(19) United States
(12) Patent Application Publication
(10) Pub. No.: US 2014/0161894 A1
(43) Pub. Date: Jun. 12, 2014

(54) SIRNA SILENCING OF GENES EXPRESSED IN CANCER

(71) Applicant: Alnylam Pharmaceuticals, Inc., Cambridge, MA (US)

(72) Inventors: Ian MacLachlan, Mission (CA); Adam Judge, Vancouver (CA); Vandana Sood, Vancouver (CA); James Heyes, Vancouver (CA); Lloyd B. Jeffs, Delta (CA); Lorne Palmer, Vancouver (CA)

(73) Assignee: Alnylam Pharmaceuticals, Inc., Cambridge, MA (US)

(21) Appl. No.: 14/067,505

(22) Filed: Oct. 30, 2013

Related U.S. Application Data
(63) Continuation of application No. 11/807,872, filed on May 29, 2007, now Pat. No. 8,598,333.
(60) Provisional application No. 60/808,859, filed on May 26, 2006.
(60) Provisional application No. 60/817,556, filed on Jun. 28, 2006.

(51) Int. Cl. C12N 15/113; A61K 31/7088; A61K 31/575

(52) U.S. Cl. CPC C12N 15/1135; A61K 31/575; A61K 31/7088
USPC 424/498; 514/44 A; 435/375; 435/366; 536/24.5

(57) ABSTRACT

The present invention provides nucleic acid-lipid particles comprising siRNA molecules that silence genes expressed in cancer (e.g., Eg5, EGFR or XIAP) and methods of using such nucleic acid-lipid particles to silence Eg5, EGFR or XIAP gene expression.

### CROSS-REFERENCES TO RELATED APPLICATIONS

[0001] This application is a continuation of U.S. patent application Ser. No. 11/807,872, filed May 29, 2007 (pending), and claims the benefit of U.S. Provisional Patent Application Nos. 60/808,859, filed May 26, 2006, and 60/817,556 filed Jun. 28, 2006, the disclosures of which are hereby incorporated by reference in their entirety for all purposes.

### SEQUENCE LISTING

[0002] The instant application contains a Sequence Listing which has been submitted via EFS-Web and is hereby incorporated by reference in its entirety. Said ASCII copy, created on Oct. 29, 2013, is named 24607US_sequencelisting.txt, and is 4,224,563 bytes in size.

### BACKGROUND OF THE INVENTION

[0003] Cell proliferation and programmed cell death play important roles in the growth and development of an organism. In proliferative diseases such as cancer, the processes of cell proliferation and/or programmed cell death are often perturbed. For example, a cancer cell may have unregulated cell division through either the overexpression of a positive regulator of the cell cycle or the loss of a negative regulator of the cell cycle, perhaps by mutation. Alternatively, a cancer cell may have lost the ability to undergo programmed cell death through the overexpression of a negative regulator of apoptosis. Therefore, there is a need to develop new therapeutic agents that will restore the processes of checkpoint control and programmed cell death to cancerous cells.

[0004] RNA interference (RNAi) is an evolutionarily conserved process in which recognition of double-stranded RNA (dsRNA) ultimately leads to posttranscriptional suppression of gene expression. This suppression is mediated by short double stranded RNA (dsRNA), also called small interfering RNA (siRNA), which induces specific degradation of mRNA through complementary base pairing. In several model systems, i.e., mostly lower order animals, this natural response has been developed into a powerful tool for the investigation of gene function (Elbashir S M, et al., Genes Dev, 2001, 15:188-200; Hammond S M, et al., Nat Rev Genet., 2001, 2:110-119). More recently it was discovered that introducing synthetic 21-nucleotide dsRNA duplexes into mammalian cells could efficiently silence gene expression. Although the precise mechanism is still unclear, RNAi offers a new way to inactivate genes of interest. In particular, for the treatment of neoplastic disorders (cancer), RNAi provides a potential new approach to modulate (e.g., reduce) the expression of certain genes, e.g., an anti-apoptotic molecule, a growth factor, a growth factor receptor, a mitotic spindle protein, a cell cycle protein, an angiogenic factor, an oncogene, an intracellular signal transducer, a molecular chaperone, and combinations thereof.

[0005] One such target is the Eg5 gene which produces the microtubule-associated protein, Eg5 (Kapoor, T. M., et al., J. Cell Biol., 2001, 154, 1125-1133; Garrett, S. et al., Curr Biol., 2003, 13, R810-812; Cassimeris, L., et al., Curr Issues Mol Biol., 2003, 5, 99-112; Houliston, E., et al., Dev. Biol. 1994, 164, 147-159). Generally, due to the clinical success seen with antimitotics in cancer therapy (e.g. taxanes), other proteins that that are also involved in the mitotic machinery, such as Eg5, have become desirable targets as next generation anti-cancer therapeutics. The mitotic kinesin, Eg5, contains an N-terminal motor domain which generates force along the microtubule, moving Eg5 to the microtubule plus end. During interphase in most epithelial cells, the plus ends of microtubules are oriented toward the plasma membrane while the minus ends are facing toward the nucleus. Upon entry into mitosis, microtubule plus ends reorient toward the chromosomes, while the minus ends are anchored at the spindle poles, forming a bipolar spindle. The homotetrameric structure of Eg5 has its motor domains arranged at two ends of a dumbbell such that it can bind and push apart spindle microtubules and generate and outward-directed force pushing spindle poles apart (Sawin, K. E., et al., Prod Natl. Acad. Sci. USA, 1995, 92, 4289-4293; Kapoor, T. M., et al., J Cell Biol., 2000, 150, 975-988; Gaglio, T., et al., J Cell Biol., 1996, 135, 399-414). Thus, Eg5 is critical for proper spindle formation during the mitotic process. Disruption of the process leads to activation of spindle assembly checkpoint, the major cell cycle control mechanism which prevents the cell undergoing mitosis to progress to anaphase and leads to cell cycle arrest. Inhibition of the production of the Eg5 protein, which is only expressed during mitosis, results in the induction of cancer cell apoptosis through a unique mechanism. In view of the important role of Eg5 has in the mitotic process, Eg5 has become an attractive therapeutic target for rapidly dividing cells, in particular, in cancer therapy.

[0006] The first small molecule inhibitors of Eg5 was identified in a phenotype-based screen and has been termed Monastrol, because of the formation of monoastral spindles due to Eg5 inhibition seen in cells treated with Monastrol (Mayer, T. U., et al., Science, 1999, 286, 971-974). Other small molecule inhibitors of Eg5 have been discovered since and are currently under development (Sakowicz, R., et al., Cancer Res., 2004, 64, 3276-3280; Hotha, S. et al., Angew Chem. Intl. Ed. Engl., 2003, 42, 2379-2382). However, recent literature publications suggest that certain cancer cell lines, e.g., HT-29 colorectal cancer cells, are resistant toward small molecule Eg5 inhibitors, and thus suggest that small molecule Eg5 inhibitors may have be of more limited clinical use than previously thought.

[0007] A second target is the EGFR gene that encodes for the epidermal growth factor receptor (EGFR), a glycoprotein with a molecular weight of 170,000 to 180,000. EGFR is an intrinsic tyrosine-specific protein kinase, which is stimulated upon epidermal growth factor (EGF) binding. The known downstream effectors of EGFR include PI3-K, RAS-RAF-MAPK P44/P42, and protein kinase C signaling pathways. EGFR signaling involved in cell growth, angiogenesis, DNA repair, and autocrine growth regulation in a wide spectrum of human cancer cells (Wakeling A E., Curr Opin Pharmacol 2002, 2:382-387). Therefore, it has recently emerged as an innovative target for the development of new cancer therapy. Recently, a monoclonal antibody against EGFR called cetuximab has been developed. It has shown excellent clinical effects for the treatment of lung and head and neck cancer in a clinical trial in humans (Shin et al., Clin Cancer Res, 2001, 7:1204-1213). Other small chemical inhibitors, such as ZD-1839 have also been developed and demonstrated anti-tumor effects in in vitro and in vivo (Shawver L K, et al., Cancer Cell 2002, 1:117-123). However, clinical use of ZD-1839 in humans has not been very successful. (Baselga Eur J Cancer 2001, 37:S16-22).

[0008] A third target is the XIAP (X-linked inhibitor of apoptosis protein) which is a member of the mammalian IAP gene family and encodes for the X-linked IAP (XIAP) protein. The anti-apoptotic function of XIAP is executed, at least in part, by inhibition of caspase-3 and caspase-7, two principal effectors of apoptosis. XIAP protein plays a critical role in regulating programmed cell death by suppressing activation of downstream caspase-3 and caspase-7. Interestingly, in pre-cancerous and cancerous cells, it is believed that expression or overexpression of XIAPs makes it difficult for cancer cells to eliminate themselves, instead allowing them to proliferate, metastasize and accumulate additional oncogenic mutations. Inhibition of XIAP activity using anti-sense oligonucleotides has demonstrates anti-tumor activity in human tumor xenograft animal model.

[0009] In view of the above, there is a need for compositions and methods for modulating the expression of genes involved in cancer. The present invention addresses these and other needs.

### SUMMARY OF THE INVENTION

[0010] The present invention provides compositions comprising siRNA molecules that target genes expressed in cancer and methods of using such compositions to silence expression of such genes.

[0011] One embodiment of the invention provides a nucleic acid-lipid particle comprising an siRNA molecule that targets a gene expressed in cancer. In some embodiments, the gene is selected from an anti-apoptotic molecule, a growth factor, a growth factor receptor, a mitotic spindle protein, a cell cycle protein, an angiogenic factor, an oncogene, an intracellular signal transducer, a molecular chaperone, and combinations thereof. In some embodiments, the lipid portion of the particle comprises a cationic lipid and a non-cationic lipid. In some embodiments, the nucleic acid-lipid particle further comprises a conjugated lipid that prevents aggregation of the particles and/or a sterol (e.g., cholesterol).

[0012] Another embodiment of the invention provides a nucleic acid-lipid particle that targets expression of the Eg5, EGFR or XIAP gene. The nucleic acid-lipid particle comprises an siRNA molecule that silences expression of the Eg5, EGFR or XIAP gene; a cationic lipid; a non-cationic lipid; and a conjugated lipid that inhibits aggregation of particles. The siRNA molecules may comprise at least one sequence set forth in Tables 1-9 (i.e., Tables 1-2 and 7 for Eg5; Tables 3-4 and 8 for EGFR; or Tables 5-6 and 9 for XIAP). In some embodiments, nucleic acid-lipid particles comprise at least 2, 3, 4, 5, or 6 of the sequences set forth in Tables 1-2 and 7 for Eg5; Tables 3-4 and 8 for EGFR; or Tables 5-6 and 9 for XIAP. In some embodiments,

[0013] The cationic lipid may be, e.g., N,N-dioleyl-N,N-dimethylammonium chloride (DODAC), N,N-distearyl-N,N-dimethylammonium bromide (DDAB), N-(1-(2,3-dioleoyloxy)propyl)-N,N,N-trimethylammonium chloride (DOTAP), N-(1-(2,3-dioleyloxy)propyl)-N,N,N-trimethylammonium chloride (DOTMA), and N,N-dimethyl-2,3-dioleyloxy)propylamine (DODMA), 1,2-DiLinoleyloxy-N,N-dimethylaminopropane (DLinDMA), and 1,2-Dilinolenyloxy-N,N-dimethylaminopropane (DLendMA), or mixtures thereof. The cationic lipid may comprise from about 2 mol % to about 60 mol %, about 5 mol % to about 45 mol %, about 5 mol % to about 15 mol %, about 30 mol % to about 50 mol % or about 40 mol % to about 50 mol % of the total lipid present in the particle.

[0014] The non-cationic lipid may be an anionic lipid or a neutral lipid including, but not limited to, a non-cationic lipid is a member selected from the group consisting of dioleoylphosphatidylethanolamine (DOPE), palmitoyloleoylphosphatidylcholine (POPC), egg phosphatidylcholine (EPC), distearoylphosphatidylcholine (DSPC), palmitoyloleyolphosphatidylglycerol (POPG), dipalmitoyl phosphatidyl ethanolamine (DPPE), dimyristoylphosphoethanolamine (DMPE), distearoyl-phosphatidyl-ethanolamine (DSPE), 16-O-monomethyl PE, 16-O-dimethyl PE, 18-1-trans PE, palmitoyloleoyl-phosphatidylethanolamine (POPE), 1-stearoyl-2-oleoyl-phosphatidyethanolamine (SOPE), 1,2-dielaidoyl-sn-glycero-3-phophoethanolamine (transDOPE), cholesterol, or mixtures thereof. The non-cationic lipid comprises from about 5 mol % to about 90 mol % or about 20 mol % to about 85 mol % of the total lipid present in the particle.

[0015] The conjugated lipid that inhibits aggregation of particles may be a polyethyleneglycol (PEG)-lipid conjugate, a polyamide (ATTA)-lipid conjugate, a cationic-polymer-lipid conjugates (CPLs), or mixtures thereof. In one preferred embodiment, the nucleic acid-lipid particles comprise either a PEG-lipid conjugate or an ATTA-lipid conjugate together with a CPL. The conjugated lipid that inhibits aggregation of particles may comprise a polyethyleneglycol-lipid including, e.g., a PEG-diacylglycerol (DAG), a PEG dialkyloxypropyl (DAA), a PEG-phospholipid, a PEG-ceramide (Cer), or mixtures thereof. The PEG-DAA conjugate may be PEG-dilauryloxypropyl (C12), a PEG-dimyristyloxypropyl (C14), a PEG-dipalmityloxypropyl (C16), and a PEG-distearyloxypropyl (C18). In some embodiments, the conjugated lipid that inhibits aggregation of particles has the formula: A-W—Y, wherein: A is a lipid moiety; W is a hydrophilic polymer; and Y is a polycationic moiety. W may be a polymer selected from the group consisting of polyethyleneglycol (PEG), polyamide, polylactic acid, polyglycolic acid, polylactic acid/polyglycolic acid copolymers or combinations thereof, said polymer having a molecular weight of about 250 to about 7000 daltons. In some embodiments, Y has at least 4 positive charges at a selected pH. In some embodiments, Y may be lysine, arginine, asparagine, glutamine, derivatives thereof and combinations thereof. The conjugated lipid that prevents aggregation of particles may be about 0 mol % to about 20 mol %, about 1 mol % to about 15 mol %, about 4 mol % to about 10 mol %, or about 2 mol % of the total lipid present in said particle.

[0016] In some embodiments, the nucleic acid-lipid particle further comprises cholesterol at, e.g., about 0 mol % to about 10 mol %, about 2 mol % to about 10 mol %, about 10 mol % to about 60 mol % or about 20 mol % to about 45 mol % of the total lipid present in the particle.

[0017] In a specific embodiment of the invention, the nucleic acid-lipid particle comprises 48% cholesterol; 10% DSPC; 2% PEG-cDMA; and 40% DLinDMA.

[0018] In some embodiments, the siRNA in the nucleic acid-lipid particle is not substantially degraded after exposure of the particle to a nuclease at 37° C. for at least 20, 30, 45, or 60 minutes; or after incubation of the particle in serum at 37° C. for at least 30, 45, or 60 minutes, 2, 3, 4, 5, 6, 7, 8, 9, 10, 12, 14, 16, 18, 20, 22, 24, 26, 28, 30, 32, 34, or 36 hours.

[0019] In some embodiments, the siRNA is fully encapsulated in the nucleic acid-lipid particle. In some embodiments, the siRNA is complexed to the lipid portion of the particle.

[0020] The present invention further provides pharmaceutical compositions comprising the nucleic acid-lipid particles described herein and a pharmaceutically acceptable carrier.

[0021] The nucleic acid-lipid particles of the present invention are useful for the therapeutic delivery of nucleic acids comprising an interfering RNA sequence (i.e., an siRNA sequence that targets expression of an Eg5, EGFR or XIAP gene. In particular, it is an object of this invention to provide in vitro and in vivo methods for treatment of a disease in a mammal by downregulating or silencing the transcription and translation of a target nucleic acid sequence of interest. In these methods, an interfering RNA is formulated into a nucleic acid-lipid particle, and the particles are administered to patients requiring such treatment. Alternatively, cells are removed from a patient, the interfering RNA delivered in vitro, and reinjected into the patient. In one embodiment, the present invention provides for a method of introducing a nucleic acid into a cell by contacting a cell with a nucleic acid-lipid particle comprised of a cationic lipid, a non-cationic lipid, a conjugated lipid that inhibits aggregation, and an interfering RNA.

[0022] In one embodiment, at least 1%, 2%, 4%, 6%, 8%, 10%, 12%. 14%. 16% or 18% of the total injected dose of the nucleic acid-lipid particles is present in plasma 1, 2, 4, 6, 8, 12, 16, 18, or 24 hours after injection. In other embodiments, more than 20%, 30%, 40% and as much as 60%, 70% or 80% of the total injected dose of the nucleic acid-lipid particles is present in plasma 1, 4, 6, 8, 10, 12, 20, or 24 hours after injection. In one embodiment, the effect of an interfering RNA (e.g., downregulation of the target sequence) at a site proximal or distal to the site of administration is detectable at 12, 24, 48, 72, or 96 hours, 6, 8, 10, 12, 14, 16, 18, 19, 20, 22, 24, 26, or 28 days after administration of the nucleic acid-lipid particles. In one embodiment, downregulation of expression of the target sequence is detectable at 12, 24, 48, 72, or 96 hours, 6, 8, 10, 12, 14, 16, 18, 19, 20, 22, 24, 26, or 28 days after administration. In some embodiments, downregulation of Eg5, EGFR or XIAP gene is detected by detecting mRNA or protein levels in a biological sample from the mammal. In some embodiments, downregulation of expression of a Eg5, EGFR or XIAP sequence is detected by measuring the cell viability or the induction of apoptosis of cells in a biological sample from the mammal.

[0023] The particles are suitable for use in intravenous nucleic acid transfer as they are stable in circulation, of a size required for pharmacodynamic behavior resulting in access to extravascular sites and target cell populations. The invention also provides for pharmaceutically acceptable compositions comprising a nucleic acid-lipid particle.

[0024] Another embodiment of the present invention provides methods for in vivo delivery of interfering RNA (e.g., interfering RNA that silences expression of an Eg5, EGFR or XIAP gene). A nucleic acid-lipid particle comprising a cationic lipid, a non-cationic lipid, a conjugated lipid that inhibits aggregation of particles, and interfering RNA is administered (e.g., intravenously, intramuscularly, or subcutaneously) to a subject (e.g., a mammal such as a human or a rodent).

[0025] A further embodiment of the present invention provides a method of treating a disease or disorder in a mammalian subject. A therapeutically effective amount of a nucleic acid-lipid particle comprising a cationic lipid, a non-cationic lipid, a conjugated lipid that inhibits aggregation of particles, and interfering RNA (e.g., interfering RNA that silences expression of a Eg5, EGFR or XIAP gene) is administered to the mammalian subject (e.g., a rodent such as a mouse, a primate such as a human, a chimpanzee, or a monkey). In some embodiments, the mammalian subject has a cell proliferative disorder. In certain aspects of this embodiment, the mammalian subject has a said cell proliferative disorder is selected from the group consisting of neoplasia (cancer), hyperplasias, restenosis, cardiac hypertrophy, immune disorders and inflammation. Preferably, said cell proliferative disorder is a neoplastic disorder, i.e., cancer. In some embodiments, the cancer includes, but is not limited to papilloma, blastoglioma, Kaposi's sarcoma, melanoma, lung cancer, ovarian cancer, prostate cancer, squamous cell carcinoma, astrocytoma, head cancer, neck cancer, bladder cancer, breast cancer, lung cancer, colorectal cancer, thyroid cancer, pancreatic cancer, gastric cancer, hepatocellular carcinoma, leukemia, lymphoma, Hodgkin's disease, osteosarcoma, testicular cancer, and Burkitt's disease.

[0026] The invention further provides siRNA molecules having the sequences set forth in any one of Tables 1-9. In some embodiments, the siRNA molecules comprise modified nucleotides. The siRNA molecules comprising modified nucleotides are capable of silencing expression of a target sequence and are less immunostimulatory than a corresponding unmodified siRNA sequence. In some embodiments, less than about 20%, 15%, 10%, 5%, or 2% of the nucleotides in the siRNA comprise modified nucleotides. In some embodiments, the modified nucleotide is selected from a 2′-O-methyl (2′OMe) pyrimidine and a 2′OMe purine (e.g., a 2′OMe-guanosine, a 2′OMe-uridine, and a 2′OMe-adenosine). In some embodiments, the modified nucleotide is not 2′OMe-cytosine. In some embodiments, the modified nucleotides are present in one strand of the siRNA (e.g., in the sense strand). In some embodiments the corresponding unmodified siRNA sequence comprises at least one 5′-GU-3′ motif. In some embodiments, the at least one 5′-GU-3′ motif is in the sense strand of the unmodified siRNA sequence. In some embodiments, the double-stranded sequence comprises a hairpin loop structure.

[0027] The invention also provides compositions comprising the siRNA molecules described herein and a pharmaceutically acceptable carrier.

[0028] These and other embodiments of the invention are further described in the detailed description that follows.

### BRIEF DESCRIPTION OF THE DRAWINGS

[0029] FIG. 1 illustrates data demonstrating RNAi activity of a Eg5 siRNA panel (at 1, 5, and 25 nM concentration) complexed with lipofectamine in HeLa cells (human).

[0030] FIG. 2 illustrates data demonstrating RNAi activity of a Eg5 siRNA panel (at 1, 5, and 25 nM concentration) complexed with lipofectamine in Neuro2A cells (mouse).

[0031] FIG. 3 illustrates data demonstrating RNAi activity of selected SNALP formulated Eg5 siRNA sequences in Neuro2A cells.

[0032] FIG. 4 illustrates data demonstrating that that the potent effects of Eg5 2263 U/U SNALP on cell viability is due to the silencing of Eg5 protein. Top panel: Eg5:GAPD mRNA ratios, bottom panel: Percent knockdown of Eg5 mRNA versus non-treated cells.

[0033] FIG. 5 illustrates data demonstrating certain characteristic changes seen in cell phenotype following treatment with Eg5 O/O siRNA.

[0034] FIG. 6 illustrates a list showing the sequences of various 2′-OMe modified Eg5 2263 siRNAs (SEQ ID NOS:1-3, 2, 3, 4, 2, 1, 5, 1, 6, 3, 5, 3, 6, 4, 6, 4 and 5, respectively).

[0035] FIG. 7 illustrates data demonstrating the activity of 2′-OMe modified Eg5 2263 siRNAs in HeLa cells (human).

[0036] FIG. 8 illustrates data demonstrating the activity of 2′-OMe modified Eg5 2263 siRNAs in Neuro2A cells (mouse).

[0037] FIG. 9 illustrates data demonstrating the Interferon induction activity for various 2′-OMe modified Eg5 2263 siRNAs, (i.e., U/O, G/O, U/U, G/G) in a SNALP formulation.

[0038] FIG. 10 illustrates data demonstrating the antibody response against the delivery vehicle for 2′-OMe modified Eg5 2663 U/U SNALP as compared to an unmodified Eg5 siRNA.

[0039] FIG. 11 illustrates data demonstrating the RNAi activity of 2′-OMe modified Eg5 2263 U/U SNALP against a range of tumor cells.

[0040] FIG. 12 illustrates data demonstrating the induction of apoptosis by Eg5 2263 U/U SNALP in human hepatocellular carcinoma cells.

[0041] FIG. 13 illustrates data demonstrating the induction of apoptosis by Eg5 2263 U/U SNALP in human colorectal cancer cells.

[0042] FIG. 14 illustrates data comparing the induction of apoptosis by Eg5 2263 U/U SNALP with a small molecule Eg5 inhibitor in human colorectal cells.

[0043] FIG. 15 illustrates data comparing the RNAi activity of Eg5 2263 U/U SNALP vs. a small molecule Eg5 inhibitor in a variety of cancer cells.

[0044] FIG. 16 illustrates data demonstrating the stability of naked Eg5 siRNA and SNALP encapsulated Eg5 O/O siRNA toward serum nuclease degradation.

[0045] FIG. 17 illustrates data demonstrating in vivo s.c. tumor growth of Neuro2A after treatment with Eg5 2263 U/U SNALP.

[0046] FIG. 18 illustrates data demonstrating that in vivo dosing with Eg5 2263 U/U SNALP in mice bearing s.c. Neuro2A tumors is well tolerated.

[0047] FIG. 19 illustrates data showing that the tumor histopathology of the intrahepatic Neuro2A tumor that was treated with Eg5 2263 U/U SNALP.

[0048] FIG. 20 illustrates data showing the tumor histopathology of the intrahepatic Neuro2A tumor that was treated with control SNALP

[0049] FIG. 21 is Table 1 which sets forth a list of Eg5 siRNA (SEQ ID NOS:7-32).

[0050] FIG. 22 is Table 2 which sets forth an additional list of Eg5 siRNA (SEQ ID NOS:33-62).

[0051] FIG. 23 is Table 3 which sets forth a list of EGFR siRNA (SEQ ID NOS:63-92).

[0052] FIG. 24 is Table 4 which sets forth an additional list of EGFR siRNA (SEQ ID NOS:93-118).

[0053] FIG. 25 is Table 5 which sets forth a list of XIAP siRNA (SEQ ID NOS:119-145).

[0054] FIG. 26 is Table 6 which sets forth an additional list of XIAP siRNA (SEQ ID NOS:146-173).

[0055] FIG. 27 is Table 7 which sets forth an additional list of Eg5 siRNA (SEQ ID NOS:174-4977).

[0056] FIG. 28 is Table 8 which sets forth an additional list of EGFR siRNA (SEQ ID NOS:4978-10362).

[0057] FIG. 29 is Table 9 which sets forth an additional list of XIAP siRNA (SEQ ID NOS:10363-18497).

[0058] FIG. 30 illustrates data showing in vitro silencing of EGFR mRNA by the panels of EGFR siRNA sequences set forth in Tables 3 and 4.

[0059] FIG. 31 illustrates data showing the silencing of EGFR mRNA correlates with a decrease in tumor cell viability.

[0060] FIG. 32 illustrates data showing in vitro silencing of EGFR mRNA by EGFR SNALP.

[0061] FIG. 33 illustrates data showing in vitro silencing of XIAP mRNA by XIAP SNALP.

[0062] FIG. 34 illustrates data showing the cells treated with XIAP SNALP are sensitized to Eg5 inhibitors.

[0063] FIG. 35 illustrates data showing that silencing of XAIP mRNA with XIAP SNALP sensitizes tumor cells to killing by Eg5 SNALP.

### DETAILED DESCRIPTION OF THE INVENTION

### I. Introduction

[0064] The invention provides compositions and methods for treating cancer. In particular, the invention provides nucleic acid-lipid particles comprising siRNA molecules that silence genes expressed in cancer including, e.g., growth factors (e.g. epidermal growth factor (“EGF”) and insulin growth factor-1 (“IGF-1”)), growth factor receptors (e.g., epidermal growth factor receptor (“EGFR”) and hepatocyte growth factor receptor (i.e. c-Met)), mitotic spindle proteins (e.g., kinesins such as kinesin family member 11 (“Eg5” or “KIF11”), anti-apoptotic molecules (e.g., caspase inhibitors such as XIAP and CrmA, survivin, bcl-2), cell cycle proteins (e.g., cyclin E and aurora kinase), angiogenic factors (e.g., vascular endothelial growth factor (“VEGF”) and vascular endothelial growth factor receptor (“VEGFR”)); oncogenes (e.g., src, fyn, ras and myc), intracellular signal transducers (e.g., mammalian target of rapamycin (“mTOR”), MAP kinase kinases (“MEK”) and nuclear factor kappa-B (“NFkB”)), and molecular chaperones (e.g., HSP90). The lipid portion of the nucleic acid-lipid particles comprise a cationic lipid, a non-cationic lipid, optionally a lipid that prevents aggregation of particles. It is a discovery of the invention that the nucleic acid-lipid particles described herein are particularly effective for encapsulating and delivering siRNA molecules that target cancer cells.

[0065] This invention is based in part on the discovery that silencing Eg5, EGFR and/or XIAP gene expression is an effective means to halt proliferation of rapidly dividing cells, e.g., cancer cells. Accordingly, the present invention also provides nucleic acid-lipid particles that target Eg5, EGFR and/or XIAP gene expression comprising an siRNA that silences Eg5, EGFR and/or XIAP gene expression; a cationic lipid; a non-cationic lipid; and a conjugated lipid that inhibits aggregation of particles. The invention further provides methods of silencing Eg5, EGFR or XIAP gene expression by administering the nucleic acid-lipid particles described herein to a mammalian subject. In addition, the invention provides methods of treating a subject who suffers from a cell proliferative disorder, e.g., cancer, by administering the nucleic acid-lipid particles described herein.

### II. Definitions

[0066] The term “Eg5” refers to the kif11 gene product, a member in a class of kinesin-related proteins that are involved in functions related to movements of organelles, microtubules, or chromosomes along microtubules. These functions include axonal transport, microtubule sliding during nuclear fusion or division, and chromosome disjunction during meiosis and early mitosis. Eg5 appears to play a critical role in mitosis of mammalian cells. Sequences for Eg5 are set forth in, e.g., Genbank Accession Nos. NM_{—}004523 (human) and NM_{—}010615 (mouse).

[0067] The term “EGFR” refers to the cell surface receptor, epidermal growth factor receptor, also known as ERBB1, that is a member of the ERBB tyrosine kinase family. EGF has 3 regions: one projects outside the cell and contains the site for binding epidermal growth factor (EGF) and related growth factors; the second is embedded in the membrane; the third projects into the cytoplasm of the cell's interior. EGFR is a phosphotyrosinekinase. Binding of EGFR by EGF has a profound effect on the differentiation of specific cells in vivo and is a potent mitogenic factor for a variety of cultured cells of both ectodermal and mesodermal origin. Sequences for the EGF gene are set forth in Genbank Accession Nos. NM_{—}005228 (human) and NM_{—}207655 (mouse).

[0068] The term “XIAP” or “X-linked inhibitor of apoptosis” is a potent member of the inhibitor of apoptosis (IAP) family. All members of this family possess baculoviral IAP (BIR) repeats, cysteine-rich domains of approximately 80 amino acids that bind and inhibit caspases. XIAP has 3 BIR domains and a C-terminal RING zinc finger that possesses E3 ubiquitin ligase activity. The anticaspase activity of XIAP and is important in mediating apoptosis resistance in cancer cells. Sequences for XIAP are set forth in Genbank Accession Nos. NM_{—}001167 (human) and NM_{—}009688 (mouse).

[0069] The term “interfering RNA” or “RNAi” or “interfering RNA sequence” refers to double-stranded RNA (i.e., duplex RNA) that targets (i.e., silences, reduces, or inhibits) expression of a target gene (i.e., by mediating the degradation of mRNAs which are complementary to the sequence of the interfering RNA) when the interfering RNA is in the same cell as the target gene. Interfering RNA thus refers to the double stranded RNA formed by two complementary strands or by a single, self-complementary strand. Interfering RNA typically has substantial or complete identity to the target gene. The sequence of the interfering RNA can correspond to the full length target gene, or a subsequence thereof. Interfering RNA includes small-interfering RNA” or “siRNA,” i.e., interfering RNA of about 15-60, 15-50, 15-50, or 15-40 (duplex) nucleotides in length, more typically about, 15-30, 15-25 or 19-25 (duplex) nucleotides in length, and is preferably about 20-24 or about 21-22 or 21-23 (duplex) nucleotides in length (e.g., each complementary sequence of the double stranded siRNA is 15-60, 15-50, 15-50, 15-40, 15-30, 15-25 or 19-25 nucleotides in length, preferably about 20-24 or about 21-22 or 21-23 nucleotides in length, and the double stranded siRNA is about 15-60, 15-50, 15-50, 15-40, 15-30, 15-25 or 19-25 preferably about 20-24 or about 21-22 or 21-23 base pairs in length). siRNA duplexes may comprise 3′ overhangs of about 1 to about 4 nucleotides, preferably of about 2 to about 3 nucleotides and 5′ phosphate termini. The siRNA can be chemically synthesized or maybe encoded by a plasmid (e.g., transcribed as sequences that automatically fold into duplexes with hairpin loops). siRNA can also be generated by cleavage of longer dsRNA (e.g., dsRNA greater than about 25 nucleotides in length) with the E coli RNase III or Dicer. These enzymes process the dsRNA into biologically active siRNA (see, e.g., Yang et al., PNAS USA 99: 9942-7 (2002); Calegari et al., PNAS USA 99: 14236 (2002); Byrom et al., Ambion TechNotes 10(1): 4-6 (2003); Kawasaki et al., Nucleic Acids Res. 31: 981-7 (2003); Knight and Bass, Science 293: 2269-71 (2001); and Robertson et al., J. Biol. Chem. 243: 82 (1968)). Preferably, dsRNA are at least 50 nucleotides to about 100, 200, 300, 400 or 500 nucleotides in length. A dsRNA may be as long as 1000, 1500, 2000, 5000 nucleotides in length, or longer. The dsRNA can encode for an entire gene transcript or a partial gene transcript.

[0070] “Substantial identity” refers to a sequence that hybridizes to a reference sequence under stringent conditions, or to a sequence that has a specified percent identity over a specified region of a reference sequence.

[0071] The phrase “stringent hybridization conditions” refers to conditions under which a probe will hybridize to its target subsequence, typically in a complex mixture of nucleic acids, but to no other sequences. Stringent conditions are sequence-dependent and will be different in different circumstances. Longer sequences hybridize specifically at higher temperatures. An extensive guide to the hybridization of nucleic acids is found in Tijssen, Techniques in Biochemistry and Molecular Biology—Hybridization with Nucleic Probes, “Overview of principles of hybridization and the strategy of nucleic acid assays” (1993). Generally, stringent conditions are selected to be about 5-10° C. lower than the thermal melting point (Tₘ) for the specific sequence at a defined ionic strength pH. The Tₘ is the temperature (under defined ionic strength, pH, and nucleic concentration) at which 50% of the probes complementary to the target hybridize to the target sequence at equilibrium (as the target sequences are present in excess, at Tₘ, 50% of the probes are occupied at equilibrium). Stringent conditions may also be achieved with the addition of destabilizing agents such as formamide. For selective or specific hybridization, a positive signal is at least two times background, preferably 10 times background hybridization.

[0072] Exemplary stringent hybridization conditions can be as following: 50% formamide, 5×SSC, and 1% SDS, incubating at 42° C., or, 5×SSC, 1% SDS, incubating at 65° C., with wash in 0.2×SSC, and 0.1% SDS at 65° C. For PCR, a temperature of about 36° C. is typical for low stringency amplification, although annealing temperatures may vary between about 32° C. and 48° C. depending on primer length. For high stringency PCR amplification, a temperature of about 62° C. is typical, although high stringency annealing temperatures can range from about 50° C. to about 65° C., depending on the primer length and specificity. Typical cycle conditions for both high and low stringency amplifications include a denaturation phase of 90° C.-95° C. for 30 sec-2 min., an annealing phase lasting 30 sec.-2 min., and an extension phase of about 72° C. for 1-2 min. Protocols and guidelines for low and high stringency amplification reactions are provided, e.g., in Innis et al. (1990) PCR Protocols, A Guide to Methods and Applications, Academic Press, Inc. N.Y.).

[0073] Nucleic acids that do not hybridize to each other under stringent conditions are still substantially identical if the polypeptides which they encode are substantially identical. This occurs, for example, when a copy of a nucleic acid is created using the maximum codon degeneracy permitted by the genetic code. In such cases, the nucleic acids typically hybridize under moderately stringent hybridization conditions. Exemplary “moderately stringent hybridization conditions” include a hybridization in a buffer of 40% formamide, 1 M NaCl, 1% SDS at 37° C., and a wash in 1×SSC at 45° C. A positive hybridization is at least twice background. Those of ordinary skill will readily recognize that alternative hybridization and wash conditions can be utilized to provide conditions of similar stringency. Additional guidelines for determining hybridization parameters are provided in numerous reference, e.g., and Current Protocols in Molecular Biology, ed. Ausubel, et al.

[0074] The terms “substantially identical” or “substantial identity,” in the context of two or more nucleic acids, refer to two or more sequences or subsequences that are the same or have a specified percentage of nucleotides that are the same (i.e., at least about 60%, preferably 65%, 70%, 75%, preferably 80%, 85%, 90%, or 95% identity over a specified region), when compared and aligned for maximum correspondence over a comparison window, or designated region as measured using one of the following sequence comparison algorithms or by manual alignment and visual inspection. This definition, when the context indicates, also refers analogously to the complement of a sequence. Preferably, the substantial identity exists over a region that is at least about 5, 10, 15, 20, 25, 30, 35, 40, 45, 50, 75, or 100 nucleotides in length.

[0075] For sequence comparison, typically one sequence acts as a reference sequence, to which test sequences are compared. When using a sequence comparison algorithm, test and reference sequences are entered into a computer, subsequence coordinates are designated, if necessary, and sequence algorithm program parameters are designated. Default program parameters can be used, or alternative parameters can be designated. The sequence comparison algorithm then calculates the percent sequence identities for the test sequences relative to the reference sequence, based on the program parameters.

[0076] A “comparison window”, as used herein, includes reference to a segment of any one of the number of contiguous positions selected from the group consisting of from 20 to 600, usually about 50 to about 200, more usually about 100 to about 150 in which a sequence may be compared to a reference sequence of the same number of contiguous positions after the two sequences are optimally aligned. Methods of alignment of sequences for comparison are well-known in the art. Optimal alignment of sequences for comparison can be conducted, e.g., by the local homology algorithm of Smith & Waterman, Adv. Appl. Math. 2:482 (1981), by the homology alignment algorithm of Needleman & Wunsch, J. Mol. Biol. 48:443 (1970), by the search for similarity method of Pearson & Lipman, Proc. Nat'l. Acad. Sci. USA 85:2444 (1988), by computerized implementations of these algorithms (GAP, BESTFIT, FASTA, and TFASTA in the Wisconsin Genetics Software Package, Genetics Computer Group, 575 Science Dr., Madison, Wis.), or by manual alignment and visual inspection (see, e.g., Current Protocols in Molecular Biology (Ausubel et al., eds. 1995 supplement)).

[0077] A preferred example of algorithm that is suitable for determining percent sequence identity and sequence similarity are the BLAST and BLAST 2.0 algorithms, which are described in Altschul et al., Nuc. Acids Res. 25:3389-3402 (1977) and Altschul et al., J. Mol. Biol. 215:403-410 (1990), respectively. BLAST and BLAST 2.0 are used, with the parameters described herein, to determine percent sequence identity for the nucleic acids and proteins of the invention. Software for performing BLAST analyses is publicly available through the National Center for Biotechnology Information (http://www.ncbi.nlm.nih.gov/). This algorithm involves first identifying high scoring sequence pairs (HSPs) by identifying short words of length W in the query sequence, which either match or satisfy some positive-valued threshold score T when aligned with a word of the same length in a database sequence. T is referred to as the neighborhood word score threshold (Altschul et al., supra). These initial neighborhood word hits act as seeds for initiating searches to find longer HSPs containing them. The word hits are extended in both directions along each sequence for as far as the cumulative alignment score can be increased. Cumulative scores are calculated using, for nucleotide sequences, the parameters M (reward score for a pair of matching residues; always >0) and N (penalty score for mismatching residues; always <0). For amino acid sequences, a scoring matrix is used to calculate the cumulative score. Extension of the word hits in each direction are halted when: the cumulative alignment score falls off by the quantity X from its maximum achieved value; the cumulative score goes to zero or below, due to the accumulation of one or more negative-scoring residue alignments; or the end of either sequence is reached. The BLAST algorithm parameters W, T, and X determine the sensitivity and speed of the alignment. The BLASTN program (for nucleotide sequences) uses as defaults a wordlength (W) of 11, an expectation (E) or 10, M=5, N=−4 and a comparison of both strands. For amino acid sequences, the BLASTP program uses as defaults a wordlength of 3, and expectation (E) of 10, and the BLOSUM62 scoring matrix (see Henikoff & Henikoff, Proc. Natl. Acad. Sci. USA 89:10915 (1989)) alignments (B) of 50, expectation (E) of 10, M=5, N=−4, and a comparison of both strands.

[0078] The BLAST algorithm also performs a statistical analysis of the similarity between two sequences (see, e.g., Karlin & Altschul, Proc. Nat'l. Acad. Sci. USA 90:5873-5787 (1993)). One measure of similarity provided by the BLAST algorithm is the smallest sum probability (P(N)), which provides an indication of the probability by which a match between two nucleotide or amino acid sequences would occur by chance. For example, a nucleic acid is considered similar to a reference sequence if the smallest sum probability in a comparison of the test nucleic acid to the reference nucleic acid is less than about 0.2, more preferably less than about 0.01, and most preferably less than about 0.001.

[0079] The phrase “inhibiting expression of a target gene” refers to the ability of a siRNA of the invention to silence, reduce, or inhibit expression of a target gene (e.g., an Eg5, EGFR or XIAP gene). To examine the extent of gene silencing, a test sample (e.g., a biological sample from organism of interest expressing the target gene or a sample of cells in culture expressing the target gene) is contacted with an siRNA that silences, reduces, or inhibits expression of the target gene. Expression of the target gene in the test sample is compared to expression of the target gene in a control sample (e.g., a biological sample from organism of interest expressing the target gene or a sample of cells in culture expressing the target gene) that is not contacted with the siRNA. Control samples (i.e., samples expressing the target gene) are assigned a value of 100%. Silencing, inhibition, or reduction of expression of a target gene is achieved when the value of the test sample relative to the control sample is about 95%, 90%, 85%, 80%, 75%, 70%, 65%, 60%, 55%, 50%, 45%, 40%, 35%, 30%, 25%, 20%, or 10%. Suitable assays include, e.g., examination of protein or mRNA levels using techniques known to those of skill in the art such as dot blots, northern blots, in situ hybridization, ELISA, immunoprecipitation, enzyme function, as well as phenotypic assays known to those of skill in the art.

[0080] “Nucleic acid” refers to deoxyribonucleotides or ribonucleotides and polymers thereof in single- or double-stranded form. The term encompasses nucleic acids containing known nucleotide analogs or modified backbone residues or linkages, which are synthetic, naturally occurring, and non-naturally occurring, which have similar binding properties as the reference nucleic acid, and which are metabolized in a manner similar to the reference nucleotides. Examples of such analogs include, without limitation, phosphorothioates, phosphoramidates, methyl phosphonates, chiral-methyl phosphonates, 2-O-methyl ribonucleotides, peptide-nucleic acids (PNAs).

[0081] An “effective amount” or “therapeutically effective amount” of a siRNA is an amount sufficient to produce the desired effect, e.g., a decrease in the expression of a target sequence in comparison to the normal expression level detected in the absence of the siRNA.

[0082] The term “lipid” refers to a group of organic compounds that include, but are not limited to, esters of fatty acids and are characterized by being insoluble in water, but soluble in many organic solvents. They are usually divided into at least three classes: (1) “simple lipids’ which include fats and oils as well as waxes; (2) “compound lipids” which include phospholipids and glycolipids; (3) “derived lipids” such as steroids.

[0083] “Lipid vesicle” refers to any lipid composition that can be used to deliver a compound including, but not limited to, liposomes, wherein an aqueous volume is encapsulated by an amphipathic lipid bilayer; or wherein the lipids coat an interior comprising a large molecular component, such as a plasmid comprising an interfering RNA sequence, with a reduced aqueous interior; or lipid aggregates or micelles, wherein the encapsulated component is contained within a relatively disordered lipid mixture.

[0084] As used herein, “lipid encapsulated” can refer to a lipid formulation that provides a compound with full encapsulation, partial encapsulation, or both. In some embodiments, the nucleic acid is fully encapsulated in the lipid formulation (e.g., to form an SPLP, pSPLP, SNALP, or other nucleic acid-lipid particle).

[0085] As used herein, the term “cell proliferative disorder” includes disorders involving the undesired proliferation of a cell. Non-limiting examples of such disorders include neoplasias (i.e., cancer), hyperplasias, restenosis, cardiac hypertrophy, immune disorders and inflammation.

[0086] The nucleic acid-lipid particles of the present invention typically have a mean diameter of less than about 150 nm and are substantially nontoxic. In addition, the nucleic acids when present in the nucleic acid-lipid particles of the present invention are resistant in aqueous solution to degradation with a nuclease. Nucleic acid-lipid particles and their method of preparation are disclosed in U.S. Pat. No. 5,976,567, U.S. Pat. No. 5,981,501 and PCT Patent Publication No. WO 96/40964.

[0087] Various suitable cationic lipids may be used in the present invention, either alone or in combination with one or more other cationic lipid species or non-cationic lipid species.

[0088] The cationic lipids of Formula I and Formula II described herein typically carry a net positive charge at a selected pH, such as physiological pH. It has been surprisingly found that cationic lipids comprising alkyl chains with multiple sites of unsaturation, e.g., at least two or three sites of unsaturation, are particularly useful for forming lipid-nucleic acid particles with increased membrane fluidity. A number of cationic lipids and related analogs, which are also useful in the present invention, have been described in U.S. Pat. Nos. 5,208,036, 5,264,618, 5,279,833 and 5,283,185, and WO 96/10390, the disclosures of which are incorporated herein by reference.

[0089] The noncationic lipids used in the present invention can be any of a variety of neutral uncharged, zwitterionic or anionic lipids capable of producing a stable complex. They are preferably neutral, although they can alternatively be negatively charged. Examples of noncationic lipids useful in the present invention include: phospholipid-related materials, such as lecithin, phosphatidylethanolamine, lysolecithin, lysophosphatidylethanolamine, phosphatidylserine, phosphatidylinositol, sphingomyelin, cephalin, cardiolipin, phosphatidic acid, cerebrosides, dicetylphosphate, distearoylphosphatidylcholine (DSPC), dioleoylphosphatidylcholine (DOPC), dipalmitoylphosphatidylcholine (DPPC), dioleoylphosphatidylglycerol (DOPG), dipalmitoylphosphatidylglycerol (DPPG), dioleoyl-phosphatidylethanolamine (DOPE), palmitoyloleoylphosphatidylcholine (POPC), palmitoyloleoyl-phosphatidylethanolamine (POPE) and dioleoyl-phosphatidylethanolamine 4-(N-maleimidomethyl)-cyclohexane-1-carboxylate (DOPE-mal). Noncationic lipids or sterols such as cholesterol may be present. Additional nonphosphorous containing lipids are, e.g., stearylamine, dodecylamine, hexadecylamine, acetyl palmitate, glycerolricinoleate, hexadecyl stereate, isopropyl myristate, amphoteric acrylic polymers, triethanolamine-lauryl sulfate, alkyl-aryl sulfate polyethyloxylated fatty acid amides, dioctadecyldimethyl ammonium bromide and the like, diacylphosphatidylcholine, diacylphosphatidylethanolamine, ceramide, sphingomyelin, cephalin, and cerebrosides. Other lipids such as lysophosphatidylcholine and lysophosphatidylethanolamine may be present. Noncationic lipids also include polyethylene glycol-based polymers such as PEG 2000, PEG 5000 and polyethylene glycol conjugated to phospholipids or to ceramides (referred to as PEG-Cer).

[0090] In preferred embodiments, the noncationic lipids are diacylphosphatidylcholine (e.g., distearoylphosphatidylcholine, dioleoylphosphatidylcholine, dipalmitoylphosphatidylcholine and dilinoleoylphosphatidylcholine), diacylphosphatidylethanolamine (e.g., dioleoylphosphatidylethanolamine and palmitoyloleoylphosphatidylethanolamine), ceramide or sphingomyelin. The acyl groups in these lipids are preferably acyl groups derived from fatty acids having C₁₀-C₂₄ carbon chains. More preferably the acyl groups are lauroyl, myristoyl, palmitoyl, stearoyl or oleoyl. In particularly preferred embodiments, the noncationic lipid will be cholesterol, 1,2-sn-dioleoylphosphatidylethanolamine, or egg sphingomyelin (ESM).

[0091] In addition to cationic and non-cationic lipids, the nucleic acid-lipid particles (e.g., SPLPs and SNALPs of the present invention comprise bilayer stabilizing component (BSC) such as an ATTA-lipid or a PEG-lipid, such as PEG coupled to dialkyloxypropyls (PEG-DAA) (see, copending U.S. Patent Application No. 60/503,239), PEG coupled to diacylglycerol (PEG-DAG) (see, copending U.S. patent application Ser. No. 10/136,707), PEG coupled to phosphatidylethanolamine (PE) (PEG-PE), or PEG conjugated to ceramides, or a mixture thereof (see, U.S. Pat. No. 5,885,613, which is incorporated herein by reference). In one preferred embodiment, the BSC is a conjugated lipid that inhibits aggregation of the nucleic acid-lipid particles. Suitable conjugated lipids include, but are not limited to PEG-lipid conjugates, ATTA-lipid conjugates, cationic-polymer-lipid conjugates (CPLs) or mixtures thereof. In one preferred embodiment, the nucleic acid-lipid particles comprise either a PEG-lipid conjugate or an ATTA-lipid conjugate together with a CPL.

[0092] PEG is a polyethylene glycol, a linear, water-soluble polymer of ethylene PEG repeating units with two terminal hydroxyl groups. PEGs are classified by their molecular weights; for example, PEG 2000 has an average molecular weight of about 2,000 daltons, and PEG 5000 has an average molecular weight of about 5,000 daltons. PEGs are commercially available from Sigma Chemical Co. and other companies and include, for example, the following: monomethoxypolyethylene glycol (MePEG-OH), monomethoxypolyethylene glycol-succinate (MePEG-S), monomethoxypolyethylene glycol-succinimidyl succinate (MePEG-S—NHS), monomethoxypolyethylene glycol-amine (MePEG-NH₂), monomethoxypolyethylene glycol-tresylate (MePEG-TRES), and monomethoxypolyethylene glycol-imidazolyl-carbonyl (MePEG-IM). In addition, monomethoxypolyethyleneglycol-acetic acid (MePEG-CH₂COOH), is particularly useful for preparing the PEG-lipid conjugates including, e.g., PEG-DAA conjugates.

[0093] In some embodiments, the PEG has an average molecular weight of from about 1000 to about 5000 daltons, more preferably, from about 1,000 to about 3,000 daltons and, even more preferably, of about 2,000 daltons. The PEG can be optionally substituted by an alkyl, alkoxy, acyl or aryl group. PEG can be conjugated directly to the lipid or may be linked to the lipid via a linker moiety. Any linker moiety suitable for coupling the PEG to a lipid can be used including, e.g., non-ester containing linker moieties and ester-containing linker moieties.

[0094] As used herein, the term “non-ester containing linker moiety” refers to a linker moiety that does not contain a carboxylic ester bond (—OC(O)—). Suitable non-ester containing linker moieties include, but are not limited to, amido (—C(O)NH—), amino (—NR—), carbonyl (—C(O)—), carbamate (—NHC(O)O—), urea (—NHC(O)NH—), disulphide (—S—S—), ether (—O—), succinyl (—(O)CCH₂CH₂C(O)—), succinamidyl (—NHC(O)CH₂CH₂C(O)NH—), ether, disulphide, etc. as well as combinations thereof (such as a linker containing both a carbamate linker moiety and an amido linker moiety). In some embodiments, a carbamate linker is used to couple the PEG to the lipid.

[0095] In other embodiments, an ester containing linker moiety is used to couple the PEG to the lipid. Suitable ester containing linker moieties include, e.g., carbonate (—OC(O)O—), succinoyl, phosphate esters (—O—(O)POH—O—), sulfonate esters, and combinations thereof.

[0096] As used herein, the term “SNALP” refers to a stable nucleic acid-lipid particle, including SPLP. A SNALP represents a vesicle of lipids coating a reduced aqueous interior comprising a nucleic acid (e.g., ssDNA, dsDNA, ssRNA, dsRNA, siRNA, or a plasmid, including plasmids from which an interfering RNA is transcribed). As used herein, the term “SPLP” refers to a nucleic acid-lipid particle comprising a nucleic acid (e.g., a plasmid) encapsulated within a lipid vesicle. SNALPs and SPLPs typically contain a cationic lipid, a non-cationic lipid, and a lipid that prevents aggregation of the particle (e.g., a PEG-lipid conjugate). SNALPs and SPLPs have systemic application as they exhibit extended circulation lifetimes following intravenous (i.v.) injection, accumulate at distal sites (e.g., sites physically separated from the administration site) and can mediate gene silencing or gene expression of a transfected nucleic acid at these distal sites. SPLPs include “pSPLP” which comprise an encapsulated condensing agent-nucleic acid complex as set forth in WO 00/03683.

[0097] The term “vesicle-forming lipid” is intended to include any amphipathic lipid having a hydrophobic moiety and a polar head group, and which by itself can form spontaneously into bilayer vesicles in water, as exemplified by most phospholipids.

[0098] The term “vesicle-adopting lipid” is intended to include any amphipathic lipid that is stably incorporated into lipid bilayers in combination with other amphipathic lipids, with its hydrophobic moiety in contact with the interior, hydrophobic region of the bilayer membrane, and its polar head group moiety oriented toward the exterior, polar surface of the membrane. Vesicle-adopting lipids include lipids that on their own tend to adopt a nonlamellar phase, yet which are capable of assuming a bilayer structure in the presence of a bilayer-stabilizing component. A typical example is DOPE (dioleoylphosphatidylethanolamine). Bilayer stabilizing components include, but are not limited to, conjugated lipids that inhibit aggregation of the SNALPs, polyamide oligomers (e.g., ATTA-lipid derivatives), peptides, proteins, detergents, lipid-derivatives, PEG-lipid derivatives such as PEG coupled to dialkyloxypropyls, PEG coupled to diacylglycerols, PEG coupled to phosphatidyl-ethanolamines, and PEG conjugated to ceramides (see, U.S. Pat. No. 5,885,613, which is incorporated herein by reference).

[0099] The term “amphipathic lipid” refers, in part, to any suitable material wherein the hydrophobic portion of the lipid material orients into a hydrophobic phase, while the hydrophilic portion orients toward the aqueous phase. Amphipathic lipids are usually the major component of a lipid vesicle. Hydrophilic characteristics derive from the presence of polar or charged groups such as carbohydrates, phosphate, carboxylic, sulfato, amino, sulfhydryl, nitro, hydroxy and other like groups. Hydrophobicity can be conferred by the inclusion of apolar groups that include, but are not limited to, long chain saturated and unsaturated aliphatic hydrocarbon groups and such groups substituted by one or more aromatic, cycloaliphatic or heterocyclic group(s). Examples of amphipathic compounds include, but are not limited to, phospholipids, aminolipids and sphingolipids. Representative examples of phospholipids include, but are not limited to, phosphatidylcholine, phosphatidylethanolamine, phosphatidylserine, phosphatidylinositol, phosphatidic acid, palmitoyloleoyl phosphatidylcholine, lysophosphatidylcholine, lysophosphatidylethanolamine, dipalmitoylphosphatidylcholine, dioleoylphosphatidylcholine, distearoylphosphatidylcholine or dilinoleoylphosphatidylcholine. Other compounds lacking in phosphorus, such as sphingolipid, glycosphingolipid families, diacylglycerols and .beta.-acyloxyacids, are also within the group designated as amphipathic lipids. Additionally, the amphipathic lipid described above can be mixed with other lipids including triglycerides and sterols.

[0100] The term “neutral lipid” refers to any of a number of lipid species that exist either in an uncharged or neutral zwitterionic form at a selected pH. At physiological pH, such lipids include, for example, diacylphosphatidylcholine, diacylphosphatidylethanolamine, ceramide, sphingomyelin, cephalin, cholesterol, cerebrosides and diacylglycerols.

[0101] The term “noncationic lipid” refers to any neutral lipid as described above as well as anionic lipids.

[0102] The term “anionic lipid” refers to any lipid that is negatively charged at physiological pH. These lipids include, but are not limited to, phosphatidylglycerol, cardiolipin, diacylphosphatidylserine, diacylphosphatidic acid, N-dodecanoyl phosphatidylethanolamines, N-succinyl phosphatidylethanolamines, N-glutarylphosphatidylethanolamines, lysylphosphatidylglycerols, palmitoyloleyolphosphatidylglycerol (POPG), and other anionic modifying groups joined to neutral lipids.

[0103] The term “cationic lipid” refers to any of a number of lipid species that carry a net positive charge at a selected pH, such as physiological pH (e.g., pH of about 7.0). As used herein, physiological pH refers to the pH of a biological fluid such as blood or lymph as well as the pH of a cellular compartment such as an endosome, an acidic endosome, or a lysosome). Such lipids include, but are not limited to, N,N-dioleyl-N,N-dimethylammonium chloride (“DODAC”); N-(2,3-dioleyloxy)propyl)-N,N,N-trimethylammonium chloride (“DOTMA”); N,N-distearyl-N,N-dimethylammonium bromide (“DDAB”); N-(2,3-dioleoyloxy)propyl)-N,N,N-trimethylammonium chloride (“DOTAP”); 3-(N—(N′,N′-dimethylaminoethane)-carbamoyl)cholesterol (“DC-Chol”); N-(1,2-dimyristyloxyprop-3-yl)-N,N-dimethyl-N-hydroxyethyl ammonium bromide (“DMRIE”); 1,2-DiLinoleyloxy-N,N-dimethylaminopropane (DLinDMA); and 1,2-Dilinolenyloxy-N,N-dimethylaminopropane (DLenDMA). The following lipids are cationic and have a positive charge at below physiological pH or at physiological pH: DODAP, DODMA, DLinDMA and the like.

[0104] The term “hydrophobic lipid” refers to compounds having apolar groups that include, but are not limited to, long chain saturated and unsaturated aliphatic hydrocarbon groups and such groups optionally substituted by one or more aromatic, cycloaliphatic or heterocyclic group(s). Suitable examples include, but are not limited to, diacylglycerol, dialkylglycerol, N—N-dialkylamino, 1,2-diacyloxy-3-aminopropane and 1,2-dialkyl-3-aminopropane.

[0105] The term “fusogenic” refers to the ability of a liposome, an SNALP or other drug delivery system to fuse with membranes of a cell. The membranes can be either the plasma membrane or membranes surrounding organelles, e.g., endosome, nucleus, etc.

[0106] The term “diacylglycerol” refers to a compound having 2-fatty acyl chains, R¹ and R², both of which have independently between 2 and 30 carbons bonded to the 1- and 2-position of glycerol by ester linkages. The acyl groups can be saturated or have varying degrees of unsaturation. Diacylglycerols have the following general formula:

[chemical structure]

[0107] The term “dialkyloxypropyl” refers to a compound having 2-alkyl chains, R¹ and R², both of which have independently between 2 and 30 carbons. The alkyl groups can be saturated or have varying degrees of unsaturation. Dialkyloxypropyls have the following general formula:

[chemical structure]

[0108] The term “ATTA” or “polyamide” refers to, but is not limited to, compounds disclosed in U.S. Pat. Nos. 6,320,017 and 6,586,559, both of which are incorporated herein by reference. These compounds include a compound having the formula

[chemical structure]

wherein: R is a member selected from the group consisting of hydrogen, alkyl and acyl; R¹ is a member selected from the group consisting of hydrogen and alkyl; or optionally, R and R¹ and the nitrogen to which they are bound form an azido moiety; R² is a member of the group selected from hydrogen, optionally substituted alkyl, optionally substituted aryl and a side chain of an amino acid; R³ is a member selected from the group consisting of hydrogen, halogen, hydroxy, alkoxy, mercapto, hydrazino, amino and NR⁴R⁵, wherein R⁴ and R⁵ are independently hydrogen or alkyl; n is 4 to 80; m is 2 to 6; p is 1 to 4; and q is 0 or 1. It will be apparent to those of skill in the art that other polyamides can be used in the compounds of the present invention.

[0109] The term “nucleic acid” or “polynucleotide” refers to a polymer containing at least two ribonucleotides (e.g. deoxy or ribo) in either single- or double-stranded form. Unless specifically limited, the terms encompasses nucleic acids containing known analogues of natural nucleotides that have similar binding properties as the reference nucleic acid and are metabolized in a manner similar to naturally occurring nucleotides. Unless otherwise indicated, a particular nucleic acid sequence also implicitly encompasses conservatively modified variants thereof (e.g., degenerate codon substitutions), alleles, orthologs, SNPs, and complementary sequences as well as the sequence explicitly indicated. Specifically, degenerate codon substitutions may be achieved by generating sequences in which the third position of one or more selected (or all) codons is substituted with mixed-base and/or deoxyinosine residues (Batzer et al., Nucleic Acid Res. 19:5081 (1991); Ohtsuka et al., J. Biol. Chem. 260:2605-2608 (1985); and Cassol et al. (1992); Rossolini et al., Mol. Cell. Probes 8:91-98 (1994)). “Nucleotides” contain a sugar deoxyribose (DNA) or ribose (RNA), a base, and a phosphate group. Nucleotides are linked together through the phosphate groups. “Bases” include purines and pyrimidines, which further include natural compounds adenine, thymine, guanine, cytosine, uracil, inosine, and natural analogs, and synthetic derivatives of purines and pyrimidines, which include, but are not limited to, modifications which place new reactive groups such as, but not limited to, amines, alcohols, thiols, carboxylates, and alkylhalides. DNA may be in the form of antisense, plasmid DNA, parts of a plasmid DNA, pre-condensed DNA, product of a polymerase chain reaction (PCR), vectors (P1, PAC, BAC, YAC, artificial chromosomes), expression cassettes, chimeric sequences, chromosomal DNA, or derivatives of these groups. The term nucleic acid is used interchangeably with gene, cDNA, mRNA encoded by a gene, and an interfering RNA molecule.

[0110] The term “gene” refers to a nucleic acid (e.g., DNA or RNA) sequence that comprises partial length or entire length coding sequences necessary for the production of a polypeptide or precursor (e.g., Eg5, EGFR or XIAP).

[0111] “Gene product,” as used herein, refers to a product of a gene such as an RNA transcript.

[0112] As used herein, the term “aqueous solution” refers to a composition comprising in whole, or in part, water.

[0113] As used herein, the term “organic lipid solution” refers to a composition comprising in whole, or in part, an organic solvent having a lipid.

[0114] “Distal site,” as used herein, refers to a physically separated site, which is not limited to an adjacent capillary bed, but includes sites broadly distributed throughout an organism.

[0115] “Serum-stable” in relation to nucleic acid-lipid particles means that the particle is not significantly degraded after exposure to a serum or nuclease assay that would significantly degrade free DNA. Suitable assays include, for example, a standard serum assay or a DNAse assay such as those described in the Examples below.

[0116] “Fully encapsulated” in relation to nucleic acid-lipid particles means that the nucleic acid portion of the particle is serum stable and is not accessible to a fluorescent dye (e.g., such as RiboGreen™). In contrast to a nucleic acid that forms a complex with the lipid vehicle (e.g., a liposome or multilammelar vesicle), a nucleic acid fully encapsulated in the lipid portion of a particle does not fluoresce in the presence of a fluorescent dye.

[0117] “Systemic delivery,” as used herein, refers to delivery that leads to a broad biodistribution of a compound within an organism. Some techniques of administration can lead to the systemic delivery of certain compounds, but not others. Systemic delivery means that a useful, preferably therapeutic, amount of a compound is exposed to most parts of the body. To obtain broad biodistribution generally requires a blood lifetime such that the compound is not rapidly degraded or cleared (such as by first pass organs (liver, lung, etc.) or by rapid, nonspecific cell binding) before reaching a disease site distal to the site of administration. Systemic delivery of nucleic acid-lipid particules can be by any means known in the art including, for example, intravenous, subcutaneous, intraperitoneal, In some embodiments, systemic delivery of nucleic acid-lipid particles is by intravenous delivery.

[0118] “Local delivery” as used herein refers to delivery of a compound directly to a target site within an organism. For example, a compound can be locally delivered by direct injection into a disease site such as a tumor or other target site such as a site of inflammation or a target organ such as the liver, heart, pancreas, kidney, and the like.

### III. Carrier Systems Containing siRNA

[0119] In one aspect, the present invention provides carrier systems containing the siRNA molecules described herein. In some embodiments, the carrier system is a lipid-based carrier system such as a stabilized nucleic acid-lipid particle (e.g., SNALP or SPLP), cationic lipid or liposome nucleic acid complexes (i.e., lipoplexes), a liposome, a micelle, a virosome, or a mixture thereof. In other embodiments, the carrier system is a polymer-based carrier system such as a cationic polymer-nucleic acid complex (i.e., polyplex). In additional embodiments, the carrier system is a cyclodextrin-based carrier system such as a cyclodextrin polymer-nucleic acid complex. In further embodiments, the carrier system is a protein-based carrier system such as a cationic peptide-nucleic acid complex. Preferably, the carrier system is a stabilized nucleic acid-lipid particle such as a SNALP or SPLP. One skilled in the art will appreciate that the siRNA molecules of the present invention can also be delivered as naked siRNA.

### IV. Stable Nucleic Acid-Lipid Particles (SNALPs) and Properties Thereof

[0120] The stable nucleic acid-lipid particles or, alternatively, SNALPs typically comprise an siRNA molecule that targets expression of a gene expressed in cancer (e.g., an Eg5, EGFR or XIAP gene), a cationic lipid (e.g., a cationic lipid of Formula I or II), a noncationic lipid and a bilayer stabilizing component (i.e., a conjugated lipid that inhibits aggregation of the SNALPs) The nucleic acid-lipid particles may comprise at least 1, 2, 3, 4, 5, or more of the sequences set forth in Tables 1-9.

[0121] The SNALPs of the present invention typically have a mean diameter of about 50 nm to about 150 nm, more typically about 60 nm to about 130 nm, more typically about 70 nm to about 110 nm, most typically about 70 to about 90 nm and are substantially nontoxic. In addition, the nucleic acids present in the SNALPs of the present invention are resistant in aqueous solution to degradation with a nuclease.

[0122] In one embodiment, the present invention provides stabilized nucleic acid-lipid particles (SPLPs or SNALPs) and other lipid-based carrier systems (e.g., a liposome, a micelle, a virosome, a lipid-nucleic acid particle, a nucleic acid complex and mixtures thereof) containing cationic lipids. The lipid-nucleic acid particles of the present invention typically comprise a nucleic acid, a cationic lipid, a non-cationic lipid and a PEG-lipid conjugate. The cationic lipid typically comprises from about 2 mol % to about 60 mol %, from about 5 mol % to about 50 mol %, from about 10 mol % to about 45 mol %, from about 20 mol % to about 40 mol %, or from about 30 mol % to about 40 mol % of the total lipid present in said particle. The non-cationic lipid typically comprises from about 5 mol % to about 90 mol %, from about 10 mol % to about 85 mol %, from about 20 mol % to about 80 mol %, from about 30 mol % to about 70 mol %, from about 40 mol % to about 60 mol % or about 48 mol % of the total lipid present in said particle. The PEG-lipid conjugate typically comprises from about 0.5 mol % to about 20 mol %, from about 1.5 mol % to about 18 mol %, from about 4 mol % to about 15 mol %, from about 5 mol % to about 12 mol %, or about 2 mol % of the total lipid present in said particle. The nucleic acid-lipid particles of the present invention may further comprise cholesterol. If present, the cholesterol typically comprises from about 0 mol % to about 10 mol %, about 2 mol % to about 10 mol %, about 10 mol % to about 60 mol %, from about 12 mol % to about 58 mol %, from about 20 mol % to about 55 mol %, or about 48 mol % of the total lipid present in said particle. It will be readily apparent to one of skill in the art that the proportions of the components of the nucleic acid-lipid particles may be varied. In a specific formulation, the total lipid in the nucleic acid-lipid particle comprises 48 mol % cholesterol; 10 mol % DSPC; 2 mol % PEG-cDMA; and 40 mol % DLinDMA of the total lipid present in said particle.

[0123] A. Cationic Lipids

[0124] Various suitable cationic lipids may be used in the present invention, either alone or in combination with one or more other cationic lipid species or neutral lipid species.

[0125] Suitable cationic lipids include, for example, DLinDMA, DLenDMA, DODAC, DOTMA, DDAB, DOTAP, DOSPA, DOGS, DC-Chol and DMRIE, or combinations thereof. A number of these lipids and related analogs, which are also useful in the present invention, have been described in U.S. Pat. Nos. 5,208,036, 5,264,618, 5,279,833, 5,283,185, 5,753,613 and 5,785,992. Additionally, a number of commercial preparations of cationic lipids are available and can be used in the present invention. These include, for example, LIPOFECTIN® (commercially available cationic liposomes comprising DOTMA and DOPE, from GIBCO/BRL, Grand Island, N.Y., USA); LIPOFECTAMINE® (commercially available cationic liposomes comprising DOSPA and DOPE, from GIBCO/BRL); and TRANSFECTAM® (commercially available cationic liposomes comprising DOGS from Promega Corp., Madison, Wis., USA). In addition, cationic lipids of Formula I and Formula II can be used in the present invention. Cationic lipids of Formula I and II have the following structures:

[chemical structure]

wherein R¹ and R² are independently selected and are H or C₁-C₃ alkyls. R³ and R⁴ are independently selected and are alkyl groups having from about 10 to about 20 carbon atoms; at least one of R³ and R⁴ comprises at least two sites of unsaturation. In one embodiment, R³ and R⁴ are both the same, i.e., R³ and R⁴ are both linoleyl (C18), etc. In another embodiment, R³ and R⁴ are different, i.e., R³ is myristyl (C14) and R⁴ is linoleyl (C18). In some embodiments, the cationic lipids of the present invention are symmetrical, i.e., R³ and R⁴ are both the same. In another preferred embodiment, both R³ and R⁴ comprise at least two sites of unsaturation. In some embodiments, R³ and R⁴ are independently selected from dodecadienyl, tetradecadienyl, hexadecadienyl, linoleyl, and icosadienyl. In some embodiments, R³ and R⁴ are both linoleyl. In some embodiments, R³ and R⁴ comprise at least three sites of unsaturation and are independently selected from, e.g., dodecatrienyl, tetradectrienyl, hexadecatrienyl, linolenyl, and icosatrienyl.

[0126] The cationic lipids of Formula I and Formula II described herein typically carry a net positive charge at a selected pH, such as physiological pH. It has been surprisingly found that cationic lipids comprising alkyl chains with multiple sites of unsaturation, e.g., at least two or three sites of unsaturation, are particularly useful for forming lipid-nucleic acid particles with increased membrane fluidity. A number of cationic lipids and related analogs, which are also useful in the present invention, have been described in U.S. Pat. Nos. 5,208,036, 5,264,618, 5,279,833 and 5,283,185, and WO 96/10390.

[0127] Additional suitable cationic lipids include, e.g., dioctadecyldimethylammonium (“DODMA”), Distearyldimethylammonium (“DSDMA”), N,N-dioleyl-N,N-dimethylammonium chloride (“DODAC”); N-(2,3-dioleyloxy)propyl)-N,N,N-trimethylammonium chloride (“DOTMA”); N,N-distearyl-N,N-dimethylammonium bromide (“DDAB”); N-(2,3-dioleoyloxy)propyl)-N,N,N-trimethylammonium chloride (“DOTAP”); 3-(N—(N′,N′-dimethylaminoethane)-carbamoyl)cholesterol (“DC-Chol”) and N-(1,2-dimyristyloxyprop-3-yl)-N,N-dimethyl-N-hydroxyethyl ammonium bromide (“DMRIE”). A number of these lipids and related analogs, which are also useful in the present invention, have been described in U.S. Pat. Nos. 5,208,036, 5,264,618, 5,279,833, 5,283,185, 5,753,613 and 5,785,992.

[0128] B. Non-Cationic Lipids

[0129] The noncationic lipids used in the present invention can be any of a variety of neutral uncharged, zwitterionic or anionic lipids capable of producing a stable complex. They are preferably neutral, although they can alternatively be negatively charged. Examples of noncationic lipids useful in the present invention include: phospholipid-related materials, such as lecithin, phosphatidylethanolamine, lysolecithin, lysophosphatidylethanolamine, phosphatidylserine, phosphatidylinositol, sphingomyelin, cephalin, cardiolipin, phosphatidic acid, cerebrosides, dicetylphosphate, distearoylphosphatidylcholine (DSPC), dioleoylphosphatidylcholine (DOPC), dipalmitoylphosphatidylcholine (DPPC), dioleoylphosphatidylglycerol (DOPG), dipalmitoylphosphatidylglycerol (DPPG), dioleoyl-phosphatidylethanolamine (DOPE), palmitoyloleoylphosphatidylcholine (POPC), palmitoyloleoyl-phosphatidylethanolamine (POPE) and dioleoyl-phosphatidylethanolamine 4-(N-maleimidomethyl)-cyclohexane-1-carboxylate (DOPE-mal), dipalmitoyl phosphatidyl ethanolamine (DPPE), dimyristoylphosphoethanolamine (DMPE), distearoyl-phosphatidyl-ethanolamine (DSPE), 16-O-monomethyl PE, 16-O-dimethyl PE, 18-1-trans PE, 1-stearoyl-2-oleoyl-phosphatidyethanolamine (SOPE), and 1,2-dielaidoyl-sn-glycero-3-phophoethanolamine (transDOPE). Noncationic lipids or sterols such as cholesterol may be present. Additional nonphosphorous containing lipids are, e.g., stearylamine, dodecylamine, hexadecylamine, acetyl palmitate, glycerolricinoleate, hexadecyl stereate, isopropyl myristate, amphoteric acrylic polymers, triethanolamine-lauryl sulfate, alkyl-aryl sulfate polyethyloxylated fatty acid amides, dioctadecyldimethyl ammonium bromide and the like, diacylphosphatidylcholine, diacylphosphatidylethanolamine, ceramide, sphingomyelin, cephalin, and cerebrosides. Other lipids such as lysophosphatidylcholine and lysophosphatidylethanolamine may be present. Noncationic lipids also include polyethylene glycol-based polymers such as PEG 2000, PEG 5000 and polyethylene glycol conjugated to phospholipids or to ceramides (referred to as PEG-Cer).

[0130] In preferred embodiments, the noncationic lipids are diacylphosphatidylcholine (e.g., distearoylphosphatidylcholine, dioleoylphosphatidylcholine, dipalmitoylphosphatidylcholine and dilinoleoylphosphatidylcholine), diacylphosphatidylethanolamine (e.g., dioleoylphosphatidylethanolamine and palmitoyloleoylphosphatidylethanolamine), ceramide or sphingomyelin. The acyl groups in these lipids are preferably acyl groups derived from fatty acids having C₁₀-C₂₄ carbon chains. More preferably the acyl groups are lauroyl, myristoyl, palmitoyl, stearoyl or oleoyl. In particularly preferred embodiments, the noncationic lipid will be cholesterol, 1,2-sn-dioleoylphosphatidylethanolamine, or egg sphingomyelin (ESM).

[0131] C. Bilayer Stabilizing Component

[0132] In addition to cationic and non-cationic lipids, the nucleic acid-lipid particles (e.g., SNALPs and SPLPs) of the present invention comprise bilayer stabilizing component (BSC) such as an ATTA-lipid or a PEG-lipid, such as PEG coupled to dialkyloxypropyls (PEG-DAA) as described in, e.g., WO 05/026372, PEG coupled to diacylglycerol (PEG-DAG) as described in, e.g., U.S. Patent Publication Nos. 20030077829 and 2005008689), PEG coupled to phosphatidylethanolamine (PE) (PEG-PE), or PEG conjugated to ceramides, or a mixture thereof (see, U.S. Pat. No. 5,885,613). In one preferred embodiment, the BSC is a conjugated lipid that inhibits aggregation of the nucleic acid-lipid particles. Suitable conjugated lipids include, but are not limited to PEG-lipid conjugates, ATTA-lipid conjugates, cationic-polymer-lipid conjugates (CPLs) or mixtures thereof. In one preferred embodiment, the nucleic acid-lipid particles comprise either a PEG-lipid conjugate or an ATTA-lipid conjugate together with a CPL.

[0133] PEG is a polyethylene glycol, a linear, water-soluble polymer of ethylene PEG repeating units with two terminal hydroxyl groups. PEGs are classified by their molecular weights; for example, PEG 2000 has an average molecular weight of about 2,000 daltons, and PEG 5000 has an average molecular weight of about 5,000 daltons. PEGs are commercially available from Sigma Chemical Co. and other companies and include, for example, the following: monomethoxypolyethylene glycol (MePEG-OH), monomethoxypolyethylene glycol-succinate (MePEG-S), monomethoxypolyethylene glycol-succinimidyl succinate (MePEG-S—NHS), monomethoxypolyethylene glycol-amine (MePEG-NH₂), monomethoxypolyethylene glycol-tresylate (MePEG-TRES), and monomethoxypolyethylene glycol-imidazolyl-carbonyl (MePEG-IM). In addition, monomethoxypolyethyleneglycol-acetic acid (MePEG-CH₂COOH), is particularly useful for preparing the PEG-lipid conjugates including, e.g., PEG-DAA conjugates.

[0134] In some embodiments, the PEG has an average molecular weight of from about 550 daltons to about 10,000 daltons, more preferably of about 750 daltons to about 5,000 daltons, more preferably of about 1,000 daltons to about 5,000 daltons, more preferably of about 1,500 daltons to about 3,000 daltons and, even more preferably, of about 2,000 daltons, or about 750 daltons. The PEG can be optionally substituted by an alkyl, alkoxy, acyl or aryl group. PEG can be conjugated directly to the lipid or may be linked to the lipid via a linker moiety. Any linker moiety suitable for coupling the PEG to a lipid can be used including, e.g., non-ester containing linker moieties and ester-containing linker moieties. In some embodiments, the linker moiety is a non-ester containing linker moiety. As used herein, the term “non-ester containing linker moiety” refers to a linker moiety that does not contain a carboxylic ester bond (—OC(O)—). Suitable non-ester containing linker moieties include, but are not limited to, amido (—C(O)NH—), amino (—NR—), carbonyl (—C(O)—), carbamate (—NHC(O)O—), urea (—NHC(O)NH—), disulphide (—S—S—), ether (—O—), succinyl (—(O)CCH₂CH₂C(O)—), succinamidyl (—NHC(O)CH₂CH₂C(O)NH—), ether, disulphide, etc. as well as combinations thereof (such as a linker containing both a carbamate linker moiety and an amido linker moiety). In some embodiments, a carbamate linker is used to couple the PEG to the lipid.

[0135] In other embodiments, an ester containing linker moiety is used to couple the PEG to the lipid. Suitable ester containing linker moieties include, e.g., carbonate (—OC(O)O—), succinoyl, phosphate esters (—O—(O)POH—O—), sulfonate esters, and combinations thereof.

[0136] Phosphatidylethanolamines having a variety of acyl chain groups of varying chain lengths and degrees of saturation can be conjugated to polyethyleneglycol to form the bilayer stabilizing component. Such phosphatidylethanolamines are commercially available, or can be isolated or synthesized using conventional techniques known to those of skilled in the art. Phosphatidylethanolamines containing saturated or unsaturated fatty acids with carbon chain lengths in the range of C₁₀ to C₂₀ are preferred. Phosphatidylethanolamines with mono- or diunsaturated fatty acids and mixtures of saturated and unsaturated fatty acids can also be used. Suitable phosphatidylethanolamines include, but are not limited to, the following: dimyristoylphosphatidylethanolamine (DMPE), dipalmitoylphosphatidylethanolamine (DPPE), dioleoylphosphatidylethanolamine (DOPE) and distearoylphosphatidylethanolamine (DSPE).

[0137] In some embodiments, the PEG-lipid is a PEG-DAA conjugate has the following formula:

[chemical structure]

[0138] In Formula VI, R¹ and R² are independently selected and are alkyl groups having from about 10 to about 22 carbon atoms. The long-chain alkyl groups can be saturated or unsaturated. Suitable alkyl groups include, but are not limited to, lauryl (C12), myristyl (C14), palmityl (C16), stearyl (C18) and icosyl (C20). In some embodiments, R¹ and R² are the same, i.e., R¹ and R² are both myristyl (i.e., dimyristyl), R¹ and R² are both stearyl (i.e., distearyl), etc. In some embodiments, the alkyl groups are saturated.

[0139] In Formula VI above, “PEG” is a polyethylene glycol having an average molecular weight ranging of about 550 daltons to about 10,000 daltons, about 750 daltons to about 5,000 daltons, about 1,000 daltons to about 5,000 daltons, about 1,500 daltons to about 3,000 daltons, about 2,000 daltons, or about 750 daltons. The PEG can be optionally substituted with alkyl, alkoxy, acyl or aryl. In some embodiments, the terminal hydroxyl group is substituted with a methoxy or methyl group.

[0140] In Formula VI, above, “L” is a non-ester containing linker moiety or an ester containing linker moiety. In some embodiments, L is a non-ester containing linker moiety. Suitable non-ester containing linkers include, but are not limited to, an amido linker moiety, an amino linker moiety, a carbonyl linker moiety, a carbamate linker moiety, a urea linker moiety, an ether linker moiety, a disulphide linker moiety, a succinamidyl linker moiety and combinations thereof. In some embodiments, the non-ester containing linker moiety is a carbamate linker moiety (i.e., a PEG-C-DAA conjugate), an amido linker moiety (i.e., a PEG-A-DAA conjugate), or a succinamidyl linker moiety (i.e., a PEG-S-DAA conjugate).

[0141] The PEG-DAA conjugates are synthesized using standard techniques and reagents known to those of skill in the art. It will be recognized that the PEG-DAA conjugates will contain various amide, amine, ether, thio, carbamate and urea linkages. T hose of skill in the art will recognize that methods and reagents for forming these bonds are well known and readily available. See, e.g., March, ADVANCED ORGANIC CHEMISTRY (Wiley 1992), Larock, COMPREHENSIVE ORGANIC TRANSFORMATIONS (VCH 1989); and Furniss, VOGEL'S TEXTBOOK OF PRACTICAL ORGANIC CHEMISTRY 5th ed. (Longman 1989). It will also be appreciated that any functional groups present may require protection and deprotection at different points in the synthesis of the PEG-DAA conjugates. Those of skill in the art will recognize that such techniques are well known. See, e.g., Green and Wuts, PROTECTIVE GROUPS IN ORGANIC SYNTHESIS (Wiley 1991).

[0142] In some embodiments, the PEG-DAA conjugate is a dilauryloxypropyl (C12)-PEG conjugate, dimyristyloxypropyl (C14)-PEG conjugate, a dipalmitoyloxypropyl (C16)-PEG conjugate or a disteryloxypropyl (C18)-PEG conjugate. Those of skill in the art will readily appreciate that other dialkyloxypropyls can be used in the PEG-DAA conjugates of the present invention.

[0143] In addition to the foregoing, it will be readily apparent to those of skill in the art that other hydrophilic polymers can be used in place of PEG. Examples of suitable polymers that can be used in place of PEG include, but are not limited to, polyvinylpyrrolidone, polymethyloxazoline, polyethyloxazoline, polyhydroxypropyl methacrylamide, polymethacrylamide and polydimethylacrylamide, polylactic acid, polyglycolic acid, and derivatized celluloses, such as hydroxymethylcellulose or hydroxyethylcellulose.

[0144] In addition to the foregoing components, the SNALPs and SPLPs of the present invention can further comprise cationic poly(ethylene glycol) (PEG) lipids, or CPLs, that have been designed for insertion into lipid bilayers to impart a positive charge (see, Chen, et al., Bioconj. Chem. 11:433-437 (2000)). Suitable SPLPs and SPLP-CPLs for use in the present invention, and methods of making and using SPLPs and SPLP-CPLs, are disclosed, e.g., in U.S. Pat. No. 6,852,334 and WO 00/62813. Cationic polymer lipids (CPLs) useful in the present invention have the following architectural features: (1) a lipid anchor, such as a hydrophobic lipid, for incorporating the CPLs into the lipid bilayer; (2) a hydrophilic spacer, such as a polyethylene glycol, for linking the lipid anchor to a cationic head group; and (3) a polycationic moiety, such as a naturally occurring amino acid, to produce a protonizable cationic head group.

[0145] Suitable CPL include compounds of Formula VII:

A-W—Y (VII)

wherein A, W and Y are as described below.

[0146] With reference to Formula VII, “A” is a lipid moiety such as an amphipathic lipid, a neutral lipid or a hydrophobic lipid that acts as a lipid anchor. Suitable lipid examples include vesicle-forming lipids or vesicle adopting lipids and include, but are not limited to, diacylglycerolyls, dialkylglycerolyls, N—N-dialkylaminos, 1,2-diacyloxy-3-aminopropanes and 1,2-dialkyl-3-aminopropanes.

[0147] “W” is a polymer or an oligomer, such as a hydrophilic polymer or oligomer. Typically, the hydrophilic polymer is a biocompatable polymer that is nonimmunogenic or possesses low inherent immunogenicity. Alternatively, the hydrophilic polymer can be weakly antigenic if used with appropriate adjuvants. Suitable nonimmunogenic polymers include, but are not limited to, PEG, polyamides, polylactic acid, polyglycolic acid, polylactic acid/polyglycolic acid copolymers and combinations thereof. In some embodiments, the polymer has a molecular weight of about 250 to about 7000 daltons.

[0148] “Y” is a polycationic moiety. The term polycationic moiety refers to a compound, derivative, or functional group having a positive charge, typically at least 2 positive charges at a selected pH, typically physiological pH. Suitable polycationic moieties include basic amino acids and their derivatives such as arginine, asparagine, glutamine, lysine and histidine; spermine; spermidine; cationic dendrimers; polyamines; polyamine sugars; and amino polysaccharides. The polycationic moieties can be linear, such as linear tetralysine, branched or dendrimeric in structure. Polycationic moieties have between about 2 to about 15 positive charges, between about 2 to about 12 positive charges, or between about 2 to about 8 positive charges at selected pH values. The selection of which polycationic moiety to employ may be determined by the type of liposome application which is desired.

[0149] The charges on the polycationic moieties can be either distributed around the entire liposome moiety, or alternatively, they can be a discrete concentration of charge density in one particular area of the liposome moiety e.g., a charge spike. If the charge density is distributed on the liposome, the charge density can be equally distributed or unequally distributed. All variations of charge distribution of the polycationic moiety are encompassed by the present invention.

[0150] The lipid “A,” and the nonimmunogenic polymer “W,” can be attached by various methods and preferably, by covalent attachment. Methods known to those of skill in the art can be used for the covalent attachment of “A” and “W.” Suitable linkages include, but are not limited to, amide, amine, carboxyl, carbonate, carbamate, ester and hydrazone linkages. It will be apparent to those skilled in the art that “A” and “W” must have complementary functional groups to effectuate the linkage. The reaction of these two groups, one on the lipid and the other on the polymer, will provide the desired linkage. For example, when the lipid is a diacylglycerol and the terminal hydroxyl is activated, for instance with NHS and DCC, to form an active ester, and is then reacted with a polymer which contains an amino group, such as with a polyamide (see, U.S. Pat. Nos. 6,320,017 and 6,586,559), an amide bond will form between the two groups.

[0151] In certain instances, the polycationic moiety can have a ligand attached, such as a targeting ligand or a chelating moiety for complexing calcium. Preferably, after the ligand is attached, the cationic moiety maintains a positive charge. In certain instances, the ligand that is attached has a positive charge. Suitable ligands include, but are not limited to, a compound or device with a reactive functional group and include lipids, amphipathic lipids, carrier compounds, bioaffinity compounds, biomaterials, biopolymers, biomedical devices, analytically detectable compounds, therapeutically active compounds, enzymes, peptides, proteins, antibodies, immune stimulators, radiolabels, fluorogens, biotin, drugs, haptens, DNA, RNA, polysaccharides, liposomes, virosomes, micelles, immunoglobulins, functional groups, other targeting moieties, or toxins.

[0152] D. Nucleic Acid Component

[0153] The nucleic acid component of the present invention comprises an interfering RNA that silences (e.g., partially or completely inhibits) expression of a gene of interest (e.g., an Eg5, EGFR and/or XIAP gene). An interfering RNA can be provided in several forms. For example an interfering RNA can be provided as one or more isolated small-interfering RNA (siRNA) duplexes, longer double-stranded RNA (dsRNA) or as siRNA or dsRNA transcribed from a transcriptional cassette in a DNA plasmid. The interfering RNA can be administered alone or in combination with the administration of conventional agents used to treat the disease or disorder associated with the gene of interest including, e.g., cancer. Genes of interest include, but are not limited to, genes associated with viral infection and survival, genes associated with liver and kidney diseases and disorders, genes associated with tumorigenesis and cell transformation, angiogenic genes, immunomodulator genes, such as those associated with inflammatory and autoimmune responses, ligand receptor genes, and genes associated with neurodegenerative disorders.

[0154] E. siRNAs

[0155] The siRNAs of the invention are capable of silencing expression of a target sequence such as, e.g., Eg5, EGFR or XIAP mRNA. Suitable siRNA sequences are set forth in, e.g., Tables 1-2 and 7 for Eg5; Tables 3-4 and 9 for EGFR; or Tables 5-6 and 9 for XIAP. For any of the sequences set forth in the Tables above, thymines (i.e., T) can substituted with uracil (“U”) and uracil can be substituted with (“T”). In some embodiments, the siRNA are about 15 to 30 nucleotides in length.

[0156] 1. Selecting siRNA Sequences

[0157] Suitable siRNA sequences can be identified using any means known in the art. Typically, the methods described in Elbashir et al., Nature, 411:494-498 (2001) and Elbashir et al., EMBO J., 20:6877-6888 (2001) are combined with rational design rules set forth in Reynolds et al., Nature Biotech., 22:326-330 (2004).

[0158] Generally, the nucleotide sequence 3′ of the AUG start codon of a transcript from the target gene of interest is scanned for dinucleotide sequences (e.g., AA, NA, CC, GG, or UU, wherein N=C, G, or U) (see, e.g., Elbashir et al., EMBO J., 20:6877-6888 (2001)). The nucleotides immediately 3′ to the dinucleotide sequences are identified as potential siRNA sequences (i.e., a target sequence or a sense strand sequence). Typically, the 19, 21, 23, 25, 27, 29, 31, 33, 35, or more nucleotides immediately 3′ to the dinucleotide sequences are identified as potential siRNA sequences. In some embodiments, the dinucleotide sequence is an AA or NA sequence and the 19 nucleotides immediately 3′ to the AA or NA dinucleotide are identified as a potential siRNA sequences. siRNA sequences are usually spaced at different positions along the length of the target gene. To further enhance silencing efficiency of the siRNA sequences, potential siRNA sequences may be analyzed to identify sites that do not contain regions of homology to other coding sequences, e.g., in the target cell or organism. For example, a suitable siRNA sequence of about 21 base pairs typically will not have more than 16-17 contiguous base pairs of homology to coding sequences in the target cell or organism. If the siRNA sequences are to be expressed from an RNA Pol III promoter, siRNA sequences lacking more than 4 contiguous A's or T's are selected.

[0159] Once a potential siRNA sequence has been identified, the sequence can be analyzed using a variety of criteria known in the art. For example, to enhance their silencing efficiency, the siRNA sequences may be analyzed by a rational design algorithm to identify sequences that have one or more of the following features: (1) G/C content of about 25% to about 60% G/C; (2) at least 3 A/Us at positions 15-19 of the sense strand; (3) no internal repeats; (4) an A at position 19 of the sense strand; (5) an A at position 3 of the sense strand; (6) a U at position 10 of the sense strand; (7) no G/C at position 19 of the sense strand; and (8) no G at position 13 of the sense strand. siRNA design tools that incorporate algorithms that assign suitable values of each of these features and are useful for selection of siRNA can be found at, e.g., http://boz094.ust.hk/RNAi/siRNA. One of skill in the art will appreciate that sequences with one or more of the foregoing characteristics may be selected for further analysis and testing as potential siRNA sequences.

[0160] Additionally, potential siRNA target sequences with one or more of the following criteria can often be eliminated as siRNA: (1) sequences comprising a stretch of 4 or more of the same base in a row; (2) sequences comprising homopolymers of Gs (i.e., to reduce possible non-specific effects due to structural characteristics of these polymers; (3) sequences comprising triple base motifs (e.g., GGG, CCC, AAA, or TTT); (4) sequences comprising stretches of 7 or more G/Cs in a row; and (5) sequences comprising direct repeats of 4 or more bases within the candidates resulting in internal fold-back structures. However, one of skill in the art will appreciate that sequences with one or more of the foregoing characteristics may still be selected for further analysis and testing as potential siRNA sequences.

[0161] In some embodiments, potential siRNA target sequences may be further analyzed based on siRNA duplex asymmetry as described in, e.g., Khvorova et al., Cell, 115:209-216 (2003); and Schwarz et al., Cell, 115:199-208 (2003). In other embodiments, potential siRNA target sequences may be further analyzed based on secondary structure at the mRNA target site as described in, e.g., Luo et al., Biophys. Res. Commun., 318:303-310 (2004). For example, mRNA secondary structure can be modeled using the Mfold algorithm (available at http://www.bioinfo.rpi.edu/applications/mfold/rna/form1.cgi) to select siRNA sequences which favor accessibility at the mRNA target site where less secondary structure in the form of base-pairing and stem-loops is present.

[0162] Once a potential siRNA sequence has been identified, the sequence can be analyzed for the presence of any immunostimulatory properties, e.g., using an in vitro cytokine assay or an in vivo animal model. Motifs in the sense and/or antisense strand of the siRNA sequence such as GU-rich motifs (e.g., 5′-GU-3′,5′-UGU-3′,5′-GUGU-3′,5′-UGUGU-3′, etc.) can also provide an indication of whether the sequence may be immunostimulatory. Once an siRNA molecule is found to be immunostimulatory, it can then be modified to decrease its immunostimulatory properties as described herein. As a non-limiting example, an siRNA sequence can be contacted with a mammalian responder cell under conditions such that the cell produces a detectable immune response to determine whether the siRNA is an immunostimulatory or a non-immunostimulatory siRNA. The mammalian responder cell may be from a naïve mammal (i.e., a mammal that has not previously been in contact with the siRNA sequence). The mammalian responder cell may be, e.g., a peripheral blood mononuclear cell (PBMC), a macrophage, and the like. The detectable immune response may comprise production of a cytokine or growth factor such as, e.g., TNF-α, IFN-α, IFN-β, IFN-γ, IL-6, IL-12, or a combination thereof. An siRNA molecule identified as being immunostimulatory can then be modified to decrease its immunostimulatory properties by replacing at least one of the nucleotides on the sense and/or antisense strand with modified nucleotides. For example, less than about 30% (e.g., less than about 30%, 25%, 20%, 15%, 10%, or 5%) of the nucleotides in the double-stranded region of the siRNA duplex can be replaced with modified nucleotides such as 2′OMe nucleotides. The modified siRNA can then be contacted with a mammalian responder cell as described above to confirm that its immunostimulatory properties have been reduced or abrogated.

[0163] Suitable in vitro assays for detecting an immune response include, but are not limited to, the double monoclonal antibody sandwich immunoassay technique of David et al. (U.S. Pat. No. 4,376,110); monoclonal-polyclonal antibody sandwich assays (Wide et al., in Kirkham and Hunter, eds., Radioimmunoassay Methods, E. and S. Livingstone, Edinburgh (1970)); the “Western blot” method of Gordon et al. (U.S. Pat. No. 4,452,901); immunoprecipitation of labeled ligand (Brown et al., J. Biol. Chem., 255:4980-4983 (1980)); enzyme-linked immunosorbent assays (ELISA) as described, for example, by Raines et al., J. Biol. Chem., 257:5154-5160 (1982); immunocytochemical techniques, including the use of fluorochromes (Brooks et al., Clin. Exp. Immunol., 39:477 (1980)); and neutralization of activity (Bowen-Pope et al., Proc. Natl. Acad. Sci. USA, 81:2396-2400 (1984)). In addition to the immunoassays described above, a number of other immunoassays are available, including those described in U.S. Pat. Nos. 3,817,827; 3,850,752; 3,901,654; 3,935,074; 3,984,533; 3,996,345; 4,034,074; and 4,098,876.

[0164] A non-limiting example of an in vivo model for detecting an immune response includes an in vivo mouse cytokine induction assay that can be performed as follows: (1) siRNA can be administered by standard intravenous injection in the lateral tail vein; (2) blood can be collected by cardiac puncture about 6 hours after administration and processed as plasma for cytokine analysis; and (3) cytokines can be quantified using sandwich ELISA kits according to the manufacturer's instructions (e.g., mouse and human IFN-α (PBL Biomedical; Piscataway, N.J.); human IL-6 and TNF-α (eBioscience; San Diego, Calif.); and mouse IL-6, TNF-α, and IFN-γ (BD Biosciences; San Diego, Calif.)).

[0165] Monoclonal antibodies that specifically bind cytokines and growth factors are commercially available from multiple sources and can be generated using methods known in the art (see, e.g., Kohler and Milstein, Nature, 256: 495-497 (1975); and Harlow and Lane, ANTIBODIES, A LABORATORY MANUAL, Cold Spring Harbor Publication, New York (1999)). Generation of monoclonal antibodies has been previously described and can be accomplished by any means known in the art (see, e.g., Buhring et al. in Hybridoma, Vol. 10, No. 1, pp. 77-78 (1991)). In some methods, the monoclonal antibody is labeled (e.g., with any composition detectable by spectroscopic, photochemical, biochemical, electrical, optical, chemical means, and the like) to facilitate detection.

[0166] F. Generating siRNA Molecules

[0167] siRNA molecules can be provided in several forms including, e.g., as one or more isolated small-interfering RNA (siRNA) duplexes, as longer double-stranded RNA (dsRNA), or as siRNA or dsRNA transcribed from a transcriptional cassette in a DNA plasmid. The siRNA sequences may have overhangs (e.g., 3′ or 5′ overhangs as described in Elbashir et al., Genes Dev., 15:188 (2001) or Nykänen et al., Cell, 107:309 (2001)), or may lack overhangs (i.e., have blunt ends).

[0168] An RNA population can be used to provide long precursor RNAs, or long precursor RNAs that have substantial or complete identity to a selected target sequence can be used to make the siRNA. The RNAs can be isolated from cells or tissue, synthesized, and/or cloned according to methods well known to those of skill in the art. The RNA can be a mixed population (obtained from cells or tissue, transcribed from cDNA, subtracted, selected, etc.), or can represent a single target sequence. RNA can be naturally occurring (e.g., isolated from tissue or cell samples), synthesized in vitro (e.g., using T7 or SP6 polymerase and PCR products or a cloned cDNA), or chemically synthesized.

[0169] To form a long dsRNA, for synthetic RNAs, the complement is also transcribed in vitro and hybridized to form a dsRNA. If a naturally occurring RNA population is used, the RNA complements are also provided (e.g., to form dsRNA for digestion by E. coli RNAse III or Dicer), e.g., by transcribing cDNAs corresponding to the RNA population, or by using RNA polymerases. The precursor RNAs are then hybridized to form double stranded RNAs for digestion. The dsRNAs can be directly administered to a subject or can be digested in vitro prior to administration.

[0170] Alternatively, one or more DNA plasmids encoding one or more siRNA templates are used to provide siRNA. siRNA can be transcribed as sequences that automatically fold into duplexes with hairpin loops from DNA templates in plasmids having RNA polymerase III transcriptional units, for example, based on the naturally occurring transcription units for small nuclear RNA U6 or human RNase P RNA H1 (see, Brummelkamp et al., Science, 296:550 (2002); Donzé et al., Nucleic Acids Res., 30:e46 (2002); Paddison et al., Genes Dev., 16:948 (2002); Yu et al., Proc. Natl. Acad. Sci. USA, 99:6047 (2002); Lee et al., Nat. Biotech., 20:500 (2002); Miyagishi et al., Nat. Biotech., 20:497 (2002); Paul et al., Nat. Biotech., 20:505 (2002); and Sui et al., Proc. Natl. Acad. Sci. USA, 99:5515 (2002)). Typically, a transcriptional unit or cassette will contain an RNA transcript promoter sequence, such as an H1-RNA or a U6 promoter, operably linked to a template for transcription of a desired siRNA sequence and a termination sequence, comprised of 2-3 uridine residues and a polythymidine (T5) sequence (polyadenylation signal) (Brummelkamp et al., supra). The selected promoter can provide for constitutive or inducible transcription. Compositions and methods for DNA-directed transcription of RNA interference molecules is described in detail in U.S. Pat. No. 6,573,099. The transcriptional unit is incorporated into a plasmid or DNA vector from which the interfering RNA is transcribed. Plasmids suitable for in vivo delivery of genetic material for therapeutic purposes are described in detail in U.S. Pat. Nos. 5,962,428 and 5,910,488. The selected plasmid can provide for transient or stable delivery of a target cell. It will be apparent to those of skill in the art that plasmids originally designed to express desired gene sequences can be modified to contain a transcriptional unit cassette for transcription of siRNA.

[0171] Methods for isolating RNA, synthesizing RNA, hybridizing nucleic acids, making and screening cDNA libraries, and performing PCR are well known in the art (see, e.g., Gubler and Hoffman, Gene 25:263-269 (1983); Sambrook et al., supra; Ausubel et al., supra), as are PCR methods (see, U.S. Pat. Nos. 4,683,195 and 4,683,202; PCR Protocols: A Guide to Methods and Applications (Innis et al., eds, 1990)). Expression libraries are also well known to those of skill in the art. Additional basic texts disclosing the general methods of use in this invention include Sambrook et al., Molecular Cloning, A Laboratory Manual (2nd ed. 1989); Kriegler, Gene Transfer and Expression: A Laboratory Manual (1990); and Current Protocols in Molecular Biology (Ausubel et al., eds., 1994).

[0172] Preferably, siRNA molecules are chemically synthesized. The single-stranded molecules that comprise the siRNA molecule can be synthesized using any of a variety of techniques known in the art, such as those described in Usman et al., J. Am. Chem. Soc., 109:7845 (1987); Scaringe et al., Nucl. Acids Res., 18:5433 (1990); Wincott et al., Nucl. Acids Res., 23:2677-2684 (1995); and Wincott et al., Methods Mol. Bio., 74:59 (1997). The synthesis of the single-stranded molecules makes use of common nucleic acid protecting and coupling groups, such as dimethoxytrityl at the 5′-end and phosphoramidites at the 3′-end. As a non-limiting example, small scale syntheses can be conducted on an Applied Biosystems synthesizer using a 0.2 μmol scale protocol with a 2.5 min coupling step for 2′-O-methylated nucleotides. Alternatively, syntheses at the 0.2 mmol scale can be performed on a 96-well plate synthesizer from Protogene (Palo Alto, Calif.). However, a larger or smaller scale of synthesis is also within the scope of the present invention. Suitable reagents for synthesis of the siRNA single-stranded molecules, methods for RNA deprotection, and methods for RNA purification are known to those of skill in the art.

[0173] The siRNA molecules can also be synthesized via a tandem synthesis technique, wherein both strands are synthesized as a single continuous fragment or strand separated by a cleavable linker that is subsequently cleaved to provide separate fragments or strands that hybridize to form the siRNA duplex. The linker can be a polynucleotide linker or a non-nucleotide linker. The tandem synthesis of siRNA can be readily adapted to both multiwell/multiplate synthesis platforms as well as large scale synthesis platforms employing batch reactors, synthesis columns, and the like. Alternatively, the siRNA molecules can be assembled from two distinct single-stranded molecules, wherein one strand comprises the sense strand and the other comprises the antisense strand of the siRNA. For example, each strand can be synthesized separately and joined together by hybridization or ligation following synthesis and/or deprotection. In certain other instances, the siRNA molecules can be synthesized as a single continuous fragment, where the self-complementary sense and antisense regions hybridize to form an siRNA duplex having hairpin secondary structure.

[0174] C. Modifying siRNA Sequences

[0175] In certain aspects, the siRNA molecules of the present invention comprise a duplex having two strands and at least one modified nucleotide in the double-stranded region, wherein each strand is about 15 to about 60 nucleotides in length. Advantageously, the modified siRNA is less immunostimulatory than a corresponding unmodified siRNA sequence, but retains the capability of silencing the expression of a target sequence.

[0176] Examples of modified nucleotides suitable for use in the present invention include, but are not limited to, ribonucleotides having a 2′-O-methyl (2′OMe), 2′-deoxy-2′-fluoro (2′F), 2′-deoxy, 5-C-methyl, 2′-O-(2-methoxyethyl) (MOE), 4′-thio, 2′-amino, or 2′-C-allyl group. Modified nucleotides having a Northern conformation such as those described in, e.g., Saenger, Principles of Nucleic Acid Structure, Springer-Verlag Ed. (1984), are also suitable for use in the siRNA molecules of the present invention. Such modified nucleotides include, without limitation, locked nucleic acid (LNA) nucleotides (e.g., 2′-O, 4′-C-methylene-(D-ribofuranosyl) nucleotides), 2′-O-(2-methoxyethyl) (MOE) nucleotides, 2′-methyl-thio-ethyl nucleotides, 2′-deoxy-2′-fluoro (2′F) nucleotides, 2′-deoxy-2′-chloro (2′Cl) nucleotides, and 2′-azido nucleotides. In certain instances, the siRNA molecules of the present invention include one or more G-clamp nucleotides. A G-clamp nucleotide refers to a modified cytosine analog wherein the modifications confer the ability to hydrogen bond both Watson-Crick and Hoogsteen faces of a complementary guanine nucleotide within a duplex (see, e.g., Lin et al., J. Am. Chem. Soc., 120:8531-8532 (1998)). In addition, nucleotides having a nucleotide base analog such as, for example, C-phenyl, C-naphthyl, other aromatic derivatives, inosine, azole carboxamides, and nitroazole derivatives such as 3-nitropyrrole, 4-nitroindole, 5-nitroindole, and 6-nitroindole (see, e.g., Loakes, Nucl. Acids Res., 29:2437-2447 (2001)) can be incorporated into the siRNA molecules of the present invention.

[0177] In certain embodiments, the siRNA molecules of the present invention further comprise one or more chemical modifications such as terminal cap moieties, phosphate backbone modifications, and the like. Examples of terminal cap moieties include, without limitation, inverted deoxy abasic residues, glyceryl modifications, 4′,5′-methylene nucleotides, 1-(β-D-erythrofuranosyl) nucleotides, 4′-thio nucleotides, carbocyclic nucleotides, 1,5-anhydrohexitol nucleotides, L-nucleotides, α-nucleotides, modified base nucleotides, threo-pentofuranosyl nucleotides, acyclic 3′,4′-seco nucleotides, acyclic 3,4-dihydroxybutyl nucleotides, acyclic 3,5-dihydroxypentyl nucleotides, 3′-3′-inverted nucleotide moieties, 3′-3′-inverted abasic moieties, 3′-2′-inverted nucleotide moieties, 3′-2′-inverted abasic moieties, 5′-5′-inverted nucleotide moieties, 5′-5′-inverted abasic moieties, 3′-5′-inverted deoxy abasic moieties, 5′-amino-alkyl phosphate, 1,3-diamino-2-propyl phosphate, 3-aminopropyl phosphate, 6-aminohexyl phosphate, 1,2-aminododecyl phosphate, hydroxypropyl phosphate, 1,4-butanediol phosphate, 3′-phosphoramidate, 5′-phosphoramidate, hexylphosphate, aminohexyl phosphate, 3′-phosphate, 5′-amino, 3′-phosphorothioate, 5′-phosphorothioate, phosphorodithioate, and bridging or non-bridging methylphosphonate or 5′-mercapto moieties (see, e.g., U.S. Pat. No. 5,998,203; Beaucage et al., Tetrahedron 49:1925 (1993)). Non-limiting examples of phosphate backbone modifications (i.e., resulting in modified internucleotide linkages) include phosphorothioate, phosphorodithioate, methylphosphonate, phosphotriester, morpholino, amidate, carbamate, carboxymethyl, acetamidate, polyamide, sulfonate, sulfonamide, sulfamate, formacetal, thioformacetal, and alkylsilyl substitutions (see, e.g., Hunziker et al., Nucleic Acid Analogues: Synthesis and Properties, in Modern Synthetic Methods, VCH, 331-417 (1995); Mesmaeker et al., Novel Backbone Replacements for Oligonucleotides, in Carbohydrate Modifications in Antisense Research, ACS, 24-39 (1994)). Such chemical modifications can occur at the 5′-end and/or 3′-end of the sense strand, antisense strand, or both strands of the siRNA.

[0178] In some embodiments, the sense and/or antisense strand can further comprise a 3′-terminal overhang having about 1 to about 4 (e.g., 1, 2, 3, or 4) 2′-deoxy ribonucleotides and/or any combination of modified and unmodified nucleotides. Additional examples of modified nucleotides and types of chemical modifications that can be introduced into the modified siRNA molecules of the present invention are described, e.g., in UK Patent No. GB 2,397,818 B and U.S. Patent Publication Nos. 20040192626 and 20050282188.

[0179] The siRNA molecules of the present invention can optionally comprise one or more non-nucleotides in one or both strands of the siRNA. As used herein, the term “non-nucleotide” refers to any group or compound that can be incorporated into a nucleic acid chain in the place of one or more nucleotide units, including sugar and/or phosphate substitutions, and allows the remaining bases to exhibit their activity. The group or compound is abasic in that it does not contain a commonly recognized nucleotide base such as adenosine, guanine, cytosine, uracil, or thymine and therefore lacks a base at the 1′-position.

[0180] In other embodiments, chemical modification of the siRNA comprises attaching a conjugate to the siRNA molecule. The conjugate can be attached at the 5′- and/or 3′-end of the sense and/or antisense strand of the siRNA via a covalent attachment such as, e.g., a biodegradable linker. The conjugate can also be attached to the siRNA, e.g., through a carbamate group or other linking group (see, e.g., U.S. Patent Publication Nos. 20050074771, 20050043219, and 20050158727). In certain instances, the conjugate is a molecule that facilitates the delivery of the siRNA into a cell. Examples of conjugate molecules suitable for attachment to the siRNA of the present invention include, without limitation, steroids such as cholesterol, glycols such as polyethylene glycol (PEG), human serum albumin (HSA), fatty acids, carotenoids, terpenes, bile acids, folates (e.g., folic acid, folate analogs and derivatives thereof), sugars (e.g., galactose, galactosamine, N-acetyl galactosamine, glucose, mannose, fructose, fucose, etc.), phospholipids, peptides, ligands for cellular receptors capable of mediating cellular uptake, and combinations thereof (see, e.g., U.S. Patent Publication Nos. 20030130186, 20040110296, and 20040249178; U.S. Pat. No. 6,753,423). Other examples include the lipophilic moiety, vitamin, polymer, peptide, protein, nucleic acid, small molecule, oligosaccharide, carbohydrate cluster, intercalator, minor groove binder, cleaving agent, and cross-linking agent conjugate molecules described in U.S. Patent Publication Nos. 20050119470 and 20050107325. Yet other examples include the 2′-O-alkyl amine, 2′-O-alkoxyalkyl amine, polyamine, CS-cationic modified pyrimidine, cationic peptide, guanidinium group, amidininium group, cationic amino acid conjugate molecules described in U.S. Patent Publication No. 20050153337. Additional examples include the hydrophobic group, membrane active compound, cell penetrating compound, cell targeting signal, interaction modifier, and steric stabilizer conjugate molecules described in U.S. Patent Publication No. 20040167090. Further examples include the conjugate molecules described in U.S. Patent Publication No. 20050239739. The type of conjugate used and the extent of conjugation to the siRNA molecule can be evaluated for improved pharmacokinetic profiles, bioavailability, and/or stability of the siRNA while retaining RNAi activity. As such, one skilled in the art can screen siRNA molecules having various conjugates attached thereto to identify ones having improved properties and RNAi activity using any of a variety of well-known in vitro cell culture or in vivo animal models.

### V. Additional Carrier Systems

[0181] Non-limiting examples of additional lipid-based carrier systems suitable for use in the present invention include lipoplexes (see, e.g., U.S. Patent Publication No. 20030203865; and Zhang et al., J. Control Release, 100:165-180 (2004)), pH-sensitive lipoplexes (see, e.g., U.S. Patent Publication No. 20020192275), reversibly masked lipoplexes (see, e.g., U.S. Patent Publication Nos. 20030180950), cationic lipid-based compositions (see, e.g., U.S. Pat. No. 6,756,054; and U.S. Patent Publication No. 20050234232), cationic liposomes (see, e.g., U.S. Patent Publication Nos. 20030229040, 20020160038, and 20020012998; U.S. Pat. No. 5,908,635; and PCT Publication No. WO 01/72283), anionic liposomes (see, e.g., U.S. Patent Publication No. 20030026831), pH-sensitive liposomes (see, e.g., U.S. Patent Publication No. 20020192274; and AU 2003210303), antibody-coated liposomes (see, e.g., U.S. Patent Publication No. 20030108597; and PCT Publication No. WO 00/50008), cell-type specific liposomes (see, e.g., U.S. Patent Publication No. 20030198664), liposomes containing nucleic acid and peptides (see, e.g., U.S. Pat. No. 6,207,456), liposomes containing lipids derivatized with releasable hydrophilic polymers (see, e.g., U.S. Patent Publication No. 20030031704), lipid-entrapped nucleic acid (see, e.g., PCT Publication Nos. WO 03/057190 and WO 03/059322), lipid-encapsulated nucleic acid (see, e.g., U.S. Patent Publication No. 20030129221; and U.S. Pat. No. 5,756,122), other liposomal compositions (see, e.g., U.S. Patent Publication Nos. 20030035829 and 20030072794; and U.S. Pat. No. 6,200,599), stabilized mixtures of liposomes and emulsions (see, e.g., EP1304160), emulsion compositions (see, e.g., U.S. Pat. No. 6,747,014), and nucleic acid micro-emulsions (see, e.g., U.S. Patent Publication No. 20050037086).

[0182] Examples of polymer-based carrier systems suitable for use in the present invention include, but are not limited to, cationic polymer-nucleic acid complexes (i.e., polyplexes). To form a polyplex, a nucleic acid (e.g., siRNA) is typically complexed with a cationic polymer having a linear, branched, star, or dendritic polymeric structure that condenses the nucleic acid into positively charged particles capable of interacting with anionic proteoglycans at the cell surface and entering cells by endocytosis. In some embodiments, the polyplex comprises nucleic acid (e.g., siRNA) complexed with a cationic polymer such as polyethylenimine (PEI) (see, e.g., U.S. Pat. No. 6,013,240; commercially available from Qbiogene, Inc. (Carlsbad, Calif.) as In vivo jetPEI™, a linear form of PEI), polypropylenimine (PPI), polyvinylpyrrolidone (PVP), poly-L-lysine (PLL), diethylaminoethyl (DEAE)-dextran, poly(β-amino ester) (PAE) polymers (see, e.g., Lynn et al., J. Am. Chem. Soc., 123:8155-8156 (2001)), chitosan, polyamidoamine (PAMAM) dendrimers (see, e.g., Kukowska-Latallo et al., Proc. Natl. Acad. Sci. USA, 93:4897-4902 (1996)), porphyrin (see, e.g., U.S. Pat. No. 6,620,805), polyvinylether (see, e.g., U.S. Patent Publication No. 20040156909), polycyclic amidinium (see, e.g., U.S. Patent Publication No. 20030220289), other polymers comprising primary amine, imine, guanidine, and/or imidazole groups (see, e.g., U.S. Pat. No. 6,013,240; PCT Publication No. WO/9602655; PCT Publication No. WO95/21931; Zhang et al., J. Control Release, 100:165-180 (2004); and Tiera et al., Curr. Gene Ther., 6:59-71 (2006)), and a mixture thereof. In other embodiments, the polyplex comprises cationic polymer-nucleic acid complexes as described in U.S. Patent Publication Nos. 20060211643, 20050222064, 20030125281, and 20030185890, and PCT Publication No. WO 03/066069; biodegradable poly(β-amino ester) polymer-nucleic acid complexes as described in U.S. Patent Publication No. 20040071654; microparticles containing polymeric matrices as described in U.S. Patent Publication No. 20040142475; other microparticle compositions as described in U.S. Patent Publication No. 20030157030; condensed nucleic acid complexes as described in U.S. Patent Publication No. 20050123600; and nanocapsule and microcapsule compositions as described in AU 2002358514 and PCT Publication No. WO 02/096551.

[0183] In certain instances, the nucleic acid (e.g., siRNA) may be complexed with cyclodextrin or a polymer thereof. Non-limiting examples of cyclodextrin-based carrier systems include the cyclodextrin-modified polymer-nucleic acid complexes described in U.S. Patent Publication No. 20040087024; the linear cyclodextrin copolymer-nucleic acid complexes described in U.S. Pat. Nos. 6,509,323, 6,884,789, and 7,091,192; and the cyclodextrin polymer-complexing agent-nucleic acid complexes described in U.S. Pat. No. 7,018,609. In certain other instances, the nucleic acid (e.g., siRNA) may be complexed with a peptide or polypeptide. An example of a protein-based carrier system includes, but is not limited to, the cationic oligopeptide-nucleic acid complex described in PCT Publication No. WO95/21931.

### VI. Preparation of SNALPs

[0184] The present invention provides a method of preparing serum-stable nucleic acid-lipid particles in which the siRNA, plasmid or other nucleic acid is encapsulated in a lipid bilayer and is protected from degradation. The particles made by the methods of this invention typically have a size of about 50 nm to about 150 nm, about 60 nm to about 130 nm, about 70 nm to about 110 nm, or about 70 to about 90 nm. The particles can be formed by any method known in the art including, but not limited to: a continuous mixing method, a detergent dialysis method, or a modification of a reverse-phase method which utilizes organic solvents to provide a single phase during mixing of the components.

[0185] In preferred embodiments, the cationic lipids are lipids of Formula I and II or combinations thereof. In other preferred embodiments, the noncationic lipids are ESM, DOPE, DOPC, DPPE, DMPE, 16:0 Monomethyl Phosphatidylethanolamine, 16:0 Dimethyl Phosphatidylethanolamine, 18:1 Trans Phosphatidylethanolamine, 18:0 18:1 Phosphatidylethanolamine (SOPE), 1,2-dielaidoyl-sn-glycero-3-phophoethanolamine (transDOPE), 16:0 18:1 Phosphatidylethanolamine, DSPE, polyethylene glycol-based polymers (e.g., PEG 2000, PEG 5000, PEG-modified diacylglycerols, or PEG-modified dialkyloxypropyls), distearoylphosphatidylcholine (DSPC), cholesterol, or combinations thereof. In still other preferred embodiments, the organic solvents are methanol, chloroform, methylene chloride, ethanol, diethyl ether or combinations thereof.

[0186] In a particularly preferred embodiment, the nucleic acid is an siRNA molecule; the cationic lipid is a lipid of Formula I or II or combinations thereof; the noncationic lipid is ESM, DOPE, PEG-DAAs, distearoylphosphatidylcholine (DSPC), cholesterol, or combinations thereof (e.g. DSPC and PEG-DAAs); and the organic solvent is methanol, chloroform, methylene chloride, ethanol, diethyl ether or combinations thereof.

[0187] In a particularly preferred embodiment, the present invention provides for nucleic acid-lipid particles produced via a continuous mixing method, e.g., process that includes providing an aqueous solution comprising a nucleic acid such as an siRNA or a plasmid, in a first reservoir, and providing an organic lipid solution in a second reservoir, and mixing the aqueous solution with the organic lipid solution such that the organic lipid solution mixes with the aqueous solution so as to substantially instantaneously produce a liposome encapsulating the nucleic acid (e.g., siRNA). This process and the apparatus for carrying this process is described in detail in U.S. Patent Publication No. 20040142025.

[0188] The action of continuously introducing lipid and buffer solutions into a mixing environment, such as in a mixing chamber, causes a continuous dilution of the lipid solution with the buffer solution, thereby producing a liposome substantially instantaneously upon mixing. As used herein, the phrase “continuously diluting a lipid solution with a buffer solution” (and variations) generally means that the lipid solution is diluted sufficiently rapidly in a hydration process with sufficient force to effectuate vesicle generation. By mixing the aqueous solution comprising a nucleic acid with the organic lipid solution, the organic lipid solution undergoes a continuous stepwise dilution in the presence of the buffer solution (i.e., aqueous solution) to produce a nucleic acid-lipid particle.

[0189] In another embodiment, the present invention provides for nucleic acid-lipid particles produced via a direct dilution process that includes forming a liposome solution and immediately and directly introducing the liposome solution into a collection vessel containing a controlled amount of dilution buffer. In preferred aspects, the collection vessel includes one or more elements configured to stir the contents of the collection vessel to facilitate dilution. In one aspect, the amount of dilution buffer present in the collection vessel is substantially equal to the volume of liposome solution introduced thereto. As an example, liposome solution in 45% ethanol when introduced into the collection vessel containing an equal volume of aqueous solution will advantageously yield smaller particles in about 22.5%, about 20%, or about 15% ethanol.

[0190] In even another embodiment, the present invention provides for nucleic acid-lipid particles produced via a direct dilution process in which a third reservoir containing dilution buffer is fluidly coupled to a second mixing region. In this embodiment, the liposome solution formed in a first mixing region is immediately and directly mixed with dilution buffer in the second mixing region. In preferred aspects, the second mixing region includes a T-connector arranged so that the liposome solution and the dilution buffer flows meet as opposing 180° flows, however, connectors providing shallower angles can be used, e.g., 27° to about 180°. A pump mechanism delivers a controllable flow of buffer to the second mixing region. In one aspect, the flow rate of dilution buffer provided to the second mixing region is controlled to be substantially equal to the flow rate of liposome solution introduced thereto from the first mixing region. This embodiment advantageously allows for more control of the flow of dilution buffer mixing with the liposome solution in the second mixing region, and therefore also the concentration of liposome solution in buffer throughout the second mixing process. Such control of the dilution buffer flow rate advantageously allows for small particle size formation at reduced concentrations.

[0191] These processes and the apparati for carrying these direct dilution processes is described in detail in U.S. Provisional Patent Application No. 60/703,380 filed Jul. 27, 2005 (Systems and Methods for Manufacturing Liposomes, Attorney Docket No. 020801-005300US), which is incorporated herein by reference.

[0192] The serum-stable nucleic acid-lipid particles formed using the continuous mixing method typically have a size of from about 50 nm to about 150 nm, about 100 nm to about 130 nm, about 110 nm to about 115 nm, about 65 nm to about 95 nm, or about 50 nm to about 75 nm. The particles thus formed do not aggregate and are optionally sized to achieve a uniform particle size.

[0193] In some embodiments, the particles are formed using detergent dialysis. Without intending to be bound by any particular mechanism of formation, a plasmid or other nucleic acid (e.g., siRNA) is contacted with a detergent solution of cationic lipids to form a coated nucleic acid complex. These coated nucleic acids can aggregate and precipitate. However, the presence of a detergent reduces this aggregation and allows the coated nucleic acids to react with excess lipids (typically, non-cationic lipids) to form particles in which the plasmid or other nucleic acid is encapsulated in a lipid bilayer. Thus, the present invention provides a method for the preparation of serum-stable nucleic acid-lipid particles, comprising:
[0194] (a) combining a nucleic acid with cationic lipids in a detergent solution to form a coated nucleic acid-lipid complex;
[0195] (b) contacting non-cationic lipids with the coated nucleic acid-lipid complex to form a detergent solution comprising a nucleic acid-lipid complex and non-cationic lipids; and
[0196] (c) dialyzing the detergent solution of step (b) to provide a solution of serum-stable nucleic acid-lipid particles, wherein the nucleic acid is encapsulated in a lipid bilayer and the particles are serum-stable and have a size of from about 50 to about 150 nm.

[0197] An initial solution of coated nucleic acid-lipid complexes is formed by combining the nucleic acid with the cationic lipids in a detergent solution.

[0198] In these embodiments, the detergent solution is preferably an aqueous solution of a neutral detergent having a critical micelle concentration of 15-300 mM, more preferably 20-50 mM. Examples of suitable detergents include, for example, N,N′-((octanoylimino)-bis-(trimethylene))-bis-(D-gluconamide) (BIGCHAP); BRIJ 35; Deoxy-BIGCHAP; dodecylpoly(ethylene glycol) ether; Tween 20; Tween 40; Tween 60; Tween 80; Tween 85; Mega 8; Mega 9; Zwittergent® 3-08; Zwittergent® 3-10; Triton X-405; hexyl-, heptyl-, octyl- and nonyl-β-D-glucopyranoside; and heptylthioglucopyranoside; with octyl β-D-glucopyranoside and Tween-20 being the most preferred. The concentration of detergent in the detergent solution is typically about 100 mM to about 2 M, preferably from about 200 mM to about 1.5 M.

[0199] The cationic lipids and nucleic acids will typically be combined to produce a charge ratio (+/−) of about 1:1 to about 20:1, in a ratio of about 1:1 to about 12:1, or in a ratio of about 2:1 to about 6:1. Additionally, the overall concentration of nucleic acid in solution will typically be from about 25 μg/mL to about 1 mg/mL, from about 25 μg/mL to about 200 μg/mL, or from about 50 μg/mL to about 100 μg/mL. The combination of nucleic acids and cationic lipids in detergent solution is kept, typically at room temperature, for a period of time which is sufficient for the coated complexes to form. Alternatively, the nucleic acids and cationic lipids can be combined in the detergent solution and warmed to temperatures of up to about 37° C., about 50° C., about 60° C., or about 70° C. For nucleic acids which are particularly sensitive to temperature, the coated complexes can be formed at lower temperatures, typically down to about 4° C.

[0200] In some embodiments, the nucleic acid to lipid ratios (mass/mass ratios) in a formed nucleic acid-lipid particle will range from about 0.01 to about 0.2, from about 0.03 to about 0.01 or about 0.01 to about 0.08. The ratio of the starting materials also falls within this range. In another preferred embodiment, the nucleic acid-lipid particle preparation uses about 400 μg nucleic acid per 10 mg total lipid or a nucleic acid to lipid ratio of about 0.01 to about 0.08 or about 0.04, which corresponds to 1.25 mg of total lipid per 50 μg of nucleic acid.

[0201] The detergent solution of the coated nucleic acid-lipid complexes is then contacted with non-cationic lipids to provide a detergent solution of nucleic acid-lipid complexes and non-cationic lipids. The non-cationic lipids which are useful in this step include, diacylphosphatidylcholine, diacylphosphatidylethanolamine, ceramide, sphingomyelin, cephalin, cardiolipin, and cerebrosides. In preferred embodiments, the non-cationic lipids are diacylphosphatidylcholine, diacylphosphatidylethanolamine, ceramide or sphingomyelin. The acyl groups in these lipids are preferably acyl groups derived from fatty acids having C₁₀-C₂₄ carbon chains. More preferably the acyl groups are lauroyl, myristoyl, palmitoyl, stearoyl or oleoyl. In particularly preferred embodiments, the non-cationic lipid will be 1,2-sn-dioleoylphosphatidylethanolamine (DOPE), palmitoyl oleoyl phosphatidylcholine (POPC), egg phosphatidylcholine (EPC), distearoylphosphatidylcholine (DSPC), cholesterol, or a mixture thereof. In the most preferred embodiments, the nucleic acid-lipid particles will be fusogenic particles with enhanced properties in vivo and the non-cationic lipid will be DSPC or DOPE. In addition, the nucleic acid-lipid particles of the present invention may further comprise cholesterol. In other preferred embodiments, the non-cationic lipids will further comprise polyethylene glycol-based polymers such as PEG 2000, PEG 5000 and polyethylene glycol conjugated to a diacylglycerol, a ceramide or a phospholipid, as described in U.S. Pat. No. 5,820,873 and U.S. Patent Publication No. 20030077829. In further preferred embodiments, the non-cationic lipids will further comprise polyethylene glycol-based polymers such as PEG 2000, PEG 5000 and polyethylene glycol conjugated to a dialkyloxypropyl.

[0202] Following formation of the detergent solution of nucleic acid-lipid complexes and non-cationic lipids, the detergent is removed, preferably by dialysis. The removal of the detergent results in the formation of a lipid-bilayer which surrounds the nucleic acid providing serum-stable nucleic acid-lipid particles which have a size of from about 50 nm to about 150 nm, more typically about 60 nm to about 130 nm, more typically about 70 nm to about 110 nm, most typically about 70 to about 90 nm. The particles thus formed do not aggregate and are optionally sized to achieve a uniform particle size.

[0203] The serum-stable nucleic acid-lipid particles can be sized by any of the methods available for sizing liposomes. The sizing may be conducted in order to achieve a desired size range and relatively narrow distribution of particle sizes.

[0204] Several techniques are available for sizing the particles to a desired size. One sizing method, used for liposomes and equally applicable to the present particles is described in U.S. Pat. No. 4,737,323. Sonicating a particle suspension either by bath or probe sonication produces a progressive size reduction down to particles of less than about 50 nm in size. Homogenization is another method which relies on shearing energy to fragment larger particles into smaller ones. In a typical homogenization procedure, particles are recirculated through a standard emulsion homogenizer until selected particle sizes, typically between about 60 and 80 nm, are observed. In both methods, the particle size distribution can be monitored by conventional laser-beam particle size discrimination, or QELS.

[0205] Extrusion of the particles through a small-pore polycarbonate membrane or an asymmetric ceramic membrane is also an effective method for reducing particle sizes to a relatively well-defined size distribution. Typically, the suspension is cycled through the membrane one or more times until the desired particle size distribution is achieved. The particles may be extruded through successively smaller-pore membranes, to achieve a gradual reduction in size.

[0206] In another group of embodiments, the present invention provides a method for the preparation of serum-stable nucleic acid-lipid particles, comprising:
[0207] (a) preparing a mixture comprising cationic lipids and non-cationic lipids in an organic solvent;
[0208] (b) contacting an aqueous solution of nucleic acid with said mixture in step (a) to provide a clear single phase; and
[0209] (c) removing said organic solvent to provide a suspension of nucleic acid-lipid particles, wherein said nucleic acid is encapsulated in a lipid bilayer, and said particles are stable in serum and have a size of from about 50 to about 150 nm.

[0210] The nucleic acids (or plasmids), cationic lipids and non-cationic lipids which are useful in this group of embodiments are as described for the detergent dialysis methods above.

[0211] The selection of an organic solvent will typically involve consideration of solvent polarity and the ease with which the solvent can be removed at the later stages of particle formation. The organic solvent, which is also used as a solubilizing agent, is in an amount sufficient to provide a clear single phase mixture of nucleic acid and lipids. Suitable solvents include, but are not limited to, chloroform, dichloromethane, diethylether, cyclohexane, cyclopentane, benzene, toluene, methanol, or other aliphatic alcohols such as propanol, isopropanol, butanol, tert-butanol, iso-butanol, pentanol and hexanol. Combinations of two or more solvents may also be used in the present invention.

[0212] Contacting the nucleic acid with the organic solution of cationic and non-cationic lipids is accomplished by mixing together a first solution of nucleic acid, which is typically an aqueous solution, and a second organic solution of the lipids. One of skill in the art will understand that this mixing can take place by any number of methods, for example by mechanical means such as by using vortex mixers.

[0213] After the nucleic acid has been contacted with the organic solution of lipids, the organic solvent is removed, thus forming an aqueous suspension of serum-stable nucleic acid-lipid particles. The methods used to remove the organic solvent will typically involve evaporation at reduced pressures or blowing a stream of inert gas (e.g., nitrogen or argon) across the mixture.

[0214] The serum-stable nucleic acid-lipid particles thus formed will typically be sized from about 50 nm to about 150 nm, more typically about 60 nm to about 130 nm, more typically about 70 nm to about 110 nm, most typically about 70 to about 90 nm. To achieve further size reduction or homogeneity of size in the particles, sizing can be conducted as described above.

[0215] In other embodiments, the methods will further comprise adding nonlipid polycations which are useful to effect the delivery to cells using the present compositions. Examples of suitable nonlipid polycations include, but are limited to, hexadimethrine bromide (sold under the brandname POLYBRENE®, from Aldrich Chemical Co., Milwaukee, Wis., USA) or other salts of heaxadimethrine. Other suitable polycations include, for example, salts of poly-L-ornithine, poly-L-arginine, poly-L-lysine, poly-D-lysine, polyallylamine and polyethyleneimine.

[0216] In certain embodiments, the formation of the nucleic acid-lipid particles can be carried out either in a mono-phase system (e.g., a Bligh and Dyer monophase or similar mixture of aqueous and organic solvents) or in a two-phase system with suitable mixing.

[0217] When formation of the complexes is carried out in a mono-phase system, the cationic lipids and nucleic acids are each dissolved in a volume of the mono-phase mixture. Combination of the two solutions provides a single mixture in which the complexes form. Alternatively, the complexes can form in two-phase mixtures in which the cationic lipids bind to the nucleic acid (which is present in the aqueous phase), and “pull” it into the organic phase.

[0218] In another embodiment, the present invention provides a method for the preparation of nucleic acid-lipid particles, comprising:
[0219] (a) contacting nucleic acids with a solution comprising non-cationic lipids and a detergent to form a nucleic acid-lipid mixture;
[0220] (b) contacting cationic lipids with the nucleic acid-lipid mixture to neutralize a portion of the negative charge of the nucleic acids and form a charge-neutralized mixture of nucleic acids and lipids; and
[0221] (c) removing the detergent from the charge-neutralized mixture to provide the nucleic acid-lipid particles in which the nucleic acids are protected from degradation.

[0222] In one group of embodiments, the solution of non-cationic lipids and detergent is an aqueous solution. Contacting the nucleic acids with the solution of non-cationic lipids and detergent is typically accomplished by mixing together a first solution of nucleic acids and a second solution of the lipids and detergent. One of skill in the art will understand that this mixing can take place by any number of methods, for example, by mechanical means such as by using vortex mixers. Preferably, the nucleic acid solution is also a detergent solution. The amount of non-cationic lipid which is used in the present method is typically determined based on the amount of cationic lipid used, and is typically of from about 0.2 to 5 times the amount of cationic lipid, preferably from about 0.5 to about 2 times the amount of cationic lipid used.

[0223] In some embodiments, the nucleic acids are precondensed as described in, e.g., U.S. patent application Ser. No. 09/744,103.

[0224] The nucleic acid-lipid mixture thus formed is contacted with cationic lipids to neutralize a portion of the negative charge which is associated with the nucleic acids (or other polyanionic materials) present. The amount of cationic lipids used will typically be sufficient to neutralize at least 50% of the negative charge of the nucleic acid. Preferably, the negative charge will be at least 70% neutralized, more preferably at least 90% neutralized. Cationic lipids which are useful in the present invention, include, for example, DLinDMA and, DLenDMA. These lipids and related analogs have been described in U.S. patent application Ser. No. 11/148,430, filed Jun. 7, 2005.

[0225] Contacting the cationic lipids with the nucleic acid-lipid mixture can be accomplished by any of a number of techniques, preferably by mixing together a solution of the cationic lipid and a solution containing the nucleic acid-lipid mixture. Upon mixing the two solutions (or contacting in any other manner), a portion of the negative charge associated with the nucleic acid is neutralized. Nevertheless, the nucleic acid remains in an uncondensed state and acquires hydrophilic characteristics.

[0226] After the cationic lipids have been contacted with the nucleic acid-lipid mixture, the detergent (or combination of detergent and organic solvent) is removed, thus forming the nucleic acid-lipid particles. The methods used to remove the detergent will typically involve dialysis. When organic solvents are present, removal is typically accomplished by evaporation at reduced pressures or by blowing a stream of inert gas (e.g., nitrogen or argon) across the mixture.

[0227] The particles thus formed will typically be sized from about 50 nm to several microns, more typically about 50 nm to about 150 nm, more typically about 60 nm to about 130 nm, more typically about 70 nm to about 110 nm, most typically about 70 to about 90 nm. To achieve further size reduction or homogeneity of size in the particles, the nucleic acid-lipid particles can be sonicated, filtered or subjected to other sizing techniques which are used in liposomal formulations and are known to those of skill in the art.

[0228] In other embodiments, the methods will further comprise adding nonlipid polycations which are useful to effect the lipofection of cells using the present compositions. Examples of suitable nonlipid polycations include, hexadimethrine bromide (sold under the brandname POLYBRENE®, from Aldrich Chemical Co., Milwaukee, Wis., USA) or other salts of hexadimethrine. Other suitable polycations include, for example, salts of poly-L-ornithine, poly-L-arginine, poly-L-lysine, poly-D-lysine, polyallylamine and polyethyleneimine. Addition of these salts is preferably after the particles have been formed.

[0229] In another aspect, the present invention provides methods for the preparation of nucleic acid-lipid particles, comprising:
[0230] (a) contacting an amount of cationic lipids with nucleic acids in a solution; the solution comprising from about 15-35% water and about 65-85% organic solvent and the amount of cationic lipids being sufficient to produce a +/−charge ratio of from about 0.85 to about 2.0, to provide a hydrophobic nucleic acid-lipid complex;
[0231] (b) contacting the hydrophobic, nucleic acid-lipid complex in solution with non-cationic lipids, to provide a nucleic acid-lipid mixture; and
[0232] (c) removing the organic solvents from the nucleic acid-lipid mixture to provide nucleic acid-lipid particles in which the nucleic acids are protected from degradation.

[0233] The nucleic acids, non-cationic lipids, cationic lipids and organic solvents which are useful in this aspect of the invention are the same as those described for the methods above which used detergents. In one group of embodiments, the solution of step (a) is a mono-phase. In another group of embodiments, the solution of step (a) is two-phase.

[0234] In preferred embodiments, the non-cationic lipids are ESM, DOPE, DOPC, polyethylene glycol-based polymers (e.g., PEG 2000, PEG 5000, PEG-modified diacylglycerols, or PEG-modified dialkyloxypropyls), distearoylphosphatidylcholine (DSPC), DPPE, DMPE, 16:0 Monomethyl Phosphatidylethanolamine, 16:0 Dimethyl Phosphatidylethanolamine, 18:1 Trans Phosphatidylethanolamine, 18:0 18:1 Phosphatidylethanolamine (SOPE), 1,2-dielaidoyl-sn-glycero-3-phophoethanolamine (transDOPE), 16:0 18:1 Phosphatidylethanolamine, DSPE, cholesterol, or combinations thereof. In still other preferred embodiments, the organic solvents are methanol, chloroform, methylene chloride, ethanol, diethyl ether or combinations thereof.

[0235] In one embodiment, the nucleic acid is a plasmid from which an interfering RNA is transcribed; the cationic lipid is DLinDMA, DLenDMA, DODAC, DDAB, DOTMA, DOSPA, DMRIE, DOGS or combinations thereof; the non-cationic lipid is ESM, DOPE, DAG-PEGs, distearoylphosphatidylcholine (DSPC), DPPE, DMPE, 16:0 Monomethyl Phosphatidylethanolamine, 16:0 Dimethyl Phosphatidylethanolamine, 18:1 Trans Phosphatidylethanolamine, 18:0 18:1 Phosphatidylethanolamine (SOPE), 1,2-dielaidoyl-sn-glycero-3-phophoethanolamine (transDOPE), 16:0 18:1 Phosphatidylethanolamine DSPE, cholesterol, or combinations thereof (e.g. DSPC and PEG-DAA); and the organic solvent is methanol, chloroform, methylene chloride, ethanol, diethyl ether or combinations thereof.

[0236] As above, contacting the nucleic acids with the cationic lipids is typically accomplished by mixing together a first solution of nucleic acids and a second solution of the lipids, preferably by mechanical means such as by using vortex mixers. The resulting mixture contains complexes as described above. These complexes are then converted to particles by the addition of non-cationic lipids and the removal of the organic solvent. The addition of the non-cationic lipids is typically accomplished by simply adding a solution of the non-cationic lipids to the mixture containing the complexes. A reverse addition can also be used. Subsequent removal of organic solvents can be accomplished by methods known to those of skill in the art and also described above.

[0237] The amount of non-cationic lipids which is used in this aspect of the invention is typically an amount of from about 0.2 to about 15 times the amount (on a mole basis) of cationic lipids which was used to provide the charge-neutralized nucleic acid-lipid complex. Preferably, the amount is from about 0.5 to about 9 times the amount of cationic lipids used.

[0238] In yet another aspect, the present invention provides nucleic acid-lipid particles which are prepared by the methods described above. In these embodiments, the nucleic acid-lipid particles are either net charge neutral or carry an overall charge which provides the particles with greater gene lipofection activity. Preferably, the nucleic acid component of the particles is a nucleic acid which interferes with the production of an undesired protein. In some embodiments, the nucleic acid comprises an interfering RNA, the non-cationic lipid is egg sphingomyelin and the cationic lipid is DLinDMA or DLenDMA. In some embodiments, the nucleic acid comprises an interfering RNA, the non-cationic lipid is a mixture of DSPC and cholesterol, and the cationic lipid is DLinDMA or DLenDMA. In other preferred embodiments, the non-cationic lipid may further comprise cholesterol.

[0239] A variety of general methods for making SNALP-CPLs (CPL-containing SNALPs) are discussed herein. Two general techniques include “post-insertion” technique, that is, insertion of a CPL into for example, a pre-formed SNALP, and the “standard” technique, wherein the CPL is included in the lipid mixture during for example, the SNALP formation steps. The post-insertion technique results in SNALPs having CPLs mainly in the external face of the SNALP bilayer membrane, whereas standard techniques provide SNALPs having CPLs on both internal and external faces. The method is especially useful for vesicles made from phospholipids (which can contain cholesterol) and also for vesicles containing PEG-lipids (such as PEG-DAAs and PEG-DAGs). Methods of making SNALP-CPL, are taught, for example, in U.S. Pat. Nos. 5,705,385, 6,586,410, 5,981,501 6,534,484; 6,852,334; U.S. Patent Publication No. 20020072121; and WO 00/62813.

### VII. Kits

[0240] The present invention also provides nucleic acid-lipid particles in kit form. The kit will typically be comprised of a container which is compartmentalized for holding the various elements of the nucleic acid-lipid particles. The kit will contain the compositions of the present inventions, preferably in dehydrated form, with instructions for their rehydration and administration. In still other embodiments, the particles and/or compositions comprising the particles will have a targeting moiety attached to the surface of the particle. Methods of attaching targeting moieties (e.g., antibodies, proteins) to lipids (such as those used in the present particles) are known to those of skill in the art.

### VIII. Administration of Nucleic Acid-Lipid Particles

[0241] Once formed, the serum-stable nucleic acid-lipid particles of the present invention are useful for the introduction of nucleic acids (i.e., siRNA that silences expression of gene expressed in cancer such as an Eg5, EGFR and/or XIAP gene) into cells. Accordingly, the present invention also provides methods for introducing a nucleic acids (e.g., a plasmid or and siRNA) into a cell. The methods are carried out in vitro or in vivo by first forming the particles as described above and then contacting the particles with the cells for a period of time sufficient for delivery of the nucleic acid to the cell to occur.

[0242] The nucleic acid-lipid particles of the present invention can be adsorbed to almost any cell type with which they are mixed or contacted. Once adsorbed, the particles can either be endocytosed by a portion of the cells, exchange lipids with cell membranes, or fuse with the cells. Transfer or incorporation of the nucleic acid portion of the particle can take place via any one of these pathways. In particular, when fusion takes place, the particle membrane is integrated into the cell membrane and the contents of the particle combine with the intracellular fluid.

[0243] The nucleic acid-lipid particles of the present invention can be administered either alone or in mixture with a physiologically-acceptable carrier (such as physiological saline or phosphate buffer) selected in accordance with the route of administration and standard pharmaceutical practice. Generally, normal saline will be employed as the pharmaceutically acceptable carrier. Other suitable carriers include, e.g., water, buffered water, 0.4% saline, 0.3% glycine, and the like, including glycoproteins for enhanced stability, such as albumin, lipoprotein, globulin, etc.

[0244] The pharmaceutical carrier is generally added following particle formation. Thus, after the particle is formed, the particle can be diluted into pharmaceutically acceptable carriers such as normal saline.

[0245] The concentration of particles in the pharmaceutical formulations can vary widely, i.e., from less than about 0.05%, usually at or at least about 2-5% to as much as 10 to 30% by weight and will be selected primarily by fluid volumes, viscosities, etc., in accordance with the particular mode of administration selected. For example, the concentration may be increased to lower the fluid load associated with treatment. This may be particularly desirable in patients having atherosclerosis-associated congestive heart failure or severe hypertension. Alternatively, particles composed of irritating lipids may be diluted to low concentrations to lessen inflammation at the site of administration.

[0246] The pharmaceutical compositions of the present invention may be sterilized by conventional, well known sterilization techniques. Aqueous solutions can be packaged for use or filtered under aseptic conditions and lyophilized, the lyophilized preparation being combined with a sterile aqueous solution prior to administration. The compositions can contain pharmaceutically acceptable auxiliary substances as required to approximate physiological conditions, such as pH adjusting and buffering agents, tonicity adjusting agents and the like, for example, sodium acetate, sodium lactate, sodium chloride, potassium chloride, and calcium chloride. Additionally, the particle suspension may include lipid-protective agents which protect lipids against free-radical and lipid-peroxidative damages on storage. Lipophilic free-radical quenchers, such as alphatocopherol and water-soluble iron-specific chelators, such as ferrioxamine, are suitable.

[0247] The nucleic acid-lipid particles can be incorporated into a broad range of topical dosage forms including, but not limited to, gels, oils, emulsions, topical creams, pastes, ointments, lotions and the like.

[0248] A. In Vivo Administration

[0249] Systemic delivery for in vivo therapy, i.e., delivery of a therapeutic nucleic acid to a distal target cell via body systems such as the circulation, has been achieved using nucleic acid-lipid particles such as those disclosed in WO 96/40964 and U.S. Pat. Nos. 5,705,385, 5,976,567, 5,981,501 and 6,410,328. This latter format provides a fully encapsulated nucleic acid-lipid particle that protects the nucleic acid from nuclease degradation in serum, is nonimmunogenic, is small in size and is suitable for repeat dosing.

[0250] For in vivo administration, administration can be in any manner known in the art, e.g., by injection, oral administration, inhalation (e.g., intransal or intratracheal), transdermal application, or rectal administration. Administration can be accomplished via single or divided doses. The pharmaceutical compositions can be administered parenterally, i.e., intraarticularly, intravenously, intraperitoneally, subcutaneously, intramuscularly, or intratumorally. In some embodiments, the pharmaceutical compositions are administered intravenously or intraperitoneally by a bolus injection (see, e.g., Stadler, et al., U.S. Pat. No. 5,286,634) or by pump infusion. Intracellular nucleic acid delivery has also been discussed in Straubringer, et al., Methods Enzymol, Academic Press, New York. 101:512 (1983); Mannino, et al., Biotechniques 6:682 (1988); Nicolau, et al., Crit. Rev. Ther. Drug Carrier Syst. 6:239 (1989), and Behr, Acc. Chem. Res. 26:274 (1993). Still other methods of administering lipid based therapeutics are described in, for example, Rahman et al., U.S. Pat. No. 3,993,754; Sears, U.S. Pat. No. 4,145,410; Papahadjopoulos et al., U.S. Pat. No. 4,235,871; Schneider, U.S. Pat. No. 4,224,179; Lenk et al., U.S. Pat. No. 4,522,803; and Fountain et al., U.S. Pat. No. 4,588,578. The lipid nucleic acid particles can be administered by direct injection at the site of disease or by injection at a site distal from the site of disease (see, e.g., Culver, HUMAN GENE THERAPY, MaryAnn Liebert, Inc., Publishers, New York. pp. 70-71 (1994)).

[0251] The compositions of the present invention, either alone or in combination with other suitable components, can be made into aerosol formulations (i.e., they can be “nebulized”) to be administered via inhalation (e.g., intranasally or intratracheally) (see, Brigham, et al., Am. J. Sci. 298(4):278 (1989)). Aerosol formulations can be placed into pressurized acceptable propellants, such as dichlorodifluoromethane, propane, nitrogen, and the like.

[0252] Formulations suitable for parenteral administration, such as, for example, by intraarticular (in the joints), intravenous, intramuscular, intradermal, intraperitoneal, and subcutaneous routes, include aqueous and non-aqueous, isotonic sterile injection solutions, which can contain antioxidants, buffers, bacteriostats, and solutes that render the formulation isotonic with the blood of the intended recipient, and aqueous and non-aqueous sterile suspensions that can include suspending agents, solubilizers, thickening agents, stabilizers, and preservatives. In the practice of this invention, compositions can be administered, for example, by intravenous infusion, orally, topically, intraperitoneally, intravesically or intrathecally.

[0253] Formulations suitable for oral administration can consist of (a) liquid solutions, such as an effective amount of the packaged nucleic acid suspended in diluents, such as water, saline or PEG 400; (b) capsules, sachets or tablets, each containing a predetermined amount of the active ingredient, as liquids, solids, granules or gelatin; (c) suspensions in an appropriate liquid; and (d) suitable emulsions. Tablet forms can include one or more of lactose, sucrose, mannitol, sorbitol, calcium phosphates, corn starch, potato starch, microcrystalline cellulose, gelatin, colloidal silicon dioxide, talc, magnesium stearate, stearic acid, and other excipients, colorants, fillers, binders, diluents, buffering agents, moistening agents, preservatives, flavoring agents, dyes, disintegrating agents, and pharmaceutically compatible carriers. Lozenge forms can comprise the active ingredient in a flavor, e.g., sucrose, as well as pastilles comprising the active ingredient in an inert base, such as gelatin and glycerin or sucrose and acacia emulsions, gels, and the like containing, in addition to the active ingredient, carriers known in the art.

[0254] Generally, when administered intravenously, the nucleic acid-lipid formulations are formulated with a suitable pharmaceutical carrier. Many pharmaceutically acceptable carriers may be employed in the compositions and methods of the present invention. Suitable formulations for use in the present invention are found, for example, in REMINGTON'S PHARMACEUTICAL SCIENCES, Mack Publishing Company, Philadelphia, Pa., 17th ed. (1985). A variety of aqueous carriers may be used, for example, water, buffered water, 0.4% saline, 0.3% glycine, and the like, and may include glycoproteins for enhanced stability, such as albumin, lipoprotein, globulin, etc. Generally, normal buffered saline (135-150 mM NaCl) will be employed as the pharmaceutically acceptable carrier, but other suitable carriers will suffice. These compositions can be sterilized by conventional liposomal sterilization techniques, such as filtration. The compositions may contain pharmaceutically acceptable auxiliary substances as required to approximate physiological conditions, such as pH adjusting and buffering agents, tonicity adjusting agents, wetting agents and the like, for example, sodium acetate, sodium lactate, sodium chloride, potassium chloride, calcium chloride, sorbitan monolaurate, triethanolamine oleate, etc. These compositions can be sterilized using the techniques referred to above or, alternatively, they can be produced under sterile conditions. The resulting aqueous solutions may be packaged for use or filtered under aseptic conditions and lyophilized, the lyophilized preparation being combined with a sterile aqueous solution prior to administration.

[0255] The methods of the present invention may be practiced in a variety of hosts. Preferred hosts include mammalian species, such as primates (e.g., humans and chimpanzees as well as other nonhuman primates), canines, felines, equines, bovines, ovines, caprines, rodents (e.g., rats and mice), lagomorphs, and swine.

[0256] The amount of particles administered will depend upon the ratio of nucleic acid to lipid; the particular nucleic acid used, the disease state being diagnosed; the age, weight, and condition of the patient and the judgment of the clinician; but will generally be between about 0.01 and about 50 mg per kilogram of body weight; preferably between about 0.1 and about 5 mg/kg of body weight or about 10⁸-10¹⁰ particles per injection.

[0257] B. Combination Therapy

[0258] In some embodiments, the nucleic acid-lipid particles described herein are administered in combination with a second therapeutic agent for treating or preventing cancer. For example, the nucleic acid-lipid particles may be administered in conjunction with any of the standard treatments for cancer including, but not limited to, chemotherapeutic agents including, e.g., alitretinoin, altretamine, anastrozole, azathioprine, bicalutamide, busulfan, capecitabine, carboplatin, cisplatin, cyclophosphamide, cytarabine, doxorubicin, epirubicin, etoposide, exemestane, finasteride, fluorouracil, fulvestrant, gemtuzumab, ozogamicin, hydroxyurea, ibritumomab, idarubicin, ifosfamide, imatinib, letrozole, megestrol acetate, methotrexate, mifepristone, paclitaxel, rituximab, tamoxifen, temozolomide, tretinoin, triptorelin, vincristine, or vinorelbine, and radiation treatment.

[0259] The nucleic acid-lipid particles and the second therapeutic agent may be administered simultaneously or sequentially. For example, the nucleic acid-lipid particles may be administered first, followed by the second therapeutic agent. Alternatively, the second therapeutic agent may be administered first, followed by the nucleic acid-lipid particles. In some cases, the nucleic acid-lipid particles and the second therapeutic agent are administered in the same formulation. In other cases the nucleic acid-lipid particles and nucleic acids and the second therapeutic agent are administered in different formulations.

[0260] C. Cells for Delivery of Interfering RNA

[0261] The compositions and methods of the present invention are used to treat a wide variety of cell types, in vivo and in vitro. Suitable cells include, e.g., hematopoietic precursor (stem) cells, fibroblasts, keratinocytes, hepatocytes, endothelial cells, skeletal and smooth muscle cells, osteoblasts, neurons, quiescent lymphocytes, terminally differentiated cells, slow or noncycling primary cells, parenchymal cells, lymphoid cells, epithelial cells, bone cells, and the like.

[0262] In vivo delivery of nucleic acid-lipid particles encapsulating an interfering RNA is particularly suited for targeting tumor cells of any cell type. In vivo studies show that SNALP's accumulate at tumor sites and predominantly transfect tumor cells. See, Fenske, et al., Methods Enzymol, Academic Press, New York 346:36 (2002). The methods and compositions can be employed with cells of a wide variety of vertebrates, including mammals, and especially those of veterinary importance, e.g, canine, feline, equine, bovine, ovine, caprine, rodent, lagomorph, swine, etc., in addition to human cell populations.

[0263] To the extent that tissue culture of cells may be required, it is well known in the art. Freshney (1994) (Culture of Animal Cells, a Manual of Basic Technique, third edition Wiley-Liss, New York), Kuchler et al. (1977) Biochemical Methods in Cell Culture and Virology, Kuchler, R. J., Dowden, Hutchinson and Ross, Inc., and the references cited therein provides a general guide to the culture of cells. Cultured cell systems often will be in the form of monolayers of cells, although cell suspensions are also used.

[0264] D. Detection of SNALPs

[0265] In some embodiments, the nucleic acid-lipid particles are detectable in the subject 8, 12, 24, 48, 60, 72, or 96 hours, 6, 8, 10, 12, 14, 16, 18, 19, 22, 24, 25, or 28 days after administration of the particles. The presence of the particles can be detected in the cells, tissues, or other biological samples from the subject. The particles may be detected, e.g., by direct detection of the particles, detection of the interfering RNA sequence, detection of the target sequence of interest (i.e., by detecting expression or reduced expression of the Eg5, EGFR and/or XIAP sequence of interest), detection of a target protein of interest (e.g., by detecting expression or reduced expression of Eg5, EGFR and/or XIAP protein), detection of a compound modulated directly or indirectly by the Eg5, EGFR and/or XIAP (e.g., tubulin, phosphor-histones, P13 kinase-AKT, STATS, caspases) or by detection of apoptosis and cell viability in the subject or a combination thereof.

[0266] 1. Detection of Particles

[0267] Nucleic acid-lipid particles can be detected using any methods known in the art. For example, a label can be coupled directly or indirectly to a component of the SNALP or other lipid-based carrier system using methods well known in the art. A wide variety of labels can be used, with the choice of label depending on sensitivity required, ease of conjugation with the SNALP component, stability requirements, and available instrumentation and disposal provisions. Suitable labels include, but are not limited to, spectral labels, such as fluorescent dyes (e.g., fluorescein and derivatives, such as fluorescein isothiocyanate (FITC) and Oregon Green™; rhodamine and derivatives, such Texas red, tetrarhodimine isothiocynate (TRITC), etc., digoxigenin, biotin, phycoerythrin, AMCA, CyDyes™, and the like; radiolabels, such as ³H, ¹²⁵I, ³⁵S, ¹⁴C, ³²P, ³³P etc.; enzymes, such as horse radish peroxidase, alkaline phosphatase, etc.; spectral colorimetric labels, such as colloidal gold or colored glass or plastic beads, such as polystyrene, polypropylene, latex, etc. The label can be detected using any means known in the art.

[0268] 2. Detection of Nucleic Acids

[0269] Nucleic acids (i.e., siRNA that silence expression of an Eg5, EGFR and/or XIAP gene) are detected and quantified herein by any of a number of means well known to those of skill in the art. The detection of nucleic acids proceeds by well known methods such as Southern analysis, northern analysis, gel electrophoresis, PCR, radiolabeling, scintillation counting, and affinity chromatography. Additional analytic biochemical methods such as spectrophotometry, radiography, electrophoresis, capillary electrophoresis, high performance liquid chromatography (HPLC), thin layer chromatography (TLC), hyperdiffusion chromatography, may also be employed

[0270] The selection of a nucleic acid hybridization format is not critical. A variety of nucleic acid hybridization formats are known to those skilled in the art. For example, common formats include sandwich assays and competition or displacement assays. Hybridization techniques are generally described in “Nucleic Acid Hybridization, A Practical Approach,” Ed. Hames, B. D. and Higgins, S. J., IRL Press, 1985.

[0271] The sensitivity of the hybridization assays may be enhanced through use of a nucleic acid amplification system which multiplies the target nucleic acid being detected. In vitro amplification techniques suitable for amplifying sequences for use as molecular probes or for generating nucleic acid fragments for subsequent subcloning are known. Examples of techniques sufficient to direct persons of skill through such in vitro amplification methods, including the polymerase chain reaction (PCR) the ligase chain reaction (LCR), Qβ-replicase amplification and other RNA polymerase mediated techniques (e.g., NASBA™) are found in Sambrook, et al., In Molecular Cloning: A Laboratory Manual, Cold Spring Harbor Laboratory Press, 2000, and Ausubel et al., SHORT PROTOCOLS IN MOLECULAR BIOLOGY, eds., Current Protocols, a joint venture between Greene Publishing Associates, Inc. and John Wiley & Sons, Inc., (2002), as well as Mullis et al. (1987), U.S. Pat. No. 4,683,202; PCR Protocols A Guide to Methods and Applications (Innis et al. eds) Academic Press Inc. San Diego, Calif. (1990) (Innis); Arnheim & Levinson (Oct. 1, 1990), C&EN 36; The Journal Of NIH Research, 3:81 (1991); (Kwoh et al., Proc. Natl. Acad. Sci. USA, 86:1173 (1989); Guatelli et al., Proc. Natl. Acad. Sci. USA, 87:1874 (1990); Lomell et al., J. Clin. Chem., 35:1826 (1989); Landegren et al., Science, 241:1077 (1988); Van Brunt, Biotechnology, 8:291 (1990); Wu and Wallace, Gene, 4:560 (1989); Barringer et al., Gene, 89:117 (1990), and Sooknanan and Malek, Biotechnology, 13:563 (1995). Improved methods of cloning in vitro amplified nucleic acids are described in Wallace et al., U.S. Pat. No. 5,426,039. Other methods described in the art are the nucleic acid sequence based amplification (NASBA™, Cangene, Mississauga, Ontario) and Q Beta Replicase systems. These systems can be used to directly identify mutants where the PCR or LCR primers are designed to be extended or ligated only when a select sequence is present. Alternatively, the select sequences can be generally amplified using, for example, nonspecific PCR primers and the amplified target region later probed for a specific sequence indicative of a mutation.

[0272] Oligonucleotides for use as probes, e.g., in in vitro amplification methods, for use as gene probes, or as inhibitor components are typically synthesized chemically according to the solid phase phosphoramidite triester method described by Beaucage and Caruthers, Tetrahedron Letts., 22(20):1859 1862 (1981), e.g., using an automated synthesizer, as described in Needham VanDevanter et al., Nucleic Acids Res., 12:6159 (1984). Purification of oligonucleotides, where necessary, is typically performed by either native acrylamide gel electrophoresis or by anion exchange HPLC as described in Pearson and Regnier, J. Chrom., 255:137 149 (1983). The sequence of the synthetic oligonucleotides can be verified using the chemical degradation method of Maxam and Gilbert (1980) in Grossman and Moldave (eds.) Academic Press, New York, Methods in Enzymology, 65:499.

[0273] An alternative means for determining the level of transcription is in situ hybridization. In situ hybridization assays are well known and are generally described in Angerer et al., Methods Enzymol., 152:649 (1987). In an in situ hybridization assay cells are fixed to a solid support, typically a glass slide. If DNA is to be probed, the cells are denatured with heat or alkali. The cells are then contacted with a hybridization solution at a moderate temperature to permit annealing of specific probes that are labeled. The probes are preferably labeled with radioisotopes or fluorescent reporters.

[0274] E. Detection of an Immune Response

[0275] An immune response to induced by the siRNA (i.e., siRNA that silence expression of an Eg5, EGFR and/or XIAP gene) described herein can be long-lived and can be detected long after administration of the siRNA or nucleic acid-lipid particles containing the siRNA. An immune response to the siRNA can be detected by using immunoassays that detect the presence or absence of cytokines and growth factors e.g., produced by responder cells.

[0276] Suitable immunoassays include the double monoclonal antibody sandwich immunoassay technique of David et al. (U.S. Pat. No. 4,376,110); monoclonal-polyclonal antibody sandwich assays (Wide et al., in Kirkham and Hunter, eds., Radioimmunoassay Methods, E. and S. Livingstone, Edinburgh (1970)); the “western blot” method of Gordon et al. (U.S. Pat. No. 4,452,901); immunoprecipitation of labeled ligand (Brown et al. (1980) J. Biol. Chem. 255:4980-4983); enzyme-linked immunosorbent assays (ELISA) as described, for example, by Raines et al. (1982) J. Biol. Chem. 257:5154-5160; immunocytochemical techniques, including the use of fluorochromes (Brooks et al. (1980) Clin. Exp. Immunol. 39:477); and neutralization of activity (Bowen-Pope et al. (1984) Proc. Natl. Acad. Sci. USA 81:2396-2400). In addition to the immunoassays described above, a number of other immunoassays are available, including those described in U.S. Pat. Nos. 3,817,827; 3,850,752; 3,901,654; 3,935,074; 3,984,533; 3,996,345; 4,034,074; and 4,098,876.

[0277] Monoclonal antibodies that specifically bind cytokines and growth factors (e.g., Il-6, IL-12, TNF-α, IFN-α, and IFN-γ can be generated using methods known in the art (see, e.g., Kohler and Milstein, Nature 256: 495-497 (1975) and Harlow and Lane, ANTIBODIES, A LABORATORY MANUAL, Cold Spring Harbor Publication, New York (1999)). Generation of monoclonal antibodies has been previously described and can be accomplished by any means known in the art. (Buhring et al. in Hybridoma 1991, Vol. 10, No. 1, pp. 77-78). For example, an animal such as a guinea pig or rat, preferably a mouse is immunized with an immunogenic polypeptide, the antibody-producing cells, preferably splenic lymphocytes, are collected and fused to a stable, immortalized cell line, preferably a myeloma cell line, to produce hybridoma cells which are then isolated and cloned. (U.S. Pat. No. 6,156,882). In some methods, the monoclonal antibody is labeled to facilitate detection.

[0278] The invention will be described in greater detail by way of specific examples. The following examples are offered for illustrative purposes, and are not intended to limit the invention in any manner. Those of skill in the art will readily recognize a variety of noncritical parameters which can be changed or modified to yield essentially the same results.

### EXAMPLES

[0279] The following examples are provided to illustrate, but not to limit the claimed invention.

### Example 1

### Materials and Methods

[0280] siRNA:

[0281] All siRNA used in these studies were chemically synthesized by Protiva Biotherapeutics (Burnaby, BC), University of Calgary (Calgary, AB) or Dharmacon Inc. (Lafayette, Colo.). siRNA were desalted and annealed using standard procedures.

[0282] Lipid Encapsulation of siRNA:

[0283] Unless otherwise indicated, siRNAs were encapsulated into liposomes composed of the following lipids; synthetic cholesterol (Sigma, St. Louis, Mo.), the phospholipid DSPC (1,2-distearoyl-sn-glycero-3-phosphocholine; Avanti Polar Lipids, Alabaster, Ala.), the PEG-lipid PEG-cDMA (3-N-[(-Methoxy poly(ethylene glycol)2000)carbamoyl]-1,2-dimyrestyloxy-propylamine), and the cationic lipid DLinDMA (1,2-Dilinoleyloxy-3-(N,N-dimethyl)aminopropane) in the molar ratios 48:10:2:40 respectively. In other words, unless otherwise indicated, siRNA's were encapsulated in to lipsomes of the following SNALP formulation: 2% PEG-cDMA, 40% DLinDMA, 10% DSPC, 48% cholesterol. For vehicle controls, empty liposomes with identical lipid composition were formed in the absence of siRNA.

[0284] Serum Nuclease Protection Assay:

[0285] Unmodified naked or lipid encapsulated siRNA (0.25 mg/ml) were incubated in 50% mouse serum at 37° C. At the times indicated, aliquots were taken directly into gel loading buffer containing 0.1% SDS and frozen in liquid nitrogen. After the final timepoint, siRNA samples were run on a non-denaturing 20% polyacrylamide TBE gel and visualized by ethidium bromide staining. To confirm that nuclease protection of siRNA was conferred by lipid encapsulation, 0.1% Triton-X100 was added to disrupt lipid bilayer integrity immediately prior to incubation with serum.

[0286] RiboGreen™ Assay:

[0287] Equal volumes of diluted RiboGreen™ and SNALP are combined so that the final concentration of siRNA is ˜167 ng/mL. 30 μl of a 10% Triton X-100 solution is added to the RiboGreen™/SNALP mixture and the resulting solution is incubated at room temperature for at least 2 minutes. Fluorescence measurements are taken at an appropriate wavelength before and after the addition of triton X-100 to determine the amount of encapsulated siRNA (see, e.g., Muriaux et al., PNAS USA 98(9): 5246-5251 (2001)).

[0288] In Vivo Cytokine Induction:

[0289] Animal studies were completed in accordance with the Canadian Council on Animal Care guidelines following approval by the local Animal Care and Use Committee at Protiva Biotherapeutics. 6-8 week old CD1 ICR mice (Harlan; Indianapolis, Ind.) were subjected to a three week quarantine and acclimation period prior to use. Encapsulated siRNA formulations were administered by standard intravenous injection in the lateral tail vein in 0.2 ml PBS. Blood was collected by cardiac puncture 6 h after administration and processed as plasma for cytokine analysis. In RNAi efficacy experiments, plasma was collected from 50 μl test bleeds 6 h after initial siRNA administration.

[0290] Cytokine ELISA:

[0291] All cytokines were quantified using sandwich ELISA kits according to manufacturers instructions. These were mouse and human IFN-α (PBL Biomedical; Piscataway, N.J.), human IL-6 and TNF-α (eBioscience; San Diego, Calif.), and mouse IL-6, TNF-α, and IFN-γ (BD Biosciences; San Diego, Calif.); and Mouse IFN-α and IFN-β (BD Biosciences, San Diego, Calif.).

[0292] Cell Viability Assay:

[0293] Cell viability of in vitro cell cultures was assessed using the commercial reagent CellTiter Blue (Promega Corp. Madison, Wis.), a resazurin dye that is reduced by metabolically active cells to the fluorogenic product resorufin. Various cancer cell lines were cultured in vitro using standard tissue culture techniques. 48-72 hours after treatment with siRNA formulations or small molecule drugs, CellTiter Blue reagent was added to the culture to quantify the metabolic activity of the cells—a measure of cell viability.

[0294] Target mRNA Quantitation:

[0295] The QuantiGene branched DNA assay (Genospectra) was used to quantify the reduction of target mRNA in cell cultures treated with SNALP. Cell lysates were prepared according to the manufacturer's instructions and used directly for Eg5 (kif11) and GAPDH mRNA quantification. The ratio of Eg5 to GAPDH mRNA was calculated for each cell culture and data expressed relative to the vehicle treated control cells. Specific probe sets used for detection of mRNA were designed by Genospectra to target the following regions: for the Eg5 mRNA, positions 4188-4882 of accession NM_{—}004523; for GAPDH mRNA, positions 1-1303 of accession NM-002046.

[0296] Antibody Assay:

[0297] An ELISA was developed to detect IgM and IgG antibodies against the PEG-lipid and other lipid components of SNALP using a method described in Judge et al in Molecular Therapy (2006). 13(2) pp. 328-337. 10 μg of PEG-cDSA was added in 20 μL 100% ethanol to 96 well plates containing PVDF membranes (Millipore Corp. Bedford, Mass.). PEG-cDSA coated membranes were allowed to completely air dry for 2 hours before blocking for 1 h with 10% FBS in PBS. 100 uL of serially diluted serum samples in blocking buffer were then applied in duplicate wells for 1 h and washed 4 times with 1% FBS in PBS. Plate bound antibodies were detected with HRP-conjugated goat anti-IgM Fcμ, or IgG Fcγ. Bound enzyme was developed with TMB substrate, stopped with 2N sulphuric acid, then read in a spectrophotometer at 450 nm (minus 570 nm).

[0298] Apoptosis/Caspase 3/7 Assay

[0299] The level of Caspase 3 and 7 enzyme activity in siRNA treated cells was assessed using the commercial reagent Apo-ONE (Promega Corp. Madison, Wis.). This assay is based on the specific enzymatic cleavage of the Caspase 3/7 substrate (Z-DEVD)2-Rhodamine 110 to a fluorogenic product and is used to quantify the level of apoptosis in cultured cells. The relative level of Caspase 3/7 activity was assessed in a number of cancer cell lines at 24-48 hours after treatment with siRNA formulations.

### Example 2

### Selection of Candidate Eg5, EGFR or XIAP siRNA with Specificity to Mouse and Human Targets

[0300] Candidate Eg5, EGFR or XIAP sequences were identified by scanning Eg5 (Genbank Accession Nos. NM_{—}004523 and NM_{—}010615), EGFR (Genbank Accession Nos. NM_{—}005228 and NM_{—}207655), and XIAP (Genbank Accession Nos. NM_{—}001167 and NM_{—}009688) sequences to identify AA dinucleotide motifs and the 19 nucleotides 3′ of the motif. The following candidate sequences were eliminated: (1) sequences comprising a stretch of 4 or more of the same base in a row; (2) sequences comprising homopolymers of Gs; (3) sequences comprising triple base motifs (GGG, CCC, AAA, or TTT); and (4) sequences comprising stretches of 7 or more G/Cs in a row.

[0301] Reynold's Rational Design criteria was then applied to the remaining candidate sequences to identify sequences with 5 or more of the following criteria:

1. 30%-52% GC content;
2. At least 3 A/Us at positions 15-19 (sense);
3. Absence of internal repeats;
4. A at position 19 (sense);
5. A at position 3 (sense);
6. U at position 10 (sense);
7. No G/C at position 19 (sense); and
8. No G at position 13 (sense).

[0302] Only results with a score of 6 or more in the Stockholm rules (see, Chalk, Wahlestedt, and Sonnhammer method described in Chalk et al., Biochem. Biophys. Res. Commun., 319:264-274 (2004)) were retained.

[0303] Next, sequences with a high score from, e.g., Classification tree method or Chalk, Wahlestedt, and Sonnhammer method, were retained.

[0304] Next, sequences with a score of 3 or more based on the rules of Amarzguioui and Prydz, Biochem. Biophys. Res. Commun., 316:1050-1058 (2004), were retained.

[0305] Next, sequences with thermodynamics >0 were eliminated.

[0306] Finally, BLASTn was used to compare the sequences with the mouse and human databases and sequences with homology to 15-16 contiguous by from the center of the target sequence (bp 3-18) against any relevant gene were eliminated. The candidate sequences are shown in Tables 1-9.

[0307] The candidate sequences are shown in Tables 1-9.

### Example 3

### siRNA Targeting the Kinesin Eg5 can Inhibit the Growth of Cancer Cells

[0308] A panel of siRNA sequences, including Eg5 2263, were evaluated for their antiproliferative effects against cancer cells. Eg5 2263 was previously described in the literature (see, Weil et al. 2002, BioTechniques 33:1244-1248) but the authors do not describe its use as a therapeutic or anti-cancer agent. The RNAi activity of the Eg5 siRNA panel were screened in vitro with HeLa cells (human; FIG. 1) and Neuro2A cells (mouse; FIG. 2) using a cell viability assay. The cells were treated with 1, 5, or 25 nM siRNA complexed with lipofectamine. Viability of the cell cultures were measured 48 h after treatment and expressed as mean fluorescence units as shown in FIGS. 1 and 2.

### Example 4

### siRNA Formulated as SNALP are Potent Inhibitors of Cell Growth In Vitro

[0309] Various Eg5 siRNAs were formulated as SNALP (SNALP formulation: 2% PEG-cDMA, 40% DLinDMA, 10% DSPC, 48% cholesterol) and evaluated for their inhibitory effects on cell growth in vitro. The cells (i.e., Neuro2A cells) were treated with various SNALP formulated Eg5 siRNAs, at different concentrations i.e. 3.1 nM, 6.3 nM, 12.5 nM, 25 nM and 50 nM, and their effect on cell viability was evaluated (FIG. 3). Viability of cell cultures is expressed as mean fluorescence units.

### Example 5

### Dose Dependent Silencing of Eg5 mRNA in Human HepG2 Cell by Eg5 SNALP

[0310] Human hepatocellular HepG2 cells were treated with either Eg5 2263 SNALP (SNALP formulation: 2% PEG-cDMA, 40% DLinDMA, 10% DSPC, 48% cholesterol) or control (i.e., a non-targeting siRNA) SNALP. Eg5 mRNA levels were measured after 48 h by a branched DNA assay. The results are shown in FIG. 4: Top Panel—Eg5:GAPD mRNA ratios; Bottom panel—% knockdown of Eg5 mRNA versus non-treated cells. The results confirm that the potent effects of Eg5 SNALP on cell viability is due to the silencing of Eg5 RNA.

### Example 6

### Cell Phenotype Changes Following Treatment with Eg5 siRNA

[0311] Control siRNA treated HeLa cells and Eg5 siRNA treated HeLa cells were analyzed by immunohistological staining (DAPI (DNA), blue; tubulin, green). The staining results showed that the control cells demonstrated typical mitotic phenotypes, while the Eg5 siRNA treated HeLa cells induced aberrant cell mitosis characterized by monoastral spindle formation due to Eg5 inhibition (FIG. 5).

### Example 7

### Anti-Proliferative Activity of Chemically Modified Eg5 2273 siRNA's

[0312] A panel (8 total) of 2′-OMe modified siRNAs of Eg5 2263 siRNA sequence was prepared and their RNAi activity was evaluated in HeLa human cells or Neuro2A mouse cells. The modifications involved introducing 2′-OMe guanosine or 2′-OMe uridine at selected positions in the sense or antisense strand the sequence modification are shown in (FIG. 6). The modified Eg5 2263 siRNAs incorporated less than 20% of chemically modified nucleosides. Anti-proliferative activity was evaluated in a cell viability bioassay (FIG. 7, HeLa human cells; and FIG. 8 Neuro2A mouse cells). Cell viability of cell cultures was measured 48 hours after treatment and expressed as mean fluorescence units.

### Example 8

### In Vivo Cytokine Induction by Chemically Modified Eg5 2263 SNALP

[0313] Unmodified Eg5 2263 siRNA and certain 2′-OMe modified variants thereof (i.e., U/O, G/O, U/U and G/G) were formulated into SNALP (SNALP formulation: 2% PEG-cDMA, 40% DLinDMA, 10% DSPC, 48% cholesterol). These SNALP formulations were tested in vivo in to look for the induction of an immune response, e.g., cytokine induction. Balb/c mice (n=3/treatment group) were injected with 40 ug of the SNALP formulation and samples were collected 6 h post treatment with SNALP and tested for Interferon-alpha by ELISA assay. The results show that 2′-OMe modifications to Eg5 2263 siRNA abrogate Interferon induction associated with systemic administration of the native (unmodified) duplex (FIG. 9).

### Example 9

### Antibody Response Against the Delivery Vehicle for siRNA with Selectively 2′-OMe Modified Eg5 2263

[0314] Unmodified Eg5 2263 siRNA and a 2′-OMe modified variant thereof (i.e., Eg5 2263 U/U siRNA) were formulated into SNALP (SNALP formulation: 2% PEG-cDMA, 40% DLinDMA, 10% DSPC, 48% cholesterol) and tested in vivo in mice (protocol: 3×2 mg/kg daily; serum assayed on day 10) to look for the induction of an immune response against the delivery vehicle (PEG). The results show that selective 2′-OMe modification to Eg5 2263 siRNA (e.g. U/U modified) abrogates the antibody response against the delivery vehicle that is associated with systemic administration of the native (unmodified) duplex. (FIG. 10). In FIG. 10, the top panel show PEG antibody levels in individual mice treated with unmodified Eg5 SNALP or with U/U modified Eg5 SNALP.

### Example 10

### The Anti-Cancer Activity of Eg5 U/U SNALP in a Range of Cancer Cell Lines

[0315] The anti-cancer activity of Eg5 U/U SNALP was demonstrated against a range of cancer cell lines. Activity against the cell lines was monitored by a cell viability assay, and by an apoptosis assay as measured by Caspase 3/7 activation. Eg5 U/U SNALP specificity is confirmed by comparison with control SNALP containing non-targeting siRNA. FIG. 11 illustrates a decrease in cell viability in all cell lines tested after treatment with Eg5 U/U SNALP as compared to control. Upper left panel: LS174T human colorectal adenocarcinoma; Upper right panel: HT29 human colorectal adenocarcinoma; lower left panel: HepG2 human hepatocellular carcinoma; Lower right panel; Neuro2A murine Neuroblastoma. The induction of apoptosis by Eg5 SNALP U/U modified siRNA, as measured by Caspase 3/7 activity, was measured in human hepatocellular carcinoma cells and human colorectal cancer cells after 24 hours and after 48 hours. The Caspase 3/7 activity is expressed as fold induction over media only treated cells. FIG. 12 illustrates that apoptosis induction in human hepatocarcinoma cells is increased in Eg5 2263 U/U SNALP as compared to control siRNA. FIG. 13 illustrates that apoptosis induction is increased in Eg5 2263 U/U SNALP in human colorectal cancer cells (HT-29 and LS 174T) as compared to control.

### Example 11

### Comparison Between Eg5 2263 U/U SNALP Vs. Small Molecule Eg5 Inhibitor Drug

[0316] There are currently several small molecule Eg5 inhibitors under clinical evaluation. Recent publications indicate that certain cancer cell lines (e.g., HT-29 colorectal adenocarcinoma cells) are resistant to apoptosis induction by small molecule Eg5 inhibitors. A comparison of apoptosis activity, via a comparison of Caspase 3/7 induction activity, in HT-29 colorectal adenocarcinoma cells (a small molecule Eg5 inhibitor resistant cell type) after treatment with a small molecule Eg5 inhibitor (i.e, Monastrol at 50 or 100 uM concentration), or with Eg5 2263 U/U SNALP (at 25 or 50 nM concentration) demonstrates that cells lines that are resistant to small molecule Eg5 inhibitors are highly sensitive to Eg5 SNALP (FIG. 14). A comparison of Eg5 2263 U/U SNALP with the small molecule Eg5 inhibitor, monastrol, in the inhibition of various cancer cell lines, as measure by cell viability assays, demonstrates that Eg5 2263 U/U SNALP is superior at inhibiting cell growth in these cancer cell lines than monastrol (FIG. 15). The results of these experiments shows that SNALP can confer advantages over conventional small molecule drugs as anti-cancer agents.

### Example 12

### Serum Nuclease Protection Assay

[0317] Naked Eg5 siRNA and SNALP encapsulated Eg5 siRNA were subjected to serum nuclease degredation. The result in the serum nuclease protection assay (presented in FIG. 16) shows that SNALP encapsulation provide the protection from serum nuclease required for in vivo use of siRNA.

### Example 13

### In Vivo Activity of Eg5 SNALP in Tumor Bearing Mice

[0318] Anti-tumor effects of Eg5 2263 U/U SNALP (2% PEG-cDSA, 40% DLinDMA, 10% DSPC, 48% cholesterol), as compared to SNALP containing control siRNA (Luc), was evaluated in a subcutaneous model in mice. A/J mice bearing s.c. Neuro2A tumors were treated with SNALP at 5×2 mg/kg daily (d6-10) by i.v. administration. Tumors were measured by calipers and recorded as tumor volume. The results of this study demonstrates that Eg5 2263 U/U SNALP exerts a specific anti-tumor effect in a s.c. tumor model (FIG. 17). Additionally, therapeutic dosing is well tolerated in tumor-bearing mice (FIG. 18).

### Example 14

### In Vivo Activity of Eg5 SNALP in Tumor Bearing Mice

[0319] Anti-tumor effects of Eg5 2263 U/U SNALP (2% PEG-cDMA, 40% DLinDMA, 10% DSPC, 48% cholesterol), as compared to SNALP containing control siRNA (Luc), was evaluated in an intrahepatic tumor model in mice. In this study, A/J mice were seeded with 100,000 Neuro2A cells by intrahepatic injection. On day 12, the mice were treated with Eg5 2263 U/U SNALP (n=6) or control siRNA (Luc SNALP; n=5). The mice were dosed at 3 mg/kg at t=0 h and at t=6 h, for a cumulative dosage of 6 mg/kg. The livers were collected 30 h after the first dose (d13), and formalin-fixed for conventional histology. The tissues were processed and stained with H&E. Tumor histology showed that Eg5 2263 U/U SNALP treated mice induced extensive phenotypic changes (e.g., aberrant mitosis and apoptosis) in the intrahepatic tumor cells, which is characteristic of Eg5 inhibition, as compared to control treated subjects. FIG. 19 shows the tumor histopathology of the intrahepatic Neuro2A tumor that was treated with Eg5 2263 U/U SNALP. Histology shows numerous tumor cells with atypical mitotic figures and apoptotic bodies characteristic of Eg5 inhibition. FIG. 20 shows the tumor histopathology of the intrahepatic Neuro2A tumor that was treated with control SNALP. Histology results shows numerous tumor cells with normal mitotic figures.

### Example 15

### In Vitro Activity of EGFr siRNA

[0320] A431 carcinoma cells were treated with increasing concentrations of lipofectamine complexed EGFr or non-targeting control siRNA. EGFr mRNA levels were quantitated by branched DNA assay after 48 h culture. EGFr mRNA values are expressed as % of media treated cells. As shown in FIG. 30, EGFr sequences 817 and 1252 and 1986 displayed the greatest levels of mRNA silencing.

[0321] Cell viability was also quantitated by CellTiter Blue fluorescence assay after 48 h culture. iability scores are expressed as % of media treated cells. As shown in FIG. 31, EGFr sequences 817 and 1252 and 1986 that displayed the greatest levels of mRNA silencing also show the most significant effects on cell viability.

### Example 16

### In Vitro Activity of EGFr siRNA

[0322] HT-29 tumor cells were treated with increasing concentrations of EGFr sequences 817 and 1252 and 1986 siRNA sequences or a non-targeting control siRNA formulated in SNALP. EGFr mRNA levels were measured 48 h after SNALP treatment by bDNA assay. As shown in FIG. 32, EGFr sequences 817 and 1252 and 1986 siRNA formulated in SNALP silence EGFR siRNA.

### Example 17

### In Vitro Activity of XIAP SNALP

[0323] SNALP containing XIAP-113, XIAP-300 or non-targeting control siRNA were applied to HT-29 cells in vitro at various concentrations. 48 h later, XIAP mRNA levels were measured by bDNA assay and expressed as % of media treated cells. As shown in FIG. 33, XIAP-113 SNALP causes significant, dose-dependent decreases in XIAP mRNA levels

### Example 18

### In Vitro Activity of XIAP SNALP

[0324] SNALP containing XIAP-113, XIAP-300 or non-targeting control siRNA were applied to LS174T colon adenocarcinoma cells in vitro at 35 nM siRNA. Cells were then treated with monastrol, a small molecule inhibitor of Eg5. Viability of cell cultures was assessed after 48 h. As shown in FIG. 34, XIAP-113 and -300 SNALP sensitize human colon cancer cells to the cytotoxic effects of the Eg5 inhibitor. Degree of sensitization correlates with the relative potency of mRNA silencing by these SNALP

### Example 19

### In Vitro Activity of Eg5 SNALP in Combination with XIAP SNALP

[0325] HT29 colon cancer cells were co-cultured with 10 nM or 30 nM XIAP-113 SNALP plus increasing concentrations of Eg5 2263 SNALP. Cell viability and caspase 3/7 activity were assayed after 48 h culture. As shown in FIG. 35, co-administration of XIAP SNALP sensitizes HT29 cells to killing by Eg5 SNALP, as demonstrated by significant increases in the level of apoptosis and corresponding decrease in cell viability in the cultures.

[0326] It is to be understood that the above description is intended to be illustrative and not restrictive. Many embodiments will be apparent to those of skill in the art upon reading the above description. The scope of the invention should, therefore, be determined not with reference to the above description, but should instead be determined with reference to the appended claims, along with the full scope of equivalents to which such claims are entitled. The disclosures of all articles and references, including patent applications, patents, PCT publications, and Accession Nos. are incorporated herein by reference for all purposes.

The application's sequence listing, which the Patent Office published only in electronic form, follows.

SEQUENCE LISTING (18498 sequences)

SEQ ID NO: 1 - DNA, 21 bp, Artificial Sequence
  Description of Artificial Sequence: Synthetic oligonucleotide
  Description of Combined DNA/RNA Molecule: Synthetic oligonucleotide
  Mitotic kinesin microtubule-associated protein Eg5 2263 siRNA sense
cugaagaccugaagacaautt

SEQ ID NO: 2 - DNA, 21 bp, Artificial Sequence
  Description of Artificial Sequence: Synthetic oligonucleotide
  Description of Combined DNA/RNA Molecule: Synthetic oligonucleotide
  Mitotic kinesin microtubule-associated protein Eg5 2263 siRNA antisense
auugucuucaggucuucagtt

SEQ ID NO: 3 - DNA, 21 bp, Artificial Sequence
  Description of Artificial Sequence: Synthetic oligonucleotide
  Description of Combined DNA/RNA Molecule: Synthetic oligonucleotide
  Mitotic kinesin microtubule-associated protein Eg5 2263 siRNA sense modified by 2'-OMe
  modified_base (2)..(2): 2'-OMe base
  modified_base (10)..(10): 2'-OMe base
  modified_base (19)..(19): 2'-OMe base
cugaagaccugaagacaautt

SEQ ID NO: 4 - DNA, 21 bp, Artificial Sequence
  Description of Artificial Sequence: Synthetic oligonucleotide
  Description of Combined DNA/RNA Molecule: Synthetic oligonucleotide
  Mitotic kinesin microtubule-associated protein Eg5 2263 siRNA sense modified by 2'-OMe
  modified_base (3)..(3): 2'-OMe base
  modified_base (6)..(6): 2'-OMe base
  modified_base (11)..(11): 2'-OMe base
  modified_base (14)..(14): 2'-OMe base
cugaagaccugaagacaautt

SEQ ID NO: 5 - DNA, 21 bp, Artificial Sequence
  Description of Artificial Sequence: Synthetic oligonucleotide
  Description of Combined DNA/RNA Molecule: Synthetic oligonucleotide
  Mitotic kinesin microtubule-associated protein Eg5 2263 siRNA antisense modified by 2'-OMe
  modified_base (8)..(8): 2'-OMe base
  modified_base (13)..(13): 2'-OMe base
  modified_base (16)..(16): 2'-OMe base
auugucuucaggucuucagtt

SEQ ID NO: 6 - DNA, 21 bp, Artificial Sequence
  Description of Artificial Sequence: Synthetic oligonucleotide
  Description of Combined DNA/RNA Molecule: Synthetic oligonucleotide
  Mitotic kinesin microtubule-associated protein Eg5 2263 siRNA antisense modified by 2'-OMe
  modified_base (4)..(4): 2'-OMe base
  modified_base (12)..(12): 2'-OMe base
  modified_base (19)..(19): 2'-OMe base
auugucuucaggucuucagtt

SEQ ID NO: 7 - RNA, 19 nt, Artificial Sequence
  Description of Artificial Sequence: Synthetic oligonucleotide
  Mitotic kinesin microtubule-associated protein Eg5 (Kif11) siRNA sense strand
uccaggugguggugagaug

SEQ ID NO: 8 - RNA, 19 nt, Artificial Sequence
  Description of Artificial Sequence: Synthetic oligonucleotide
  Mitotic kinesin microtubule-associated protein Eg5 (Kif11) siRNA sense strand
ggugguggugagaugcaga

SEQ ID NO: 9 - RNA, 19 nt, Artificial Sequence
  Description of Artificial Sequence: Synthetic oligonucleotide
  Mitotic kinesin microtubule-associated protein Eg5 (Kif11) siRNA sense strand
uaugguguuuggagcaucu

SEQ ID NO: 10 - RNA, 19 nt, Artificial Sequence
  Description of Artificial Sequence: Synthetic oligonucleotide
  Mitotic kinesin microtubule-associated protein Eg5 (Kif11) siRNA sense strand
ugguguuuggagcaucuac

SEQ ID NO: 11 - RNA, 19 nt, Artificial Sequence
  Description of Artificial Sequence: Synthetic oligonucleotide
  Mitotic kinesin microtubule-associated protein Eg5 (Kif11) siRNA sense strand
uguuuaccgaaguguuguu

SEQ ID NO: 12 - RNA, 19 nt, Artificial Sequence
  Description of Artificial Sequence: Synthetic oligonucleotide
  Mitotic kinesin microtubule-associated protein Eg5 (Kif11) siRNA sense strand
aguguuguuuguccaauuc

SEQ ID NO: 13 - RNA, 19 nt, Artificial Sequence
  Description of Artificial Sequence: Synthetic oligonucleotide
  Mitotic kinesin microtubule-associated protein Eg5 (Kif11) siRNA sense strand
guguuguuuguccaauucu

SEQ ID NO: 14 - DNA, 19 bp, Artificial Sequence
  Description of Artificial Sequence: Synthetic oligonucleotide
  Mitotic kinesin microtubule-associated protein Eg5 (Kif11) siRNA sense strand
tgaaguuauuaugggcuau

SEQ ID NO: 15 - RNA, 19 nt, Artificial Sequence
  Description of Artificial Sequence: Synthetic oligonucleotide
  Mitotic kinesin microtubule-associated protein Eg5 (Kif11) siRNA sense strand
aguuauuaugggcuauaau

SEQ ID NO: 16 - RNA, 19 nt, Artificial Sequence
  Description of Artificial Sequence: Synthetic oligonucleotide
  Mitotic kinesin microtubule-associated protein Eg5 (Kif11) siRNA sense strand
guuauuaugggcuauaauu

SEQ ID NO: 17 - RNA, 19 nt, Artificial Sequence
  Description of Artificial Sequence: Synthetic oligonucleotide
  Mitotic kinesin microtubule-associated protein Eg5 (Kif11) siRNA sense strand
aggugaaaggucaccuaau

SEQ ID NO: 18 - RNA, 19 nt, Artificial Sequence
  Description of Artificial Sequence: Synthetic oligonucleotide
  Mitotic kinesin microtubule-associated protein Eg5 (Kif11) siRNA sense strand
ggugaaaggucaccuaaug

SEQ ID NO: 19 - RNA, 19 nt, Artificial Sequence
  Description of Artificial Sequence: Synthetic oligonucleotide
  Mitotic kinesin microtubule-associated protein Eg5 (Kif11) siRNA sense strand
uggagaagagcuuguuaaa

SEQ ID NO: 20 - RNA, 19 nt, Artificial Sequence
  Description of Artificial Sequence: Synthetic oligonucleotide
  Mitotic kinesin microtubule-associated protein Eg5 (Kif11) siRNA sense strand
ucgagaaucuaaacuaacu

SEQ ID NO: 21 - RNA, 19 nt, Artificial Sequence
  Description of Artificial Sequence: Synthetic oligonucleotide
  Mitotic kinesin microtubule-associated protein Eg5 (Kif11) siRNA sense strand
gaaucuaaacuaacuagaa

SEQ ID NO: 22 - RNA, 19 nt, Artificial Sequence
  Description of Artificial Sequence: Synthetic oligonucleotide
  Mitotic kinesin microtubule-associated protein Eg5 (Kif11) siRNA sense strand
ggaaacucugaguacauug

SEQ ID NO: 23 - RNA, 19 nt, Artificial Sequence
  Description of Artificial Sequence: Synthetic oligonucleotide
  Mitotic kinesin microtubule-associated protein Eg5 (Kif11) siRNA sense strand
acucugaguacauuggaau

SEQ ID NO: 24 - RNA, 19 nt, Artificial Sequence
  Description of Artificial Sequence: Synthetic oligonucleotide
  Mitotic kinesin microtubule-associated protein Eg5 (Kif11) siRNA sense strand
cucugaguacauuggaaua

SEQ ID NO: 25 - RNA, 19 nt, Artificial Sequence
  Description of Artificial Sequence: Synthetic oligonucleotide
  Mitotic kinesin microtubule-associated protein Eg5 (Kif11) siRNA sense strand
agcucuuauuaaggaguau

SEQ ID NO: 26 - RNA, 19 nt, Artificial Sequence
  Description of Artificial Sequence: Synthetic oligonucleotide
  Mitotic kinesin microtubule-associated protein Eg5 (Kif11) siRNA sense strand
gcucuuauuaaggaguaua

SEQ ID NO: 27 - RNA, 19 nt, Artificial Sequence
  Description of Artificial Sequence: Synthetic oligonucleotide
  Mitotic kinesin microtubule-associated protein Eg5 (Kif11) siRNA sense strand
acuugaccaguguaaaucu

SEQ ID NO: 28 - RNA, 19 nt, Artificial Sequence
  Description of Artificial Sequence: Synthetic oligonucleotide
  Mitotic kinesin microtubule-associated protein Eg5 (Kif11) siRNA sense strand
guguaaaucugaccugcaa

SEQ ID NO: 29 - RNA, 19 nt, Artificial Sequence
  Description of Artificial Sequence: Synthetic oligonucleotide
  Mitotic kinesin microtubule-associated protein Eg5 (Kif11) siRNA sense strand
acugaagaccugaagacaa

SEQ ID NO: 30 - RNA, 19 nt, Artificial Sequence
  Description of Artificial Sequence: Synthetic oligonucleotide
  Mitotic kinesin microtubule-associated protein Eg5 (Kif11) siRNA sense strand
cugaagaccugaagacaau

SEQ ID NO: 31 - RNA, 19 nt, Artificial Sequence
  Description of Artificial Sequence: Synthetic oligonucleotide
  Mitotic kinesin microtubule-associated protein Eg5 (Kif11) siRNA sense strand
agaccugaagacaauaaag

SEQ ID NO: 32 - RNA, 19 nt, Artificial Sequence
  Description of Artificial Sequence: Synthetic oligonucleotide
  Mitotic kinesin microtubule-associated protein Eg5 (Kif11) siRNA sense strand
gagagauucugugcuuugg

SEQ ID NO: 33 - DNA, 21 bp, Artificial Sequence
  Description of Artificial Sequence: Synthetic oligonucleotide
  Description of Combined DNA/RNA Molecule: Synthetic oligonucleotide
  Mitotic kinesin microtubule-associated protein Eg5 (Kif11) siRNA sense
guguuguuuguccaauucutt

SEQ ID NO: 34 - DNA, 21 bp, Artificial Sequence
  Description of Artificial Sequence: Synthetic oligonucleotide
  Description of Combined DNA/RNA Molecule: Synthetic oligonucleotide
  Mitotic kinesin microtubule-associated protein Eg5 (Kif11) siRNA antisense
agaauuggacaaacaacactt

SEQ ID NO: 35 - DNA, 21 bp, Artificial Sequence
  Description of Artificial Sequence: Synthetic oligonucleotide
  Description of Combined DNA/RNA Molecule: Synthetic oligonucleotide
  Mitotic kinesin microtubule-associated protein Eg5 (Kif11) siRNA sense
guuauuaugggcuauaauutt

SEQ ID NO: 36 - DNA, 21 bp, Artificial Sequence
  Description of Artificial Sequence: Synthetic oligonucleotide
  Description of Combined DNA/RNA Molecule: Synthetic oligonucleotide
  Mitotic kinesin microtubule-associated protein Eg5 (Kif11) siRNA antisense
aauuauagcccauaauaactt

SEQ ID NO: 37 - DNA, 21 bp, Artificial Sequence
  Description of Artificial Sequence: Synthetic oligonucleotide
  Description of Combined DNA/RNA Molecule: Synthetic oligonucleotide
  Mitotic kinesin microtubule-associated protein Eg5 (Kif11) siRNA sense
aggugaaaggucaccuaautt

SEQ ID NO: 38 - DNA, 21 bp, Artificial Sequence
  Description of Artificial Sequence: Synthetic oligonucleotide
  Description of Combined DNA/RNA Molecule: Synthetic oligonucleotide
  Mitotic kinesin microtubule-associated protein Eg5 (Kif11) siRNA antisense
auuaggugaccuuucaccutt

SEQ ID NO: 39 - DNA, 21 bp, Artificial Sequence
  Description of Artificial Sequence: Synthetic oligonucleotide
  Description of Combined DNA/RNA Molecule: Synthetic oligonucleotide
  Mitotic kinesin microtubule-associated protein Eg5 (Kif11) siRNA sense
ggugaaaggucaccuaaugtt

SEQ ID NO: 40 - DNA, 21 bp, Artificial Sequence
  Description of Artificial Sequence: Synthetic oligonucleotide
  Description of Combined DNA/RNA Molecule: Synthetic oligonucleotide
  Mitotic kinesin microtubule-associated protein Eg5 (Kif11) siRNA antisense
cauuaggugaccuuucacctt

SEQ ID NO: 41 - DNA, 21 bp, Artificial Sequence
  Description of Artificial Sequence: Synthetic oligonucleotide
  Description of Combined DNA/RNA Molecule: Synthetic oligonucleotide
  Mitotic kinesin microtubule-associated protein Eg5 (Kif11) siRNA sense
uggagaagagcuuguuaaatt

SEQ ID NO: 42 - DNA, 21 bp, Artificial Sequence
  Description of Artificial Sequence: Synthetic oligonucleotide
  Description of Combined DNA/RNA Molecule: Synthetic oligonucleotide
  Mitotic kinesin microtubule-associated protein Eg5 (Kif11) siRNA antisense
uuuaacaagcucuucuccatt

SEQ ID NO: 43 - DNA, 21 bp, Artificial Sequence
  Description of Artificial Sequence: Synthetic oligonucleotide
  Description of Combined DNA/RNA Molecule: Synthetic oligonucleotide
  Mitotic kinesin microtubule-associated protein Eg5 (Kif11) siRNA sense
ucgagaaucuaaacuaacutt

SEQ ID NO: 44 - DNA, 21 bp, Artificial Sequence
  Description of Artificial Sequence: Synthetic oligonucleotide
  Description of Combined DNA/RNA Molecule: Synthetic oligonucleotide
  Mitotic kinesin microtubule-associated protein Eg5 (Kif11) siRNA antisense
aguuaguuuagauucucgatt

SEQ ID NO: 45 - DNA, 21 bp, Artificial Sequence
  Description of Artificial Sequence: Synthetic oligonucleotide
  Description of Combined DNA/RNA Molecule: Synthetic oligonucleotide
  Mitotic kinesin microtubule-associated protein Eg5 (Kif11) siRNA sense
ggaaacucugaguacauugtt

SEQ ID NO: 46 - DNA, 21 bp, Artificial Sequence
  Description of Artificial Sequence: Synthetic oligonucleotide
  Description of Combined DNA/RNA Molecule: Synthetic oligonucleotide
  Mitotic kinesin microtubule-associated protein Eg5 (Kif11) siRNA antisense
caauguacucagaguuucctt

SEQ ID NO: 47 - DNA, 21 bp, Artificial Sequence
  Description of Artificial Sequence: Synthetic oligonucleotide
  Description of Combined DNA/RNA Molecule: Synthetic oligonucleotide
  Mitotic kinesin microtubule-associated protein Eg5 (Kif11) siRNA sense
cucugaguacauuggaauatt

SEQ ID NO: 48 - DNA, 21 bp, Artificial Sequence
  Description of Artificial Sequence: Synthetic oligonucleotide
  Description of Combined DNA/RNA Molecule: Synthetic oligonucleotide
  Mitotic kinesin microtubule-associated protein Eg5 (Kif11) siRNA antisense
uauuccaauguacucagagtt

SEQ ID NO: 49 - DNA, 21 bp, Artificial Sequence
  Description of Artificial Sequence: Synthetic oligonucleotide
  Description of Combined DNA/RNA Molecule: Synthetic oligonucleotide
  Mitotic kinesin microtubule-associated protein Eg5 (Kif11) siRNA sense
agcucuuauuaaggaguautt

SEQ ID NO: 50 - DNA, 21 bp, Artificial Sequence
  Description of Artificial Sequence: Synthetic oligonucleotide
  Description of Combined DNA/RNA Molecule: Synthetic oligonucleotide
  Mitotic kinesin microtubule-associated protein Eg5 (Kif11) siRNA antisense
auacuccuuaauaagagcutt

SEQ ID NO: 51 - DNA, 21 bp, Artificial Sequence
  Description of Artificial Sequence: Synthetic oligonucleotide
  Description of Combined DNA/RNA Molecule: Synthetic oligonucleotide
  Mitotic kinesin microtubule-associated protein Eg5 (Kif11) siRNA sense
gcucuuauuaaggaguauatt

SEQ ID NO: 52 - DNA, 21 bp, Artificial Sequence
  Description of Artificial Sequence: Synthetic oligonucleotide
  Description of Combined DNA/RNA Molecule: Synthetic oligonucleotide
  Mitotic kinesin microtubule-associated protein Eg5 (Kif11) siRNA antisense
uauacuccuuaauaagagctt

SEQ ID NO: 53 - DNA, 21 bp, Artificial Sequence
  Description of Artificial Sequence: Synthetic oligonucleotide
  Description of Combined DNA/RNA Molecule: Synthetic oligonucleotide
  Mitotic kinesin microtubule-associated protein Eg5 (Kif11) siRNA sense
acuugaccaguguaaaucutt

SEQ ID NO: 54 - DNA, 21 bp, Artificial Sequence
  Description of Artificial Sequence: Synthetic oligonucleotide
  Description of Combined DNA/RNA Molecule: Synthetic oligonucleotide
  Mitotic kinesin microtubule-associated protein Eg5 (Kif11) siRNA antisense
agauuuacacuggucaagutt

SEQ ID NO: 55 - DNA, 21 bp, Artificial Sequence
  Description of Artificial Sequence: Synthetic oligonucleotide
  Description of Combined DNA/RNA Molecule: Synthetic oligonucleotide
  Mitotic kinesin microtubule-associated protein Eg5 (Kif11) siRNA sense
acugaagaccugaagacaatt

SEQ ID NO: 56 - DNA, 21 bp, Artificial Sequence
  Description of Artificial Sequence: Synthetic oligonucleotide
  Description of Combined DNA/RNA Molecule: Synthetic oligonucleotide
  Mitotic kinesin microtubule-associated protein Eg5 (Kif11) siRNA antisense
uugucuucaggucuucagutt

SEQ ID NO: 57 - DNA, 21 bp, Artificial Sequence
  Description of Artificial Sequence: Synthetic oligonucleotide
  Description of Combined DNA/RNA Molecule: Synthetic oligonucleotide
  Mitotic kinesin microtubule-associated protein Eg5 (Kif11) siRNA sense
cugaagaccugaagacaautt

SEQ ID NO: 58 - DNA, 21 bp, Artificial Sequence
  Description of Artificial Sequence: Synthetic oligonucleotide
  Description of Combined DNA/RNA Molecule: Synthetic oligonucleotide
  Mitotic kinesin microtubule-associated protein Eg5 (Kif11) siRNA antisense
auugucuucaggucuucagtt

SEQ ID NO: 59 - DNA, 21 bp, Artificial Sequence
  Description of Artificial Sequence: Synthetic oligonucleotide
  Description of Combined DNA/RNA Molecule: Synthetic oligonucleotide
  Mitotic kinesin microtubule-associated protein Eg5 (Kif11) siRNA sense
agaccugaagacaauaaagtt

SEQ ID NO: 60 - DNA, 21 bp, Artificial Sequence
  Description of Artificial Sequence: Synthetic oligonucleotide
  Description of Combined DNA/RNA Molecule: Synthetic oligonucleotide
  Mitotic kinesin microtubule-associated protein Eg5 (Kif11) siRNA antisense
cuuuauugucuucaggucutt

SEQ ID NO: 61 - DNA, 21 bp, Artificial Sequence
  Description of Artificial Sequence: Synthetic oligonucleotide
  Description of Combined DNA/RNA Molecule: Synthetic oligonucleotide
  Mitotic kinesin microtubule-associated protein Eg5 (Kif11) siRNA sense
gagagauucugugcuuuggtt

SEQ ID NO: 62 - DNA, 21 bp, Artificial Sequence
  Description of Artificial Sequence: Synthetic oligonucleotide
  Description of Combined DNA/RNA Molecule: Synthetic oligonucleotide
  Mitotic kinesin microtubule-associated protein Eg5 (Kif11) siRNA antisense
ccaaagcacagaaucucuctt

SEQ ID NO: 63 - DNA, 21 bp, Artificial Sequence
  Description of Artificial Sequence: Synthetic oligonucleotide
  Description of Combined DNA/RNA Molecule: Synthetic oligonucleotide
  Epidermal growth factor receptor (EGFR), ERBB1 phosphotyrosine kinase siRNA sense strand target
uguccucauugcccucaactt

SEQ ID NO: 64 - DNA, 21 bp, Artificial Sequence
  Description of Artificial Sequence: Synthetic oligonucleotide
  Description of Combined DNA/RNA Molecule: Synthetic oligonucleotide
  Epidermal growth factor receptor (EGFR), ERBB1 phosphotyrosine kinase siRNA sense strand target
guccucauugcccucaacatt

SEQ ID NO: 65 - DNA, 21 bp, Artificial Sequence
  Description of Artificial Sequence: Synthetic oligonucleotide
  Description of Combined DNA/RNA Molecule: Synthetic oligonucleotide
  Epidermal growth factor receptor (EGFR), ERBB1 phosphotyrosine kinase siRNA sense strand target
uccucauugcccucaacactt

SEQ ID NO: 66 - DNA, 21 bp, Artificial Sequence
  Description of Artificial Sequence: Synthetic oligonucleotide
  Description of Combined DNA/RNA Molecule: Synthetic oligonucleotide
  Epidermal growth factor receptor (EGFR), ERBB1 phosphotyrosine kinase siRNA sense strand target
ugauccaagcugucccaautt

SEQ ID NO: 67 - DNA, 21 bp, Artificial Sequence
  Description of Artificial Sequence: Synthetic oligonucleotide
  Description of Combined DNA/RNA Molecule: Synthetic oligonucleotide
  Epidermal growth factor receptor (EGFR), ERBB1 phosphotyrosine kinase siRNA sense strand target
gauccaagcugucccaaugtt

SEQ ID NO: 68 - DNA, 21 bp, Artificial Sequence
  Description of Artificial Sequence: Synthetic oligonucleotide
  Description of Combined DNA/RNA Molecule: Synthetic oligonucleotide
  Epidermal growth factor receptor (EGFR), ERBB1 phosphotyrosine kinase siRNA sense strand target
gagaggagaacugccagaatt

SEQ ID NO: 69 - DNA, 21 bp, Artificial Sequence
  Description of Artificial Sequence: Synthetic oligonucleotide
  Description of Combined DNA/RNA Molecule: Synthetic oligonucleotide
  Epidermal growth factor receptor (EGFR), ERBB1 phosphotyrosine kinase siRNA sense strand target
agaggagaacugccagaaatt

SEQ ID NO: 70 - DNA, 21 bp, Artificial Sequence
  Description of Artificial Sequence: Synthetic oligonucleotide
  Description of Combined DNA/RNA Molecule: Synthetic oligonucleotide
  Epidermal growth factor receptor (EGFR), ERBB1 phosphotyrosine kinase siRNA sense strand target
cccagugacugcugccacatt

SEQ ID NO: 71 - DNA, 21 bp, Artificial Sequence
  Description of Artificial Sequence: Synthetic oligonucleotide
  Description of Combined DNA/RNA Molecule: Synthetic oligonucleotide
  Epidermal growth factor receptor (EGFR), ERBB1 phosphotyrosine kinase siRNA sense strand target
ccagugacugcugccacaatt

SEQ ID NO: 72 - DNA, 21 bp, Artificial Sequence
  Description of Artificial Sequence: Synthetic oligonucleotide
  Description of Combined DNA/RNA Molecule: Synthetic oligonucleotide
  Epidermal growth factor receptor (EGFR), ERBB1 phosphotyrosine kinase siRNA sense strand target
guguguaacggaauagguatt

SEQ ID NO: 73 - DNA, 21 bp, Artificial Sequence
  Description of Artificial Sequence: Synthetic oligonucleotide
  Description of Combined DNA/RNA Molecule: Synthetic oligonucleotide
  Epidermal growth factor receptor (EGFR), ERBB1 phosphotyrosine kinase siRNA sense strand target
ccagugugcccacuacauutt

SEQ ID NO: 74 - DNA, 21 bp, Artificial Sequence
  Description of Artificial Sequence: Synthetic oligonucleotide
  Description of Combined DNA/RNA Molecule: Synthetic oligonucleotide
  Epidermal growth factor receptor (EGFR), ERBB1 phosphotyrosine kinase siRNA sense strand target
cagugugcccacuacauugtt

SEQ ID NO: 75 - DNA, 21 bp, Artificial Sequence
  Description of Artificial Sequence: Synthetic oligonucleotide
  Description of Combined DNA/RNA Molecule: Synthetic oligonucleotide
  Epidermal growth factor receptor (EGFR), ERBB1 phosphotyrosine kinase siRNA sense strand target
agugugcccacuacauugatt

SEQ ID NO: 76 - DNA, 21 bp, Artificial Sequence
  Description of Artificial Sequence: Synthetic oligonucleotide
  Description of Combined DNA/RNA Molecule: Synthetic oligonucleotide
  Epidermal growth factor receptor (EGFR), ERBB1 phosphotyrosine kinase siRNA sense strand target
ggaucccagaaggugagaatt

SEQ ID NO: 77 - DNA, 21 bp, Artificial Sequence
  Description of Artificial Sequence: Synthetic oligonucleotide
  Description of Combined DNA/RNA Molecule: Synthetic oligonucleotide
  Epidermal growth factor receptor (EGFR), ERBB1 phosphotyrosine kinase siRNA sense strand target
gaucccagaaggugagaaatt

SEQ ID NO: 78 - DNA, 21 bp, Artificial Sequence
  Description of Artificial Sequence: Synthetic oligonucleotide
  Description of Combined DNA/RNA Molecule: Synthetic oligonucleotide
  Epidermal growth factor receptor (EGFR), ERBB1 phosphotyrosine kinase siRNA sense strand target
aucccagaaggugagaaagtt

SEQ ID NO: 79 - DNA, 21 bp, Artificial Sequence
  Description of Artificial Sequence: Synthetic oligonucleotide
  Description of Combined DNA/RNA Molecule: Synthetic oligonucleotide
  Epidermal growth factor receptor (EGFR), ERBB1 phosphotyrosine kinase siRNA sense strand target
ucccagaaggugagaaagutt

SEQ ID NO: 80 - DNA, 21 bp, Artificial Sequence
  Description of Artificial Sequence: Synthetic oligonucleotide
  Description of Combined DNA/RNA Molecule: Synthetic oligonucleotide
  Epidermal growth factor receptor (EGFR), ERBB1 phosphotyrosine kinase siRNA sense strand target
gcaugucaagaucacagautt

SEQ ID NO: 81 - DNA, 21 bp, Artificial Sequence
  Description of Artificial Sequence: Synthetic oligonucleotide
  Description of Combined DNA/RNA Molecule: Synthetic oligonucleotide
  Epidermal growth factor receptor (EGFR), ERBB1 phosphotyrosine kinase siRNA sense strand target
caugucaagaucacagauutt

SEQ ID NO: 82 - DNA, 21 bp, Artificial Sequence
  Description of Artificial Sequence: Synthetic oligonucleotide
  Description of Combined DNA/RNA Molecule: Synthetic oligonucleotide
  Epidermal growth factor receptor (EGFR), ERBB1 phosphotyrosine kinase siRNA sense strand target
augucaagaucacagauuutt

SEQ ID NO: 83 - DNA, 21 bp, Artificial Sequence
  Description of Artificial Sequence: Synthetic oligonucleotide
  Description of Combined DNA/RNA Molecule: Synthetic oligonucleotide
  Epidermal growth factor receptor (EGFR), ERBB1 phosphotyrosine kinase siRNA sense strand target
gugccuaucaaguggauggtt

SEQ ID NO: 84 - DNA, 21 bp, Artificial Sequence
  Description of Artificial Sequence: Synthetic oligonucleotide
  Description of Combined DNA/RNA Molecule: Synthetic oligonucleotide
  Epidermal growth factor receptor (EGFR), ERBB1 phosphotyrosine kinase siRNA sense strand target
ucgaugucuacaugaucautt

SEQ ID NO: 85 - DNA, 21 bp, Artificial Sequence
  Description of Artificial Sequence: Synthetic oligonucleotide
  Description of Combined DNA/RNA Molecule: Synthetic oligonucleotide
  Epidermal growth factor receptor (EGFR), ERBB1 phosphotyrosine kinase siRNA sense strand target
uggucaagugcuggaugautt

SEQ ID NO: 86 - DNA, 21 bp, Artificial Sequence
  Description of Artificial Sequence: Synthetic oligonucleotide
  Description of Combined DNA/RNA Molecule: Synthetic oligonucleotide
  Epidermal growth factor receptor (EGFR), ERBB1 phosphotyrosine kinase siRNA sense strand target
ggucaagugcuggaugauatt

SEQ ID NO: 87 - DNA, 21 bp, Artificial Sequence
  Description of Artificial Sequence: Synthetic oligonucleotide
  Description of Combined DNA/RNA Molecule: Synthetic oligonucleotide
  Epidermal growth factor receptor (EGFR), ERBB1 phosphotyrosine kinase siRNA sense strand target
gucaagugcuggaugauagtt

SEQ ID NO: 88 - DNA, 21 bp, Artificial Sequence
  Description of Artificial Sequence: Synthetic oligonucleotide
  Description of Combined DNA/RNA Molecule: Synthetic oligonucleotide
  Epidermal growth factor receptor (EGFR), ERBB1 phosphotyrosine kinase siRNA sense strand target
gggaugaaagaaugcauuutt

SEQ ID NO: 89 - DNA, 21 bp, Artificial Sequence
  Description of Artificial Sequence: Synthetic oligonucleotide
  Description of Combined DNA/RNA Molecule: Synthetic oligonucleotide
  Epidermal growth factor receptor (EGFR), ERBB1 phosphotyrosine kinase siRNA sense strand target
ggaugaaagaaugcauuugtt

SEQ ID NO: 90 - DNA, 21 bp, Artificial Sequence
  Description of Artificial Sequence: Synthetic oligonucleotide
  Description of Combined DNA/RNA Molecule: Synthetic oligonucleotide
  Epidermal growth factor receptor (EGFR), ERBB1 phosphotyrosine kinase siRNA sense strand target
cugacuaccagcaggacuutt

SEQ ID NO: 91 - DNA, 21 bp, Artificial Sequence
  Description of Artificial Sequence: Synthetic oligonucleotide
  Description of Combined DNA/RNA Molecule: Synthetic oligonucleotide
  Epidermal growth factor receptor (EGFR), ERBB1 phosphotyrosine kinase siRNA sense strand target
gacuaccagcaggacuucutt

SEQ ID NO: 92 - DNA, 21 bp, Artificial Sequence
  Description of Artificial Sequence: Synthetic oligonucleotide
  Description of Combined DNA/RNA Molecule: Synthetic oligonucleotide
  Epidermal growth factor receptor (EGFR), ERBB1 phosphotyrosine kinase siRNA sense strand target
acuaccagcaggacuucuutt

SEQ ID NO: 93 - DNA, 21 bp, Artificial Sequence
  Description of Artificial Sequence: Synthetic oligonucleotide
  Description of Combined DNA/RNA Molecule: Synthetic oligonucleotide
  Epidermal growth factor receptor (EGFR), ERBB1 phosphotyrosine kinase siRNA sense
guccucauugcccucaacatt

SEQ ID NO: 94 - DNA, 21 bp, Artificial Sequence
  Description of Artificial Sequence: Synthetic oligonucleotide
  Description of Combined DNA/RNA Molecule: Synthetic oligonucleotide
  Epidermal growth factor receptor (EGFR), ERBB1 phosphotyrosine kinase siRNA antisense
uguugagggcaaugaggactt

SEQ ID NO: 95 - DNA, 21 bp, Artificial Sequence
  Description of Artificial Sequence: Synthetic oligonucleotide
  Description of Combined DNA/RNA Molecule: Synthetic oligonucleotide
  Epidermal growth factor receptor (EGFR), ERBB1 phosphotyrosine kinase siRNA sense
uccucauugcccucaacactt

SEQ ID NO: 96 - DNA, 21 bp, Artificial Sequence
  Description of Artificial Sequence: Synthetic oligonucleotide
  Description of Combined DNA/RNA Molecule: Synthetic oligonucleotide
  Epidermal growth factor receptor (EGFR), ERBB1 phosphotyrosine kinase siRNA antisense
guguugagggcaaugaggatt

SEQ ID NO: 97 - DNA, 21 bp, Artificial Sequence
  Description of Artificial Sequence: Synthetic oligonucleotide
  Description of Combined DNA/RNA Molecule: Synthetic oligonucleotide
  Epidermal growth factor receptor (EGFR), ERBB1 phosphotyrosine kinase siRNA sense
ugauccaagcugucccaautt

SEQ ID NO: 98 - DNA, 21 bp, Artificial Sequence
  Description of Artificial Sequence: Synthetic oligonucleotide
  Description of Combined DNA/RNA Molecule: Synthetic oligonucleotide
  Epidermal growth factor receptor (EGFR), ERBB1 phosphotyrosine kinase siRNA antisense
auugggacagcuuggaucatt

SEQ ID NO: 99 - DNA, 21 bp, Artificial Sequence
  Description of Artificial Sequence: Synthetic oligonucleotide
  Description of Combined DNA/RNA Molecule: Synthetic oligonucleotide
  Epidermal growth factor receptor (EGFR), ERBB1 phosphotyrosine kinase siRNA sense
gauccaagcugucccaaugtt

SEQ ID NO: 100 - DNA, 21 bp, Artificial Sequence
  Description of Artificial Sequence: Synthetic oligonucleotide
  Description of Combined DNA/RNA Molecule: Synthetic oligonucleotide
  Epidermal growth factor receptor (EGFR), ERBB1 phosphotyrosine kinase siRNA antisense
cauugggacagcuuggauctt

SEQ ID NO: 101 - DNA, 21 bp, Artificial Sequence
  Description of Artificial Sequence: Synthetic oligonucleotide
  Description of Combined DNA/RNA Molecule: Synthetic oligonucleotide
  Epidermal growth factor receptor (EGFR), ERBB1 phosphotyrosine kinase siRNA sense
guguguaacggaauagguatt

SEQ ID NO: 102 - DNA, 21 bp, Artificial Sequence
  Description of Artificial Sequence: Synthetic oligonucleotide
  Description of Combined DNA/RNA Molecule: Synthetic oligonucleotide
  Epidermal growth factor receptor (EGFR), ERBB1 phosphotyrosine kinase siRNA antisense
uaccuauuccguuacacactt

SEQ ID NO: 103 - DNA, 21 bp, Artificial Sequence
  Description of Artificial Sequence: Synthetic oligonucleotide
  Description of Combined DNA/RNA Molecule: Synthetic oligonucleotide
  Epidermal growth factor receptor (EGFR), ERBB1 phosphotyrosine kinase siRNA sense
ccagugugcccacuacauutt

SEQ ID NO: 104 - DNA, 21 bp, Artificial Sequence
  Description of Artificial Sequence: Synthetic oligonucleotide
  Description of Combined DNA/RNA Molecule: Synthetic oligonucleotide
  Epidermal growth factor receptor (EGFR), ERBB1 phosphotyrosine kinase siRNA antisense
aauguagugggcacacuggtt

SEQ ID NO: 105 - DNA, 21 bp, Artificial Sequence
  Description of Artificial Sequence: Synthetic oligonucleotide
  Description of Combined DNA/RNA Molecule: Synthetic oligonucleotide
  Epidermal growth factor receptor (EGFR), ERBB1 phosphotyrosine kinase siRNA sense
aucccagaaggugagaaagtt

SEQ ID NO: 106 - DNA, 21 bp, Artificial Sequence
  Description of Artificial Sequence: Synthetic oligonucleotide
  Description of Combined DNA/RNA Molecule: Synthetic oligonucleotide
  Epidermal growth factor receptor (EGFR), ERBB1 phosphotyrosine kinase siRNA antisense
cuuucucaccuucugggautt

SEQ ID NO: 107 - DNA, 21 bp, Artificial Sequence
  Description of Artificial Sequence: Synthetic oligonucleotide
  Description of Combined DNA/RNA Molecule: Synthetic oligonucleotide
  Epidermal growth factor receptor (EGFR), ERBB1 phosphotyrosine kinase siRNA sense
augucaagaucacagauuutt

SEQ ID NO: 108 - DNA, 21 bp, Artificial Sequence
  Description of Artificial Sequence: Synthetic oligonucleotide
  Description of Combined DNA/RNA Molecule: Synthetic oligonucleotide
  Epidermal growth factor receptor (EGFR), ERBB1 phosphotyrosine kinase siRNA antisense
aaaucugugaucuugacautt

SEQ ID NO: 109 - DNA, 21 bp, Artificial Sequence
  Description of Artificial Sequence: Synthetic oligonucleotide
  Description of Combined DNA/RNA Molecule: Synthetic oligonucleotide
  Epidermal growth factor receptor (EGFR), ERBB1 phosphotyrosine kinase siRNA sense
ucgaugucuacaugaucautt

SEQ ID NO: 110 - DNA, 21 bp, Artificial Sequence
  Description of Artificial Sequence: Synthetic oligonucleotide
  Description of Combined DNA/RNA Molecule: Synthetic oligonucleotide
  Epidermal growth factor receptor (EGFR), ERBB1 phosphotyrosine kinase siRNA antisense
augaucauguagacaucgatt

SEQ ID NO: 111 - DNA, 21 bp, Artificial Sequence
  Description of Artificial Sequence: Synthetic oligonucleotide
  Description of Combined DNA/RNA Molecule: Synthetic oligonucleotide
  Epidermal growth factor receptor (EGFR), ERBB1 phosphotyrosine kinase siRNA sense
gucaagugcuggaugauagtt

SEQ ID NO: 112 - DNA, 21 bp, Artificial Sequence
  Description of Artificial Sequence: Synthetic oligonucleotide
  Description of Combined DNA/RNA Molecule: Synthetic oligonucleotide
  Epidermal growth factor receptor (EGFR), ERBB1 phosphotyrosine kinase siRNA antisense
cuaucauccagcacuugactt

SEQ ID NO: 113 - DNA, 21 bp, Artificial Sequence
  Description of Artificial Sequence: Synthetic oligonucleotide
  Description of Combined DNA/RNA Molecule: Synthetic oligonucleotide
  Epidermal growth factor receptor (EGFR), ERBB1 phosphotyrosine kinase siRNA sense
cugacuaccagcaggacuutt

SEQ ID NO: 114 - DNA, 21 bp, Artificial Sequence
  Description of Artificial Sequence: Synthetic oligonucleotide
  Description of Combined DNA/RNA Molecule: Synthetic oligonucleotide
  Epidermal growth factor receptor (EGFR), ERBB1 phosphotyrosine kinase siRNA antisense
aaguccugcugguagucagtt

SEQ ID NO: 115 - DNA, 21 bp, Artificial Sequence
  Description of Artificial Sequence: Synthetic oligonucleotide
  Description of Combined DNA/RNA Molecule: Synthetic oligonucleotide
  Epidermal growth factor receptor (EGFR), ERBB1 phosphotyrosine kinase siRNA sense
gacuaccagcaggacuucutt

SEQ ID NO: 116 - DNA, 21 bp, Artificial Sequence
  Description of Artificial Sequence: Synthetic oligonucleotide
  Description of Combined DNA/RNA Molecule: Synthetic oligonucleotide
  Epidermal growth factor receptor (EGFR), ERBB1 phosphotyrosine kinase siRNA antisense
agaaguccugcugguaguctt

SEQ ID NO: 117 - DNA, 21 bp, Artificial Sequence
  Description of Artificial Sequence: Synthetic oligonucleotide
  Description of Combined DNA/RNA Molecule: Synthetic oligonucleotide
  Epidermal growth factor receptor (EGFR), ERBB1 phosphotyrosine kinase siRNA sense
acuaccagcaggacuucuutt

SEQ ID NO: 118 - DNA, 21 bp, Artificial Sequence
  Description of Artificial Sequence: Synthetic oligonucleotide
  Description of Combined DNA/RNA Molecule: Synthetic oligonucleotide
  Epidermal growth factor receptor (EGFR), ERBB1 phosphotyrosine kinase siRNA antisense
aagaaguccugcugguagutt

SEQ ID NO: 119 - DNA, 21 bp, Artificial Sequence
  Description of Artificial Sequence: Synthetic oligonucleotide
  Description of Combined DNA/RNA Molecule: Synthetic oligonucleotide
  X-linked inhibitor of apoptosis (XIAP) siRNA sense strand target
aagguggacaaguccuauutt

SEQ ID NO: 120 - DNA, 21 bp, Artificial Sequence
  Description of Artificial Sequence: Synthetic oligonucleotide
  Description of Combined DNA/RNA Molecule: Synthetic oligonucleotide
  X-linked inhibitor of apoptosis (XIAP) siRNA sense strand target
agguggacaaguccuauuutt

SEQ ID NO: 121 - DNA, 21 bp, Artificial Sequence
  Description of Artificial Sequence: Synthetic oligonucleotide
  Description of Combined DNA/RNA Molecule: Synthetic oligonucleotide
  X-linked inhibitor of apoptosis (XIAP) siRNA sense strand target
gaauuuguagaagaguuuatt

SEQ ID NO: 122 - DNA, 21 bp, Artificial Sequence
  Description of Artificial Sequence: Synthetic oligonucleotide
  Description of Combined DNA/RNA Molecule: Synthetic oligonucleotide
  X-linked inhibitor of apoptosis (XIAP) siRNA sense strand target
uuuguagaagaguuuaauatt

SEQ ID NO: 123 - DNA, 21 bp, Artificial Sequence
  Description of Artificial Sequence: Synthetic oligonucleotide
  Description of Combined DNA/RNA Molecule: Synthetic oligonucleotide
  X-linked inhibitor of apoptosis (XIAP) siRNA sense strand target
guagaagaguuuaauagautt

SEQ ID NO: 124 - DNA, 21 bp, Artificial Sequence
  Description of Artificial Sequence: Synthetic oligonucleotide
  Description of Combined DNA/RNA Molecule: Synthetic oligonucleotide
  X-linked inhibitor of apoptosis (XIAP) siRNA sense strand target
agaagaguuuaauagauuatt

SEQ ID NO: 125 - DNA, 21 bp, Artificial Sequence
  Description of Artificial Sequence: Synthetic oligonucleotide
  Description of Combined DNA/RNA Molecule: Synthetic oligonucleotide
  X-linked inhibitor of apoptosis (XIAP) siRNA sense strand target
gaagaguuuaauagauuaatt

SEQ ID NO: 126 - DNA, 21 bp, Artificial Sequence
  Description of Artificial Sequence: Synthetic oligonucleotide
  Description of Combined DNA/RNA Molecule: Synthetic oligonucleotide
  X-linked inhibitor of apoptosis (XIAP) siRNA sense strand target
aagaguuuaauagauuaaatt

SEQ ID NO: 127 - DNA, 21 bp, Artificial Sequence
  Description of Artificial Sequence: Synthetic oligonucleotide
  Description of Combined DNA/RNA Molecule: Synthetic oligonucleotide
  X-linked inhibitor of apoptosis (XIAP) siRNA sense strand target
gugguaguccuguuucagctt

SEQ ID NO: 128 - DNA, 21 bp, Artificial Sequence
  Description of Artificial Sequence: Synthetic oligonucleotide
  Description of Combined DNA/RNA Molecule: Synthetic oligonucleotide
  X-linked inhibitor of apoptosis (XIAP) siRNA sense strand target
aguccuguuucagcaucaatt

SEQ ID NO: 129 - DNA, 21 bp, Artificial Sequence
  Description of Artificial Sequence: Synthetic oligonucleotide
  Description of Combined DNA/RNA Molecule: Synthetic oligonucleotide
  X-linked inhibitor of apoptosis (XIAP) siRNA sense strand target
guccuguuucagcaucaactt

SEQ ID NO: 130 - DNA, 21 bp, Artificial Sequence
  Description of Artificial Sequence: Synthetic oligonucleotide
  Description of Combined DNA/RNA Molecule: Synthetic oligonucleotide
  X-linked inhibitor of apoptosis (XIAP) siRNA sense strand target
uccuguuucagcaucaacatt

SEQ ID NO: 131 - DNA, 21 bp, Artificial Sequence
  Description of Artificial Sequence: Synthetic oligonucleotide
  Description of Combined DNA/RNA Molecule: Synthetic oligonucleotide
  X-linked inhibitor of apoptosis (XIAP) siRNA sense strand target
cccaaauugcagauuuauctt

SEQ ID NO: 132 - DNA, 21 bp, Artificial Sequence
  Description of Artificial Sequence: Synthetic oligonucleotide
  Description of Combined DNA/RNA Molecule: Synthetic oligonucleotide
  X-linked inhibitor of apoptosis (XIAP) siRNA sense strand target
uagugccacgcagucuacatt

SEQ ID NO: 133 - DNA, 21 bp, Artificial Sequence
  Description of Artificial Sequence: Synthetic oligonucleotide
  Description of Combined DNA/RNA Molecule: Synthetic oligonucleotide
  X-linked inhibitor of apoptosis (XIAP) siRNA sense strand target
gaguucugauaggaauuuctt

SEQ ID NO: 134 - DNA, 21 bp, Artificial Sequence
  Description of Artificial Sequence: Synthetic oligonucleotide
  Description of Combined DNA/RNA Molecule: Synthetic oligonucleotide
  X-linked inhibitor of apoptosis (XIAP) siRNA sense strand target
ugauaggaauuucccaaautt

SEQ ID NO: 135 - DNA, 21 bp, Artificial Sequence
  Description of Artificial Sequence: Synthetic oligonucleotide
  Description of Combined DNA/RNA Molecule: Synthetic oligonucleotide
  X-linked inhibitor of apoptosis (XIAP) siRNA sense strand target
gauaggaauuucccaaauutt

SEQ ID NO: 136 - DNA, 21 bp, Artificial Sequence
  Description of Artificial Sequence: Synthetic oligonucleotide
  Description of Combined DNA/RNA Molecule: Synthetic oligonucleotide
  X-linked inhibitor of apoptosis (XIAP) siRNA sense strand target
uaggaauuucccaaauucatt

SEQ ID NO: 137 - DNA, 21 bp, Artificial Sequence
  Description of Artificial Sequence: Synthetic oligonucleotide
  Description of Combined DNA/RNA Molecule: Synthetic oligonucleotide
  X-linked inhibitor of apoptosis (XIAP) siRNA sense strand target
aggaauuucccaaauucaatt

SEQ ID NO: 138 - DNA, 21 bp, Artificial Sequence
  Description of Artificial Sequence: Synthetic oligonucleotide
  Description of Combined DNA/RNA Molecule: Synthetic oligonucleotide
  X-linked inhibitor of apoptosis (XIAP) siRNA sense strand target
gcuugcaagagcuggauuutt

SEQ ID NO: 139 - DNA, 21 bp, Artificial Sequence
  Description of Artificial Sequence: Synthetic oligonucleotide
  Description of Combined DNA/RNA Molecule: Synthetic oligonucleotide
  X-linked inhibitor of apoptosis (XIAP) siRNA sense strand target
guacugaagagcagcuaagtt

SEQ ID NO: 140 - DNA, 21 bp, Artificial Sequence
  Description of Artificial Sequence: Synthetic oligonucleotide
  Description of Combined DNA/RNA Molecule: Synthetic oligonucleotide
  X-linked inhibitor of apoptosis (XIAP) siRNA sense strand target
aaucuguauggauagaaautt

SEQ ID NO: 141 - DNA, 21 bp, Artificial Sequence
  Description of Artificial Sequence: Synthetic oligonucleotide
  Description of Combined DNA/RNA Molecule: Synthetic oligonucleotide
  X-linked inhibitor of apoptosis (XIAP) siRNA sense strand target
aucuguauggauagaaauatt

SEQ ID NO: 142 - DNA, 21 bp, Artificial Sequence
  Description of Artificial Sequence: Synthetic oligonucleotide
  Description of Combined DNA/RNA Molecule: Synthetic oligonucleotide
  X-linked inhibitor of apoptosis (XIAP) siRNA sense strand target
ucuguauggauagaaauautt

SEQ ID NO: 143 - DNA, 21 bp, Artificial Sequence
  Description of Artificial Sequence: Synthetic oligonucleotide
  Description of Combined DNA/RNA Molecule: Synthetic oligonucleotide
  X-linked inhibitor of apoptosis (XIAP) siRNA sense strand target
cuguauggauagaaauauutt

SEQ ID NO: 144 - DNA, 21 bp, Artificial Sequence
  Description of Artificial Sequence: Synthetic oligonucleotide
  Description of Combined DNA/RNA Molecule: Synthetic oligonucleotide
  X-linked inhibitor of apoptosis (XIAP) siRNA sense strand target
uggauagaaauauugcuautt

SEQ ID NO: 145 - DNA, 21 bp, Artificial Sequence
  Description of Artificial Sequence: Synthetic oligonucleotide
  Description of Combined DNA/RNA Molecule: Synthetic oligonucleotide
  X-linked inhibitor of apoptosis (XIAP) siRNA sense strand target
ggauagaaauauugcuauctt

SEQ ID NO: 146 - DNA, 21 bp, Artificial Sequence
  Description of Artificial Sequence: Synthetic oligonucleotide
  Description of Combined DNA/RNA Molecule: Synthetic oligonucleotide
  X-linked inhibitor of apoptosis (XIAP) siRNA sense
gaauuuguagaagaguuuatt

SEQ ID NO: 147 - DNA, 21 bp, Artificial Sequence
  Description of Artificial Sequence: Synthetic oligonucleotide
  Description of Combined DNA/RNA Molecule: Synthetic oligonucleotide
  X-linked inhibitor of apoptosis (XIAP) siRNA antisense
uaaacucuucuacaaauuctt

SEQ ID NO: 148 - DNA, 21 bp, Artificial Sequence
  Description of Artificial Sequence: Synthetic oligonucleotide
  Description of Combined DNA/RNA Molecule: Synthetic oligonucleotide
  X-linked inhibitor of apoptosis (XIAP) siRNA sense
gaagaguuuaauagauuaatt

SEQ ID NO: 149 - DNA, 21 bp, Artificial Sequence
  Description of Artificial Sequence: Synthetic oligonucleotide
  Description of Combined DNA/RNA Molecule: Synthetic oligonucleotide
  X-linked inhibitor of apoptosis (XIAP) siRNA antisense
uuaaucuauuaaacucuuctt

SEQ ID NO: 150 - DNA, 21 bp, Artificial Sequence
  Description of Artificial Sequence: Synthetic oligonucleotide
  Description of Combined DNA/RNA Molecule: Synthetic oligonucleotide
  X-linked inhibitor of apoptosis (XIAP) siRNA sense
aagaguuuaauagauuaaatt

SEQ ID NO: 151 - DNA, 21 bp, Artificial Sequence
  Description of Artificial Sequence: Synthetic oligonucleotide
  Description of Combined DNA/RNA Molecule: Synthetic oligonucleotide
  X-linked inhibitor of apoptosis (XIAP) siRNA antisense
uuuaaucuauuaaacucuutt

SEQ ID NO: 152 - DNA, 21 bp, Artificial Sequence
  Description of Artificial Sequence: Synthetic oligonucleotide
  Description of Combined DNA/RNA Molecule: Synthetic oligonucleotide
  X-linked inhibitor of apoptosis (XIAP) siRNA sense
gugguaguccuguuucagctt

SEQ ID NO: 153 - DNA, 21 bp, Artificial Sequence
  Description of Artificial Sequence: Synthetic oligonucleotide
  Description of Combined DNA/RNA Molecule: Synthetic oligonucleotide
  X-linked inhibitor of apoptosis (XIAP) siRNA antisense
gcugaaacaggacuaccactt

SEQ ID NO: 154 - DNA, 21 bp, Artificial Sequence
  Description of Artificial Sequence: Synthetic oligonucleotide
  Description of Combined DNA/RNA Molecule: Synthetic oligonucleotide
  X-linked inhibitor of apoptosis (XIAP) siRNA sense
uccuguuucagcaucaacatt

SEQ ID NO: 155 - DNA, 21 bp, Artificial Sequence
  Description of Artificial Sequence: Synthetic oligonucleotide
  Description of Combined DNA/RNA Molecule: Synthetic oligonucleotide
  X-linked inhibitor of apoptosis (XIAP) siRNA antisense
uguugaugcugaaacaggatt

SEQ ID NO: 156 - DNA, 21 bp, Artificial Sequence
  Description of Artificial Sequence: Synthetic oligonucleotide
  Description of Combined DNA/RNA Molecule: Synthetic oligonucleotide
  X-linked inhibitor of apoptosis (XIAP) siRNA sense
cccaaauugcagauuuauctt

SEQ ID NO: 157 - DNA, 21 bp, Artificial Sequence
  Description of Artificial Sequence: Synthetic oligonucleotide
  Description of Combined DNA/RNA Molecule: Synthetic oligonucleotide
  X-linked inhibitor of apoptosis (XIAP) siRNA antisense
gauaaaucugcaauuugggtt

SEQ ID NO: 158 - DNA, 21 bp, Artificial Sequence
  Description of Artificial Sequence: Synthetic oligonucleotide
  Description of Combined DNA/RNA Molecule: Synthetic oligonucleotide
  X-linked inhibitor of apoptosis (XIAP) siRNA sense
uagugccacgcagucuacatt

SEQ ID NO: 159 - DNA, 21 bp, Artificial Sequence
  Description of Artificial Sequence: Synthetic oligonucleotide
  Description of Combined DNA/RNA Molecule: Synthetic oligonucleotide
  X-linked inhibitor of apoptosis (XIAP) siRNA antisense
uguagacugcguggcacuatt

SEQ ID NO: 160 - DNA, 21 bp, Artificial Sequence
  Description of Artificial Sequence: Synthetic oligonucleotide
  Description of Combined DNA/RNA Molecule: Synthetic oligonucleotide
  X-linked inhibitor of apoptosis (XIAP) siRNA sense
gaguucugauaggaauuuctt

SEQ ID NO: 161 - DNA, 21 bp, Artificial Sequence
  Description of Artificial Sequence: Synthetic oligonucleotide
  Description of Combined DNA/RNA Molecule: Synthetic oligonucleotide
  X-linked inhibitor of apoptosis (XIAP) siRNA antisense
gaaauuccuaucagaacuctt

SEQ ID NO: 162 - DNA, 21 bp, Artificial Sequence
  Description of Artificial Sequence: Synthetic oligonucleotide
  Description of Combined DNA/RNA Molecule: Synthetic oligonucleotide
  X-linked inhibitor of apoptosis (XIAP) siRNA sense
uaggaauuucccaaauucatt

SEQ ID NO: 163 - DNA, 21 bp, Artificial Sequence
  Description of Artificial Sequence: Synthetic oligonucleotide
  Description of Combined DNA/RNA Molecule: Synthetic oligonucleotide
  X-linked inhibitor of apoptosis (XIAP) siRNA antisense
ugaauuugggaaauuccuatt

SEQ ID NO: 164 - DNA, 21 bp, Artificial Sequence
  Description of Artificial Sequence: Synthetic oligonucleotide
  Description of Combined DNA/RNA Molecule: Synthetic oligonucleotide
  X-linked inhibitor of apoptosis (XIAP) siRNA sense
aggaauuucccaaauucaatt

SEQ ID NO: 165 - DNA, 21 bp, Artificial Sequence
  Description of Artificial Sequence: Synthetic oligonucleotide
  Description of Combined DNA/RNA Molecule: Synthetic oligonucleotide
  X-linked inhibitor of apoptosis (XIAP) siRNA antisense
uugaauuugggaaauuccutt

SEQ ID NO: 166 - DNA, 21 bp, Artificial Sequence
  Description of Artificial Sequence: Synthetic oligonucleotide
  Description of Combined DNA/RNA Molecule: Synthetic oligonucleotide
  X-linked inhibitor of apoptosis (XIAP) siRNA sense
gcuugcaagagcuggauuutt

SEQ ID NO: 167 - DNA, 21 bp, Artificial Sequence
  Description of Artificial Sequence: Synthetic oligonucleotide
  Description of Combined DNA/RNA Molecule: Synthetic oligonucleotide
  X-linked inhibitor of apoptosis (XIAP) siRNA antisense
aaauccagcucuugcaagctt

SEQ ID NO: 168 - DNA, 21 bp, Artificial Sequence
  Description of Artificial Sequence: Synthetic oligonucleotide
  Description of Combined DNA/RNA Molecule: Synthetic oligonucleotide
  X-linked inhibitor of apoptosis (XIAP) siRNA sense
guacugaagagcagcuaagtt

SEQ ID NO: 169 - DNA, 21 bp, Artificial Sequence
  Description of Artificial Sequence: Synthetic oligonucleotide
  Description of Combined DNA/RNA Molecule: Synthetic oligonucleotide
  X-linked inhibitor of apoptosis (XIAP) siRNA antisense
cuuagcugcucuucaguactt

SEQ ID NO: 170 - DNA, 21 bp, Artificial Sequence
  Description of Artificial Sequence: Synthetic oligonucleotide
  Description of Combined DNA/RNA Molecule: Synthetic oligonucleotide
  X-linked inhibitor of apoptosis (XIAP) siRNA sense
uggauagaaauauugcuautt

SEQ ID NO: 171 - DNA, 21 bp, Artificial Sequence
  Description of Artificial Sequence: Synthetic oligonucleotide
  Description of Combined DNA/RNA Molecule: Synthetic oligonucleotide
  X-linked inhibitor of apoptosis (XIAP) siRNA antisense
auagcaauauuucuauccatt

SEQ ID NO: 172 - DNA, 21 bp, Artificial Sequence
  Description of Artificial Sequence: Synthetic oligonucleotide
  Description of Combined DNA/RNA Molecule: Synthetic oligonucleotide
  X-linked inhibitor of apoptosis (XIAP) siRNA sense
ggauagaaauauugcuauctt

SEQ ID NO: 173 - DNA, 21 bp, Artificial Sequence
  Description of Artificial Sequence: Synthetic oligonucleotide
  Description of Combined DNA/RNA Molecule: Synthetic oligonucleotide
  X-linked inhibitor of apoptosis (XIAP) siRNA antisense
gauagcaauauuucuaucctt

SEQ ID NO: 174 - DNA, 23 bp, Artificial Sequence
  Description of Artificial Sequence: Synthetic oligonucleotide
  Mitotic kinesin microtubule-associated protein Eg5 (Kif11) siRNA
acctgcgtgcagtcggtcctcca

SEQ ID NO: 175 - DNA, 23 bp, Artificial Sequence
  Description of Artificial Sequence: Synthetic oligonucleotide
  Mitotic kinesin microtubule-associated protein Eg5 (Kif11) siRNA
cctgcgtgcagtcggtcctccag

SEQ ID NO: 176 - DNA, 23 bp, Artificial Sequence
  Description of Artificial Sequence: Synthetic oligonucleotide
  Mitotic kinesin microtubule-associated protein Eg5 (Kif11) siRNA
ctgcgtgcagtcggtcctccagg

SEQ ID NO: 177 - DNA, 23 bp, Artificial Sequence
  Description of Artificial Sequence: Synthetic oligonucleotide
  Mitotic kinesin microtubule-associated protein Eg5 (Kif11) siRNA
tgcgtgcagtcggtcctccaggc

SEQ ID NO: 178 - DNA, 23 bp, Artificial Sequence
  Description of Artificial Sequence: Synthetic oligonucleotide
  Mitotic kinesin microtubule-associated protein Eg5 (Kif11) siRNA
gcgtgcagtcggtcctccaggcc

SEQ ID NO: 179 - DNA, 23 bp, Artificial Sequence
  Description of Artificial Sequence: Synthetic oligonucleotide
  Mitotic kinesin microtubule-associated protein Eg5 (Kif11) siRNA
cgtgcagtcggtcctccaggcca

SEQ ID NO: 180 - DNA, 23 bp, Artificial Sequence
  Description of Artificial Sequence: Synthetic oligonucleotide
  Mitotic kinesin microtubule-associated protein Eg5 (Kif11) siRNA
gtgcagtcggtcctccaggccac

SEQ ID NO: 181 - DNA, 23 bp, Artificial Sequence
  Description of Artificial Sequence: Synthetic oligonucleotide
  Mitotic kinesin microtubule-associated protein Eg5 (Kif11) siRNA
tgcagtcggtcctccaggccacg

SEQ ID NO: 182 - DNA, 23 bp, Artificial Sequence
  Description of Artificial Sequence: Synthetic oligonucleotide
  Mitotic kinesin microtubule-associated protein Eg5 (Kif11) siRNA
gcagtcggtcctccaggccacgc

SEQ ID NO: 183 - DNA, 23 bp, Artificial Sequence
  Description of Artificial Sequence: Synthetic oligonucleotide
  Mitotic kinesin microtubule-associated protein Eg5 (Kif11) siRNA
cagtcggtcctccaggccacgca

SEQ ID NO: 184 - DNA, 23 bp, Artificial Sequence
  Description of Artificial Sequence: Synthetic oligonucleotide
  Mitotic kinesin microtubule-associated protein Eg5 (Kif11) siRNA
agtcggtcctccaggccacgcag

SEQ ID NO: 185 - DNA, 23 bp, Artificial Sequence
  Description of Artificial Sequence: Synthetic oligonucleotide
  Mitotic kinesin microtubule-associated protein Eg5 (Kif11) siRNA
gtcggtcctccaggccacgcagc

SEQ ID NO: 186 - DNA, 23 bp, Artificial Sequence
  Description of Artificial Sequence: Synthetic oligonucleotide
  Mitotic kinesin microtubule-associated protein Eg5 (Kif11) siRNA
tcggtcctccaggccacgcagcg

SEQ ID NO: 187 - DNA, 23 bp, Artificial Sequence
  Description of Artificial Sequence: Synthetic oligonucleotide
  Mitotic kinesin microtubule-associated protein Eg5 (Kif11) siRNA
cggtcctccaggccacgcagcgc

SEQ ID NO: 188 - DNA, 23 bp, Artificial Sequence
  Description of Artificial Sequence: Synthetic oligonucleotide
  Mitotic kinesin microtubule-associated protein Eg5 (Kif11) siRNA
ggtcctccaggccacgcagcgcc

SEQ ID NO: 189 - DNA, 23 bp, Artificial Sequence
  Description of Artificial Sequence: Synthetic oligonucleotide
  Mitotic kinesin microtubule-associated protein Eg5 (Kif11) siRNA
gtcctccaggccacgcagcgccc

SEQ ID NO: 190 - DNA, 23 bp, Artificial Sequence
  Description of Artificial Sequence: Synthetic oligonucleotide
  Mitotic kinesin microtubule-associated protein Eg5 (Kif11) siRNA
tcctccaggccacgcagcgcccg

SEQ ID NO: 191 - DNA, 23 bp, Artificial Sequence
  Description of Artificial Sequence: Synthetic oligonucleotide
  Mitotic kinesin microtubule-associated protein Eg5 (Kif11) siRNA
cctccaggccacgcagcgcccga

SEQ ID NO: 192 - DNA, 23 bp, Artificial Sequence
  Description of Artificial Sequence: Synthetic oligonucleotide
  Mitotic kinesin microtubule-associated protein Eg5 (Kif11) siRNA
ctccaggccacgcagcgcccgag

SEQ ID NO: 193 - DNA, 23 bp, Artificial Sequence
  Description of Artificial Sequence: Synthetic oligonucleotide
  Mitotic kinesin microtubule-associated protein Eg5 (Kif11) siRNA
tccaggccacgcagcgcccgaga

SEQ ID NO: 194 - DNA, 23 bp, Artificial Sequence
  Description of Artificial Sequence: Synthetic oligonucleotide
  Mitotic kinesin microtubule-associated protein Eg5 (Kif11) siRNA
ccaggccacgcagcgcccgagag

SEQ ID NO: 195 - DNA, 23 bp, Artificial Sequence
  Description of Artificial Sequence: Synthetic oligonucleotide
  Mitotic kinesin microtubule-associated protein Eg5 (Kif11) siRNA
caggccacgcagcgcccgagagt

SEQ ID NO: 196 - DNA, 23 bp, Artificial Sequence
  Description of Artificial Sequence: Synthetic oligonucleotide
  Mitotic kinesin microtubule-associated protein Eg5 (Kif11) siRNA
aggccacgcagcgcccgagagta

SEQ ID NO: 197 - DNA, 23 bp, Artificial Sequence
  Description of Artificial Sequence: Synthetic oligonucleotide
  Mitotic kinesin microtubule-associated protein Eg5 (Kif11) siRNA
ggccacgcagcgcccgagagtac

SEQ ID NO: 198 - DNA, 23 bp, Artificial Sequence
  Description of Artificial Sequence: Synthetic oligonucleotide
  Mitotic kinesin microtubule-associated protein Eg5 (Kif11) siRNA
gccacgcagcgcccgagagtacc

SEQ ID NO: 199 - DNA, 23 bp, Artificial Sequence
  Description of Artificial Sequence: Synthetic oligonucleotide
  Mitotic kinesin microtubule-associated protein Eg5 (Kif11) siRNA
ccacgcagcgcccgagagtacca

SEQ ID NO: 200 - DNA, 23 bp, Artificial Sequence
  Description of Artificial Sequence: Synthetic oligonucleotide
  Mitotic kinesin microtubule-associated protein Eg5 (Kif11) siRNA
cacgcagcgcccgagagtaccag

SEQ ID NO: 201 - DNA, 23 bp, Artificial Sequence
  Description of Artificial Sequence: Synthetic oligonucleotide
  Mitotic kinesin microtubule-associated protein Eg5 (Kif11) siRNA
acgcagcgcccgagagtaccagg

SEQ ID NO: 202 - DNA, 23 bp, Artificial Sequence
  Description of Artificial Sequence: Synthetic oligonucleotide
  Mitotic kinesin microtubule-associated protein Eg5 (Kif11) siRNA
cgcagcgcccgagagtaccaggg

SEQ ID NO: 203 - DNA, 23 bp, Artificial Sequence
  Description of Artificial Sequence: Synthetic oligonucleotide
  Mitotic kinesin microtubule-associated protein Eg5 (Kif11) siRNA
gcagcgcccgagagtaccaggga

SEQ ID NO: 204 - DNA, 23 bp, Artificial Sequence
  Description of Artificial Sequence: Synthetic oligonucleotide
  Mitotic kinesin microtubule-associated protein Eg5 (Kif11) siRNA
cagcgcccgagagtaccagggag

SEQ ID NO: 205 - DNA, 23 bp, Artificial Sequence
  Description of Artificial Sequence: Synthetic oligonucleotide
  Mitotic kinesin microtubule-associated protein Eg5 (Kif11) siRNA
agcgcccgagagtaccagggaga

SEQ ID NO: 206 - DNA, 23 bp, Artificial Sequence
  Description of Artificial Sequence: Synthetic oligonucleotide
  Mitotic kinesin microtubule-associated protein Eg5 (Kif11) siRNA
gcgcccgagagtaccagggagac

SEQ ID NO: 207 - DNA, 23 bp, Artificial Sequence
  Description of Artificial Sequence: Synthetic oligonucleotide
  Mitotic kinesin microtubule-associated protein Eg5 (Kif11) siRNA
cgcccgagagtaccagggagact

SEQ ID NO: 208 - DNA, 23 bp, Artificial Sequence
  Description of Artificial Sequence: Synthetic oligonucleotide
  Mitotic kinesin microtubule-associated protein Eg5 (Kif11) siRNA
gcccgagagtaccagggagactc

SEQ ID NO: 209 - DNA, 23 bp, Artificial Sequence
  Description of Artificial Sequence: Synthetic oligonucleotide
  Mitotic kinesin microtubule-associated protein Eg5 (Kif11) siRNA
cccgagagtaccagggagactcc

SEQ ID NO: 210 - DNA, 23 bp, Artificial Sequence
  Description of Artificial Sequence: Synthetic oligonucleotide
  Mitotic kinesin microtubule-associated protein Eg5 (Kif11) siRNA
ccgagagtaccagggagactccg

SEQ ID NO: 211 - DNA, 23 bp, Artificial Sequence
  Description of Artificial Sequence: Synthetic oligonucleotide
  Mitotic kinesin microtubule-associated protein Eg5 (Kif11) siRNA
cgagagtaccagggagactccgg

SEQ ID NO: 212 - DNA, 23 bp, Artificial Sequence
  Description of Artificial Sequence: Synthetic oligonucleotide
  Mitotic kinesin microtubule-associated protein Eg5 (Kif11) siRNA
gagagtaccagggagactccggc

SEQ ID NO: 213 - DNA, 23 bp, Artificial Sequence
  Description of Artificial Sequence: Synthetic oligonucleotide
  Mitotic kinesin microtubule-associated protein Eg5 (Kif11) siRNA
agagtaccagggagactccggcc

SEQ ID NO: 214 - DNA, 23 bp, Artificial Sequence
  Description of Artificial Sequence: Synthetic oligonucleotide
  Mitotic kinesin microtubule-associated protein Eg5 (Kif11) siRNA
gagtaccagggagactccggccc

SEQ ID NO: 215 - DNA, 23 bp, Artificial Sequence
  Description of Artificial Sequence: Synthetic oligonucleotide
  Mitotic kinesin microtubule-associated protein Eg5 (Kif11) siRNA
agtaccagggagactccggcccc

SEQ ID NO: 216 - DNA, 23 bp, Artificial Sequence
  Description of Artificial Sequence: Synthetic oligonucleotide
  Mitotic kinesin microtubule-associated protein Eg5 (Kif11) siRNA
gtaccagggagactccggcccct

SEQ ID NO: 217 - DNA, 23 bp, Artificial Sequence
  Description of Artificial Sequence: Synthetic oligonucleotide
  Mitotic kinesin microtubule-associated protein Eg5 (Kif11) siRNA
taccagggagactccggcccctg

SEQ ID NO: 218 - DNA, 23 bp, Artificial Sequence
  Description of Artificial Sequence: Synthetic oligonucleotide
  Mitotic kinesin microtubule-associated protein Eg5 (Kif11) siRNA
accagggagactccggcccctgt

SEQ ID NO: 219 - DNA, 23 bp, Artificial Sequence
  Description of Artificial Sequence: Synthetic oligonucleotide
  Mitotic kinesin microtubule-associated protein Eg5 (Kif11) siRNA
ccagggagactccggcccctgtc

SEQ ID NO: 220 - DNA, 23 bp, Artificial Sequence
  Description of Artificial Sequence: Synthetic oligonucleotide
  Mitotic kinesin microtubule-associated protein Eg5 (Kif11) siRNA
cagggagactccggcccctgtcg

SEQ ID NO: 221 - DNA, 23 bp, Artificial Sequence
  Description of Artificial Sequence: Synthetic oligonucleotide
  Mitotic kinesin microtubule-associated protein Eg5 (Kif11) siRNA
agggagactccggcccctgtcgg

SEQ ID NO: 222 - DNA, 23 bp, Artificial Sequence
  Description of Artificial Sequence: Synthetic oligonucleotide
  Mitotic kinesin microtubule-associated protein Eg5 (Kif11) siRNA
gggagactccggcccctgtcggc

SEQ ID NO: 223 - DNA, 23 bp, Artificial Sequence
  Description of Artificial Sequence: Synthetic oligonucleotide
  Mitotic kinesin microtubule-associated protein Eg5 (Kif11) siRNA
ggagactccggcccctgtcggcg

SEQ ID NO: 224 - DNA, 23 bp, Artificial Sequence
  Description of Artificial Sequence: Synthetic oligonucleotide
  Mitotic kinesin microtubule-associated protein Eg5 (Kif11) siRNA
gagactccggcccctgtcggcgc

SEQ ID NO: 225 - DNA, 23 bp, Artificial Sequence
  Description of Artificial Sequence: Synthetic oligonucleotide
  Mitotic kinesin microtubule-associated protein Eg5 (Kif11) siRNA
agactccggcccctgtcggcgcc

SEQ ID NO: 226 - DNA, 23 bp, Artificial Sequence
  Description of Artificial Sequence: Synthetic oligonucleotide
  Mitotic kinesin microtubule-associated protein Eg5 (Kif11) siRNA
gactccggcccctgtcggcgcca

SEQ ID NO: 227 - DNA, 23 bp, Artificial Sequence
  Description of Artificial Sequence: Synthetic oligonucleotide
  Mitotic kinesin microtubule-associated protein Eg5 (Kif11) siRNA
actccggcccctgtcggcgccaa

SEQ ID NO: 228 - DNA, 23 bp, Artificial Sequence
  Description of Artificial Sequence: Synthetic oligonucleotide
  Mitotic kinesin microtubule-associated protein Eg5 (Kif11) siRNA
ctccggcccctgtcggcgccaag

SEQ ID NO: 229 - DNA, 23 bp, Artificial Sequence
  Description of Artificial Sequence: Synthetic oligonucleotide
  Mitotic kinesin microtubule-associated protein Eg5 (Kif11) siRNA
tccggcccctgtcggcgccaagc

SEQ ID NO: 230 - DNA, 23 bp, Artificial Sequence
  Description of Artificial Sequence: Synthetic oligonucleotide
  Mitotic kinesin microtubule-associated protein Eg5 (Kif11) siRNA
ccggcccctgtcggcgccaagcc

SEQ ID NO: 231 - DNA, 23 bp, Artificial Sequence
  Description of Artificial Sequence: Synthetic oligonucleotide
  Mitotic kinesin microtubule-associated protein Eg5 (Kif11) siRNA
cggcccctgtcggcgccaagccc

SEQ ID NO: 232 - DNA, 23 bp, Artificial Sequence
  Description of Artificial Sequence: Synthetic oligonucleotide
  Mitotic kinesin microtubule-associated protein Eg5 (Kif11) siRNA
ggcccctgtcggcgccaagcccc

SEQ ID NO: 233 - DNA, 23 bp, Artificial Sequence
  Description of Artificial Sequence: Synthetic oligonucleotide
  Mitotic kinesin microtubule-associated protein Eg5 (Kif11) siRNA
gcccctgtcggcgccaagcccct

SEQ ID NO: 234 - DNA, 23 bp, Artificial Sequence
  Description of Artificial Sequence: Synthetic oligonucleotide
  Mitotic kinesin microtubule-associated protein Eg5 (Kif11) siRNA
cccctgtcggcgccaagcccctc

SEQ ID NO: 235 - DNA, 23 bp, Artificial Sequence
  Description of Artificial Sequence: Synthetic oligonucleotide
  Mitotic kinesin microtubule-associated protein Eg5 (Kif11) siRNA
ccctgtcggcgccaagcccctcc

SEQ ID NO: 236 - DNA, 23 bp, Artificial Sequence
  Description of Artificial Sequence: Synthetic oligonucleotide
  Mitotic kinesin microtubule-associated protein Eg5 (Kif11) siRNA
cctgtcggcgccaagcccctccg

SEQ ID NO: 237 - DNA, 23 bp, Artificial Sequence
  Description of Artificial Sequence: Synthetic oligonucleotide
  Mitotic kinesin microtubule-associated protein Eg5 (Kif11) siRNA
ctgtcggcgccaagcccctccgc

SEQ ID NO: 238 - DNA, 23 bp, Artificial Sequence
  Description of Artificial Sequence: Synthetic oligonucleotide
  Mitotic kinesin microtubule-associated protein Eg5 (Kif11) siRNA
tgtcggcgccaagcccctccgcc

SEQ ID NO: 239 - DNA, 23 bp, Artificial Sequence
  Description of Artificial Sequence: Synthetic oligonucleotide
  Mitotic kinesin microtubule-associated protein Eg5 (Kif11) siRNA
gtcggcgccaagcccctccgccc

SEQ ID NO: 240 - DNA, 23 bp, Artificial Sequence
  Description of Artificial Sequence: Synthetic oligonucleotide
  Mitotic kinesin microtubule-associated protein Eg5 (Kif11) siRNA
tcggcgccaagcccctccgcccc

SEQ ID NO: 241 - DNA, 23 bp, Artificial Sequence
  Description of Artificial Sequence: Synthetic oligonucleotide
  Mitotic kinesin microtubule-associated protein Eg5 (Kif11) siRNA
cggcgccaagcccctccgcccct

SEQ ID NO: 242 - DNA, 23 bp, Artificial Sequence
  Description of Artificial Sequence: Synthetic oligonucleotide
  Mitotic kinesin microtubule-associated protein Eg5 (Kif11) siRNA
ggcgccaagcccctccgcccctc

SEQ ID NO: 243 - DNA, 23 bp, Artificial Sequence
  Description of Artificial Sequence: Synthetic oligonucleotide
  Mitotic kinesin microtubule-associated protein Eg5 (Kif11) siRNA
gcgccaagcccctccgcccctca

SEQ ID NO: 244 - DNA, 23 bp, Artificial Sequence
  Description of Artificial Sequence: Synthetic oligonucleotide
  Mitotic kinesin microtubule-associated protein Eg5 (Kif11) siRNA
cgccaagcccctccgcccctcac

SEQ ID NO: 245 - DNA, 23 bp, Artificial Sequence
  Description of Artificial Sequence: Synthetic oligonucleotide
  Mitotic kinesin microtubule-associated protein Eg5 (Kif11) siRNA
gccaagcccctccgcccctcaca

SEQ ID NO: 246 - DNA, 23 bp, Artificial Sequence
  Description of Artificial Sequence: Synthetic oligonucleotide
  Mitotic kinesin microtubule-associated protein Eg5 (Kif11) siRNA
ccaagcccctccgcccctcacag

SEQ ID NO: 247 - DNA, 23 bp, Artificial Sequence
  Description of Artificial Sequence: Synthetic oligonucleotide
  Mitotic kinesin microtubule-associated protein Eg5 (Kif11) siRNA
caagcccctccgcccctcacagc

SEQ ID NO: 248 - DNA, 23 bp, Artificial Sequence
  Description of Artificial Sequence: Synthetic oligonucleotide
  Mitotic kinesin microtubule-associated protein Eg5 (Kif11) siRNA
aagcccctccgcccctcacagcg

SEQ ID NO: 249 - DNA, 23 bp, Artificial Sequence
  Description of Artificial Sequence: Synthetic oligonucleotide
  Mitotic kinesin microtubule-associated protein Eg5 (Kif11) siRNA
agcccctccgcccctcacagcgc

SEQ ID NO: 250 - DNA, 23 bp, Artificial Sequence
  Description of Artificial Sequence: Synthetic oligonucleotide
  Mitotic kinesin microtubule-associated protein Eg5 (Kif11) siRNA
gcccctccgcccctcacagcgcc

SEQ ID NO: 251 - DNA, 23 bp, Artificial Sequence
  Description of Artificial Sequence: Synthetic oligonucleotide
  Mitotic kinesin microtubule-associated protein Eg5 (Kif11) siRNA
cccctccgcccctcacagcgccc

SEQ ID NO: 252 - DNA, 23 bp, Artificial Sequence
  Description of Artificial Sequence: Synthetic oligonucleotide
  Mitotic kinesin microtubule-associated protein Eg5 (Kif11) siRNA
ccctccgcccctcacagcgccca

SEQ ID NO: 253 - DNA, 23 bp, Artificial Sequence
  Description of Artificial Sequence: Synthetic oligonucleotide
  Mitotic kinesin microtubule-associated protein Eg5 (Kif11) siRNA
cctccgcccctcacagcgcccag

SEQ ID NO: 254 - DNA, 23 bp, Artificial Sequence
  Description of Artificial Sequence: Synthetic oligonucleotide
  Mitotic kinesin microtubule-associated protein Eg5 (Kif11) siRNA
ctccgcccctcacagcgcccagg

SEQ ID NO: 255 - DNA, 23 bp, Artificial Sequence
  Description of Artificial Sequence: Synthetic oligonucleotide
  Mitotic kinesin microtubule-associated protein Eg5 (Kif11) siRNA
tccgcccctcacagcgcccaggt

SEQ ID NO: 256 - DNA, 23 bp, Artificial Sequence
  Description of Artificial Sequence: Synthetic oligonucleotide
  Mitotic kinesin microtubule-associated protein Eg5 (Kif11) siRNA
ccgcccctcacagcgcccaggtc

SEQ ID NO: 257 - DNA, 23 bp, Artificial Sequence
  Description of Artificial Sequence: Synthetic oligonucleotide
  Mitotic kinesin microtubule-associated protein Eg5 (Kif11) siRNA
cgcccctcacagcgcccaggtcc

SEQ ID NO: 258 - DNA, 23 bp, Artificial Sequence
  Description of Artificial Sequence: Synthetic oligonucleotide
  Mitotic kinesin microtubule-associated protein Eg5 (Kif11) siRNA
gcccctcacagcgcccaggtccg

SEQ ID NO: 259 - DNA, 23 bp, Artificial Sequence
  Description of Artificial Sequence: Synthetic oligonucleotide
  Mitotic kinesin microtubule-associated protein Eg5 (Kif11) siRNA
cccctcacagcgcccaggtccgc

SEQ ID NO: 260 - DNA, 23 bp, Artificial Sequence
  Description of Artificial Sequence: Synthetic oligonucleotide
  Mitotic kinesin microtubule-associated protein Eg5 (Kif11) siRNA
ccctcacagcgcccaggtccgcg

SEQ ID NO: 261 - DNA, 23 bp, Artificial Sequence
  Description of Artificial Sequence: Synthetic oligonucleotide
  Mitotic kinesin microtubule-associated protein Eg5 (Kif11) siRNA
cctcacagcgcccaggtccgcgg

SEQ ID NO: 262 - DNA, 23 bp, Artificial Sequence
  Description of Artificial Sequence: Synthetic oligonucleotide
  Mitotic kinesin microtubule-associated protein Eg5 (Kif11) siRNA
ctcacagcgcccaggtccgcggc

SEQ ID NO: 263 - DNA, 23 bp, Artificial Sequence
  Description of Artificial Sequence: Synthetic oligonucleotide
  Mitotic kinesin microtubule-associated protein Eg5 (Kif11) siRNA
tcacagcgcccaggtccgcggcc

SEQ ID NO: 264 - DNA, 23 bp, Artificial Sequence
  Description of Artificial Sequence: Synthetic oligonucleotide
  Mitotic kinesin microtubule-associated protein Eg5 (Kif11) siRNA
gccgggccttgattttttggcgg

SEQ ID NO: 265 - DNA, 23 bp, Artificial Sequence
  Description of Artificial Sequence: Synthetic oligonucleotide
  Mitotic kinesin microtubule-associated protein Eg5 (Kif11) siRNA
ccgggccttgattttttggcggg

SEQ ID NO: 266 - DNA, 23 bp, Artificial Sequence
  Description of Artificial Sequence: Synthetic oligonucleotide
  Mitotic kinesin microtubule-associated protein Eg5 (Kif11) siRNA
cgggccttgattttttggcgggg

SEQ ID NO: 267 - DNA, 23 bp, Artificial Sequence
  Description of Artificial Sequence: Synthetic oligonucleotide
  Mitotic kinesin microtubule-associated protein Eg5 (Kif11) siRNA
gggccttgattttttggcgggga

SEQ ID NO: 268 - DNA, 23 bp, Artificial Sequence
  Description of Artificial Sequence: Synthetic oligonucleotide
  Mitotic kinesin microtubule-associated protein Eg5 (Kif11) siRNA
ggccttgattttttggcggggac

SEQ ID NO: 269 - DNA, 23 bp, Artificial Sequence
  Description of Artificial Sequence: Synthetic oligonucleotide
  Mitotic kinesin microtubule-associated protein Eg5 (Kif11) siRNA
gccttgattttttggcggggacc

SEQ ID NO: 270 - DNA, 23 bp, Artificial Sequence
  Description of Artificial Sequence: Synthetic oligonucleotide
  Mitotic kinesin microtubule-associated protein Eg5 (Kif11) siRNA
ccttgattttttggcggggaccg

SEQ ID NO: 271 - DNA, 23 bp, Artificial Sequence
  Description of Artificial Sequence: Synthetic oligonucleotide
  Mitotic kinesin microtubule-associated protein Eg5 (Kif11) siRNA
cttgattttttggcggggaccgt

SEQ ID NO: 272 - DNA, 23 bp, Artificial Sequence
  Description of Artificial Sequence: Synthetic oligonucleotide
  Mitotic kinesin microtubule-associated protein Eg5 (Kif11) siRNA
atggcgtcgcagccaaattcgtc

SEQ ID NO: 273 - DNA, 23 bp, Artificial Sequence
  Description of Artificial Sequence: Synthetic oligonucleotide
  Mitotic kinesin microtubule-associated protein Eg5 (Kif11) siRNA
tggcgtcgcagccaaattcgtct

SEQ ID NO: 274 - DNA, 23 bp, Artificial Sequence
  Description of Artificial Sequence: Synthetic oligonucleotide
  Mitotic kinesin microtubule-associated protein Eg5 (Kif11) siRNA
ggcgtcgcagccaaattcgtctg

SEQ ID NO: 275 - DNA, 23 bp, Artificial Sequence
  Description of Artificial Sequence: Synthetic oligonucleotide
  Mitotic kinesin microtubule-associated protein Eg5 (Kif11) siRNA
gcgtcgcagccaaattcgtctgc

SEQ ID NO: 276 - DNA, 23 bp, Artificial Sequence
  Description of Artificial Sequence: Synthetic oligonucleotide
  Mitotic kinesin microtubule-associated protein Eg5 (Kif11) siRNA
cgtcgcagccaaattcgtctgcg

SEQ ID NO: 277 - DNA, 23 bp, Artificial Sequence
  Description of Artificial Sequence: Synthetic oligonucleotide
  Mitotic kinesin microtubule-associated protein Eg5 (Kif11) siRNA
gtcgcagccaaattcgtctgcga

SEQ ID NO: 278 - DNA, 23 bp, Artificial Sequence
  Description of Artificial Sequence: Synthetic oligonucleotide
  Mitotic kinesin microtubule-associated protein Eg5 (Kif11) siRNA
tcgcagccaaattcgtctgcgaa

SEQ ID NO: 279 - DNA, 23 bp, Artificial Sequence
  Description of Artificial Sequence: Synthetic oligonucleotide
  Mitotic kinesin microtubule-associated protein Eg5 (Kif11) siRNA
cgcagccaaattcgtctgcgaag

SEQ ID NO: 280 - DNA, 23 bp, Artificial Sequence
  Description of Artificial Sequence: Synthetic oligonucleotide
  Mitotic kinesin microtubule-associated protein Eg5 (Kif11) siRNA
gcagccaaattcgtctgcgaaga

SEQ ID NO: 281 - DNA, 23 bp, Artificial Sequence
  Description of Artificial Sequence: Synthetic oligonucleotide
  Mitotic kinesin microtubule-associated protein Eg5 (Kif11) siRNA
cagccaaattcgtctgcgaagaa

SEQ ID NO: 282 - DNA, 23 bp, Artificial Sequence
  Description of Artificial Sequence: Synthetic oligonucleotide
  Mitotic kinesin microtubule-associated protein Eg5 (Kif11) siRNA
agccaaattcgtctgcgaagaag

SEQ ID NO: 283 - DNA, 23 bp, Artificial Sequence
  Description of Artificial Sequence: Synthetic oligonucleotide
  Mitotic kinesin microtubule-associated protein Eg5 (Kif11) siRNA
gccaaattcgtctgcgaagaaga

SEQ ID NO: 284 - DNA, 23 bp, Artificial Sequence
  Description of Artificial Sequence: Synthetic oligonucleotide
  Mitotic kinesin microtubule-associated protein Eg5 (Kif11) siRNA
ccaaattcgtctgcgaagaagaa

SEQ ID NO: 285 - DNA, 23 bp, Artificial Sequence
  Description of Artificial Sequence: Synthetic oligonucleotide
  Mitotic kinesin microtubule-associated protein Eg5 (Kif11) siRNA
caaattcgtctgcgaagaagaaa

SEQ ID NO: 286 - DNA, 23 bp, Artificial Sequence
  Description of Artificial Sequence: Synthetic oligonucleotide
  Mitotic kinesin microtubule-associated protein Eg5 (Kif11) siRNA
aaattcgtctgcgaagaagaaag

SEQ ID NO: 287 - DNA, 23 bp, Artificial Sequence
  Description of Artificial Sequence: Synthetic oligonucleotide
  Mitotic kinesin microtubule-associated protein Eg5 (Kif11) siRNA
aattcgtctgcgaagaagaaaga

SEQ ID NO: 288 - DNA, 23 bp, Artificial Sequence
  Description of Artificial Sequence: Synthetic oligonucleotide
  Mitotic kinesin microtubule-associated protein Eg5 (Kif11) siRNA
attcgtctgcgaagaagaaagag

SEQ ID NO: 289 - DNA, 23 bp, Artificial Sequence
  Description of Artificial Sequence: Synthetic oligonucleotide
  Mitotic kinesin microtubule-associated protein Eg5 (Kif11) siRNA
ttcgtctgcgaagaagaaagagg

SEQ ID NO: 290 - DNA, 23 bp, Artificial Sequence
  Description of Artificial Sequence: Synthetic oligonucleotide
  Mitotic kinesin microtubule-associated protein Eg5 (Kif11) siRNA
tcgtctgcgaagaagaaagagga

SEQ ID NO: 291 - DNA, 23 bp, Artificial Sequence
  Description of Artificial Sequence: Synthetic oligonucleotide
  Mitotic kinesin microtubule-associated protein Eg5 (Kif11) siRNA
cgtctgcgaagaagaaagaggag

SEQ ID NO: 292 - DNA, 23 bp, Artificial Sequence
  Description of Artificial Sequence: Synthetic oligonucleotide
  Mitotic kinesin microtubule-associated protein Eg5 (Kif11) siRNA
gtctgcgaagaagaaagaggaga

SEQ ID NO: 293 - DNA, 23 bp, Artificial Sequence
  Description of Artificial Sequence: Synthetic oligonucleotide
  Mitotic kinesin microtubule-associated protein Eg5 (Kif11) siRNA
tctgcgaagaagaaagaggagaa

SEQ ID NO: 294 - DNA, 23 bp, Artificial Sequence
  Description of Artificial Sequence: Synthetic oligonucleotide
  Mitotic kinesin microtubule-associated protein Eg5 (Kif11) siRNA
ctgcgaagaagaaagaggagaag

SEQ ID NO: 295 - DNA, 23 bp, Artificial Sequence
  Description of Artificial Sequence: Synthetic oligonucleotide
  Mitotic kinesin microtubule-associated protein Eg5 (Kif11) siRNA
tgcgaagaagaaagaggagaagg

SEQ ID NO: 296 - DNA, 23 bp, Artificial Sequence
  Description of Artificial Sequence: Synthetic oligonucleotide
  Mitotic kinesin microtubule-associated protein Eg5 (Kif11) siRNA
gcgaagaagaaagaggagaaggg

SEQ ID NO: 297 - DNA, 23 bp, Artificial Sequence
  Description of Artificial Sequence: Synthetic oligonucleotide
  Mitotic kinesin microtubule-associated protein Eg5 (Kif11) siRNA
cgaagaagaaagaggagaagggg

SEQ ID NO: 298 - DNA, 23 bp, Artificial Sequence
  Description of Artificial Sequence: Synthetic oligonucleotide
  Mitotic kinesin microtubule-associated protein Eg5 (Kif11) siRNA
gaagaagaaagaggagaagggga

SEQ ID NO: 299 - DNA, 23 bp, Artificial Sequence
  Description of Artificial Sequence: Synthetic oligonucleotide
  Mitotic kinesin microtubule-associated protein Eg5 (Kif11) siRNA
aagaagaaagaggagaaggggaa

SEQ ID NO: 300 - DNA, 23 bp, Artificial Sequence
  Description of Artificial Sequence: Synthetic oligonucleotide
  Mitotic kinesin microtubule-associated protein Eg5 (Kif11) siRNA
agaagaaagaggagaaggggaag

SEQ ID NO: 301 - DNA, 23 bp, Artificial Sequence
  Description of Artificial Sequence: Synthetic oligonucleotide
  Mitotic kinesin microtubule-associated protein Eg5 (Kif11) siRNA
gaagaaagaggagaaggggaaga

SEQ ID NO: 302 - DNA, 23 bp, Artificial Sequence
  Description of Artificial Sequence: Synthetic oligonucleotide
  Mitotic kinesin microtubule-associated protein Eg5 (Kif11) siRNA
aagaaagaggagaaggggaagaa

SEQ ID NO: 303 - DNA, 23 bp, Artificial Sequence
  Description of Artificial Sequence: Synthetic oligonucleotide
  Mitotic kinesin microtubule-associated protein Eg5 (Kif11) siRNA
agaaagaggagaaggggaagaac

SEQ ID NO: 304 - DNA, 23 bp, Artificial Sequence
  Description of Artificial Sequence: Synthetic oligonucleotide
  Mitotic kinesin microtubule-associated protein Eg5 (Kif11) siRNA
gaaagaggagaaggggaagaaca

SEQ ID NO: 305 - DNA, 23 bp, Artificial Sequence
  Description of Artificial Sequence: Synthetic oligonucleotide
  Mitotic kinesin microtubule-associated protein Eg5 (Kif11) siRNA
aaagaggagaaggggaagaacat

SEQ ID NO: 306 - DNA, 23 bp, Artificial Sequence
  Description of Artificial Sequence: Synthetic oligonucleotide
  Mitotic kinesin microtubule-associated protein Eg5 (Kif11) siRNA
aagaggagaaggggaagaacatc

SEQ ID NO: 307 - DNA, 23 bp, Artificial Sequence
  Description of Artificial Sequence: Synthetic oligonucleotide
  Mitotic kinesin microtubule-associated protein Eg5 (Kif11) siRNA
agaggagaaggggaagaacatcc

SEQ ID NO: 308 - DNA, 23 bp, Artificial Sequence
  Description of Artificial Sequence: Synthetic oligonucleotide
  Mitotic kinesin microtubule-associated protein Eg5 (Kif11) siRNA
gaggagaaggggaagaacatcca

SEQ ID NO: 309 - DNA, 23 bp, Artificial Sequence
  Description of Artificial Sequence: Synthetic oligonucleotide
  Mitotic kinesin microtubule-associated protein Eg5 (Kif11) siRNA
aggagaaggggaagaacatccag

SEQ ID NO: 310 - DNA, 23 bp, Artificial Sequence
  Description of Artificial Sequence: Synthetic oligonucleotide
  Mitotic kinesin microtubule-associated protein Eg5 (Kif11) siRNA
ggagaaggggaagaacatccagg

SEQ ID NO: 311 - DNA, 23 bp, Artificial Sequence
  Description of Artificial Sequence: Synthetic oligonucleotide
  Mitotic kinesin microtubule-associated protein Eg5 (Kif11) siRNA
gagaaggggaagaacatccaggt

SEQ ID NO: 312 - DNA, 23 bp, Artificial Sequence
  Description of Artificial Sequence: Synthetic oligonucleotide
  Mitotic kinesin microtubule-associated protein Eg5 (Kif11) siRNA
agaaggggaagaacatccaggtg

SEQ ID NO: 313 - DNA, 23 bp, Artificial Sequence
  Description of Artificial Sequence: Synthetic oligonucleotide
  Mitotic kinesin microtubule-associated protein Eg5 (Kif11) siRNA
gaaggggaagaacatccaggtgg

SEQ ID NO: 314 - DNA, 23 bp, Artificial Sequence
  Description of Artificial Sequence: Synthetic oligonucleotide
  Mitotic kinesin microtubule-associated protein Eg5 (Kif11) siRNA
aaggggaagaacatccaggtggt

SEQ ID NO: 315 - DNA, 23 bp, Artificial Sequence
  Description of Artificial Sequence: Synthetic oligonucleotide
  Mitotic kinesin microtubule-associated protein Eg5 (Kif11) siRNA
aggggaagaacatccaggtggtg

SEQ ID NO: 316 - DNA, 23 bp, Artificial Sequence
  Description of Artificial Sequence: Synthetic oligonucleotide
  Mitotic kinesin microtubule-associated protein Eg5 (Kif11) siRNA
ggggaagaacatccaggtggtgg

SEQ ID NO: 317 - DNA, 23 bp, Artificial Sequence
  Description of Artificial Sequence: Synthetic oligonucleotide
  Mitotic kinesin microtubule-associated protein Eg5 (Kif11) siRNA
gggaagaacatccaggtggtggt

SEQ ID NO: 318 - DNA, 23 bp, Artificial Sequence
  Description of Artificial Sequence: Synthetic oligonucleotide
  Mitotic kinesin microtubule-associated protein Eg5 (Kif11) siRNA
ggaagaacatccaggtggtggtg

SEQ ID NO: 319 - DNA, 23 bp, Artificial Sequence
  Description of Artificial Sequence: Synthetic oligonucleotide
  Mitotic kinesin microtubule-associated protein Eg5 (Kif11) siRNA
gaagaacatccaggtggtggtga

SEQ ID NO: 320 - DNA, 23 bp, Artificial Sequence
  Description of Artificial Sequence: Synthetic oligonucleotide
  Mitotic kinesin microtubule-associated protein Eg5 (Kif11) siRNA
aagaacatccaggtggtggtgag

SEQ ID NO: 321 - DNA, 23 bp, Artificial Sequence
  Description of Artificial Sequence: Synthetic oligonucleotide
  Mitotic kinesin microtubule-associated protein Eg5 (Kif11) siRNA
agaacatccaggtggtggtgaga

SEQ ID NO: 322 - DNA, 23 bp, Artificial Sequence
  Description of Artificial Sequence: Synthetic oligonucleotide
  Mitotic kinesin microtubule-associated protein Eg5 (Kif11) siRNA
gaacatccaggtggtggtgagat

SEQ ID NO: 323 - DNA, 23 bp, Artificial Sequence
  Description of Artificial Sequence: Synthetic oligonucleotide
  Mitotic kinesin microtubule-associated protein Eg5 (Kif11) siRNA
aacatccaggtggtggtgagatg

SEQ ID NO: 324 - DNA, 23 bp, Artificial Sequence
  Description of Artificial Sequence: Synthetic oligonucleotide
  Mitotic kinesin microtubule-associated protein Eg5 (Kif11) siRNA
acatccaggtggtggtgagatgc

SEQ ID NO: 325 - DNA, 23 bp, Artificial Sequence
  Description of Artificial Sequence: Synthetic oligonucleotide
  Mitotic kinesin microtubule-associated protein Eg5 (Kif11) siRNA
catccaggtggtggtgagatgca

SEQ ID NO: 326 - DNA, 23 bp, Artificial Sequence
  Description of Artificial Sequence: Synthetic oligonucleotide
  Mitotic kinesin microtubule-associated protein Eg5 (Kif11) siRNA
atccaggtggtggtgagatgcag

SEQ ID NO: 327 - DNA, 23 bp, Artificial Sequence
  Description of Artificial Sequence: Synthetic oligonucleotide
  Mitotic kinesin microtubule-associated protein Eg5 (Kif11) siRNA
tccaggtggtggtgagatgcaga

SEQ ID NO: 328 - DNA, 23 bp, Artificial Sequence
  Description of Artificial Sequence: Synthetic oligonucleotide
  Mitotic kinesin microtubule-associated protein Eg5 (Kif11) siRNA
ccaggtggtggtgagatgcagac

SEQ ID NO: 329 - DNA, 23 bp, Artificial Sequence
  Description of Artificial Sequence: Synthetic oligonucleotide
  Mitotic kinesin microtubule-associated protein Eg5 (Kif11) siRNA
caggtggtggtgagatgcagacc

SEQ ID NO: 330 - DNA, 23 bp, Artificial Sequence
  Description of Artificial Sequence: Synthetic oligonucleotide
  Mitotic kinesin microtubule-associated protein Eg5 (Kif11) siRNA
aggtggtggtgagatgcagacca

SEQ ID NO: 331 - DNA, 23 bp, Artificial Sequence
  Description of Artificial Sequence: Synthetic oligonucleotide
  Mitotic kinesin microtubule-associated protein Eg5 (Kif11) siRNA
ggtggtggtgagatgcagaccat

SEQ ID NO: 332 - DNA, 23 bp, Artificial Sequence
  Description of Artificial Sequence: Synthetic oligonucleotide
  Mitotic kinesin microtubule-associated protein Eg5 (Kif11) siRNA
gtggtggtgagatgcagaccatt

SEQ ID NO: 333 - DNA, 23 bp, Artificial Sequence
  Description of Artificial Sequence: Synthetic oligonucleotide
  Mitotic kinesin microtubule-associated protein Eg5 (Kif11) siRNA
tggtggtgagatgcagaccattt

SEQ ID NO: 334 - DNA, 23 bp, Artificial Sequence
  Description of Artificial Sequence: Synthetic oligonucleotide
  Mitotic kinesin microtubule-associated protein Eg5 (Kif11) siRNA
ggtggtgagatgcagaccattta

SEQ ID NO: 335 - DNA, 23 bp, Artificial Sequence
  Description of Artificial Sequence: Synthetic oligonucleotide
  Mitotic kinesin microtubule-associated protein Eg5 (Kif11) siRNA
gtggtgagatgcagaccatttaa

SEQ ID NO: 336 - DNA, 23 bp, Artificial Sequence
  Description of Artificial Sequence: Synthetic oligonucleotide
  Mitotic kinesin microtubule-associated protein Eg5 (Kif11) siRNA
tggtgagatgcagaccatttaat

SEQ ID NO: 337 - DNA, 23 bp, Artificial Sequence
  Description of Artificial Sequence: Synthetic oligonucleotide
  Mitotic kinesin microtubule-associated protein Eg5 (Kif11) siRNA
ggtgagatgcagaccatttaatt

SEQ ID NO: 338 - DNA, 23 bp, Artificial Sequence
  Description of Artificial Sequence: Synthetic oligonucleotide
  Mitotic kinesin microtubule-associated protein Eg5 (Kif11) siRNA
gtgagatgcagaccatttaattt

SEQ ID NO: 339 - DNA, 23 bp, Artificial Sequence
  Description of Artificial Sequence: Synthetic oligonucleotide
  Mitotic kinesin microtubule-associated protein Eg5 (Kif11) siRNA
tgagatgcagaccatttaatttg

SEQ ID NO: 340 - DNA, 23 bp, Artificial Sequence
  Description of Artificial Sequence: Synthetic oligonucleotide
  Mitotic kinesin microtubule-associated protein Eg5 (Kif11) siRNA
gagatgcagaccatttaatttgg

SEQ ID NO: 341 - DNA, 23 bp, Artificial Sequence
  Description of Artificial Sequence: Synthetic oligonucleotide
  Mitotic kinesin microtubule-associated protein Eg5 (Kif11) siRNA
agatgcagaccatttaatttggc

SEQ ID NO: 342 - DNA, 23 bp, Artificial Sequence
  Description of Artificial Sequence: Synthetic oligonucleotide
  Mitotic kinesin microtubule-associated protein Eg5 (Kif11) siRNA
gatgcagaccatttaatttggca

SEQ ID NO: 343 - DNA, 23 bp, Artificial Sequence
  Description of Artificial Sequence: Synthetic oligonucleotide
  Mitotic kinesin microtubule-associated protein Eg5 (Kif11) siRNA
atgcagaccatttaatttggcag

SEQ ID NO: 344 - DNA, 23 bp, Artificial Sequence
  Description of Artificial Sequence: Synthetic oligonucleotide
  Mitotic kinesin microtubule-associated protein Eg5 (Kif11) siRNA
tgcagaccatttaatttggcaga

SEQ ID NO: 345 - DNA, 23 bp, Artificial Sequence
  Description of Artificial Sequence: Synthetic oligonucleotide
  Mitotic kinesin microtubule-associated protein Eg5 (Kif11) siRNA
gcagaccatttaatttggcagag

SEQ ID NO: 346 - DNA, 23 bp, Artificial Sequence
  Description of Artificial Sequence: Synthetic oligonucleotide
  Mitotic kinesin microtubule-associated protein Eg5 (Kif11) siRNA
cagaccatttaatttggcagagc

SEQ ID NO: 347 - DNA, 23 bp, Artificial Sequence
  Description of Artificial Sequence: Synthetic oligonucleotide
  Mitotic kinesin microtubule-associated protein Eg5 (Kif11) siRNA
agaccatttaatttggcagagcg

SEQ ID NO: 348 - DNA, 23 bp, Artificial Sequence
  Description of Artificial Sequence: Synthetic oligonucleotide
  Mitotic kinesin microtubule-associated protein Eg5 (Kif11) siRNA
gaccatttaatttggcagagcgg

SEQ ID NO: 349 - DNA, 23 bp, Artificial Sequence
  Description of Artificial Sequence: Synthetic oligonucleotide
  Mitotic kinesin microtubule-associated protein Eg5 (Kif11) siRNA
accatttaatttggcagagcgga

SEQ ID NO: 350 - DNA, 23 bp, Artificial Sequence
  Description of Artificial Sequence: Synthetic oligonucleotide
  Mitotic kinesin microtubule-associated protein Eg5 (Kif11) siRNA
ccatttaatttggcagagcggaa

SEQ ID NO: 351 - DNA, 23 bp, Artificial Sequence
  Description of Artificial Sequence: Synthetic oligonucleotide
  Mitotic kinesin microtubule-associated protein Eg5 (Kif11) siRNA
catttaatttggcagagcggaaa

SEQ ID NO: 352 - DNA, 23 bp, Artificial Sequence
  Description of Artificial Sequence: Synthetic oligonucleotide
  Mitotic kinesin microtubule-associated protein Eg5 (Kif11) siRNA
atttaatttggcagagcggaaag

SEQ ID NO: 353 - DNA, 23 bp, Artificial Sequence
  Description of Artificial Sequence: Synthetic oligonucleotide
  Mitotic kinesin microtubule-associated protein Eg5 (Kif11) siRNA
tttaatttggcagagcggaaagc

SEQ ID NO: 354 - DNA, 23 bp, Artificial Sequence
  Description of Artificial Sequence: Synthetic oligonucleotide
  Mitotic kinesin microtubule-associated protein Eg5 (Kif11) siRNA
ttaatttggcagagcggaaagct

SEQ ID NO: 355 - DNA, 23 bp, Artificial Sequence
  Description of Artificial Sequence: Synthetic oligonucleotide
  Mitotic kinesin microtubule-associated protein Eg5 (Kif11) siRNA
taatttggcagagcggaaagcta

SEQ ID NO: 356 - DNA, 23 bp, Artificial Sequence
  Description of Artificial Sequence: Synthetic oligonucleotide
  Mitotic kinesin microtubule-associated protein Eg5 (Kif11) siRNA
aatttggcagagcggaaagctag

SEQ ID NO: 357 - DNA, 23 bp, Artificial Sequence
  Description of Artificial Sequence: Synthetic oligonucleotide
  Mitotic kinesin microtubule-associated protein Eg5 (Kif11) siRNA
atttggcagagcggaaagctagc

SEQ ID NO: 358 - DNA, 23 bp, Artificial Sequence
  Description of Artificial Sequence: Synthetic oligonucleotide
  Mitotic kinesin microtubule-associated protein Eg5 (Kif11) siRNA
tttggcagagcggaaagctagcg

SEQ ID NO: 359 - DNA, 23 bp, Artificial Sequence
  Description of Artificial Sequence: Synthetic oligonucleotide
  Mitotic kinesin microtubule-associated protein Eg5 (Kif11) siRNA
ttggcagagcggaaagctagcgc

SEQ ID NO: 360 - DNA, 23 bp, Artificial Sequence
  Description of Artificial Sequence: Synthetic oligonucleotide
  Mitotic kinesin microtubule-associated protein Eg5 (Kif11) siRNA
tggcagagcggaaagctagcgcc

SEQ ID NO: 361 - DNA, 23 bp, Artificial Sequence
  Description of Artificial Sequence: Synthetic oligonucleotide
  Mitotic kinesin microtubule-associated protein Eg5 (Kif11) siRNA
ggcagagcggaaagctagcgccc

SEQ ID NO: 362 - DNA, 23 bp, Artificial Sequence
  Description of Artificial Sequence: Synthetic oligonucleotide
  Mitotic kinesin microtubule-associated protein Eg5 (Kif11) siRNA
gcagagcggaaagctagcgccca

SEQ ID NO: 363 - DNA, 23 bp, Artificial Sequence
  Description of Artificial Sequence: Synthetic oligonucleotide
  Mitotic kinesin microtubule-associated protein Eg5 (Kif11) siRNA
cagagcggaaagctagcgcccat

SEQ ID NO: 364 - DNA, 23 bp, Artificial Sequence
  Description of Artificial Sequence: Synthetic oligonucleotide
  Mitotic kinesin microtubule-associated protein Eg5 (Kif11) siRNA
agagcggaaagctagcgcccatt

SEQ ID NO: 365 - DNA, 23 bp, Artificial Sequence
  Description of Artificial Sequence: Synthetic oligonucleotide
  Mitotic kinesin microtubule-associated protein Eg5 (Kif11) siRNA
gagcggaaagctagcgcccattc

SEQ ID NO: 366 - DNA, 23 bp, Artificial Sequence
  Description of Artificial Sequence: Synthetic oligonucleotide
  Mitotic kinesin microtubule-associated protein Eg5 (Kif11) siRNA
agcggaaagctagcgcccattca

SEQ ID NO: 367 - DNA, 23 bp, Artificial Sequence
  Description of Artificial Sequence: Synthetic oligonucleotide
  Mitotic kinesin microtubule-associated protein Eg5 (Kif11) siRNA
gcggaaagctagcgcccattcaa

SEQ ID NO: 368 - DNA, 23 bp, Artificial Sequence
  Description of Artificial Sequence: Synthetic oligonucleotide
  Mitotic kinesin microtubule-associated protein Eg5 (Kif11) siRNA
cggaaagctagcgcccattcaat

SEQ ID NO: 369 - DNA, 23 bp, Artificial Sequence
  Description of Artificial Sequence: Synthetic oligonucleotide
  Mitotic kinesin microtubule-associated protein Eg5 (Kif11) siRNA
ggaaagctagcgcccattcaata

SEQ ID NO: 370 - DNA, 23 bp, Artificial Sequence
  Description of Artificial Sequence: Synthetic oligonucleotide
  Mitotic kinesin microtubule-associated protein Eg5 (Kif11) siRNA
gaaagctagcgcccattcaatag

SEQ ID NO: 371 - DNA, 23 bp, Artificial Sequence
  Description of Artificial Sequence: Synthetic oligonucleotide
  Mitotic kinesin microtubule-associated protein Eg5 (Kif11) siRNA
aaagctagcgcccattcaatagt

SEQ ID NO: 372 - DNA, 23 bp, Artificial Sequence
  Description of Artificial Sequence: Synthetic oligonucleotide
  Mitotic kinesin microtubule-associated protein Eg5 (Kif11) siRNA
aagctagcgcccattcaatagta

SEQ ID NO: 373 - DNA, 23 bp, Artificial Sequence
  Description of Artificial Sequence: Synthetic oligonucleotide
  Mitotic kinesin microtubule-associated protein Eg5 (Kif11) siRNA
agctagcgcccattcaatagtag

SEQ ID NO: 374 - DNA, 23 bp, Artificial Sequence
  Description of Artificial Sequence: Synthetic oligonucleotide
  Mitotic kinesin microtubule-associated protein Eg5 (Kif11) siRNA
gctagcgcccattcaatagtaga

SEQ ID NO: 375 - DNA, 23 bp, Artificial Sequence
  Description of Artificial Sequence: Synthetic oligonucleotide
  Mitotic kinesin microtubule-associated protein Eg5 (Kif11) siRNA
ctagcgcccattcaatagtagaa

SEQ ID NO: 376 - DNA, 23 bp, Artificial Sequence
  Description of Artificial Sequence: Synthetic oligonucleotide
  Mitotic kinesin microtubule-associated protein Eg5 (Kif11) siRNA
tagcgcccattcaatagtagaat

SEQ ID NO: 377 - DNA, 23 bp, Artificial Sequence
  Description of Artificial Sequence: Synthetic oligonucleotide
  Mitotic kinesin microtubule-associated protein Eg5 (Kif11) siRNA
agcgcccattcaatagtagaatg

SEQ ID NO: 378 - DNA, 23 bp, Artificial Sequence
  Description of Artificial Sequence: Synthetic oligonucleotide
  Mitotic kinesin microtubule-associated protein Eg5 (Kif11) siRNA
gcgcccattcaatagtagaatgt

SEQ ID NO: 379 - DNA, 23 bp, Artificial Sequence
  Description of Artificial Sequence: Synthetic oligonucleotide
  Mitotic kinesin microtubule-associated protein Eg5 (Kif11) siRNA
cgcccattcaatagtagaatgtg

SEQ ID NO: 380 - DNA, 23 bp, Artificial Sequence
  Description of Artificial Sequence: Synthetic oligonucleotide
  Mitotic kinesin microtubule-associated protein Eg5 (Kif11) siRNA
gcccattcaatagtagaatgtga

SEQ ID NO: 381 - DNA, 23 bp, Artificial Sequence
  Description of Artificial Sequence: Synthetic oligonucleotide
  Mitotic kinesin microtubule-associated protein Eg5 (Kif11) siRNA
cccattcaatagtagaatgtgat

SEQ ID NO: 382 - DNA, 23 bp, Artificial Sequence
  Description of Artificial Sequence: Synthetic oligonucleotide
  Mitotic kinesin microtubule-associated protein Eg5 (Kif11) siRNA
ccattcaatagtagaatgtgatc

SEQ ID NO: 383 - DNA, 23 bp, Artificial Sequence
  Description of Artificial Sequence: Synthetic oligonucleotide
  Mitotic kinesin microtubule-associated protein Eg5 (Kif11) siRNA
cattcaatagtagaatgtgatcc

SEQ ID NO: 384 - DNA, 23 bp, Artificial Sequence
  Description of Artificial Sequence: Synthetic oligonucleotide
  Mitotic kinesin microtubule-associated protein Eg5 (Kif11) siRNA
attcaatagtagaatgtgatcct

SEQ ID NO: 385 - DNA, 23 bp, Artificial Sequence
  Description of Artificial Sequence: Synthetic oligonucleotide
  Mitotic kinesin microtubule-associated protein Eg5 (Kif11) siRNA
ttcaatagtagaatgtgatcctg

SEQ ID NO: 386 - DNA, 23 bp, Artificial Sequence
  Description of Artificial Sequence: Synthetic oligonucleotide
  Mitotic kinesin microtubule-associated protein Eg5 (Kif11) siRNA
tcaatagtagaatgtgatcctgt

SEQ ID NO: 387 - DNA, 23 bp, Artificial Sequence
  Description of Artificial Sequence: Synthetic oligonucleotide
  Mitotic kinesin microtubule-associated protein Eg5 (Kif11) siRNA
caatagtagaatgtgatcctgta

SEQ ID NO: 388 - DNA, 23 bp, Artificial Sequence
  Description of Artificial Sequence: Synthetic oligonucleotide
  Mitotic kinesin microtubule-associated protein Eg5 (Kif11) siRNA
aatagtagaatgtgatcctgtac

SEQ ID NO: 389 - DNA, 23 bp, Artificial Sequence
  Description of Artificial Sequence: Synthetic oligonucleotide
  Mitotic kinesin microtubule-associated protein Eg5 (Kif11) siRNA
atagtagaatgtgatcctgtacg

SEQ ID NO: 390 - DNA, 23 bp, Artificial Sequence
  Description of Artificial Sequence: Synthetic oligonucleotide
  Mitotic kinesin microtubule-associated protein Eg5 (Kif11) siRNA
tagtagaatgtgatcctgtacga

SEQ ID NO: 391 - DNA, 23 bp, Artificial Sequence
  Description of Artificial Sequence: Synthetic oligonucleotide
  Mitotic kinesin microtubule-associated protein Eg5 (Kif11) siRNA
agtagaatgtgatcctgtacgaa

SEQ ID NO: 392 - DNA, 23 bp, Artificial Sequence
  Description of Artificial Sequence: Synthetic oligonucleotide
  Mitotic kinesin microtubule-associated protein Eg5 (Kif11) siRNA
gtagaatgtgatcctgtacgaaa

SEQ ID NO: 393 - DNA, 23 bp, Artificial Sequence
  Description of Artificial Sequence: Synthetic oligonucleotide
  Mitotic kinesin microtubule-associated protein Eg5 (Kif11) siRNA
tagaatgtgatcctgtacgaaaa

SEQ ID NO: 394 - DNA, 23 bp, Artificial Sequence
  Description of Artificial Sequence: Synthetic oligonucleotide
  Mitotic kinesin microtubule-associated protein Eg5 (Kif11) siRNA
agaatgtgatcctgtacgaaaag

SEQ ID NO: 395 - DNA, 23 bp, Artificial Sequence
  Description of Artificial Sequence: Synthetic oligonucleotide
  Mitotic kinesin microtubule-associated protein Eg5 (Kif11) siRNA
gaatgtgatcctgtacgaaaaga

SEQ ID NO: 396 - DNA, 23 bp, Artificial Sequence
  Description of Artificial Sequence: Synthetic oligonucleotide
  Mitotic kinesin microtubule-associated protein Eg5 (Kif11) siRNA
aatgtgatcctgtacgaaaagaa

SEQ ID NO: 397 - DNA, 23 bp, Artificial Sequence
  Description of Artificial Sequence: Synthetic oligonucleotide
  Mitotic kinesin microtubule-associated protein Eg5 (Kif11) siRNA
atgtgatcctgtacgaaaagaag

SEQ ID NO: 398 - DNA, 23 bp, Artificial Sequence
  Description of Artificial Sequence: Synthetic oligonucleotide
  Mitotic kinesin microtubule-associated protein Eg5 (Kif11) siRNA
tgtgatcctgtacgaaaagaagt

SEQ ID NO: 399 - DNA, 23 bp, Artificial Sequence
  Description of Artificial Sequence: Synthetic oligonucleotide
  Mitotic kinesin microtubule-associated protein Eg5 (Kif11) siRNA
gtgatcctgtacgaaaagaagtt

SEQ ID NO: 400 - DNA, 23 bp, Artificial Sequence
  Description of Artificial Sequence: Synthetic oligonucleotide
  Mitotic kinesin microtubule-associated protein Eg5 (Kif11) siRNA
tgatcctgtacgaaaagaagtta

SEQ ID NO: 401 - DNA, 23 bp, Artificial Sequence
  Description of Artificial Sequence: Synthetic oligonucleotide
  Mitotic kinesin microtubule-associated protein Eg5 (Kif11) siRNA
gatcctgtacgaaaagaagttag

SEQ ID NO: 402 - DNA, 23 bp, Artificial Sequence
  Description of Artificial Sequence: Synthetic oligonucleotide
  Mitotic kinesin microtubule-associated protein Eg5 (Kif11) siRNA
atcctgtacgaaaagaagttagt

SEQ ID NO: 403 - DNA, 23 bp, Artificial Sequence
  Description of Artificial Sequence: Synthetic oligonucleotide
  Mitotic kinesin microtubule-associated protein Eg5 (Kif11) siRNA
tcctgtacgaaaagaagttagtg

SEQ ID NO: 404 - DNA, 23 bp, Artificial Sequence
  Description of Artificial Sequence: Synthetic oligonucleotide
  Mitotic kinesin microtubule-associated protein Eg5 (Kif11) siRNA
cctgtacgaaaagaagttagtgt

SEQ ID NO: 405 - DNA, 23 bp, Artificial Sequence
  Description of Artificial Sequence: Synthetic oligonucleotide
  Mitotic kinesin microtubule-associated protein Eg5 (Kif11) siRNA
ctgtacgaaaagaagttagtgta

SEQ ID NO: 406 - DNA, 23 bp, Artificial Sequence
  Description of Artificial Sequence: Synthetic oligonucleotide
  Mitotic kinesin microtubule-associated protein Eg5 (Kif11) siRNA
tgtacgaaaagaagttagtgtac

SEQ ID NO: 407 - DNA, 23 bp, Artificial Sequence
  Description of Artificial Sequence: Synthetic oligonucleotide
  Mitotic kinesin microtubule-associated protein Eg5 (Kif11) siRNA
gtacgaaaagaagttagtgtacg

SEQ ID NO: 408 - DNA, 23 bp, Artificial Sequence
  Description of Artificial Sequence: Synthetic oligonucleotide
  Mitotic kinesin microtubule-associated protein Eg5 (Kif11) siRNA
tacgaaaagaagttagtgtacga

SEQ ID NO: 409 - DNA, 23 bp, Artificial Sequence
  Description of Artificial Sequence: Synthetic oligonucleotide
  Mitotic kinesin microtubule-associated protein Eg5 (Kif11) siRNA
acgaaaagaagttagtgtacgaa

SEQ ID NO: 410 - DNA, 23 bp, Artificial Sequence
  Description of Artificial Sequence: Synthetic oligonucleotide
  Mitotic kinesin microtubule-associated protein Eg5 (Kif11) siRNA
cgaaaagaagttagtgtacgaac

SEQ ID NO: 411 - DNA, 23 bp, Artificial Sequence
  Description of Artificial Sequence: Synthetic oligonucleotide
  Mitotic kinesin microtubule-associated protein Eg5 (Kif11) siRNA
gaaaagaagttagtgtacgaact

SEQ ID NO: 412 - DNA, 23 bp, Artificial Sequence
  Description of Artificial Sequence: Synthetic oligonucleotide
  Mitotic kinesin microtubule-associated protein Eg5 (Kif11) siRNA
aaaagaagttagtgtacgaactg

SEQ ID NO: 413 - DNA, 23 bp, Artificial Sequence
  Description of Artificial Sequence: Synthetic oligonucleotide
  Mitotic kinesin microtubule-associated protein Eg5 (Kif11) siRNA
aaagaagttagtgtacgaactgg

SEQ ID NO: 414 - DNA, 23 bp, Artificial Sequence
  Description of Artificial Sequence: Synthetic oligonucleotide
  Mitotic kinesin microtubule-associated protein Eg5 (Kif11) siRNA
aagaagttagtgtacgaactgga

SEQ ID NO: 415 - DNA, 23 bp, Artificial Sequence
  Description of Artificial Sequence: Synthetic oligonucleotide
  Mitotic kinesin microtubule-associated protein Eg5 (Kif11) siRNA
agaagttagtgtacgaactggag

SEQ ID NO: 416 - DNA, 23 bp, Artificial Sequence
  Description of Artificial Sequence: Synthetic oligonucleotide
  Mitotic kinesin microtubule-associated protein Eg5 (Kif11) siRNA
gaagttagtgtacgaactggagg

SEQ ID NO: 417 - DNA, 23 bp, Artificial Sequence
  Description of Artificial Sequence: Synthetic oligonucleotide
  Mitotic kinesin microtubule-associated protein Eg5 (Kif11) siRNA
aagttagtgtacgaactggagga

SEQ ID NO: 418 - DNA, 23 bp, Artificial Sequence
  Description of Artificial Sequence: Synthetic oligonucleotide
  Mitotic kinesin microtubule-associated protein Eg5 (Kif11) siRNA
agttagtgtacgaactggaggat

SEQ ID NO: 419 - DNA, 23 bp, Artificial Sequence
  Description of Artificial Sequence: Synthetic oligonucleotide
  Mitotic kinesin microtubule-associated protein Eg5 (Kif11) siRNA
gttagtgtacgaactggaggatt

SEQ ID NO: 420 - DNA, 23 bp, Artificial Sequence
  Description of Artificial Sequence: Synthetic oligonucleotide
  Mitotic kinesin microtubule-associated protein Eg5 (Kif11) siRNA
ttagtgtacgaactggaggattg

SEQ ID NO: 421 - DNA, 23 bp, Artificial Sequence
  Description of Artificial Sequence: Synthetic oligonucleotide
  Mitotic kinesin microtubule-associated protein Eg5 (Kif11) siRNA
tagtgtacgaactggaggattgg

SEQ ID NO: 422 - DNA, 23 bp, Artificial Sequence
  Description of Artificial Sequence: Synthetic oligonucleotide
  Mitotic kinesin microtubule-associated protein Eg5 (Kif11) siRNA
agtgtacgaactggaggattggc

SEQ ID NO: 423 - DNA, 23 bp, Artificial Sequence
  Description of Artificial Sequence: Synthetic oligonucleotide
  Mitotic kinesin microtubule-associated protein Eg5 (Kif11) siRNA
gtgtacgaactggaggattggct

SEQ ID NO: 424 - DNA, 23 bp, Artificial Sequence
  Description of Artificial Sequence: Synthetic oligonucleotide
  Mitotic kinesin microtubule-associated protein Eg5 (Kif11) siRNA
tgtacgaactggaggattggctg

SEQ ID NO: 425 - DNA, 23 bp, Artificial Sequence
  Description of Artificial Sequence: Synthetic oligonucleotide
  Mitotic kinesin microtubule-associated protein Eg5 (Kif11) siRNA
gtacgaactggaggattggctga

SEQ ID NO: 426 - DNA, 23 bp, Artificial Sequence
  Description of Artificial Sequence: Synthetic oligonucleotide
  Mitotic kinesin microtubule-associated protein Eg5 (Kif11) siRNA
tacgaactggaggattggctgac

SEQ ID NO: 427 - DNA, 23 bp, Artificial Sequence
  Description of Artificial Sequence: Synthetic oligonucleotide
  Mitotic kinesin microtubule-associated protein Eg5 (Kif11) siRNA
acgaactggaggattggctgaca

SEQ ID NO: 428 - DNA, 23 bp, Artificial Sequence
  Description of Artificial Sequence: Synthetic oligonucleotide
  Mitotic kinesin microtubule-associated protein Eg5 (Kif11) siRNA
cgaactggaggattggctgacaa

SEQ ID NO: 429 - DNA, 23 bp, Artificial Sequence
  Description of Artificial Sequence: Synthetic oligonucleotide
  Mitotic kinesin microtubule-associated protein Eg5 (Kif11) siRNA
gaactggaggattggctgacaag

SEQ ID NO: 430 - DNA, 23 bp, Artificial Sequence
  Description of Artificial Sequence: Synthetic oligonucleotide
  Mitotic kinesin microtubule-associated protein Eg5 (Kif11) siRNA
aactggaggattggctgacaaga

SEQ ID NO: 431 - DNA, 23 bp, Artificial Sequence
  Description of Artificial Sequence: Synthetic oligonucleotide
  Mitotic kinesin microtubule-associated protein Eg5 (Kif11) siRNA
actggaggattggctgacaagag

SEQ ID NO: 432 - DNA, 23 bp, Artificial Sequence
  Description of Artificial Sequence: Synthetic oligonucleotide
  Mitotic kinesin microtubule-associated protein Eg5 (Kif11) siRNA
ctggaggattggctgacaagagc

SEQ ID NO: 433 - DNA, 23 bp, Artificial Sequence
  Description of Artificial Sequence: Synthetic oligonucleotide
  Mitotic kinesin microtubule-associated protein Eg5 (Kif11) siRNA
tggaggattggctgacaagagct

SEQ ID NO: 434 - DNA, 23 bp, Artificial Sequence
  Description of Artificial Sequence: Synthetic oligonucleotide
  Mitotic kinesin microtubule-associated protein Eg5 (Kif11) siRNA
ggaggattggctgacaagagctc

SEQ ID NO: 435 - DNA, 23 bp, Artificial Sequence
  Description of Artificial Sequence: Synthetic oligonucleotide
  Mitotic kinesin microtubule-associated protein Eg5 (Kif11) siRNA
gaggattggctgacaagagctca

SEQ ID NO: 436 - DNA, 23 bp, Artificial Sequence
  Description of Artificial Sequence: Synthetic oligonucleotide
  Mitotic kinesin microtubule-associated protein Eg5 (Kif11) siRNA
aggattggctgacaagagctcaa

SEQ ID NO: 437 - DNA, 23 bp, Artificial Sequence
  Description of Artificial Sequence: Synthetic oligonucleotide
  Mitotic kinesin microtubule-associated protein Eg5 (Kif11) siRNA
ggattggctgacaagagctcaag

SEQ ID NO: 438 - DNA, 23 bp, Artificial Sequence
  Description of Artificial Sequence: Synthetic oligonucleotide
  Mitotic kinesin microtubule-associated protein Eg5 (Kif11) siRNA
gattggctgacaagagctcaagg

SEQ ID NO: 439 - DNA, 23 bp, Artificial Sequence
  Description of Artificial Sequence: Synthetic oligonucleotide
  Mitotic kinesin microtubule-associated protein Eg5 (Kif11) siRNA
attggctgacaagagctcaagga

SEQ ID NO: 440 - DNA, 23 bp, Artificial Sequence
  Description of Artificial Sequence: Synthetic oligonucleotide
  Mitotic kinesin microtubule-associated protein Eg5 (Kif11) siRNA
ttggctgacaagagctcaaggaa

SEQ ID NO: 441 - DNA, 23 bp, Artificial Sequence
  Description of Artificial Sequence: Synthetic oligonucleotide
  Mitotic kinesin microtubule-associated protein Eg5 (Kif11) siRNA
tggctgacaagagctcaaggaaa

SEQ ID NO: 442 - DNA, 23 bp, Artificial Sequence
  Description of Artificial Sequence: Synthetic oligonucleotide
  Mitotic kinesin microtubule-associated protein Eg5 (Kif11) siRNA
ggctgacaagagctcaaggaaaa

SEQ ID NO: 443 - DNA, 23 bp, Artificial Sequence
  Description of Artificial Sequence: Synthetic oligonucleotide
  Mitotic kinesin microtubule-associated protein Eg5 (Kif11) siRNA
gctgacaagagctcaaggaaaac

SEQ ID NO: 444 - DNA, 23 bp, Artificial Sequence
  Description of Artificial Sequence: Synthetic oligonucleotide
  Mitotic kinesin microtubule-associated protein Eg5 (Kif11) siRNA
ctgacaagagctcaaggaaaaca

SEQ ID NO: 445 - DNA, 23 bp, Artificial Sequence
  Description of Artificial Sequence: Synthetic oligonucleotide
  Mitotic kinesin microtubule-associated protein Eg5 (Kif11) siRNA
tgacaagagctcaaggaaaacat

SEQ ID NO: 446 - DNA, 23 bp, Artificial Sequence
  Description of Artificial Sequence: Synthetic oligonucleotide
  Mitotic kinesin microtubule-associated protein Eg5 (Kif11) siRNA
gacaagagctcaaggaaaacata

SEQ ID NO: 447 - DNA, 23 bp, Artificial Sequence
  Description of Artificial Sequence: Synthetic oligonucleotide
  Mitotic kinesin microtubule-associated protein Eg5 (Kif11) siRNA
acaagagctcaaggaaaacatac

SEQ ID NO: 448 - DNA, 23 bp, Artificial Sequence
  Description of Artificial Sequence: Synthetic oligonucleotide
  Mitotic kinesin microtubule-associated protein Eg5 (Kif11) siRNA
caagagctcaaggaaaacataca

SEQ ID NO: 449 - DNA, 23 bp, Artificial Sequence
  Description of Artificial Sequence: Synthetic oligonucleotide
  Mitotic kinesin microtubule-associated protein Eg5 (Kif11) siRNA
aagagctcaaggaaaacatacac

SEQ ID NO: 450 - DNA, 23 bp, Artificial Sequence
  Description of Artificial Sequence: Synthetic oligonucleotide
  Mitotic kinesin microtubule-associated protein Eg5 (Kif11) siRNA
agagctcaaggaaaacatacact

SEQ ID NO: 451 - DNA, 23 bp, Artificial Sequence
  Description of Artificial Sequence: Synthetic oligonucleotide
  Mitotic kinesin microtubule-associated protein Eg5 (Kif11) siRNA
gagctcaaggaaaacatacactt

SEQ ID NO: 452 - DNA, 23 bp, Artificial Sequence
  Description of Artificial Sequence: Synthetic oligonucleotide
  Mitotic kinesin microtubule-associated protein Eg5 (Kif11) siRNA
agctcaaggaaaacatacacttt

SEQ ID NO: 453 - DNA, 23 bp, Artificial Sequence
  Description of Artificial Sequence: Synthetic oligonucleotide
  Mitotic kinesin microtubule-associated protein Eg5 (Kif11) siRNA
gctcaaggaaaacatacactttt

SEQ ID NO: 454 - DNA, 23 bp, Artificial Sequence
  Description of Artificial Sequence: Synthetic oligonucleotide
  Mitotic kinesin microtubule-associated protein Eg5 (Kif11) siRNA
ctcaaggaaaacatacacttttg

SEQ ID NO: 455 - DNA, 23 bp, Artificial Sequence
  Description of Artificial Sequence: Synthetic oligonucleotide
  Mitotic kinesin microtubule-associated protein Eg5 (Kif11) siRNA
tcaaggaaaacatacacttttga

SEQ ID NO: 456 - DNA, 23 bp, Artificial Sequence
  Description of Artificial Sequence: Synthetic oligonucleotide
  Mitotic kinesin microtubule-associated protein Eg5 (Kif11) siRNA
caaggaaaacatacacttttgat

SEQ ID NO: 457 - DNA, 23 bp, Artificial Sequence
  Description of Artificial Sequence: Synthetic oligonucleotide
  Mitotic kinesin microtubule-associated protein Eg5 (Kif11) siRNA
aaggaaaacatacacttttgata

SEQ ID NO: 458 - DNA, 23 bp, Artificial Sequence
  Description of Artificial Sequence: Synthetic oligonucleotide
  Mitotic kinesin microtubule-associated protein Eg5 (Kif11) siRNA
aggaaaacatacacttttgatat

SEQ ID NO: 459 - DNA, 23 bp, Artificial Sequence
  Description of Artificial Sequence: Synthetic oligonucleotide
  Mitotic kinesin microtubule-associated protein Eg5 (Kif11) siRNA
ggaaaacatacacttttgatatg

SEQ ID NO: 460 - DNA, 23 bp, Artificial Sequence
  Description of Artificial Sequence: Synthetic oligonucleotide
  Mitotic kinesin microtubule-associated protein Eg5 (Kif11) siRNA
gaaaacatacacttttgatatgg

SEQ ID NO: 461 - DNA, 23 bp, Artificial Sequence
  Description of Artificial Sequence: Synthetic oligonucleotide
  Mitotic kinesin microtubule-associated protein Eg5 (Kif11) siRNA
aaaacatacacttttgatatggt

SEQ ID NO: 462 - DNA, 23 bp, Artificial Sequence
  Description of Artificial Sequence: Synthetic oligonucleotide
  Mitotic kinesin microtubule-associated protein Eg5 (Kif11) siRNA
aaacatacacttttgatatggtg

SEQ ID NO: 463 - DNA, 23 bp, Artificial Sequence
  Description of Artificial Sequence: Synthetic oligonucleotide
  Mitotic kinesin microtubule-associated protein Eg5 (Kif11) siRNA
aacatacacttttgatatggtgt

SEQ ID NO: 464 - DNA, 23 bp, Artificial Sequence
  Description of Artificial Sequence: Synthetic oligonucleotide
  Mitotic kinesin microtubule-associated protein Eg5 (Kif11) siRNA
acatacacttttgatatggtgtt

SEQ ID NO: 465 - DNA, 23 bp, Artificial Sequence
  Description of Artificial Sequence: Synthetic oligonucleotide
  Mitotic kinesin microtubule-associated protein Eg5 (Kif11) siRNA
catacacttttgatatggtgttt

SEQ ID NO: 466 - DNA, 23 bp, Artificial Sequence
  Description of Artificial Sequence: Synthetic oligonucleotide
  Mitotic kinesin microtubule-associated protein Eg5 (Kif11) siRNA
atacacttttgatatggtgtttg

SEQ ID NO: 467 - DNA, 23 bp, Artificial Sequence
  Description of Artificial Sequence: Synthetic oligonucleotide
  Mitotic kinesin microtubule-associated protein Eg5 (Kif11) siRNA
tacacttttgatatggtgtttgg

SEQ ID NO: 468 - DNA, 23 bp, Artificial Sequence
  Description of Artificial Sequence: Synthetic oligonucleotide
  Mitotic kinesin microtubule-associated protein Eg5 (Kif11) siRNA
acacttttgatatggtgtttgga

SEQ ID NO: 469 - DNA, 23 bp, Artificial Sequence
  Description of Artificial Sequence: Synthetic oligonucleotide
  Mitotic kinesin microtubule-associated protein Eg5 (Kif11) siRNA
cacttttgatatggtgtttggag

SEQ ID NO: 470 - DNA, 23 bp, Artificial Sequence
  Description of Artificial Sequence: Synthetic oligonucleotide
  Mitotic kinesin microtubule-associated protein Eg5 (Kif11) siRNA
acttttgatatggtgtttggagc

SEQ ID NO: 471 - DNA, 23 bp, Artificial Sequence
  Description of Artificial Sequence: Synthetic oligonucleotide
  Mitotic kinesin microtubule-associated protein Eg5 (Kif11) siRNA
cttttgatatggtgtttggagca

SEQ ID NO: 472 - DNA, 23 bp, Artificial Sequence
  Description of Artificial Sequence: Synthetic oligonucleotide
  Mitotic kinesin microtubule-associated protein Eg5 (Kif11) siRNA
ttttgatatggtgtttggagcat

SEQ ID NO: 473 - DNA, 23 bp, Artificial Sequence
  Description of Artificial Sequence: Synthetic oligonucleotide
  Mitotic kinesin microtubule-associated protein Eg5 (Kif11) siRNA
tttgatatggtgtttggagcatc

SEQ ID NO: 474 - DNA, 23 bp, Artificial Sequence
  Description of Artificial Sequence: Synthetic oligonucleotide
  Mitotic kinesin microtubule-associated protein Eg5 (Kif11) siRNA
ttgatatggtgtttggagcatct

SEQ ID NO: 475 - DNA, 23 bp, Artificial Sequence
  Description of Artificial Sequence: Synthetic oligonucleotide
  Mitotic kinesin microtubule-associated protein Eg5 (Kif11) siRNA
tgatatggtgtttggagcatcta

SEQ ID NO: 476 - DNA, 23 bp, Artificial Sequence
  Description of Artificial Sequence: Synthetic oligonucleotide
  Mitotic kinesin microtubule-associated protein Eg5 (Kif11) siRNA
gatatggtgtttggagcatctac

SEQ ID NO: 477 - DNA, 23 bp, Artificial Sequence
  Description of Artificial Sequence: Synthetic oligonucleotide
  Mitotic kinesin microtubule-associated protein Eg5 (Kif11) siRNA
atatggtgtttggagcatctact

SEQ ID NO: 478 - DNA, 23 bp, Artificial Sequence
  Description of Artificial Sequence: Synthetic oligonucleotide
  Mitotic kinesin microtubule-associated protein Eg5 (Kif11) siRNA
tatggtgtttggagcatctacta

SEQ ID NO: 479 - DNA, 23 bp, Artificial Sequence
  Description of Artificial Sequence: Synthetic oligonucleotide
  Mitotic kinesin microtubule-associated protein Eg5 (Kif11) siRNA
atggtgtttggagcatctactaa

SEQ ID NO: 480 - DNA, 23 bp, Artificial Sequence
  Description of Artificial Sequence: Synthetic oligonucleotide
  Mitotic kinesin microtubule-associated protein Eg5 (Kif11) siRNA
tggtgtttggagcatctactaaa

SEQ ID NO: 481 - DNA, 23 bp, Artificial Sequence
  Description of Artificial Sequence: Synthetic oligonucleotide
  Mitotic kinesin microtubule-associated protein Eg5 (Kif11) siRNA
ggtgtttggagcatctactaaac

SEQ ID NO: 482 - DNA, 23 bp, Artificial Sequence
  Description of Artificial Sequence: Synthetic oligonucleotide
  Mitotic kinesin microtubule-associated protein Eg5 (Kif11) siRNA
gtgtttggagcatctactaaaca

SEQ ID NO: 483 - DNA, 23 bp, Artificial Sequence
  Description of Artificial Sequence: Synthetic oligonucleotide
  Mitotic kinesin microtubule-associated protein Eg5 (Kif11) siRNA
tgtttggagcatctactaaacag

SEQ ID NO: 484 - DNA, 23 bp, Artificial Sequence
  Description of Artificial Sequence: Synthetic oligonucleotide
  Mitotic kinesin microtubule-associated protein Eg5 (Kif11) siRNA
gtttggagcatctactaaacaga

SEQ ID NO: 485 - DNA, 23 bp, Artificial Sequence
  Description of Artificial Sequence: Synthetic oligonucleotide
  Mitotic kinesin microtubule-associated protein Eg5 (Kif11) siRNA
tttggagcatctactaaacagat

SEQ ID NO: 486 - DNA, 23 bp, Artificial Sequence
  Description of Artificial Sequence: Synthetic oligonucleotide
  Mitotic kinesin microtubule-associated protein Eg5 (Kif11) siRNA
ttggagcatctactaaacagatt

SEQ ID NO: 487 - DNA, 23 bp, Artificial Sequence
  Description of Artificial Sequence: Synthetic oligonucleotide
  Mitotic kinesin microtubule-associated protein Eg5 (Kif11) siRNA
tggagcatctactaaacagattg

SEQ ID NO: 488 - DNA, 23 bp, Artificial Sequence
  Description of Artificial Sequence: Synthetic oligonucleotide
  Mitotic kinesin microtubule-associated protein Eg5 (Kif11) siRNA
ggagcatctactaaacagattga

SEQ ID NO: 489 - DNA, 23 bp, Artificial Sequence
  Description of Artificial Sequence: Synthetic oligonucleotide
  Mitotic kinesin microtubule-associated protein Eg5 (Kif11) siRNA
gagcatctactaaacagattgat

SEQ ID NO: 490 - DNA, 23 bp, Artificial Sequence
  Description of Artificial Sequence: Synthetic oligonucleotide
  Mitotic kinesin microtubule-associated protein Eg5 (Kif11) siRNA
agcatctactaaacagattgatg

SEQ ID NO: 491 - DNA, 23 bp, Artificial Sequence
  Description of Artificial Sequence: Synthetic oligonucleotide
  Mitotic kinesin microtubule-associated protein Eg5 (Kif11) siRNA
gcatctactaaacagattgatgt

SEQ ID NO: 492 - DNA, 23 bp, Artificial Sequence
  Description of Artificial Sequence: Synthetic oligonucleotide
  Mitotic kinesin microtubule-associated protein Eg5 (Kif11) siRNA
catctactaaacagattgatgtt

SEQ ID NO: 493 - DNA, 23 bp, Artificial Sequence
  Description of Artificial Sequence: Synthetic oligonucleotide
  Mitotic kinesin microtubule-associated protein Eg5 (Kif11) siRNA
atctactaaacagattgatgttt

SEQ ID NO: 494 - DNA, 23 bp, Artificial Sequence
  Description of Artificial Sequence: Synthetic oligonucleotide
  Mitotic kinesin microtubule-associated protein Eg5 (Kif11) siRNA
tctactaaacagattgatgttta

SEQ ID NO: 495 - DNA, 23 bp, Artificial Sequence
  Description of Artificial Sequence: Synthetic oligonucleotide
  Mitotic kinesin microtubule-associated protein Eg5 (Kif11) siRNA
ctactaaacagattgatgtttac

SEQ ID NO: 496 - DNA, 23 bp, Artificial Sequence
  Description of Artificial Sequence: Synthetic oligonucleotide
  Mitotic kinesin microtubule-associated protein Eg5 (Kif11) siRNA
tactaaacagattgatgtttacc

SEQ ID NO: 497 - DNA, 23 bp, Artificial Sequence
  Description of Artificial Sequence: Synthetic oligonucleotide
  Mitotic kinesin microtubule-associated protein Eg5 (Kif11) siRNA
actaaacagattgatgtttaccg

SEQ ID NO: 498 - DNA, 23 bp, Artificial Sequence
  Description of Artificial Sequence: Synthetic oligonucleotide
  Mitotic kinesin microtubule-associated protein Eg5 (Kif11) siRNA
ctaaacagattgatgtttaccga

SEQ ID NO: 499 - DNA, 23 bp, Artificial Sequence
  Description of Artificial Sequence: Synthetic oligonucleotide
  Mitotic kinesin microtubule-associated protein Eg5 (Kif11) siRNA
taaacagattgatgtttaccgaa

SEQ ID NO: 500 - DNA, 23 bp, Artificial Sequence
  Description of Artificial Sequence: Synthetic oligonucleotide
  Mitotic kinesin microtubule-associated protein Eg5 (Kif11) siRNA
aaacagattgatgtttaccgaag

SEQ ID NO: 501 - DNA, 23 bp, Artificial Sequence
  Description of Artificial Sequence: Synthetic oligonucleotide
  Mitotic kinesin microtubule-associated protein Eg5 (Kif11) siRNA
aacagattgatgtttaccgaagt

SEQ ID NO: 502 - DNA, 23 bp, Artificial Sequence
  Description of Artificial Sequence: Synthetic oligonucleotide
  Mitotic kinesin microtubule-associated protein Eg5 (Kif11) siRNA
acagattgatgtttaccgaagtg

SEQ ID NO: 503 - DNA, 23 bp, Artificial Sequence
  Description of Artificial Sequence: Synthetic oligonucleotide
  Mitotic kinesin microtubule-associated protein Eg5 (Kif11) siRNA
cagattgatgtttaccgaagtgt

SEQ ID NO: 504 - DNA, 23 bp, Artificial Sequence
  Description of Artificial Sequence: Synthetic oligonucleotide
  Mitotic kinesin microtubule-associated protein Eg5 (Kif11) siRNA
agattgatgtttaccgaagtgtt

SEQ ID NO: 505 - DNA, 23 bp, Artificial Sequence
  Description of Artificial Sequence: Synthetic oligonucleotide
  Mitotic kinesin microtubule-associated protein Eg5 (Kif11) siRNA
gattgatgtttaccgaagtgttg

SEQ ID NO: 506 - DNA, 23 bp, Artificial Sequence
  Description of Artificial Sequence: Synthetic oligonucleotide
  Mitotic kinesin microtubule-associated protein Eg5 (Kif11) siRNA
attgatgtttaccgaagtgttgt

SEQ ID NO: 507 - DNA, 23 bp, Artificial Sequence
  Description of Artificial Sequence: Synthetic oligonucleotide
  Mitotic kinesin microtubule-associated protein Eg5 (Kif11) siRNA
ttgatgtttaccgaagtgttgtt

SEQ ID NO: 508 - DNA, 23 bp, Artificial Sequence
  Description of Artificial Sequence: Synthetic oligonucleotide
  Mitotic kinesin microtubule-associated protein Eg5 (Kif11) siRNA
tgatgtttaccgaagtgttgttt

SEQ ID NO: 509 - DNA, 23 bp, Artificial Sequence
  Description of Artificial Sequence: Synthetic oligonucleotide
  Mitotic kinesin microtubule-associated protein Eg5 (Kif11) siRNA
gatgtttaccgaagtgttgtttg

SEQ ID NO: 510 - DNA, 23 bp, Artificial Sequence
  Description of Artificial Sequence: Synthetic oligonucleotide
  Mitotic kinesin microtubule-associated protein Eg5 (Kif11) siRNA
atgtttaccgaagtgttgtttgt

SEQ ID NO: 511 - DNA, 23 bp, Artificial Sequence
  Description of Artificial Sequence: Synthetic oligonucleotide
  Mitotic kinesin microtubule-associated protein Eg5 (Kif11) siRNA
tgtttaccgaagtgttgtttgtc

SEQ ID NO: 512 - DNA, 23 bp, Artificial Sequence
  Description of Artificial Sequence: Synthetic oligonucleotide
  Mitotic kinesin microtubule-associated protein Eg5 (Kif11) siRNA
gtttaccgaagtgttgtttgtcc

SEQ ID NO: 513 - DNA, 23 bp, Artificial Sequence
  Description of Artificial Sequence: Synthetic oligonucleotide
  Mitotic kinesin microtubule-associated protein Eg5 (Kif11) siRNA
tttaccgaagtgttgtttgtcca

SEQ ID NO: 514 - DNA, 23 bp, Artificial Sequence
  Description of Artificial Sequence: Synthetic oligonucleotide
  Mitotic kinesin microtubule-associated protein Eg5 (Kif11) siRNA
ttaccgaagtgttgtttgtccaa

SEQ ID NO: 515 - DNA, 23 bp, Artificial Sequence
  Description of Artificial Sequence: Synthetic oligonucleotide
  Mitotic kinesin microtubule-associated protein Eg5 (Kif11) siRNA
taccgaagtgttgtttgtccaat

SEQ ID NO: 516 - DNA, 23 bp, Artificial Sequence
  Description of Artificial Sequence: Synthetic oligonucleotide
  Mitotic kinesin microtubule-associated protein Eg5 (Kif11) siRNA
accgaagtgttgtttgtccaatt

SEQ ID NO: 517 - DNA, 23 bp, Artificial Sequence
  Description of Artificial Sequence: Synthetic oligonucleotide
  Mitotic kinesin microtubule-associated protein Eg5 (Kif11) siRNA
ccgaagtgttgtttgtccaattc

SEQ ID NO: 518 - DNA, 23 bp, Artificial Sequence
  Description of Artificial Sequence: Synthetic oligonucleotide
  Mitotic kinesin microtubule-associated protein Eg5 (Kif11) siRNA
cgaagtgttgtttgtccaattct

SEQ ID NO: 519 - DNA, 23 bp, Artificial Sequence
  Description of Artificial Sequence: Synthetic oligonucleotide
  Mitotic kinesin microtubule-associated protein Eg5 (Kif11) siRNA
gaagtgttgtttgtccaattctg

SEQ ID NO: 520 - DNA, 23 bp, Artificial Sequence
  Description of Artificial Sequence: Synthetic oligonucleotide
  Mitotic kinesin microtubule-associated protein Eg5 (Kif11) siRNA
aagtgttgtttgtccaattctgg

SEQ ID NO: 521 - DNA, 23 bp, Artificial Sequence
  Description of Artificial Sequence: Synthetic oligonucleotide
  Mitotic kinesin microtubule-associated protein Eg5 (Kif11) siRNA
agtgttgtttgtccaattctgga

SEQ ID NO: 522 - DNA, 23 bp, Artificial Sequence
  Description of Artificial Sequence: Synthetic oligonucleotide
  Mitotic kinesin microtubule-associated protein Eg5 (Kif11) siRNA
gtgttgtttgtccaattctggat

SEQ ID NO: 523 - DNA, 23 bp, Artificial Sequence
  Description of Artificial Sequence: Synthetic oligonucleotide
  Mitotic kinesin microtubule-associated protein Eg5 (Kif11) siRNA
tgttgtttgtccaattctggatg

SEQ ID NO: 524 - DNA, 23 bp, Artificial Sequence
  Description of Artificial Sequence: Synthetic oligonucleotide
  Mitotic kinesin microtubule-associated protein Eg5 (Kif11) siRNA
gttgtttgtccaattctggatga

SEQ ID NO: 525 - DNA, 23 bp, Artificial Sequence
  Description of Artificial Sequence: Synthetic oligonucleotide
  Mitotic kinesin microtubule-associated protein Eg5 (Kif11) siRNA
ttgtttgtccaattctggatgaa

SEQ ID NO: 526 - DNA, 23 bp, Artificial Sequence
  Description of Artificial Sequence: Synthetic oligonucleotide
  Mitotic kinesin microtubule-associated protein Eg5 (Kif11) siRNA
tgtttgtccaattctggatgaag

SEQ ID NO: 527 - DNA, 23 bp, Artificial Sequence
  Description of Artificial Sequence: Synthetic oligonucleotide
  Mitotic kinesin microtubule-associated protein Eg5 (Kif11) siRNA
gtttgtccaattctggatgaagt

SEQ ID NO: 528 - DNA, 23 bp, Artificial Sequence
  Description of Artificial Sequence: Synthetic oligonucleotide
  Mitotic kinesin microtubule-associated protein Eg5 (Kif11) siRNA
tttgtccaattctggatgaagtt

SEQ ID NO: 529 - DNA, 23 bp, Artificial Sequence
  Description of Artificial Sequence: Synthetic oligonucleotide
  Mitotic kinesin microtubule-associated protein Eg5 (Kif11) siRNA
ttgtccaattctggatgaagtta

SEQ ID NO: 530 - DNA, 23 bp, Artificial Sequence
  Description of Artificial Sequence: Synthetic oligonucleotide
  Mitotic kinesin microtubule-associated protein Eg5 (Kif11) siRNA
tgtccaattctggatgaagttat

SEQ ID NO: 531 - DNA, 23 bp, Artificial Sequence
  Description of Artificial Sequence: Synthetic oligonucleotide
  Mitotic kinesin microtubule-associated protein Eg5 (Kif11) siRNA
gtccaattctggatgaagttatt

SEQ ID NO: 532 - DNA, 23 bp, Artificial Sequence
  Description of Artificial Sequence: Synthetic oligonucleotide
  Mitotic kinesin microtubule-associated protein Eg5 (Kif11) siRNA
tccaattctggatgaagttatta

SEQ ID NO: 533 - DNA, 23 bp, Artificial Sequence
  Description of Artificial Sequence: Synthetic oligonucleotide
  Mitotic kinesin microtubule-associated protein Eg5 (Kif11) siRNA
ccaattctggatgaagttattat

SEQ ID NO: 534 - DNA, 23 bp, Artificial Sequence
  Description of Artificial Sequence: Synthetic oligonucleotide
  Mitotic kinesin microtubule-associated protein Eg5 (Kif11) siRNA
caattctggatgaagttattatg

SEQ ID NO: 535 - DNA, 23 bp, Artificial Sequence
  Description of Artificial Sequence: Synthetic oligonucleotide
  Mitotic kinesin microtubule-associated protein Eg5 (Kif11) siRNA
aattctggatgaagttattatgg

SEQ ID NO: 536 - DNA, 23 bp, Artificial Sequence
  Description of Artificial Sequence: Synthetic oligonucleotide
  Mitotic kinesin microtubule-associated protein Eg5 (Kif11) siRNA
attctggatgaagttattatggg

SEQ ID NO: 537 - DNA, 23 bp, Artificial Sequence
  Description of Artificial Sequence: Synthetic oligonucleotide
  Mitotic kinesin microtubule-associated protein Eg5 (Kif11) siRNA
ttctggatgaagttattatgggc

SEQ ID NO: 538 - DNA, 23 bp, Artificial Sequence
  Description of Artificial Sequence: Synthetic oligonucleotide
  Mitotic kinesin microtubule-associated protein Eg5 (Kif11) siRNA
tctggatgaagttattatgggct

SEQ ID NO: 539 - DNA, 23 bp, Artificial Sequence
  Description of Artificial Sequence: Synthetic oligonucleotide
  Mitotic kinesin microtubule-associated protein Eg5 (Kif11) siRNA
ctggatgaagttattatgggcta

SEQ ID NO: 540 - DNA, 23 bp, Artificial Sequence
  Description of Artificial Sequence: Synthetic oligonucleotide
  Mitotic kinesin microtubule-associated protein Eg5 (Kif11) siRNA
tggatgaagttattatgggctat

SEQ ID NO: 541 - DNA, 23 bp, Artificial Sequence
  Description of Artificial Sequence: Synthetic oligonucleotide
  Mitotic kinesin microtubule-associated protein Eg5 (Kif11) siRNA
ggatgaagttattatgggctata

SEQ ID NO: 542 - DNA, 23 bp, Artificial Sequence
  Description of Artificial Sequence: Synthetic oligonucleotide
  Mitotic kinesin microtubule-associated protein Eg5 (Kif11) siRNA
gatgaagttattatgggctataa

SEQ ID NO: 543 - DNA, 23 bp, Artificial Sequence
  Description of Artificial Sequence: Synthetic oligonucleotide
  Mitotic kinesin microtubule-associated protein Eg5 (Kif11) siRNA
atgaagttattatgggctataat

SEQ ID NO: 544 - DNA, 23 bp, Artificial Sequence
  Description of Artificial Sequence: Synthetic oligonucleotide
  Mitotic kinesin microtubule-associated protein Eg5 (Kif11) siRNA
tgaagttattatgggctataatt

SEQ ID NO: 545 - DNA, 23 bp, Artificial Sequence
  Description of Artificial Sequence: Synthetic oligonucleotide
  Mitotic kinesin microtubule-associated protein Eg5 (Kif11) siRNA
gaagttattatgggctataattg

SEQ ID NO: 546 - DNA, 23 bp, Artificial Sequence
  Description of Artificial Sequence: Synthetic oligonucleotide
  Mitotic kinesin microtubule-associated protein Eg5 (Kif11) siRNA
aagttattatgggctataattgc

SEQ ID NO: 547 - DNA, 23 bp, Artificial Sequence
  Description of Artificial Sequence: Synthetic oligonucleotide
  Mitotic kinesin microtubule-associated protein Eg5 (Kif11) siRNA
agttattatgggctataattgca

SEQ ID NO: 548 - DNA, 23 bp, Artificial Sequence
  Description of Artificial Sequence: Synthetic oligonucleotide
  Mitotic kinesin microtubule-associated protein Eg5 (Kif11) siRNA
gttattatgggctataattgcac

SEQ ID NO: 549 - DNA, 23 bp, Artificial Sequence
  Description of Artificial Sequence: Synthetic oligonucleotide
  Mitotic kinesin microtubule-associated protein Eg5 (Kif11) siRNA
ttattatgggctataattgcact

SEQ ID NO: 550 - DNA, 23 bp, Artificial Sequence
  Description of Artificial Sequence: Synthetic oligonucleotide
  Mitotic kinesin microtubule-associated protein Eg5 (Kif11) siRNA
tattatgggctataattgcacta

SEQ ID NO: 551 - DNA, 23 bp, Artificial Sequence
  Description of Artificial Sequence: Synthetic oligonucleotide
  Mitotic kinesin microtubule-associated protein Eg5 (Kif11) siRNA
attatgggctataattgcactat

SEQ ID NO: 552 - DNA, 23 bp, Artificial Sequence
  Description of Artificial Sequence: Synthetic oligonucleotide
  Mitotic kinesin microtubule-associated protein Eg5 (Kif11) siRNA
ttatgggctataattgcactatc

SEQ ID NO: 553 - DNA, 23 bp, Artificial Sequence
  Description of Artificial Sequence: Synthetic oligonucleotide
  Mitotic kinesin microtubule-associated protein Eg5 (Kif11) siRNA
tatgggctataattgcactatct

SEQ ID NO: 554 - DNA, 23 bp, Artificial Sequence
  Description of Artificial Sequence: Synthetic oligonucleotide
  Mitotic kinesin microtubule-associated protein Eg5 (Kif11) siRNA
atgggctataattgcactatctt

SEQ ID NO: 555 - DNA, 23 bp, Artificial Sequence
  Description of Artificial Sequence: Synthetic oligonucleotide
  Mitotic kinesin microtubule-associated protein Eg5 (Kif11) siRNA
tgggctataattgcactatcttt

SEQ ID NO: 556 - DNA, 23 bp, Artificial Sequence
  Description of Artificial Sequence: Synthetic oligonucleotide
  Mitotic kinesin microtubule-associated protein Eg5 (Kif11) siRNA
gggctataattgcactatctttg

SEQ ID NO: 557 - DNA, 23 bp, Artificial Sequence
  Description of Artificial Sequence: Synthetic oligonucleotide
  Mitotic kinesin microtubule-associated protein Eg5 (Kif11) siRNA
ggctataattgcactatctttgc

SEQ ID NO: 558 - DNA, 23 bp, Artificial Sequence
  Description of Artificial Sequence: Synthetic oligonucleotide
  Mitotic kinesin microtubule-associated protein Eg5 (Kif11) siRNA
gctataattgcactatctttgcg

SEQ ID NO: 559 - DNA, 23 bp, Artificial Sequence
  Description of Artificial Sequence: Synthetic oligonucleotide
  Mitotic kinesin microtubule-associated protein Eg5 (Kif11) siRNA
ctataattgcactatctttgcgt

SEQ ID NO: 560 - DNA, 23 bp, Artificial Sequence
  Description of Artificial Sequence: Synthetic oligonucleotide
  Mitotic kinesin microtubule-associated protein Eg5 (Kif11) siRNA
tataattgcactatctttgcgta

SEQ ID NO: 561 - DNA, 23 bp, Artificial Sequence
  Description of Artificial Sequence: Synthetic oligonucleotide
  Mitotic kinesin microtubule-associated protein Eg5 (Kif11) siRNA
ataattgcactatctttgcgtat

SEQ ID NO: 562 - DNA, 23 bp, Artificial Sequence
  Description of Artificial Sequence: Synthetic oligonucleotide
  Mitotic kinesin microtubule-associated protein Eg5 (Kif11) siRNA
taattgcactatctttgcgtatg

SEQ ID NO: 563 - DNA, 23 bp, Artificial Sequence
  Description of Artificial Sequence: Synthetic oligonucleotide
  Mitotic kinesin microtubule-associated protein Eg5 (Kif11) siRNA
aattgcactatctttgcgtatgg

SEQ ID NO: 564 - DNA, 23 bp, Artificial Sequence
  Description of Artificial Sequence: Synthetic oligonucleotide
  Mitotic kinesin microtubule-associated protein Eg5 (Kif11) siRNA
attgcactatctttgcgtatggc

SEQ ID NO: 565 - DNA, 23 bp, Artificial Sequence
  Description of Artificial Sequence: Synthetic oligonucleotide
  Mitotic kinesin microtubule-associated protein Eg5 (Kif11) siRNA
ttgcactatctttgcgtatggcc

SEQ ID NO: 566 - DNA, 23 bp, Artificial Sequence
  Description of Artificial Sequence: Synthetic oligonucleotide
  Mitotic kinesin microtubule-associated protein Eg5 (Kif11) siRNA
tgcactatctttgcgtatggcca

SEQ ID NO: 567 - DNA, 23 bp, Artificial Sequence
  Description of Artificial Sequence: Synthetic oligonucleotide
  Mitotic kinesin microtubule-associated protein Eg5 (Kif11) siRNA
gcactatctttgcgtatggccaa

SEQ ID NO: 568 - DNA, 23 bp, Artificial Sequence
  Description of Artificial Sequence: Synthetic oligonucleotide
  Mitotic kinesin microtubule-associated protein Eg5 (Kif11) siRNA
cactatctttgcgtatggccaaa

SEQ ID NO: 569 - DNA, 23 bp, Artificial Sequence
  Description of Artificial Sequence: Synthetic oligonucleotide
  Mitotic kinesin microtubule-associated protein Eg5 (Kif11) siRNA
actatctttgcgtatggccaaac

SEQ ID NO: 570 - DNA, 23 bp, Artificial Sequence
  Description of Artificial Sequence: Synthetic oligonucleotide
  Mitotic kinesin microtubule-associated protein Eg5 (Kif11) siRNA
ctatctttgcgtatggccaaact

SEQ ID NO: 571 - DNA, 23 bp, Artificial Sequence
  Description of Artificial Sequence: Synthetic oligonucleotide
  Mitotic kinesin microtubule-associated protein Eg5 (Kif11) siRNA
tatctttgcgtatggccaaactg

SEQ ID NO: 572 - DNA, 23 bp, Artificial Sequence
  Description of Artificial Sequence: Synthetic oligonucleotide
  Mitotic kinesin microtubule-associated protein Eg5 (Kif11) siRNA
atctttgcgtatggccaaactgg

SEQ ID NO: 573 - DNA, 23 bp, Artificial Sequence
  Description of Artificial Sequence: Synthetic oligonucleotide
  Mitotic kinesin microtubule-associated protein Eg5 (Kif11) siRNA
tctttgcgtatggccaaactggc

SEQ ID NO: 574 - DNA, 23 bp, Artificial Sequence
  Description of Artificial Sequence: Synthetic oligonucleotide
  Mitotic kinesin microtubule-associated protein Eg5 (Kif11) siRNA
ctttgcgtatggccaaactggca

SEQ ID NO: 575 - DNA, 23 bp, Artificial Sequence
  Description of Artificial Sequence: Synthetic oligonucleotide
  Mitotic kinesin microtubule-associated protein Eg5 (Kif11) siRNA
tttgcgtatggccaaactggcac

SEQ ID NO: 576 - DNA, 23 bp, Artificial Sequence
  Description of Artificial Sequence: Synthetic oligonucleotide
  Mitotic kinesin microtubule-associated protein Eg5 (Kif11) siRNA
ttgcgtatggccaaactggcact

SEQ ID NO: 577 - DNA, 23 bp, Artificial Sequence
  Description of Artificial Sequence: Synthetic oligonucleotide
  Mitotic kinesin microtubule-associated protein Eg5 (Kif11) siRNA
tgcgtatggccaaactggcactg

SEQ ID NO: 578 - DNA, 23 bp, Artificial Sequence
  Description of Artificial Sequence: Synthetic oligonucleotide
  Mitotic kinesin microtubule-associated protein Eg5 (Kif11) siRNA
gcgtatggccaaactggcactgg

SEQ ID NO: 579 - DNA, 23 bp, Artificial Sequence
  Description of Artificial Sequence: Synthetic oligonucleotide
  Mitotic kinesin microtubule-associated protein Eg5 (Kif11) siRNA
cgtatggccaaactggcactgga

SEQ ID NO: 580 - DNA, 23 bp, Artificial Sequence
  Description of Artificial Sequence: Synthetic oligonucleotide
  Mitotic kinesin microtubule-associated protein Eg5 (Kif11) siRNA
gtatggccaaactggcactggaa

SEQ ID NO: 581 - DNA, 23 bp, Artificial Sequence
  Description of Artificial Sequence: Synthetic oligonucleotide
  Mitotic kinesin microtubule-associated protein Eg5 (Kif11) siRNA
tatggccaaactggcactggaaa

SEQ ID NO: 582 - DNA, 23 bp, Artificial Sequence
  Description of Artificial Sequence: Synthetic oligonucleotide
  Mitotic kinesin microtubule-associated protein Eg5 (Kif11) siRNA
atggccaaactggcactggaaaa

SEQ ID NO: 583 - DNA, 23 bp, Artificial Sequence
  Description of Artificial Sequence: Synthetic oligonucleotide
  Mitotic kinesin microtubule-associated protein Eg5 (Kif11) siRNA
tggccaaactggcactggaaaaa

SEQ ID NO: 584 - DNA, 23 bp, Artificial Sequence
  Description of Artificial Sequence: Synthetic oligonucleotide
  Mitotic kinesin microtubule-associated protein Eg5 (Kif11) siRNA
ggccaaactggcactggaaaaac

SEQ ID NO: 585 - DNA, 23 bp, Artificial Sequence
  Description of Artificial Sequence: Synthetic oligonucleotide
  Mitotic kinesin microtubule-associated protein Eg5 (Kif11) siRNA
gccaaactggcactggaaaaact

SEQ ID NO: 586 - DNA, 23 bp, Artificial Sequence
  Description of Artificial Sequence: Synthetic oligonucleotide
  Mitotic kinesin microtubule-associated protein Eg5 (Kif11) siRNA
ccaaactggcactggaaaaactt

SEQ ID NO: 587 - DNA, 23 bp, Artificial Sequence
  Description of Artificial Sequence: Synthetic oligonucleotide
  Mitotic kinesin microtubule-associated protein Eg5 (Kif11) siRNA
caaactggcactggaaaaacttt

SEQ ID NO: 588 - DNA, 23 bp, Artificial Sequence
  Description of Artificial Sequence: Synthetic oligonucleotide
  Mitotic kinesin microtubule-associated protein Eg5 (Kif11) siRNA
aaactggcactggaaaaactttt

SEQ ID NO: 589 - DNA, 23 bp, Artificial Sequence
  Description of Artificial Sequence: Synthetic oligonucleotide
  Mitotic kinesin microtubule-associated protein Eg5 (Kif11) siRNA
aactggcactggaaaaactttta

SEQ ID NO: 590 - DNA, 23 bp, Artificial Sequence
  Description of Artificial Sequence: Synthetic oligonucleotide
  Mitotic kinesin microtubule-associated protein Eg5 (Kif11) siRNA
actggcactggaaaaacttttac

SEQ ID NO: 591 - DNA, 23 bp, Artificial Sequence
  Description of Artificial Sequence: Synthetic oligonucleotide
  Mitotic kinesin microtubule-associated protein Eg5 (Kif11) siRNA
ctggcactggaaaaacttttaca

SEQ ID NO: 592 - DNA, 23 bp, Artificial Sequence
  Description of Artificial Sequence: Synthetic oligonucleotide
  Mitotic kinesin microtubule-associated protein Eg5 (Kif11) siRNA
tggcactggaaaaacttttacaa

SEQ ID NO: 593 - DNA, 23 bp, Artificial Sequence
  Description of Artificial Sequence: Synthetic oligonucleotide
  Mitotic kinesin microtubule-associated protein Eg5 (Kif11) siRNA
ggcactggaaaaacttttacaat

SEQ ID NO: 594 - DNA, 23 bp, Artificial Sequence
  Description of Artificial Sequence: Synthetic oligonucleotide
  Mitotic kinesin microtubule-associated protein Eg5 (Kif11) siRNA
gcactggaaaaacttttacaatg

SEQ ID NO: 595 - DNA, 23 bp, Artificial Sequence
  Description of Artificial Sequence: Synthetic oligonucleotide
  Mitotic kinesin microtubule-associated protein Eg5 (Kif11) siRNA
cactggaaaaacttttacaatgg

SEQ ID NO: 596 - DNA, 23 bp, Artificial Sequence
  Description of Artificial Sequence: Synthetic oligonucleotide
  Mitotic kinesin microtubule-associated protein Eg5 (Kif11) siRNA
actggaaaaacttttacaatgga

SEQ ID NO: 597 - DNA, 23 bp, Artificial Sequence
  Description of Artificial Sequence: Synthetic oligonucleotide
  Mitotic kinesin microtubule-associated protein Eg5 (Kif11) siRNA
ctggaaaaacttttacaatggaa

SEQ ID NO: 598 - DNA, 23 bp, Artificial Sequence
  Description of Artificial Sequence: Synthetic oligonucleotide
  Mitotic kinesin microtubule-associated protein Eg5 (Kif11) siRNA
tggaaaaacttttacaatggaag

SEQ ID NO: 599 - DNA, 23 bp, Artificial Sequence
  Description of Artificial Sequence: Synthetic oligonucleotide
  Mitotic kinesin microtubule-associated protein Eg5 (Kif11) siRNA
ggaaaaacttttacaatggaagg

SEQ ID NO: 600 - DNA, 23 bp, Artificial Sequence
  Description of Artificial Sequence: Synthetic oligonucleotide
  Mitotic kinesin microtubule-associated protein Eg5 (Kif11) siRNA
gaaaaacttttacaatggaaggt

SEQ ID NO: 601 - DNA, 23 bp, Artificial Sequence
  Description of Artificial Sequence: Synthetic oligonucleotide
  Mitotic kinesin microtubule-associated protein Eg5 (Kif11) siRNA
aaaaacttttacaatggaaggtg

SEQ ID NO: 602 - DNA, 23 bp, Artificial Sequence
  Description of Artificial Sequence: Synthetic oligonucleotide
  Mitotic kinesin microtubule-associated protein Eg5 (Kif11) siRNA
aaaacttttacaatggaaggtga

SEQ ID NO: 603 - DNA, 23 bp, Artificial Sequence
  Description of Artificial Sequence: Synthetic oligonucleotide
  Mitotic kinesin microtubule-associated protein Eg5 (Kif11) siRNA
aaacttttacaatggaaggtgaa

SEQ ID NO: 604 - DNA, 23 bp, Artificial Sequence
  Description of Artificial Sequence: Synthetic oligonucleotide
  Mitotic kinesin microtubule-associated protein Eg5 (Kif11) siRNA
aacttttacaatggaaggtgaaa

SEQ ID NO: 605 - DNA, 23 bp, Artificial Sequence
  Description of Artificial Sequence: Synthetic oligonucleotide
  Mitotic kinesin microtubule-associated protein Eg5 (Kif11) siRNA
acttttacaatggaaggtgaaag

SEQ ID NO: 606 - DNA, 23 bp, Artificial Sequence
  Description of Artificial Sequence: Synthetic oligonucleotide
  Mitotic kinesin microtubule-associated protein Eg5 (Kif11) siRNA
cttttacaatggaaggtgaaagg

SEQ ID NO: 607 - DNA, 23 bp, Artificial Sequence
  Description of Artificial Sequence: Synthetic oligonucleotide
  Mitotic kinesin microtubule-associated protein Eg5 (Kif11) siRNA
ttttacaatggaaggtgaaaggt

SEQ ID NO: 608 - DNA, 23 bp, Artificial Sequence
  Description of Artificial Sequence: Synthetic oligonucleotide
  Mitotic kinesin microtubule-associated protein Eg5 (Kif11) siRNA
tttacaatggaaggtgaaaggtc

SEQ ID NO: 609 - DNA, 23 bp, Artificial Sequence
  Description of Artificial Sequence: Synthetic oligonucleotide
  Mitotic kinesin microtubule-associated protein Eg5 (Kif11) siRNA
ttacaatggaaggtgaaaggtca

SEQ ID NO: 610 - DNA, 23 bp, Artificial Sequence
  Description of Artificial Sequence: Synthetic oligonucleotide
  Mitotic kinesin microtubule-associated protein Eg5 (Kif11) siRNA
tacaatggaaggtgaaaggtcac

SEQ ID NO: 611 - DNA, 23 bp, Artificial Sequence
  Description of Artificial Sequence: Synthetic oligonucleotide
  Mitotic kinesin microtubule-associated protein Eg5 (Kif11) siRNA
acaatggaaggtgaaaggtcacc

SEQ ID NO: 612 - DNA, 23 bp, Artificial Sequence
  Description of Artificial Sequence: Synthetic oligonucleotide
  Mitotic kinesin microtubule-associated protein Eg5 (Kif11) siRNA
caatggaaggtgaaaggtcacct

SEQ ID NO: 613 - DNA, 23 bp, Artificial Sequence
  Description of Artificial Sequence: Synthetic oligonucleotide
  Mitotic kinesin microtubule-associated protein Eg5 (Kif11) siRNA
aatggaaggtgaaaggtcaccta

SEQ ID NO: 614 - DNA, 23 bp, Artificial Sequence
  Description of Artificial Sequence: Synthetic oligonucleotide
  Mitotic kinesin microtubule-associated protein Eg5 (Kif11) siRNA
atggaaggtgaaaggtcacctaa

SEQ ID NO: 615 - DNA, 23 bp, Artificial Sequence
  Description of Artificial Sequence: Synthetic oligonucleotide
  Mitotic kinesin microtubule-associated protein Eg5 (Kif11) siRNA
tggaaggtgaaaggtcacctaat

SEQ ID NO: 616 - DNA, 23 bp, Artificial Sequence
  Description of Artificial Sequence: Synthetic oligonucleotide
  Mitotic kinesin microtubule-associated protein Eg5 (Kif11) siRNA
ggaaggtgaaaggtcacctaatg

SEQ ID NO: 617 - DNA, 23 bp, Artificial Sequence
  Description of Artificial Sequence: Synthetic oligonucleotide
  Mitotic kinesin microtubule-associated protein Eg5 (Kif11) siRNA
gaaggtgaaaggtcacctaatga

SEQ ID NO: 618 - DNA, 23 bp, Artificial Sequence
  Description of Artificial Sequence: Synthetic oligonucleotide
  Mitotic kinesin microtubule-associated protein Eg5 (Kif11) siRNA
aaggtgaaaggtcacctaatgaa

SEQ ID NO: 619 - DNA, 23 bp, Artificial Sequence
  Description of Artificial Sequence: Synthetic oligonucleotide
  Mitotic kinesin microtubule-associated protein Eg5 (Kif11) siRNA
aggtgaaaggtcacctaatgaag

SEQ ID NO: 620 - DNA, 23 bp, Artificial Sequence
  Description of Artificial Sequence: Synthetic oligonucleotide
  Mitotic kinesin microtubule-associated protein Eg5 (Kif11) siRNA
ggtgaaaggtcacctaatgaaga

SEQ ID NO: 621 - DNA, 23 bp, Artificial Sequence
  Description of Artificial Sequence: Synthetic oligonucleotide
  Mitotic kinesin microtubule-associated protein Eg5 (Kif11) siRNA
gtgaaaggtcacctaatgaagag

SEQ ID NO: 622 - DNA, 23 bp, Artificial Sequence
  Description of Artificial Sequence: Synthetic oligonucleotide
  Mitotic kinesin microtubule-associated protein Eg5 (Kif11) siRNA
tgaaaggtcacctaatgaagagt

SEQ ID NO: 623 - DNA, 23 bp, Artificial Sequence
  Description of Artificial Sequence: Synthetic oligonucleotide
  Mitotic kinesin microtubule-associated protein Eg5 (Kif11) siRNA
gaaaggtcacctaatgaagagta

SEQ ID NO: 624 - DNA, 23 bp, Artificial Sequence
  Description of Artificial Sequence: Synthetic oligonucleotide
  Mitotic kinesin microtubule-associated protein Eg5 (Kif11) siRNA
aaaggtcacctaatgaagagtat

SEQ ID NO: 625 - DNA, 23 bp, Artificial Sequence
  Description of Artificial Sequence: Synthetic oligonucleotide
  Mitotic kinesin microtubule-associated protein Eg5 (Kif11) siRNA
aaggtcacctaatgaagagtata

SEQ ID NO: 626 - DNA, 23 bp, Artificial Sequence
  Description of Artificial Sequence: Synthetic oligonucleotide
  Mitotic kinesin microtubule-associated protein Eg5 (Kif11) siRNA
aggtcacctaatgaagagtatac

SEQ ID NO: 627 - DNA, 23 bp, Artificial Sequence
  Description of Artificial Sequence: Synthetic oligonucleotide
  Mitotic kinesin microtubule-associated protein Eg5 (Kif11) siRNA
ggtcacctaatgaagagtatacc

SEQ ID NO: 628 - DNA, 23 bp, Artificial Sequence
  Description of Artificial Sequence: Synthetic oligonucleotide
  Mitotic kinesin microtubule-associated protein Eg5 (Kif11) siRNA
gtcacctaatgaagagtatacct

SEQ ID NO: 629 - DNA, 23 bp, Artificial Sequence
  Description of Artificial Sequence: Synthetic oligonucleotide
  Mitotic kinesin microtubule-associated protein Eg5 (Kif11) siRNA
tcacctaatgaagagtatacctg

SEQ ID NO: 630 - DNA, 23 bp, Artificial Sequence
  Description of Artificial Sequence: Synthetic oligonucleotide
  Mitotic kinesin microtubule-associated protein Eg5 (Kif11) siRNA
cacctaatgaagagtatacctgg

SEQ ID NO: 631 - DNA, 23 bp, Artificial Sequence
  Description of Artificial Sequence: Synthetic oligonucleotide
  Mitotic kinesin microtubule-associated protein Eg5 (Kif11) siRNA
acctaatgaagagtatacctggg

SEQ ID NO: 632 - DNA, 23 bp, Artificial Sequence
  Description of Artificial Sequence: Synthetic oligonucleotide
  Mitotic kinesin microtubule-associated protein Eg5 (Kif11) siRNA
cctaatgaagagtatacctggga

SEQ ID NO: 633 - DNA, 23 bp, Artificial Sequence
  Description of Artificial Sequence: Synthetic oligonucleotide
  Mitotic kinesin microtubule-associated protein Eg5 (Kif11) siRNA
ctaatgaagagtatacctgggaa

SEQ ID NO: 634 - DNA, 23 bp, Artificial Sequence
  Description of Artificial Sequence: Synthetic oligonucleotide
  Mitotic kinesin microtubule-associated protein Eg5 (Kif11) siRNA
taatgaagagtatacctgggaag

SEQ ID NO: 635 - DNA, 23 bp, Artificial Sequence
  Description of Artificial Sequence: Synthetic oligonucleotide
  Mitotic kinesin microtubule-associated protein Eg5 (Kif11) siRNA
aatgaagagtatacctgggaaga

SEQ ID NO: 636 - DNA, 23 bp, Artificial Sequence
  Description of Artificial Sequence: Synthetic oligonucleotide
  Mitotic kinesin microtubule-associated protein Eg5 (Kif11) siRNA
atgaagagtatacctgggaagag

SEQ ID NO: 637 - DNA, 23 bp, Artificial Sequence
  Description of Artificial Sequence: Synthetic oligonucleotide
  Mitotic kinesin microtubule-associated protein Eg5 (Kif11) siRNA
tgaagagtatacctgggaagagg

SEQ ID NO: 638 - DNA, 23 bp, Artificial Sequence
  Description of Artificial Sequence: Synthetic oligonucleotide
  Mitotic kinesin microtubule-associated protein Eg5 (Kif11) siRNA
ttcaaatcttaacccttaggact

SEQ ID NO: 639 - DNA, 23 bp, Artificial Sequence
  Description of Artificial Sequence: Synthetic oligonucleotide
  Mitotic kinesin microtubule-associated protein Eg5 (Kif11) siRNA
tcaaatcttaacccttaggactc

SEQ ID NO: 640 - DNA, 23 bp, Artificial Sequence
  Description of Artificial Sequence: Synthetic oligonucleotide
  Mitotic kinesin microtubule-associated protein Eg5 (Kif11) siRNA
agagtatacctgggaagaggatc

SEQ ID NO: 641 - DNA, 23 bp, Artificial Sequence
  Description of Artificial Sequence: Synthetic oligonucleotide
  Mitotic kinesin microtubule-associated protein Eg5 (Kif11) siRNA
gagtatacctgggaagaggatcc

SEQ ID NO: 642 - DNA, 23 bp, Artificial Sequence
  Description of Artificial Sequence: Synthetic oligonucleotide
  Mitotic kinesin microtubule-associated protein Eg5 (Kif11) siRNA
agtatacctgggaagaggatccc

SEQ ID NO: 643 - DNA, 23 bp, Artificial Sequence
  Description of Artificial Sequence: Synthetic oligonucleotide
  Mitotic kinesin microtubule-associated protein Eg5 (Kif11) siRNA
gtatacctgggaagaggatccct

SEQ ID NO: 644 - DNA, 23 bp, Artificial Sequence
  Description of Artificial Sequence: Synthetic oligonucleotide
  Mitotic kinesin microtubule-associated protein Eg5 (Kif11) siRNA
tatacctgggaagaggatccctt

SEQ ID NO: 645 - DNA, 23 bp, Artificial Sequence
  Description of Artificial Sequence: Synthetic oligonucleotide
  Mitotic kinesin microtubule-associated protein Eg5 (Kif11) siRNA
atacctgggaagaggatcccttg

SEQ ID NO: 646 - DNA, 23 bp, Artificial Sequence
  Description of Artificial Sequence: Synthetic oligonucleotide
  Mitotic kinesin microtubule-associated protein Eg5 (Kif11) siRNA
tacctgggaagaggatcccttgg

SEQ ID NO: 647 - DNA, 23 bp, Artificial Sequence
  Description of Artificial Sequence: Synthetic oligonucleotide
  Mitotic kinesin microtubule-associated protein Eg5 (Kif11) siRNA
acctgggaagaggatcccttggc

SEQ ID NO: 648 - DNA, 23 bp, Artificial Sequence
  Description of Artificial Sequence: Synthetic oligonucleotide
  Mitotic kinesin microtubule-associated protein Eg5 (Kif11) siRNA
cctgggaagaggatcccttggct

SEQ ID NO: 649 - DNA, 23 bp, Artificial Sequence
  Description of Artificial Sequence: Synthetic oligonucleotide
  Mitotic kinesin microtubule-associated protein Eg5 (Kif11) siRNA
ctgggaagaggatcccttggctg

SEQ ID NO: 650 - DNA, 23 bp, Artificial Sequence
  Description of Artificial Sequence: Synthetic oligonucleotide
  Mitotic kinesin microtubule-associated protein Eg5 (Kif11) siRNA
tgggaagaggatcccttggctgg

SEQ ID NO: 651 - DNA, 23 bp, Artificial Sequence
  Description of Artificial Sequence: Synthetic oligonucleotide
  Mitotic kinesin microtubule-associated protein Eg5 (Kif11) siRNA
gggaagaggatcccttggctggt

SEQ ID NO: 652 - DNA, 23 bp, Artificial Sequence
  Description of Artificial Sequence: Synthetic oligonucleotide
  Mitotic kinesin microtubule-associated protein Eg5 (Kif11) siRNA
ggaagaggatcccttggctggta

SEQ ID NO: 653 - DNA, 23 bp, Artificial Sequence
  Description of Artificial Sequence: Synthetic oligonucleotide
  Mitotic kinesin microtubule-associated protein Eg5 (Kif11) siRNA
gaagaggatcccttggctggtat

SEQ ID NO: 654 - DNA, 23 bp, Artificial Sequence
  Description of Artificial Sequence: Synthetic oligonucleotide
  Mitotic kinesin microtubule-associated protein Eg5 (Kif11) siRNA
aagaggatcccttggctggtata

SEQ ID NO: 655 - DNA, 23 bp, Artificial Sequence
  Description of Artificial Sequence: Synthetic oligonucleotide
  Mitotic kinesin microtubule-associated protein Eg5 (Kif11) siRNA
agaggatcccttggctggtataa

SEQ ID NO: 656 - DNA, 23 bp, Artificial Sequence
  Description of Artificial Sequence: Synthetic oligonucleotide
  Mitotic kinesin microtubule-associated protein Eg5 (Kif11) siRNA
gaggatcccttggctggtataat

SEQ ID NO: 657 - DNA, 23 bp, Artificial Sequence
  Description of Artificial Sequence: Synthetic oligonucleotide
  Mitotic kinesin microtubule-associated protein Eg5 (Kif11) siRNA
aggatcccttggctggtataatt

SEQ ID NO: 658 - DNA, 23 bp, Artificial Sequence
  Description of Artificial Sequence: Synthetic oligonucleotide
  Mitotic kinesin microtubule-associated protein Eg5 (Kif11) siRNA
ggatcccttggctggtataattc

SEQ ID NO: 659 - DNA, 23 bp, Artificial Sequence
  Description of Artificial Sequence: Synthetic oligonucleotide
  Mitotic kinesin microtubule-associated protein Eg5 (Kif11) siRNA
gatcccttggctggtataattcc

SEQ ID NO: 660 - DNA, 23 bp, Artificial Sequence
  Description of Artificial Sequence: Synthetic oligonucleotide
  Mitotic kinesin microtubule-associated protein Eg5 (Kif11) siRNA
atcccttggctggtataattcca

SEQ ID NO: 661 - DNA, 23 bp, Artificial Sequence
  Description of Artificial Sequence: Synthetic oligonucleotide
  Mitotic kinesin microtubule-associated protein Eg5 (Kif11) siRNA
tcccttggctggtataattccac

SEQ ID NO: 662 - DNA, 23 bp, Artificial Sequence
  Description of Artificial Sequence: Synthetic oligonucleotide
  Mitotic kinesin microtubule-associated protein Eg5 (Kif11) siRNA
cccttggctggtataattccacg

SEQ ID NO: 663 - DNA, 23 bp, Artificial Sequence
  Description of Artificial Sequence: Synthetic oligonucleotide
  Mitotic kinesin microtubule-associated protein Eg5 (Kif11) siRNA
ccttggctggtataattccacgt

SEQ ID NO: 664 - DNA, 23 bp, Artificial Sequence
  Description of Artificial Sequence: Synthetic oligonucleotide
  Mitotic kinesin microtubule-associated protein Eg5 (Kif11) siRNA
cttggctggtataattccacgta

SEQ ID NO: 665 - DNA, 23 bp, Artificial Sequence
  Description of Artificial Sequence: Synthetic oligonucleotide
  Mitotic kinesin microtubule-associated protein Eg5 (Kif11) siRNA
ttggctggtataattccacgtac

SEQ ID NO: 666 - DNA, 23 bp, Artificial Sequence
  Description of Artificial Sequence: Synthetic oligonucleotide
  Mitotic kinesin microtubule-associated protein Eg5 (Kif11) siRNA
tggctggtataattccacgtacc

SEQ ID NO: 667 - DNA, 23 bp, Artificial Sequence
  Description of Artificial Sequence: Synthetic oligonucleotide
  Mitotic kinesin microtubule-associated protein Eg5 (Kif11) siRNA
ggctggtataattccacgtaccc

SEQ ID NO: 668 - DNA, 23 bp, Artificial Sequence
  Description of Artificial Sequence: Synthetic oligonucleotide
  Mitotic kinesin microtubule-associated protein Eg5 (Kif11) siRNA
gctggtataattccacgtaccct

SEQ ID NO: 669 - DNA, 23 bp, Artificial Sequence
  Description of Artificial Sequence: Synthetic oligonucleotide
  Mitotic kinesin microtubule-associated protein Eg5 (Kif11) siRNA
ctggtataattccacgtaccctt

SEQ ID NO: 670 - DNA, 23 bp, Artificial Sequence
  Description of Artificial Sequence: Synthetic oligonucleotide
  Mitotic kinesin microtubule-associated protein Eg5 (Kif11) siRNA
tggtataattccacgtacccttc

SEQ ID NO: 671 - DNA, 23 bp, Artificial Sequence
  Description of Artificial Sequence: Synthetic oligonucleotide
  Mitotic kinesin microtubule-associated protein Eg5 (Kif11) siRNA
ggtataattccacgtacccttca

SEQ ID NO: 672 - DNA, 23 bp, Artificial Sequence
  Description of Artificial Sequence: Synthetic oligonucleotide
  Mitotic kinesin microtubule-associated protein Eg5 (Kif11) siRNA
gtataattccacgtacccttcat

SEQ ID NO: 673 - DNA, 23 bp, Artificial Sequence
  Description of Artificial Sequence: Synthetic oligonucleotide
  Mitotic kinesin microtubule-associated protein Eg5 (Kif11) siRNA
tataattccacgtacccttcatc

SEQ ID NO: 674 - DNA, 23 bp, Artificial Sequence
  Description of Artificial Sequence: Synthetic oligonucleotide
  Mitotic kinesin microtubule-associated protein Eg5 (Kif11) siRNA
ataattccacgtacccttcatca

SEQ ID NO: 675 - DNA, 23 bp, Artificial Sequence
  Description of Artificial Sequence: Synthetic oligonucleotide
  Mitotic kinesin microtubule-associated protein Eg5 (Kif11) siRNA
taattccacgtacccttcatcaa

SEQ ID NO: 676 - DNA, 23 bp, Artificial Sequence
  Description of Artificial Sequence: Synthetic oligonucleotide
  Mitotic kinesin microtubule-associated protein Eg5 (Kif11) siRNA
aattccacgtacccttcatcaaa

SEQ ID NO: 677 - DNA, 23 bp, Artificial Sequence
  Description of Artificial Sequence: Synthetic oligonucleotide
  Mitotic kinesin microtubule-associated protein Eg5 (Kif11) siRNA
attccacgtacccttcatcaaat

SEQ ID NO: 678 - DNA, 23 bp, Artificial Sequence
  Description of Artificial Sequence: Synthetic oligonucleotide
  Mitotic kinesin microtubule-associated protein Eg5 (Kif11) siRNA
ttccacgtacccttcatcaaatt

SEQ ID NO: 679 - DNA, 23 bp, Artificial Sequence
  Description of Artificial Sequence: Synthetic oligonucleotide
  Mitotic kinesin microtubule-associated protein Eg5 (Kif11) siRNA
tccacgtacccttcatcaaattt

SEQ ID NO: 680 - DNA, 23 bp, Artificial Sequence
  Description of Artificial Sequence: Synthetic oligonucleotide
  Mitotic kinesin microtubule-associated protein Eg5 (Kif11) siRNA
ccacgtacccttcatcaaatttt

SEQ ID NO: 681 - DNA, 23 bp, Artificial Sequence
  Description of Artificial Sequence: Synthetic oligonucleotide
  Mitotic kinesin microtubule-associated protein Eg5 (Kif11) siRNA
cacgtacccttcatcaaattttt

SEQ ID NO: 682 - DNA, 23 bp, Artificial Sequence
  Description of Artificial Sequence: Synthetic oligonucleotide
  Mitotic kinesin microtubule-associated protein Eg5 (Kif11) siRNA
acgtacccttcatcaaatttttg

SEQ ID NO: 683 - DNA, 23 bp, Artificial Sequence
  Description of Artificial Sequence: Synthetic oligonucleotide
  Mitotic kinesin microtubule-associated protein Eg5 (Kif11) siRNA
cgtacccttcatcaaatttttga

SEQ ID NO: 684 - DNA, 23 bp, Artificial Sequence
  Description of Artificial Sequence: Synthetic oligonucleotide
  Mitotic kinesin microtubule-associated protein Eg5 (Kif11) siRNA
gtacccttcatcaaatttttgag

SEQ ID NO: 685 - DNA, 23 bp, Artificial Sequence
  Description of Artificial Sequence: Synthetic oligonucleotide
  Mitotic kinesin microtubule-associated protein Eg5 (Kif11) siRNA
tacccttcatcaaatttttgaga

SEQ ID NO: 686 - DNA, 23 bp, Artificial Sequence
  Description of Artificial Sequence: Synthetic oligonucleotide
  Mitotic kinesin microtubule-associated protein Eg5 (Kif11) siRNA
acccttcatcaaatttttgagaa

SEQ ID NO: 687 - DNA, 23 bp, Artificial Sequence
  Description of Artificial Sequence: Synthetic oligonucleotide
  Mitotic kinesin microtubule-associated protein Eg5 (Kif11) siRNA
cccttcatcaaatttttgagaaa

SEQ ID NO: 688 - DNA, 23 bp, Artificial Sequence
  Description of Artificial Sequence: Synthetic oligonucleotide
  Mitotic kinesin microtubule-associated protein Eg5 (Kif11) siRNA
ccttcatcaaatttttgagaaac

SEQ ID NO: 689 - DNA, 23 bp, Artificial Sequence
  Description of Artificial Sequence: Synthetic oligonucleotide
  Mitotic kinesin microtubule-associated protein Eg5 (Kif11) siRNA
cttcatcaaatttttgagaaact

SEQ ID NO: 690 - DNA, 23 bp, Artificial Sequence
  Description of Artificial Sequence: Synthetic oligonucleotide
  Mitotic kinesin microtubule-associated protein Eg5 (Kif11) siRNA
ttcatcaaatttttgagaaactt

SEQ ID NO: 691 - DNA, 23 bp, Artificial Sequence
  Description of Artificial Sequence: Synthetic oligonucleotide
  Mitotic kinesin microtubule-associated protein Eg5 (Kif11) siRNA
tcatcaaatttttgagaaactta

SEQ ID NO: 692 - DNA, 23 bp, Artificial Sequence
  Description of Artificial Sequence: Synthetic oligonucleotide
  Mitotic kinesin microtubule-associated protein Eg5 (Kif11) siRNA
catcaaatttttgagaaacttac

SEQ ID NO: 693 - DNA, 23 bp, Artificial Sequence
  Description of Artificial Sequence: Synthetic oligonucleotide
  Mitotic kinesin microtubule-associated protein Eg5 (Kif11) siRNA
atcaaatttttgagaaacttact

SEQ ID NO: 694 - DNA, 23 bp, Artificial Sequence
  Description of Artificial Sequence: Synthetic oligonucleotide
  Mitotic kinesin microtubule-associated protein Eg5 (Kif11) siRNA
tcaaatttttgagaaacttactg

SEQ ID NO: 695 - DNA, 23 bp, Artificial Sequence
  Description of Artificial Sequence: Synthetic oligonucleotide
  Mitotic kinesin microtubule-associated protein Eg5 (Kif11) siRNA
caaatttttgagaaacttactga

SEQ ID NO: 696 - DNA, 23 bp, Artificial Sequence
  Description of Artificial Sequence: Synthetic oligonucleotide
  Mitotic kinesin microtubule-associated protein Eg5 (Kif11) siRNA
aaatttttgagaaacttactgat

SEQ ID NO: 697 - DNA, 23 bp, Artificial Sequence
  Description of Artificial Sequence: Synthetic oligonucleotide
  Mitotic kinesin microtubule-associated protein Eg5 (Kif11) siRNA
aatttttgagaaacttactgata

SEQ ID NO: 698 - DNA, 23 bp, Artificial Sequence
  Description of Artificial Sequence: Synthetic oligonucleotide
  Mitotic kinesin microtubule-associated protein Eg5 (Kif11) siRNA
atttttgagaaacttactgataa

SEQ ID NO: 699 - DNA, 23 bp, Artificial Sequence
  Description of Artificial Sequence: Synthetic oligonucleotide
  Mitotic kinesin microtubule-associated protein Eg5 (Kif11) siRNA
tttttgagaaacttactgataat

SEQ ID NO: 700 - DNA, 23 bp, Artificial Sequence
  Description of Artificial Sequence: Synthetic oligonucleotide
  Mitotic kinesin microtubule-associated protein Eg5 (Kif11) siRNA
ttttgagaaacttactgataatg

SEQ ID NO: 701 - DNA, 23 bp, Artificial Sequence
  Description of Artificial Sequence: Synthetic oligonucleotide
  Mitotic kinesin microtubule-associated protein Eg5 (Kif11) siRNA
tttgagaaacttactgataatgg

SEQ ID NO: 702 - DNA, 23 bp, Artificial Sequence
  Description of Artificial Sequence: Synthetic oligonucleotide
  Mitotic kinesin microtubule-associated protein Eg5 (Kif11) siRNA
ttgagaaacttactgataatggt

SEQ ID NO: 703 - DNA, 23 bp, Artificial Sequence
  Description of Artificial Sequence: Synthetic oligonucleotide
  Mitotic kinesin microtubule-associated protein Eg5 (Kif11) siRNA
tgagaaacttactgataatggta

SEQ ID NO: 704 - DNA, 23 bp, Artificial Sequence
  Description of Artificial Sequence: Synthetic oligonucleotide
  Mitotic kinesin microtubule-associated protein Eg5 (Kif11) siRNA
gagaaacttactgataatggtac

SEQ ID NO: 705 - DNA, 23 bp, Artificial Sequence
  Description of Artificial Sequence: Synthetic oligonucleotide
  Mitotic kinesin microtubule-associated protein Eg5 (Kif11) siRNA
agaaacttactgataatggtact

SEQ ID NO: 706 - DNA, 23 bp, Artificial Sequence
  Description of Artificial Sequence: Synthetic oligonucleotide
  Mitotic kinesin microtubule-associated protein Eg5 (Kif11) siRNA
gaaacttactgataatggtactg

SEQ ID NO: 707 - DNA, 23 bp, Artificial Sequence
  Description of Artificial Sequence: Synthetic oligonucleotide
  Mitotic kinesin microtubule-associated protein Eg5 (Kif11) siRNA
aaacttactgataatggtactga

SEQ ID NO: 708 - DNA, 23 bp, Artificial Sequence
  Description of Artificial Sequence: Synthetic oligonucleotide
  Mitotic kinesin microtubule-associated protein Eg5 (Kif11) siRNA
aacttactgataatggtactgaa

SEQ ID NO: 709 - DNA, 23 bp, Artificial Sequence
  Description of Artificial Sequence: Synthetic oligonucleotide
  Mitotic kinesin microtubule-associated protein Eg5 (Kif11) siRNA
acttactgataatggtactgaat

SEQ ID NO: 710 - DNA, 23 bp, Artificial Sequence
  Description of Artificial Sequence: Synthetic oligonucleotide
  Mitotic kinesin microtubule-associated protein Eg5 (Kif11) siRNA
cttactgataatggtactgaatt

SEQ ID NO: 711 - DNA, 23 bp, Artificial Sequence
  Description of Artificial Sequence: Synthetic oligonucleotide
  Mitotic kinesin microtubule-associated protein Eg5 (Kif11) siRNA
ttactgataatggtactgaattt

SEQ ID NO: 712 - DNA, 23 bp, Artificial Sequence
  Description of Artificial Sequence: Synthetic oligonucleotide
  Mitotic kinesin microtubule-associated protein Eg5 (Kif11) siRNA
tactgataatggtactgaatttt

SEQ ID NO: 713 - DNA, 23 bp, Artificial Sequence
  Description of Artificial Sequence: Synthetic oligonucleotide
  Mitotic kinesin microtubule-associated protein Eg5 (Kif11) siRNA
actgataatggtactgaattttc

SEQ ID NO: 714 - DNA, 23 bp, Artificial Sequence
  Description of Artificial Sequence: Synthetic oligonucleotide
  Mitotic kinesin microtubule-associated protein Eg5 (Kif11) siRNA
ctgataatggtactgaattttca

SEQ ID NO: 715 - DNA, 23 bp, Artificial Sequence
  Description of Artificial Sequence: Synthetic oligonucleotide
  Mitotic kinesin microtubule-associated protein Eg5 (Kif11) siRNA
tgataatggtactgaattttcag

SEQ ID NO: 716 - DNA, 23 bp, Artificial Sequence
  Description of Artificial Sequence: Synthetic oligonucleotide
  Mitotic kinesin microtubule-associated protein Eg5 (Kif11) siRNA
gataatggtactgaattttcagt

SEQ ID NO: 717 - DNA, 23 bp, Artificial Sequence
  Description of Artificial Sequence: Synthetic oligonucleotide
  Mitotic kinesin microtubule-associated protein Eg5 (Kif11) siRNA
ataatggtactgaattttcagtc

SEQ ID NO: 718 - DNA, 23 bp, Artificial Sequence
  Description of Artificial Sequence: Synthetic oligonucleotide
  Mitotic kinesin microtubule-associated protein Eg5 (Kif11) siRNA
taatggtactgaattttcagtca

SEQ ID NO: 719 - DNA, 23 bp, Artificial Sequence
  Description of Artificial Sequence: Synthetic oligonucleotide
  Mitotic kinesin microtubule-associated protein Eg5 (Kif11) siRNA
aatggtactgaattttcagtcaa

SEQ ID NO: 720 - DNA, 23 bp, Artificial Sequence
  Description of Artificial Sequence: Synthetic oligonucleotide
  Mitotic kinesin microtubule-associated protein Eg5 (Kif11) siRNA
atggtactgaattttcagtcaaa

SEQ ID NO: 721 - DNA, 23 bp, Artificial Sequence
  Description of Artificial Sequence: Synthetic oligonucleotide
  Mitotic kinesin microtubule-associated protein Eg5 (Kif11) siRNA
tggtactgaattttcagtcaaag

SEQ ID NO: 722 - DNA, 23 bp, Artificial Sequence
  Description of Artificial Sequence: Synthetic oligonucleotide
  Mitotic kinesin microtubule-associated protein Eg5 (Kif11) siRNA
ggtactgaattttcagtcaaagt

SEQ ID NO: 723 - DNA, 23 bp, Artificial Sequence
  Description of Artificial Sequence: Synthetic oligonucleotide
  Mitotic kinesin microtubule-associated protein Eg5 (Kif11) siRNA
gtactgaattttcagtcaaagtg

SEQ ID NO: 724 - DNA, 23 bp, Artificial Sequence
  Description of Artificial Sequence: Synthetic oligonucleotide
  Mitotic kinesin microtubule-associated protein Eg5 (Kif11) siRNA
tactgaattttcagtcaaagtgt

SEQ ID NO: 725 - DNA, 23 bp, Artificial Sequence
  Description of Artificial Sequence: Synthetic oligonucleotide
  Mitotic kinesin microtubule-associated protein Eg5 (Kif11) siRNA
actgaattttcagtcaaagtgtc

SEQ ID NO: 726 - DNA, 23 bp, Artificial Sequence
  Description of Artificial Sequence: Synthetic oligonucleotide
  Mitotic kinesin microtubule-associated protein Eg5 (Kif11) siRNA
ctgaattttcagtcaaagtgtct

SEQ ID NO: 727 - DNA, 23 bp, Artificial Sequence
  Description of Artificial Sequence: Synthetic oligonucleotide
  Mitotic kinesin microtubule-associated protein Eg5 (Kif11) siRNA
tgaattttcagtcaaagtgtctc

SEQ ID NO: 728 - DNA, 23 bp, Artificial Sequence
  Description of Artificial Sequence: Synthetic oligonucleotide
  Mitotic kinesin microtubule-associated protein Eg5 (Kif11) siRNA
gaattttcagtcaaagtgtctct

SEQ ID NO: 729 - DNA, 23 bp, Artificial Sequence
  Description of Artificial Sequence: Synthetic oligonucleotide
  Mitotic kinesin microtubule-associated protein Eg5 (Kif11) siRNA
aattttcagtcaaagtgtctctg

SEQ ID NO: 730 - DNA, 23 bp, Artificial Sequence
  Description of Artificial Sequence: Synthetic oligonucleotide
  Mitotic kinesin microtubule-associated protein Eg5 (Kif11) siRNA
attttcagtcaaagtgtctctgt

SEQ ID NO: 731 - DNA, 23 bp, Artificial Sequence
  Description of Artificial Sequence: Synthetic oligonucleotide
  Mitotic kinesin microtubule-associated protein Eg5 (Kif11) siRNA
ttttcagtcaaagtgtctctgtt

SEQ ID NO: 732 - DNA, 23 bp, Artificial Sequence
  Description of Artificial Sequence: Synthetic oligonucleotide
  Mitotic kinesin microtubule-associated protein Eg5 (Kif11) siRNA
tttcagtcaaagtgtctctgttg

SEQ ID NO: 733 - DNA, 23 bp, Artificial Sequence
  Description of Artificial Sequence: Synthetic oligonucleotide
  Mitotic kinesin microtubule-associated protein Eg5 (Kif11) siRNA
ttcagtcaaagtgtctctgttgg

SEQ ID NO: 734 - DNA, 23 bp, Artificial Sequence
  Description of Artificial Sequence: Synthetic oligonucleotide
  Mitotic kinesin microtubule-associated protein Eg5 (Kif11) siRNA
tcagtcaaagtgtctctgttgga

SEQ ID NO: 735 - DNA, 23 bp, Artificial Sequence
  Description of Artificial Sequence: Synthetic oligonucleotide
  Mitotic kinesin microtubule-associated protein Eg5 (Kif11) siRNA
cagtcaaagtgtctctgttggag

SEQ ID NO: 736 - DNA, 23 bp, Artificial Sequence
  Description of Artificial Sequence: Synthetic oligonucleotide
  Mitotic kinesin microtubule-associated protein Eg5 (Kif11) siRNA
agtcaaagtgtctctgttggaga

SEQ ID NO: 737 - DNA, 23 bp, Artificial Sequence
  Description of Artificial Sequence: Synthetic oligonucleotide
  Mitotic kinesin microtubule-associated protein Eg5 (Kif11) siRNA
gtcaaagtgtctctgttggagat

SEQ ID NO: 738 - DNA, 23 bp, Artificial Sequence
  Description of Artificial Sequence: Synthetic oligonucleotide
  Mitotic kinesin microtubule-associated protein Eg5 (Kif11) siRNA
tcaaagtgtctctgttggagatc

SEQ ID NO: 739 - DNA, 23 bp, Artificial Sequence
  Description of Artificial Sequence: Synthetic oligonucleotide
  Mitotic kinesin microtubule-associated protein Eg5 (Kif11) siRNA
caaagtgtctctgttggagatct

SEQ ID NO: 740 - DNA, 23 bp, Artificial Sequence
  Description of Artificial Sequence: Synthetic oligonucleotide
  Mitotic kinesin microtubule-associated protein Eg5 (Kif11) siRNA
aaagtgtctctgttggagatcta

SEQ ID NO: 741 - DNA, 23 bp, Artificial Sequence
  Description of Artificial Sequence: Synthetic oligonucleotide
  Mitotic kinesin microtubule-associated protein Eg5 (Kif11) siRNA
aagtgtctctgttggagatctat

SEQ ID NO: 742 - DNA, 23 bp, Artificial Sequence
  Description of Artificial Sequence: Synthetic oligonucleotide
  Mitotic kinesin microtubule-associated protein Eg5 (Kif11) siRNA
agtgtctctgttggagatctata

SEQ ID NO: 743 - DNA, 23 bp, Artificial Sequence
  Description of Artificial Sequence: Synthetic oligonucleotide
  Mitotic kinesin microtubule-associated protein Eg5 (Kif11) siRNA
gtgtctctgttggagatctataa

SEQ ID NO: 744 - DNA, 23 bp, Artificial Sequence
  Description of Artificial Sequence: Synthetic oligonucleotide
  Mitotic kinesin microtubule-associated protein Eg5 (Kif11) siRNA
tgtctctgttggagatctataat

SEQ ID NO: 745 - DNA, 23 bp, Artificial Sequence
  Description of Artificial Sequence: Synthetic oligonucleotide
  Mitotic kinesin microtubule-associated protein Eg5 (Kif11) siRNA
gtctctgttggagatctataatg

SEQ ID NO: 746 - DNA, 23 bp, Artificial Sequence
  Description of Artificial Sequence: Synthetic oligonucleotide
  Mitotic kinesin microtubule-associated protein Eg5 (Kif11) siRNA
tctctgttggagatctataatga

SEQ ID NO: 747 - DNA, 23 bp, Artificial Sequence
  Description of Artificial Sequence: Synthetic oligonucleotide
  Mitotic kinesin microtubule-associated protein Eg5 (Kif11) siRNA
ctctgttggagatctataatgaa

SEQ ID NO: 748 - DNA, 23 bp, Artificial Sequence
  Description of Artificial Sequence: Synthetic oligonucleotide
  Mitotic kinesin microtubule-associated protein Eg5 (Kif11) siRNA
tctgttggagatctataatgaag

SEQ ID NO: 749 - DNA, 23 bp, Artificial Sequence
  Description of Artificial Sequence: Synthetic oligonucleotide
  Mitotic kinesin microtubule-associated protein Eg5 (Kif11) siRNA
ctgttggagatctataatgaaga

SEQ ID NO: 750 - DNA, 23 bp, Artificial Sequence
  Description of Artificial Sequence: Synthetic oligonucleotide
  Mitotic kinesin microtubule-associated protein Eg5 (Kif11) siRNA
tgttggagatctataatgaagag

SEQ ID NO: 751 - DNA, 23 bp, Artificial Sequence
  Description of Artificial Sequence: Synthetic oligonucleotide
  Mitotic kinesin microtubule-associated protein Eg5 (Kif11) siRNA
gttggagatctataatgaagagc

SEQ ID NO: 752 - DNA, 23 bp, Artificial Sequence
  Description of Artificial Sequence: Synthetic oligonucleotide
  Mitotic kinesin microtubule-associated protein Eg5 (Kif11) siRNA
ttggagatctataatgaagagct

SEQ ID NO: 753 - DNA, 23 bp, Artificial Sequence
  Description of Artificial Sequence: Synthetic oligonucleotide
  Mitotic kinesin microtubule-associated protein Eg5 (Kif11) siRNA
tggagatctataatgaagagctt

SEQ ID NO: 754 - DNA, 23 bp, Artificial Sequence
  Description of Artificial Sequence: Synthetic oligonucleotide
  Mitotic kinesin microtubule-associated protein Eg5 (Kif11) siRNA
ggagatctataatgaagagcttt

SEQ ID NO: 755 - DNA, 23 bp, Artificial Sequence
  Description of Artificial Sequence: Synthetic oligonucleotide
  Mitotic kinesin microtubule-associated protein Eg5 (Kif11) siRNA
gagatctataatgaagagctttt

SEQ ID NO: 756 - DNA, 23 bp, Artificial Sequence
  Description of Artificial Sequence: Synthetic oligonucleotide
  Mitotic kinesin microtubule-associated protein Eg5 (Kif11) siRNA
agatctataatgaagagcttttt

SEQ ID NO: 757 - DNA, 23 bp, Artificial Sequence
  Description of Artificial Sequence: Synthetic oligonucleotide
  Mitotic kinesin microtubule-associated protein Eg5 (Kif11) siRNA
gatctataatgaagagctttttg

SEQ ID NO: 758 - DNA, 23 bp, Artificial Sequence
  Description of Artificial Sequence: Synthetic oligonucleotide
  Mitotic kinesin microtubule-associated protein Eg5 (Kif11) siRNA
atctataatgaagagctttttga

SEQ ID NO: 759 - DNA, 23 bp, Artificial Sequence
  Description of Artificial Sequence: Synthetic oligonucleotide
  Mitotic kinesin microtubule-associated protein Eg5 (Kif11) siRNA
tctataatgaagagctttttgat

SEQ ID NO: 760 - DNA, 23 bp, Artificial Sequence
  Description of Artificial Sequence: Synthetic oligonucleotide
  Mitotic kinesin microtubule-associated protein Eg5 (Kif11) siRNA
ctataatgaagagctttttgatc

SEQ ID NO: 761 - DNA, 23 bp, Artificial Sequence
  Description of Artificial Sequence: Synthetic oligonucleotide
  Mitotic kinesin microtubule-associated protein Eg5 (Kif11) siRNA
tataatgaagagctttttgatct

SEQ ID NO: 762 - DNA, 23 bp, Artificial Sequence
  Description of Artificial Sequence: Synthetic oligonucleotide
  Mitotic kinesin microtubule-associated protein Eg5 (Kif11) siRNA
ataatgaagagctttttgatctt

SEQ ID NO: 763 - DNA, 23 bp, Artificial Sequence
  Description of Artificial Sequence: Synthetic oligonucleotide
  Mitotic kinesin microtubule-associated protein Eg5 (Kif11) siRNA
taatgaagagctttttgatcttc

SEQ ID NO: 764 - DNA, 23 bp, Artificial Sequence
  Description of Artificial Sequence: Synthetic oligonucleotide
  Mitotic kinesin microtubule-associated protein Eg5 (Kif11) siRNA
aatgaagagctttttgatcttct

SEQ ID NO: 765 - DNA, 23 bp, Artificial Sequence
  Description of Artificial Sequence: Synthetic oligonucleotide
  Mitotic kinesin microtubule-associated protein Eg5 (Kif11) siRNA
atgaagagctttttgatcttctt

SEQ ID NO: 766 - DNA, 23 bp, Artificial Sequence
  Description of Artificial Sequence: Synthetic oligonucleotide
  Mitotic kinesin microtubule-associated protein Eg5 (Kif11) siRNA
tgaagagctttttgatcttctta

SEQ ID NO: 767 - DNA, 23 bp, Artificial Sequence
  Description of Artificial Sequence: Synthetic oligonucleotide
  Mitotic kinesin microtubule-associated protein Eg5 (Kif11) siRNA
gaagagctttttgatcttcttaa

SEQ ID NO: 768 - DNA, 23 bp, Artificial Sequence
  Description of Artificial Sequence: Synthetic oligonucleotide
  Mitotic kinesin microtubule-associated protein Eg5 (Kif11) siRNA
aagagctttttgatcttcttaat

SEQ ID NO: 769 - DNA, 23 bp, Artificial Sequence
  Description of Artificial Sequence: Synthetic oligonucleotide
  Mitotic kinesin microtubule-associated protein Eg5 (Kif11) siRNA
agagctttttgatcttcttaatc

SEQ ID NO: 770 - DNA, 23 bp, Artificial Sequence
  Description of Artificial Sequence: Synthetic oligonucleotide
  Mitotic kinesin microtubule-associated protein Eg5 (Kif11) siRNA
gagctttttgatcttcttaatcc

SEQ ID NO: 771 - DNA, 23 bp, Artificial Sequence
  Description of Artificial Sequence: Synthetic oligonucleotide
  Mitotic kinesin microtubule-associated protein Eg5 (Kif11) siRNA
agctttttgatcttcttaatcca

SEQ ID NO: 772 - DNA, 23 bp, Artificial Sequence
  Description of Artificial Sequence: Synthetic oligonucleotide
  Mitotic kinesin microtubule-associated protein Eg5 (Kif11) siRNA
gctttttgatcttcttaatccat

SEQ ID NO: 773 - DNA, 23 bp, Artificial Sequence
  Description of Artificial Sequence: Synthetic oligonucleotide
  Mitotic kinesin microtubule-associated protein Eg5 (Kif11) siRNA
ctttttgatcttcttaatccatc

SEQ ID NO: 774 - DNA, 23 bp, Artificial Sequence
  Description of Artificial Sequence: Synthetic oligonucleotide
  Mitotic kinesin microtubule-associated protein Eg5 (Kif11) siRNA
tttttgatcttcttaatccatca

SEQ ID NO: 775 - DNA, 23 bp, Artificial Sequence
  Description of Artificial Sequence: Synthetic oligonucleotide
  Mitotic kinesin microtubule-associated protein Eg5 (Kif11) siRNA
ttttgatcttcttaatccatcat

SEQ ID NO: 776 - DNA, 23 bp, Artificial Sequence
  Description of Artificial Sequence: Synthetic oligonucleotide
  Mitotic kinesin microtubule-associated protein Eg5 (Kif11) siRNA
tttgatcttcttaatccatcatc

SEQ ID NO: 777 - DNA, 23 bp, Artificial Sequence
  Description of Artificial Sequence: Synthetic oligonucleotide
  Mitotic kinesin microtubule-associated protein Eg5 (Kif11) siRNA
ttgatcttcttaatccatcatct

SEQ ID NO: 778 - DNA, 23 bp, Artificial Sequence
  Description of Artificial Sequence: Synthetic oligonucleotide
  Mitotic kinesin microtubule-associated protein Eg5 (Kif11) siRNA
tgatcttcttaatccatcatctg

SEQ ID NO: 779 - DNA, 23 bp, Artificial Sequence
  Description of Artificial Sequence: Synthetic oligonucleotide
  Mitotic kinesin microtubule-associated protein Eg5 (Kif11) siRNA
gatcttcttaatccatcatctga

SEQ ID NO: 780 - DNA, 23 bp, Artificial Sequence
  Description of Artificial Sequence: Synthetic oligonucleotide
  Mitotic kinesin microtubule-associated protein Eg5 (Kif11) siRNA
atcttcttaatccatcatctgat

SEQ ID NO: 781 - DNA, 23 bp, Artificial Sequence
  Description of Artificial Sequence: Synthetic oligonucleotide
  Mitotic kinesin microtubule-associated protein Eg5 (Kif11) siRNA
tcttcttaatccatcatctgatg

SEQ ID NO: 782 - DNA, 23 bp, Artificial Sequence
  Description of Artificial Sequence: Synthetic oligonucleotide
  Mitotic kinesin microtubule-associated protein Eg5 (Kif11) siRNA
cttcttaatccatcatctgatgt

SEQ ID NO: 783 - DNA, 23 bp, Artificial Sequence
  Description of Artificial Sequence: Synthetic oligonucleotide
  Mitotic kinesin microtubule-associated protein Eg5 (Kif11) siRNA
ttcttaatccatcatctgatgtt

SEQ ID NO: 784 - DNA, 23 bp, Artificial Sequence
  Description of Artificial Sequence: Synthetic oligonucleotide
  Mitotic kinesin microtubule-associated protein Eg5 (Kif11) siRNA
tcttaatccatcatctgatgttt

SEQ ID NO: 785 - DNA, 23 bp, Artificial Sequence
  Description of Artificial Sequence: Synthetic oligonucleotide
  Mitotic kinesin microtubule-associated protein Eg5 (Kif11) siRNA
cttaatccatcatctgatgtttc

SEQ ID NO: 786 - DNA, 23 bp, Artificial Sequence
  Description of Artificial Sequence: Synthetic oligonucleotide
  Mitotic kinesin microtubule-associated protein Eg5 (Kif11) siRNA
ttaatccatcatctgatgtttct

SEQ ID NO: 787 - DNA, 23 bp, Artificial Sequence
  Description of Artificial Sequence: Synthetic oligonucleotide
  Mitotic kinesin microtubule-associated protein Eg5 (Kif11) siRNA
taatccatcatctgatgtttctg

SEQ ID NO: 788 - DNA, 23 bp, Artificial Sequence
  Description of Artificial Sequence: Synthetic oligonucleotide
  Mitotic kinesin microtubule-associated protein Eg5 (Kif11) siRNA
aatccatcatctgatgtttctga

SEQ ID NO: 789 - DNA, 23 bp, Artificial Sequence
  Description of Artificial Sequence: Synthetic oligonucleotide
  Mitotic kinesin microtubule-associated protein Eg5 (Kif11) siRNA
atccatcatctgatgtttctgag

SEQ ID NO: 790 - DNA, 23 bp, Artificial Sequence
  Description of Artificial Sequence: Synthetic oligonucleotide
  Mitotic kinesin microtubule-associated protein Eg5 (Kif11) siRNA
tccatcatctgatgtttctgaga

SEQ ID NO: 791 - DNA, 23 bp, Artificial Sequence
  Description of Artificial Sequence: Synthetic oligonucleotide
  Mitotic kinesin microtubule-associated protein Eg5 (Kif11) siRNA
ccatcatctgatgtttctgagag

SEQ ID NO: 792 - DNA, 23 bp, Artificial Sequence
  Description of Artificial Sequence: Synthetic oligonucleotide
  Mitotic kinesin microtubule-associated protein Eg5 (Kif11) siRNA
catcatctgatgtttctgagaga

SEQ ID NO: 793 - DNA, 23 bp, Artificial Sequence
  Description of Artificial Sequence: Synthetic oligonucleotide
  Mitotic kinesin microtubule-associated protein Eg5 (Kif11) siRNA
atcatctgatgtttctgagagac

SEQ ID NO: 794 - DNA, 23 bp, Artificial Sequence
  Description of Artificial Sequence: Synthetic oligonucleotide
  Mitotic kinesin microtubule-associated protein Eg5 (Kif11) siRNA
tcatctgatgtttctgagagact

SEQ ID NO: 795 - DNA, 23 bp, Artificial Sequence
  Description of Artificial Sequence: Synthetic oligonucleotide
  Mitotic kinesin microtubule-associated protein Eg5 (Kif11) siRNA
catctgatgtttctgagagacta

SEQ ID NO: 796 - DNA, 23 bp, Artificial Sequence
  Description of Artificial Sequence: Synthetic oligonucleotide
  Mitotic kinesin microtubule-associated protein Eg5 (Kif11) siRNA
atctgatgtttctgagagactac

SEQ ID NO: 797 - DNA, 23 bp, Artificial Sequence
  Description of Artificial Sequence: Synthetic oligonucleotide
  Mitotic kinesin microtubule-associated protein Eg5 (Kif11) siRNA
tctgatgtttctgagagactaca

SEQ ID NO: 798 - DNA, 23 bp, Artificial Sequence
  Description of Artificial Sequence: Synthetic oligonucleotide
  Mitotic kinesin microtubule-associated protein Eg5 (Kif11) siRNA
ctgatgtttctgagagactacag

SEQ ID NO: 799 - DNA, 23 bp, Artificial Sequence
  Description of Artificial Sequence: Synthetic oligonucleotide
  Mitotic kinesin microtubule-associated protein Eg5 (Kif11) siRNA
tgatgtttctgagagactacaga

SEQ ID NO: 800 - DNA, 23 bp, Artificial Sequence
  Description of Artificial Sequence: Synthetic oligonucleotide
  Mitotic kinesin microtubule-associated protein Eg5 (Kif11) siRNA
gatgtttctgagagactacagat

SEQ ID NO: 801 - DNA, 23 bp, Artificial Sequence
  Description of Artificial Sequence: Synthetic oligonucleotide
  Mitotic kinesin microtubule-associated protein Eg5 (Kif11) siRNA
atgtttctgagagactacagatg

SEQ ID NO: 802 - DNA, 23 bp, Artificial Sequence
  Description of Artificial Sequence: Synthetic oligonucleotide
  Mitotic kinesin microtubule-associated protein Eg5 (Kif11) siRNA
tgtttctgagagactacagatgt

SEQ ID NO: 803 - DNA, 23 bp, Artificial Sequence
  Description of Artificial Sequence: Synthetic oligonucleotide
  Mitotic kinesin microtubule-associated protein Eg5 (Kif11) siRNA
gtttctgagagactacagatgtt

SEQ ID NO: 804 - DNA, 23 bp, Artificial Sequence
  Description of Artificial Sequence: Synthetic oligonucleotide
  Mitotic kinesin microtubule-associated protein Eg5 (Kif11) siRNA
tttctgagagactacagatgttt

SEQ ID NO: 805 - DNA, 23 bp, Artificial Sequence
  Description of Artificial Sequence: Synthetic oligonucleotide
  Mitotic kinesin microtubule-associated protein Eg5 (Kif11) siRNA
ttctgagagactacagatgtttg

SEQ ID NO: 806 - DNA, 23 bp, Artificial Sequence
  Description of Artificial Sequence: Synthetic oligonucleotide
  Mitotic kinesin microtubule-associated protein Eg5 (Kif11) siRNA
tctgagagactacagatgtttga

SEQ ID NO: 807 - DNA, 23 bp, Artificial Sequence
  Description of Artificial Sequence: Synthetic oligonucleotide
  Mitotic kinesin microtubule-associated protein Eg5 (Kif11) siRNA
ctgagagactacagatgtttgat

SEQ ID NO: 808 - DNA, 23 bp, Artificial Sequence
  Description of Artificial Sequence: Synthetic oligonucleotide
  Mitotic kinesin microtubule-associated protein Eg5 (Kif11) siRNA
tgagagactacagatgtttgatg

SEQ ID NO: 809 - DNA, 23 bp, Artificial Sequence
  Description of Artificial Sequence: Synthetic oligonucleotide
  Mitotic kinesin microtubule-associated protein Eg5 (Kif11) siRNA
gagagactacagatgtttgatga

SEQ ID NO: 810 - DNA, 23 bp, Artificial Sequence
  Description of Artificial Sequence: Synthetic oligonucleotide
  Mitotic kinesin microtubule-associated protein Eg5 (Kif11) siRNA
agagactacagatgtttgatgat

SEQ ID NO: 811 - DNA, 23 bp, Artificial Sequence
  Description of Artificial Sequence: Synthetic oligonucleotide
  Mitotic kinesin microtubule-associated protein Eg5 (Kif11) siRNA
gagactacagatgtttgatgatc

SEQ ID NO: 812 - DNA, 23 bp, Artificial Sequence
  Description of Artificial Sequence: Synthetic oligonucleotide
  Mitotic kinesin microtubule-associated protein Eg5 (Kif11) siRNA
agactacagatgtttgatgatcc

SEQ ID NO: 813 - DNA, 23 bp, Artificial Sequence
  Description of Artificial Sequence: Synthetic oligonucleotide
  Mitotic kinesin microtubule-associated protein Eg5 (Kif11) siRNA
gactacagatgtttgatgatccc

SEQ ID NO: 814 - DNA, 23 bp, Artificial Sequence
  Description of Artificial Sequence: Synthetic oligonucleotide
  Mitotic kinesin microtubule-associated protein Eg5 (Kif11) siRNA
actacagatgtttgatgatcccc

SEQ ID NO: 815 - DNA, 23 bp, Artificial Sequence
  Description of Artificial Sequence: Synthetic oligonucleotide
  Mitotic kinesin microtubule-associated protein Eg5 (Kif11) siRNA
ctacagatgtttgatgatccccg

SEQ ID NO: 816 - DNA, 23 bp, Artificial Sequence
  Description of Artificial Sequence: Synthetic oligonucleotide
  Mitotic kinesin microtubule-associated protein Eg5 (Kif11) siRNA
tacagatgtttgatgatccccgt

SEQ ID NO: 817 - DNA, 23 bp, Artificial Sequence
  Description of Artificial Sequence: Synthetic oligonucleotide
  Mitotic kinesin microtubule-associated protein Eg5 (Kif11) siRNA
acagatgtttgatgatccccgta

SEQ ID NO: 818 - DNA, 23 bp, Artificial Sequence
  Description of Artificial Sequence: Synthetic oligonucleotide
  Mitotic kinesin microtubule-associated protein Eg5 (Kif11) siRNA
cagatgtttgatgatccccgtaa

SEQ ID NO: 819 - DNA, 23 bp, Artificial Sequence
  Description of Artificial Sequence: Synthetic oligonucleotide
  Mitotic kinesin microtubule-associated protein Eg5 (Kif11) siRNA
agatgtttgatgatccccgtaac

SEQ ID NO: 820 - DNA, 23 bp, Artificial Sequence
  Description of Artificial Sequence: Synthetic oligonucleotide
  Mitotic kinesin microtubule-associated protein Eg5 (Kif11) siRNA
gatgtttgatgatccccgtaaca

SEQ ID NO: 821 - DNA, 23 bp, Artificial Sequence
  Description of Artificial Sequence: Synthetic oligonucleotide
  Mitotic kinesin microtubule-associated protein Eg5 (Kif11) siRNA
atgtttgatgatccccgtaacaa

SEQ ID NO: 822 - DNA, 23 bp, Artificial Sequence
  Description of Artificial Sequence: Synthetic oligonucleotide
  Mitotic kinesin microtubule-associated protein Eg5 (Kif11) siRNA
tgtttgatgatccccgtaacaag

SEQ ID NO: 823 - DNA, 23 bp, Artificial Sequence
  Description of Artificial Sequence: Synthetic oligonucleotide
  Mitotic kinesin microtubule-associated protein Eg5 (Kif11) siRNA
gtttgatgatccccgtaacaaga

SEQ ID NO: 824 - DNA, 23 bp, Artificial Sequence
  Description of Artificial Sequence: Synthetic oligonucleotide
  Mitotic kinesin microtubule-associated protein Eg5 (Kif11) siRNA
tttgatgatccccgtaacaagag

SEQ ID NO: 825 - DNA, 23 bp, Artificial Sequence
  Description of Artificial Sequence: Synthetic oligonucleotide
  Mitotic kinesin microtubule-associated protein Eg5 (Kif11) siRNA
ttgatgatccccgtaacaagaga

SEQ ID NO: 826 - DNA, 23 bp, Artificial Sequence
  Description of Artificial Sequence: Synthetic oligonucleotide
  Mitotic kinesin microtubule-associated protein Eg5 (Kif11) siRNA
tgatgatccccgtaacaagagag

SEQ ID NO: 827 - DNA, 23 bp, Artificial Sequence
  Description of Artificial Sequence: Synthetic oligonucleotide
  Mitotic kinesin microtubule-associated protein Eg5 (Kif11) siRNA
gatgatccccgtaacaagagagg

SEQ ID NO: 828 - DNA, 23 bp, Artificial Sequence
  Description of Artificial Sequence: Synthetic oligonucleotide
  Mitotic kinesin microtubule-associated protein Eg5 (Kif11) siRNA
atgatccccgtaacaagagagga

SEQ ID NO: 829 - DNA, 23 bp, Artificial Sequence
  Description of Artificial Sequence: Synthetic oligonucleotide
  Mitotic kinesin microtubule-associated protein Eg5 (Kif11) siRNA
tgatccccgtaacaagagaggag

SEQ ID NO: 830 - DNA, 23 bp, Artificial Sequence
  Description of Artificial Sequence: Synthetic oligonucleotide
  Mitotic kinesin microtubule-associated protein Eg5 (Kif11) siRNA
gatccccgtaacaagagaggagt

SEQ ID NO: 831 - DNA, 23 bp, Artificial Sequence
  Description of Artificial Sequence: Synthetic oligonucleotide
  Mitotic kinesin microtubule-associated protein Eg5 (Kif11) siRNA
atccccgtaacaagagaggagtg

SEQ ID NO: 832 - DNA, 23 bp, Artificial Sequence
  Description of Artificial Sequence: Synthetic oligonucleotide
  Mitotic kinesin microtubule-associated protein Eg5 (Kif11) siRNA
tccccgtaacaagagaggagtga

SEQ ID NO: 833 - DNA, 23 bp, Artificial Sequence
  Description of Artificial Sequence: Synthetic oligonucleotide
  Mitotic kinesin microtubule-associated protein Eg5 (Kif11) siRNA
ccccgtaacaagagaggagtgat

SEQ ID NO: 834 - DNA, 23 bp, Artificial Sequence
  Description of Artificial Sequence: Synthetic oligonucleotide
  Mitotic kinesin microtubule-associated protein Eg5 (Kif11) siRNA
cccgtaacaagagaggagtgata

SEQ ID NO: 835 - DNA, 23 bp, Artificial Sequence
  Description of Artificial Sequence: Synthetic oligonucleotide
  Mitotic kinesin microtubule-associated protein Eg5 (Kif11) siRNA
ccgtaacaagagaggagtgataa

SEQ ID NO: 836 - DNA, 23 bp, Artificial Sequence
  Description of Artificial Sequence: Synthetic oligonucleotide
  Mitotic kinesin microtubule-associated protein Eg5 (Kif11) siRNA
cgtaacaagagaggagtgataat

SEQ ID NO: 837 - DNA, 23 bp, Artificial Sequence
  Description of Artificial Sequence: Synthetic oligonucleotide
  Mitotic kinesin microtubule-associated protein Eg5 (Kif11) siRNA
gtaacaagagaggagtgataatt

SEQ ID NO: 838 - DNA, 23 bp, Artificial Sequence
  Description of Artificial Sequence: Synthetic oligonucleotide
  Mitotic kinesin microtubule-associated protein Eg5 (Kif11) siRNA
taacaagagaggagtgataatta

SEQ ID NO: 839 - DNA, 23 bp, Artificial Sequence
  Description of Artificial Sequence: Synthetic oligonucleotide
  Mitotic kinesin microtubule-associated protein Eg5 (Kif11) siRNA
aacaagagaggagtgataattaa

SEQ ID NO: 840 - DNA, 23 bp, Artificial Sequence
  Description of Artificial Sequence: Synthetic oligonucleotide
  Mitotic kinesin microtubule-associated protein Eg5 (Kif11) siRNA
acaagagaggagtgataattaaa

SEQ ID NO: 841 - DNA, 23 bp, Artificial Sequence
  Description of Artificial Sequence: Synthetic oligonucleotide
  Mitotic kinesin microtubule-associated protein Eg5 (Kif11) siRNA
caagagaggagtgataattaaag

SEQ ID NO: 842 - DNA, 23 bp, Artificial Sequence
  Description of Artificial Sequence: Synthetic oligonucleotide
  Mitotic kinesin microtubule-associated protein Eg5 (Kif11) siRNA
aagagaggagtgataattaaagg

SEQ ID NO: 843 - DNA, 23 bp, Artificial Sequence
  Description of Artificial Sequence: Synthetic oligonucleotide
  Mitotic kinesin microtubule-associated protein Eg5 (Kif11) siRNA
agagaggagtgataattaaaggt

SEQ ID NO: 844 - DNA, 23 bp, Artificial Sequence
  Description of Artificial Sequence: Synthetic oligonucleotide
  Mitotic kinesin microtubule-associated protein Eg5 (Kif11) siRNA
gagaggagtgataattaaaggtt

SEQ ID NO: 845 - DNA, 23 bp, Artificial Sequence
  Description of Artificial Sequence: Synthetic oligonucleotide
  Mitotic kinesin microtubule-associated protein Eg5 (Kif11) siRNA
agaggagtgataattaaaggttt

SEQ ID NO: 846 - DNA, 23 bp, Artificial Sequence
  Description of Artificial Sequence: Synthetic oligonucleotide
  Mitotic kinesin microtubule-associated protein Eg5 (Kif11) siRNA
gaggagtgataattaaaggttta

SEQ ID NO: 847 - DNA, 23 bp, Artificial Sequence
  Description of Artificial Sequence: Synthetic oligonucleotide
  Mitotic kinesin microtubule-associated protein Eg5 (Kif11) siRNA
aggagtgataattaaaggtttag

SEQ ID NO: 848 - DNA, 23 bp, Artificial Sequence
  Description of Artificial Sequence: Synthetic oligonucleotide
  Mitotic kinesin microtubule-associated protein Eg5 (Kif11) siRNA
ggagtgataattaaaggtttaga

SEQ ID NO: 849 - DNA, 23 bp, Artificial Sequence
  Description of Artificial Sequence: Synthetic oligonucleotide
  Mitotic kinesin microtubule-associated protein Eg5 (Kif11) siRNA
gagtgataattaaaggtttagaa

SEQ ID NO: 850 - DNA, 23 bp, Artificial Sequence
  Description of Artificial Sequence: Synthetic oligonucleotide
  Mitotic kinesin microtubule-associated protein Eg5 (Kif11) siRNA
agtgataattaaaggtttagaag

SEQ ID NO: 851 - DNA, 23 bp, Artificial Sequence
  Description of Artificial Sequence: Synthetic oligonucleotide
  Mitotic kinesin microtubule-associated protein Eg5 (Kif11) siRNA
gtgataattaaaggtttagaaga

SEQ ID NO: 852 - DNA, 23 bp, Artificial Sequence
  Description of Artificial Sequence: Synthetic oligonucleotide
  Mitotic kinesin microtubule-associated protein Eg5 (Kif11) siRNA
tgataattaaaggtttagaagaa

SEQ ID NO: 853 - DNA, 23 bp, Artificial Sequence
  Description of Artificial Sequence: Synthetic oligonucleotide
  Mitotic kinesin microtubule-associated protein Eg5 (Kif11) siRNA
gataattaaaggtttagaagaaa

SEQ ID NO: 854 - DNA, 23 bp, Artificial Sequence
  Description of Artificial Sequence: Synthetic oligonucleotide
  Mitotic kinesin microtubule-associated protein Eg5 (Kif11) siRNA
ataattaaaggtttagaagaaat

SEQ ID NO: 855 - DNA, 23 bp, Artificial Sequence
  Description of Artificial Sequence: Synthetic oligonucleotide
  Mitotic kinesin microtubule-associated protein Eg5 (Kif11) siRNA
taattaaaggtttagaagaaatt

SEQ ID NO: 856 - DNA, 23 bp, Artificial Sequence
  Description of Artificial Sequence: Synthetic oligonucleotide
  Mitotic kinesin microtubule-associated protein Eg5 (Kif11) siRNA
aattaaaggtttagaagaaatta

SEQ ID NO: 857 - DNA, 23 bp, Artificial Sequence
  Description of Artificial Sequence: Synthetic oligonucleotide
  Mitotic kinesin microtubule-associated protein Eg5 (Kif11) siRNA
attaaaggtttagaagaaattac

SEQ ID NO: 858 - DNA, 23 bp, Artificial Sequence
  Description of Artificial Sequence: Synthetic oligonucleotide
  Mitotic kinesin microtubule-associated protein Eg5 (Kif11) siRNA
ttaaaggtttagaagaaattaca

SEQ ID NO: 859 - DNA, 23 bp, Artificial Sequence
  Description of Artificial Sequence: Synthetic oligonucleotide
  Mitotic kinesin microtubule-associated protein Eg5 (Kif11) siRNA
taaaggtttagaagaaattacag

SEQ ID NO: 860 - DNA, 23 bp, Artificial Sequence
  Description of Artificial Sequence: Synthetic oligonucleotide
  Mitotic kinesin microtubule-associated protein Eg5 (Kif11) siRNA
aaaggtttagaagaaattacagt

SEQ ID NO: 861 - DNA, 23 bp, Artificial Sequence
  Description of Artificial Sequence: Synthetic oligonucleotide
  Mitotic kinesin microtubule-associated protein Eg5 (Kif11) siRNA
aaggtttagaagaaattacagta

SEQ ID NO: 862 - DNA, 23 bp, Artificial Sequence
  Description of Artificial Sequence: Synthetic oligonucleotide
  Mitotic kinesin microtubule-associated protein Eg5 (Kif11) siRNA
aggtttagaagaaattacagtac

SEQ ID NO: 863 - DNA, 23 bp, Artificial Sequence
  Description of Artificial Sequence: Synthetic oligonucleotide
  Mitotic kinesin microtubule-associated protein Eg5 (Kif11) siRNA
ggtttagaagaaattacagtaca

SEQ ID NO: 864 - DNA, 23 bp, Artificial Sequence
  Description of Artificial Sequence: Synthetic oligonucleotide
  Mitotic kinesin microtubule-associated protein Eg5 (Kif11) siRNA
gtttagaagaaattacagtacac

SEQ ID NO: 865 - DNA, 23 bp, Artificial Sequence
  Description of Artificial Sequence: Synthetic oligonucleotide
  Mitotic kinesin microtubule-associated protein Eg5 (Kif11) siRNA
tttagaagaaattacagtacaca

SEQ ID NO: 866 - DNA, 23 bp, Artificial Sequence
  Description of Artificial Sequence: Synthetic oligonucleotide
  Mitotic kinesin microtubule-associated protein Eg5 (Kif11) siRNA
ttagaagaaattacagtacacaa

SEQ ID NO: 867 - DNA, 23 bp, Artificial Sequence
  Description of Artificial Sequence: Synthetic oligonucleotide
  Mitotic kinesin microtubule-associated protein Eg5 (Kif11) siRNA
tagaagaaattacagtacacaac

SEQ ID NO: 868 - DNA, 23 bp, Artificial Sequence
  Description of Artificial Sequence: Synthetic oligonucleotide
  Mitotic kinesin microtubule-associated protein Eg5 (Kif11) siRNA
agaagaaattacagtacacaaca

SEQ ID NO: 869 - DNA, 23 bp, Artificial Sequence
  Description of Artificial Sequence: Synthetic oligonucleotide
  Mitotic kinesin microtubule-associated protein Eg5 (Kif11) siRNA
gaagaaattacagtacacaacaa

SEQ ID NO: 870 - DNA, 23 bp, Artificial Sequence
  Description of Artificial Sequence: Synthetic oligonucleotide
  Mitotic kinesin microtubule-associated protein Eg5 (Kif11) siRNA
aagaaattacagtacacaacaag

SEQ ID NO: 871 - DNA, 23 bp, Artificial Sequence
  Description of Artificial Sequence: Synthetic oligonucleotide
  Mitotic kinesin microtubule-associated protein Eg5 (Kif11) siRNA
agaaattacagtacacaacaagg

SEQ ID NO: 872 - DNA, 23 bp, Artificial Sequence
  Description of Artificial Sequence: Synthetic oligonucleotide
  Mitotic kinesin microtubule-associated protein Eg5 (Kif11) siRNA
gaaattacagtacacaacaagga

SEQ ID NO: 873 - DNA, 23 bp, Artificial Sequence
  Description of Artificial Sequence: Synthetic oligonucleotide
  Mitotic kinesin microtubule-associated protein Eg5 (Kif11) siRNA
aaattacagtacacaacaaggat

SEQ ID NO: 874 - DNA, 23 bp, Artificial Sequence
  Description of Artificial Sequence: Synthetic oligonucleotide
  Mitotic kinesin microtubule-associated protein Eg5 (Kif11) siRNA
aattacagtacacaacaaggatg

SEQ ID NO: 875 - DNA, 23 bp, Artificial Sequence
  Description of Artificial Sequence: Synthetic oligonucleotide
  Mitotic kinesin microtubule-associated protein Eg5 (Kif11) siRNA
attacagtacacaacaaggatga

SEQ ID NO: 876 - DNA, 23 bp, Artificial Sequence
  Description of Artificial Sequence: Synthetic oligonucleotide
  Mitotic kinesin microtubule-associated protein Eg5 (Kif11) siRNA
ttacagtacacaacaaggatgaa

SEQ ID NO: 877 - DNA, 23 bp, Artificial Sequence
  Description of Artificial Sequence: Synthetic oligonucleotide
  Mitotic kinesin microtubule-associated protein Eg5 (Kif11) siRNA
tacagtacacaacaaggatgaag

SEQ ID NO: 878 - DNA, 23 bp, Artificial Sequence
  Description of Artificial Sequence: Synthetic oligonucleotide
  Mitotic kinesin microtubule-associated protein Eg5 (Kif11) siRNA
acagtacacaacaaggatgaagt

SEQ ID NO: 879 - DNA, 23 bp, Artificial Sequence
  Description of Artificial Sequence: Synthetic oligonucleotide
  Mitotic kinesin microtubule-associated protein Eg5 (Kif11) siRNA
cagtacacaacaaggatgaagtc

SEQ ID NO: 880 - DNA, 23 bp, Artificial Sequence
  Description of Artificial Sequence: Synthetic oligonucleotide
  Mitotic kinesin microtubule-associated protein Eg5 (Kif11) siRNA
agtacacaacaaggatgaagtct

SEQ ID NO: 881 - DNA, 23 bp, Artificial Sequence
  Description of Artificial Sequence: Synthetic oligonucleotide
  Mitotic kinesin microtubule-associated protein Eg5 (Kif11) siRNA
gtacacaacaaggatgaagtcta

SEQ ID NO: 882 - DNA, 23 bp, Artificial Sequence
  Description of Artificial Sequence: Synthetic oligonucleotide
  Mitotic kinesin microtubule-associated protein Eg5 (Kif11) siRNA
tacacaacaaggatgaagtctat

SEQ ID NO: 883 - DNA, 23 bp, Artificial Sequence
  Description of Artificial Sequence: Synthetic oligonucleotide
  Mitotic kinesin microtubule-associated protein Eg5 (Kif11) siRNA
acacaacaaggatgaagtctatc

SEQ ID NO: 884 - DNA, 23 bp, Artificial Sequence
  Description of Artificial Sequence: Synthetic oligonucleotide
  Mitotic kinesin microtubule-associated protein Eg5 (Kif11) siRNA
cacaacaaggatgaagtctatca

SEQ ID NO: 885 - DNA, 23 bp, Artificial Sequence
  Description of Artificial Sequence: Synthetic oligonucleotide
  Mitotic kinesin microtubule-associated protein Eg5 (Kif11) siRNA
acaacaaggatgaagtctatcaa

SEQ ID NO: 886 - DNA, 23 bp, Artificial Sequence
  Description of Artificial Sequence: Synthetic oligonucleotide
  Mitotic kinesin microtubule-associated protein Eg5 (Kif11) siRNA
caacaaggatgaagtctatcaaa

SEQ ID NO: 887 - DNA, 23 bp, Artificial Sequence
  Description of Artificial Sequence: Synthetic oligonucleotide
  Mitotic kinesin microtubule-associated protein Eg5 (Kif11) siRNA
aacaaggatgaagtctatcaaat

SEQ ID NO: 888 - DNA, 23 bp, Artificial Sequence
  Description of Artificial Sequence: Synthetic oligonucleotide
  Mitotic kinesin microtubule-associated protein Eg5 (Kif11) siRNA
acaaggatgaagtctatcaaatt

SEQ ID NO: 889 - DNA, 23 bp, Artificial Sequence
  Description of Artificial Sequence: Synthetic oligonucleotide
  Mitotic kinesin microtubule-associated protein Eg5 (Kif11) siRNA
caaggatgaagtctatcaaattt

SEQ ID NO: 890 - DNA, 23 bp, Artificial Sequence
  Description of Artificial Sequence: Synthetic oligonucleotide
  Mitotic kinesin microtubule-associated protein Eg5 (Kif11) siRNA
aaggatgaagtctatcaaatttt

SEQ ID NO: 891 - DNA, 23 bp, Artificial Sequence
  Description of Artificial Sequence: Synthetic oligonucleotide
  Mitotic kinesin microtubule-associated protein Eg5 (Kif11) siRNA
aggatgaagtctatcaaatttta

SEQ ID NO: 892 - DNA, 23 bp, Artificial Sequence
  Description of Artificial Sequence: Synthetic oligonucleotide
  Mitotic kinesin microtubule-associated protein Eg5 (Kif11) siRNA
ggatgaagtctatcaaattttag

SEQ ID NO: 893 - DNA, 23 bp, Artificial Sequence
  Description of Artificial Sequence: Synthetic oligonucleotide
  Mitotic kinesin microtubule-associated protein Eg5 (Kif11) siRNA
gatgaagtctatcaaattttaga

SEQ ID NO: 894 - DNA, 23 bp, Artificial Sequence
  Description of Artificial Sequence: Synthetic oligonucleotide
  Mitotic kinesin microtubule-associated protein Eg5 (Kif11) siRNA
atgaagtctatcaaattttagaa

SEQ ID NO: 895 - DNA, 23 bp, Artificial Sequence
  Description of Artificial Sequence: Synthetic oligonucleotide
  Mitotic kinesin microtubule-associated protein Eg5 (Kif11) siRNA
tgaagtctatcaaattttagaaa

SEQ ID NO: 896 - DNA, 23 bp, Artificial Sequence
  Description of Artificial Sequence: Synthetic oligonucleotide
  Mitotic kinesin microtubule-associated protein Eg5 (Kif11) siRNA
gaagtctatcaaattttagaaaa

SEQ ID NO: 897 - DNA, 23 bp, Artificial Sequence
  Description of Artificial Sequence: Synthetic oligonucleotide
  Mitotic kinesin microtubule-associated protein Eg5 (Kif11) siRNA
aagtctatcaaattttagaaaag

SEQ ID NO: 898 - DNA, 23 bp, Artificial Sequence
  Description of Artificial Sequence: Synthetic oligonucleotide
  Mitotic kinesin microtubule-associated protein Eg5 (Kif11) siRNA
agtctatcaaattttagaaaagg

SEQ ID NO: 899 - DNA, 23 bp, Artificial Sequence
  Description of Artificial Sequence: Synthetic oligonucleotide
  Mitotic kinesin microtubule-associated protein Eg5 (Kif11) siRNA
gtctatcaaattttagaaaaggg

SEQ ID NO: 900 - DNA, 23 bp, Artificial Sequence
  Description of Artificial Sequence: Synthetic oligonucleotide
  Mitotic kinesin microtubule-associated protein Eg5 (Kif11) siRNA
tctatcaaattttagaaaagggg

SEQ ID NO: 901 - DNA, 23 bp, Artificial Sequence
  Description of Artificial Sequence: Synthetic oligonucleotide
  Mitotic kinesin microtubule-associated protein Eg5 (Kif11) siRNA
ctatcaaattttagaaaaggggg

SEQ ID NO: 902 - DNA, 23 bp, Artificial Sequence
  Description of Artificial Sequence: Synthetic oligonucleotide
  Mitotic kinesin microtubule-associated protein Eg5 (Kif11) siRNA
tatcaaattttagaaaagggggc

SEQ ID NO: 903 - DNA, 23 bp, Artificial Sequence
  Description of Artificial Sequence: Synthetic oligonucleotide
  Mitotic kinesin microtubule-associated protein Eg5 (Kif11) siRNA
atcaaattttagaaaagggggca

SEQ ID NO: 904 - DNA, 23 bp, Artificial Sequence
  Description of Artificial Sequence: Synthetic oligonucleotide
  Mitotic kinesin microtubule-associated protein Eg5 (Kif11) siRNA
tcaaattttagaaaagggggcag

SEQ ID NO: 905 - DNA, 23 bp, Artificial Sequence
  Description of Artificial Sequence: Synthetic oligonucleotide
  Mitotic kinesin microtubule-associated protein Eg5 (Kif11) siRNA
caaattttagaaaagggggcagc

SEQ ID NO: 906 - DNA, 23 bp, Artificial Sequence
  Description of Artificial Sequence: Synthetic oligonucleotide
  Mitotic kinesin microtubule-associated protein Eg5 (Kif11) siRNA
aaattttagaaaagggggcagca

SEQ ID NO: 907 - DNA, 23 bp, Artificial Sequence
  Description of Artificial Sequence: Synthetic oligonucleotide
  Mitotic kinesin microtubule-associated protein Eg5 (Kif11) siRNA
aattttagaaaagggggcagcaa

SEQ ID NO: 908 - DNA, 23 bp, Artificial Sequence
  Description of Artificial Sequence: Synthetic oligonucleotide
  Mitotic kinesin microtubule-associated protein Eg5 (Kif11) siRNA
attttagaaaagggggcagcaaa

SEQ ID NO: 909 - DNA, 23 bp, Artificial Sequence
  Description of Artificial Sequence: Synthetic oligonucleotide
  Mitotic kinesin microtubule-associated protein Eg5 (Kif11) siRNA
ttttagaaaagggggcagcaaaa

SEQ ID NO: 910 - DNA, 23 bp, Artificial Sequence
  Description of Artificial Sequence: Synthetic oligonucleotide
  Mitotic kinesin microtubule-associated protein Eg5 (Kif11) siRNA
tttagaaaagggggcagcaaaaa

SEQ ID NO: 911 - DNA, 23 bp, Artificial Sequence
  Description of Artificial Sequence: Synthetic oligonucleotide
  Mitotic kinesin microtubule-associated protein Eg5 (Kif11) siRNA
ttagaaaagggggcagcaaaaag

SEQ ID NO: 912 - DNA, 23 bp, Artificial Sequence
  Description of Artificial Sequence: Synthetic oligonucleotide
  Mitotic kinesin microtubule-associated protein Eg5 (Kif11) siRNA
tagaaaagggggcagcaaaaagg

SEQ ID NO: 913 - DNA, 23 bp, Artificial Sequence
  Description of Artificial Sequence: Synthetic oligonucleotide
  Mitotic kinesin microtubule-associated protein Eg5 (Kif11) siRNA
agaaaagggggcagcaaaaagga

SEQ ID NO: 914 - DNA, 23 bp, Artificial Sequence
  Description of Artificial Sequence: Synthetic oligonucleotide
  Mitotic kinesin microtubule-associated protein Eg5 (Kif11) siRNA
gaaaagggggcagcaaaaaggac

SEQ ID NO: 915 - DNA, 23 bp, Artificial Sequence
  Description of Artificial Sequence: Synthetic oligonucleotide
  Mitotic kinesin microtubule-associated protein Eg5 (Kif11) siRNA
aaaagggggcagcaaaaaggaca

SEQ ID NO: 916 - DNA, 23 bp, Artificial Sequence
  Description of Artificial Sequence: Synthetic oligonucleotide
  Mitotic kinesin microtubule-associated protein Eg5 (Kif11) siRNA
aaagggggcagcaaaaaggacaa

SEQ ID NO: 917 - DNA, 23 bp, Artificial Sequence
  Description of Artificial Sequence: Synthetic oligonucleotide
  Mitotic kinesin microtubule-associated protein Eg5 (Kif11) siRNA
aagggggcagcaaaaaggacaac

SEQ ID NO: 918 - DNA, 23 bp, Artificial Sequence
  Description of Artificial Sequence: Synthetic oligonucleotide
  Mitotic kinesin microtubule-associated protein Eg5 (Kif11) siRNA
agggggcagcaaaaaggacaact

SEQ ID NO: 919 - DNA, 23 bp, Artificial Sequence
  Description of Artificial Sequence: Synthetic oligonucleotide
  Mitotic kinesin microtubule-associated protein Eg5 (Kif11) siRNA
gggggcagcaaaaaggacaactg

SEQ ID NO: 920 - DNA, 23 bp, Artificial Sequence
  Description of Artificial Sequence: Synthetic oligonucleotide
  Mitotic kinesin microtubule-associated protein Eg5 (Kif11) siRNA
ggggcagcaaaaaggacaactgc

SEQ ID NO: 921 - DNA, 23 bp, Artificial Sequence
  Description of Artificial Sequence: Synthetic oligonucleotide
  Mitotic kinesin microtubule-associated protein Eg5 (Kif11) siRNA
gggcagcaaaaaggacaactgca

SEQ ID NO: 922 - DNA, 23 bp, Artificial Sequence
  Description of Artificial Sequence: Synthetic oligonucleotide
  Mitotic kinesin microtubule-associated protein Eg5 (Kif11) siRNA
ggcagcaaaaaggacaactgcag

SEQ ID NO: 923 - DNA, 23 bp, Artificial Sequence
  Description of Artificial Sequence: Synthetic oligonucleotide
  Mitotic kinesin microtubule-associated protein Eg5 (Kif11) siRNA
gcagcaaaaaggacaactgcagc

SEQ ID NO: 924 - DNA, 23 bp, Artificial Sequence
  Description of Artificial Sequence: Synthetic oligonucleotide
  Mitotic kinesin microtubule-associated protein Eg5 (Kif11) siRNA
cagcaaaaaggacaactgcagct

SEQ ID NO: 925 - DNA, 23 bp, Artificial Sequence
  Description of Artificial Sequence: Synthetic oligonucleotide
  Mitotic kinesin microtubule-associated protein Eg5 (Kif11) siRNA
agcaaaaaggacaactgcagcta

SEQ ID NO: 926 - DNA, 23 bp, Artificial Sequence
  Description of Artificial Sequence: Synthetic oligonucleotide
  Mitotic kinesin microtubule-associated protein Eg5 (Kif11) siRNA
gcaaaaaggacaactgcagctac

SEQ ID NO: 927 - DNA, 23 bp, Artificial Sequence
  Description of Artificial Sequence: Synthetic oligonucleotide
  Mitotic kinesin microtubule-associated protein Eg5 (Kif11) siRNA
caaaaaggacaactgcagctact

SEQ ID NO: 928 - DNA, 23 bp, Artificial Sequence
  Description of Artificial Sequence: Synthetic oligonucleotide
  Mitotic kinesin microtubule-associated protein Eg5 (Kif11) siRNA
aaaaaggacaactgcagctactc

SEQ ID NO: 929 - DNA, 23 bp, Artificial Sequence
  Description of Artificial Sequence: Synthetic oligonucleotide
  Mitotic kinesin microtubule-associated protein Eg5 (Kif11) siRNA
aaaaggacaactgcagctactct

SEQ ID NO: 930 - DNA, 23 bp, Artificial Sequence
  Description of Artificial Sequence: Synthetic oligonucleotide
  Mitotic kinesin microtubule-associated protein Eg5 (Kif11) siRNA
aaaggacaactgcagctactctg

SEQ ID NO: 931 - DNA, 23 bp, Artificial Sequence
  Description of Artificial Sequence: Synthetic oligonucleotide
  Mitotic kinesin microtubule-associated protein Eg5 (Kif11) siRNA
aaggacaactgcagctactctga

SEQ ID NO: 932 - DNA, 23 bp, Artificial Sequence
  Description of Artificial Sequence: Synthetic oligonucleotide
  Mitotic kinesin microtubule-associated protein Eg5 (Kif11) siRNA
aggacaactgcagctactctgat

SEQ ID NO: 933 - DNA, 23 bp, Artificial Sequence
  Description of Artificial Sequence: Synthetic oligonucleotide
  Mitotic kinesin microtubule-associated protein Eg5 (Kif11) siRNA
ggacaactgcagctactctgatg

SEQ ID NO: 934 - DNA, 23 bp, Artificial Sequence
  Description of Artificial Sequence: Synthetic oligonucleotide
  Mitotic kinesin microtubule-associated protein Eg5 (Kif11) siRNA
gacaactgcagctactctgatga

SEQ ID NO: 935 - DNA, 23 bp, Artificial Sequence
  Description of Artificial Sequence: Synthetic oligonucleotide
  Mitotic kinesin microtubule-associated protein Eg5 (Kif11) siRNA
acaactgcagctactctgatgaa

SEQ ID NO: 936 - DNA, 23 bp, Artificial Sequence
  Description of Artificial Sequence: Synthetic oligonucleotide
  Mitotic kinesin microtubule-associated protein Eg5 (Kif11) siRNA
caactgcagctactctgatgaat

SEQ ID NO: 937 - DNA, 23 bp, Artificial Sequence
  Description of Artificial Sequence: Synthetic oligonucleotide
  Mitotic kinesin microtubule-associated protein Eg5 (Kif11) siRNA
aactgcagctactctgatgaatg

SEQ ID NO: 938 - DNA, 23 bp, Artificial Sequence
  Description of Artificial Sequence: Synthetic oligonucleotide
  Mitotic kinesin microtubule-associated protein Eg5 (Kif11) siRNA
actgcagctactctgatgaatgc

SEQ ID NO: 939 - DNA, 23 bp, Artificial Sequence
  Description of Artificial Sequence: Synthetic oligonucleotide
  Mitotic kinesin microtubule-associated protein Eg5 (Kif11) siRNA
ctgcagctactctgatgaatgca

SEQ ID NO: 940 - DNA, 23 bp, Artificial Sequence
  Description of Artificial Sequence: Synthetic oligonucleotide
  Mitotic kinesin microtubule-associated protein Eg5 (Kif11) siRNA
tgcagctactctgatgaatgcat

SEQ ID NO: 941 - DNA, 23 bp, Artificial Sequence
  Description of Artificial Sequence: Synthetic oligonucleotide
  Mitotic kinesin microtubule-associated protein Eg5 (Kif11) siRNA
gcagctactctgatgaatgcata

SEQ ID NO: 942 - DNA, 23 bp, Artificial Sequence
  Description of Artificial Sequence: Synthetic oligonucleotide
  Mitotic kinesin microtubule-associated protein Eg5 (Kif11) siRNA
cagctactctgatgaatgcatac

SEQ ID NO: 943 - DNA, 23 bp, Artificial Sequence
  Description of Artificial Sequence: Synthetic oligonucleotide
  Mitotic kinesin microtubule-associated protein Eg5 (Kif11) siRNA
agctactctgatgaatgcatact

SEQ ID NO: 944 - DNA, 23 bp, Artificial Sequence
  Description of Artificial Sequence: Synthetic oligonucleotide
  Mitotic kinesin microtubule-associated protein Eg5 (Kif11) siRNA
gctactctgatgaatgcatactc

SEQ ID NO: 945 - DNA, 23 bp, Artificial Sequence
  Description of Artificial Sequence: Synthetic oligonucleotide
  Mitotic kinesin microtubule-associated protein Eg5 (Kif11) siRNA
ctactctgatgaatgcatactct

SEQ ID NO: 946 - DNA, 23 bp, Artificial Sequence
  Description of Artificial Sequence: Synthetic oligonucleotide
  Mitotic kinesin microtubule-associated protein Eg5 (Kif11) siRNA
tactctgatgaatgcatactcta

SEQ ID NO: 947 - DNA, 23 bp, Artificial Sequence
  Description of Artificial Sequence: Synthetic oligonucleotide
  Mitotic kinesin microtubule-associated protein Eg5 (Kif11) siRNA
actctgatgaatgcatactctag

SEQ ID NO: 948 - DNA, 23 bp, Artificial Sequence
  Description of Artificial Sequence: Synthetic oligonucleotide
  Mitotic kinesin microtubule-associated protein Eg5 (Kif11) siRNA
ctctgatgaatgcatactctagt

SEQ ID NO: 949 - DNA, 23 bp, Artificial Sequence
  Description of Artificial Sequence: Synthetic oligonucleotide
  Mitotic kinesin microtubule-associated protein Eg5 (Kif11) siRNA
tctgatgaatgcatactctagtc

SEQ ID NO: 950 - DNA, 23 bp, Artificial Sequence
  Description of Artificial Sequence: Synthetic oligonucleotide
  Mitotic kinesin microtubule-associated protein Eg5 (Kif11) siRNA
ctgatgaatgcatactctagtcg

SEQ ID NO: 951 - DNA, 23 bp, Artificial Sequence
  Description of Artificial Sequence: Synthetic oligonucleotide
  Mitotic kinesin microtubule-associated protein Eg5 (Kif11) siRNA
tgatgaatgcatactctagtcgt

SEQ ID NO: 952 - DNA, 23 bp, Artificial Sequence
  Description of Artificial Sequence: Synthetic oligonucleotide
  Mitotic kinesin microtubule-associated protein Eg5 (Kif11) siRNA
gatgaatgcatactctagtcgtt

SEQ ID NO: 953 - DNA, 23 bp, Artificial Sequence
  Description of Artificial Sequence: Synthetic oligonucleotide
  Mitotic kinesin microtubule-associated protein Eg5 (Kif11) siRNA
atgaatgcatactctagtcgttc

SEQ ID NO: 954 - DNA, 23 bp, Artificial Sequence
  Description of Artificial Sequence: Synthetic oligonucleotide
  Mitotic kinesin microtubule-associated protein Eg5 (Kif11) siRNA
tgaatgcatactctagtcgttcc

SEQ ID NO: 955 - DNA, 23 bp, Artificial Sequence
  Description of Artificial Sequence: Synthetic oligonucleotide
  Mitotic kinesin microtubule-associated protein Eg5 (Kif11) siRNA
gaatgcatactctagtcgttccc

SEQ ID NO: 956 - DNA, 23 bp, Artificial Sequence
  Description of Artificial Sequence: Synthetic oligonucleotide
  Mitotic kinesin microtubule-associated protein Eg5 (Kif11) siRNA
aatgcatactctagtcgttccca

SEQ ID NO: 957 - DNA, 23 bp, Artificial Sequence
  Description of Artificial Sequence: Synthetic oligonucleotide
  Mitotic kinesin microtubule-associated protein Eg5 (Kif11) siRNA
atgcatactctagtcgttcccac

SEQ ID NO: 958 - DNA, 23 bp, Artificial Sequence
  Description of Artificial Sequence: Synthetic oligonucleotide
  Mitotic kinesin microtubule-associated protein Eg5 (Kif11) siRNA
tgcatactctagtcgttcccact

SEQ ID NO: 959 - DNA, 23 bp, Artificial Sequence
  Description of Artificial Sequence: Synthetic oligonucleotide
  Mitotic kinesin microtubule-associated protein Eg5 (Kif11) siRNA
gcatactctagtcgttcccactc

SEQ ID NO: 960 - DNA, 23 bp, Artificial Sequence
  Description of Artificial Sequence: Synthetic oligonucleotide
  Mitotic kinesin microtubule-associated protein Eg5 (Kif11) siRNA
catactctagtcgttcccactca

SEQ ID NO: 961 - DNA, 23 bp, Artificial Sequence
  Description of Artificial Sequence: Synthetic oligonucleotide
  Mitotic kinesin microtubule-associated protein Eg5 (Kif11) siRNA
atactctagtcgttcccactcag

SEQ ID NO: 962 - DNA, 23 bp, Artificial Sequence
  Description of Artificial Sequence: Synthetic oligonucleotide
  Mitotic kinesin microtubule-associated protein Eg5 (Kif11) siRNA
tactctagtcgttcccactcagt

SEQ ID NO: 963 - DNA, 23 bp, Artificial Sequence
  Description of Artificial Sequence: Synthetic oligonucleotide
  Mitotic kinesin microtubule-associated protein Eg5 (Kif11) siRNA
actctagtcgttcccactcagtt

SEQ ID NO: 964 - DNA, 23 bp, Artificial Sequence
  Description of Artificial Sequence: Synthetic oligonucleotide
  Mitotic kinesin microtubule-associated protein Eg5 (Kif11) siRNA
ctctagtcgttcccactcagttt

SEQ ID NO: 965 - DNA, 23 bp, Artificial Sequence
  Description of Artificial Sequence: Synthetic oligonucleotide
  Mitotic kinesin microtubule-associated protein Eg5 (Kif11) siRNA
tctagtcgttcccactcagtttt

SEQ ID NO: 966 - DNA, 23 bp, Artificial Sequence
  Description of Artificial Sequence: Synthetic oligonucleotide
  Mitotic kinesin microtubule-associated protein Eg5 (Kif11) siRNA
ctagtcgttcccactcagttttc

SEQ ID NO: 967 - DNA, 23 bp, Artificial Sequence
  Description of Artificial Sequence: Synthetic oligonucleotide
  Mitotic kinesin microtubule-associated protein Eg5 (Kif11) siRNA
tagtcgttcccactcagttttct

SEQ ID NO: 968 - DNA, 23 bp, Artificial Sequence
  Description of Artificial Sequence: Synthetic oligonucleotide
  Mitotic kinesin microtubule-associated protein Eg5 (Kif11) siRNA
agtcgttcccactcagttttctc

SEQ ID NO: 969 - DNA, 23 bp, Artificial Sequence
  Description of Artificial Sequence: Synthetic oligonucleotide
  Mitotic kinesin microtubule-associated protein Eg5 (Kif11) siRNA
gtcgttcccactcagttttctct

SEQ ID NO: 970 - DNA, 23 bp, Artificial Sequence
  Description of Artificial Sequence: Synthetic oligonucleotide
  Mitotic kinesin microtubule-associated protein Eg5 (Kif11) siRNA
tcgttcccactcagttttctctg

SEQ ID NO: 971 - DNA, 23 bp, Artificial Sequence
  Description of Artificial Sequence: Synthetic oligonucleotide
  Mitotic kinesin microtubule-associated protein Eg5 (Kif11) siRNA
cgttcccactcagttttctctgt

SEQ ID NO: 972 - DNA, 23 bp, Artificial Sequence
  Description of Artificial Sequence: Synthetic oligonucleotide
  Mitotic kinesin microtubule-associated protein Eg5 (Kif11) siRNA
gttcccactcagttttctctgtt

SEQ ID NO: 973 - DNA, 23 bp, Artificial Sequence
  Description of Artificial Sequence: Synthetic oligonucleotide
  Mitotic kinesin microtubule-associated protein Eg5 (Kif11) siRNA
ttcccactcagttttctctgtta

SEQ ID NO: 974 - DNA, 23 bp, Artificial Sequence
  Description of Artificial Sequence: Synthetic oligonucleotide
  Mitotic kinesin microtubule-associated protein Eg5 (Kif11) siRNA
tcccactcagttttctctgttac

SEQ ID NO: 975 - DNA, 23 bp, Artificial Sequence
  Description of Artificial Sequence: Synthetic oligonucleotide
  Mitotic kinesin microtubule-associated protein Eg5 (Kif11) siRNA
cccactcagttttctctgttaca

SEQ ID NO: 976 - DNA, 23 bp, Artificial Sequence
  Description of Artificial Sequence: Synthetic oligonucleotide
  Mitotic kinesin microtubule-associated protein Eg5 (Kif11) siRNA
ccactcagttttctctgttacaa

SEQ ID NO: 977 - DNA, 23 bp, Artificial Sequence
  Description of Artificial Sequence: Synthetic oligonucleotide
  Mitotic kinesin microtubule-associated protein Eg5 (Kif11) siRNA
cactcagttttctctgttacaat

SEQ ID NO: 978 - DNA, 23 bp, Artificial Sequence
  Description of Artificial Sequence: Synthetic oligonucleotide
  Mitotic kinesin microtubule-associated protein Eg5 (Kif11) siRNA
actcagttttctctgttacaata

SEQ ID NO: 979 - DNA, 23 bp, Artificial Sequence
  Description of Artificial Sequence: Synthetic oligonucleotide
  Mitotic kinesin microtubule-associated protein Eg5 (Kif11) siRNA
ctcagttttctctgttacaatac

SEQ ID NO: 980 - DNA, 23 bp, Artificial Sequence
  Description of Artificial Sequence: Synthetic oligonucleotide
  Mitotic kinesin microtubule-associated protein Eg5 (Kif11) siRNA
tcagttttctctgttacaataca

SEQ ID NO: 981 - DNA, 23 bp, Artificial Sequence
  Description of Artificial Sequence: Synthetic oligonucleotide
  Mitotic kinesin microtubule-associated protein Eg5 (Kif11) siRNA
cagttttctctgttacaatacat

SEQ ID NO: 982 - DNA, 23 bp, Artificial Sequence
  Description of Artificial Sequence: Synthetic oligonucleotide
  Mitotic kinesin microtubule-associated protein Eg5 (Kif11) siRNA
agttttctctgttacaatacata

SEQ ID NO: 983 - DNA, 23 bp, Artificial Sequence
  Description of Artificial Sequence: Synthetic oligonucleotide
  Mitotic kinesin microtubule-associated protein Eg5 (Kif11) siRNA
gttttctctgttacaatacatat

SEQ ID NO: 984 - DNA, 23 bp, Artificial Sequence
  Description of Artificial Sequence: Synthetic oligonucleotide
  Mitotic kinesin microtubule-associated protein Eg5 (Kif11) siRNA
ttttctctgttacaatacatatg

SEQ ID NO: 985 - DNA, 23 bp, Artificial Sequence
  Description of Artificial Sequence: Synthetic oligonucleotide
  Mitotic kinesin microtubule-associated protein Eg5 (Kif11) siRNA
tttctctgttacaatacatatga

SEQ ID NO: 986 - DNA, 23 bp, Artificial Sequence
  Description of Artificial Sequence: Synthetic oligonucleotide
  Mitotic kinesin microtubule-associated protein Eg5 (Kif11) siRNA
ttctctgttacaatacatatgaa

SEQ ID NO: 987 - DNA, 23 bp, Artificial Sequence
  Description of Artificial Sequence: Synthetic oligonucleotide
  Mitotic kinesin microtubule-associated protein Eg5 (Kif11) siRNA
tctctgttacaatacatatgaaa

SEQ ID NO: 988 - DNA, 23 bp, Artificial Sequence
  Description of Artificial Sequence: Synthetic oligonucleotide
  Mitotic kinesin microtubule-associated protein Eg5 (Kif11) siRNA
ctctgttacaatacatatgaaag

SEQ ID NO: 989 - DNA, 23 bp, Artificial Sequence
  Description of Artificial Sequence: Synthetic oligonucleotide
  Mitotic kinesin microtubule-associated protein Eg5 (Kif11) siRNA
tctgttacaatacatatgaaaga

SEQ ID NO: 990 - DNA, 23 bp, Artificial Sequence
  Description of Artificial Sequence: Synthetic oligonucleotide
  Mitotic kinesin microtubule-associated protein Eg5 (Kif11) siRNA
ctgttacaatacatatgaaagaa

SEQ ID NO: 991 - DNA, 23 bp, Artificial Sequence
  Description of Artificial Sequence: Synthetic oligonucleotide
  Mitotic kinesin microtubule-associated protein Eg5 (Kif11) siRNA
tgttacaatacatatgaaagaaa

SEQ ID NO: 992 - DNA, 23 bp, Artificial Sequence
  Description of Artificial Sequence: Synthetic oligonucleotide
  Mitotic kinesin microtubule-associated protein Eg5 (Kif11) siRNA
gttacaatacatatgaaagaaac

SEQ ID NO: 993 - DNA, 23 bp, Artificial Sequence
  Description of Artificial Sequence: Synthetic oligonucleotide
  Mitotic kinesin microtubule-associated protein Eg5 (Kif11) siRNA
ttacaatacatatgaaagaaact

SEQ ID NO: 994 - DNA, 23 bp, Artificial Sequence
  Description of Artificial Sequence: Synthetic oligonucleotide
  Mitotic kinesin microtubule-associated protein Eg5 (Kif11) siRNA
tacaatacatatgaaagaaacta

SEQ ID NO: 995 - DNA, 23 bp, Artificial Sequence
  Description of Artificial Sequence: Synthetic oligonucleotide
  Mitotic kinesin microtubule-associated protein Eg5 (Kif11) siRNA
acaatacatatgaaagaaactac

SEQ ID NO: 996 - DNA, 23 bp, Artificial Sequence
  Description of Artificial Sequence: Synthetic oligonucleotide
  Mitotic kinesin microtubule-associated protein Eg5 (Kif11) siRNA
caatacatatgaaagaaactacg

SEQ ID NO: 997 - DNA, 23 bp, Artificial Sequence
  Description of Artificial Sequence: Synthetic oligonucleotide
  Mitotic kinesin microtubule-associated protein Eg5 (Kif11) siRNA
aatacatatgaaagaaactacga

SEQ ID NO: 998 - DNA, 23 bp, Artificial Sequence
  Description of Artificial Sequence: Synthetic oligonucleotide
  Mitotic kinesin microtubule-associated protein Eg5 (Kif11) siRNA
atacatatgaaagaaactacgat

SEQ ID NO: 999 - DNA, 23 bp, Artificial Sequence
  Description of Artificial Sequence: Synthetic oligonucleotide
  Mitotic kinesin microtubule-associated protein Eg5 (Kif11) siRNA
tacatatgaaagaaactacgatt

SEQ ID NO: 1000 - DNA, 23 bp, Artificial Sequence
  Description of Artificial Sequence: Synthetic oligonucleotide
  Mitotic kinesin microtubule-associated protein Eg5 (Kif11) siRNA
acatatgaaagaaactacgattg

SEQ ID NO: 1001 - DNA, 23 bp, Artificial Sequence
  Description of Artificial Sequence: Synthetic oligonucleotide
  Mitotic kinesin microtubule-associated protein Eg5 (Kif11) siRNA
catatgaaagaaactacgattga

SEQ ID NO: 1002 - DNA, 23 bp, Artificial Sequence
  Description of Artificial Sequence: Synthetic oligonucleotide
  Mitotic kinesin microtubule-associated protein Eg5 (Kif11) siRNA
atatgaaagaaactacgattgat

SEQ ID NO: 1003 - DNA, 23 bp, Artificial Sequence
  Description of Artificial Sequence: Synthetic oligonucleotide
  Mitotic kinesin microtubule-associated protein Eg5 (Kif11) siRNA
tatgaaagaaactacgattgatg

SEQ ID NO: 1004 - DNA, 23 bp, Artificial Sequence
  Description of Artificial Sequence: Synthetic oligonucleotide
  Mitotic kinesin microtubule-associated protein Eg5 (Kif11) siRNA
atgaaagaaactacgattgatgg

SEQ ID NO: 1005 - DNA, 23 bp, Artificial Sequence
  Description of Artificial Sequence: Synthetic oligonucleotide
  Mitotic kinesin microtubule-associated protein Eg5 (Kif11) siRNA
tgaaagaaactacgattgatgga

SEQ ID NO: 1006 - DNA, 23 bp, Artificial Sequence
  Description of Artificial Sequence: Synthetic oligonucleotide
  Mitotic kinesin microtubule-associated protein Eg5 (Kif11) siRNA
gaaagaaactacgattgatggag

SEQ ID NO: 1007 - DNA, 23 bp, Artificial Sequence
  Description of Artificial Sequence: Synthetic oligonucleotide
  Mitotic kinesin microtubule-associated protein Eg5 (Kif11) siRNA
aaagaaactacgattgatggaga

SEQ ID NO: 1008 - DNA, 23 bp, Artificial Sequence
  Description of Artificial Sequence: Synthetic oligonucleotide
  Mitotic kinesin microtubule-associated protein Eg5 (Kif11) siRNA
aagaaactacgattgatggagaa

SEQ ID NO: 1009 - DNA, 23 bp, Artificial Sequence
  Description of Artificial Sequence: Synthetic oligonucleotide
  Mitotic kinesin microtubule-associated protein Eg5 (Kif11) siRNA
agaaactacgattgatggagaag

SEQ ID NO: 1010 - DNA, 23 bp, Artificial Sequence
  Description of Artificial Sequence: Synthetic oligonucleotide
  Mitotic kinesin microtubule-associated protein Eg5 (Kif11) siRNA
gaaactacgattgatggagaaga

SEQ ID NO: 1011 - DNA, 23 bp, Artificial Sequence
  Description of Artificial Sequence: Synthetic oligonucleotide
  Mitotic kinesin microtubule-associated protein Eg5 (Kif11) siRNA
aaactacgattgatggagaagag

SEQ ID NO: 1012 - DNA, 23 bp, Artificial Sequence
  Description of Artificial Sequence: Synthetic oligonucleotide
  Mitotic kinesin microtubule-associated protein Eg5 (Kif11) siRNA
aactacgattgatggagaagagc

SEQ ID NO: 1013 - DNA, 23 bp, Artificial Sequence
  Description of Artificial Sequence: Synthetic oligonucleotide
  Mitotic kinesin microtubule-associated protein Eg5 (Kif11) siRNA
actacgattgatggagaagagct

SEQ ID NO: 1014 - DNA, 23 bp, Artificial Sequence
  Description of Artificial Sequence: Synthetic oligonucleotide
  Mitotic kinesin microtubule-associated protein Eg5 (Kif11) siRNA
ctacgattgatggagaagagctt

SEQ ID NO: 1015 - DNA, 23 bp, Artificial Sequence
  Description of Artificial Sequence: Synthetic oligonucleotide
  Mitotic kinesin microtubule-associated protein Eg5 (Kif11) siRNA
tacgattgatggagaagagcttg

SEQ ID NO: 1016 - DNA, 23 bp, Artificial Sequence
  Description of Artificial Sequence: Synthetic oligonucleotide
  Mitotic kinesin microtubule-associated protein Eg5 (Kif11) siRNA
acgattgatggagaagagcttgt

SEQ ID NO: 1017 - DNA, 23 bp, Artificial Sequence
  Description of Artificial Sequence: Synthetic oligonucleotide
  Mitotic kinesin microtubule-associated protein Eg5 (Kif11) siRNA
cgattgatggagaagagcttgtt

SEQ ID NO: 1018 - DNA, 23 bp, Artificial Sequence
  Description of Artificial Sequence: Synthetic oligonucleotide
  Mitotic kinesin microtubule-associated protein Eg5 (Kif11) siRNA
gattgatggagaagagcttgtta

SEQ ID NO: 1019 - DNA, 23 bp, Artificial Sequence
  Description of Artificial Sequence: Synthetic oligonucleotide
  Mitotic kinesin microtubule-associated protein Eg5 (Kif11) siRNA
attgatggagaagagcttgttaa

SEQ ID NO: 1020 - DNA, 23 bp, Artificial Sequence
  Description of Artificial Sequence: Synthetic oligonucleotide
  Mitotic kinesin microtubule-associated protein Eg5 (Kif11) siRNA
ttgatggagaagagcttgttaaa

SEQ ID NO: 1021 - DNA, 23 bp, Artificial Sequence
  Description of Artificial Sequence: Synthetic oligonucleotide
  Mitotic kinesin microtubule-associated protein Eg5 (Kif11) siRNA
tgatggagaagagcttgttaaaa

SEQ ID NO: 1022 - DNA, 23 bp, Artificial Sequence
  Description of Artificial Sequence: Synthetic oligonucleotide
  Mitotic kinesin microtubule-associated protein Eg5 (Kif11) siRNA
gatggagaagagcttgttaaaat

SEQ ID NO: 1023 - DNA, 23 bp, Artificial Sequence
  Description of Artificial Sequence: Synthetic oligonucleotide
  Mitotic kinesin microtubule-associated protein Eg5 (Kif11) siRNA
atggagaagagcttgttaaaatc

SEQ ID NO: 1024 - DNA, 23 bp, Artificial Sequence
  Description of Artificial Sequence: Synthetic oligonucleotide
  Mitotic kinesin microtubule-associated protein Eg5 (Kif11) siRNA
tggagaagagcttgttaaaatcg

SEQ ID NO: 1025 - DNA, 23 bp, Artificial Sequence
  Description of Artificial Sequence: Synthetic oligonucleotide
  Mitotic kinesin microtubule-associated protein Eg5 (Kif11) siRNA
ggagaagagcttgttaaaatcgg

SEQ ID NO: 1026 - DNA, 23 bp, Artificial Sequence
  Description of Artificial Sequence: Synthetic oligonucleotide
  Mitotic kinesin microtubule-associated protein Eg5 (Kif11) siRNA
gagaagagcttgttaaaatcgga

SEQ ID NO: 1027 - DNA, 23 bp, Artificial Sequence
  Description of Artificial Sequence: Synthetic oligonucleotide
  Mitotic kinesin microtubule-associated protein Eg5 (Kif11) siRNA
agaagagcttgttaaaatcggaa

SEQ ID NO: 1028 - DNA, 23 bp, Artificial Sequence
  Description of Artificial Sequence: Synthetic oligonucleotide
  Mitotic kinesin microtubule-associated protein Eg5 (Kif11) siRNA
gaagagcttgttaaaatcggaaa

SEQ ID NO: 1029 - DNA, 23 bp, Artificial Sequence
  Description of Artificial Sequence: Synthetic oligonucleotide
  Mitotic kinesin microtubule-associated protein Eg5 (Kif11) siRNA
aagagcttgttaaaatcggaaag

SEQ ID NO: 1030 - DNA, 23 bp, Artificial Sequence
  Description of Artificial Sequence: Synthetic oligonucleotide
  Mitotic kinesin microtubule-associated protein Eg5 (Kif11) siRNA
agagcttgttaaaatcggaaagt

SEQ ID NO: 1031 - DNA, 23 bp, Artificial Sequence
  Description of Artificial Sequence: Synthetic oligonucleotide
  Mitotic kinesin microtubule-associated protein Eg5 (Kif11) siRNA
gagcttgttaaaatcggaaagtt

SEQ ID NO: 1032 - DNA, 23 bp, Artificial Sequence
  Description of Artificial Sequence: Synthetic oligonucleotide
  Mitotic kinesin microtubule-associated protein Eg5 (Kif11) siRNA
agcttgttaaaatcggaaagttg

SEQ ID NO: 1033 - DNA, 23 bp, Artificial Sequence
  Description of Artificial Sequence: Synthetic oligonucleotide
  Mitotic kinesin microtubule-associated protein Eg5 (Kif11) siRNA
gcttgttaaaatcggaaagttga

SEQ ID NO: 1034 - DNA, 23 bp, Artificial Sequence
  Description of Artificial Sequence: Synthetic oligonucleotide
  Mitotic kinesin microtubule-associated protein Eg5 (Kif11) siRNA
cttgttaaaatcggaaagttgaa

SEQ ID NO: 1035 - DNA, 23 bp, Artificial Sequence
  Description of Artificial Sequence: Synthetic oligonucleotide
  Mitotic kinesin microtubule-associated protein Eg5 (Kif11) siRNA
ttgttaaaatcggaaagttgaac

SEQ ID NO: 1036 - DNA, 23 bp, Artificial Sequence
  Description of Artificial Sequence: Synthetic oligonucleotide
  Mitotic kinesin microtubule-associated protein Eg5 (Kif11) siRNA
tgttaaaatcggaaagttgaact

SEQ ID NO: 1037 - DNA, 23 bp, Artificial Sequence
  Description of Artificial Sequence: Synthetic oligonucleotide
  Mitotic kinesin microtubule-associated protein Eg5 (Kif11) siRNA
gttaaaatcggaaagttgaactt

SEQ ID NO: 1038 - DNA, 23 bp, Artificial Sequence
  Description of Artificial Sequence: Synthetic oligonucleotide
  Mitotic kinesin microtubule-associated protein Eg5 (Kif11) siRNA
ttaaaatcggaaagttgaacttg

SEQ ID NO: 1039 - DNA, 23 bp, Artificial Sequence
  Description of Artificial Sequence: Synthetic oligonucleotide
  Mitotic kinesin microtubule-associated protein Eg5 (Kif11) siRNA
taaaatcggaaagttgaacttgg

SEQ ID NO: 1040 - DNA, 23 bp, Artificial Sequence
  Description of Artificial Sequence: Synthetic oligonucleotide
  Mitotic kinesin microtubule-associated protein Eg5 (Kif11) siRNA
aaaatcggaaagttgaacttggt

SEQ ID NO: 1041 - DNA, 23 bp, Artificial Sequence
  Description of Artificial Sequence: Synthetic oligonucleotide
  Mitotic kinesin microtubule-associated protein Eg5 (Kif11) siRNA
aaatcggaaagttgaacttggtt

SEQ ID NO: 1042 - DNA, 23 bp, Artificial Sequence
  Description of Artificial Sequence: Synthetic oligonucleotide
  Mitotic kinesin microtubule-associated protein Eg5 (Kif11) siRNA
aatcggaaagttgaacttggttg

SEQ ID NO: 1043 - DNA, 23 bp, Artificial Sequence
  Description of Artificial Sequence: Synthetic oligonucleotide
  Mitotic kinesin microtubule-associated protein Eg5 (Kif11) siRNA
atcggaaagttgaacttggttga

SEQ ID NO: 1044 - DNA, 23 bp, Artificial Sequence
  Description of Artificial Sequence: Synthetic oligonucleotide
  Mitotic kinesin microtubule-associated protein Eg5 (Kif11) siRNA
tcggaaagttgaacttggttgat

SEQ ID NO: 1045 - DNA, 23 bp, Artificial Sequence
  Description of Artificial Sequence: Synthetic oligonucleotide
  Mitotic kinesin microtubule-associated protein Eg5 (Kif11) siRNA
cggaaagttgaacttggttgatc

SEQ ID NO: 1046 - DNA, 23 bp, Artificial Sequence
  Description of Artificial Sequence: Synthetic oligonucleotide
  Mitotic kinesin microtubule-associated protein Eg5 (Kif11) siRNA
ggaaagttgaacttggttgatct

SEQ ID NO: 1047 - DNA, 23 bp, Artificial Sequence
  Description of Artificial Sequence: Synthetic oligonucleotide
  Mitotic kinesin microtubule-associated protein Eg5 (Kif11) siRNA
gaaagttgaacttggttgatctt

SEQ ID NO: 1048 - DNA, 23 bp, Artificial Sequence
  Description of Artificial Sequence: Synthetic oligonucleotide
  Mitotic kinesin microtubule-associated protein Eg5 (Kif11) siRNA
aaagttgaacttggttgatcttg

SEQ ID NO: 1049 - DNA, 23 bp, Artificial Sequence
  Description of Artificial Sequence: Synthetic oligonucleotide
  Mitotic kinesin microtubule-associated protein Eg5 (Kif11) siRNA
aagttgaacttggttgatcttgc

SEQ ID NO: 1050 - DNA, 23 bp, Artificial Sequence
  Description of Artificial Sequence: Synthetic oligonucleotide
  Mitotic kinesin microtubule-associated protein Eg5 (Kif11) siRNA
agttgaacttggttgatcttgca

SEQ ID NO: 1051 - DNA, 23 bp, Artificial Sequence
  Description of Artificial Sequence: Synthetic oligonucleotide
  Mitotic kinesin microtubule-associated protein Eg5 (Kif11) siRNA
gttgaacttggttgatcttgcag

SEQ ID NO: 1052 - DNA, 23 bp, Artificial Sequence
  Description of Artificial Sequence: Synthetic oligonucleotide
  Mitotic kinesin microtubule-associated protein Eg5 (Kif11) siRNA
ttgaacttggttgatcttgcagg

SEQ ID NO: 1053 - DNA, 23 bp, Artificial Sequence
  Description of Artificial Sequence: Synthetic oligonucleotide
  Mitotic kinesin microtubule-associated protein Eg5 (Kif11) siRNA
tgaacttggttgatcttgcagga

SEQ ID NO: 1054 - DNA, 23 bp, Artificial Sequence
  Description of Artificial Sequence: Synthetic oligonucleotide
  Mitotic kinesin microtubule-associated protein Eg5 (Kif11) siRNA
gaacttggttgatcttgcaggaa

SEQ ID NO: 1055 - DNA, 23 bp, Artificial Sequence
  Description of Artificial Sequence: Synthetic oligonucleotide
  Mitotic kinesin microtubule-associated protein Eg5 (Kif11) siRNA
aacttggttgatcttgcaggaag

SEQ ID NO: 1056 - DNA, 23 bp, Artificial Sequence
  Description of Artificial Sequence: Synthetic oligonucleotide
  Mitotic kinesin microtubule-associated protein Eg5 (Kif11) siRNA
acttggttgatcttgcaggaagt

SEQ ID NO: 1057 - DNA, 23 bp, Artificial Sequence
  Description of Artificial Sequence: Synthetic oligonucleotide
  Mitotic kinesin microtubule-associated protein Eg5 (Kif11) siRNA
cttggttgatcttgcaggaagtg

SEQ ID NO: 1058 - DNA, 23 bp, Artificial Sequence
  Description of Artificial Sequence: Synthetic oligonucleotide
  Mitotic kinesin microtubule-associated protein Eg5 (Kif11) siRNA
ttggttgatcttgcaggaagtga

SEQ ID NO: 1059 - DNA, 23 bp, Artificial Sequence
  Description of Artificial Sequence: Synthetic oligonucleotide
  Mitotic kinesin microtubule-associated protein Eg5 (Kif11) siRNA
tggttgatcttgcaggaagtgaa

SEQ ID NO: 1060 - DNA, 23 bp, Artificial Sequence
  Description of Artificial Sequence: Synthetic oligonucleotide
  Mitotic kinesin microtubule-associated protein Eg5 (Kif11) siRNA
ggttgatcttgcaggaagtgaaa

SEQ ID NO: 1061 - DNA, 23 bp, Artificial Sequence
  Description of Artificial Sequence: Synthetic oligonucleotide
  Mitotic kinesin microtubule-associated protein Eg5 (Kif11) siRNA
gttgatcttgcaggaagtgaaaa

SEQ ID NO: 1062 - DNA, 23 bp, Artificial Sequence
  Description of Artificial Sequence: Synthetic oligonucleotide
  Mitotic kinesin microtubule-associated protein Eg5 (Kif11) siRNA
ttgatcttgcaggaagtgaaaac

SEQ ID NO: 1063 - DNA, 23 bp, Artificial Sequence
  Description of Artificial Sequence: Synthetic oligonucleotide
  Mitotic kinesin microtubule-associated protein Eg5 (Kif11) siRNA
tgatcttgcaggaagtgaaaaca

SEQ ID NO: 1064 - DNA, 23 bp, Artificial Sequence
  Description of Artificial Sequence: Synthetic oligonucleotide
  Mitotic kinesin microtubule-associated protein Eg5 (Kif11) siRNA
gatcttgcaggaagtgaaaacat

SEQ ID NO: 1065 - DNA, 23 bp, Artificial Sequence
  Description of Artificial Sequence: Synthetic oligonucleotide
  Mitotic kinesin microtubule-associated protein Eg5 (Kif11) siRNA
atcttgcaggaagtgaaaacatt

SEQ ID NO: 1066 - DNA, 23 bp, Artificial Sequence
  Description of Artificial Sequence: Synthetic oligonucleotide
  Mitotic kinesin microtubule-associated protein Eg5 (Kif11) siRNA
tcttgcaggaagtgaaaacattg

SEQ ID NO: 1067 - DNA, 23 bp, Artificial Sequence
  Description of Artificial Sequence: Synthetic oligonucleotide
  Mitotic kinesin microtubule-associated protein Eg5 (Kif11) siRNA
cttgcaggaagtgaaaacattgg

SEQ ID NO: 1068 - DNA, 23 bp, Artificial Sequence
  Description of Artificial Sequence: Synthetic oligonucleotide
  Mitotic kinesin microtubule-associated protein Eg5 (Kif11) siRNA
ttgcaggaagtgaaaacattggc

SEQ ID NO: 1069 - DNA, 23 bp, Artificial Sequence
  Description of Artificial Sequence: Synthetic oligonucleotide
  Mitotic kinesin microtubule-associated protein Eg5 (Kif11) siRNA
tgcaggaagtgaaaacattggcc

SEQ ID NO: 1070 - DNA, 23 bp, Artificial Sequence
  Description of Artificial Sequence: Synthetic oligonucleotide
  Mitotic kinesin microtubule-associated protein Eg5 (Kif11) siRNA
gcaggaagtgaaaacattggccg

SEQ ID NO: 1071 - DNA, 23 bp, Artificial Sequence
  Description of Artificial Sequence: Synthetic oligonucleotide
  Mitotic kinesin microtubule-associated protein Eg5 (Kif11) siRNA
caggaagtgaaaacattggccgt

SEQ ID NO: 1072 - DNA, 23 bp, Artificial Sequence
  Description of Artificial Sequence: Synthetic oligonucleotide
  Mitotic kinesin microtubule-associated protein Eg5 (Kif11) siRNA
aggaagtgaaaacattggccgtt

SEQ ID NO: 1073 - DNA, 23 bp, Artificial Sequence
  Description of Artificial Sequence: Synthetic oligonucleotide
  Mitotic kinesin microtubule-associated protein Eg5 (Kif11) siRNA
ggaagtgaaaacattggccgttc

SEQ ID NO: 1074 - DNA, 23 bp, Artificial Sequence
  Description of Artificial Sequence: Synthetic oligonucleotide
  Mitotic kinesin microtubule-associated protein Eg5 (Kif11) siRNA
gaagtgaaaacattggccgttct

SEQ ID NO: 1075 - DNA, 23 bp, Artificial Sequence
  Description of Artificial Sequence: Synthetic oligonucleotide
  Mitotic kinesin microtubule-associated protein Eg5 (Kif11) siRNA
aagtgaaaacattggccgttctg

SEQ ID NO: 1076 - DNA, 23 bp, Artificial Sequence
  Description of Artificial Sequence: Synthetic oligonucleotide
  Mitotic kinesin microtubule-associated protein Eg5 (Kif11) siRNA
agtgaaaacattggccgttctgg

SEQ ID NO: 1077 - DNA, 23 bp, Artificial Sequence
  Description of Artificial Sequence: Synthetic oligonucleotide
  Mitotic kinesin microtubule-associated protein Eg5 (Kif11) siRNA
gtgaaaacattggccgttctgga

SEQ ID NO: 1078 - DNA, 23 bp, Artificial Sequence
  Description of Artificial Sequence: Synthetic oligonucleotide
  Mitotic kinesin microtubule-associated protein Eg5 (Kif11) siRNA
tgaaaacattggccgttctggag

SEQ ID NO: 1079 - DNA, 23 bp, Artificial Sequence
  Description of Artificial Sequence: Synthetic oligonucleotide
  Mitotic kinesin microtubule-associated protein Eg5 (Kif11) siRNA
gaaaacattggccgttctggagc

SEQ ID NO: 1080 - DNA, 23 bp, Artificial Sequence
  Description of Artificial Sequence: Synthetic oligonucleotide
  Mitotic kinesin microtubule-associated protein Eg5 (Kif11) siRNA
aaaacattggccgttctggagct

SEQ ID NO: 1081 - DNA, 23 bp, Artificial Sequence
  Description of Artificial Sequence: Synthetic oligonucleotide
  Mitotic kinesin microtubule-associated protein Eg5 (Kif11) siRNA
aaacattggccgttctggagctg

SEQ ID NO: 1082 - DNA, 23 bp, Artificial Sequence
  Description of Artificial Sequence: Synthetic oligonucleotide
  Mitotic kinesin microtubule-associated protein Eg5 (Kif11) siRNA
aacattggccgttctggagctgt

SEQ ID NO: 1083 - DNA, 23 bp, Artificial Sequence
  Description of Artificial Sequence: Synthetic oligonucleotide
  Mitotic kinesin microtubule-associated protein Eg5 (Kif11) siRNA
acattggccgttctggagctgtt

SEQ ID NO: 1084 - DNA, 23 bp, Artificial Sequence
  Description of Artificial Sequence: Synthetic oligonucleotide
  Mitotic kinesin microtubule-associated protein Eg5 (Kif11) siRNA
cattggccgttctggagctgttg

SEQ ID NO: 1085 - DNA, 23 bp, Artificial Sequence
  Description of Artificial Sequence: Synthetic oligonucleotide
  Mitotic kinesin microtubule-associated protein Eg5 (Kif11) siRNA
attggccgttctggagctgttga

SEQ ID NO: 1086 - DNA, 23 bp, Artificial Sequence
  Description of Artificial Sequence: Synthetic oligonucleotide
  Mitotic kinesin microtubule-associated protein Eg5 (Kif11) siRNA
ttggccgttctggagctgttgat

SEQ ID NO: 1087 - DNA, 23 bp, Artificial Sequence
  Description of Artificial Sequence: Synthetic oligonucleotide
  Mitotic kinesin microtubule-associated protein Eg5 (Kif11) siRNA
tggccgttctggagctgttgata

SEQ ID NO: 1088 - DNA, 23 bp, Artificial Sequence
  Description of Artificial Sequence: Synthetic oligonucleotide
  Mitotic kinesin microtubule-associated protein Eg5 (Kif11) siRNA
ggccgttctggagctgttgataa

SEQ ID NO: 1089 - DNA, 23 bp, Artificial Sequence
  Description of Artificial Sequence: Synthetic oligonucleotide
  Mitotic kinesin microtubule-associated protein Eg5 (Kif11) siRNA
gccgttctggagctgttgataag

SEQ ID NO: 1090 - DNA, 23 bp, Artificial Sequence
  Description of Artificial Sequence: Synthetic oligonucleotide
  Mitotic kinesin microtubule-associated protein Eg5 (Kif11) siRNA
ccgttctggagctgttgataaga

SEQ ID NO: 1091 - DNA, 23 bp, Artificial Sequence
  Description of Artificial Sequence: Synthetic oligonucleotide
  Mitotic kinesin microtubule-associated protein Eg5 (Kif11) siRNA
cgttctggagctgttgataagag

SEQ ID NO: 1092 - DNA, 23 bp, Artificial Sequence
  Description of Artificial Sequence: Synthetic oligonucleotide
  Mitotic kinesin microtubule-associated protein Eg5 (Kif11) siRNA
gttctggagctgttgataagaga

SEQ ID NO: 1093 - DNA, 23 bp, Artificial Sequence
  Description of Artificial Sequence: Synthetic oligonucleotide
  Mitotic kinesin microtubule-associated protein Eg5 (Kif11) siRNA
ttctggagctgttgataagagag

SEQ ID NO: 1094 - DNA, 23 bp, Artificial Sequence
  Description of Artificial Sequence: Synthetic oligonucleotide
  Mitotic kinesin microtubule-associated protein Eg5 (Kif11) siRNA
tctggagctgttgataagagagc

SEQ ID NO: 1095 - DNA, 23 bp, Artificial Sequence
  Description of Artificial Sequence: Synthetic oligonucleotide
  Mitotic kinesin microtubule-associated protein Eg5 (Kif11) siRNA
ctggagctgttgataagagagct

SEQ ID NO: 1096 - DNA, 23 bp, Artificial Sequence
  Description of Artificial Sequence: Synthetic oligonucleotide
  Mitotic kinesin microtubule-associated protein Eg5 (Kif11) siRNA
tggagctgttgataagagagctc

SEQ ID NO: 1097 - DNA, 23 bp, Artificial Sequence
  Description of Artificial Sequence: Synthetic oligonucleotide
  Mitotic kinesin microtubule-associated protein Eg5 (Kif11) siRNA
ggagctgttgataagagagctcg

SEQ ID NO: 1098 - DNA, 23 bp, Artificial Sequence
  Description of Artificial Sequence: Synthetic oligonucleotide
  Mitotic kinesin microtubule-associated protein Eg5 (Kif11) siRNA
gagctgttgataagagagctcgg

SEQ ID NO: 1099 - DNA, 23 bp, Artificial Sequence
  Description of Artificial Sequence: Synthetic oligonucleotide
  Mitotic kinesin microtubule-associated protein Eg5 (Kif11) siRNA
agctgttgataagagagctcggg

SEQ ID NO: 1100 - DNA, 23 bp, Artificial Sequence
  Description of Artificial Sequence: Synthetic oligonucleotide
  Mitotic kinesin microtubule-associated protein Eg5 (Kif11) siRNA
gctgttgataagagagctcggga

SEQ ID NO: 1101 - DNA, 23 bp, Artificial Sequence
  Description of Artificial Sequence: Synthetic oligonucleotide
  Mitotic kinesin microtubule-associated protein Eg5 (Kif11) siRNA
ctgttgataagagagctcgggaa

SEQ ID NO: 1102 - DNA, 23 bp, Artificial Sequence
  Description of Artificial Sequence: Synthetic oligonucleotide
  Mitotic kinesin microtubule-associated protein Eg5 (Kif11) siRNA
tgttgataagagagctcgggaag

SEQ ID NO: 1103 - DNA, 23 bp, Artificial Sequence
  Description of Artificial Sequence: Synthetic oligonucleotide
  Mitotic kinesin microtubule-associated protein Eg5 (Kif11) siRNA
gttgataagagagctcgggaagc

SEQ ID NO: 1104 - DNA, 23 bp, Artificial Sequence
  Description of Artificial Sequence: Synthetic oligonucleotide
  Mitotic kinesin microtubule-associated protein Eg5 (Kif11) siRNA
ttgataagagagctcgggaagct

SEQ ID NO: 1105 - DNA, 23 bp, Artificial Sequence
  Description of Artificial Sequence: Synthetic oligonucleotide
  Mitotic kinesin microtubule-associated protein Eg5 (Kif11) siRNA
tgataagagagctcgggaagctg

SEQ ID NO: 1106 - DNA, 23 bp, Artificial Sequence
  Description of Artificial Sequence: Synthetic oligonucleotide
  Mitotic kinesin microtubule-associated protein Eg5 (Kif11) siRNA
gataagagagctcgggaagctgg

SEQ ID NO: 1107 - DNA, 23 bp, Artificial Sequence
  Description of Artificial Sequence: Synthetic oligonucleotide
  Mitotic kinesin microtubule-associated protein Eg5 (Kif11) siRNA
ataagagagctcgggaagctgga

SEQ ID NO: 1108 - DNA, 23 bp, Artificial Sequence
  Description of Artificial Sequence: Synthetic oligonucleotide
  Mitotic kinesin microtubule-associated protein Eg5 (Kif11) siRNA
taagagagctcgggaagctggaa

SEQ ID NO: 1109 - DNA, 23 bp, Artificial Sequence
  Description of Artificial Sequence: Synthetic oligonucleotide
  Mitotic kinesin microtubule-associated protein Eg5 (Kif11) siRNA
aagagagctcgggaagctggaaa

SEQ ID NO: 1110 - DNA, 23 bp, Artificial Sequence
  Description of Artificial Sequence: Synthetic oligonucleotide
  Mitotic kinesin microtubule-associated protein Eg5 (Kif11) siRNA
agagagctcgggaagctggaaat

SEQ ID NO: 1111 - DNA, 23 bp, Artificial Sequence
  Description of Artificial Sequence: Synthetic oligonucleotide
  Mitotic kinesin microtubule-associated protein Eg5 (Kif11) siRNA
gagagctcgggaagctggaaata

SEQ ID NO: 1112 - DNA, 23 bp, Artificial Sequence
  Description of Artificial Sequence: Synthetic oligonucleotide
  Mitotic kinesin microtubule-associated protein Eg5 (Kif11) siRNA
agagctcgggaagctggaaatat

SEQ ID NO: 1113 - DNA, 23 bp, Artificial Sequence
  Description of Artificial Sequence: Synthetic oligonucleotide
  Mitotic kinesin microtubule-associated protein Eg5 (Kif11) siRNA
gagctcgggaagctggaaatata

SEQ ID NO: 1114 - DNA, 23 bp, Artificial Sequence
  Description of Artificial Sequence: Synthetic oligonucleotide
  Mitotic kinesin microtubule-associated protein Eg5 (Kif11) siRNA
agctcgggaagctggaaatataa

SEQ ID NO: 1115 - DNA, 23 bp, Artificial Sequence
  Description of Artificial Sequence: Synthetic oligonucleotide
  Mitotic kinesin microtubule-associated protein Eg5 (Kif11) siRNA
gctcgggaagctggaaatataaa

SEQ ID NO: 1116 - DNA, 23 bp, Artificial Sequence
  Description of Artificial Sequence: Synthetic oligonucleotide
  Mitotic kinesin microtubule-associated protein Eg5 (Kif11) siRNA
ctcgggaagctggaaatataaat

SEQ ID NO: 1117 - DNA, 23 bp, Artificial Sequence
  Description of Artificial Sequence: Synthetic oligonucleotide
  Mitotic kinesin microtubule-associated protein Eg5 (Kif11) siRNA
tcgggaagctggaaatataaatc

SEQ ID NO: 1118 - DNA, 23 bp, Artificial Sequence
  Description of Artificial Sequence: Synthetic oligonucleotide
  Mitotic kinesin microtubule-associated protein Eg5 (Kif11) siRNA
cgggaagctggaaatataaatca

SEQ ID NO: 1119 - DNA, 23 bp, Artificial Sequence
  Description of Artificial Sequence: Synthetic oligonucleotide
  Mitotic kinesin microtubule-associated protein Eg5 (Kif11) siRNA
gggaagctggaaatataaatcaa

SEQ ID NO: 1120 - DNA, 23 bp, Artificial Sequence
  Description of Artificial Sequence: Synthetic oligonucleotide
  Mitotic kinesin microtubule-associated protein Eg5 (Kif11) siRNA
ggaagctggaaatataaatcaat

SEQ ID NO: 1121 - DNA, 23 bp, Artificial Sequence
  Description of Artificial Sequence: Synthetic oligonucleotide
  Mitotic kinesin microtubule-associated protein Eg5 (Kif11) siRNA
gaagctggaaatataaatcaatc

SEQ ID NO: 1122 - DNA, 23 bp, Artificial Sequence
  Description of Artificial Sequence: Synthetic oligonucleotide
  Mitotic kinesin microtubule-associated protein Eg5 (Kif11) siRNA
aagctggaaatataaatcaatcc

SEQ ID NO: 1123 - DNA, 23 bp, Artificial Sequence
  Description of Artificial Sequence: Synthetic oligonucleotide
  Mitotic kinesin microtubule-associated protein Eg5 (Kif11) siRNA
agctggaaatataaatcaatccc

SEQ ID NO: 1124 - DNA, 23 bp, Artificial Sequence
  Description of Artificial Sequence: Synthetic oligonucleotide
  Mitotic kinesin microtubule-associated protein Eg5 (Kif11) siRNA
gctggaaatataaatcaatccct

SEQ ID NO: 1125 - DNA, 23 bp, Artificial Sequence
  Description of Artificial Sequence: Synthetic oligonucleotide
  Mitotic kinesin microtubule-associated protein Eg5 (Kif11) siRNA
ctggaaatataaatcaatccctg

SEQ ID NO: 1126 - DNA, 23 bp, Artificial Sequence
  Description of Artificial Sequence: Synthetic oligonucleotide
  Mitotic kinesin microtubule-associated protein Eg5 (Kif11) siRNA
tggaaatataaatcaatccctgt

SEQ ID NO: 1127 - DNA, 23 bp, Artificial Sequence
  Description of Artificial Sequence: Synthetic oligonucleotide
  Mitotic kinesin microtubule-associated protein Eg5 (Kif11) siRNA
ggaaatataaatcaatccctgtt

SEQ ID NO: 1128 - DNA, 23 bp, Artificial Sequence
  Description of Artificial Sequence: Synthetic oligonucleotide
  Mitotic kinesin microtubule-associated protein Eg5 (Kif11) siRNA
gaaatataaatcaatccctgttg

SEQ ID NO: 1129 - DNA, 23 bp, Artificial Sequence
  Description of Artificial Sequence: Synthetic oligonucleotide
  Mitotic kinesin microtubule-associated protein Eg5 (Kif11) siRNA
aaatataaatcaatccctgttga

SEQ ID NO: 1130 - DNA, 23 bp, Artificial Sequence
  Description of Artificial Sequence: Synthetic oligonucleotide
  Mitotic kinesin microtubule-associated protein Eg5 (Kif11) siRNA
aatataaatcaatccctgttgac

SEQ ID NO: 1131 - DNA, 23 bp, Artificial Sequence
  Description of Artificial Sequence: Synthetic oligonucleotide
  Mitotic kinesin microtubule-associated protein Eg5 (Kif11) siRNA
atataaatcaatccctgttgact

SEQ ID NO: 1132 - DNA, 23 bp, Artificial Sequence
  Description of Artificial Sequence: Synthetic oligonucleotide
  Mitotic kinesin microtubule-associated protein Eg5 (Kif11) siRNA
tataaatcaatccctgttgactt

SEQ ID NO: 1133 - DNA, 23 bp, Artificial Sequence
  Description of Artificial Sequence: Synthetic oligonucleotide
  Mitotic kinesin microtubule-associated protein Eg5 (Kif11) siRNA
ataaatcaatccctgttgacttt

SEQ ID NO: 1134 - DNA, 23 bp, Artificial Sequence
  Description of Artificial Sequence: Synthetic oligonucleotide
  Mitotic kinesin microtubule-associated protein Eg5 (Kif11) siRNA
taaatcaatccctgttgactttg

SEQ ID NO: 1135 - DNA, 23 bp, Artificial Sequence
  Description of Artificial Sequence: Synthetic oligonucleotide
  Mitotic kinesin microtubule-associated protein Eg5 (Kif11) siRNA
aaatcaatccctgttgactttgg

SEQ ID NO: 1136 - DNA, 23 bp, Artificial Sequence
  Description of Artificial Sequence: Synthetic oligonucleotide
  Mitotic kinesin microtubule-associated protein Eg5 (Kif11) siRNA
aatcaatccctgttgactttggg

SEQ ID NO: 1137 - DNA, 23 bp, Artificial Sequence
  Description of Artificial Sequence: Synthetic oligonucleotide
  Mitotic kinesin microtubule-associated protein Eg5 (Kif11) siRNA
atcaatccctgttgactttggga

SEQ ID NO: 1138 - DNA, 23 bp, Artificial Sequence
  Description of Artificial Sequence: Synthetic oligonucleotide
  Mitotic kinesin microtubule-associated protein Eg5 (Kif11) siRNA
tcaatccctgttgactttgggaa

SEQ ID NO: 1139 - DNA, 23 bp, Artificial Sequence
  Description of Artificial Sequence: Synthetic oligonucleotide
  Mitotic kinesin microtubule-associated protein Eg5 (Kif11) siRNA
caatccctgttgactttgggaag

SEQ ID NO: 1140 - DNA, 23 bp, Artificial Sequence
  Description of Artificial Sequence: Synthetic oligonucleotide
  Mitotic kinesin microtubule-associated protein Eg5 (Kif11) siRNA
aatccctgttgactttgggaagg

SEQ ID NO: 1141 - DNA, 23 bp, Artificial Sequence
  Description of Artificial Sequence: Synthetic oligonucleotide
  Mitotic kinesin microtubule-associated protein Eg5 (Kif11) siRNA
atccctgttgactttgggaaggg

SEQ ID NO: 1142 - DNA, 23 bp, Artificial Sequence
  Description of Artificial Sequence: Synthetic oligonucleotide
  Mitotic kinesin microtubule-associated protein Eg5 (Kif11) siRNA
tccctgttgactttgggaagggt

SEQ ID NO: 1143 - DNA, 23 bp, Artificial Sequence
  Description of Artificial Sequence: Synthetic oligonucleotide
  Mitotic kinesin microtubule-associated protein Eg5 (Kif11) siRNA
ccctgttgactttgggaagggtc

SEQ ID NO: 1144 - DNA, 23 bp, Artificial Sequence
  Description of Artificial Sequence: Synthetic oligonucleotide
  Mitotic kinesin microtubule-associated protein Eg5 (Kif11) siRNA
cctgttgactttgggaagggtca

SEQ ID NO: 1145 - DNA, 23 bp, Artificial Sequence
  Description of Artificial Sequence: Synthetic oligonucleotide
  Mitotic kinesin microtubule-associated protein Eg5 (Kif11) siRNA
ctgttgactttgggaagggtcat

SEQ ID NO: 1146 - DNA, 23 bp, Artificial Sequence
  Description of Artificial Sequence: Synthetic oligonucleotide
  Mitotic kinesin microtubule-associated protein Eg5 (Kif11) siRNA
tgttgactttgggaagggtcatt

SEQ ID NO: 1147 - DNA, 23 bp, Artificial Sequence
  Description of Artificial Sequence: Synthetic oligonucleotide
  Mitotic kinesin microtubule-associated protein Eg5 (Kif11) siRNA
gttgactttgggaagggtcatta

SEQ ID NO: 1148 - DNA, 23 bp, Artificial Sequence
  Description of Artificial Sequence: Synthetic oligonucleotide
  Mitotic kinesin microtubule-associated protein Eg5 (Kif11) siRNA
ttgactttgggaagggtcattac

SEQ ID NO: 1149 - DNA, 23 bp, Artificial Sequence
  Description of Artificial Sequence: Synthetic oligonucleotide
  Mitotic kinesin microtubule-associated protein Eg5 (Kif11) siRNA
tgactttgggaagggtcattact

SEQ ID NO: 1150 - DNA, 23 bp, Artificial Sequence
  Description of Artificial Sequence: Synthetic oligonucleotide
  Mitotic kinesin microtubule-associated protein Eg5 (Kif11) siRNA
gactttgggaagggtcattactg

SEQ ID NO: 1151 - DNA, 23 bp, Artificial Sequence
  Description of Artificial Sequence: Synthetic oligonucleotide
  Mitotic kinesin microtubule-associated protein Eg5 (Kif11) siRNA
actttgggaagggtcattactgc

SEQ ID NO: 1152 - DNA, 23 bp, Artificial Sequence
  Description of Artificial Sequence: Synthetic oligonucleotide
  Mitotic kinesin microtubule-associated protein Eg5 (Kif11) siRNA
ctttgggaagggtcattactgcc

SEQ ID NO: 1153 - DNA, 23 bp, Artificial Sequence
  Description of Artificial Sequence: Synthetic oligonucleotide
  Mitotic kinesin microtubule-associated protein Eg5 (Kif11) siRNA
tttgggaagggtcattactgccc

SEQ ID NO: 1154 - DNA, 23 bp, Artificial Sequence
  Description of Artificial Sequence: Synthetic oligonucleotide
  Mitotic kinesin microtubule-associated protein Eg5 (Kif11) siRNA
ttgggaagggtcattactgccct

SEQ ID NO: 1155 - DNA, 23 bp, Artificial Sequence
  Description of Artificial Sequence: Synthetic oligonucleotide
  Mitotic kinesin microtubule-associated protein Eg5 (Kif11) siRNA
tgggaagggtcattactgccctt

SEQ ID NO: 1156 - DNA, 23 bp, Artificial Sequence
  Description of Artificial Sequence: Synthetic oligonucleotide
  Mitotic kinesin microtubule-associated protein Eg5 (Kif11) siRNA
gggaagggtcattactgcccttg

SEQ ID NO: 1157 - DNA, 23 bp, Artificial Sequence
  Description of Artificial Sequence: Synthetic oligonucleotide
  Mitotic kinesin microtubule-associated protein Eg5 (Kif11) siRNA
ggaagggtcattactgcccttgt

SEQ ID NO: 1158 - DNA, 23 bp, Artificial Sequence
  Description of Artificial Sequence: Synthetic oligonucleotide
  Mitotic kinesin microtubule-associated protein Eg5 (Kif11) siRNA
gaagggtcattactgcccttgta

SEQ ID NO: 1159 - DNA, 23 bp, Artificial Sequence
  Description of Artificial Sequence: Synthetic oligonucleotide
  Mitotic kinesin microtubule-associated protein Eg5 (Kif11) siRNA
aagggtcattactgcccttgtag

SEQ ID NO: 1160 - DNA, 23 bp, Artificial Sequence
  Description of Artificial Sequence: Synthetic oligonucleotide
  Mitotic kinesin microtubule-associated protein Eg5 (Kif11) siRNA
agggtcattactgcccttgtaga

SEQ ID NO: 1161 - DNA, 23 bp, Artificial Sequence
  Description of Artificial Sequence: Synthetic oligonucleotide
  Mitotic kinesin microtubule-associated protein Eg5 (Kif11) siRNA
gggtcattactgcccttgtagaa

SEQ ID NO: 1162 - DNA, 23 bp, Artificial Sequence
  Description of Artificial Sequence: Synthetic oligonucleotide
  Mitotic kinesin microtubule-associated protein Eg5 (Kif11) siRNA
ggtcattactgcccttgtagaaa

SEQ ID NO: 1163 - DNA, 23 bp, Artificial Sequence
  Description of Artificial Sequence: Synthetic oligonucleotide
  Mitotic kinesin microtubule-associated protein Eg5 (Kif11) siRNA
gtcattactgcccttgtagaaag

SEQ ID NO: 1164 - DNA, 23 bp, Artificial Sequence
  Description of Artificial Sequence: Synthetic oligonucleotide
  Mitotic kinesin microtubule-associated protein Eg5 (Kif11) siRNA
tcattactgcccttgtagaaaga

SEQ ID NO: 1165 - DNA, 23 bp, Artificial Sequence
  Description of Artificial Sequence: Synthetic oligonucleotide
  Mitotic kinesin microtubule-associated protein Eg5 (Kif11) siRNA
cattactgcccttgtagaaagaa

SEQ ID NO: 1166 - DNA, 23 bp, Artificial Sequence
  Description of Artificial Sequence: Synthetic oligonucleotide
  Mitotic kinesin microtubule-associated protein Eg5 (Kif11) siRNA
attactgcccttgtagaaagaac

SEQ ID NO: 1167 - DNA, 23 bp, Artificial Sequence
  Description of Artificial Sequence: Synthetic oligonucleotide
  Mitotic kinesin microtubule-associated protein Eg5 (Kif11) siRNA
ttactgcccttgtagaaagaaca

SEQ ID NO: 1168 - DNA, 23 bp, Artificial Sequence
  Description of Artificial Sequence: Synthetic oligonucleotide
  Mitotic kinesin microtubule-associated protein Eg5 (Kif11) siRNA
tactgcccttgtagaaagaacac

SEQ ID NO: 1169 - DNA, 23 bp, Artificial Sequence
  Description of Artificial Sequence: Synthetic oligonucleotide
  Mitotic kinesin microtubule-associated protein Eg5 (Kif11) siRNA
actgcccttgtagaaagaacacc

SEQ ID NO: 1170 - DNA, 23 bp, Artificial Sequence
  Description of Artificial Sequence: Synthetic oligonucleotide
  Mitotic kinesin microtubule-associated protein Eg5 (Kif11) siRNA
ctgcccttgtagaaagaacacct

SEQ ID NO: 1171 - DNA, 23 bp, Artificial Sequence
  Description of Artificial Sequence: Synthetic oligonucleotide
  Mitotic kinesin microtubule-associated protein Eg5 (Kif11) siRNA
tgcccttgtagaaagaacacctc

SEQ ID NO: 1172 - DNA, 23 bp, Artificial Sequence
  Description of Artificial Sequence: Synthetic oligonucleotide
  Mitotic kinesin microtubule-associated protein Eg5 (Kif11) siRNA
gcccttgtagaaagaacacctca

SEQ ID NO: 1173 - DNA, 23 bp, Artificial Sequence
  Description of Artificial Sequence: Synthetic oligonucleotide
  Mitotic kinesin microtubule-associated protein Eg5 (Kif11) siRNA
cccttgtagaaagaacacctcat

SEQ ID NO: 1174 - DNA, 23 bp, Artificial Sequence
  Description of Artificial Sequence: Synthetic oligonucleotide
  Mitotic kinesin microtubule-associated protein Eg5 (Kif11) siRNA
ccttgtagaaagaacacctcatg

SEQ ID NO: 1175 - DNA, 23 bp, Artificial Sequence
  Description of Artificial Sequence: Synthetic oligonucleotide
  Mitotic kinesin microtubule-associated protein Eg5 (Kif11) siRNA
cttgtagaaagaacacctcatgt

SEQ ID NO: 1176 - DNA, 23 bp, Artificial Sequence
  Description of Artificial Sequence: Synthetic oligonucleotide
  Mitotic kinesin microtubule-associated protein Eg5 (Kif11) siRNA
ttgtagaaagaacacctcatgtt

SEQ ID NO: 1177 - DNA, 23 bp, Artificial Sequence
  Description of Artificial Sequence: Synthetic oligonucleotide
  Mitotic kinesin microtubule-associated protein Eg5 (Kif11) siRNA
tgtagaaagaacacctcatgttc

SEQ ID NO: 1178 - DNA, 23 bp, Artificial Sequence
  Description of Artificial Sequence: Synthetic oligonucleotide
  Mitotic kinesin microtubule-associated protein Eg5 (Kif11) siRNA
gtagaaagaacacctcatgttcc

SEQ ID NO: 1179 - DNA, 23 bp, Artificial Sequence
  Description of Artificial Sequence: Synthetic oligonucleotide
  Mitotic kinesin microtubule-associated protein Eg5 (Kif11) siRNA
tagaaagaacacctcatgttcct

SEQ ID NO: 1180 - DNA, 23 bp, Artificial Sequence
  Description of Artificial Sequence: Synthetic oligonucleotide
  Mitotic kinesin microtubule-associated protein Eg5 (Kif11) siRNA
agaaagaacacctcatgttcctt

SEQ ID NO: 1181 - DNA, 23 bp, Artificial Sequence
  Description of Artificial Sequence: Synthetic oligonucleotide
  Mitotic kinesin microtubule-associated protein Eg5 (Kif11) siRNA
gaaagaacacctcatgttcctta

SEQ ID NO: 1182 - DNA, 23 bp, Artificial Sequence
  Description of Artificial Sequence: Synthetic oligonucleotide
  Mitotic kinesin microtubule-associated protein Eg5 (Kif11) siRNA
aaagaacacctcatgttccttat

SEQ ID NO: 1183 - DNA, 23 bp, Artificial Sequence
  Description of Artificial Sequence: Synthetic oligonucleotide
  Mitotic kinesin microtubule-associated protein Eg5 (Kif11) siRNA
aagaacacctcatgttccttatc

SEQ ID NO: 1184 - DNA, 23 bp, Artificial Sequence
  Description of Artificial Sequence: Synthetic oligonucleotide
  Mitotic kinesin microtubule-associated protein Eg5 (Kif11) siRNA
agaacacctcatgttccttatcg

SEQ ID NO: 1185 - DNA, 23 bp, Artificial Sequence
  Description of Artificial Sequence: Synthetic oligonucleotide
  Mitotic kinesin microtubule-associated protein Eg5 (Kif11) siRNA
gaacacctcatgttccttatcga

SEQ ID NO: 1186 - DNA, 23 bp, Artificial Sequence
  Description of Artificial Sequence: Synthetic oligonucleotide
  Mitotic kinesin microtubule-associated protein Eg5 (Kif11) siRNA
aacacctcatgttccttatcgag

SEQ ID NO: 1187 - DNA, 23 bp, Artificial Sequence
  Description of Artificial Sequence: Synthetic oligonucleotide
  Mitotic kinesin microtubule-associated protein Eg5 (Kif11) siRNA
acacctcatgttccttatcgaga

SEQ ID NO: 1188 - DNA, 23 bp, Artificial Sequence
  Description of Artificial Sequence: Synthetic oligonucleotide
  Mitotic kinesin microtubule-associated protein Eg5 (Kif11) siRNA
cacctcatgttccttatcgagaa

SEQ ID NO: 1189 - DNA, 23 bp, Artificial Sequence
  Description of Artificial Sequence: Synthetic oligonucleotide
  Mitotic kinesin microtubule-associated protein Eg5 (Kif11) siRNA
acctcatgttccttatcgagaat

SEQ ID NO: 1190 - DNA, 23 bp, Artificial Sequence
  Description of Artificial Sequence: Synthetic oligonucleotide
  Mitotic kinesin microtubule-associated protein Eg5 (Kif11) siRNA
cctcatgttccttatcgagaatc

SEQ ID NO: 1191 - DNA, 23 bp, Artificial Sequence
  Description of Artificial Sequence: Synthetic oligonucleotide
  Mitotic kinesin microtubule-associated protein Eg5 (Kif11) siRNA
ctcatgttccttatcgagaatct

SEQ ID NO: 1192 - DNA, 23 bp, Artificial Sequence
  Description of Artificial Sequence: Synthetic oligonucleotide
  Mitotic kinesin microtubule-associated protein Eg5 (Kif11) siRNA
tcatgttccttatcgagaatcta

SEQ ID NO: 1193 - DNA, 23 bp, Artificial Sequence
  Description of Artificial Sequence: Synthetic oligonucleotide
  Mitotic kinesin microtubule-associated protein Eg5 (Kif11) siRNA
catgttccttatcgagaatctaa

SEQ ID NO: 1194 - DNA, 23 bp, Artificial Sequence
  Description of Artificial Sequence: Synthetic oligonucleotide
  Mitotic kinesin microtubule-associated protein Eg5 (Kif11) siRNA
atgttccttatcgagaatctaaa

SEQ ID NO: 1195 - DNA, 23 bp, Artificial Sequence
  Description of Artificial Sequence: Synthetic oligonucleotide
  Mitotic kinesin microtubule-associated protein Eg5 (Kif11) siRNA
tgttccttatcgagaatctaaac

SEQ ID NO: 1196 - DNA, 23 bp, Artificial Sequence
  Description of Artificial Sequence: Synthetic oligonucleotide
  Mitotic kinesin microtubule-associated protein Eg5 (Kif11) siRNA
gttccttatcgagaatctaaact

SEQ ID NO: 1197 - DNA, 23 bp, Artificial Sequence
  Description of Artificial Sequence: Synthetic oligonucleotide
  Mitotic kinesin microtubule-associated protein Eg5 (Kif11) siRNA
ttccttatcgagaatctaaacta

SEQ ID NO: 1198 - DNA, 23 bp, Artificial Sequence
  Description of Artificial Sequence: Synthetic oligonucleotide
  Mitotic kinesin microtubule-associated protein Eg5 (Kif11) siRNA
tccttatcgagaatctaaactaa

SEQ ID NO: 1199 - DNA, 23 bp, Artificial Sequence
  Description of Artificial Sequence: Synthetic oligonucleotide
  Mitotic kinesin microtubule-associated protein Eg5 (Kif11) siRNA
ccttatcgagaatctaaactaac

SEQ ID NO: 1200 - DNA, 23 bp, Artificial Sequence
  Description of Artificial Sequence: Synthetic oligonucleotide
  Mitotic kinesin microtubule-associated protein Eg5 (Kif11) siRNA
cttatcgagaatctaaactaact

SEQ ID NO: 1201 - DNA, 23 bp, Artificial Sequence
  Description of Artificial Sequence: Synthetic oligonucleotide
  Mitotic kinesin microtubule-associated protein Eg5 (Kif11) siRNA
ttatcgagaatctaaactaacta

SEQ ID NO: 1202 - DNA, 23 bp, Artificial Sequence
  Description of Artificial Sequence: Synthetic oligonucleotide
  Mitotic kinesin microtubule-associated protein Eg5 (Kif11) siRNA
tatcgagaatctaaactaactag

SEQ ID NO: 1203 - DNA, 23 bp, Artificial Sequence
  Description of Artificial Sequence: Synthetic oligonucleotide
  Mitotic kinesin microtubule-associated protein Eg5 (Kif11) siRNA
atcgagaatctaaactaactaga

SEQ ID NO: 1204 - DNA, 23 bp, Artificial Sequence
  Description of Artificial Sequence: Synthetic oligonucleotide
  Mitotic kinesin microtubule-associated protein Eg5 (Kif11) siRNA
tcgagaatctaaactaactagaa

SEQ ID NO: 1205 - DNA, 23 bp, Artificial Sequence
  Description of Artificial Sequence: Synthetic oligonucleotide
  Mitotic kinesin microtubule-associated protein Eg5 (Kif11) siRNA
cgagaatctaaactaactagaat

SEQ ID NO: 1206 - DNA, 23 bp, Artificial Sequence
  Description of Artificial Sequence: Synthetic oligonucleotide
  Mitotic kinesin microtubule-associated protein Eg5 (Kif11) siRNA
gagaatctaaactaactagaatc

SEQ ID NO: 1207 - DNA, 23 bp, Artificial Sequence
  Description of Artificial Sequence: Synthetic oligonucleotide
  Mitotic kinesin microtubule-associated protein Eg5 (Kif11) siRNA
agaatctaaactaactagaatcc

SEQ ID NO: 1208 - DNA, 23 bp, Artificial Sequence
  Description of Artificial Sequence: Synthetic oligonucleotide
  Mitotic kinesin microtubule-associated protein Eg5 (Kif11) siRNA
gaatctaaactaactagaatcct

SEQ ID NO: 1209 - DNA, 23 bp, Artificial Sequence
  Description of Artificial Sequence: Synthetic oligonucleotide
  Mitotic kinesin microtubule-associated protein Eg5 (Kif11) siRNA
aatctaaactaactagaatcctc

SEQ ID NO: 1210 - DNA, 23 bp, Artificial Sequence
  Description of Artificial Sequence: Synthetic oligonucleotide
  Mitotic kinesin microtubule-associated protein Eg5 (Kif11) siRNA
atctaaactaactagaatcctcc

SEQ ID NO: 1211 - DNA, 23 bp, Artificial Sequence
  Description of Artificial Sequence: Synthetic oligonucleotide
  Mitotic kinesin microtubule-associated protein Eg5 (Kif11) siRNA
tctaaactaactagaatcctcca

SEQ ID NO: 1212 - DNA, 23 bp, Artificial Sequence
  Description of Artificial Sequence: Synthetic oligonucleotide
  Mitotic kinesin microtubule-associated protein Eg5 (Kif11) siRNA
ctaaactaactagaatcctccag

SEQ ID NO: 1213 - DNA, 23 bp, Artificial Sequence
  Description of Artificial Sequence: Synthetic oligonucleotide
  Mitotic kinesin microtubule-associated protein Eg5 (Kif11) siRNA
taaactaactagaatcctccagg

SEQ ID NO: 1214 - DNA, 23 bp, Artificial Sequence
  Description of Artificial Sequence: Synthetic oligonucleotide
  Mitotic kinesin microtubule-associated protein Eg5 (Kif11) siRNA
aaactaactagaatcctccagga

SEQ ID NO: 1215 - DNA, 23 bp, Artificial Sequence
  Description of Artificial Sequence: Synthetic oligonucleotide
  Mitotic kinesin microtubule-associated protein Eg5 (Kif11) siRNA
aactaactagaatcctccaggat

SEQ ID NO: 1216 - DNA, 23 bp, Artificial Sequence
  Description of Artificial Sequence: Synthetic oligonucleotide
  Mitotic kinesin microtubule-associated protein Eg5 (Kif11) siRNA
actaactagaatcctccaggatt

SEQ ID NO: 1217 - DNA, 23 bp, Artificial Sequence
  Description of Artificial Sequence: Synthetic oligonucleotide
  Mitotic kinesin microtubule-associated protein Eg5 (Kif11) siRNA
ctaactagaatcctccaggattc

SEQ ID NO: 1218 - DNA, 23 bp, Artificial Sequence
  Description of Artificial Sequence: Synthetic oligonucleotide
  Mitotic kinesin microtubule-associated protein Eg5 (Kif11) siRNA
taactagaatcctccaggattct

SEQ ID NO: 1219 - DNA, 23 bp, Artificial Sequence
  Description of Artificial Sequence: Synthetic oligonucleotide
  Mitotic kinesin microtubule-associated protein Eg5 (Kif11) siRNA
aactagaatcctccaggattctc

SEQ ID NO: 1220 - DNA, 23 bp, Artificial Sequence
  Description of Artificial Sequence: Synthetic oligonucleotide
  Mitotic kinesin microtubule-associated protein Eg5 (Kif11) siRNA
actagaatcctccaggattctct

SEQ ID NO: 1221 - DNA, 23 bp, Artificial Sequence
  Description of Artificial Sequence: Synthetic oligonucleotide
  Mitotic kinesin microtubule-associated protein Eg5 (Kif11) siRNA
ctagaatcctccaggattctctt

SEQ ID NO: 1222 - DNA, 23 bp, Artificial Sequence
  Description of Artificial Sequence: Synthetic oligonucleotide
  Mitotic kinesin microtubule-associated protein Eg5 (Kif11) siRNA
tagaatcctccaggattctcttg

SEQ ID NO: 1223 - DNA, 23 bp, Artificial Sequence
  Description of Artificial Sequence: Synthetic oligonucleotide
  Mitotic kinesin microtubule-associated protein Eg5 (Kif11) siRNA
agaatcctccaggattctcttgg

SEQ ID NO: 1224 - DNA, 23 bp, Artificial Sequence
  Description of Artificial Sequence: Synthetic oligonucleotide
  Mitotic kinesin microtubule-associated protein Eg5 (Kif11) siRNA
gaatcctccaggattctcttgga

SEQ ID NO: 1225 - DNA, 23 bp, Artificial Sequence
  Description of Artificial Sequence: Synthetic oligonucleotide
  Mitotic kinesin microtubule-associated protein Eg5 (Kif11) siRNA
aatcctccaggattctcttggag

SEQ ID NO: 1226 - DNA, 23 bp, Artificial Sequence
  Description of Artificial Sequence: Synthetic oligonucleotide
  Mitotic kinesin microtubule-associated protein Eg5 (Kif11) siRNA
atcctccaggattctcttggagg

SEQ ID NO: 1227 - DNA, 23 bp, Artificial Sequence
  Description of Artificial Sequence: Synthetic oligonucleotide
  Mitotic kinesin microtubule-associated protein Eg5 (Kif11) siRNA
tcctccaggattctcttggaggg

SEQ ID NO: 1228 - DNA, 23 bp, Artificial Sequence
  Description of Artificial Sequence: Synthetic oligonucleotide
  Mitotic kinesin microtubule-associated protein Eg5 (Kif11) siRNA
cctccaggattctcttggagggc

SEQ ID NO: 1229 - DNA, 23 bp, Artificial Sequence
  Description of Artificial Sequence: Synthetic oligonucleotide
  Mitotic kinesin microtubule-associated protein Eg5 (Kif11) siRNA
ctccaggattctcttggagggcg

SEQ ID NO: 1230 - DNA, 23 bp, Artificial Sequence
  Description of Artificial Sequence: Synthetic oligonucleotide
  Mitotic kinesin microtubule-associated protein Eg5 (Kif11) siRNA
tccaggattctcttggagggcgt

SEQ ID NO: 1231 - DNA, 23 bp, Artificial Sequence
  Description of Artificial Sequence: Synthetic oligonucleotide
  Mitotic kinesin microtubule-associated protein Eg5 (Kif11) siRNA
ccaggattctcttggagggcgta

SEQ ID NO: 1232 - DNA, 23 bp, Artificial Sequence
  Description of Artificial Sequence: Synthetic oligonucleotide
  Mitotic kinesin microtubule-associated protein Eg5 (Kif11) siRNA
caggattctcttggagggcgtac

SEQ ID NO: 1233 - DNA, 23 bp, Artificial Sequence
  Description of Artificial Sequence: Synthetic oligonucleotide
  Mitotic kinesin microtubule-associated protein Eg5 (Kif11) siRNA
aggattctcttggagggcgtaca

SEQ ID NO: 1234 - DNA, 23 bp, Artificial Sequence
  Description of Artificial Sequence: Synthetic oligonucleotide
  Mitotic kinesin microtubule-associated protein Eg5 (Kif11) siRNA
ggattctcttggagggcgtacaa

SEQ ID NO: 1235 - DNA, 23 bp, Artificial Sequence
  Description of Artificial Sequence: Synthetic oligonucleotide
  Mitotic kinesin microtubule-associated protein Eg5 (Kif11) siRNA
gattctcttggagggcgtacaag

SEQ ID NO: 1236 - DNA, 23 bp, Artificial Sequence
  Description of Artificial Sequence: Synthetic oligonucleotide
  Mitotic kinesin microtubule-associated protein Eg5 (Kif11) siRNA
attctcttggagggcgtacaaga

SEQ ID NO: 1237 - DNA, 23 bp, Artificial Sequence
  Description of Artificial Sequence: Synthetic oligonucleotide
  Mitotic kinesin microtubule-associated protein Eg5 (Kif11) siRNA
ttctcttggagggcgtacaagaa

SEQ ID NO: 1238 - DNA, 23 bp, Artificial Sequence
  Description of Artificial Sequence: Synthetic oligonucleotide
  Mitotic kinesin microtubule-associated protein Eg5 (Kif11) siRNA
tctcttggagggcgtacaagaac

SEQ ID NO: 1239 - DNA, 23 bp, Artificial Sequence
  Description of Artificial Sequence: Synthetic oligonucleotide
  Mitotic kinesin microtubule-associated protein Eg5 (Kif11) siRNA
ctcttggagggcgtacaagaaca

SEQ ID NO: 1240 - DNA, 23 bp, Artificial Sequence
  Description of Artificial Sequence: Synthetic oligonucleotide
  Mitotic kinesin microtubule-associated protein Eg5 (Kif11) siRNA
tcttggagggcgtacaagaacat

SEQ ID NO: 1241 - DNA, 23 bp, Artificial Sequence
  Description of Artificial Sequence: Synthetic oligonucleotide
  Mitotic kinesin microtubule-associated protein Eg5 (Kif11) siRNA
cttggagggcgtacaagaacatc

SEQ ID NO: 1242 - DNA, 23 bp, Artificial Sequence
  Description of Artificial Sequence: Synthetic oligonucleotide
  Mitotic kinesin microtubule-associated protein Eg5 (Kif11) siRNA
ttggagggcgtacaagaacatct

SEQ ID NO: 1243 - DNA, 23 bp, Artificial Sequence
  Description of Artificial Sequence: Synthetic oligonucleotide
  Mitotic kinesin microtubule-associated protein Eg5 (Kif11) siRNA
tggagggcgtacaagaacatcta

SEQ ID NO: 1244 - DNA, 23 bp, Artificial Sequence
  Description of Artificial Sequence: Synthetic oligonucleotide
  Mitotic kinesin microtubule-associated protein Eg5 (Kif11) siRNA
ggagggcgtacaagaacatctat

SEQ ID NO: 1245 - DNA, 23 bp, Artificial Sequence
  Description of Artificial Sequence: Synthetic oligonucleotide
  Mitotic kinesin microtubule-associated protein Eg5 (Kif11) siRNA
gagggcgtacaagaacatctata

SEQ ID NO: 1246 - DNA, 23 bp, Artificial Sequence
  Description of Artificial Sequence: Synthetic oligonucleotide
  Mitotic kinesin microtubule-associated protein Eg5 (Kif11) siRNA
agggcgtacaagaacatctataa

SEQ ID NO: 1247 - DNA, 23 bp, Artificial Sequence
  Description of Artificial Sequence: Synthetic oligonucleotide
  Mitotic kinesin microtubule-associated protein Eg5 (Kif11) siRNA
gggcgtacaagaacatctataat

SEQ ID NO: 1248 - DNA, 23 bp, Artificial Sequence
  Description of Artificial Sequence: Synthetic oligonucleotide
  Mitotic kinesin microtubule-associated protein Eg5 (Kif11) siRNA
ggcgtacaagaacatctataatt

SEQ ID NO: 1249 - DNA, 23 bp, Artificial Sequence
  Description of Artificial Sequence: Synthetic oligonucleotide
  Mitotic kinesin microtubule-associated protein Eg5 (Kif11) siRNA
gcgtacaagaacatctataattg

SEQ ID NO: 1250 - DNA, 23 bp, Artificial Sequence
  Description of Artificial Sequence: Synthetic oligonucleotide
  Mitotic kinesin microtubule-associated protein Eg5 (Kif11) siRNA
cgtacaagaacatctataattgc

SEQ ID NO: 1251 - DNA, 23 bp, Artificial Sequence
  Description of Artificial Sequence: Synthetic oligonucleotide
  Mitotic kinesin microtubule-associated protein Eg5 (Kif11) siRNA
gtacaagaacatctataattgca

SEQ ID NO: 1252 - DNA, 23 bp, Artificial Sequence
  Description of Artificial Sequence: Synthetic oligonucleotide
  Mitotic kinesin microtubule-associated protein Eg5 (Kif11) siRNA
tacaagaacatctataattgcaa

SEQ ID NO: 1253 - DNA, 23 bp, Artificial Sequence
  Description of Artificial Sequence: Synthetic oligonucleotide
  Mitotic kinesin microtubule-associated protein Eg5 (Kif11) siRNA
acaagaacatctataattgcaac

SEQ ID NO: 1254 - DNA, 23 bp, Artificial Sequence
  Description of Artificial Sequence: Synthetic oligonucleotide
  Mitotic kinesin microtubule-associated protein Eg5 (Kif11) siRNA
caagaacatctataattgcaaca

SEQ ID NO: 1255 - DNA, 23 bp, Artificial Sequence
  Description of Artificial Sequence: Synthetic oligonucleotide
  Mitotic kinesin microtubule-associated protein Eg5 (Kif11) siRNA
aagaacatctataattgcaacaa

SEQ ID NO: 1256 - DNA, 23 bp, Artificial Sequence
  Description of Artificial Sequence: Synthetic oligonucleotide
  Mitotic kinesin microtubule-associated protein Eg5 (Kif11) siRNA
agaacatctataattgcaacaat

SEQ ID NO: 1257 - DNA, 23 bp, Artificial Sequence
  Description of Artificial Sequence: Synthetic oligonucleotide
  Mitotic kinesin microtubule-associated protein Eg5 (Kif11) siRNA
gaacatctataattgcaacaatt

SEQ ID NO: 1258 - DNA, 23 bp, Artificial Sequence
  Description of Artificial Sequence: Synthetic oligonucleotide
  Mitotic kinesin microtubule-associated protein Eg5 (Kif11) siRNA
aacatctataattgcaacaattt

SEQ ID NO: 1259 - DNA, 23 bp, Artificial Sequence
  Description of Artificial Sequence: Synthetic oligonucleotide
  Mitotic kinesin microtubule-associated protein Eg5 (Kif11) siRNA
acatctataattgcaacaatttc

SEQ ID NO: 1260 - DNA, 23 bp, Artificial Sequence
  Description of Artificial Sequence: Synthetic oligonucleotide
  Mitotic kinesin microtubule-associated protein Eg5 (Kif11) siRNA
catctataattgcaacaatttct

SEQ ID NO: 1261 - DNA, 23 bp, Artificial Sequence
  Description of Artificial Sequence: Synthetic oligonucleotide
  Mitotic kinesin microtubule-associated protein Eg5 (Kif11) siRNA
atctataattgcaacaatttctc

SEQ ID NO: 1262 - DNA, 23 bp, Artificial Sequence
  Description of Artificial Sequence: Synthetic oligonucleotide
  Mitotic kinesin microtubule-associated protein Eg5 (Kif11) siRNA
tctataattgcaacaatttctcc

SEQ ID NO: 1263 - DNA, 23 bp, Artificial Sequence
  Description of Artificial Sequence: Synthetic oligonucleotide
  Mitotic kinesin microtubule-associated protein Eg5 (Kif11) siRNA
ctataattgcaacaatttctcct

SEQ ID NO: 1264 - DNA, 23 bp, Artificial Sequence
  Description of Artificial Sequence: Synthetic oligonucleotide
  Mitotic kinesin microtubule-associated protein Eg5 (Kif11) siRNA
tataattgcaacaatttctcctg

SEQ ID NO: 1265 - DNA, 23 bp, Artificial Sequence
  Description of Artificial Sequence: Synthetic oligonucleotide
  Mitotic kinesin microtubule-associated protein Eg5 (Kif11) siRNA
ataattgcaacaatttctcctgc

SEQ ID NO: 1266 - DNA, 23 bp, Artificial Sequence
  Description of Artificial Sequence: Synthetic oligonucleotide
  Mitotic kinesin microtubule-associated protein Eg5 (Kif11) siRNA
taattgcaacaatttctcctgca

SEQ ID NO: 1267 - DNA, 23 bp, Artificial Sequence
  Description of Artificial Sequence: Synthetic oligonucleotide
  Mitotic kinesin microtubule-associated protein Eg5 (Kif11) siRNA
aattgcaacaatttctcctgcat

SEQ ID NO: 1268 - DNA, 23 bp, Artificial Sequence
  Description of Artificial Sequence: Synthetic oligonucleotide
  Mitotic kinesin microtubule-associated protein Eg5 (Kif11) siRNA
attgcaacaatttctcctgcatc

SEQ ID NO: 1269 - DNA, 23 bp, Artificial Sequence
  Description of Artificial Sequence: Synthetic oligonucleotide
  Mitotic kinesin microtubule-associated protein Eg5 (Kif11) siRNA
ttgcaacaatttctcctgcatct

SEQ ID NO: 1270 - DNA, 23 bp, Artificial Sequence
  Description of Artificial Sequence: Synthetic oligonucleotide
  Mitotic kinesin microtubule-associated protein Eg5 (Kif11) siRNA
tgcaacaatttctcctgcatctc

SEQ ID NO: 1271 - DNA, 23 bp, Artificial Sequence
  Description of Artificial Sequence: Synthetic oligonucleotide
  Mitotic kinesin microtubule-associated protein Eg5 (Kif11) siRNA
gcaacaatttctcctgcatctct

SEQ ID NO: 1272 - DNA, 23 bp, Artificial Sequence
  Description of Artificial Sequence: Synthetic oligonucleotide
  Mitotic kinesin microtubule-associated protein Eg5 (Kif11) siRNA
caacaatttctcctgcatctctc

SEQ ID NO: 1273 - DNA, 23 bp, Artificial Sequence
  Description of Artificial Sequence: Synthetic oligonucleotide
  Mitotic kinesin microtubule-associated protein Eg5 (Kif11) siRNA
aacaatttctcctgcatctctca

SEQ ID NO: 1274 - DNA, 23 bp, Artificial Sequence
  Description of Artificial Sequence: Synthetic oligonucleotide
  Mitotic kinesin microtubule-associated protein Eg5 (Kif11) siRNA
acaatttctcctgcatctctcaa

SEQ ID NO: 1275 - DNA, 23 bp, Artificial Sequence
  Description of Artificial Sequence: Synthetic oligonucleotide
  Mitotic kinesin microtubule-associated protein Eg5 (Kif11) siRNA
caatttctcctgcatctctcaat

SEQ ID NO: 1276 - DNA, 23 bp, Artificial Sequence
  Description of Artificial Sequence: Synthetic oligonucleotide
  Mitotic kinesin microtubule-associated protein Eg5 (Kif11) siRNA
aatttctcctgcatctctcaatc

SEQ ID NO: 1277 - DNA, 23 bp, Artificial Sequence
  Description of Artificial Sequence: Synthetic oligonucleotide
  Mitotic kinesin microtubule-associated protein Eg5 (Kif11) siRNA
atttctcctgcatctctcaatct

SEQ ID NO: 1278 - DNA, 23 bp, Artificial Sequence
  Description of Artificial Sequence: Synthetic oligonucleotide
  Mitotic kinesin microtubule-associated protein Eg5 (Kif11) siRNA
tttctcctgcatctctcaatctt

SEQ ID NO: 1279 - DNA, 23 bp, Artificial Sequence
  Description of Artificial Sequence: Synthetic oligonucleotide
  Mitotic kinesin microtubule-associated protein Eg5 (Kif11) siRNA
ttctcctgcatctctcaatcttg

SEQ ID NO: 1280 - DNA, 23 bp, Artificial Sequence
  Description of Artificial Sequence: Synthetic oligonucleotide
  Mitotic kinesin microtubule-associated protein Eg5 (Kif11) siRNA
tctcctgcatctctcaatcttga

SEQ ID NO: 1281 - DNA, 23 bp, Artificial Sequence
  Description of Artificial Sequence: Synthetic oligonucleotide
  Mitotic kinesin microtubule-associated protein Eg5 (Kif11) siRNA
ctcctgcatctctcaatcttgag

SEQ ID NO: 1282 - DNA, 23 bp, Artificial Sequence
  Description of Artificial Sequence: Synthetic oligonucleotide
  Mitotic kinesin microtubule-associated protein Eg5 (Kif11) siRNA
tcctgcatctctcaatcttgagg

SEQ ID NO: 1283 - DNA, 23 bp, Artificial Sequence
  Description of Artificial Sequence: Synthetic oligonucleotide
  Mitotic kinesin microtubule-associated protein Eg5 (Kif11) siRNA
cctgcatctctcaatcttgagga

SEQ ID NO: 1284 - DNA, 23 bp, Artificial Sequence
  Description of Artificial Sequence: Synthetic oligonucleotide
  Mitotic kinesin microtubule-associated protein Eg5 (Kif11) siRNA
ctgcatctctcaatcttgaggaa

SEQ ID NO: 1285 - DNA, 23 bp, Artificial Sequence
  Description of Artificial Sequence: Synthetic oligonucleotide
  Mitotic kinesin microtubule-associated protein Eg5 (Kif11) siRNA
tgcatctctcaatcttgaggaaa

SEQ ID NO: 1286 - DNA, 23 bp, Artificial Sequence
  Description of Artificial Sequence: Synthetic oligonucleotide
  Mitotic kinesin microtubule-associated protein Eg5 (Kif11) siRNA
gcatctctcaatcttgaggaaac

SEQ ID NO: 1287 - DNA, 23 bp, Artificial Sequence
  Description of Artificial Sequence: Synthetic oligonucleotide
  Mitotic kinesin microtubule-associated protein Eg5 (Kif11) siRNA
catctctcaatcttgaggaaact

SEQ ID NO: 1288 - DNA, 23 bp, Artificial Sequence
  Description of Artificial Sequence: Synthetic oligonucleotide
  Mitotic kinesin microtubule-associated protein Eg5 (Kif11) siRNA
atctctcaatcttgaggaaactc

SEQ ID NO: 1289 - DNA, 23 bp, Artificial Sequence
  Description of Artificial Sequence: Synthetic oligonucleotide
  Mitotic kinesin microtubule-associated protein Eg5 (Kif11) siRNA
tctctcaatcttgaggaaactct

SEQ ID NO: 1290 - DNA, 23 bp, Artificial Sequence
  Description of Artificial Sequence: Synthetic oligonucleotide
  Mitotic kinesin microtubule-associated protein Eg5 (Kif11) siRNA
ctctcaatcttgaggaaactctg

SEQ ID NO: 1291 - DNA, 23 bp, Artificial Sequence
  Description of Artificial Sequence: Synthetic oligonucleotide
  Mitotic kinesin microtubule-associated protein Eg5 (Kif11) siRNA
tctcaatcttgaggaaactctga

SEQ ID NO: 1292 - DNA, 23 bp, Artificial Sequence
  Description of Artificial Sequence: Synthetic oligonucleotide
  Mitotic kinesin microtubule-associated protein Eg5 (Kif11) siRNA
ctcaatcttgaggaaactctgag

SEQ ID NO: 1293 - DNA, 23 bp, Artificial Sequence
  Description of Artificial Sequence: Synthetic oligonucleotide
  Mitotic kinesin microtubule-associated protein Eg5 (Kif11) siRNA
tcaatcttgaggaaactctgagt

SEQ ID NO: 1294 - DNA, 23 bp, Artificial Sequence
  Description of Artificial Sequence: Synthetic oligonucleotide
  Mitotic kinesin microtubule-associated protein Eg5 (Kif11) siRNA
caatcttgaggaaactctgagta

SEQ ID NO: 1295 - DNA, 23 bp, Artificial Sequence
  Description of Artificial Sequence: Synthetic oligonucleotide
  Mitotic kinesin microtubule-associated protein Eg5 (Kif11) siRNA
aatcttgaggaaactctgagtac

SEQ ID NO: 1296 - DNA, 23 bp, Artificial Sequence
  Description of Artificial Sequence: Synthetic oligonucleotide
  Mitotic kinesin microtubule-associated protein Eg5 (Kif11) siRNA
atcttgaggaaactctgagtaca

SEQ ID NO: 1297 - DNA, 23 bp, Artificial Sequence
  Description of Artificial Sequence: Synthetic oligonucleotide
  Mitotic kinesin microtubule-associated protein Eg5 (Kif11) siRNA
tcttgaggaaactctgagtacat

SEQ ID NO: 1298 - DNA, 23 bp, Artificial Sequence
  Description of Artificial Sequence: Synthetic oligonucleotide
  Mitotic kinesin microtubule-associated protein Eg5 (Kif11) siRNA
cttgaggaaactctgagtacatt

SEQ ID NO: 1299 - DNA, 23 bp, Artificial Sequence
  Description of Artificial Sequence: Synthetic oligonucleotide
  Mitotic kinesin microtubule-associated protein Eg5 (Kif11) siRNA
ttgaggaaactctgagtacattg

SEQ ID NO: 1300 - DNA, 23 bp, Artificial Sequence
  Description of Artificial Sequence: Synthetic oligonucleotide
  Mitotic kinesin microtubule-associated protein Eg5 (Kif11) siRNA
tgaggaaactctgagtacattgg

SEQ ID NO: 1301 - DNA, 23 bp, Artificial Sequence
  Description of Artificial Sequence: Synthetic oligonucleotide
  Mitotic kinesin microtubule-associated protein Eg5 (Kif11) siRNA
gaggaaactctgagtacattgga

SEQ ID NO: 1302 - DNA, 23 bp, Artificial Sequence
  Description of Artificial Sequence: Synthetic oligonucleotide
  Mitotic kinesin microtubule-associated protein Eg5 (Kif11) siRNA
aggaaactctgagtacattggaa

SEQ ID NO: 1303 - DNA, 23 bp, Artificial Sequence
  Description of Artificial Sequence: Synthetic oligonucleotide
  Mitotic kinesin microtubule-associated protein Eg5 (Kif11) siRNA
ggaaactctgagtacattggaat

SEQ ID NO: 1304 - DNA, 23 bp, Artificial Sequence
  Description of Artificial Sequence: Synthetic oligonucleotide
  Mitotic kinesin microtubule-associated protein Eg5 (Kif11) siRNA
gaaactctgagtacattggaata

SEQ ID NO: 1305 - DNA, 23 bp, Artificial Sequence
  Description of Artificial Sequence: Synthetic oligonucleotide
  Mitotic kinesin microtubule-associated protein Eg5 (Kif11) siRNA
aaactctgagtacattggaatat

SEQ ID NO: 1306 - DNA, 23 bp, Artificial Sequence
  Description of Artificial Sequence: Synthetic oligonucleotide
  Mitotic kinesin microtubule-associated protein Eg5 (Kif11) siRNA
aactctgagtacattggaatatg

SEQ ID NO: 1307 - DNA, 23 bp, Artificial Sequence
  Description of Artificial Sequence: Synthetic oligonucleotide
  Mitotic kinesin microtubule-associated protein Eg5 (Kif11) siRNA
actctgagtacattggaatatgc

SEQ ID NO: 1308 - DNA, 23 bp, Artificial Sequence
  Description of Artificial Sequence: Synthetic oligonucleotide
  Mitotic kinesin microtubule-associated protein Eg5 (Kif11) siRNA
ctctgagtacattggaatatgct

SEQ ID NO: 1309 - DNA, 23 bp, Artificial Sequence
  Description of Artificial Sequence: Synthetic oligonucleotide
  Mitotic kinesin microtubule-associated protein Eg5 (Kif11) siRNA
tctgagtacattggaatatgctc

SEQ ID NO: 1310 - DNA, 23 bp, Artificial Sequence
  Description of Artificial Sequence: Synthetic oligonucleotide
  Mitotic kinesin microtubule-associated protein Eg5 (Kif11) siRNA
ctgagtacattggaatatgctca

SEQ ID NO: 1311 - DNA, 23 bp, Artificial Sequence
  Description of Artificial Sequence: Synthetic oligonucleotide
  Mitotic kinesin microtubule-associated protein Eg5 (Kif11) siRNA
tgagtacattggaatatgctcat

SEQ ID NO: 1312 - DNA, 23 bp, Artificial Sequence
  Description of Artificial Sequence: Synthetic oligonucleotide
  Mitotic kinesin microtubule-associated protein Eg5 (Kif11) siRNA
gagtacattggaatatgctcata

SEQ ID NO: 1313 - DNA, 23 bp, Artificial Sequence
  Description of Artificial Sequence: Synthetic oligonucleotide
  Mitotic kinesin microtubule-associated protein Eg5 (Kif11) siRNA
agtacattggaatatgctcatag

SEQ ID NO: 1314 - DNA, 23 bp, Artificial Sequence
  Description of Artificial Sequence: Synthetic oligonucleotide
  Mitotic kinesin microtubule-associated protein Eg5 (Kif11) siRNA
gtacattggaatatgctcataga

SEQ ID NO: 1315 - DNA, 23 bp, Artificial Sequence
  Description of Artificial Sequence: Synthetic oligonucleotide
  Mitotic kinesin microtubule-associated protein Eg5 (Kif11) siRNA
tacattggaatatgctcatagag

SEQ ID NO: 1316 - DNA, 23 bp, Artificial Sequence
  Description of Artificial Sequence: Synthetic oligonucleotide
  Mitotic kinesin microtubule-associated protein Eg5 (Kif11) siRNA
acattggaatatgctcatagagc

SEQ ID NO: 1317 - DNA, 23 bp, Artificial Sequence
  Description of Artificial Sequence: Synthetic oligonucleotide
  Mitotic kinesin microtubule-associated protein Eg5 (Kif11) siRNA
cattggaatatgctcatagagca

SEQ ID NO: 1318 - DNA, 23 bp, Artificial Sequence
  Description of Artificial Sequence: Synthetic oligonucleotide
  Mitotic kinesin microtubule-associated protein Eg5 (Kif11) siRNA
attggaatatgctcatagagcaa

SEQ ID NO: 1319 - DNA, 23 bp, Artificial Sequence
  Description of Artificial Sequence: Synthetic oligonucleotide
  Mitotic kinesin microtubule-associated protein Eg5 (Kif11) siRNA
ttggaatatgctcatagagcaaa

SEQ ID NO: 1320 - DNA, 23 bp, Artificial Sequence
  Description of Artificial Sequence: Synthetic oligonucleotide
  Mitotic kinesin microtubule-associated protein Eg5 (Kif11) siRNA
tggaatatgctcatagagcaaag

SEQ ID NO: 1321 - DNA, 23 bp, Artificial Sequence
  Description of Artificial Sequence: Synthetic oligonucleotide
  Mitotic kinesin microtubule-associated protein Eg5 (Kif11) siRNA
ggaatatgctcatagagcaaaga

SEQ ID NO: 1322 - DNA, 23 bp, Artificial Sequence
  Description of Artificial Sequence: Synthetic oligonucleotide
  Mitotic kinesin microtubule-associated protein Eg5 (Kif11) siRNA
gaatatgctcatagagcaaagaa

SEQ ID NO: 1323 - DNA, 23 bp, Artificial Sequence
  Description of Artificial Sequence: Synthetic oligonucleotide
  Mitotic kinesin microtubule-associated protein Eg5 (Kif11) siRNA
aatatgctcatagagcaaagaac

SEQ ID NO: 1324 - DNA, 23 bp, Artificial Sequence
  Description of Artificial Sequence: Synthetic oligonucleotide
  Mitotic kinesin microtubule-associated protein Eg5 (Kif11) siRNA
atatgctcatagagcaaagaaca

SEQ ID NO: 1325 - DNA, 23 bp, Artificial Sequence
  Description of Artificial Sequence: Synthetic oligonucleotide
  Mitotic kinesin microtubule-associated protein Eg5 (Kif11) siRNA
tatgctcatagagcaaagaacat

SEQ ID NO: 1326 - DNA, 23 bp, Artificial Sequence
  Description of Artificial Sequence: Synthetic oligonucleotide
  Mitotic kinesin microtubule-associated protein Eg5 (Kif11) siRNA
atgctcatagagcaaagaacata

SEQ ID NO: 1327 - DNA, 23 bp, Artificial Sequence
  Description of Artificial Sequence: Synthetic oligonucleotide
  Mitotic kinesin microtubule-associated protein Eg5 (Kif11) siRNA
tgctcatagagcaaagaacatat

SEQ ID NO: 1328 - DNA, 23 bp, Artificial Sequence
  Description of Artificial Sequence: Synthetic oligonucleotide
  Mitotic kinesin microtubule-associated protein Eg5 (Kif11) siRNA
gctcatagagcaaagaacatatt

SEQ ID NO: 1329 - DNA, 23 bp, Artificial Sequence
  Description of Artificial Sequence: Synthetic oligonucleotide
  Mitotic kinesin microtubule-associated protein Eg5 (Kif11) siRNA
ctcatagagcaaagaacatattg

SEQ ID NO: 1330 - DNA, 23 bp, Artificial Sequence
  Description of Artificial Sequence: Synthetic oligonucleotide
  Mitotic kinesin microtubule-associated protein Eg5 (Kif11) siRNA
tcatagagcaaagaacatattga

SEQ ID NO: 1331 - DNA, 23 bp, Artificial Sequence
  Description of Artificial Sequence: Synthetic oligonucleotide
  Mitotic kinesin microtubule-associated protein Eg5 (Kif11) siRNA
catagagcaaagaacatattgaa

SEQ ID NO: 1332 - DNA, 23 bp, Artificial Sequence
  Description of Artificial Sequence: Synthetic oligonucleotide
  Mitotic kinesin microtubule-associated protein Eg5 (Kif11) siRNA
atagagcaaagaacatattgaat

SEQ ID NO: 1333 - DNA, 23 bp, Artificial Sequence
  Description of Artificial Sequence: Synthetic oligonucleotide
  Mitotic kinesin microtubule-associated protein Eg5 (Kif11) siRNA
tagagcaaagaacatattgaata

SEQ ID NO: 1334 - DNA, 23 bp, Artificial Sequence
  Description of Artificial Sequence: Synthetic oligonucleotide
  Mitotic kinesin microtubule-associated protein Eg5 (Kif11) siRNA
agagcaaagaacatattgaataa

SEQ ID NO: 1335 - DNA, 23 bp, Artificial Sequence
  Description of Artificial Sequence: Synthetic oligonucleotide
  Mitotic kinesin microtubule-associated protein Eg5 (Kif11) siRNA
gagcaaagaacatattgaataag

SEQ ID NO: 1336 - DNA, 23 bp, Artificial Sequence
  Description of Artificial Sequence: Synthetic oligonucleotide
  Mitotic kinesin microtubule-associated protein Eg5 (Kif11) siRNA
agcaaagaacatattgaataagc

SEQ ID NO: 1337 - DNA, 23 bp, Artificial Sequence
  Description of Artificial Sequence: Synthetic oligonucleotide
  Mitotic kinesin microtubule-associated protein Eg5 (Kif11) siRNA
gcaaagaacatattgaataagcc

SEQ ID NO: 1338 - DNA, 23 bp, Artificial Sequence
  Description of Artificial Sequence: Synthetic oligonucleotide
  Mitotic kinesin microtubule-associated protein Eg5 (Kif11) siRNA
caaagaacatattgaataagcct

SEQ ID NO: 1339 - DNA, 23 bp, Artificial Sequence
  Description of Artificial Sequence: Synthetic oligonucleotide
  Mitotic kinesin microtubule-associated protein Eg5 (Kif11) siRNA
aaagaacatattgaataagcctg

SEQ ID NO: 1340 - DNA, 23 bp, Artificial Sequence
  Description of Artificial Sequence: Synthetic oligonucleotide
  Mitotic kinesin microtubule-associated protein Eg5 (Kif11) siRNA
aagaacatattgaataagcctga

SEQ ID NO: 1341 - DNA, 23 bp, Artificial Sequence
  Description of Artificial Sequence: Synthetic oligonucleotide
  Mitotic kinesin microtubule-associated protein Eg5 (Kif11) siRNA
agaacatattgaataagcctgaa

SEQ ID NO: 1342 - DNA, 23 bp, Artificial Sequence
  Description of Artificial Sequence: Synthetic oligonucleotide
  Mitotic kinesin microtubule-associated protein Eg5 (Kif11) siRNA
gaacatattgaataagcctgaag

SEQ ID NO: 1343 - DNA, 23 bp, Artificial Sequence
  Description of Artificial Sequence: Synthetic oligonucleotide
  Mitotic kinesin microtubule-associated protein Eg5 (Kif11) siRNA
aacatattgaataagcctgaagt

SEQ ID NO: 1344 - DNA, 23 bp, Artificial Sequence
  Description of Artificial Sequence: Synthetic oligonucleotide
  Mitotic kinesin microtubule-associated protein Eg5 (Kif11) siRNA
acatattgaataagcctgaagtg

SEQ ID NO: 1345 - DNA, 23 bp, Artificial Sequence
  Description of Artificial Sequence: Synthetic oligonucleotide
  Mitotic kinesin microtubule-associated protein Eg5 (Kif11) siRNA
catattgaataagcctgaagtga

SEQ ID NO: 1346 - DNA, 23 bp, Artificial Sequence
  Description of Artificial Sequence: Synthetic oligonucleotide
  Mitotic kinesin microtubule-associated protein Eg5 (Kif11) siRNA
atattgaataagcctgaagtgaa

SEQ ID NO: 1347 - DNA, 23 bp, Artificial Sequence
  Description of Artificial Sequence: Synthetic oligonucleotide
  Mitotic kinesin microtubule-associated protein Eg5 (Kif11) siRNA
tattgaataagcctgaagtgaat

SEQ ID NO: 1348 - DNA, 23 bp, Artificial Sequence
  Description of Artificial Sequence: Synthetic oligonucleotide
  Mitotic kinesin microtubule-associated protein Eg5 (Kif11) siRNA
attgaataagcctgaagtgaatc

SEQ ID NO: 1349 - DNA, 23 bp, Artificial Sequence
  Description of Artificial Sequence: Synthetic oligonucleotide
  Mitotic kinesin microtubule-associated protein Eg5 (Kif11) siRNA
ttgaataagcctgaagtgaatca

SEQ ID NO: 1350 - DNA, 23 bp, Artificial Sequence
  Description of Artificial Sequence: Synthetic oligonucleotide
  Mitotic kinesin microtubule-associated protein Eg5 (Kif11) siRNA
tgaataagcctgaagtgaatcag

SEQ ID NO: 1351 - DNA, 23 bp, Artificial Sequence
  Description of Artificial Sequence: Synthetic oligonucleotide
  Mitotic kinesin microtubule-associated protein Eg5 (Kif11) siRNA
gaataagcctgaagtgaatcaga

SEQ ID NO: 1352 - DNA, 23 bp, Artificial Sequence
  Description of Artificial Sequence: Synthetic oligonucleotide
  Mitotic kinesin microtubule-associated protein Eg5 (Kif11) siRNA
aataagcctgaagtgaatcagaa

SEQ ID NO: 1353 - DNA, 23 bp, Artificial Sequence
  Description of Artificial Sequence: Synthetic oligonucleotide
  Mitotic kinesin microtubule-associated protein Eg5 (Kif11) siRNA
ataagcctgaagtgaatcagaaa

SEQ ID NO: 1354 - DNA, 23 bp, Artificial Sequence
  Description of Artificial Sequence: Synthetic oligonucleotide
  Mitotic kinesin microtubule-associated protein Eg5 (Kif11) siRNA
taagcctgaagtgaatcagaaac

SEQ ID NO: 1355 - DNA, 23 bp, Artificial Sequence
  Description of Artificial Sequence: Synthetic oligonucleotide
  Mitotic kinesin microtubule-associated protein Eg5 (Kif11) siRNA
aagcctgaagtgaatcagaaact

SEQ ID NO: 1356 - DNA, 23 bp, Artificial Sequence
  Description of Artificial Sequence: Synthetic oligonucleotide
  Mitotic kinesin microtubule-associated protein Eg5 (Kif11) siRNA
agcctgaagtgaatcagaaactc

SEQ ID NO: 1357 - DNA, 23 bp, Artificial Sequence
  Description of Artificial Sequence: Synthetic oligonucleotide
  Mitotic kinesin microtubule-associated protein Eg5 (Kif11) siRNA
gcctgaagtgaatcagaaactca

SEQ ID NO: 1358 - DNA, 23 bp, Artificial Sequence
  Description of Artificial Sequence: Synthetic oligonucleotide
  Mitotic kinesin microtubule-associated protein Eg5 (Kif11) siRNA
cctgaagtgaatcagaaactcac

SEQ ID NO: 1359 - DNA, 23 bp, Artificial Sequence
  Description of Artificial Sequence: Synthetic oligonucleotide
  Mitotic kinesin microtubule-associated protein Eg5 (Kif11) siRNA
ctgaagtgaatcagaaactcacc

SEQ ID NO: 1360 - DNA, 23 bp, Artificial Sequence
  Description of Artificial Sequence: Synthetic oligonucleotide
  Mitotic kinesin microtubule-associated protein Eg5 (Kif11) siRNA
tgaagtgaatcagaaactcacca

SEQ ID NO: 1361 - DNA, 23 bp, Artificial Sequence
  Description of Artificial Sequence: Synthetic oligonucleotide
  Mitotic kinesin microtubule-associated protein Eg5 (Kif11) siRNA
gaagtgaatcagaaactcaccaa

SEQ ID NO: 1362 - DNA, 23 bp, Artificial Sequence
  Description of Artificial Sequence: Synthetic oligonucleotide
  Mitotic kinesin microtubule-associated protein Eg5 (Kif11) siRNA
aagtgaatcagaaactcaccaaa

SEQ ID NO: 1363 - DNA, 23 bp, Artificial Sequence
  Description of Artificial Sequence: Synthetic oligonucleotide
  Mitotic kinesin microtubule-associated protein Eg5 (Kif11) siRNA
agtgaatcagaaactcaccaaaa

SEQ ID NO: 1364 - DNA, 23 bp, Artificial Sequence
  Description of Artificial Sequence: Synthetic oligonucleotide
  Mitotic kinesin microtubule-associated protein Eg5 (Kif11) siRNA
gtgaatcagaaactcaccaaaaa

SEQ ID NO: 1365 - DNA, 23 bp, Artificial Sequence
  Description of Artificial Sequence: Synthetic oligonucleotide
  Mitotic kinesin microtubule-associated protein Eg5 (Kif11) siRNA
tgaatcagaaactcaccaaaaaa

SEQ ID NO: 1366 - DNA, 23 bp, Artificial Sequence
  Description of Artificial Sequence: Synthetic oligonucleotide
  Mitotic kinesin microtubule-associated protein Eg5 (Kif11) siRNA
gaatcagaaactcaccaaaaaag

SEQ ID NO: 1367 - DNA, 23 bp, Artificial Sequence
  Description of Artificial Sequence: Synthetic oligonucleotide
  Mitotic kinesin microtubule-associated protein Eg5 (Kif11) siRNA
aatcagaaactcaccaaaaaagc

SEQ ID NO: 1368 - DNA, 23 bp, Artificial Sequence
  Description of Artificial Sequence: Synthetic oligonucleotide
  Mitotic kinesin microtubule-associated protein Eg5 (Kif11) siRNA
atcagaaactcaccaaaaaagct

SEQ ID NO: 1369 - DNA, 23 bp, Artificial Sequence
  Description of Artificial Sequence: Synthetic oligonucleotide
  Mitotic kinesin microtubule-associated protein Eg5 (Kif11) siRNA
tcagaaactcaccaaaaaagctc

SEQ ID NO: 1370 - DNA, 23 bp, Artificial Sequence
  Description of Artificial Sequence: Synthetic oligonucleotide
  Mitotic kinesin microtubule-associated protein Eg5 (Kif11) siRNA
cagaaactcaccaaaaaagctct

SEQ ID NO: 1371 - DNA, 23 bp, Artificial Sequence
  Description of Artificial Sequence: Synthetic oligonucleotide
  Mitotic kinesin microtubule-associated protein Eg5 (Kif11) siRNA
agaaactcaccaaaaaagctctt

SEQ ID NO: 1372 - DNA, 23 bp, Artificial Sequence
  Description of Artificial Sequence: Synthetic oligonucleotide
  Mitotic kinesin microtubule-associated protein Eg5 (Kif11) siRNA
gaaactcaccaaaaaagctctta

SEQ ID NO: 1373 - DNA, 23 bp, Artificial Sequence
  Description of Artificial Sequence: Synthetic oligonucleotide
  Mitotic kinesin microtubule-associated protein Eg5 (Kif11) siRNA
aaactcaccaaaaaagctcttat

SEQ ID NO: 1374 - DNA, 23 bp, Artificial Sequence
  Description of Artificial Sequence: Synthetic oligonucleotide
  Mitotic kinesin microtubule-associated protein Eg5 (Kif11) siRNA
aactcaccaaaaaagctcttatt

SEQ ID NO: 1375 - DNA, 23 bp, Artificial Sequence
  Description of Artificial Sequence: Synthetic oligonucleotide
  Mitotic kinesin microtubule-associated protein Eg5 (Kif11) siRNA
actcaccaaaaaagctcttatta

SEQ ID NO: 1376 - DNA, 23 bp, Artificial Sequence
  Description of Artificial Sequence: Synthetic oligonucleotide
  Mitotic kinesin microtubule-associated protein Eg5 (Kif11) siRNA
ctcaccaaaaaagctcttattaa

SEQ ID NO: 1377 - DNA, 23 bp, Artificial Sequence
  Description of Artificial Sequence: Synthetic oligonucleotide
  Mitotic kinesin microtubule-associated protein Eg5 (Kif11) siRNA
tcaccaaaaaagctcttattaag

SEQ ID NO: 1378 - DNA, 23 bp, Artificial Sequence
  Description of Artificial Sequence: Synthetic oligonucleotide
  Mitotic kinesin microtubule-associated protein Eg5 (Kif11) siRNA
caccaaaaaagctcttattaagg

SEQ ID NO: 1379 - DNA, 23 bp, Artificial Sequence
  Description of Artificial Sequence: Synthetic oligonucleotide
  Mitotic kinesin microtubule-associated protein Eg5 (Kif11) siRNA
accaaaaaagctcttattaagga

SEQ ID NO: 1380 - DNA, 23 bp, Artificial Sequence
  Description of Artificial Sequence: Synthetic oligonucleotide
  Mitotic kinesin microtubule-associated protein Eg5 (Kif11) siRNA
ccaaaaaagctcttattaaggag

SEQ ID NO: 1381 - DNA, 23 bp, Artificial Sequence
  Description of Artificial Sequence: Synthetic oligonucleotide
  Mitotic kinesin microtubule-associated protein Eg5 (Kif11) siRNA
caaaaaagctcttattaaggagt

SEQ ID NO: 1382 - DNA, 23 bp, Artificial Sequence
  Description of Artificial Sequence: Synthetic oligonucleotide
  Mitotic kinesin microtubule-associated protein Eg5 (Kif11) siRNA
aaaaaagctcttattaaggagta

SEQ ID NO: 1383 - DNA, 23 bp, Artificial Sequence
  Description of Artificial Sequence: Synthetic oligonucleotide
  Mitotic kinesin microtubule-associated protein Eg5 (Kif11) siRNA
aaaaagctcttattaaggagtat

SEQ ID NO: 1384 - DNA, 23 bp, Artificial Sequence
  Description of Artificial Sequence: Synthetic oligonucleotide
  Mitotic kinesin microtubule-associated protein Eg5 (Kif11) siRNA
aaaagctcttattaaggagtata

SEQ ID NO: 1385 - DNA, 23 bp, Artificial Sequence
  Description of Artificial Sequence: Synthetic oligonucleotide
  Mitotic kinesin microtubule-associated protein Eg5 (Kif11) siRNA
aaagctcttattaaggagtatac

SEQ ID NO: 1386 - DNA, 23 bp, Artificial Sequence
  Description of Artificial Sequence: Synthetic oligonucleotide
  Mitotic kinesin microtubule-associated protein Eg5 (Kif11) siRNA
aagctcttattaaggagtatacg

SEQ ID NO: 1387 - DNA, 23 bp, Artificial Sequence
  Description of Artificial Sequence: Synthetic oligonucleotide
  Mitotic kinesin microtubule-associated protein Eg5 (Kif11) siRNA
agctcttattaaggagtatacgg

SEQ ID NO: 1388 - DNA, 23 bp, Artificial Sequence
  Description of Artificial Sequence: Synthetic oligonucleotide
  Mitotic kinesin microtubule-associated protein Eg5 (Kif11) siRNA
gctcttattaaggagtatacgga

SEQ ID NO: 1389 - DNA, 23 bp, Artificial Sequence
  Description of Artificial Sequence: Synthetic oligonucleotide
  Mitotic kinesin microtubule-associated protein Eg5 (Kif11) siRNA
ctcttattaaggagtatacggag

SEQ ID NO: 1390 - DNA, 23 bp, Artificial Sequence
  Description of Artificial Sequence: Synthetic oligonucleotide
  Mitotic kinesin microtubule-associated protein Eg5 (Kif11) siRNA
tcttattaaggagtatacggagg

SEQ ID NO: 1391 - DNA, 23 bp, Artificial Sequence
  Description of Artificial Sequence: Synthetic oligonucleotide
  Mitotic kinesin microtubule-associated protein Eg5 (Kif11) siRNA
cttattaaggagtatacggagga

SEQ ID NO: 1392 - DNA, 23 bp, Artificial Sequence
  Description of Artificial Sequence: Synthetic oligonucleotide
  Mitotic kinesin microtubule-associated protein Eg5 (Kif11) siRNA
ttattaaggagtatacggaggag

SEQ ID NO: 1393 - DNA, 23 bp, Artificial Sequence
  Description of Artificial Sequence: Synthetic oligonucleotide
  Mitotic kinesin microtubule-associated protein Eg5 (Kif11) siRNA
tattaaggagtatacggaggaga

SEQ ID NO: 1394 - DNA, 23 bp, Artificial Sequence
  Description of Artificial Sequence: Synthetic oligonucleotide
  Mitotic kinesin microtubule-associated protein Eg5 (Kif11) siRNA
attaaggagtatacggaggagat

SEQ ID NO: 1395 - DNA, 23 bp, Artificial Sequence
  Description of Artificial Sequence: Synthetic oligonucleotide
  Mitotic kinesin microtubule-associated protein Eg5 (Kif11) siRNA
ttaaggagtatacggaggagata

SEQ ID NO: 1396 - DNA, 23 bp, Artificial Sequence
  Description of Artificial Sequence: Synthetic oligonucleotide
  Mitotic kinesin microtubule-associated protein Eg5 (Kif11) siRNA
taaggagtatacggaggagatag

SEQ ID NO: 1397 - DNA, 23 bp, Artificial Sequence
  Description of Artificial Sequence: Synthetic oligonucleotide
  Mitotic kinesin microtubule-associated protein Eg5 (Kif11) siRNA
aaggagtatacggaggagataga

SEQ ID NO: 1398 - DNA, 23 bp, Artificial Sequence
  Description of Artificial Sequence: Synthetic oligonucleotide
  Mitotic kinesin microtubule-associated protein Eg5 (Kif11) siRNA
aggagtatacggaggagatagaa

SEQ ID NO: 1399 - DNA, 23 bp, Artificial Sequence
  Description of Artificial Sequence: Synthetic oligonucleotide
  Mitotic kinesin microtubule-associated protein Eg5 (Kif11) siRNA
ggagtatacggaggagatagaac

SEQ ID NO: 1400 - DNA, 23 bp, Artificial Sequence
  Description of Artificial Sequence: Synthetic oligonucleotide
  Mitotic kinesin microtubule-associated protein Eg5 (Kif11) siRNA
gagtatacggaggagatagaacg

SEQ ID NO: 1401 - DNA, 23 bp, Artificial Sequence
  Description of Artificial Sequence: Synthetic oligonucleotide
  Mitotic kinesin microtubule-associated protein Eg5 (Kif11) siRNA
agtatacggaggagatagaacgt

SEQ ID NO: 1402 - DNA, 23 bp, Artificial Sequence
  Description of Artificial Sequence: Synthetic oligonucleotide
  Mitotic kinesin microtubule-associated protein Eg5 (Kif11) siRNA
gtatacggaggagatagaacgtt

SEQ ID NO: 1403 - DNA, 23 bp, Artificial Sequence
  Description of Artificial Sequence: Synthetic oligonucleotide
  Mitotic kinesin microtubule-associated protein Eg5 (Kif11) siRNA
tatacggaggagatagaacgttt

SEQ ID NO: 1404 - DNA, 23 bp, Artificial Sequence
  Description of Artificial Sequence: Synthetic oligonucleotide
  Mitotic kinesin microtubule-associated protein Eg5 (Kif11) siRNA
atacggaggagatagaacgttta

SEQ ID NO: 1405 - DNA, 23 bp, Artificial Sequence
  Description of Artificial Sequence: Synthetic oligonucleotide
  Mitotic kinesin microtubule-associated protein Eg5 (Kif11) siRNA
tacggaggagatagaacgtttaa

SEQ ID NO: 1406 - DNA, 23 bp, Artificial Sequence
  Description of Artificial Sequence: Synthetic oligonucleotide
  Mitotic kinesin microtubule-associated protein Eg5 (Kif11) siRNA
acggaggagatagaacgtttaaa

SEQ ID NO: 1407 - DNA, 23 bp, Artificial Sequence
  Description of Artificial Sequence: Synthetic oligonucleotide
  Mitotic kinesin microtubule-associated protein Eg5 (Kif11) siRNA
cggaggagatagaacgtttaaaa

SEQ ID NO: 1408 - DNA, 23 bp, Artificial Sequence
  Description of Artificial Sequence: Synthetic oligonucleotide
  Mitotic kinesin microtubule-associated protein Eg5 (Kif11) siRNA
ggaggagatagaacgtttaaaac

SEQ ID NO: 1409 - DNA, 23 bp, Artificial Sequence
  Description of Artificial Sequence: Synthetic oligonucleotide
  Mitotic kinesin microtubule-associated protein Eg5 (Kif11) siRNA
gaggagatagaacgtttaaaacg

SEQ ID NO: 1410 - DNA, 23 bp, Artificial Sequence
  Description of Artificial Sequence: Synthetic oligonucleotide
  Mitotic kinesin microtubule-associated protein Eg5 (Kif11) siRNA
aggagatagaacgtttaaaacga

SEQ ID NO: 1411 - DNA, 23 bp, Artificial Sequence
  Description of Artificial Sequence: Synthetic oligonucleotide
  Mitotic kinesin microtubule-associated protein Eg5 (Kif11) siRNA
ggagatagaacgtttaaaacgag

SEQ ID NO: 1412 - DNA, 23 bp, Artificial Sequence
  Description of Artificial Sequence: Synthetic oligonucleotide
  Mitotic kinesin microtubule-associated protein Eg5 (Kif11) siRNA
gagatagaacgtttaaaacgaga

SEQ ID NO: 1413 - DNA, 23 bp, Artificial Sequence
  Description of Artificial Sequence: Synthetic oligonucleotide
  Mitotic kinesin microtubule-associated protein Eg5 (Kif11) siRNA
agatagaacgtttaaaacgagat

SEQ ID NO: 1414 - DNA, 23 bp, Artificial Sequence
  Description of Artificial Sequence: Synthetic oligonucleotide
  Mitotic kinesin microtubule-associated protein Eg5 (Kif11) siRNA
gatagaacgtttaaaacgagatc

SEQ ID NO: 1415 - DNA, 23 bp, Artificial Sequence
  Description of Artificial Sequence: Synthetic oligonucleotide
  Mitotic kinesin microtubule-associated protein Eg5 (Kif11) siRNA
atagaacgtttaaaacgagatct

SEQ ID NO: 1416 - DNA, 23 bp, Artificial Sequence
  Description of Artificial Sequence: Synthetic oligonucleotide
  Mitotic kinesin microtubule-associated protein Eg5 (Kif11) siRNA
tagaacgtttaaaacgagatctt

SEQ ID NO: 1417 - DNA, 23 bp, Artificial Sequence
  Description of Artificial Sequence: Synthetic oligonucleotide
  Mitotic kinesin microtubule-associated protein Eg5 (Kif11) siRNA
agaacgtttaaaacgagatcttg

SEQ ID NO: 1418 - DNA, 23 bp, Artificial Sequence
  Description of Artificial Sequence: Synthetic oligonucleotide
  Mitotic kinesin microtubule-associated protein Eg5 (Kif11) siRNA
gaacgtttaaaacgagatcttgc

SEQ ID NO: 1419 - DNA, 23 bp, Artificial Sequence
  Description of Artificial Sequence: Synthetic oligonucleotide
  Mitotic kinesin microtubule-associated protein Eg5 (Kif11) siRNA
aacgtttaaaacgagatcttgct

SEQ ID NO: 1420 - DNA, 23 bp, Artificial Sequence
  Description of Artificial Sequence: Synthetic oligonucleotide
  Mitotic kinesin microtubule-associated protein Eg5 (Kif11) siRNA
acgtttaaaacgagatcttgctg

SEQ ID NO: 1421 - DNA, 23 bp, Artificial Sequence
  Description of Artificial Sequence: Synthetic oligonucleotide
  Mitotic kinesin microtubule-associated protein Eg5 (Kif11) siRNA
cgtttaaaacgagatcttgctgc

SEQ ID NO: 1422 - DNA, 23 bp, Artificial Sequence
  Description of Artificial Sequence: Synthetic oligonucleotide
  Mitotic kinesin microtubule-associated protein Eg5 (Kif11) siRNA
gtttaaaacgagatcttgctgca

SEQ ID NO: 1423 - DNA, 23 bp, Artificial Sequence
  Description of Artificial Sequence: Synthetic oligonucleotide
  Mitotic kinesin microtubule-associated protein Eg5 (Kif11) siRNA
tttaaaacgagatcttgctgcag

SEQ ID NO: 1424 - DNA, 23 bp, Artificial Sequence
  Description of Artificial Sequence: Synthetic oligonucleotide
  Mitotic kinesin microtubule-associated protein Eg5 (Kif11) siRNA
ttaaaacgagatcttgctgcagc

SEQ ID NO: 1425 - DNA, 23 bp, Artificial Sequence
  Description of Artificial Sequence: Synthetic oligonucleotide
  Mitotic kinesin microtubule-associated protein Eg5 (Kif11) siRNA
taaaacgagatcttgctgcagcc

SEQ ID NO: 1426 - DNA, 23 bp, Artificial Sequence
  Description of Artificial Sequence: Synthetic oligonucleotide
  Mitotic kinesin microtubule-associated protein Eg5 (Kif11) siRNA
aaaacgagatcttgctgcagccc

SEQ ID NO: 1427 - DNA, 23 bp, Artificial Sequence
  Description of Artificial Sequence: Synthetic oligonucleotide
  Mitotic kinesin microtubule-associated protein Eg5 (Kif11) siRNA
aaacgagatcttgctgcagcccg

SEQ ID NO: 1428 - DNA, 23 bp, Artificial Sequence
  Description of Artificial Sequence: Synthetic oligonucleotide
  Mitotic kinesin microtubule-associated protein Eg5 (Kif11) siRNA
aacgagatcttgctgcagcccgt

SEQ ID NO: 1429 - DNA, 23 bp, Artificial Sequence
  Description of Artificial Sequence: Synthetic oligonucleotide
  Mitotic kinesin microtubule-associated protein Eg5 (Kif11) siRNA
acgagatcttgctgcagcccgtg

SEQ ID NO: 1430 - DNA, 23 bp, Artificial Sequence
  Description of Artificial Sequence: Synthetic oligonucleotide
  Mitotic kinesin microtubule-associated protein Eg5 (Kif11) siRNA
cgagatcttgctgcagcccgtga

SEQ ID NO: 1431 - DNA, 23 bp, Artificial Sequence
  Description of Artificial Sequence: Synthetic oligonucleotide
  Mitotic kinesin microtubule-associated protein Eg5 (Kif11) siRNA
gagatcttgctgcagcccgtgag

SEQ ID NO: 1432 - DNA, 23 bp, Artificial Sequence
  Description of Artificial Sequence: Synthetic oligonucleotide
  Mitotic kinesin microtubule-associated protein Eg5 (Kif11) siRNA
agatcttgctgcagcccgtgaga

SEQ ID NO: 1433 - DNA, 23 bp, Artificial Sequence
  Description of Artificial Sequence: Synthetic oligonucleotide
  Mitotic kinesin microtubule-associated protein Eg5 (Kif11) siRNA
gatcttgctgcagcccgtgagaa

SEQ ID NO: 1434 - DNA, 23 bp, Artificial Sequence
  Description of Artificial Sequence: Synthetic oligonucleotide
  Mitotic kinesin microtubule-associated protein Eg5 (Kif11) siRNA
atcttgctgcagcccgtgagaaa

SEQ ID NO: 1435 - DNA, 23 bp, Artificial Sequence
  Description of Artificial Sequence: Synthetic oligonucleotide
  Mitotic kinesin microtubule-associated protein Eg5 (Kif11) siRNA
tcttgctgcagcccgtgagaaaa

SEQ ID NO: 1436 - DNA, 23 bp, Artificial Sequence
  Description of Artificial Sequence: Synthetic oligonucleotide
  Mitotic kinesin microtubule-associated protein Eg5 (Kif11) siRNA
cttgctgcagcccgtgagaaaaa

SEQ ID NO: 1437 - DNA, 23 bp, Artificial Sequence
  Description of Artificial Sequence: Synthetic oligonucleotide
  Mitotic kinesin microtubule-associated protein Eg5 (Kif11) siRNA
ttgctgcagcccgtgagaaaaat

SEQ ID NO: 1438 - DNA, 23 bp, Artificial Sequence
  Description of Artificial Sequence: Synthetic oligonucleotide
  Mitotic kinesin microtubule-associated protein Eg5 (Kif11) siRNA
tgctgcagcccgtgagaaaaatg

SEQ ID NO: 1439 - DNA, 23 bp, Artificial Sequence
  Description of Artificial Sequence: Synthetic oligonucleotide
  Mitotic kinesin microtubule-associated protein Eg5 (Kif11) siRNA
gctgcagcccgtgagaaaaatgg

SEQ ID NO: 1440 - DNA, 23 bp, Artificial Sequence
  Description of Artificial Sequence: Synthetic oligonucleotide
  Mitotic kinesin microtubule-associated protein Eg5 (Kif11) siRNA
ctgcagcccgtgagaaaaatgga

SEQ ID NO: 1441 - DNA, 23 bp, Artificial Sequence
  Description of Artificial Sequence: Synthetic oligonucleotide
  Mitotic kinesin microtubule-associated protein Eg5 (Kif11) siRNA
tgcagcccgtgagaaaaatggag

SEQ ID NO: 1442 - DNA, 23 bp, Artificial Sequence
  Description of Artificial Sequence: Synthetic oligonucleotide
  Mitotic kinesin microtubule-associated protein Eg5 (Kif11) siRNA
gcagcccgtgagaaaaatggagt

SEQ ID NO: 1443 - DNA, 23 bp, Artificial Sequence
  Description of Artificial Sequence: Synthetic oligonucleotide
  Mitotic kinesin microtubule-associated protein Eg5 (Kif11) siRNA
cagcccgtgagaaaaatggagtg

SEQ ID NO: 1444 - DNA, 23 bp, Artificial Sequence
  Description of Artificial Sequence: Synthetic oligonucleotide
  Mitotic kinesin microtubule-associated protein Eg5 (Kif11) siRNA
agcccgtgagaaaaatggagtgt

SEQ ID NO: 1445 - DNA, 23 bp, Artificial Sequence
  Description of Artificial Sequence: Synthetic oligonucleotide
  Mitotic kinesin microtubule-associated protein Eg5 (Kif11) siRNA
gcccgtgagaaaaatggagtgta

SEQ ID NO: 1446 - DNA, 23 bp, Artificial Sequence
  Description of Artificial Sequence: Synthetic oligonucleotide
  Mitotic kinesin microtubule-associated protein Eg5 (Kif11) siRNA
cccgtgagaaaaatggagtgtat

SEQ ID NO: 1447 - DNA, 23 bp, Artificial Sequence
  Description of Artificial Sequence: Synthetic oligonucleotide
  Mitotic kinesin microtubule-associated protein Eg5 (Kif11) siRNA
ccgtgagaaaaatggagtgtata

SEQ ID NO: 1448 - DNA, 23 bp, Artificial Sequence
  Description of Artificial Sequence: Synthetic oligonucleotide
  Mitotic kinesin microtubule-associated protein Eg5 (Kif11) siRNA
cgtgagaaaaatggagtgtatat

SEQ ID NO: 1449 - DNA, 23 bp, Artificial Sequence
  Description of Artificial Sequence: Synthetic oligonucleotide
  Mitotic kinesin microtubule-associated protein Eg5 (Kif11) siRNA
gtgagaaaaatggagtgtatatt

SEQ ID NO: 1450 - DNA, 23 bp, Artificial Sequence
  Description of Artificial Sequence: Synthetic oligonucleotide
  Mitotic kinesin microtubule-associated protein Eg5 (Kif11) siRNA
tgagaaaaatggagtgtatattt

SEQ ID NO: 1451 - DNA, 23 bp, Artificial Sequence
  Description of Artificial Sequence: Synthetic oligonucleotide
  Mitotic kinesin microtubule-associated protein Eg5 (Kif11) siRNA
gagaaaaatggagtgtatatttc

SEQ ID NO: 1452 - DNA, 23 bp, Artificial Sequence
  Description of Artificial Sequence: Synthetic oligonucleotide
  Mitotic kinesin microtubule-associated protein Eg5 (Kif11) siRNA
agaaaaatggagtgtatatttct

SEQ ID NO: 1453 - DNA, 23 bp, Artificial Sequence
  Description of Artificial Sequence: Synthetic oligonucleotide
  Mitotic kinesin microtubule-associated protein Eg5 (Kif11) siRNA
gaaaaatggagtgtatatttctg

SEQ ID NO: 1454 - DNA, 23 bp, Artificial Sequence
  Description of Artificial Sequence: Synthetic oligonucleotide
  Mitotic kinesin microtubule-associated protein Eg5 (Kif11) siRNA
aaaaatggagtgtatatttctga

SEQ ID NO: 1455 - DNA, 23 bp, Artificial Sequence
  Description of Artificial Sequence: Synthetic oligonucleotide
  Mitotic kinesin microtubule-associated protein Eg5 (Kif11) siRNA
aaaatggagtgtatatttctgaa

SEQ ID NO: 1456 - DNA, 23 bp, Artificial Sequence
  Description of Artificial Sequence: Synthetic oligonucleotide
  Mitotic kinesin microtubule-associated protein Eg5 (Kif11) siRNA
aaatggagtgtatatttctgaag

SEQ ID NO: 1457 - DNA, 23 bp, Artificial Sequence
  Description of Artificial Sequence: Synthetic oligonucleotide
  Mitotic kinesin microtubule-associated protein Eg5 (Kif11) siRNA
aatggagtgtatatttctgaaga

SEQ ID NO: 1458 - DNA, 23 bp, Artificial Sequence
  Description of Artificial Sequence: Synthetic oligonucleotide
  Mitotic kinesin microtubule-associated protein Eg5 (Kif11) siRNA
atggagtgtatatttctgaagaa

SEQ ID NO: 1459 - DNA, 23 bp, Artificial Sequence
  Description of Artificial Sequence: Synthetic oligonucleotide
  Mitotic kinesin microtubule-associated protein Eg5 (Kif11) siRNA
tggagtgtatatttctgaagaaa

SEQ ID NO: 1460 - DNA, 23 bp, Artificial Sequence
  Description of Artificial Sequence: Synthetic oligonucleotide
  Mitotic kinesin microtubule-associated protein Eg5 (Kif11) siRNA
ggagtgtatatttctgaagaaaa

SEQ ID NO: 1461 - DNA, 23 bp, Artificial Sequence
  Description of Artificial Sequence: Synthetic oligonucleotide
  Mitotic kinesin microtubule-associated protein Eg5 (Kif11) siRNA
gagtgtatatttctgaagaaaat

SEQ ID NO: 1462 - DNA, 23 bp, Artificial Sequence
  Description of Artificial Sequence: Synthetic oligonucleotide
  Mitotic kinesin microtubule-associated protein Eg5 (Kif11) siRNA
agtgtatatttctgaagaaaatt

SEQ ID NO: 1463 - DNA, 23 bp, Artificial Sequence
  Description of Artificial Sequence: Synthetic oligonucleotide
  Mitotic kinesin microtubule-associated protein Eg5 (Kif11) siRNA
gtgtatatttctgaagaaaattt

SEQ ID NO: 1464 - DNA, 23 bp, Artificial Sequence
  Description of Artificial Sequence: Synthetic oligonucleotide
  Mitotic kinesin microtubule-associated protein Eg5 (Kif11) siRNA
tgtatatttctgaagaaaatttt

SEQ ID NO: 1465 - DNA, 23 bp, Artificial Sequence
  Description of Artificial Sequence: Synthetic oligonucleotide
  Mitotic kinesin microtubule-associated protein Eg5 (Kif11) siRNA
gtatatttctgaagaaaatttta

SEQ ID NO: 1466 - DNA, 23 bp, Artificial Sequence
  Description of Artificial Sequence: Synthetic oligonucleotide
  Mitotic kinesin microtubule-associated protein Eg5 (Kif11) siRNA
tatatttctgaagaaaattttag

SEQ ID NO: 1467 - DNA, 23 bp, Artificial Sequence
  Description of Artificial Sequence: Synthetic oligonucleotide
  Mitotic kinesin microtubule-associated protein Eg5 (Kif11) siRNA
atatttctgaagaaaattttaga

SEQ ID NO: 1468 - DNA, 23 bp, Artificial Sequence
  Description of Artificial Sequence: Synthetic oligonucleotide
  Mitotic kinesin microtubule-associated protein Eg5 (Kif11) siRNA
tatttctgaagaaaattttagag

SEQ ID NO: 1469 - DNA, 23 bp, Artificial Sequence
  Description of Artificial Sequence: Synthetic oligonucleotide
  Mitotic kinesin microtubule-associated protein Eg5 (Kif11) siRNA
atttctgaagaaaattttagagt

SEQ ID NO: 1470 - DNA, 23 bp, Artificial Sequence
  Description of Artificial Sequence: Synthetic oligonucleotide
  Mitotic kinesin microtubule-associated protein Eg5 (Kif11) siRNA
tttctgaagaaaattttagagtc

SEQ ID NO: 1471 - DNA, 23 bp, Artificial Sequence
  Description of Artificial Sequence: Synthetic oligonucleotide
  Mitotic kinesin microtubule-associated protein Eg5 (Kif11) siRNA
ttctgaagaaaattttagagtca

SEQ ID NO: 1472 - DNA, 23 bp, Artificial Sequence
  Description of Artificial Sequence: Synthetic oligonucleotide
  Mitotic kinesin microtubule-associated protein Eg5 (Kif11) siRNA
tctgaagaaaattttagagtcat

SEQ ID NO: 1473 - DNA, 23 bp, Artificial Sequence
  Description of Artificial Sequence: Synthetic oligonucleotide
  Mitotic kinesin microtubule-associated protein Eg5 (Kif11) siRNA
ctgaagaaaattttagagtcatg

SEQ ID NO: 1474 - DNA, 23 bp, Artificial Sequence
  Description of Artificial Sequence: Synthetic oligonucleotide
  Mitotic kinesin microtubule-associated protein Eg5 (Kif11) siRNA
tgaagaaaattttagagtcatga

SEQ ID NO: 1475 - DNA, 23 bp, Artificial Sequence
  Description of Artificial Sequence: Synthetic oligonucleotide
  Mitotic kinesin microtubule-associated protein Eg5 (Kif11) siRNA
gaagaaaattttagagtcatgag

SEQ ID NO: 1476 - DNA, 23 bp, Artificial Sequence
  Description of Artificial Sequence: Synthetic oligonucleotide
  Mitotic kinesin microtubule-associated protein Eg5 (Kif11) siRNA
aagaaaattttagagtcatgagt

SEQ ID NO: 1477 - DNA, 23 bp, Artificial Sequence
  Description of Artificial Sequence: Synthetic oligonucleotide
  Mitotic kinesin microtubule-associated protein Eg5 (Kif11) siRNA
agaaaattttagagtcatgagtg

SEQ ID NO: 1478 - DNA, 23 bp, Artificial Sequence
  Description of Artificial Sequence: Synthetic oligonucleotide
  Mitotic kinesin microtubule-associated protein Eg5 (Kif11) siRNA
gaaaattttagagtcatgagtgg

SEQ ID NO: 1479 - DNA, 23 bp, Artificial Sequence
  Description of Artificial Sequence: Synthetic oligonucleotide
  Mitotic kinesin microtubule-associated protein Eg5 (Kif11) siRNA
aaaattttagagtcatgagtgga

SEQ ID NO: 1480 - DNA, 23 bp, Artificial Sequence
  Description of Artificial Sequence: Synthetic oligonucleotide
  Mitotic kinesin microtubule-associated protein Eg5 (Kif11) siRNA
aaattttagagtcatgagtggaa

SEQ ID NO: 1481 - DNA, 23 bp, Artificial Sequence
  Description of Artificial Sequence: Synthetic oligonucleotide
  Mitotic kinesin microtubule-associated protein Eg5 (Kif11) siRNA
aattttagagtcatgagtggaaa

SEQ ID NO: 1482 - DNA, 23 bp, Artificial Sequence
  Description of Artificial Sequence: Synthetic oligonucleotide
  Mitotic kinesin microtubule-associated protein Eg5 (Kif11) siRNA
attttagagtcatgagtggaaaa

SEQ ID NO: 1483 - DNA, 23 bp, Artificial Sequence
  Description of Artificial Sequence: Synthetic oligonucleotide
  Mitotic kinesin microtubule-associated protein Eg5 (Kif11) siRNA
ttttagagtcatgagtggaaaat

SEQ ID NO: 1484 - DNA, 23 bp, Artificial Sequence
  Description of Artificial Sequence: Synthetic oligonucleotide
  Mitotic kinesin microtubule-associated protein Eg5 (Kif11) siRNA
tttagagtcatgagtggaaaatt

SEQ ID NO: 1485 - DNA, 23 bp, Artificial Sequence
  Description of Artificial Sequence: Synthetic oligonucleotide
  Mitotic kinesin microtubule-associated protein Eg5 (Kif11) siRNA
ttagagtcatgagtggaaaatta

SEQ ID NO: 1486 - DNA, 23 bp, Artificial Sequence
  Description of Artificial Sequence: Synthetic oligonucleotide
  Mitotic kinesin microtubule-associated protein Eg5 (Kif11) siRNA
tagagtcatgagtggaaaattaa

SEQ ID NO: 1487 - DNA, 23 bp, Artificial Sequence
  Description of Artificial Sequence: Synthetic oligonucleotide
  Mitotic kinesin microtubule-associated protein Eg5 (Kif11) siRNA
agagtcatgagtggaaaattaac

SEQ ID NO: 1488 - DNA, 23 bp, Artificial Sequence
  Description of Artificial Sequence: Synthetic oligonucleotide
  Mitotic kinesin microtubule-associated protein Eg5 (Kif11) siRNA
gagtcatgagtggaaaattaact

SEQ ID NO: 1489 - DNA, 23 bp, Artificial Sequence
  Description of Artificial Sequence: Synthetic oligonucleotide
  Mitotic kinesin microtubule-associated protein Eg5 (Kif11) siRNA
agtcatgagtggaaaattaactg

SEQ ID NO: 1490 - DNA, 23 bp, Artificial Sequence
  Description of Artificial Sequence: Synthetic oligonucleotide
  Mitotic kinesin microtubule-associated protein Eg5 (Kif11) siRNA
gtcatgagtggaaaattaactgt

SEQ ID NO: 1491 - DNA, 23 bp, Artificial Sequence
  Description of Artificial Sequence: Synthetic oligonucleotide
  Mitotic kinesin microtubule-associated protein Eg5 (Kif11) siRNA
tcatgagtggaaaattaactgtt

SEQ ID NO: 1492 - DNA, 23 bp, Artificial Sequence
  Description of Artificial Sequence: Synthetic oligonucleotide
  Mitotic kinesin microtubule-associated protein Eg5 (Kif11) siRNA
catgagtggaaaattaactgttc

SEQ ID NO: 1493 - DNA, 23 bp, Artificial Sequence
  Description of Artificial Sequence: Synthetic oligonucleotide
  Mitotic kinesin microtubule-associated protein Eg5 (Kif11) siRNA
atgagtggaaaattaactgttca

SEQ ID NO: 1494 - DNA, 23 bp, Artificial Sequence
  Description of Artificial Sequence: Synthetic oligonucleotide
  Mitotic kinesin microtubule-associated protein Eg5 (Kif11) siRNA
tgagtggaaaattaactgttcaa

SEQ ID NO: 1495 - DNA, 23 bp, Artificial Sequence
  Description of Artificial Sequence: Synthetic oligonucleotide
  Mitotic kinesin microtubule-associated protein Eg5 (Kif11) siRNA
gagtggaaaattaactgttcaag

SEQ ID NO: 1496 - DNA, 23 bp, Artificial Sequence
  Description of Artificial Sequence: Synthetic oligonucleotide
  Mitotic kinesin microtubule-associated protein Eg5 (Kif11) siRNA
agtggaaaattaactgttcaaga

SEQ ID NO: 1497 - DNA, 23 bp, Artificial Sequence
  Description of Artificial Sequence: Synthetic oligonucleotide
  Mitotic kinesin microtubule-associated protein Eg5 (Kif11) siRNA
gtggaaaattaactgttcaagaa

SEQ ID NO: 1498 - DNA, 23 bp, Artificial Sequence
  Description of Artificial Sequence: Synthetic oligonucleotide
  Mitotic kinesin microtubule-associated protein Eg5 (Kif11) siRNA
tggaaaattaactgttcaagaag

SEQ ID NO: 1499 - DNA, 23 bp, Artificial Sequence
  Description of Artificial Sequence: Synthetic oligonucleotide
  Mitotic kinesin microtubule-associated protein Eg5 (Kif11) siRNA
ggaaaattaactgttcaagaaga

SEQ ID NO: 1500 - DNA, 23 bp, Artificial Sequence
  Description of Artificial Sequence: Synthetic oligonucleotide
  Mitotic kinesin microtubule-associated protein Eg5 (Kif11) siRNA
gaaaattaactgttcaagaagag

SEQ ID NO: 1501 - DNA, 23 bp, Artificial Sequence
  Description of Artificial Sequence: Synthetic oligonucleotide
  Mitotic kinesin microtubule-associated protein Eg5 (Kif11) siRNA
aaaattaactgttcaagaagagc

SEQ ID NO: 1502 - DNA, 23 bp, Artificial Sequence
  Description of Artificial Sequence: Synthetic oligonucleotide
  Mitotic kinesin microtubule-associated protein Eg5 (Kif11) siRNA
aaattaactgttcaagaagagca

SEQ ID NO: 1503 - DNA, 23 bp, Artificial Sequence
  Description of Artificial Sequence: Synthetic oligonucleotide
  Mitotic kinesin microtubule-associated protein Eg5 (Kif11) siRNA
aattaactgttcaagaagagcag

SEQ ID NO: 1504 - DNA, 23 bp, Artificial Sequence
  Description of Artificial Sequence: Synthetic oligonucleotide
  Mitotic kinesin microtubule-associated protein Eg5 (Kif11) siRNA
attaactgttcaagaagagcaga

SEQ ID NO: 1505 - DNA, 23 bp, Artificial Sequence
  Description of Artificial Sequence: Synthetic oligonucleotide
  Mitotic kinesin microtubule-associated protein Eg5 (Kif11) siRNA
ttaactgttcaagaagagcagat

SEQ ID NO: 1506 - DNA, 23 bp, Artificial Sequence
  Description of Artificial Sequence: Synthetic oligonucleotide
  Mitotic kinesin microtubule-associated protein Eg5 (Kif11) siRNA
taactgttcaagaagagcagatt

SEQ ID NO: 1507 - DNA, 23 bp, Artificial Sequence
  Description of Artificial Sequence: Synthetic oligonucleotide
  Mitotic kinesin microtubule-associated protein Eg5 (Kif11) siRNA
aactgttcaagaagagcagattg

SEQ ID NO: 1508 - DNA, 23 bp, Artificial Sequence
  Description of Artificial Sequence: Synthetic oligonucleotide
  Mitotic kinesin microtubule-associated protein Eg5 (Kif11) siRNA
actgttcaagaagagcagattgt

SEQ ID NO: 1509 - DNA, 23 bp, Artificial Sequence
  Description of Artificial Sequence: Synthetic oligonucleotide
  Mitotic kinesin microtubule-associated protein Eg5 (Kif11) siRNA
ctgttcaagaagagcagattgta

SEQ ID NO: 1510 - DNA, 23 bp, Artificial Sequence
  Description of Artificial Sequence: Synthetic oligonucleotide
  Mitotic kinesin microtubule-associated protein Eg5 (Kif11) siRNA
tgttcaagaagagcagattgtag

SEQ ID NO: 1511 - DNA, 23 bp, Artificial Sequence
  Description of Artificial Sequence: Synthetic oligonucleotide
  Mitotic kinesin microtubule-associated protein Eg5 (Kif11) siRNA
gttcaagaagagcagattgtaga

SEQ ID NO: 1512 - DNA, 23 bp, Artificial Sequence
  Description of Artificial Sequence: Synthetic oligonucleotide
  Mitotic kinesin microtubule-associated protein Eg5 (Kif11) siRNA
ttcaagaagagcagattgtagaa

SEQ ID NO: 1513 - DNA, 23 bp, Artificial Sequence
  Description of Artificial Sequence: Synthetic oligonucleotide
  Mitotic kinesin microtubule-associated protein Eg5 (Kif11) siRNA
tcaagaagagcagattgtagaat

SEQ ID NO: 1514 - DNA, 23 bp, Artificial Sequence
  Description of Artificial Sequence: Synthetic oligonucleotide
  Mitotic kinesin microtubule-associated protein Eg5 (Kif11) siRNA
caagaagagcagattgtagaatt

SEQ ID NO: 1515 - DNA, 23 bp, Artificial Sequence
  Description of Artificial Sequence: Synthetic oligonucleotide
  Mitotic kinesin microtubule-associated protein Eg5 (Kif11) siRNA
aagaagagcagattgtagaattg

SEQ ID NO: 1516 - DNA, 23 bp, Artificial Sequence
  Description of Artificial Sequence: Synthetic oligonucleotide
  Mitotic kinesin microtubule-associated protein Eg5 (Kif11) siRNA
agaagagcagattgtagaattga

SEQ ID NO: 1517 - DNA, 23 bp, Artificial Sequence
  Description of Artificial Sequence: Synthetic oligonucleotide
  Mitotic kinesin microtubule-associated protein Eg5 (Kif11) siRNA
gaagagcagattgtagaattgat

SEQ ID NO: 1518 - DNA, 23 bp, Artificial Sequence
  Description of Artificial Sequence: Synthetic oligonucleotide
  Mitotic kinesin microtubule-associated protein Eg5 (Kif11) siRNA
aagagcagattgtagaattgatt

SEQ ID NO: 1519 - DNA, 23 bp, Artificial Sequence
  Description of Artificial Sequence: Synthetic oligonucleotide
  Mitotic kinesin microtubule-associated protein Eg5 (Kif11) siRNA
agagcagattgtagaattgattg

SEQ ID NO: 1520 - DNA, 23 bp, Artificial Sequence
  Description of Artificial Sequence: Synthetic oligonucleotide
  Mitotic kinesin microtubule-associated protein Eg5 (Kif11) siRNA
gagcagattgtagaattgattga

SEQ ID NO: 1521 - DNA, 23 bp, Artificial Sequence
  Description of Artificial Sequence: Synthetic oligonucleotide
  Mitotic kinesin microtubule-associated protein Eg5 (Kif11) siRNA
agcagattgtagaattgattgaa

SEQ ID NO: 1522 - DNA, 23 bp, Artificial Sequence
  Description of Artificial Sequence: Synthetic oligonucleotide
  Mitotic kinesin microtubule-associated protein Eg5 (Kif11) siRNA
gcagattgtagaattgattgaaa

SEQ ID NO: 1523 - DNA, 23 bp, Artificial Sequence
  Description of Artificial Sequence: Synthetic oligonucleotide
  Mitotic kinesin microtubule-associated protein Eg5 (Kif11) siRNA
cagattgtagaattgattgaaaa

SEQ ID NO: 1524 - DNA, 23 bp, Artificial Sequence
  Description of Artificial Sequence: Synthetic oligonucleotide
  Mitotic kinesin microtubule-associated protein Eg5 (Kif11) siRNA
agattgtagaattgattgaaaaa

SEQ ID NO: 1525 - DNA, 23 bp, Artificial Sequence
  Description of Artificial Sequence: Synthetic oligonucleotide
  Mitotic kinesin microtubule-associated protein Eg5 (Kif11) siRNA
gattgtagaattgattgaaaaaa

SEQ ID NO: 1526 - DNA, 23 bp, Artificial Sequence
  Description of Artificial Sequence: Synthetic oligonucleotide
  Mitotic kinesin microtubule-associated protein Eg5 (Kif11) siRNA
attgtagaattgattgaaaaaat

SEQ ID NO: 1527 - DNA, 23 bp, Artificial Sequence
  Description of Artificial Sequence: Synthetic oligonucleotide
  Mitotic kinesin microtubule-associated protein Eg5 (Kif11) siRNA
ttgtagaattgattgaaaaaatt

SEQ ID NO: 1528 - DNA, 23 bp, Artificial Sequence
  Description of Artificial Sequence: Synthetic oligonucleotide
  Mitotic kinesin microtubule-associated protein Eg5 (Kif11) siRNA
tgtagaattgattgaaaaaattg

SEQ ID NO: 1529 - DNA, 23 bp, Artificial Sequence
  Description of Artificial Sequence: Synthetic oligonucleotide
  Mitotic kinesin microtubule-associated protein Eg5 (Kif11) siRNA
gtagaattgattgaaaaaattgg

SEQ ID NO: 1530 - DNA, 23 bp, Artificial Sequence
  Description of Artificial Sequence: Synthetic oligonucleotide
  Mitotic kinesin microtubule-associated protein Eg5 (Kif11) siRNA
tagaattgattgaaaaaattggt

SEQ ID NO: 1531 - DNA, 23 bp, Artificial Sequence
  Description of Artificial Sequence: Synthetic oligonucleotide
  Mitotic kinesin microtubule-associated protein Eg5 (Kif11) siRNA
agaattgattgaaaaaattggtg

SEQ ID NO: 1532 - DNA, 23 bp, Artificial Sequence
  Description of Artificial Sequence: Synthetic oligonucleotide
  Mitotic kinesin microtubule-associated protein Eg5 (Kif11) siRNA
gaattgattgaaaaaattggtgc

SEQ ID NO: 1533 - DNA, 23 bp, Artificial Sequence
  Description of Artificial Sequence: Synthetic oligonucleotide
  Mitotic kinesin microtubule-associated protein Eg5 (Kif11) siRNA
aattgattgaaaaaattggtgct

SEQ ID NO: 1534 - DNA, 23 bp, Artificial Sequence
  Description of Artificial Sequence: Synthetic oligonucleotide
  Mitotic kinesin microtubule-associated protein Eg5 (Kif11) siRNA
attgattgaaaaaattggtgctg

SEQ ID NO: 1535 - DNA, 23 bp, Artificial Sequence
  Description of Artificial Sequence: Synthetic oligonucleotide
  Mitotic kinesin microtubule-associated protein Eg5 (Kif11) siRNA
ttgattgaaaaaattggtgctgt

SEQ ID NO: 1536 - DNA, 23 bp, Artificial Sequence
  Description of Artificial Sequence: Synthetic oligonucleotide
  Mitotic kinesin microtubule-associated protein Eg5 (Kif11) siRNA
tgattgaaaaaattggtgctgtt

SEQ ID NO: 1537 - DNA, 23 bp, Artificial Sequence
  Description of Artificial Sequence: Synthetic oligonucleotide
  Mitotic kinesin microtubule-associated protein Eg5 (Kif11) siRNA
gattgaaaaaattggtgctgttg

SEQ ID NO: 1538 - DNA, 23 bp, Artificial Sequence
  Description of Artificial Sequence: Synthetic oligonucleotide
  Mitotic kinesin microtubule-associated protein Eg5 (Kif11) siRNA
attgaaaaaattggtgctgttga

SEQ ID NO: 1539 - DNA, 23 bp, Artificial Sequence
  Description of Artificial Sequence: Synthetic oligonucleotide
  Mitotic kinesin microtubule-associated protein Eg5 (Kif11) siRNA
ttgaaaaaattggtgctgttgag

SEQ ID NO: 1540 - DNA, 23 bp, Artificial Sequence
  Description of Artificial Sequence: Synthetic oligonucleotide
  Mitotic kinesin microtubule-associated protein Eg5 (Kif11) siRNA
tgaaaaaattggtgctgttgagg

SEQ ID NO: 1541 - DNA, 23 bp, Artificial Sequence
  Description of Artificial Sequence: Synthetic oligonucleotide
  Mitotic kinesin microtubule-associated protein Eg5 (Kif11) siRNA
gaaaaaattggtgctgttgagga

SEQ ID NO: 1542 - DNA, 23 bp, Artificial Sequence
  Description of Artificial Sequence: Synthetic oligonucleotide
  Mitotic kinesin microtubule-associated protein Eg5 (Kif11) siRNA
aaaaaattggtgctgttgaggag

SEQ ID NO: 1543 - DNA, 23 bp, Artificial Sequence
  Description of Artificial Sequence: Synthetic oligonucleotide
  Mitotic kinesin microtubule-associated protein Eg5 (Kif11) siRNA
aaaaattggtgctgttgaggagg

SEQ ID NO: 1544 - DNA, 23 bp, Artificial Sequence
  Description of Artificial Sequence: Synthetic oligonucleotide
  Mitotic kinesin microtubule-associated protein Eg5 (Kif11) siRNA
aaaattggtgctgttgaggagga

SEQ ID NO: 1545 - DNA, 23 bp, Artificial Sequence
  Description of Artificial Sequence: Synthetic oligonucleotide
  Mitotic kinesin microtubule-associated protein Eg5 (Kif11) siRNA
aaattggtgctgttgaggaggag

SEQ ID NO: 1546 - DNA, 23 bp, Artificial Sequence
  Description of Artificial Sequence: Synthetic oligonucleotide
  Mitotic kinesin microtubule-associated protein Eg5 (Kif11) siRNA
aattggtgctgttgaggaggagc

SEQ ID NO: 1547 - DNA, 23 bp, Artificial Sequence
  Description of Artificial Sequence: Synthetic oligonucleotide
  Mitotic kinesin microtubule-associated protein Eg5 (Kif11) siRNA
attggtgctgttgaggaggagct

SEQ ID NO: 1548 - DNA, 23 bp, Artificial Sequence
  Description of Artificial Sequence: Synthetic oligonucleotide
  Mitotic kinesin microtubule-associated protein Eg5 (Kif11) siRNA
ttggtgctgttgaggaggagctg

SEQ ID NO: 1549 - DNA, 23 bp, Artificial Sequence
  Description of Artificial Sequence: Synthetic oligonucleotide
  Mitotic kinesin microtubule-associated protein Eg5 (Kif11) siRNA
tggtgctgttgaggaggagctga

SEQ ID NO: 1550 - DNA, 23 bp, Artificial Sequence
  Description of Artificial Sequence: Synthetic oligonucleotide
  Mitotic kinesin microtubule-associated protein Eg5 (Kif11) siRNA
ggtgctgttgaggaggagctgaa

SEQ ID NO: 1551 - DNA, 23 bp, Artificial Sequence
  Description of Artificial Sequence: Synthetic oligonucleotide
  Mitotic kinesin microtubule-associated protein Eg5 (Kif11) siRNA
gtgctgttgaggaggagctgaat

SEQ ID NO: 1552 - DNA, 23 bp, Artificial Sequence
  Description of Artificial Sequence: Synthetic oligonucleotide
  Mitotic kinesin microtubule-associated protein Eg5 (Kif11) siRNA
tgctgttgaggaggagctgaata

SEQ ID NO: 1553 - DNA, 23 bp, Artificial Sequence
  Description of Artificial Sequence: Synthetic oligonucleotide
  Mitotic kinesin microtubule-associated protein Eg5 (Kif11) siRNA
gctgttgaggaggagctgaatag

SEQ ID NO: 1554 - DNA, 23 bp, Artificial Sequence
  Description of Artificial Sequence: Synthetic oligonucleotide
  Mitotic kinesin microtubule-associated protein Eg5 (Kif11) siRNA
ctgttgaggaggagctgaatagg

SEQ ID NO: 1555 - DNA, 23 bp, Artificial Sequence
  Description of Artificial Sequence: Synthetic oligonucleotide
  Mitotic kinesin microtubule-associated protein Eg5 (Kif11) siRNA
tgttgaggaggagctgaataggg

SEQ ID NO: 1556 - DNA, 23 bp, Artificial Sequence
  Description of Artificial Sequence: Synthetic oligonucleotide
  Mitotic kinesin microtubule-associated protein Eg5 (Kif11) siRNA
gttgaggaggagctgaatagggt

SEQ ID NO: 1557 - DNA, 23 bp, Artificial Sequence
  Description of Artificial Sequence: Synthetic oligonucleotide
  Mitotic kinesin microtubule-associated protein Eg5 (Kif11) siRNA
ttgaggaggagctgaatagggtt

SEQ ID NO: 1558 - DNA, 23 bp, Artificial Sequence
  Description of Artificial Sequence: Synthetic oligonucleotide
  Mitotic kinesin microtubule-associated protein Eg5 (Kif11) siRNA
tgaggaggagctgaatagggtta

SEQ ID NO: 1559 - DNA, 23 bp, Artificial Sequence
  Description of Artificial Sequence: Synthetic oligonucleotide
  Mitotic kinesin microtubule-associated protein Eg5 (Kif11) siRNA
gaggaggagctgaatagggttac

SEQ ID NO: 1560 - DNA, 23 bp, Artificial Sequence
  Description of Artificial Sequence: Synthetic oligonucleotide
  Mitotic kinesin microtubule-associated protein Eg5 (Kif11) siRNA
aggaggagctgaatagggttaca

SEQ ID NO: 1561 - DNA, 23 bp, Artificial Sequence
  Description of Artificial Sequence: Synthetic oligonucleotide
  Mitotic kinesin microtubule-associated protein Eg5 (Kif11) siRNA
ggaggagctgaatagggttacag

SEQ ID NO: 1562 - DNA, 23 bp, Artificial Sequence
  Description of Artificial Sequence: Synthetic oligonucleotide
  Mitotic kinesin microtubule-associated protein Eg5 (Kif11) siRNA
gaggagctgaatagggttacaga

SEQ ID NO: 1563 - DNA, 23 bp, Artificial Sequence
  Description of Artificial Sequence: Synthetic oligonucleotide
  Mitotic kinesin microtubule-associated protein Eg5 (Kif11) siRNA
aggagctgaatagggttacagag

SEQ ID NO: 1564 - DNA, 23 bp, Artificial Sequence
  Description of Artificial Sequence: Synthetic oligonucleotide
  Mitotic kinesin microtubule-associated protein Eg5 (Kif11) siRNA
ggagctgaatagggttacagagt

SEQ ID NO: 1565 - DNA, 23 bp, Artificial Sequence
  Description of Artificial Sequence: Synthetic oligonucleotide
  Mitotic kinesin microtubule-associated protein Eg5 (Kif11) siRNA
gagctgaatagggttacagagtt

SEQ ID NO: 1566 - DNA, 23 bp, Artificial Sequence
  Description of Artificial Sequence: Synthetic oligonucleotide
  Mitotic kinesin microtubule-associated protein Eg5 (Kif11) siRNA
agctgaatagggttacagagttg

SEQ ID NO: 1567 - DNA, 23 bp, Artificial Sequence
  Description of Artificial Sequence: Synthetic oligonucleotide
  Mitotic kinesin microtubule-associated protein Eg5 (Kif11) siRNA
gctgaatagggttacagagttgt

SEQ ID NO: 1568 - DNA, 23 bp, Artificial Sequence
  Description of Artificial Sequence: Synthetic oligonucleotide
  Mitotic kinesin microtubule-associated protein Eg5 (Kif11) siRNA
ctgaatagggttacagagttgtt

SEQ ID NO: 1569 - DNA, 23 bp, Artificial Sequence
  Description of Artificial Sequence: Synthetic oligonucleotide
  Mitotic kinesin microtubule-associated protein Eg5 (Kif11) siRNA
tgaatagggttacagagttgttt

SEQ ID NO: 1570 - DNA, 23 bp, Artificial Sequence
  Description of Artificial Sequence: Synthetic oligonucleotide
  Mitotic kinesin microtubule-associated protein Eg5 (Kif11) siRNA
gaatagggttacagagttgttta

SEQ ID NO: 1571 - DNA, 23 bp, Artificial Sequence
  Description of Artificial Sequence: Synthetic oligonucleotide
  Mitotic kinesin microtubule-associated protein Eg5 (Kif11) siRNA
aatagggttacagagttgtttat

SEQ ID NO: 1572 - DNA, 23 bp, Artificial Sequence
  Description of Artificial Sequence: Synthetic oligonucleotide
  Mitotic kinesin microtubule-associated protein Eg5 (Kif11) siRNA
atagggttacagagttgtttatg

SEQ ID NO: 1573 - DNA, 23 bp, Artificial Sequence
  Description of Artificial Sequence: Synthetic oligonucleotide
  Mitotic kinesin microtubule-associated protein Eg5 (Kif11) siRNA
tagggttacagagttgtttatgg

SEQ ID NO: 1574 - DNA, 23 bp, Artificial Sequence
  Description of Artificial Sequence: Synthetic oligonucleotide
  Mitotic kinesin microtubule-associated protein Eg5 (Kif11) siRNA
agggttacagagttgtttatgga

SEQ ID NO: 1575 - DNA, 23 bp, Artificial Sequence
  Description of Artificial Sequence: Synthetic oligonucleotide
  Mitotic kinesin microtubule-associated protein Eg5 (Kif11) siRNA
gggttacagagttgtttatggat

SEQ ID NO: 1576 - DNA, 23 bp, Artificial Sequence
  Description of Artificial Sequence: Synthetic oligonucleotide
  Mitotic kinesin microtubule-associated protein Eg5 (Kif11) siRNA
ggttacagagttgtttatggata

SEQ ID NO: 1577 - DNA, 23 bp, Artificial Sequence
  Description of Artificial Sequence: Synthetic oligonucleotide
  Mitotic kinesin microtubule-associated protein Eg5 (Kif11) siRNA
gttacagagttgtttatggataa

SEQ ID NO: 1578 - DNA, 23 bp, Artificial Sequence
  Description of Artificial Sequence: Synthetic oligonucleotide
  Mitotic kinesin microtubule-associated protein Eg5 (Kif11) siRNA
ttacagagttgtttatggataat

SEQ ID NO: 1579 - DNA, 23 bp, Artificial Sequence
  Description of Artificial Sequence: Synthetic oligonucleotide
  Mitotic kinesin microtubule-associated protein Eg5 (Kif11) siRNA
tacagagttgtttatggataata

SEQ ID NO: 1580 - DNA, 23 bp, Artificial Sequence
  Description of Artificial Sequence: Synthetic oligonucleotide
  Mitotic kinesin microtubule-associated protein Eg5 (Kif11) siRNA
acagagttgtttatggataataa

SEQ ID NO: 1581 - DNA, 23 bp, Artificial Sequence
  Description of Artificial Sequence: Synthetic oligonucleotide
  Mitotic kinesin microtubule-associated protein Eg5 (Kif11) siRNA
cagagttgtttatggataataaa

SEQ ID NO: 1582 - DNA, 23 bp, Artificial Sequence
  Description of Artificial Sequence: Synthetic oligonucleotide
  Mitotic kinesin microtubule-associated protein Eg5 (Kif11) siRNA
agagttgtttatggataataaaa

SEQ ID NO: 1583 - DNA, 23 bp, Artificial Sequence
  Description of Artificial Sequence: Synthetic oligonucleotide
  Mitotic kinesin microtubule-associated protein Eg5 (Kif11) siRNA
gagttgtttatggataataaaaa

SEQ ID NO: 1584 - DNA, 23 bp, Artificial Sequence
  Description of Artificial Sequence: Synthetic oligonucleotide
  Mitotic kinesin microtubule-associated protein Eg5 (Kif11) siRNA
agttgtttatggataataaaaat

SEQ ID NO: 1585 - DNA, 23 bp, Artificial Sequence
  Description of Artificial Sequence: Synthetic oligonucleotide
  Mitotic kinesin microtubule-associated protein Eg5 (Kif11) siRNA
gttgtttatggataataaaaatg

SEQ ID NO: 1586 - DNA, 23 bp, Artificial Sequence
  Description of Artificial Sequence: Synthetic oligonucleotide
  Mitotic kinesin microtubule-associated protein Eg5 (Kif11) siRNA
ttgtttatggataataaaaatga

SEQ ID NO: 1587 - DNA, 23 bp, Artificial Sequence
  Description of Artificial Sequence: Synthetic oligonucleotide
  Mitotic kinesin microtubule-associated protein Eg5 (Kif11) siRNA
tgtttatggataataaaaatgaa

SEQ ID NO: 1588 - DNA, 23 bp, Artificial Sequence
  Description of Artificial Sequence: Synthetic oligonucleotide
  Mitotic kinesin microtubule-associated protein Eg5 (Kif11) siRNA
gtttatggataataaaaatgaac

SEQ ID NO: 1589 - DNA, 23 bp, Artificial Sequence
  Description of Artificial Sequence: Synthetic oligonucleotide
  Mitotic kinesin microtubule-associated protein Eg5 (Kif11) siRNA
tttatggataataaaaatgaact

SEQ ID NO: 1590 - DNA, 23 bp, Artificial Sequence
  Description of Artificial Sequence: Synthetic oligonucleotide
  Mitotic kinesin microtubule-associated protein Eg5 (Kif11) siRNA
ttatggataataaaaatgaactt

SEQ ID NO: 1591 - DNA, 23 bp, Artificial Sequence
  Description of Artificial Sequence: Synthetic oligonucleotide
  Mitotic kinesin microtubule-associated protein Eg5 (Kif11) siRNA
tatggataataaaaatgaacttg

SEQ ID NO: 1592 - DNA, 23 bp, Artificial Sequence
  Description of Artificial Sequence: Synthetic oligonucleotide
  Mitotic kinesin microtubule-associated protein Eg5 (Kif11) siRNA
atggataataaaaatgaacttga

SEQ ID NO: 1593 - DNA, 23 bp, Artificial Sequence
  Description of Artificial Sequence: Synthetic oligonucleotide
  Mitotic kinesin microtubule-associated protein Eg5 (Kif11) siRNA
tggataataaaaatgaacttgac

SEQ ID NO: 1594 - DNA, 23 bp, Artificial Sequence
  Description of Artificial Sequence: Synthetic oligonucleotide
  Mitotic kinesin microtubule-associated protein Eg5 (Kif11) siRNA
ggataataaaaatgaacttgacc

SEQ ID NO: 1595 - DNA, 23 bp, Artificial Sequence
  Description of Artificial Sequence: Synthetic oligonucleotide
  Mitotic kinesin microtubule-associated protein Eg5 (Kif11) siRNA
gataataaaaatgaacttgacca

SEQ ID NO: 1596 - DNA, 23 bp, Artificial Sequence
  Description of Artificial Sequence: Synthetic oligonucleotide
  Mitotic kinesin microtubule-associated protein Eg5 (Kif11) siRNA
ataataaaaatgaacttgaccag

SEQ ID NO: 1597 - DNA, 23 bp, Artificial Sequence
  Description of Artificial Sequence: Synthetic oligonucleotide
  Mitotic kinesin microtubule-associated protein Eg5 (Kif11) siRNA
taataaaaatgaacttgaccagt

SEQ ID NO: 1598 - DNA, 23 bp, Artificial Sequence
  Description of Artificial Sequence: Synthetic oligonucleotide
  Mitotic kinesin microtubule-associated protein Eg5 (Kif11) siRNA
aataaaaatgaacttgaccagtg

SEQ ID NO: 1599 - DNA, 23 bp, Artificial Sequence
  Description of Artificial Sequence: Synthetic oligonucleotide
  Mitotic kinesin microtubule-associated protein Eg5 (Kif11) siRNA
ataaaaatgaacttgaccagtgt

SEQ ID NO: 1600 - DNA, 23 bp, Artificial Sequence
  Description of Artificial Sequence: Synthetic oligonucleotide
  Mitotic kinesin microtubule-associated protein Eg5 (Kif11) siRNA
taaaaatgaacttgaccagtgta

SEQ ID NO: 1601 - DNA, 23 bp, Artificial Sequence
  Description of Artificial Sequence: Synthetic oligonucleotide
  Mitotic kinesin microtubule-associated protein Eg5 (Kif11) siRNA
aaaaatgaacttgaccagtgtaa

SEQ ID NO: 1602 - DNA, 23 bp, Artificial Sequence
  Description of Artificial Sequence: Synthetic oligonucleotide
  Mitotic kinesin microtubule-associated protein Eg5 (Kif11) siRNA
aaaatgaacttgaccagtgtaaa

SEQ ID NO: 1603 - DNA, 23 bp, Artificial Sequence
  Description of Artificial Sequence: Synthetic oligonucleotide
  Mitotic kinesin microtubule-associated protein Eg5 (Kif11) siRNA
aaatgaacttgaccagtgtaaat

SEQ ID NO: 1604 - DNA, 23 bp, Artificial Sequence
  Description of Artificial Sequence: Synthetic oligonucleotide
  Mitotic kinesin microtubule-associated protein Eg5 (Kif11) siRNA
aatgaacttgaccagtgtaaatc

SEQ ID NO: 1605 - DNA, 23 bp, Artificial Sequence
  Description of Artificial Sequence: Synthetic oligonucleotide
  Mitotic kinesin microtubule-associated protein Eg5 (Kif11) siRNA
atgaacttgaccagtgtaaatct

SEQ ID NO: 1606 - DNA, 23 bp, Artificial Sequence
  Description of Artificial Sequence: Synthetic oligonucleotide
  Mitotic kinesin microtubule-associated protein Eg5 (Kif11) siRNA
tgaacttgaccagtgtaaatctg

SEQ ID NO: 1607 - DNA, 23 bp, Artificial Sequence
  Description of Artificial Sequence: Synthetic oligonucleotide
  Mitotic kinesin microtubule-associated protein Eg5 (Kif11) siRNA
gaacttgaccagtgtaaatctga

SEQ ID NO: 1608 - DNA, 23 bp, Artificial Sequence
  Description of Artificial Sequence: Synthetic oligonucleotide
  Mitotic kinesin microtubule-associated protein Eg5 (Kif11) siRNA
aacttgaccagtgtaaatctgac

SEQ ID NO: 1609 - DNA, 23 bp, Artificial Sequence
  Description of Artificial Sequence: Synthetic oligonucleotide
  Mitotic kinesin microtubule-associated protein Eg5 (Kif11) siRNA
acttgaccagtgtaaatctgacc

SEQ ID NO: 1610 - DNA, 23 bp, Artificial Sequence
  Description of Artificial Sequence: Synthetic oligonucleotide
  Mitotic kinesin microtubule-associated protein Eg5 (Kif11) siRNA
cttgaccagtgtaaatctgacct

SEQ ID NO: 1611 - DNA, 23 bp, Artificial Sequence
  Description of Artificial Sequence: Synthetic oligonucleotide
  Mitotic kinesin microtubule-associated protein Eg5 (Kif11) siRNA
ttgaccagtgtaaatctgacctg

SEQ ID NO: 1612 - DNA, 23 bp, Artificial Sequence
  Description of Artificial Sequence: Synthetic oligonucleotide
  Mitotic kinesin microtubule-associated protein Eg5 (Kif11) siRNA
tgaccagtgtaaatctgacctgc

SEQ ID NO: 1613 - DNA, 23 bp, Artificial Sequence
  Description of Artificial Sequence: Synthetic oligonucleotide
  Mitotic kinesin microtubule-associated protein Eg5 (Kif11) siRNA
gaccagtgtaaatctgacctgca

SEQ ID NO: 1614 - DNA, 23 bp, Artificial Sequence
  Description of Artificial Sequence: Synthetic oligonucleotide
  Mitotic kinesin microtubule-associated protein Eg5 (Kif11) siRNA
accagtgtaaatctgacctgcaa

SEQ ID NO: 1615 - DNA, 23 bp, Artificial Sequence
  Description of Artificial Sequence: Synthetic oligonucleotide
  Mitotic kinesin microtubule-associated protein Eg5 (Kif11) siRNA
ccagtgtaaatctgacctgcaaa

SEQ ID NO: 1616 - DNA, 23 bp, Artificial Sequence
  Description of Artificial Sequence: Synthetic oligonucleotide
  Mitotic kinesin microtubule-associated protein Eg5 (Kif11) siRNA
cagtgtaaatctgacctgcaaaa

SEQ ID NO: 1617 - DNA, 23 bp, Artificial Sequence
  Description of Artificial Sequence: Synthetic oligonucleotide
  Mitotic kinesin microtubule-associated protein Eg5 (Kif11) siRNA
agtgtaaatctgacctgcaaaat

SEQ ID NO: 1618 - DNA, 23 bp, Artificial Sequence
  Description of Artificial Sequence: Synthetic oligonucleotide
  Mitotic kinesin microtubule-associated protein Eg5 (Kif11) siRNA
gtgtaaatctgacctgcaaaata

SEQ ID NO: 1619 - DNA, 23 bp, Artificial Sequence
  Description of Artificial Sequence: Synthetic oligonucleotide
  Mitotic kinesin microtubule-associated protein Eg5 (Kif11) siRNA
tgtaaatctgacctgcaaaataa

SEQ ID NO: 1620 - DNA, 23 bp, Artificial Sequence
  Description of Artificial Sequence: Synthetic oligonucleotide
  Mitotic kinesin microtubule-associated protein Eg5 (Kif11) siRNA
gtaaatctgacctgcaaaataaa

SEQ ID NO: 1621 - DNA, 23 bp, Artificial Sequence
  Description of Artificial Sequence: Synthetic oligonucleotide
  Mitotic kinesin microtubule-associated protein Eg5 (Kif11) siRNA
taaatctgacctgcaaaataaaa

SEQ ID NO: 1622 - DNA, 23 bp, Artificial Sequence
  Description of Artificial Sequence: Synthetic oligonucleotide
  Mitotic kinesin microtubule-associated protein Eg5 (Kif11) siRNA
aaatctgacctgcaaaataaaac

SEQ ID NO: 1623 - DNA, 23 bp, Artificial Sequence
  Description of Artificial Sequence: Synthetic oligonucleotide
  Mitotic kinesin microtubule-associated protein Eg5 (Kif11) siRNA
aatctgacctgcaaaataaaaca

SEQ ID NO: 1624 - DNA, 23 bp, Artificial Sequence
  Description of Artificial Sequence: Synthetic oligonucleotide
  Mitotic kinesin microtubule-associated protein Eg5 (Kif11) siRNA
atctgacctgcaaaataaaacac

SEQ ID NO: 1625 - DNA, 23 bp, Artificial Sequence
  Description of Artificial Sequence: Synthetic oligonucleotide
  Mitotic kinesin microtubule-associated protein Eg5 (Kif11) siRNA
tctgacctgcaaaataaaacaca

SEQ ID NO: 1626 - DNA, 23 bp, Artificial Sequence
  Description of Artificial Sequence: Synthetic oligonucleotide
  Mitotic kinesin microtubule-associated protein Eg5 (Kif11) siRNA
ctgacctgcaaaataaaacacaa

SEQ ID NO: 1627 - DNA, 23 bp, Artificial Sequence
  Description of Artificial Sequence: Synthetic oligonucleotide
  Mitotic kinesin microtubule-associated protein Eg5 (Kif11) siRNA
tgacctgcaaaataaaacacaag

SEQ ID NO: 1628 - DNA, 23 bp, Artificial Sequence
  Description of Artificial Sequence: Synthetic oligonucleotide
  Mitotic kinesin microtubule-associated protein Eg5 (Kif11) siRNA
gacctgcaaaataaaacacaaga

SEQ ID NO: 1629 - DNA, 23 bp, Artificial Sequence
  Description of Artificial Sequence: Synthetic oligonucleotide
  Mitotic kinesin microtubule-associated protein Eg5 (Kif11) siRNA
acctgcaaaataaaacacaagaa

SEQ ID NO: 1630 - DNA, 23 bp, Artificial Sequence
  Description of Artificial Sequence: Synthetic oligonucleotide
  Mitotic kinesin microtubule-associated protein Eg5 (Kif11) siRNA
cctgcaaaataaaacacaagaac

SEQ ID NO: 1631 - DNA, 23 bp, Artificial Sequence
  Description of Artificial Sequence: Synthetic oligonucleotide
  Mitotic kinesin microtubule-associated protein Eg5 (Kif11) siRNA
ctgcaaaataaaacacaagaact

SEQ ID NO: 1632 - DNA, 23 bp, Artificial Sequence
  Description of Artificial Sequence: Synthetic oligonucleotide
  Mitotic kinesin microtubule-associated protein Eg5 (Kif11) siRNA
tgcaaaataaaacacaagaactt

SEQ ID NO: 1633 - DNA, 23 bp, Artificial Sequence
  Description of Artificial Sequence: Synthetic oligonucleotide
  Mitotic kinesin microtubule-associated protein Eg5 (Kif11) siRNA
gcaaaataaaacacaagaacttg

SEQ ID NO: 1634 - DNA, 23 bp, Artificial Sequence
  Description of Artificial Sequence: Synthetic oligonucleotide
  Mitotic kinesin microtubule-associated protein Eg5 (Kif11) siRNA
caaaataaaacacaagaacttga

SEQ ID NO: 1635 - DNA, 23 bp, Artificial Sequence
  Description of Artificial Sequence: Synthetic oligonucleotide
  Mitotic kinesin microtubule-associated protein Eg5 (Kif11) siRNA
aaaataaaacacaagaacttgaa

SEQ ID NO: 1636 - DNA, 23 bp, Artificial Sequence
  Description of Artificial Sequence: Synthetic oligonucleotide
  Mitotic kinesin microtubule-associated protein Eg5 (Kif11) siRNA
aaataaaacacaagaacttgaaa

SEQ ID NO: 1637 - DNA, 23 bp, Artificial Sequence
  Description of Artificial Sequence: Synthetic oligonucleotide
  Mitotic kinesin microtubule-associated protein Eg5 (Kif11) siRNA
aataaaacacaagaacttgaaac

SEQ ID NO: 1638 - DNA, 23 bp, Artificial Sequence
  Description of Artificial Sequence: Synthetic oligonucleotide
  Mitotic kinesin microtubule-associated protein Eg5 (Kif11) siRNA
ataaaacacaagaacttgaaacc

SEQ ID NO: 1639 - DNA, 23 bp, Artificial Sequence
  Description of Artificial Sequence: Synthetic oligonucleotide
  Mitotic kinesin microtubule-associated protein Eg5 (Kif11) siRNA
taaaacacaagaacttgaaacca

SEQ ID NO: 1640 - DNA, 23 bp, Artificial Sequence
  Description of Artificial Sequence: Synthetic oligonucleotide
  Mitotic kinesin microtubule-associated protein Eg5 (Kif11) siRNA
aaaacacaagaacttgaaaccac

SEQ ID NO: 1641 - DNA, 23 bp, Artificial Sequence
  Description of Artificial Sequence: Synthetic oligonucleotide
  Mitotic kinesin microtubule-associated protein Eg5 (Kif11) siRNA
aaacacaagaacttgaaaccact

SEQ ID NO: 1642 - DNA, 23 bp, Artificial Sequence
  Description of Artificial Sequence: Synthetic oligonucleotide
  Mitotic kinesin microtubule-associated protein Eg5 (Kif11) siRNA
aacacaagaacttgaaaccactc

SEQ ID NO: 1643 - DNA, 23 bp, Artificial Sequence
  Description of Artificial Sequence: Synthetic oligonucleotide
  Mitotic kinesin microtubule-associated protein Eg5 (Kif11) siRNA
acacaagaacttgaaaccactca

SEQ ID NO: 1644 - DNA, 23 bp, Artificial Sequence
  Description of Artificial Sequence: Synthetic oligonucleotide
  Mitotic kinesin microtubule-associated protein Eg5 (Kif11) siRNA
cacaagaacttgaaaccactcaa

SEQ ID NO: 1645 - DNA, 23 bp, Artificial Sequence
  Description of Artificial Sequence: Synthetic oligonucleotide
  Mitotic kinesin microtubule-associated protein Eg5 (Kif11) siRNA
acaagaacttgaaaccactcaaa

SEQ ID NO: 1646 - DNA, 23 bp, Artificial Sequence
  Description of Artificial Sequence: Synthetic oligonucleotide
  Mitotic kinesin microtubule-associated protein Eg5 (Kif11) siRNA
caagaacttgaaaccactcaaaa

SEQ ID NO: 1647 - DNA, 23 bp, Artificial Sequence
  Description of Artificial Sequence: Synthetic oligonucleotide
  Mitotic kinesin microtubule-associated protein Eg5 (Kif11) siRNA
aagaacttgaaaccactcaaaaa

SEQ ID NO: 1648 - DNA, 23 bp, Artificial Sequence
  Description of Artificial Sequence: Synthetic oligonucleotide
  Mitotic kinesin microtubule-associated protein Eg5 (Kif11) siRNA
agaacttgaaaccactcaaaaac

SEQ ID NO: 1649 - DNA, 23 bp, Artificial Sequence
  Description of Artificial Sequence: Synthetic oligonucleotide
  Mitotic kinesin microtubule-associated protein Eg5 (Kif11) siRNA
gaacttgaaaccactcaaaaaca

SEQ ID NO: 1650 - DNA, 23 bp, Artificial Sequence
  Description of Artificial Sequence: Synthetic oligonucleotide
  Mitotic kinesin microtubule-associated protein Eg5 (Kif11) siRNA
aacttgaaaccactcaaaaacat

SEQ ID NO: 1651 - DNA, 23 bp, Artificial Sequence
  Description of Artificial Sequence: Synthetic oligonucleotide
  Mitotic kinesin microtubule-associated protein Eg5 (Kif11) siRNA
acttgaaaccactcaaaaacatt

SEQ ID NO: 1652 - DNA, 23 bp, Artificial Sequence
  Description of Artificial Sequence: Synthetic oligonucleotide
  Mitotic kinesin microtubule-associated protein Eg5 (Kif11) siRNA
cttgaaaccactcaaaaacattt

SEQ ID NO: 1653 - DNA, 23 bp, Artificial Sequence
  Description of Artificial Sequence: Synthetic oligonucleotide
  Mitotic kinesin microtubule-associated protein Eg5 (Kif11) siRNA
ttgaaaccactcaaaaacatttg

SEQ ID NO: 1654 - DNA, 23 bp, Artificial Sequence
  Description of Artificial Sequence: Synthetic oligonucleotide
  Mitotic kinesin microtubule-associated protein Eg5 (Kif11) siRNA
tgaaaccactcaaaaacatttgc

SEQ ID NO: 1655 - DNA, 23 bp, Artificial Sequence
  Description of Artificial Sequence: Synthetic oligonucleotide
  Mitotic kinesin microtubule-associated protein Eg5 (Kif11) siRNA
gaaaccactcaaaaacatttgca

SEQ ID NO: 1656 - DNA, 23 bp, Artificial Sequence
  Description of Artificial Sequence: Synthetic oligonucleotide
  Mitotic kinesin microtubule-associated protein Eg5 (Kif11) siRNA
aaaccactcaaaaacatttgcaa

SEQ ID NO: 1657 - DNA, 23 bp, Artificial Sequence
  Description of Artificial Sequence: Synthetic oligonucleotide
  Mitotic kinesin microtubule-associated protein Eg5 (Kif11) siRNA
aaccactcaaaaacatttgcaag

SEQ ID NO: 1658 - DNA, 23 bp, Artificial Sequence
  Description of Artificial Sequence: Synthetic oligonucleotide
  Mitotic kinesin microtubule-associated protein Eg5 (Kif11) siRNA
accactcaaaaacatttgcaaga

SEQ ID NO: 1659 - DNA, 23 bp, Artificial Sequence
  Description of Artificial Sequence: Synthetic oligonucleotide
  Mitotic kinesin microtubule-associated protein Eg5 (Kif11) siRNA
ccactcaaaaacatttgcaagaa

SEQ ID NO: 1660 - DNA, 23 bp, Artificial Sequence
  Description of Artificial Sequence: Synthetic oligonucleotide
  Mitotic kinesin microtubule-associated protein Eg5 (Kif11) siRNA
cactcaaaaacatttgcaagaaa

SEQ ID NO: 1661 - DNA, 23 bp, Artificial Sequence
  Description of Artificial Sequence: Synthetic oligonucleotide
  Mitotic kinesin microtubule-associated protein Eg5 (Kif11) siRNA
actcaaaaacatttgcaagaaac

SEQ ID NO: 1662 - DNA, 23 bp, Artificial Sequence
  Description of Artificial Sequence: Synthetic oligonucleotide
  Mitotic kinesin microtubule-associated protein Eg5 (Kif11) siRNA
ctcaaaaacatttgcaagaaact

SEQ ID NO: 1663 - DNA, 23 bp, Artificial Sequence
  Description of Artificial Sequence: Synthetic oligonucleotide
  Mitotic kinesin microtubule-associated protein Eg5 (Kif11) siRNA
tcaaaaacatttgcaagaaacta

SEQ ID NO: 1664 - DNA, 23 bp, Artificial Sequence
  Description of Artificial Sequence: Synthetic oligonucleotide
  Mitotic kinesin microtubule-associated protein Eg5 (Kif11) siRNA
caaaaacatttgcaagaaactaa

SEQ ID NO: 1665 - DNA, 23 bp, Artificial Sequence
  Description of Artificial Sequence: Synthetic oligonucleotide
  Mitotic kinesin microtubule-associated protein Eg5 (Kif11) siRNA
aaaaacatttgcaagaaactaaa

SEQ ID NO: 1666 - DNA, 23 bp, Artificial Sequence
  Description of Artificial Sequence: Synthetic oligonucleotide
  Mitotic kinesin microtubule-associated protein Eg5 (Kif11) siRNA
aaaacatttgcaagaaactaaat

SEQ ID NO: 1667 - DNA, 23 bp, Artificial Sequence
  Description of Artificial Sequence: Synthetic oligonucleotide
  Mitotic kinesin microtubule-associated protein Eg5 (Kif11) siRNA
aaacatttgcaagaaactaaatt

SEQ ID NO: 1668 - DNA, 23 bp, Artificial Sequence
  Description of Artificial Sequence: Synthetic oligonucleotide
  Mitotic kinesin microtubule-associated protein Eg5 (Kif11) siRNA
aacatttgcaagaaactaaatta

SEQ ID NO: 1669 - DNA, 23 bp, Artificial Sequence
  Description of Artificial Sequence: Synthetic oligonucleotide
  Mitotic kinesin microtubule-associated protein Eg5 (Kif11) siRNA
acatttgcaagaaactaaattac

SEQ ID NO: 1670 - DNA, 23 bp, Artificial Sequence
  Description of Artificial Sequence: Synthetic oligonucleotide
  Mitotic kinesin microtubule-associated protein Eg5 (Kif11) siRNA
catttgcaagaaactaaattaca

SEQ ID NO: 1671 - DNA, 23 bp, Artificial Sequence
  Description of Artificial Sequence: Synthetic oligonucleotide
  Mitotic kinesin microtubule-associated protein Eg5 (Kif11) siRNA
atttgcaagaaactaaattacaa

SEQ ID NO: 1672 - DNA, 23 bp, Artificial Sequence
  Description of Artificial Sequence: Synthetic oligonucleotide
  Mitotic kinesin microtubule-associated protein Eg5 (Kif11) siRNA
tttgcaagaaactaaattacaac

SEQ ID NO: 1673 - DNA, 23 bp, Artificial Sequence
  Description of Artificial Sequence: Synthetic oligonucleotide
  Mitotic kinesin microtubule-associated protein Eg5 (Kif11) siRNA
ttgcaagaaactaaattacaact

SEQ ID NO: 1674 - DNA, 23 bp, Artificial Sequence
  Description of Artificial Sequence: Synthetic oligonucleotide
  Mitotic kinesin microtubule-associated protein Eg5 (Kif11) siRNA
tgcaagaaactaaattacaactt

SEQ ID NO: 1675 - DNA, 23 bp, Artificial Sequence
  Description of Artificial Sequence: Synthetic oligonucleotide
  Mitotic kinesin microtubule-associated protein Eg5 (Kif11) siRNA
gcaagaaactaaattacaacttg

SEQ ID NO: 1676 - DNA, 23 bp, Artificial Sequence
  Description of Artificial Sequence: Synthetic oligonucleotide
  Mitotic kinesin microtubule-associated protein Eg5 (Kif11) siRNA
caagaaactaaattacaacttgt

SEQ ID NO: 1677 - DNA, 23 bp, Artificial Sequence
  Description of Artificial Sequence: Synthetic oligonucleotide
  Mitotic kinesin microtubule-associated protein Eg5 (Kif11) siRNA
aagaaactaaattacaacttgtt

SEQ ID NO: 1678 - DNA, 23 bp, Artificial Sequence
  Description of Artificial Sequence: Synthetic oligonucleotide
  Mitotic kinesin microtubule-associated protein Eg5 (Kif11) siRNA
agaaactaaattacaacttgtta

SEQ ID NO: 1679 - DNA, 23 bp, Artificial Sequence
  Description of Artificial Sequence: Synthetic oligonucleotide
  Mitotic kinesin microtubule-associated protein Eg5 (Kif11) siRNA
gaaactaaattacaacttgttaa

SEQ ID NO: 1680 - DNA, 23 bp, Artificial Sequence
  Description of Artificial Sequence: Synthetic oligonucleotide
  Mitotic kinesin microtubule-associated protein Eg5 (Kif11) siRNA
aaactaaattacaacttgttaaa

SEQ ID NO: 1681 - DNA, 23 bp, Artificial Sequence
  Description of Artificial Sequence: Synthetic oligonucleotide
  Mitotic kinesin microtubule-associated protein Eg5 (Kif11) siRNA
aactaaattacaacttgttaaag

SEQ ID NO: 1682 - DNA, 23 bp, Artificial Sequence
  Description of Artificial Sequence: Synthetic oligonucleotide
  Mitotic kinesin microtubule-associated protein Eg5 (Kif11) siRNA
actaaattacaacttgttaaaga

SEQ ID NO: 1683 - DNA, 23 bp, Artificial Sequence
  Description of Artificial Sequence: Synthetic oligonucleotide
  Mitotic kinesin microtubule-associated protein Eg5 (Kif11) siRNA
ctaaattacaacttgttaaagaa

SEQ ID NO: 1684 - DNA, 23 bp, Artificial Sequence
  Description of Artificial Sequence: Synthetic oligonucleotide
  Mitotic kinesin microtubule-associated protein Eg5 (Kif11) siRNA
taaattacaacttgttaaagaag

SEQ ID NO: 1685 - DNA, 23 bp, Artificial Sequence
  Description of Artificial Sequence: Synthetic oligonucleotide
  Mitotic kinesin microtubule-associated protein Eg5 (Kif11) siRNA
aaattacaacttgttaaagaaga

SEQ ID NO: 1686 - DNA, 23 bp, Artificial Sequence
  Description of Artificial Sequence: Synthetic oligonucleotide
  Mitotic kinesin microtubule-associated protein Eg5 (Kif11) siRNA
aattacaacttgttaaagaagaa

SEQ ID NO: 1687 - DNA, 23 bp, Artificial Sequence
  Description of Artificial Sequence: Synthetic oligonucleotide
  Mitotic kinesin microtubule-associated protein Eg5 (Kif11) siRNA
attacaacttgttaaagaagaat

SEQ ID NO: 1688 - DNA, 23 bp, Artificial Sequence
  Description of Artificial Sequence: Synthetic oligonucleotide
  Mitotic kinesin microtubule-associated protein Eg5 (Kif11) siRNA
ttacaacttgttaaagaagaata

SEQ ID NO: 1689 - DNA, 23 bp, Artificial Sequence
  Description of Artificial Sequence: Synthetic oligonucleotide
  Mitotic kinesin microtubule-associated protein Eg5 (Kif11) siRNA
tacaacttgttaaagaagaatat

SEQ ID NO: 1690 - DNA, 23 bp, Artificial Sequence
  Description of Artificial Sequence: Synthetic oligonucleotide
  Mitotic kinesin microtubule-associated protein Eg5 (Kif11) siRNA
acaacttgttaaagaagaatata

SEQ ID NO: 1691 - DNA, 23 bp, Artificial Sequence
  Description of Artificial Sequence: Synthetic oligonucleotide
  Mitotic kinesin microtubule-associated protein Eg5 (Kif11) siRNA
caacttgttaaagaagaatatat

SEQ ID NO: 1692 - DNA, 23 bp, Artificial Sequence
  Description of Artificial Sequence: Synthetic oligonucleotide
  Mitotic kinesin microtubule-associated protein Eg5 (Kif11) siRNA
aacttgttaaagaagaatatatc

SEQ ID NO: 1693 - DNA, 23 bp, Artificial Sequence
  Description of Artificial Sequence: Synthetic oligonucleotide
  Mitotic kinesin microtubule-associated protein Eg5 (Kif11) siRNA
acttgttaaagaagaatatatca

SEQ ID NO: 1694 - DNA, 23 bp, Artificial Sequence
  Description of Artificial Sequence: Synthetic oligonucleotide
  Mitotic kinesin microtubule-associated protein Eg5 (Kif11) siRNA
cttgttaaagaagaatatatcac

SEQ ID NO: 1695 - DNA, 23 bp, Artificial Sequence
  Description of Artificial Sequence: Synthetic oligonucleotide
  Mitotic kinesin microtubule-associated protein Eg5 (Kif11) siRNA
ttgttaaagaagaatatatcaca

SEQ ID NO: 1696 - DNA, 23 bp, Artificial Sequence
  Description of Artificial Sequence: Synthetic oligonucleotide
  Mitotic kinesin microtubule-associated protein Eg5 (Kif11) siRNA
tgttaaagaagaatatatcacat

SEQ ID NO: 1697 - DNA, 23 bp, Artificial Sequence
  Description of Artificial Sequence: Synthetic oligonucleotide
  Mitotic kinesin microtubule-associated protein Eg5 (Kif11) siRNA
gttaaagaagaatatatcacatc

SEQ ID NO: 1698 - DNA, 23 bp, Artificial Sequence
  Description of Artificial Sequence: Synthetic oligonucleotide
  Mitotic kinesin microtubule-associated protein Eg5 (Kif11) siRNA
ttaaagaagaatatatcacatca

SEQ ID NO: 1699 - DNA, 23 bp, Artificial Sequence
  Description of Artificial Sequence: Synthetic oligonucleotide
  Mitotic kinesin microtubule-associated protein Eg5 (Kif11) siRNA
taaagaagaatatatcacatcag

SEQ ID NO: 1700 - DNA, 23 bp, Artificial Sequence
  Description of Artificial Sequence: Synthetic oligonucleotide
  Mitotic kinesin microtubule-associated protein Eg5 (Kif11) siRNA
aaagaagaatatatcacatcagc

SEQ ID NO: 1701 - DNA, 23 bp, Artificial Sequence
  Description of Artificial Sequence: Synthetic oligonucleotide
  Mitotic kinesin microtubule-associated protein Eg5 (Kif11) siRNA
aagaagaatatatcacatcagct

SEQ ID NO: 1702 - DNA, 23 bp, Artificial Sequence
  Description of Artificial Sequence: Synthetic oligonucleotide
  Mitotic kinesin microtubule-associated protein Eg5 (Kif11) siRNA
agaagaatatatcacatcagctt

SEQ ID NO: 1703 - DNA, 23 bp, Artificial Sequence
  Description of Artificial Sequence: Synthetic oligonucleotide
  Mitotic kinesin microtubule-associated protein Eg5 (Kif11) siRNA
gaagaatatatcacatcagcttt

SEQ ID NO: 1704 - DNA, 23 bp, Artificial Sequence
  Description of Artificial Sequence: Synthetic oligonucleotide
  Mitotic kinesin microtubule-associated protein Eg5 (Kif11) siRNA
aagaatatatcacatcagctttg

SEQ ID NO: 1705 - DNA, 23 bp, Artificial Sequence
  Description of Artificial Sequence: Synthetic oligonucleotide
  Mitotic kinesin microtubule-associated protein Eg5 (Kif11) siRNA
agaatatatcacatcagctttgg

SEQ ID NO: 1706 - DNA, 23 bp, Artificial Sequence
  Description of Artificial Sequence: Synthetic oligonucleotide
  Mitotic kinesin microtubule-associated protein Eg5 (Kif11) siRNA
gaatatatcacatcagctttgga

SEQ ID NO: 1707 - DNA, 23 bp, Artificial Sequence
  Description of Artificial Sequence: Synthetic oligonucleotide
  Mitotic kinesin microtubule-associated protein Eg5 (Kif11) siRNA
aatatatcacatcagctttggaa

SEQ ID NO: 1708 - DNA, 23 bp, Artificial Sequence
  Description of Artificial Sequence: Synthetic oligonucleotide
  Mitotic kinesin microtubule-associated protein Eg5 (Kif11) siRNA
atatatcacatcagctttggaaa

SEQ ID NO: 1709 - DNA, 23 bp, Artificial Sequence
  Description of Artificial Sequence: Synthetic oligonucleotide
  Mitotic kinesin microtubule-associated protein Eg5 (Kif11) siRNA
tatatcacatcagctttggaaag

SEQ ID NO: 1710 - DNA, 23 bp, Artificial Sequence
  Description of Artificial Sequence: Synthetic oligonucleotide
  Mitotic kinesin microtubule-associated protein Eg5 (Kif11) siRNA
atatcacatcagctttggaaagt

SEQ ID NO: 1711 - DNA, 23 bp, Artificial Sequence
  Description of Artificial Sequence: Synthetic oligonucleotide
  Mitotic kinesin microtubule-associated protein Eg5 (Kif11) siRNA
tatcacatcagctttggaaagta

SEQ ID NO: 1712 - DNA, 23 bp, Artificial Sequence
  Description of Artificial Sequence: Synthetic oligonucleotide
  Mitotic kinesin microtubule-associated protein Eg5 (Kif11) siRNA
atcacatcagctttggaaagtac

SEQ ID NO: 1713 - DNA, 23 bp, Artificial Sequence
  Description of Artificial Sequence: Synthetic oligonucleotide
  Mitotic kinesin microtubule-associated protein Eg5 (Kif11) siRNA
tcacatcagctttggaaagtact

SEQ ID NO: 1714 - DNA, 23 bp, Artificial Sequence
  Description of Artificial Sequence: Synthetic oligonucleotide
  Mitotic kinesin microtubule-associated protein Eg5 (Kif11) siRNA
cacatcagctttggaaagtactg

SEQ ID NO: 1715 - DNA, 23 bp, Artificial Sequence
  Description of Artificial Sequence: Synthetic oligonucleotide
  Mitotic kinesin microtubule-associated protein Eg5 (Kif11) siRNA
acatcagctttggaaagtactga

SEQ ID NO: 1716 - DNA, 23 bp, Artificial Sequence
  Description of Artificial Sequence: Synthetic oligonucleotide
  Mitotic kinesin microtubule-associated protein Eg5 (Kif11) siRNA
catcagctttggaaagtactgag

SEQ ID NO: 1717 - DNA, 23 bp, Artificial Sequence
  Description of Artificial Sequence: Synthetic oligonucleotide
  Mitotic kinesin microtubule-associated protein Eg5 (Kif11) siRNA
atcagctttggaaagtactgagg

SEQ ID NO: 1718 - DNA, 23 bp, Artificial Sequence
  Description of Artificial Sequence: Synthetic oligonucleotide
  Mitotic kinesin microtubule-associated protein Eg5 (Kif11) siRNA
tcagctttggaaagtactgagga

SEQ ID NO: 1719 - DNA, 23 bp, Artificial Sequence
  Description of Artificial Sequence: Synthetic oligonucleotide
  Mitotic kinesin microtubule-associated protein Eg5 (Kif11) siRNA
cagctttggaaagtactgaggag

SEQ ID NO: 1720 - DNA, 23 bp, Artificial Sequence
  Description of Artificial Sequence: Synthetic oligonucleotide
  Mitotic kinesin microtubule-associated protein Eg5 (Kif11) siRNA
agctttggaaagtactgaggaga

SEQ ID NO: 1721 - DNA, 23 bp, Artificial Sequence
  Description of Artificial Sequence: Synthetic oligonucleotide
  Mitotic kinesin microtubule-associated protein Eg5 (Kif11) siRNA
gctttggaaagtactgaggagaa

SEQ ID NO: 1722 - DNA, 23 bp, Artificial Sequence
  Description of Artificial Sequence: Synthetic oligonucleotide
  Mitotic kinesin microtubule-associated protein Eg5 (Kif11) siRNA
ctttggaaagtactgaggagaaa

SEQ ID NO: 1723 - DNA, 23 bp, Artificial Sequence
  Description of Artificial Sequence: Synthetic oligonucleotide
  Mitotic kinesin microtubule-associated protein Eg5 (Kif11) siRNA
tttggaaagtactgaggagaaac

SEQ ID NO: 1724 - DNA, 23 bp, Artificial Sequence
  Description of Artificial Sequence: Synthetic oligonucleotide
  Mitotic kinesin microtubule-associated protein Eg5 (Kif11) siRNA
ttggaaagtactgaggagaaact

SEQ ID NO: 1725 - DNA, 23 bp, Artificial Sequence
  Description of Artificial Sequence: Synthetic oligonucleotide
  Mitotic kinesin microtubule-associated protein Eg5 (Kif11) siRNA
tggaaagtactgaggagaaactt

SEQ ID NO: 1726 - DNA, 23 bp, Artificial Sequence
  Description of Artificial Sequence: Synthetic oligonucleotide
  Mitotic kinesin microtubule-associated protein Eg5 (Kif11) siRNA
ggaaagtactgaggagaaacttc

SEQ ID NO: 1727 - DNA, 23 bp, Artificial Sequence
  Description of Artificial Sequence: Synthetic oligonucleotide
  Mitotic kinesin microtubule-associated protein Eg5 (Kif11) siRNA
gaaagtactgaggagaaacttca

SEQ ID NO: 1728 - DNA, 23 bp, Artificial Sequence
  Description of Artificial Sequence: Synthetic oligonucleotide
  Mitotic kinesin microtubule-associated protein Eg5 (Kif11) siRNA
aaagtactgaggagaaacttcat

SEQ ID NO: 1729 - DNA, 23 bp, Artificial Sequence
  Description of Artificial Sequence: Synthetic oligonucleotide
  Mitotic kinesin microtubule-associated protein Eg5 (Kif11) siRNA
aagtactgaggagaaacttcatg

SEQ ID NO: 1730 - DNA, 23 bp, Artificial Sequence
  Description of Artificial Sequence: Synthetic oligonucleotide
  Mitotic kinesin microtubule-associated protein Eg5 (Kif11) siRNA
agtactgaggagaaacttcatga

SEQ ID NO: 1731 - DNA, 23 bp, Artificial Sequence
  Description of Artificial Sequence: Synthetic oligonucleotide
  Mitotic kinesin microtubule-associated protein Eg5 (Kif11) siRNA
gtactgaggagaaacttcatgat

SEQ ID NO: 1732 - DNA, 23 bp, Artificial Sequence
  Description of Artificial Sequence: Synthetic oligonucleotide
  Mitotic kinesin microtubule-associated protein Eg5 (Kif11) siRNA
tactgaggagaaacttcatgatg

SEQ ID NO: 1733 - DNA, 23 bp, Artificial Sequence
  Description of Artificial Sequence: Synthetic oligonucleotide
  Mitotic kinesin microtubule-associated protein Eg5 (Kif11) siRNA
actgaggagaaacttcatgatgc

SEQ ID NO: 1734 - DNA, 23 bp, Artificial Sequence
  Description of Artificial Sequence: Synthetic oligonucleotide
  Mitotic kinesin microtubule-associated protein Eg5 (Kif11) siRNA
ctgaggagaaacttcatgatgct

SEQ ID NO: 1735 - DNA, 23 bp, Artificial Sequence
  Description of Artificial Sequence: Synthetic oligonucleotide
  Mitotic kinesin microtubule-associated protein Eg5 (Kif11) siRNA
tgaggagaaacttcatgatgctg

SEQ ID NO: 1736 - DNA, 23 bp, Artificial Sequence
  Description of Artificial Sequence: Synthetic oligonucleotide
  Mitotic kinesin microtubule-associated protein Eg5 (Kif11) siRNA
gaggagaaacttcatgatgctgc

SEQ ID NO: 1737 - DNA, 23 bp, Artificial Sequence
  Description of Artificial Sequence: Synthetic oligonucleotide
  Mitotic kinesin microtubule-associated protein Eg5 (Kif11) siRNA
aggagaaacttcatgatgctgcc

SEQ ID NO: 1738 - DNA, 23 bp, Artificial Sequence
  Description of Artificial Sequence: Synthetic oligonucleotide
  Mitotic kinesin microtubule-associated protein Eg5 (Kif11) siRNA
ggagaaacttcatgatgctgcca

SEQ ID NO: 1739 - DNA, 23 bp, Artificial Sequence
  Description of Artificial Sequence: Synthetic oligonucleotide
  Mitotic kinesin microtubule-associated protein Eg5 (Kif11) siRNA
gagaaacttcatgatgctgccag

SEQ ID NO: 1740 - DNA, 23 bp, Artificial Sequence
  Description of Artificial Sequence: Synthetic oligonucleotide
  Mitotic kinesin microtubule-associated protein Eg5 (Kif11) siRNA
agaaacttcatgatgctgccagc

SEQ ID NO: 1741 - DNA, 23 bp, Artificial Sequence
  Description of Artificial Sequence: Synthetic oligonucleotide
  Mitotic kinesin microtubule-associated protein Eg5 (Kif11) siRNA
gaaacttcatgatgctgccagca

SEQ ID NO: 1742 - DNA, 23 bp, Artificial Sequence
  Description of Artificial Sequence: Synthetic oligonucleotide
  Mitotic kinesin microtubule-associated protein Eg5 (Kif11) siRNA
aaacttcatgatgctgccagcaa

SEQ ID NO: 1743 - DNA, 23 bp, Artificial Sequence
  Description of Artificial Sequence: Synthetic oligonucleotide
  Mitotic kinesin microtubule-associated protein Eg5 (Kif11) siRNA
aacttcatgatgctgccagcaag

SEQ ID NO: 1744 - DNA, 23 bp, Artificial Sequence
  Description of Artificial Sequence: Synthetic oligonucleotide
  Mitotic kinesin microtubule-associated protein Eg5 (Kif11) siRNA
acttcatgatgctgccagcaagc

SEQ ID NO: 1745 - DNA, 23 bp, Artificial Sequence
  Description of Artificial Sequence: Synthetic oligonucleotide
  Mitotic kinesin microtubule-associated protein Eg5 (Kif11) siRNA
cttcatgatgctgccagcaagct

SEQ ID NO: 1746 - DNA, 23 bp, Artificial Sequence
  Description of Artificial Sequence: Synthetic oligonucleotide
  Mitotic kinesin microtubule-associated protein Eg5 (Kif11) siRNA
ttcatgatgctgccagcaagctg

SEQ ID NO: 1747 - DNA, 23 bp, Artificial Sequence
  Description of Artificial Sequence: Synthetic oligonucleotide
  Mitotic kinesin microtubule-associated protein Eg5 (Kif11) siRNA
tcatgatgctgccagcaagctgc

SEQ ID NO: 1748 - DNA, 23 bp, Artificial Sequence
  Description of Artificial Sequence: Synthetic oligonucleotide
  Mitotic kinesin microtubule-associated protein Eg5 (Kif11) siRNA
catgatgctgccagcaagctgct

SEQ ID NO: 1749 - DNA, 23 bp, Artificial Sequence
  Description of Artificial Sequence: Synthetic oligonucleotide
  Mitotic kinesin microtubule-associated protein Eg5 (Kif11) siRNA
atgatgctgccagcaagctgctt

SEQ ID NO: 1750 - DNA, 23 bp, Artificial Sequence
  Description of Artificial Sequence: Synthetic oligonucleotide
  Mitotic kinesin microtubule-associated protein Eg5 (Kif11) siRNA
tgatgctgccagcaagctgctta

SEQ ID NO: 1751 - DNA, 23 bp, Artificial Sequence
  Description of Artificial Sequence: Synthetic oligonucleotide
  Mitotic kinesin microtubule-associated protein Eg5 (Kif11) siRNA
gatgctgccagcaagctgcttaa

SEQ ID NO: 1752 - DNA, 23 bp, Artificial Sequence
  Description of Artificial Sequence: Synthetic oligonucleotide
  Mitotic kinesin microtubule-associated protein Eg5 (Kif11) siRNA
atgctgccagcaagctgcttaac

SEQ ID NO: 1753 - DNA, 23 bp, Artificial Sequence
  Description of Artificial Sequence: Synthetic oligonucleotide
  Mitotic kinesin microtubule-associated protein Eg5 (Kif11) siRNA
tgctgccagcaagctgcttaaca

SEQ ID NO: 1754 - DNA, 23 bp, Artificial Sequence
  Description of Artificial Sequence: Synthetic oligonucleotide
  Mitotic kinesin microtubule-associated protein Eg5 (Kif11) siRNA
gctgccagcaagctgcttaacac

SEQ ID NO: 1755 - DNA, 23 bp, Artificial Sequence
  Description of Artificial Sequence: Synthetic oligonucleotide
  Mitotic kinesin microtubule-associated protein Eg5 (Kif11) siRNA
ctgccagcaagctgcttaacaca

SEQ ID NO: 1756 - DNA, 23 bp, Artificial Sequence
  Description of Artificial Sequence: Synthetic oligonucleotide
  Mitotic kinesin microtubule-associated protein Eg5 (Kif11) siRNA
tgccagcaagctgcttaacacag

SEQ ID NO: 1757 - DNA, 23 bp, Artificial Sequence
  Description of Artificial Sequence: Synthetic oligonucleotide
  Mitotic kinesin microtubule-associated protein Eg5 (Kif11) siRNA
gccagcaagctgcttaacacagt

SEQ ID NO: 1758 - DNA, 23 bp, Artificial Sequence
  Description of Artificial Sequence: Synthetic oligonucleotide
  Mitotic kinesin microtubule-associated protein Eg5 (Kif11) siRNA
ccagcaagctgcttaacacagtt

SEQ ID NO: 1759 - DNA, 23 bp, Artificial Sequence
  Description of Artificial Sequence: Synthetic oligonucleotide
  Mitotic kinesin microtubule-associated protein Eg5 (Kif11) siRNA
cagcaagctgcttaacacagttg

SEQ ID NO: 1760 - DNA, 23 bp, Artificial Sequence
  Description of Artificial Sequence: Synthetic oligonucleotide
  Mitotic kinesin microtubule-associated protein Eg5 (Kif11) siRNA
agcaagctgcttaacacagttga

SEQ ID NO: 1761 - DNA, 23 bp, Artificial Sequence
  Description of Artificial Sequence: Synthetic oligonucleotide
  Mitotic kinesin microtubule-associated protein Eg5 (Kif11) siRNA
gcaagctgcttaacacagttgaa

SEQ ID NO: 1762 - DNA, 23 bp, Artificial Sequence
  Description of Artificial Sequence: Synthetic oligonucleotide
  Mitotic kinesin microtubule-associated protein Eg5 (Kif11) siRNA
caagctgcttaacacagttgaag

SEQ ID NO: 1763 - DNA, 23 bp, Artificial Sequence
  Description of Artificial Sequence: Synthetic oligonucleotide
  Mitotic kinesin microtubule-associated protein Eg5 (Kif11) siRNA
aagctgcttaacacagttgaaga

SEQ ID NO: 1764 - DNA, 23 bp, Artificial Sequence
  Description of Artificial Sequence: Synthetic oligonucleotide
  Mitotic kinesin microtubule-associated protein Eg5 (Kif11) siRNA
agctgcttaacacagttgaagaa

SEQ ID NO: 1765 - DNA, 23 bp, Artificial Sequence
  Description of Artificial Sequence: Synthetic oligonucleotide
  Mitotic kinesin microtubule-associated protein Eg5 (Kif11) siRNA
gctgcttaacacagttgaagaaa

SEQ ID NO: 1766 - DNA, 23 bp, Artificial Sequence
  Description of Artificial Sequence: Synthetic oligonucleotide
  Mitotic kinesin microtubule-associated protein Eg5 (Kif11) siRNA
ctgcttaacacagttgaagaaac

SEQ ID NO: 1767 - DNA, 23 bp, Artificial Sequence
  Description of Artificial Sequence: Synthetic oligonucleotide
  Mitotic kinesin microtubule-associated protein Eg5 (Kif11) siRNA
tgcttaacacagttgaagaaact

SEQ ID NO: 1768 - DNA, 23 bp, Artificial Sequence
  Description of Artificial Sequence: Synthetic oligonucleotide
  Mitotic kinesin microtubule-associated protein Eg5 (Kif11) siRNA
gcttaacacagttgaagaaacta

SEQ ID NO: 1769 - DNA, 23 bp, Artificial Sequence
  Description of Artificial Sequence: Synthetic oligonucleotide
  Mitotic kinesin microtubule-associated protein Eg5 (Kif11) siRNA
cttaacacagttgaagaaactac

SEQ ID NO: 1770 - DNA, 23 bp, Artificial Sequence
  Description of Artificial Sequence: Synthetic oligonucleotide
  Mitotic kinesin microtubule-associated protein Eg5 (Kif11) siRNA
ttaacacagttgaagaaactaca

SEQ ID NO: 1771 - DNA, 23 bp, Artificial Sequence
  Description of Artificial Sequence: Synthetic oligonucleotide
  Mitotic kinesin microtubule-associated protein Eg5 (Kif11) siRNA
taacacagttgaagaaactacaa

SEQ ID NO: 1772 - DNA, 23 bp, Artificial Sequence
  Description of Artificial Sequence: Synthetic oligonucleotide
  Mitotic kinesin microtubule-associated protein Eg5 (Kif11) siRNA
aacacagttgaagaaactacaaa

SEQ ID NO: 1773 - DNA, 23 bp, Artificial Sequence
  Description of Artificial Sequence: Synthetic oligonucleotide
  Mitotic kinesin microtubule-associated protein Eg5 (Kif11) siRNA
acacagttgaagaaactacaaaa

SEQ ID NO: 1774 - DNA, 23 bp, Artificial Sequence
  Description of Artificial Sequence: Synthetic oligonucleotide
  Mitotic kinesin microtubule-associated protein Eg5 (Kif11) siRNA
cacagttgaagaaactacaaaag

SEQ ID NO: 1775 - DNA, 23 bp, Artificial Sequence
  Description of Artificial Sequence: Synthetic oligonucleotide
  Mitotic kinesin microtubule-associated protein Eg5 (Kif11) siRNA
acagttgaagaaactacaaaaga

SEQ ID NO: 1776 - DNA, 23 bp, Artificial Sequence
  Description of Artificial Sequence: Synthetic oligonucleotide
  Mitotic kinesin microtubule-associated protein Eg5 (Kif11) siRNA
cagttgaagaaactacaaaagat

SEQ ID NO: 1777 - DNA, 23 bp, Artificial Sequence
  Description of Artificial Sequence: Synthetic oligonucleotide
  Mitotic kinesin microtubule-associated protein Eg5 (Kif11) siRNA
agttgaagaaactacaaaagatg

SEQ ID NO: 1778 - DNA, 23 bp, Artificial Sequence
  Description of Artificial Sequence: Synthetic oligonucleotide
  Mitotic kinesin microtubule-associated protein Eg5 (Kif11) siRNA
gttgaagaaactacaaaagatgt

SEQ ID NO: 1779 - DNA, 23 bp, Artificial Sequence
  Description of Artificial Sequence: Synthetic oligonucleotide
  Mitotic kinesin microtubule-associated protein Eg5 (Kif11) siRNA
ttgaagaaactacaaaagatgta

SEQ ID NO: 1780 - DNA, 23 bp, Artificial Sequence
  Description of Artificial Sequence: Synthetic oligonucleotide
  Mitotic kinesin microtubule-associated protein Eg5 (Kif11) siRNA
tgaagaaactacaaaagatgtat

SEQ ID NO: 1781 - DNA, 23 bp, Artificial Sequence
  Description of Artificial Sequence: Synthetic oligonucleotide
  Mitotic kinesin microtubule-associated protein Eg5 (Kif11) siRNA
gaagaaactacaaaagatgtatc

SEQ ID NO: 1782 - DNA, 23 bp, Artificial Sequence
  Description of Artificial Sequence: Synthetic oligonucleotide
  Mitotic kinesin microtubule-associated protein Eg5 (Kif11) siRNA
aagaaactacaaaagatgtatct

SEQ ID NO: 1783 - DNA, 23 bp, Artificial Sequence
  Description of Artificial Sequence: Synthetic oligonucleotide
  Mitotic kinesin microtubule-associated protein Eg5 (Kif11) siRNA
agaaactacaaaagatgtatctg

SEQ ID NO: 1784 - DNA, 23 bp, Artificial Sequence
  Description of Artificial Sequence: Synthetic oligonucleotide
  Mitotic kinesin microtubule-associated protein Eg5 (Kif11) siRNA
gaaactacaaaagatgtatctgg

SEQ ID NO: 1785 - DNA, 23 bp, Artificial Sequence
  Description of Artificial Sequence: Synthetic oligonucleotide
  Mitotic kinesin microtubule-associated protein Eg5 (Kif11) siRNA
aaactacaaaagatgtatctggt

SEQ ID NO: 1786 - DNA, 23 bp, Artificial Sequence
  Description of Artificial Sequence: Synthetic oligonucleotide
  Mitotic kinesin microtubule-associated protein Eg5 (Kif11) siRNA
aactacaaaagatgtatctggtc

SEQ ID NO: 1787 - DNA, 23 bp, Artificial Sequence
  Description of Artificial Sequence: Synthetic oligonucleotide
  Mitotic kinesin microtubule-associated protein Eg5 (Kif11) siRNA
actacaaaagatgtatctggtct

SEQ ID NO: 1788 - DNA, 23 bp, Artificial Sequence
  Description of Artificial Sequence: Synthetic oligonucleotide
  Mitotic kinesin microtubule-associated protein Eg5 (Kif11) siRNA
ctacaaaagatgtatctggtctc

SEQ ID NO: 1789 - DNA, 23 bp, Artificial Sequence
  Description of Artificial Sequence: Synthetic oligonucleotide
  Mitotic kinesin microtubule-associated protein Eg5 (Kif11) siRNA
tacaaaagatgtatctggtctcc

SEQ ID NO: 1790 - DNA, 23 bp, Artificial Sequence
  Description of Artificial Sequence: Synthetic oligonucleotide
  Mitotic kinesin microtubule-associated protein Eg5 (Kif11) siRNA
acaaaagatgtatctggtctcca

SEQ ID NO: 1791 - DNA, 23 bp, Artificial Sequence
  Description of Artificial Sequence: Synthetic oligonucleotide
  Mitotic kinesin microtubule-associated protein Eg5 (Kif11) siRNA
caaaagatgtatctggtctccat

SEQ ID NO: 1792 - DNA, 23 bp, Artificial Sequence
  Description of Artificial Sequence: Synthetic oligonucleotide
  Mitotic kinesin microtubule-associated protein Eg5 (Kif11) siRNA
aaaagatgtatctggtctccatt

SEQ ID NO: 1793 - DNA, 23 bp, Artificial Sequence
  Description of Artificial Sequence: Synthetic oligonucleotide
  Mitotic kinesin microtubule-associated protein Eg5 (Kif11) siRNA
aaagatgtatctggtctccattc

SEQ ID NO: 1794 - DNA, 23 bp, Artificial Sequence
  Description of Artificial Sequence: Synthetic oligonucleotide
  Mitotic kinesin microtubule-associated protein Eg5 (Kif11) siRNA
aagatgtatctggtctccattcc

SEQ ID NO: 1795 - DNA, 23 bp, Artificial Sequence
  Description of Artificial Sequence: Synthetic oligonucleotide
  Mitotic kinesin microtubule-associated protein Eg5 (Kif11) siRNA
agatgtatctggtctccattcca

SEQ ID NO: 1796 - DNA, 23 bp, Artificial Sequence
  Description of Artificial Sequence: Synthetic oligonucleotide
  Mitotic kinesin microtubule-associated protein Eg5 (Kif11) siRNA
gatgtatctggtctccattccaa

SEQ ID NO: 1797 - DNA, 23 bp, Artificial Sequence
  Description of Artificial Sequence: Synthetic oligonucleotide
  Mitotic kinesin microtubule-associated protein Eg5 (Kif11) siRNA
atgtatctggtctccattccaaa

SEQ ID NO: 1798 - DNA, 23 bp, Artificial Sequence
  Description of Artificial Sequence: Synthetic oligonucleotide
  Mitotic kinesin microtubule-associated protein Eg5 (Kif11) siRNA
tgtatctggtctccattccaaac

SEQ ID NO: 1799 - DNA, 23 bp, Artificial Sequence
  Description of Artificial Sequence: Synthetic oligonucleotide
  Mitotic kinesin microtubule-associated protein Eg5 (Kif11) siRNA
gtatctggtctccattccaaact

SEQ ID NO: 1800 - DNA, 23 bp, Artificial Sequence
  Description of Artificial Sequence: Synthetic oligonucleotide
  Mitotic kinesin microtubule-associated protein Eg5 (Kif11) siRNA
tatctggtctccattccaaactg

SEQ ID NO: 1801 - DNA, 23 bp, Artificial Sequence
  Description of Artificial Sequence: Synthetic oligonucleotide
  Mitotic kinesin microtubule-associated protein Eg5 (Kif11) siRNA
atctggtctccattccaaactgg

SEQ ID NO: 1802 - DNA, 23 bp, Artificial Sequence
  Description of Artificial Sequence: Synthetic oligonucleotide
  Mitotic kinesin microtubule-associated protein Eg5 (Kif11) siRNA
tctggtctccattccaaactgga

SEQ ID NO: 1803 - DNA, 23 bp, Artificial Sequence
  Description of Artificial Sequence: Synthetic oligonucleotide
  Mitotic kinesin microtubule-associated protein Eg5 (Kif11) siRNA
ctggtctccattccaaactggat

SEQ ID NO: 1804 - DNA, 23 bp, Artificial Sequence
  Description of Artificial Sequence: Synthetic oligonucleotide
  Mitotic kinesin microtubule-associated protein Eg5 (Kif11) siRNA
tggtctccattccaaactggatc

SEQ ID NO: 1805 - DNA, 23 bp, Artificial Sequence
  Description of Artificial Sequence: Synthetic oligonucleotide
  Mitotic kinesin microtubule-associated protein Eg5 (Kif11) siRNA
ggtctccattccaaactggatcg

SEQ ID NO: 1806 - DNA, 23 bp, Artificial Sequence
  Description of Artificial Sequence: Synthetic oligonucleotide
  Mitotic kinesin microtubule-associated protein Eg5 (Kif11) siRNA
gtctccattccaaactggatcgt

SEQ ID NO: 1807 - DNA, 23 bp, Artificial Sequence
  Description of Artificial Sequence: Synthetic oligonucleotide
  Mitotic kinesin microtubule-associated protein Eg5 (Kif11) siRNA
tctccattccaaactggatcgta

SEQ ID NO: 1808 - DNA, 23 bp, Artificial Sequence
  Description of Artificial Sequence: Synthetic oligonucleotide
  Mitotic kinesin microtubule-associated protein Eg5 (Kif11) siRNA
ctccattccaaactggatcgtaa

SEQ ID NO: 1809 - DNA, 23 bp, Artificial Sequence
  Description of Artificial Sequence: Synthetic oligonucleotide
  Mitotic kinesin microtubule-associated protein Eg5 (Kif11) siRNA
tccattccaaactggatcgtaag

SEQ ID NO: 1810 - DNA, 23 bp, Artificial Sequence
  Description of Artificial Sequence: Synthetic oligonucleotide
  Mitotic kinesin microtubule-associated protein Eg5 (Kif11) siRNA
ccattccaaactggatcgtaaga

SEQ ID NO: 1811 - DNA, 23 bp, Artificial Sequence
  Description of Artificial Sequence: Synthetic oligonucleotide
  Mitotic kinesin microtubule-associated protein Eg5 (Kif11) siRNA
cattccaaactggatcgtaagaa

SEQ ID NO: 1812 - DNA, 23 bp, Artificial Sequence
  Description of Artificial Sequence: Synthetic oligonucleotide
  Mitotic kinesin microtubule-associated protein Eg5 (Kif11) siRNA
attccaaactggatcgtaagaag

SEQ ID NO: 1813 - DNA, 23 bp, Artificial Sequence
  Description of Artificial Sequence: Synthetic oligonucleotide
  Mitotic kinesin microtubule-associated protein Eg5 (Kif11) siRNA
ttccaaactggatcgtaagaagg

SEQ ID NO: 1814 - DNA, 23 bp, Artificial Sequence
  Description of Artificial Sequence: Synthetic oligonucleotide
  Mitotic kinesin microtubule-associated protein Eg5 (Kif11) siRNA
tccaaactggatcgtaagaaggc

SEQ ID NO: 1815 - DNA, 23 bp, Artificial Sequence
  Description of Artificial Sequence: Synthetic oligonucleotide
  Mitotic kinesin microtubule-associated protein Eg5 (Kif11) siRNA
ccaaactggatcgtaagaaggca

SEQ ID NO: 1816 - DNA, 23 bp, Artificial Sequence
  Description of Artificial Sequence: Synthetic oligonucleotide
  Mitotic kinesin microtubule-associated protein Eg5 (Kif11) siRNA
caaactggatcgtaagaaggcag

SEQ ID NO: 1817 - DNA, 23 bp, Artificial Sequence
  Description of Artificial Sequence: Synthetic oligonucleotide
  Mitotic kinesin microtubule-associated protein Eg5 (Kif11) siRNA
aaactggatcgtaagaaggcagt

SEQ ID NO: 1818 - DNA, 23 bp, Artificial Sequence
  Description of Artificial Sequence: Synthetic oligonucleotide
  Mitotic kinesin microtubule-associated protein Eg5 (Kif11) siRNA
aactggatcgtaagaaggcagtt

SEQ ID NO: 1819 - DNA, 23 bp, Artificial Sequence
  Description of Artificial Sequence: Synthetic oligonucleotide
  Mitotic kinesin microtubule-associated protein Eg5 (Kif11) siRNA
actggatcgtaagaaggcagttg

SEQ ID NO: 1820 - DNA, 23 bp, Artificial Sequence
  Description of Artificial Sequence: Synthetic oligonucleotide
  Mitotic kinesin microtubule-associated protein Eg5 (Kif11) siRNA
ctggatcgtaagaaggcagttga

SEQ ID NO: 1821 - DNA, 23 bp, Artificial Sequence
  Description of Artificial Sequence: Synthetic oligonucleotide
  Mitotic kinesin microtubule-associated protein Eg5 (Kif11) siRNA
tggatcgtaagaaggcagttgac

SEQ ID NO: 1822 - DNA, 23 bp, Artificial Sequence
  Description of Artificial Sequence: Synthetic oligonucleotide
  Mitotic kinesin microtubule-associated protein Eg5 (Kif11) siRNA
ggatcgtaagaaggcagttgacc

SEQ ID NO: 1823 - DNA, 23 bp, Artificial Sequence
  Description of Artificial Sequence: Synthetic oligonucleotide
  Mitotic kinesin microtubule-associated protein Eg5 (Kif11) siRNA
gatcgtaagaaggcagttgacca

SEQ ID NO: 1824 - DNA, 23 bp, Artificial Sequence
  Description of Artificial Sequence: Synthetic oligonucleotide
  Mitotic kinesin microtubule-associated protein Eg5 (Kif11) siRNA
atcgtaagaaggcagttgaccaa

SEQ ID NO: 1825 - DNA, 23 bp, Artificial Sequence
  Description of Artificial Sequence: Synthetic oligonucleotide
  Mitotic kinesin microtubule-associated protein Eg5 (Kif11) siRNA
tcgtaagaaggcagttgaccaac

SEQ ID NO: 1826 - DNA, 23 bp, Artificial Sequence
  Description of Artificial Sequence: Synthetic oligonucleotide
  Mitotic kinesin microtubule-associated protein Eg5 (Kif11) siRNA
cgtaagaaggcagttgaccaaca

SEQ ID NO: 1827 - DNA, 23 bp, Artificial Sequence
  Description of Artificial Sequence: Synthetic oligonucleotide
  Mitotic kinesin microtubule-associated protein Eg5 (Kif11) siRNA
gtaagaaggcagttgaccaacac

SEQ ID NO: 1828 - DNA, 23 bp, Artificial Sequence
  Description of Artificial Sequence: Synthetic oligonucleotide
  Mitotic kinesin microtubule-associated protein Eg5 (Kif11) siRNA
taagaaggcagttgaccaacaca

SEQ ID NO: 1829 - DNA, 23 bp, Artificial Sequence
  Description of Artificial Sequence: Synthetic oligonucleotide
  Mitotic kinesin microtubule-associated protein Eg5 (Kif11) siRNA
aagaaggcagttgaccaacacaa

SEQ ID NO: 1830 - DNA, 23 bp, Artificial Sequence
  Description of Artificial Sequence: Synthetic oligonucleotide
  Mitotic kinesin microtubule-associated protein Eg5 (Kif11) siRNA
agaaggcagttgaccaacacaat

SEQ ID NO: 1831 - DNA, 23 bp, Artificial Sequence
  Description of Artificial Sequence: Synthetic oligonucleotide
  Mitotic kinesin microtubule-associated protein Eg5 (Kif11) siRNA
gaaggcagttgaccaacacaatg

SEQ ID NO: 1832 - DNA, 23 bp, Artificial Sequence
  Description of Artificial Sequence: Synthetic oligonucleotide
  Mitotic kinesin microtubule-associated protein Eg5 (Kif11) siRNA
aaggcagttgaccaacacaatgc

SEQ ID NO: 1833 - DNA, 23 bp, Artificial Sequence
  Description of Artificial Sequence: Synthetic oligonucleotide
  Mitotic kinesin microtubule-associated protein Eg5 (Kif11) siRNA
aggcagttgaccaacacaatgca

SEQ ID NO: 1834 - DNA, 23 bp, Artificial Sequence
  Description of Artificial Sequence: Synthetic oligonucleotide
  Mitotic kinesin microtubule-associated protein Eg5 (Kif11) siRNA
ggcagttgaccaacacaatgcag

SEQ ID NO: 1835 - DNA, 23 bp, Artificial Sequence
  Description of Artificial Sequence: Synthetic oligonucleotide
  Mitotic kinesin microtubule-associated protein Eg5 (Kif11) siRNA
gcagttgaccaacacaatgcaga

SEQ ID NO: 1836 - DNA, 23 bp, Artificial Sequence
  Description of Artificial Sequence: Synthetic oligonucleotide
  Mitotic kinesin microtubule-associated protein Eg5 (Kif11) siRNA
cagttgaccaacacaatgcagaa

SEQ ID NO: 1837 - DNA, 23 bp, Artificial Sequence
  Description of Artificial Sequence: Synthetic oligonucleotide
  Mitotic kinesin microtubule-associated protein Eg5 (Kif11) siRNA
agttgaccaacacaatgcagaag

SEQ ID NO: 1838 - DNA, 23 bp, Artificial Sequence
  Description of Artificial Sequence: Synthetic oligonucleotide
  Mitotic kinesin microtubule-associated protein Eg5 (Kif11) siRNA
gttgaccaacacaatgcagaagc

SEQ ID NO: 1839 - DNA, 23 bp, Artificial Sequence
  Description of Artificial Sequence: Synthetic oligonucleotide
  Mitotic kinesin microtubule-associated protein Eg5 (Kif11) siRNA
ttgaccaacacaatgcagaagct

SEQ ID NO: 1840 - DNA, 23 bp, Artificial Sequence
  Description of Artificial Sequence: Synthetic oligonucleotide
  Mitotic kinesin microtubule-associated protein Eg5 (Kif11) siRNA
tgaccaacacaatgcagaagctc

SEQ ID NO: 1841 - DNA, 23 bp, Artificial Sequence
  Description of Artificial Sequence: Synthetic oligonucleotide
  Mitotic kinesin microtubule-associated protein Eg5 (Kif11) siRNA
gaccaacacaatgcagaagctca

SEQ ID NO: 1842 - DNA, 23 bp, Artificial Sequence
  Description of Artificial Sequence: Synthetic oligonucleotide
  Mitotic kinesin microtubule-associated protein Eg5 (Kif11) siRNA
accaacacaatgcagaagctcag

SEQ ID NO: 1843 - DNA, 23 bp, Artificial Sequence
  Description of Artificial Sequence: Synthetic oligonucleotide
  Mitotic kinesin microtubule-associated protein Eg5 (Kif11) siRNA
ccaacacaatgcagaagctcagg

SEQ ID NO: 1844 - DNA, 23 bp, Artificial Sequence
  Description of Artificial Sequence: Synthetic oligonucleotide
  Mitotic kinesin microtubule-associated protein Eg5 (Kif11) siRNA
caacacaatgcagaagctcagga

SEQ ID NO: 1845 - DNA, 23 bp, Artificial Sequence
  Description of Artificial Sequence: Synthetic oligonucleotide
  Mitotic kinesin microtubule-associated protein Eg5 (Kif11) siRNA
aacacaatgcagaagctcaggat

SEQ ID NO: 1846 - DNA, 23 bp, Artificial Sequence
  Description of Artificial Sequence: Synthetic oligonucleotide
  Mitotic kinesin microtubule-associated protein Eg5 (Kif11) siRNA
acacaatgcagaagctcaggata

SEQ ID NO: 1847 - DNA, 23 bp, Artificial Sequence
  Description of Artificial Sequence: Synthetic oligonucleotide
  Mitotic kinesin microtubule-associated protein Eg5 (Kif11) siRNA
cacaatgcagaagctcaggatat

SEQ ID NO: 1848 - DNA, 23 bp, Artificial Sequence
  Description of Artificial Sequence: Synthetic oligonucleotide
  Mitotic kinesin microtubule-associated protein Eg5 (Kif11) siRNA
acaatgcagaagctcaggatatt

SEQ ID NO: 1849 - DNA, 23 bp, Artificial Sequence
  Description of Artificial Sequence: Synthetic oligonucleotide
  Mitotic kinesin microtubule-associated protein Eg5 (Kif11) siRNA
caatgcagaagctcaggatattt

SEQ ID NO: 1850 - DNA, 23 bp, Artificial Sequence
  Description of Artificial Sequence: Synthetic oligonucleotide
  Mitotic kinesin microtubule-associated protein Eg5 (Kif11) siRNA
aatgcagaagctcaggatatttt

SEQ ID NO: 1851 - DNA, 23 bp, Artificial Sequence
  Description of Artificial Sequence: Synthetic oligonucleotide
  Mitotic kinesin microtubule-associated protein Eg5 (Kif11) siRNA
atgcagaagctcaggatattttt

SEQ ID NO: 1852 - DNA, 23 bp, Artificial Sequence
  Description of Artificial Sequence: Synthetic oligonucleotide
  Mitotic kinesin microtubule-associated protein Eg5 (Kif11) siRNA
tgcagaagctcaggatatttttg

SEQ ID NO: 1853 - DNA, 23 bp, Artificial Sequence
  Description of Artificial Sequence: Synthetic oligonucleotide
  Mitotic kinesin microtubule-associated protein Eg5 (Kif11) siRNA
gcagaagctcaggatatttttgg

SEQ ID NO: 1854 - DNA, 23 bp, Artificial Sequence
  Description of Artificial Sequence: Synthetic oligonucleotide
  Mitotic kinesin microtubule-associated protein Eg5 (Kif11) siRNA
cagaagctcaggatatttttggc

SEQ ID NO: 1855 - DNA, 23 bp, Artificial Sequence
  Description of Artificial Sequence: Synthetic oligonucleotide
  Mitotic kinesin microtubule-associated protein Eg5 (Kif11) siRNA
agaagctcaggatatttttggca

SEQ ID NO: 1856 - DNA, 23 bp, Artificial Sequence
  Description of Artificial Sequence: Synthetic oligonucleotide
  Mitotic kinesin microtubule-associated protein Eg5 (Kif11) siRNA
gaagctcaggatatttttggcaa

SEQ ID NO: 1857 - DNA, 23 bp, Artificial Sequence
  Description of Artificial Sequence: Synthetic oligonucleotide
  Mitotic kinesin microtubule-associated protein Eg5 (Kif11) siRNA
aagctcaggatatttttggcaaa

SEQ ID NO: 1858 - DNA, 23 bp, Artificial Sequence
  Description of Artificial Sequence: Synthetic oligonucleotide
  Mitotic kinesin microtubule-associated protein Eg5 (Kif11) siRNA
agctcaggatatttttggcaaaa

SEQ ID NO: 1859 - DNA, 23 bp, Artificial Sequence
  Description of Artificial Sequence: Synthetic oligonucleotide
  Mitotic kinesin microtubule-associated protein Eg5 (Kif11) siRNA
gctcaggatatttttggcaaaaa

SEQ ID NO: 1860 - DNA, 23 bp, Artificial Sequence
  Description of Artificial Sequence: Synthetic oligonucleotide
  Mitotic kinesin microtubule-associated protein Eg5 (Kif11) siRNA
ctcaggatatttttggcaaaaac

SEQ ID NO: 1861 - DNA, 23 bp, Artificial Sequence
  Description of Artificial Sequence: Synthetic oligonucleotide
  Mitotic kinesin microtubule-associated protein Eg5 (Kif11) siRNA
tcaggatatttttggcaaaaacc

SEQ ID NO: 1862 - DNA, 23 bp, Artificial Sequence
  Description of Artificial Sequence: Synthetic oligonucleotide
  Mitotic kinesin microtubule-associated protein Eg5 (Kif11) siRNA
caggatatttttggcaaaaacct

SEQ ID NO: 1863 - DNA, 23 bp, Artificial Sequence
  Description of Artificial Sequence: Synthetic oligonucleotide
  Mitotic kinesin microtubule-associated protein Eg5 (Kif11) siRNA
aggatatttttggcaaaaacctg

SEQ ID NO: 1864 - DNA, 23 bp, Artificial Sequence
  Description of Artificial Sequence: Synthetic oligonucleotide
  Mitotic kinesin microtubule-associated protein Eg5 (Kif11) siRNA
ggatatttttggcaaaaacctga

SEQ ID NO: 1865 - DNA, 23 bp, Artificial Sequence
  Description of Artificial Sequence: Synthetic oligonucleotide
  Mitotic kinesin microtubule-associated protein Eg5 (Kif11) siRNA
gatatttttggcaaaaacctgaa

SEQ ID NO: 1866 - DNA, 23 bp, Artificial Sequence
  Description of Artificial Sequence: Synthetic oligonucleotide
  Mitotic kinesin microtubule-associated protein Eg5 (Kif11) siRNA
atatttttggcaaaaacctgaat

SEQ ID NO: 1867 - DNA, 23 bp, Artificial Sequence
  Description of Artificial Sequence: Synthetic oligonucleotide
  Mitotic kinesin microtubule-associated protein Eg5 (Kif11) siRNA
tatttttggcaaaaacctgaata

SEQ ID NO: 1868 - DNA, 23 bp, Artificial Sequence
  Description of Artificial Sequence: Synthetic oligonucleotide
  Mitotic kinesin microtubule-associated protein Eg5 (Kif11) siRNA
atttttggcaaaaacctgaatag

SEQ ID NO: 1869 - DNA, 23 bp, Artificial Sequence
  Description of Artificial Sequence: Synthetic oligonucleotide
  Mitotic kinesin microtubule-associated protein Eg5 (Kif11) siRNA
tttttggcaaaaacctgaatagt

SEQ ID NO: 1870 - DNA, 23 bp, Artificial Sequence
  Description of Artificial Sequence: Synthetic oligonucleotide
  Mitotic kinesin microtubule-associated protein Eg5 (Kif11) siRNA
ttttggcaaaaacctgaatagtc

SEQ ID NO: 1871 - DNA, 23 bp, Artificial Sequence
  Description of Artificial Sequence: Synthetic oligonucleotide
  Mitotic kinesin microtubule-associated protein Eg5 (Kif11) siRNA
tttggcaaaaacctgaatagtct

SEQ ID NO: 1872 - DNA, 23 bp, Artificial Sequence
  Description of Artificial Sequence: Synthetic oligonucleotide
  Mitotic kinesin microtubule-associated protein Eg5 (Kif11) siRNA
ttggcaaaaacctgaatagtctg

SEQ ID NO: 1873 - DNA, 23 bp, Artificial Sequence
  Description of Artificial Sequence: Synthetic oligonucleotide
  Mitotic kinesin microtubule-associated protein Eg5 (Kif11) siRNA
tggcaaaaacctgaatagtctgt

SEQ ID NO: 1874 - DNA, 23 bp, Artificial Sequence
  Description of Artificial Sequence: Synthetic oligonucleotide
  Mitotic kinesin microtubule-associated protein Eg5 (Kif11) siRNA
ggcaaaaacctgaatagtctgtt

SEQ ID NO: 1875 - DNA, 23 bp, Artificial Sequence
  Description of Artificial Sequence: Synthetic oligonucleotide
  Mitotic kinesin microtubule-associated protein Eg5 (Kif11) siRNA
gcaaaaacctgaatagtctgttt

SEQ ID NO: 1876 - DNA, 23 bp, Artificial Sequence
  Description of Artificial Sequence: Synthetic oligonucleotide
  Mitotic kinesin microtubule-associated protein Eg5 (Kif11) siRNA
caaaaacctgaatagtctgttta

SEQ ID NO: 1877 - DNA, 23 bp, Artificial Sequence
  Description of Artificial Sequence: Synthetic oligonucleotide
  Mitotic kinesin microtubule-associated protein Eg5 (Kif11) siRNA
aaaaacctgaatagtctgtttaa

SEQ ID NO: 1878 - DNA, 23 bp, Artificial Sequence
  Description of Artificial Sequence: Synthetic oligonucleotide
  Mitotic kinesin microtubule-associated protein Eg5 (Kif11) siRNA
aaaacctgaatagtctgtttaat

SEQ ID NO: 1879 - DNA, 23 bp, Artificial Sequence
  Description of Artificial Sequence: Synthetic oligonucleotide
  Mitotic kinesin microtubule-associated protein Eg5 (Kif11) siRNA
aaacctgaatagtctgtttaata

SEQ ID NO: 1880 - DNA, 23 bp, Artificial Sequence
  Description of Artificial Sequence: Synthetic oligonucleotide
  Mitotic kinesin microtubule-associated protein Eg5 (Kif11) siRNA
aacctgaatagtctgtttaataa

SEQ ID NO: 1881 - DNA, 23 bp, Artificial Sequence
  Description of Artificial Sequence: Synthetic oligonucleotide
  Mitotic kinesin microtubule-associated protein Eg5 (Kif11) siRNA
acctgaatagtctgtttaataat

SEQ ID NO: 1882 - DNA, 23 bp, Artificial Sequence
  Description of Artificial Sequence: Synthetic oligonucleotide
  Mitotic kinesin microtubule-associated protein Eg5 (Kif11) siRNA
cctgaatagtctgtttaataata

SEQ ID NO: 1883 - DNA, 23 bp, Artificial Sequence
  Description of Artificial Sequence: Synthetic oligonucleotide
  Mitotic kinesin microtubule-associated protein Eg5 (Kif11) siRNA
ctgaatagtctgtttaataatat

SEQ ID NO: 1884 - DNA, 23 bp, Artificial Sequence
  Description of Artificial Sequence: Synthetic oligonucleotide
  Mitotic kinesin microtubule-associated protein Eg5 (Kif11) siRNA
tgaatagtctgtttaataatatg

SEQ ID NO: 1885 - DNA, 23 bp, Artificial Sequence
  Description of Artificial Sequence: Synthetic oligonucleotide
  Mitotic kinesin microtubule-associated protein Eg5 (Kif11) siRNA
gaatagtctgtttaataatatgg

SEQ ID NO: 1886 - DNA, 23 bp, Artificial Sequence
  Description of Artificial Sequence: Synthetic oligonucleotide
  Mitotic kinesin microtubule-associated protein Eg5 (Kif11) siRNA
aatagtctgtttaataatatgga

SEQ ID NO: 1887 - DNA, 23 bp, Artificial Sequence
  Description of Artificial Sequence: Synthetic oligonucleotide
  Mitotic kinesin microtubule-associated protein Eg5 (Kif11) siRNA
atagtctgtttaataatatggaa

SEQ ID NO: 1888 - DNA, 23 bp, Artificial Sequence
  Description of Artificial Sequence: Synthetic oligonucleotide
  Mitotic kinesin microtubule-associated protein Eg5 (Kif11) siRNA
tagtctgtttaataatatggaag

SEQ ID NO: 1889 - DNA, 23 bp, Artificial Sequence
  Description of Artificial Sequence: Synthetic oligonucleotide
  Mitotic kinesin microtubule-associated protein Eg5 (Kif11) siRNA
agtctgtttaataatatggaaga

SEQ ID NO: 1890 - DNA, 23 bp, Artificial Sequence
  Description of Artificial Sequence: Synthetic oligonucleotide
  Mitotic kinesin microtubule-associated protein Eg5 (Kif11) siRNA
gtctgtttaataatatggaagaa

SEQ ID NO: 1891 - DNA, 23 bp, Artificial Sequence
  Description of Artificial Sequence: Synthetic oligonucleotide
  Mitotic kinesin microtubule-associated protein Eg5 (Kif11) siRNA
tctgtttaataatatggaagaat

SEQ ID NO: 1892 - DNA, 23 bp, Artificial Sequence
  Description of Artificial Sequence: Synthetic oligonucleotide
  Mitotic kinesin microtubule-associated protein Eg5 (Kif11) siRNA
ctgtttaataatatggaagaatt

SEQ ID NO: 1893 - DNA, 23 bp, Artificial Sequence
  Description of Artificial Sequence: Synthetic oligonucleotide
  Mitotic kinesin microtubule-associated protein Eg5 (Kif11) siRNA
tgtttaataatatggaagaatta

SEQ ID NO: 1894 - DNA, 23 bp, Artificial Sequence
  Description of Artificial Sequence: Synthetic oligonucleotide
  Mitotic kinesin microtubule-associated protein Eg5 (Kif11) siRNA
gtttaataatatggaagaattaa

SEQ ID NO: 1895 - DNA, 23 bp, Artificial Sequence
  Description of Artificial Sequence: Synthetic oligonucleotide
  Mitotic kinesin microtubule-associated protein Eg5 (Kif11) siRNA
tttaataatatggaagaattaat

SEQ ID NO: 1896 - DNA, 23 bp, Artificial Sequence
  Description of Artificial Sequence: Synthetic oligonucleotide
  Mitotic kinesin microtubule-associated protein Eg5 (Kif11) siRNA
ttaataatatggaagaattaatt

SEQ ID NO: 1897 - DNA, 23 bp, Artificial Sequence
  Description of Artificial Sequence: Synthetic oligonucleotide
  Mitotic kinesin microtubule-associated protein Eg5 (Kif11) siRNA
taataatatggaagaattaatta

SEQ ID NO: 1898 - DNA, 23 bp, Artificial Sequence
  Description of Artificial Sequence: Synthetic oligonucleotide
  Mitotic kinesin microtubule-associated protein Eg5 (Kif11) siRNA
aataatatggaagaattaattaa

SEQ ID NO: 1899 - DNA, 23 bp, Artificial Sequence
  Description of Artificial Sequence: Synthetic oligonucleotide
  Mitotic kinesin microtubule-associated protein Eg5 (Kif11) siRNA
ataatatggaagaattaattaag

SEQ ID NO: 1900 - DNA, 23 bp, Artificial Sequence
  Description of Artificial Sequence: Synthetic oligonucleotide
  Mitotic kinesin microtubule-associated protein Eg5 (Kif11) siRNA
taatatggaagaattaattaagg

SEQ ID NO: 1901 - DNA, 23 bp, Artificial Sequence
  Description of Artificial Sequence: Synthetic oligonucleotide
  Mitotic kinesin microtubule-associated protein Eg5 (Kif11) siRNA
aatatggaagaattaattaagga

SEQ ID NO: 1902 - DNA, 23 bp, Artificial Sequence
  Description of Artificial Sequence: Synthetic oligonucleotide
  Mitotic kinesin microtubule-associated protein Eg5 (Kif11) siRNA
atatggaagaattaattaaggat

SEQ ID NO: 1903 - DNA, 23 bp, Artificial Sequence
  Description of Artificial Sequence: Synthetic oligonucleotide
  Mitotic kinesin microtubule-associated protein Eg5 (Kif11) siRNA
tatggaagaattaattaaggatg

SEQ ID NO: 1904 - DNA, 23 bp, Artificial Sequence
  Description of Artificial Sequence: Synthetic oligonucleotide
  Mitotic kinesin microtubule-associated protein Eg5 (Kif11) siRNA
atggaagaattaattaaggatgg

SEQ ID NO: 1905 - DNA, 23 bp, Artificial Sequence
  Description of Artificial Sequence: Synthetic oligonucleotide
  Mitotic kinesin microtubule-associated protein Eg5 (Kif11) siRNA
tggaagaattaattaaggatggc

SEQ ID NO: 1906 - DNA, 23 bp, Artificial Sequence
  Description of Artificial Sequence: Synthetic oligonucleotide
  Mitotic kinesin microtubule-associated protein Eg5 (Kif11) siRNA
ggaagaattaattaaggatggca

SEQ ID NO: 1907 - DNA, 23 bp, Artificial Sequence
  Description of Artificial Sequence: Synthetic oligonucleotide
  Mitotic kinesin microtubule-associated protein Eg5 (Kif11) siRNA
gaagaattaattaaggatggcag

SEQ ID NO: 1908 - DNA, 23 bp, Artificial Sequence
  Description of Artificial Sequence: Synthetic oligonucleotide
  Mitotic kinesin microtubule-associated protein Eg5 (Kif11) siRNA
aagaattaattaaggatggcagc

SEQ ID NO: 1909 - DNA, 23 bp, Artificial Sequence
  Description of Artificial Sequence: Synthetic oligonucleotide
  Mitotic kinesin microtubule-associated protein Eg5 (Kif11) siRNA
agaattaattaaggatggcagct

SEQ ID NO: 1910 - DNA, 23 bp, Artificial Sequence
  Description of Artificial Sequence: Synthetic oligonucleotide
  Mitotic kinesin microtubule-associated protein Eg5 (Kif11) siRNA
gaattaattaaggatggcagctc

SEQ ID NO: 1911 - DNA, 23 bp, Artificial Sequence
  Description of Artificial Sequence: Synthetic oligonucleotide
  Mitotic kinesin microtubule-associated protein Eg5 (Kif11) siRNA
aattaattaaggatggcagctca

SEQ ID NO: 1912 - DNA, 23 bp, Artificial Sequence
  Description of Artificial Sequence: Synthetic oligonucleotide
  Mitotic kinesin microtubule-associated protein Eg5 (Kif11) siRNA
attaattaaggatggcagctcaa

SEQ ID NO: 1913 - DNA, 23 bp, Artificial Sequence
  Description of Artificial Sequence: Synthetic oligonucleotide
  Mitotic kinesin microtubule-associated protein Eg5 (Kif11) siRNA
ttaattaaggatggcagctcaaa

SEQ ID NO: 1914 - DNA, 23 bp, Artificial Sequence
  Description of Artificial Sequence: Synthetic oligonucleotide
  Mitotic kinesin microtubule-associated protein Eg5 (Kif11) siRNA
taattaaggatggcagctcaaag

SEQ ID NO: 1915 - DNA, 23 bp, Artificial Sequence
  Description of Artificial Sequence: Synthetic oligonucleotide
  Mitotic kinesin microtubule-associated protein Eg5 (Kif11) siRNA
aattaaggatggcagctcaaagc

SEQ ID NO: 1916 - DNA, 23 bp, Artificial Sequence
  Description of Artificial Sequence: Synthetic oligonucleotide
  Mitotic kinesin microtubule-associated protein Eg5 (Kif11) siRNA
attaaggatggcagctcaaagca

SEQ ID NO: 1917 - DNA, 23 bp, Artificial Sequence
  Description of Artificial Sequence: Synthetic oligonucleotide
  Mitotic kinesin microtubule-associated protein Eg5 (Kif11) siRNA
ttaaggatggcagctcaaagcaa

SEQ ID NO: 1918 - DNA, 23 bp, Artificial Sequence
  Description of Artificial Sequence: Synthetic oligonucleotide
  Mitotic kinesin microtubule-associated protein Eg5 (Kif11) siRNA
taaggatggcagctcaaagcaaa

SEQ ID NO: 1919 - DNA, 23 bp, Artificial Sequence
  Description of Artificial Sequence: Synthetic oligonucleotide
  Mitotic kinesin microtubule-associated protein Eg5 (Kif11) siRNA
aaggatggcagctcaaagcaaaa

SEQ ID NO: 1920 - DNA, 23 bp, Artificial Sequence
  Description of Artificial Sequence: Synthetic oligonucleotide
  Mitotic kinesin microtubule-associated protein Eg5 (Kif11) siRNA
aggatggcagctcaaagcaaaag

SEQ ID NO: 1921 - DNA, 23 bp, Artificial Sequence
  Description of Artificial Sequence: Synthetic oligonucleotide
  Mitotic kinesin microtubule-associated protein Eg5 (Kif11) siRNA
ggatggcagctcaaagcaaaagg

SEQ ID NO: 1922 - DNA, 23 bp, Artificial Sequence
  Description of Artificial Sequence: Synthetic oligonucleotide
  Mitotic kinesin microtubule-associated protein Eg5 (Kif11) siRNA
gatggcagctcaaagcaaaaggc

SEQ ID NO: 1923 - DNA, 23 bp, Artificial Sequence
  Description of Artificial Sequence: Synthetic oligonucleotide
  Mitotic kinesin microtubule-associated protein Eg5 (Kif11) siRNA
atggcagctcaaagcaaaaggcc

SEQ ID NO: 1924 - DNA, 23 bp, Artificial Sequence
  Description of Artificial Sequence: Synthetic oligonucleotide
  Mitotic kinesin microtubule-associated protein Eg5 (Kif11) siRNA
tggcagctcaaagcaaaaggcca

SEQ ID NO: 1925 - DNA, 23 bp, Artificial Sequence
  Description of Artificial Sequence: Synthetic oligonucleotide
  Mitotic kinesin microtubule-associated protein Eg5 (Kif11) siRNA
ggcagctcaaagcaaaaggccat

SEQ ID NO: 1926 - DNA, 23 bp, Artificial Sequence
  Description of Artificial Sequence: Synthetic oligonucleotide
  Mitotic kinesin microtubule-associated protein Eg5 (Kif11) siRNA
gcagctcaaagcaaaaggccatg

SEQ ID NO: 1927 - DNA, 23 bp, Artificial Sequence
  Description of Artificial Sequence: Synthetic oligonucleotide
  Mitotic kinesin microtubule-associated protein Eg5 (Kif11) siRNA
cagctcaaagcaaaaggccatgc

SEQ ID NO: 1928 - DNA, 23 bp, Artificial Sequence
  Description of Artificial Sequence: Synthetic oligonucleotide
  Mitotic kinesin microtubule-associated protein Eg5 (Kif11) siRNA
agctcaaagcaaaaggccatgct

SEQ ID NO: 1929 - DNA, 23 bp, Artificial Sequence
  Description of Artificial Sequence: Synthetic oligonucleotide
  Mitotic kinesin microtubule-associated protein Eg5 (Kif11) siRNA
gctcaaagcaaaaggccatgcta

SEQ ID NO: 1930 - DNA, 23 bp, Artificial Sequence
  Description of Artificial Sequence: Synthetic oligonucleotide
  Mitotic kinesin microtubule-associated protein Eg5 (Kif11) siRNA
ctcaaagcaaaaggccatgctag

SEQ ID NO: 1931 - DNA, 23 bp, Artificial Sequence
  Description of Artificial Sequence: Synthetic oligonucleotide
  Mitotic kinesin microtubule-associated protein Eg5 (Kif11) siRNA
tcaaagcaaaaggccatgctaga

SEQ ID NO: 1932 - DNA, 23 bp, Artificial Sequence
  Description of Artificial Sequence: Synthetic oligonucleotide
  Mitotic kinesin microtubule-associated protein Eg5 (Kif11) siRNA
caaagcaaaaggccatgctagaa

SEQ ID NO: 1933 - DNA, 23 bp, Artificial Sequence
  Description of Artificial Sequence: Synthetic oligonucleotide
  Mitotic kinesin microtubule-associated protein Eg5 (Kif11) siRNA
aaagcaaaaggccatgctagaag

SEQ ID NO: 1934 - DNA, 23 bp, Artificial Sequence
  Description of Artificial Sequence: Synthetic oligonucleotide
  Mitotic kinesin microtubule-associated protein Eg5 (Kif11) siRNA
aagcaaaaggccatgctagaagt

SEQ ID NO: 1935 - DNA, 23 bp, Artificial Sequence
  Description of Artificial Sequence: Synthetic oligonucleotide
  Mitotic kinesin microtubule-associated protein Eg5 (Kif11) siRNA
agcaaaaggccatgctagaagta

SEQ ID NO: 1936 - DNA, 23 bp, Artificial Sequence
  Description of Artificial Sequence: Synthetic oligonucleotide
  Mitotic kinesin microtubule-associated protein Eg5 (Kif11) siRNA
gcaaaaggccatgctagaagtac

SEQ ID NO: 1937 - DNA, 23 bp, Artificial Sequence
  Description of Artificial Sequence: Synthetic oligonucleotide
  Mitotic kinesin microtubule-associated protein Eg5 (Kif11) siRNA
caaaaggccatgctagaagtaca

SEQ ID NO: 1938 - DNA, 23 bp, Artificial Sequence
  Description of Artificial Sequence: Synthetic oligonucleotide
  Mitotic kinesin microtubule-associated protein Eg5 (Kif11) siRNA
aaaaggccatgctagaagtacat

SEQ ID NO: 1939 - DNA, 23 bp, Artificial Sequence
  Description of Artificial Sequence: Synthetic oligonucleotide
  Mitotic kinesin microtubule-associated protein Eg5 (Kif11) siRNA
aaaggccatgctagaagtacata

SEQ ID NO: 1940 - DNA, 23 bp, Artificial Sequence
  Description of Artificial Sequence: Synthetic oligonucleotide
  Mitotic kinesin microtubule-associated protein Eg5 (Kif11) siRNA
aaggccatgctagaagtacataa

SEQ ID NO: 1941 - DNA, 23 bp, Artificial Sequence
  Description of Artificial Sequence: Synthetic oligonucleotide
  Mitotic kinesin microtubule-associated protein Eg5 (Kif11) siRNA
aggccatgctagaagtacataag

SEQ ID NO: 1942 - DNA, 23 bp, Artificial Sequence
  Description of Artificial Sequence: Synthetic oligonucleotide
  Mitotic kinesin microtubule-associated protein Eg5 (Kif11) siRNA
ggccatgctagaagtacataaga

SEQ ID NO: 1943 - DNA, 23 bp, Artificial Sequence
  Description of Artificial Sequence: Synthetic oligonucleotide
  Mitotic kinesin microtubule-associated protein Eg5 (Kif11) siRNA
gccatgctagaagtacataagac

SEQ ID NO: 1944 - DNA, 23 bp, Artificial Sequence
  Description of Artificial Sequence: Synthetic oligonucleotide
  Mitotic kinesin microtubule-associated protein Eg5 (Kif11) siRNA
ccatgctagaagtacataagacc

SEQ ID NO: 1945 - DNA, 23 bp, Artificial Sequence
  Description of Artificial Sequence: Synthetic oligonucleotide
  Mitotic kinesin microtubule-associated protein Eg5 (Kif11) siRNA
catgctagaagtacataagacct

SEQ ID NO: 1946 - DNA, 23 bp, Artificial Sequence
  Description of Artificial Sequence: Synthetic oligonucleotide
  Mitotic kinesin microtubule-associated protein Eg5 (Kif11) siRNA
atgctagaagtacataagacctt

SEQ ID NO: 1947 - DNA, 23 bp, Artificial Sequence
  Description of Artificial Sequence: Synthetic oligonucleotide
  Mitotic kinesin microtubule-associated protein Eg5 (Kif11) siRNA
tgctagaagtacataagacctta

SEQ ID NO: 1948 - DNA, 23 bp, Artificial Sequence
  Description of Artificial Sequence: Synthetic oligonucleotide
  Mitotic kinesin microtubule-associated protein Eg5 (Kif11) siRNA
gctagaagtacataagaccttat

SEQ ID NO: 1949 - DNA, 23 bp, Artificial Sequence
  Description of Artificial Sequence: Synthetic oligonucleotide
  Mitotic kinesin microtubule-associated protein Eg5 (Kif11) siRNA
ctagaagtacataagaccttatt

SEQ ID NO: 1950 - DNA, 23 bp, Artificial Sequence
  Description of Artificial Sequence: Synthetic oligonucleotide
  Mitotic kinesin microtubule-associated protein Eg5 (Kif11) siRNA
tagaagtacataagaccttattt

SEQ ID NO: 1951 - DNA, 23 bp, Artificial Sequence
  Description of Artificial Sequence: Synthetic oligonucleotide
  Mitotic kinesin microtubule-associated protein Eg5 (Kif11) siRNA
agaagtacataagaccttatttg

SEQ ID NO: 1952 - DNA, 23 bp, Artificial Sequence
  Description of Artificial Sequence: Synthetic oligonucleotide
  Mitotic kinesin microtubule-associated protein Eg5 (Kif11) siRNA
gaagtacataagaccttatttgg

SEQ ID NO: 1953 - DNA, 23 bp, Artificial Sequence
  Description of Artificial Sequence: Synthetic oligonucleotide
  Mitotic kinesin microtubule-associated protein Eg5 (Kif11) siRNA
aagtacataagaccttatttggt

SEQ ID NO: 1954 - DNA, 23 bp, Artificial Sequence
  Description of Artificial Sequence: Synthetic oligonucleotide
  Mitotic kinesin microtubule-associated protein Eg5 (Kif11) siRNA
agtacataagaccttatttggta

SEQ ID NO: 1955 - DNA, 23 bp, Artificial Sequence
  Description of Artificial Sequence: Synthetic oligonucleotide
  Mitotic kinesin microtubule-associated protein Eg5 (Kif11) siRNA
gtacataagaccttatttggtaa

SEQ ID NO: 1956 - DNA, 23 bp, Artificial Sequence
  Description of Artificial Sequence: Synthetic oligonucleotide
  Mitotic kinesin microtubule-associated protein Eg5 (Kif11) siRNA
tacataagaccttatttggtaat

SEQ ID NO: 1957 - DNA, 23 bp, Artificial Sequence
  Description of Artificial Sequence: Synthetic oligonucleotide
  Mitotic kinesin microtubule-associated protein Eg5 (Kif11) siRNA
acataagaccttatttggtaatc

SEQ ID NO: 1958 - DNA, 23 bp, Artificial Sequence
  Description of Artificial Sequence: Synthetic oligonucleotide
  Mitotic kinesin microtubule-associated protein Eg5 (Kif11) siRNA
cataagaccttatttggtaatct

SEQ ID NO: 1959 - DNA, 23 bp, Artificial Sequence
  Description of Artificial Sequence: Synthetic oligonucleotide
  Mitotic kinesin microtubule-associated protein Eg5 (Kif11) siRNA
ataagaccttatttggtaatctg

SEQ ID NO: 1960 - DNA, 23 bp, Artificial Sequence
  Description of Artificial Sequence: Synthetic oligonucleotide
  Mitotic kinesin microtubule-associated protein Eg5 (Kif11) siRNA
taagaccttatttggtaatctgc

SEQ ID NO: 1961 - DNA, 23 bp, Artificial Sequence
  Description of Artificial Sequence: Synthetic oligonucleotide
  Mitotic kinesin microtubule-associated protein Eg5 (Kif11) siRNA
aagaccttatttggtaatctgct

SEQ ID NO: 1962 - DNA, 23 bp, Artificial Sequence
  Description of Artificial Sequence: Synthetic oligonucleotide
  Mitotic kinesin microtubule-associated protein Eg5 (Kif11) siRNA
agaccttatttggtaatctgctg

SEQ ID NO: 1963 - DNA, 23 bp, Artificial Sequence
  Description of Artificial Sequence: Synthetic oligonucleotide
  Mitotic kinesin microtubule-associated protein Eg5 (Kif11) siRNA
gaccttatttggtaatctgctgt

SEQ ID NO: 1964 - DNA, 23 bp, Artificial Sequence
  Description of Artificial Sequence: Synthetic oligonucleotide
  Mitotic kinesin microtubule-associated protein Eg5 (Kif11) siRNA
accttatttggtaatctgctgtc

SEQ ID NO: 1965 - DNA, 23 bp, Artificial Sequence
  Description of Artificial Sequence: Synthetic oligonucleotide
  Mitotic kinesin microtubule-associated protein Eg5 (Kif11) siRNA
ccttatttggtaatctgctgtct

SEQ ID NO: 1966 - DNA, 23 bp, Artificial Sequence
  Description of Artificial Sequence: Synthetic oligonucleotide
  Mitotic kinesin microtubule-associated protein Eg5 (Kif11) siRNA
cttatttggtaatctgctgtctt

SEQ ID NO: 1967 - DNA, 23 bp, Artificial Sequence
  Description of Artificial Sequence: Synthetic oligonucleotide
  Mitotic kinesin microtubule-associated protein Eg5 (Kif11) siRNA
ttatttggtaatctgctgtcttc

SEQ ID NO: 1968 - DNA, 23 bp, Artificial Sequence
  Description of Artificial Sequence: Synthetic oligonucleotide
  Mitotic kinesin microtubule-associated protein Eg5 (Kif11) siRNA
tatttggtaatctgctgtcttcc

SEQ ID NO: 1969 - DNA, 23 bp, Artificial Sequence
  Description of Artificial Sequence: Synthetic oligonucleotide
  Mitotic kinesin microtubule-associated protein Eg5 (Kif11) siRNA
atttggtaatctgctgtcttcca

SEQ ID NO: 1970 - DNA, 23 bp, Artificial Sequence
  Description of Artificial Sequence: Synthetic oligonucleotide
  Mitotic kinesin microtubule-associated protein Eg5 (Kif11) siRNA
tttggtaatctgctgtcttccag

SEQ ID NO: 1971 - DNA, 23 bp, Artificial Sequence
  Description of Artificial Sequence: Synthetic oligonucleotide
  Mitotic kinesin microtubule-associated protein Eg5 (Kif11) siRNA
ttggtaatctgctgtcttccagt

SEQ ID NO: 1972 - DNA, 23 bp, Artificial Sequence
  Description of Artificial Sequence: Synthetic oligonucleotide
  Mitotic kinesin microtubule-associated protein Eg5 (Kif11) siRNA
tggtaatctgctgtcttccagtg

SEQ ID NO: 1973 - DNA, 23 bp, Artificial Sequence
  Description of Artificial Sequence: Synthetic oligonucleotide
  Mitotic kinesin microtubule-associated protein Eg5 (Kif11) siRNA
ggtaatctgctgtcttccagtgt

SEQ ID NO: 1974 - DNA, 23 bp, Artificial Sequence
  Description of Artificial Sequence: Synthetic oligonucleotide
  Mitotic kinesin microtubule-associated protein Eg5 (Kif11) siRNA
gtaatctgctgtcttccagtgtc

SEQ ID NO: 1975 - DNA, 23 bp, Artificial Sequence
  Description of Artificial Sequence: Synthetic oligonucleotide
  Mitotic kinesin microtubule-associated protein Eg5 (Kif11) siRNA
taatctgctgtcttccagtgtct

SEQ ID NO: 1976 - DNA, 23 bp, Artificial Sequence
  Description of Artificial Sequence: Synthetic oligonucleotide
  Mitotic kinesin microtubule-associated protein Eg5 (Kif11) siRNA
aatctgctgtcttccagtgtctc

SEQ ID NO: 1977 - DNA, 23 bp, Artificial Sequence
  Description of Artificial Sequence: Synthetic oligonucleotide
  Mitotic kinesin microtubule-associated protein Eg5 (Kif11) siRNA
atctgctgtcttccagtgtctct

SEQ ID NO: 1978 - DNA, 23 bp, Artificial Sequence
  Description of Artificial Sequence: Synthetic oligonucleotide
  Mitotic kinesin microtubule-associated protein Eg5 (Kif11) siRNA
tctgctgtcttccagtgtctctg

SEQ ID NO: 1979 - DNA, 23 bp, Artificial Sequence
  Description of Artificial Sequence: Synthetic oligonucleotide
  Mitotic kinesin microtubule-associated protein Eg5 (Kif11) siRNA
ctgctgtcttccagtgtctctgc

SEQ ID NO: 1980 - DNA, 23 bp, Artificial Sequence
  Description of Artificial Sequence: Synthetic oligonucleotide
  Mitotic kinesin microtubule-associated protein Eg5 (Kif11) siRNA
tgctgtcttccagtgtctctgca

SEQ ID NO: 1981 - DNA, 23 bp, Artificial Sequence
  Description of Artificial Sequence: Synthetic oligonucleotide
  Mitotic kinesin microtubule-associated protein Eg5 (Kif11) siRNA
gctgtcttccagtgtctctgcat

SEQ ID NO: 1982 - DNA, 23 bp, Artificial Sequence
  Description of Artificial Sequence: Synthetic oligonucleotide
  Mitotic kinesin microtubule-associated protein Eg5 (Kif11) siRNA
ctgtcttccagtgtctctgcatt

SEQ ID NO: 1983 - DNA, 23 bp, Artificial Sequence
  Description of Artificial Sequence: Synthetic oligonucleotide
  Mitotic kinesin microtubule-associated protein Eg5 (Kif11) siRNA
tgtcttccagtgtctctgcatta

SEQ ID NO: 1984 - DNA, 23 bp, Artificial Sequence
  Description of Artificial Sequence: Synthetic oligonucleotide
  Mitotic kinesin microtubule-associated protein Eg5 (Kif11) siRNA
gtcttccagtgtctctgcattag

SEQ ID NO: 1985 - DNA, 23 bp, Artificial Sequence
  Description of Artificial Sequence: Synthetic oligonucleotide
  Mitotic kinesin microtubule-associated protein Eg5 (Kif11) siRNA
tcttccagtgtctctgcattaga

SEQ ID NO: 1986 - DNA, 23 bp, Artificial Sequence
  Description of Artificial Sequence: Synthetic oligonucleotide
  Mitotic kinesin microtubule-associated protein Eg5 (Kif11) siRNA
cttccagtgtctctgcattagat

SEQ ID NO: 1987 - DNA, 23 bp, Artificial Sequence
  Description of Artificial Sequence: Synthetic oligonucleotide
  Mitotic kinesin microtubule-associated protein Eg5 (Kif11) siRNA
ttccagtgtctctgcattagata

SEQ ID NO: 1988 - DNA, 23 bp, Artificial Sequence
  Description of Artificial Sequence: Synthetic oligonucleotide
  Mitotic kinesin microtubule-associated protein Eg5 (Kif11) siRNA
tccagtgtctctgcattagatac

SEQ ID NO: 1989 - DNA, 23 bp, Artificial Sequence
  Description of Artificial Sequence: Synthetic oligonucleotide
  Mitotic kinesin microtubule-associated protein Eg5 (Kif11) siRNA
ccagtgtctctgcattagatacc

SEQ ID NO: 1990 - DNA, 23 bp, Artificial Sequence
  Description of Artificial Sequence: Synthetic oligonucleotide
  Mitotic kinesin microtubule-associated protein Eg5 (Kif11) siRNA
cagtgtctctgcattagatacca

SEQ ID NO: 1991 - DNA, 23 bp, Artificial Sequence
  Description of Artificial Sequence: Synthetic oligonucleotide
  Mitotic kinesin microtubule-associated protein Eg5 (Kif11) siRNA
agtgtctctgcattagataccat

SEQ ID NO: 1992 - DNA, 23 bp, Artificial Sequence
  Description of Artificial Sequence: Synthetic oligonucleotide
  Mitotic kinesin microtubule-associated protein Eg5 (Kif11) siRNA
gtgtctctgcattagataccatt

SEQ ID NO: 1993 - DNA, 23 bp, Artificial Sequence
  Description of Artificial Sequence: Synthetic oligonucleotide
  Mitotic kinesin microtubule-associated protein Eg5 (Kif11) siRNA
tgtctctgcattagataccatta

SEQ ID NO: 1994 - DNA, 23 bp, Artificial Sequence
  Description of Artificial Sequence: Synthetic oligonucleotide
  Mitotic kinesin microtubule-associated protein Eg5 (Kif11) siRNA
gtctctgcattagataccattac

SEQ ID NO: 1995 - DNA, 23 bp, Artificial Sequence
  Description of Artificial Sequence: Synthetic oligonucleotide
  Mitotic kinesin microtubule-associated protein Eg5 (Kif11) siRNA
tctctgcattagataccattact

SEQ ID NO: 1996 - DNA, 23 bp, Artificial Sequence
  Description of Artificial Sequence: Synthetic oligonucleotide
  Mitotic kinesin microtubule-associated protein Eg5 (Kif11) siRNA
ctctgcattagataccattacta

SEQ ID NO: 1997 - DNA, 23 bp, Artificial Sequence
  Description of Artificial Sequence: Synthetic oligonucleotide
  Mitotic kinesin microtubule-associated protein Eg5 (Kif11) siRNA
tctgcattagataccattactac

SEQ ID NO: 1998 - DNA, 23 bp, Artificial Sequence
  Description of Artificial Sequence: Synthetic oligonucleotide
  Mitotic kinesin microtubule-associated protein Eg5 (Kif11) siRNA
ctgcattagataccattactaca

SEQ ID NO: 1999 - DNA, 23 bp, Artificial Sequence
  Description of Artificial Sequence: Synthetic oligonucleotide
  Mitotic kinesin microtubule-associated protein Eg5 (Kif11) siRNA
tgcattagataccattactacag

SEQ ID NO: 2000 - DNA, 23 bp, Artificial Sequence
  Description of Artificial Sequence: Synthetic oligonucleotide
  Mitotic kinesin microtubule-associated protein Eg5 (Kif11) siRNA
gcattagataccattactacagt

SEQ ID NO: 2001 - DNA, 23 bp, Artificial Sequence
  Description of Artificial Sequence: Synthetic oligonucleotide
  Mitotic kinesin microtubule-associated protein Eg5 (Kif11) siRNA
cattagataccattactacagta

SEQ ID NO: 2002 - DNA, 23 bp, Artificial Sequence
  Description of Artificial Sequence: Synthetic oligonucleotide
  Mitotic kinesin microtubule-associated protein Eg5 (Kif11) siRNA
attagataccattactacagtag

SEQ ID NO: 2003 - DNA, 23 bp, Artificial Sequence
  Description of Artificial Sequence: Synthetic oligonucleotide
  Mitotic kinesin microtubule-associated protein Eg5 (Kif11) siRNA
ttagataccattactacagtagc

SEQ ID NO: 2004 - DNA, 23 bp, Artificial Sequence
  Description of Artificial Sequence: Synthetic oligonucleotide
  Mitotic kinesin microtubule-associated protein Eg5 (Kif11) siRNA
tagataccattactacagtagca

SEQ ID NO: 2005 - DNA, 23 bp, Artificial Sequence
  Description of Artificial Sequence: Synthetic oligonucleotide
  Mitotic kinesin microtubule-associated protein Eg5 (Kif11) siRNA
agataccattactacagtagcac

SEQ ID NO: 2006 - DNA, 23 bp, Artificial Sequence
  Description of Artificial Sequence: Synthetic oligonucleotide
  Mitotic kinesin microtubule-associated protein Eg5 (Kif11) siRNA
gataccattactacagtagcact

SEQ ID NO: 2007 - DNA, 23 bp, Artificial Sequence
  Description of Artificial Sequence: Synthetic oligonucleotide
  Mitotic kinesin microtubule-associated protein Eg5 (Kif11) siRNA
ataccattactacagtagcactt

SEQ ID NO: 2008 - DNA, 23 bp, Artificial Sequence
  Description of Artificial Sequence: Synthetic oligonucleotide
  Mitotic kinesin microtubule-associated protein Eg5 (Kif11) siRNA
taccattactacagtagcacttg

SEQ ID NO: 2009 - DNA, 23 bp, Artificial Sequence
  Description of Artificial Sequence: Synthetic oligonucleotide
  Mitotic kinesin microtubule-associated protein Eg5 (Kif11) siRNA
accattactacagtagcacttgg

SEQ ID NO: 2010 - DNA, 23 bp, Artificial Sequence
  Description of Artificial Sequence: Synthetic oligonucleotide
  Mitotic kinesin microtubule-associated protein Eg5 (Kif11) siRNA
ccattactacagtagcacttgga

SEQ ID NO: 2011 - DNA, 23 bp, Artificial Sequence
  Description of Artificial Sequence: Synthetic oligonucleotide
  Mitotic kinesin microtubule-associated protein Eg5 (Kif11) siRNA
cattactacagtagcacttggat

SEQ ID NO: 2012 - DNA, 23 bp, Artificial Sequence
  Description of Artificial Sequence: Synthetic oligonucleotide
  Mitotic kinesin microtubule-associated protein Eg5 (Kif11) siRNA
attactacagtagcacttggatc

SEQ ID NO: 2013 - DNA, 23 bp, Artificial Sequence
  Description of Artificial Sequence: Synthetic oligonucleotide
  Mitotic kinesin microtubule-associated protein Eg5 (Kif11) siRNA
ttactacagtagcacttggatct

SEQ ID NO: 2014 - DNA, 23 bp, Artificial Sequence
  Description of Artificial Sequence: Synthetic oligonucleotide
  Mitotic kinesin microtubule-associated protein Eg5 (Kif11) siRNA
tactacagtagcacttggatctc

SEQ ID NO: 2015 - DNA, 23 bp, Artificial Sequence
  Description of Artificial Sequence: Synthetic oligonucleotide
  Mitotic kinesin microtubule-associated protein Eg5 (Kif11) siRNA
actacagtagcacttggatctct

SEQ ID NO: 2016 - DNA, 23 bp, Artificial Sequence
  Description of Artificial Sequence: Synthetic oligonucleotide
  Mitotic kinesin microtubule-associated protein Eg5 (Kif11) siRNA
ctacagtagcacttggatctctc

SEQ ID NO: 2017 - DNA, 23 bp, Artificial Sequence
  Description of Artificial Sequence: Synthetic oligonucleotide
  Mitotic kinesin microtubule-associated protein Eg5 (Kif11) siRNA
tacagtagcacttggatctctca

SEQ ID NO: 2018 - DNA, 23 bp, Artificial Sequence
  Description of Artificial Sequence: Synthetic oligonucleotide
  Mitotic kinesin microtubule-associated protein Eg5 (Kif11) siRNA
acagtagcacttggatctctcac

SEQ ID NO: 2019 - DNA, 23 bp, Artificial Sequence
  Description of Artificial Sequence: Synthetic oligonucleotide
  Mitotic kinesin microtubule-associated protein Eg5 (Kif11) siRNA
cagtagcacttggatctctcaca

SEQ ID NO: 2020 - DNA, 23 bp, Artificial Sequence
  Description of Artificial Sequence: Synthetic oligonucleotide
  Mitotic kinesin microtubule-associated protein Eg5 (Kif11) siRNA
agtagcacttggatctctcacat

SEQ ID NO: 2021 - DNA, 23 bp, Artificial Sequence
  Description of Artificial Sequence: Synthetic oligonucleotide
  Mitotic kinesin microtubule-associated protein Eg5 (Kif11) siRNA
gtagcacttggatctctcacatc

SEQ ID NO: 2022 - DNA, 23 bp, Artificial Sequence
  Description of Artificial Sequence: Synthetic oligonucleotide
  Mitotic kinesin microtubule-associated protein Eg5 (Kif11) siRNA
tagcacttggatctctcacatct

SEQ ID NO: 2023 - DNA, 23 bp, Artificial Sequence
  Description of Artificial Sequence: Synthetic oligonucleotide
  Mitotic kinesin microtubule-associated protein Eg5 (Kif11) siRNA
agcacttggatctctcacatcta

SEQ ID NO: 2024 - DNA, 23 bp, Artificial Sequence
  Description of Artificial Sequence: Synthetic oligonucleotide
  Mitotic kinesin microtubule-associated protein Eg5 (Kif11) siRNA
gcacttggatctctcacatctat

SEQ ID NO: 2025 - DNA, 23 bp, Artificial Sequence
  Description of Artificial Sequence: Synthetic oligonucleotide
  Mitotic kinesin microtubule-associated protein Eg5 (Kif11) siRNA
cacttggatctctcacatctatt

SEQ ID NO: 2026 - DNA, 23 bp, Artificial Sequence
  Description of Artificial Sequence: Synthetic oligonucleotide
  Mitotic kinesin microtubule-associated protein Eg5 (Kif11) siRNA
acttggatctctcacatctattc

SEQ ID NO: 2027 - DNA, 23 bp, Artificial Sequence
  Description of Artificial Sequence: Synthetic oligonucleotide
  Mitotic kinesin microtubule-associated protein Eg5 (Kif11) siRNA
cttggatctctcacatctattcc

SEQ ID NO: 2028 - DNA, 23 bp, Artificial Sequence
  Description of Artificial Sequence: Synthetic oligonucleotide
  Mitotic kinesin microtubule-associated protein Eg5 (Kif11) siRNA
ttggatctctcacatctattcca

SEQ ID NO: 2029 - DNA, 23 bp, Artificial Sequence
  Description of Artificial Sequence: Synthetic oligonucleotide
  Mitotic kinesin microtubule-associated protein Eg5 (Kif11) siRNA
tggatctctcacatctattccag

SEQ ID NO: 2030 - DNA, 23 bp, Artificial Sequence
  Description of Artificial Sequence: Synthetic oligonucleotide
  Mitotic kinesin microtubule-associated protein Eg5 (Kif11) siRNA
ggatctctcacatctattccaga

SEQ ID NO: 2031 - DNA, 23 bp, Artificial Sequence
  Description of Artificial Sequence: Synthetic oligonucleotide
  Mitotic kinesin microtubule-associated protein Eg5 (Kif11) siRNA
gatctctcacatctattccagaa

SEQ ID NO: 2032 - DNA, 23 bp, Artificial Sequence
  Description of Artificial Sequence: Synthetic oligonucleotide
  Mitotic kinesin microtubule-associated protein Eg5 (Kif11) siRNA
atctctcacatctattccagaaa

SEQ ID NO: 2033 - DNA, 23 bp, Artificial Sequence
  Description of Artificial Sequence: Synthetic oligonucleotide
  Mitotic kinesin microtubule-associated protein Eg5 (Kif11) siRNA
tctctcacatctattccagaaaa

SEQ ID NO: 2034 - DNA, 23 bp, Artificial Sequence
  Description of Artificial Sequence: Synthetic oligonucleotide
  Mitotic kinesin microtubule-associated protein Eg5 (Kif11) siRNA
ctctcacatctattccagaaaat

SEQ ID NO: 2035 - DNA, 23 bp, Artificial Sequence
  Description of Artificial Sequence: Synthetic oligonucleotide
  Mitotic kinesin microtubule-associated protein Eg5 (Kif11) siRNA
tctcacatctattccagaaaatg

SEQ ID NO: 2036 - DNA, 23 bp, Artificial Sequence
  Description of Artificial Sequence: Synthetic oligonucleotide
  Mitotic kinesin microtubule-associated protein Eg5 (Kif11) siRNA
ctcacatctattccagaaaatgt

SEQ ID NO: 2037 - DNA, 23 bp, Artificial Sequence
  Description of Artificial Sequence: Synthetic oligonucleotide
  Mitotic kinesin microtubule-associated protein Eg5 (Kif11) siRNA
tcacatctattccagaaaatgtg

SEQ ID NO: 2038 - DNA, 23 bp, Artificial Sequence
  Description of Artificial Sequence: Synthetic oligonucleotide
  Mitotic kinesin microtubule-associated protein Eg5 (Kif11) siRNA
cacatctattccagaaaatgtgt

SEQ ID NO: 2039 - DNA, 23 bp, Artificial Sequence
  Description of Artificial Sequence: Synthetic oligonucleotide
  Mitotic kinesin microtubule-associated protein Eg5 (Kif11) siRNA
acatctattccagaaaatgtgtc

SEQ ID NO: 2040 - DNA, 23 bp, Artificial Sequence
  Description of Artificial Sequence: Synthetic oligonucleotide
  Mitotic kinesin microtubule-associated protein Eg5 (Kif11) siRNA
catctattccagaaaatgtgtct

SEQ ID NO: 2041 - DNA, 23 bp, Artificial Sequence
  Description of Artificial Sequence: Synthetic oligonucleotide
  Mitotic kinesin microtubule-associated protein Eg5 (Kif11) siRNA
atctattccagaaaatgtgtcta

SEQ ID NO: 2042 - DNA, 23 bp, Artificial Sequence
  Description of Artificial Sequence: Synthetic oligonucleotide
  Mitotic kinesin microtubule-associated protein Eg5 (Kif11) siRNA
tctattccagaaaatgtgtctac

SEQ ID NO: 2043 - DNA, 23 bp, Artificial Sequence
  Description of Artificial Sequence: Synthetic oligonucleotide
  Mitotic kinesin microtubule-associated protein Eg5 (Kif11) siRNA
ctattccagaaaatgtgtctact

SEQ ID NO: 2044 - DNA, 23 bp, Artificial Sequence
  Description of Artificial Sequence: Synthetic oligonucleotide
  Mitotic kinesin microtubule-associated protein Eg5 (Kif11) siRNA
tattccagaaaatgtgtctactc

SEQ ID NO: 2045 - DNA, 23 bp, Artificial Sequence
  Description of Artificial Sequence: Synthetic oligonucleotide
  Mitotic kinesin microtubule-associated protein Eg5 (Kif11) siRNA
attccagaaaatgtgtctactca

SEQ ID NO: 2046 - DNA, 23 bp, Artificial Sequence
  Description of Artificial Sequence: Synthetic oligonucleotide
  Mitotic kinesin microtubule-associated protein Eg5 (Kif11) siRNA
ttccagaaaatgtgtctactcat

SEQ ID NO: 2047 - DNA, 23 bp, Artificial Sequence
  Description of Artificial Sequence: Synthetic oligonucleotide
  Mitotic kinesin microtubule-associated protein Eg5 (Kif11) siRNA
tccagaaaatgtgtctactcatg

SEQ ID NO: 2048 - DNA, 23 bp, Artificial Sequence
  Description of Artificial Sequence: Synthetic oligonucleotide
  Mitotic kinesin microtubule-associated protein Eg5 (Kif11) siRNA
ccagaaaatgtgtctactcatgt

SEQ ID NO: 2049 - DNA, 23 bp, Artificial Sequence
  Description of Artificial Sequence: Synthetic oligonucleotide
  Mitotic kinesin microtubule-associated protein Eg5 (Kif11) siRNA
cagaaaatgtgtctactcatgtt

SEQ ID NO: 2050 - DNA, 23 bp, Artificial Sequence
  Description of Artificial Sequence: Synthetic oligonucleotide
  Mitotic kinesin microtubule-associated protein Eg5 (Kif11) siRNA
agaaaatgtgtctactcatgttt

SEQ ID NO: 2051 - DNA, 23 bp, Artificial Sequence
  Description of Artificial Sequence: Synthetic oligonucleotide
  Mitotic kinesin microtubule-associated protein Eg5 (Kif11) siRNA
gaaaatgtgtctactcatgtttc

SEQ ID NO: 2052 - DNA, 23 bp, Artificial Sequence
  Description of Artificial Sequence: Synthetic oligonucleotide
  Mitotic kinesin microtubule-associated protein Eg5 (Kif11) siRNA
aaaatgtgtctactcatgtttct

SEQ ID NO: 2053 - DNA, 23 bp, Artificial Sequence
  Description of Artificial Sequence: Synthetic oligonucleotide
  Mitotic kinesin microtubule-associated protein Eg5 (Kif11) siRNA
aaatgtgtctactcatgtttctc

SEQ ID NO: 2054 - DNA, 23 bp, Artificial Sequence
  Description of Artificial Sequence: Synthetic oligonucleotide
  Mitotic kinesin microtubule-associated protein Eg5 (Kif11) siRNA
aatgtgtctactcatgtttctca

SEQ ID NO: 2055 - DNA, 23 bp, Artificial Sequence
  Description of Artificial Sequence: Synthetic oligonucleotide
  Mitotic kinesin microtubule-associated protein Eg5 (Kif11) siRNA
atgtgtctactcatgtttctcag

SEQ ID NO: 2056 - DNA, 23 bp, Artificial Sequence
  Description of Artificial Sequence: Synthetic oligonucleotide
  Mitotic kinesin microtubule-associated protein Eg5 (Kif11) siRNA
tgtgtctactcatgtttctcaga

SEQ ID NO: 2057 - DNA, 23 bp, Artificial Sequence
  Description of Artificial Sequence: Synthetic oligonucleotide
  Mitotic kinesin microtubule-associated protein Eg5 (Kif11) siRNA
gtgtctactcatgtttctcagat

SEQ ID NO: 2058 - DNA, 23 bp, Artificial Sequence
  Description of Artificial Sequence: Synthetic oligonucleotide
  Mitotic kinesin microtubule-associated protein Eg5 (Kif11) siRNA
tgtctactcatgtttctcagatt

SEQ ID NO: 2059 - DNA, 23 bp, Artificial Sequence
  Description of Artificial Sequence: Synthetic oligonucleotide
  Mitotic kinesin microtubule-associated protein Eg5 (Kif11) siRNA
gtctactcatgtttctcagattt

SEQ ID NO: 2060 - DNA, 23 bp, Artificial Sequence
  Description of Artificial Sequence: Synthetic oligonucleotide
  Mitotic kinesin microtubule-associated protein Eg5 (Kif11) siRNA
tctactcatgtttctcagatttt

SEQ ID NO: 2061 - DNA, 23 bp, Artificial Sequence
  Description of Artificial Sequence: Synthetic oligonucleotide
  Mitotic kinesin microtubule-associated protein Eg5 (Kif11) siRNA
ctactcatgtttctcagattttt

SEQ ID NO: 2062 - DNA, 23 bp, Artificial Sequence
  Description of Artificial Sequence: Synthetic oligonucleotide
  Mitotic kinesin microtubule-associated protein Eg5 (Kif11) siRNA
tactcatgtttctcagattttta

SEQ ID NO: 2063 - DNA, 23 bp, Artificial Sequence
  Description of Artificial Sequence: Synthetic oligonucleotide
  Mitotic kinesin microtubule-associated protein Eg5 (Kif11) siRNA
actcatgtttctcagatttttaa

SEQ ID NO: 2064 - DNA, 23 bp, Artificial Sequence
  Description of Artificial Sequence: Synthetic oligonucleotide
  Mitotic kinesin microtubule-associated protein Eg5 (Kif11) siRNA
ctcatgtttctcagatttttaat

SEQ ID NO: 2065 - DNA, 23 bp, Artificial Sequence
  Description of Artificial Sequence: Synthetic oligonucleotide
  Mitotic kinesin microtubule-associated protein Eg5 (Kif11) siRNA
tcatgtttctcagatttttaata

SEQ ID NO: 2066 - DNA, 23 bp, Artificial Sequence
  Description of Artificial Sequence: Synthetic oligonucleotide
  Mitotic kinesin microtubule-associated protein Eg5 (Kif11) siRNA
catgtttctcagatttttaatat

SEQ ID NO: 2067 - DNA, 23 bp, Artificial Sequence
  Description of Artificial Sequence: Synthetic oligonucleotide
  Mitotic kinesin microtubule-associated protein Eg5 (Kif11) siRNA
atgtttctcagatttttaatatg

SEQ ID NO: 2068 - DNA, 23 bp, Artificial Sequence
  Description of Artificial Sequence: Synthetic oligonucleotide
  Mitotic kinesin microtubule-associated protein Eg5 (Kif11) siRNA
tgtttctcagatttttaatatga

SEQ ID NO: 2069 - DNA, 23 bp, Artificial Sequence
  Description of Artificial Sequence: Synthetic oligonucleotide
  Mitotic kinesin microtubule-associated protein Eg5 (Kif11) siRNA
gtttctcagatttttaatatgat

SEQ ID NO: 2070 - DNA, 23 bp, Artificial Sequence
  Description of Artificial Sequence: Synthetic oligonucleotide
  Mitotic kinesin microtubule-associated protein Eg5 (Kif11) siRNA
tttctcagatttttaatatgata

SEQ ID NO: 2071 - DNA, 23 bp, Artificial Sequence
  Description of Artificial Sequence: Synthetic oligonucleotide
  Mitotic kinesin microtubule-associated protein Eg5 (Kif11) siRNA
ttctcagatttttaatatgatac

SEQ ID NO: 2072 - DNA, 23 bp, Artificial Sequence
  Description of Artificial Sequence: Synthetic oligonucleotide
  Mitotic kinesin microtubule-associated protein Eg5 (Kif11) siRNA
tctcagatttttaatatgatact

SEQ ID NO: 2073 - DNA, 23 bp, Artificial Sequence
  Description of Artificial Sequence: Synthetic oligonucleotide
  Mitotic kinesin microtubule-associated protein Eg5 (Kif11) siRNA
ctcagatttttaatatgatacta

SEQ ID NO: 2074 - DNA, 23 bp, Artificial Sequence
  Description of Artificial Sequence: Synthetic oligonucleotide
  Mitotic kinesin microtubule-associated protein Eg5 (Kif11) siRNA
tcagatttttaatatgatactaa

SEQ ID NO: 2075 - DNA, 23 bp, Artificial Sequence
  Description of Artificial Sequence: Synthetic oligonucleotide
  Mitotic kinesin microtubule-associated protein Eg5 (Kif11) siRNA
cagatttttaatatgatactaaa

SEQ ID NO: 2076 - DNA, 23 bp, Artificial Sequence
  Description of Artificial Sequence: Synthetic oligonucleotide
  Mitotic kinesin microtubule-associated protein Eg5 (Kif11) siRNA
agatttttaatatgatactaaaa

SEQ ID NO: 2077 - DNA, 23 bp, Artificial Sequence
  Description of Artificial Sequence: Synthetic oligonucleotide
  Mitotic kinesin microtubule-associated protein Eg5 (Kif11) siRNA
gatttttaatatgatactaaaag

SEQ ID NO: 2078 - DNA, 23 bp, Artificial Sequence
  Description of Artificial Sequence: Synthetic oligonucleotide
  Mitotic kinesin microtubule-associated protein Eg5 (Kif11) siRNA
atttttaatatgatactaaaaga

SEQ ID NO: 2079 - DNA, 23 bp, Artificial Sequence
  Description of Artificial Sequence: Synthetic oligonucleotide
  Mitotic kinesin microtubule-associated protein Eg5 (Kif11) siRNA
tttttaatatgatactaaaagaa

SEQ ID NO: 2080 - DNA, 23 bp, Artificial Sequence
  Description of Artificial Sequence: Synthetic oligonucleotide
  Mitotic kinesin microtubule-associated protein Eg5 (Kif11) siRNA
ttttaatatgatactaaaagaac

SEQ ID NO: 2081 - DNA, 23 bp, Artificial Sequence
  Description of Artificial Sequence: Synthetic oligonucleotide
  Mitotic kinesin microtubule-associated protein Eg5 (Kif11) siRNA
tttaatatgatactaaaagaaca

SEQ ID NO: 2082 - DNA, 23 bp, Artificial Sequence
  Description of Artificial Sequence: Synthetic oligonucleotide
  Mitotic kinesin microtubule-associated protein Eg5 (Kif11) siRNA
ttaatatgatactaaaagaacaa

SEQ ID NO: 2083 - DNA, 23 bp, Artificial Sequence
  Description of Artificial Sequence: Synthetic oligonucleotide
  Mitotic kinesin microtubule-associated protein Eg5 (Kif11) siRNA
taatatgatactaaaagaacaat

SEQ ID NO: 2084 - DNA, 23 bp, Artificial Sequence
  Description of Artificial Sequence: Synthetic oligonucleotide
  Mitotic kinesin microtubule-associated protein Eg5 (Kif11) siRNA
aatatgatactaaaagaacaatc

SEQ ID NO: 2085 - DNA, 23 bp, Artificial Sequence
  Description of Artificial Sequence: Synthetic oligonucleotide
  Mitotic kinesin microtubule-associated protein Eg5 (Kif11) siRNA
atatgatactaaaagaacaatca

SEQ ID NO: 2086 - DNA, 23 bp, Artificial Sequence
  Description of Artificial Sequence: Synthetic oligonucleotide
  Mitotic kinesin microtubule-associated protein Eg5 (Kif11) siRNA
tatgatactaaaagaacaatcat

SEQ ID NO: 2087 - DNA, 23 bp, Artificial Sequence
  Description of Artificial Sequence: Synthetic oligonucleotide
  Mitotic kinesin microtubule-associated protein Eg5 (Kif11) siRNA
atgatactaaaagaacaatcatt

SEQ ID NO: 2088 - DNA, 23 bp, Artificial Sequence
  Description of Artificial Sequence: Synthetic oligonucleotide
  Mitotic kinesin microtubule-associated protein Eg5 (Kif11) siRNA
tgatactaaaagaacaatcatta

SEQ ID NO: 2089 - DNA, 23 bp, Artificial Sequence
  Description of Artificial Sequence: Synthetic oligonucleotide
  Mitotic kinesin microtubule-associated protein Eg5 (Kif11) siRNA
gatactaaaagaacaatcattag

SEQ ID NO: 2090 - DNA, 23 bp, Artificial Sequence
  Description of Artificial Sequence: Synthetic oligonucleotide
  Mitotic kinesin microtubule-associated protein Eg5 (Kif11) siRNA
atactaaaagaacaatcattagc

SEQ ID NO: 2091 - DNA, 23 bp, Artificial Sequence
  Description of Artificial Sequence: Synthetic oligonucleotide
  Mitotic kinesin microtubule-associated protein Eg5 (Kif11) siRNA
tactaaaagaacaatcattagca

SEQ ID NO: 2092 - DNA, 23 bp, Artificial Sequence
  Description of Artificial Sequence: Synthetic oligonucleotide
  Mitotic kinesin microtubule-associated protein Eg5 (Kif11) siRNA
actaaaagaacaatcattagcag

SEQ ID NO: 2093 - DNA, 23 bp, Artificial Sequence
  Description of Artificial Sequence: Synthetic oligonucleotide
  Mitotic kinesin microtubule-associated protein Eg5 (Kif11) siRNA
ctaaaagaacaatcattagcagc

SEQ ID NO: 2094 - DNA, 23 bp, Artificial Sequence
  Description of Artificial Sequence: Synthetic oligonucleotide
  Mitotic kinesin microtubule-associated protein Eg5 (Kif11) siRNA
taaaagaacaatcattagcagca

SEQ ID NO: 2095 - DNA, 23 bp, Artificial Sequence
  Description of Artificial Sequence: Synthetic oligonucleotide
  Mitotic kinesin microtubule-associated protein Eg5 (Kif11) siRNA
aaaagaacaatcattagcagcag

SEQ ID NO: 2096 - DNA, 23 bp, Artificial Sequence
  Description of Artificial Sequence: Synthetic oligonucleotide
  Mitotic kinesin microtubule-associated protein Eg5 (Kif11) siRNA
aaagaacaatcattagcagcaga

SEQ ID NO: 2097 - DNA, 23 bp, Artificial Sequence
  Description of Artificial Sequence: Synthetic oligonucleotide
  Mitotic kinesin microtubule-associated protein Eg5 (Kif11) siRNA
aagaacaatcattagcagcagaa

SEQ ID NO: 2098 - DNA, 23 bp, Artificial Sequence
  Description of Artificial Sequence: Synthetic oligonucleotide
  Mitotic kinesin microtubule-associated protein Eg5 (Kif11) siRNA
agaacaatcattagcagcagaaa

SEQ ID NO: 2099 - DNA, 23 bp, Artificial Sequence
  Description of Artificial Sequence: Synthetic oligonucleotide
  Mitotic kinesin microtubule-associated protein Eg5 (Kif11) siRNA
gaacaatcattagcagcagaaag

SEQ ID NO: 2100 - DNA, 23 bp, Artificial Sequence
  Description of Artificial Sequence: Synthetic oligonucleotide
  Mitotic kinesin microtubule-associated protein Eg5 (Kif11) siRNA
aacaatcattagcagcagaaagt

SEQ ID NO: 2101 - DNA, 23 bp, Artificial Sequence
  Description of Artificial Sequence: Synthetic oligonucleotide
  Mitotic kinesin microtubule-associated protein Eg5 (Kif11) siRNA
acaatcattagcagcagaaagta

SEQ ID NO: 2102 - DNA, 23 bp, Artificial Sequence
  Description of Artificial Sequence: Synthetic oligonucleotide
  Mitotic kinesin microtubule-associated protein Eg5 (Kif11) siRNA
caatcattagcagcagaaagtaa

SEQ ID NO: 2103 - DNA, 23 bp, Artificial Sequence
  Description of Artificial Sequence: Synthetic oligonucleotide
  Mitotic kinesin microtubule-associated protein Eg5 (Kif11) siRNA
aatcattagcagcagaaagtaaa

SEQ ID NO: 2104 - DNA, 23 bp, Artificial Sequence
  Description of Artificial Sequence: Synthetic oligonucleotide
  Mitotic kinesin microtubule-associated protein Eg5 (Kif11) siRNA
atcattagcagcagaaagtaaaa

SEQ ID NO: 2105 - DNA, 23 bp, Artificial Sequence
  Description of Artificial Sequence: Synthetic oligonucleotide
  Mitotic kinesin microtubule-associated protein Eg5 (Kif11) siRNA
tcattagcagcagaaagtaaaac

SEQ ID NO: 2106 - DNA, 23 bp, Artificial Sequence
  Description of Artificial Sequence: Synthetic oligonucleotide
  Mitotic kinesin microtubule-associated protein Eg5 (Kif11) siRNA
cattagcagcagaaagtaaaact

SEQ ID NO: 2107 - DNA, 23 bp, Artificial Sequence
  Description of Artificial Sequence: Synthetic oligonucleotide
  Mitotic kinesin microtubule-associated protein Eg5 (Kif11) siRNA
attagcagcagaaagtaaaactg

SEQ ID NO: 2108 - DNA, 23 bp, Artificial Sequence
  Description of Artificial Sequence: Synthetic oligonucleotide
  Mitotic kinesin microtubule-associated protein Eg5 (Kif11) siRNA
ttagcagcagaaagtaaaactgt

SEQ ID NO: 2109 - DNA, 23 bp, Artificial Sequence
  Description of Artificial Sequence: Synthetic oligonucleotide
  Mitotic kinesin microtubule-associated protein Eg5 (Kif11) siRNA
tagcagcagaaagtaaaactgta

SEQ ID NO: 2110 - DNA, 23 bp, Artificial Sequence
  Description of Artificial Sequence: Synthetic oligonucleotide
  Mitotic kinesin microtubule-associated protein Eg5 (Kif11) siRNA
agcagcagaaagtaaaactgtac

SEQ ID NO: 2111 - DNA, 23 bp, Artificial Sequence
  Description of Artificial Sequence: Synthetic oligonucleotide
  Mitotic kinesin microtubule-associated protein Eg5 (Kif11) siRNA
gcagcagaaagtaaaactgtact

SEQ ID NO: 2112 - DNA, 23 bp, Artificial Sequence
  Description of Artificial Sequence: Synthetic oligonucleotide
  Mitotic kinesin microtubule-associated protein Eg5 (Kif11) siRNA
cagcagaaagtaaaactgtacta

SEQ ID NO: 2113 - DNA, 23 bp, Artificial Sequence
  Description of Artificial Sequence: Synthetic oligonucleotide
  Mitotic kinesin microtubule-associated protein Eg5 (Kif11) siRNA
agcagaaagtaaaactgtactac

SEQ ID NO: 2114 - DNA, 23 bp, Artificial Sequence
  Description of Artificial Sequence: Synthetic oligonucleotide
  Mitotic kinesin microtubule-associated protein Eg5 (Kif11) siRNA
gcagaaagtaaaactgtactaca

SEQ ID NO: 2115 - DNA, 23 bp, Artificial Sequence
  Description of Artificial Sequence: Synthetic oligonucleotide
  Mitotic kinesin microtubule-associated protein Eg5 (Kif11) siRNA
cagaaagtaaaactgtactacag

SEQ ID NO: 2116 - DNA, 23 bp, Artificial Sequence
  Description of Artificial Sequence: Synthetic oligonucleotide
  Mitotic kinesin microtubule-associated protein Eg5 (Kif11) siRNA
agaaagtaaaactgtactacagg

SEQ ID NO: 2117 - DNA, 23 bp, Artificial Sequence
  Description of Artificial Sequence: Synthetic oligonucleotide
  Mitotic kinesin microtubule-associated protein Eg5 (Kif11) siRNA
gaaagtaaaactgtactacagga

SEQ ID NO: 2118 - DNA, 23 bp, Artificial Sequence
  Description of Artificial Sequence: Synthetic oligonucleotide
  Mitotic kinesin microtubule-associated protein Eg5 (Kif11) siRNA
aaagtaaaactgtactacaggaa

SEQ ID NO: 2119 - DNA, 23 bp, Artificial Sequence
  Description of Artificial Sequence: Synthetic oligonucleotide
  Mitotic kinesin microtubule-associated protein Eg5 (Kif11) siRNA
aagtaaaactgtactacaggaat

SEQ ID NO: 2120 - DNA, 23 bp, Artificial Sequence
  Description of Artificial Sequence: Synthetic oligonucleotide
  Mitotic kinesin microtubule-associated protein Eg5 (Kif11) siRNA
agtaaaactgtactacaggaatt

SEQ ID NO: 2121 - DNA, 23 bp, Artificial Sequence
  Description of Artificial Sequence: Synthetic oligonucleotide
  Mitotic kinesin microtubule-associated protein Eg5 (Kif11) siRNA
gtaaaactgtactacaggaattg

SEQ ID NO: 2122 - DNA, 23 bp, Artificial Sequence
  Description of Artificial Sequence: Synthetic oligonucleotide
  Mitotic kinesin microtubule-associated protein Eg5 (Kif11) siRNA
taaaactgtactacaggaattga

SEQ ID NO: 2123 - DNA, 23 bp, Artificial Sequence
  Description of Artificial Sequence: Synthetic oligonucleotide
  Mitotic kinesin microtubule-associated protein Eg5 (Kif11) siRNA
aaaactgtactacaggaattgat

SEQ ID NO: 2124 - DNA, 23 bp, Artificial Sequence
  Description of Artificial Sequence: Synthetic oligonucleotide
  Mitotic kinesin microtubule-associated protein Eg5 (Kif11) siRNA
aaactgtactacaggaattgatt

SEQ ID NO: 2125 - DNA, 23 bp, Artificial Sequence
  Description of Artificial Sequence: Synthetic oligonucleotide
  Mitotic kinesin microtubule-associated protein Eg5 (Kif11) siRNA
aactgtactacaggaattgatta

SEQ ID NO: 2126 - DNA, 23 bp, Artificial Sequence
  Description of Artificial Sequence: Synthetic oligonucleotide
  Mitotic kinesin microtubule-associated protein Eg5 (Kif11) siRNA
actgtactacaggaattgattaa

SEQ ID NO: 2127 - DNA, 23 bp, Artificial Sequence
  Description of Artificial Sequence: Synthetic oligonucleotide
  Mitotic kinesin microtubule-associated protein Eg5 (Kif11) siRNA
ctgtactacaggaattgattaat

SEQ ID NO: 2128 - DNA, 23 bp, Artificial Sequence
  Description of Artificial Sequence: Synthetic oligonucleotide
  Mitotic kinesin microtubule-associated protein Eg5 (Kif11) siRNA
tgtactacaggaattgattaatg

SEQ ID NO: 2129 - DNA, 23 bp, Artificial Sequence
  Description of Artificial Sequence: Synthetic oligonucleotide
  Mitotic kinesin microtubule-associated protein Eg5 (Kif11) siRNA
gtactacaggaattgattaatgt

SEQ ID NO: 2130 - DNA, 23 bp, Artificial Sequence
  Description of Artificial Sequence: Synthetic oligonucleotide
  Mitotic kinesin microtubule-associated protein Eg5 (Kif11) siRNA
tactacaggaattgattaatgta

SEQ ID NO: 2131 - DNA, 23 bp, Artificial Sequence
  Description of Artificial Sequence: Synthetic oligonucleotide
  Mitotic kinesin microtubule-associated protein Eg5 (Kif11) siRNA
actacaggaattgattaatgtac

SEQ ID NO: 2132 - DNA, 23 bp, Artificial Sequence
  Description of Artificial Sequence: Synthetic oligonucleotide
  Mitotic kinesin microtubule-associated protein Eg5 (Kif11) siRNA
ctacaggaattgattaatgtact

SEQ ID NO: 2133 - DNA, 23 bp, Artificial Sequence
  Description of Artificial Sequence: Synthetic oligonucleotide
  Mitotic kinesin microtubule-associated protein Eg5 (Kif11) siRNA
tacaggaattgattaatgtactc

SEQ ID NO: 2134 - DNA, 23 bp, Artificial Sequence
  Description of Artificial Sequence: Synthetic oligonucleotide
  Mitotic kinesin microtubule-associated protein Eg5 (Kif11) siRNA
acaggaattgattaatgtactca

SEQ ID NO: 2135 - DNA, 23 bp, Artificial Sequence
  Description of Artificial Sequence: Synthetic oligonucleotide
  Mitotic kinesin microtubule-associated protein Eg5 (Kif11) siRNA
caggaattgattaatgtactcaa

SEQ ID NO: 2136 - DNA, 23 bp, Artificial Sequence
  Description of Artificial Sequence: Synthetic oligonucleotide
  Mitotic kinesin microtubule-associated protein Eg5 (Kif11) siRNA
aggaattgattaatgtactcaag

SEQ ID NO: 2137 - DNA, 23 bp, Artificial Sequence
  Description of Artificial Sequence: Synthetic oligonucleotide
  Mitotic kinesin microtubule-associated protein Eg5 (Kif11) siRNA
ggaattgattaatgtactcaaga

SEQ ID NO: 2138 - DNA, 23 bp, Artificial Sequence
  Description of Artificial Sequence: Synthetic oligonucleotide
  Mitotic kinesin microtubule-associated protein Eg5 (Kif11) siRNA
gaattgattaatgtactcaagac

SEQ ID NO: 2139 - DNA, 23 bp, Artificial Sequence
  Description of Artificial Sequence: Synthetic oligonucleotide
  Mitotic kinesin microtubule-associated protein Eg5 (Kif11) siRNA
aattgattaatgtactcaagact

SEQ ID NO: 2140 - DNA, 23 bp, Artificial Sequence
  Description of Artificial Sequence: Synthetic oligonucleotide
  Mitotic kinesin microtubule-associated protein Eg5 (Kif11) siRNA
attgattaatgtactcaagactg

SEQ ID NO: 2141 - DNA, 23 bp, Artificial Sequence
  Description of Artificial Sequence: Synthetic oligonucleotide
  Mitotic kinesin microtubule-associated protein Eg5 (Kif11) siRNA
ttgattaatgtactcaagactga

SEQ ID NO: 2142 - DNA, 23 bp, Artificial Sequence
  Description of Artificial Sequence: Synthetic oligonucleotide
  Mitotic kinesin microtubule-associated protein Eg5 (Kif11) siRNA
tgattaatgtactcaagactgat

SEQ ID NO: 2143 - DNA, 23 bp, Artificial Sequence
  Description of Artificial Sequence: Synthetic oligonucleotide
  Mitotic kinesin microtubule-associated protein Eg5 (Kif11) siRNA
gattaatgtactcaagactgatc

SEQ ID NO: 2144 - DNA, 23 bp, Artificial Sequence
  Description of Artificial Sequence: Synthetic oligonucleotide
  Mitotic kinesin microtubule-associated protein Eg5 (Kif11) siRNA
attaatgtactcaagactgatct

SEQ ID NO: 2145 - DNA, 23 bp, Artificial Sequence
  Description of Artificial Sequence: Synthetic oligonucleotide
  Mitotic kinesin microtubule-associated protein Eg5 (Kif11) siRNA
ttaatgtactcaagactgatctt

SEQ ID NO: 2146 - DNA, 23 bp, Artificial Sequence
  Description of Artificial Sequence: Synthetic oligonucleotide
  Mitotic kinesin microtubule-associated protein Eg5 (Kif11) siRNA
taatgtactcaagactgatcttc

SEQ ID NO: 2147 - DNA, 23 bp, Artificial Sequence
  Description of Artificial Sequence: Synthetic oligonucleotide
  Mitotic kinesin microtubule-associated protein Eg5 (Kif11) siRNA
aatgtactcaagactgatcttct

SEQ ID NO: 2148 - DNA, 23 bp, Artificial Sequence
  Description of Artificial Sequence: Synthetic oligonucleotide
  Mitotic kinesin microtubule-associated protein Eg5 (Kif11) siRNA
atgtactcaagactgatcttcta

SEQ ID NO: 2149 - DNA, 23 bp, Artificial Sequence
  Description of Artificial Sequence: Synthetic oligonucleotide
  Mitotic kinesin microtubule-associated protein Eg5 (Kif11) siRNA
tgtactcaagactgatcttctaa

SEQ ID NO: 2150 - DNA, 23 bp, Artificial Sequence
  Description of Artificial Sequence: Synthetic oligonucleotide
  Mitotic kinesin microtubule-associated protein Eg5 (Kif11) siRNA
gtactcaagactgatcttctaag

SEQ ID NO: 2151 - DNA, 23 bp, Artificial Sequence
  Description of Artificial Sequence: Synthetic oligonucleotide
  Mitotic kinesin microtubule-associated protein Eg5 (Kif11) siRNA
tactcaagactgatcttctaagt

SEQ ID NO: 2152 - DNA, 23 bp, Artificial Sequence
  Description of Artificial Sequence: Synthetic oligonucleotide
  Mitotic kinesin microtubule-associated protein Eg5 (Kif11) siRNA
actcaagactgatcttctaagtt

SEQ ID NO: 2153 - DNA, 23 bp, Artificial Sequence
  Description of Artificial Sequence: Synthetic oligonucleotide
  Mitotic kinesin microtubule-associated protein Eg5 (Kif11) siRNA
ctcaagactgatcttctaagttc

SEQ ID NO: 2154 - DNA, 23 bp, Artificial Sequence
  Description of Artificial Sequence: Synthetic oligonucleotide
  Mitotic kinesin microtubule-associated protein Eg5 (Kif11) siRNA
tcaagactgatcttctaagttca

SEQ ID NO: 2155 - DNA, 23 bp, Artificial Sequence
  Description of Artificial Sequence: Synthetic oligonucleotide
  Mitotic kinesin microtubule-associated protein Eg5 (Kif11) siRNA
caagactgatcttctaagttcac

SEQ ID NO: 2156 - DNA, 23 bp, Artificial Sequence
  Description of Artificial Sequence: Synthetic oligonucleotide
  Mitotic kinesin microtubule-associated protein Eg5 (Kif11) siRNA
aagactgatcttctaagttcact

SEQ ID NO: 2157 - DNA, 23 bp, Artificial Sequence
  Description of Artificial Sequence: Synthetic oligonucleotide
  Mitotic kinesin microtubule-associated protein Eg5 (Kif11) siRNA
agactgatcttctaagttcactg

SEQ ID NO: 2158 - DNA, 23 bp, Artificial Sequence
  Description of Artificial Sequence: Synthetic oligonucleotide
  Mitotic kinesin microtubule-associated protein Eg5 (Kif11) siRNA
gactgatcttctaagttcactgg

SEQ ID NO: 2159 - DNA, 23 bp, Artificial Sequence
  Description of Artificial Sequence: Synthetic oligonucleotide
  Mitotic kinesin microtubule-associated protein Eg5 (Kif11) siRNA
actgatcttctaagttcactgga

SEQ ID NO: 2160 - DNA, 23 bp, Artificial Sequence
  Description of Artificial Sequence: Synthetic oligonucleotide
  Mitotic kinesin microtubule-associated protein Eg5 (Kif11) siRNA
ctgatcttctaagttcactggaa

SEQ ID NO: 2161 - DNA, 23 bp, Artificial Sequence
  Description of Artificial Sequence: Synthetic oligonucleotide
  Mitotic kinesin microtubule-associated protein Eg5 (Kif11) siRNA
tgatcttctaagttcactggaaa

SEQ ID NO: 2162 - DNA, 23 bp, Artificial Sequence
  Description of Artificial Sequence: Synthetic oligonucleotide
  Mitotic kinesin microtubule-associated protein Eg5 (Kif11) siRNA
gatcttctaagttcactggaaat

SEQ ID NO: 2163 - DNA, 23 bp, Artificial Sequence
  Description of Artificial Sequence: Synthetic oligonucleotide
  Mitotic kinesin microtubule-associated protein Eg5 (Kif11) siRNA
atcttctaagttcactggaaatg

SEQ ID NO: 2164 - DNA, 23 bp, Artificial Sequence
  Description of Artificial Sequence: Synthetic oligonucleotide
  Mitotic kinesin microtubule-associated protein Eg5 (Kif11) siRNA
tcttctaagttcactggaaatga

SEQ ID NO: 2165 - DNA, 23 bp, Artificial Sequence
  Description of Artificial Sequence: Synthetic oligonucleotide
  Mitotic kinesin microtubule-associated protein Eg5 (Kif11) siRNA
cttctaagttcactggaaatgat

SEQ ID NO: 2166 - DNA, 23 bp, Artificial Sequence
  Description of Artificial Sequence: Synthetic oligonucleotide
  Mitotic kinesin microtubule-associated protein Eg5 (Kif11) siRNA
ttctaagttcactggaaatgatt

SEQ ID NO: 2167 - DNA, 23 bp, Artificial Sequence
  Description of Artificial Sequence: Synthetic oligonucleotide
  Mitotic kinesin microtubule-associated protein Eg5 (Kif11) siRNA
tctaagttcactggaaatgattt

SEQ ID NO: 2168 - DNA, 23 bp, Artificial Sequence
  Description of Artificial Sequence: Synthetic oligonucleotide
  Mitotic kinesin microtubule-associated protein Eg5 (Kif11) siRNA
ctaagttcactggaaatgatttt

SEQ ID NO: 2169 - DNA, 23 bp, Artificial Sequence
  Description of Artificial Sequence: Synthetic oligonucleotide
  Mitotic kinesin microtubule-associated protein Eg5 (Kif11) siRNA
taagttcactggaaatgatttta

SEQ ID NO: 2170 - DNA, 23 bp, Artificial Sequence
  Description of Artificial Sequence: Synthetic oligonucleotide
  Mitotic kinesin microtubule-associated protein Eg5 (Kif11) siRNA
aagttcactggaaatgattttat

SEQ ID NO: 2171 - DNA, 23 bp, Artificial Sequence
  Description of Artificial Sequence: Synthetic oligonucleotide
  Mitotic kinesin microtubule-associated protein Eg5 (Kif11) siRNA
agttcactggaaatgattttatc

SEQ ID NO: 2172 - DNA, 23 bp, Artificial Sequence
  Description of Artificial Sequence: Synthetic oligonucleotide
  Mitotic kinesin microtubule-associated protein Eg5 (Kif11) siRNA
gttcactggaaatgattttatcc

SEQ ID NO: 2173 - DNA, 23 bp, Artificial Sequence
  Description of Artificial Sequence: Synthetic oligonucleotide
  Mitotic kinesin microtubule-associated protein Eg5 (Kif11) siRNA
ttcactggaaatgattttatccc

SEQ ID NO: 2174 - DNA, 23 bp, Artificial Sequence
  Description of Artificial Sequence: Synthetic oligonucleotide
  Mitotic kinesin microtubule-associated protein Eg5 (Kif11) siRNA
tcactggaaatgattttatcccc

SEQ ID NO: 2175 - DNA, 23 bp, Artificial Sequence
  Description of Artificial Sequence: Synthetic oligonucleotide
  Mitotic kinesin microtubule-associated protein Eg5 (Kif11) siRNA
cactggaaatgattttatcccca

SEQ ID NO: 2176 - DNA, 23 bp, Artificial Sequence
  Description of Artificial Sequence: Synthetic oligonucleotide
  Mitotic kinesin microtubule-associated protein Eg5 (Kif11) siRNA
actggaaatgattttatccccaa

SEQ ID NO: 2177 - DNA, 23 bp, Artificial Sequence
  Description of Artificial Sequence: Synthetic oligonucleotide
  Mitotic kinesin microtubule-associated protein Eg5 (Kif11) siRNA
ctggaaatgattttatccccaac

SEQ ID NO: 2178 - DNA, 23 bp, Artificial Sequence
  Description of Artificial Sequence: Synthetic oligonucleotide
  Mitotic kinesin microtubule-associated protein Eg5 (Kif11) siRNA
tggaaatgattttatccccaact

SEQ ID NO: 2179 - DNA, 23 bp, Artificial Sequence
  Description of Artificial Sequence: Synthetic oligonucleotide
  Mitotic kinesin microtubule-associated protein Eg5 (Kif11) siRNA
ggaaatgattttatccccaactg

SEQ ID NO: 2180 - DNA, 23 bp, Artificial Sequence
  Description of Artificial Sequence: Synthetic oligonucleotide
  Mitotic kinesin microtubule-associated protein Eg5 (Kif11) siRNA
gaaatgattttatccccaactgt

SEQ ID NO: 2181 - DNA, 23 bp, Artificial Sequence
  Description of Artificial Sequence: Synthetic oligonucleotide
  Mitotic kinesin microtubule-associated protein Eg5 (Kif11) siRNA
aaatgattttatccccaactgtg

SEQ ID NO: 2182 - DNA, 23 bp, Artificial Sequence
  Description of Artificial Sequence: Synthetic oligonucleotide
  Mitotic kinesin microtubule-associated protein Eg5 (Kif11) siRNA
aatgattttatccccaactgtgg

SEQ ID NO: 2183 - DNA, 23 bp, Artificial Sequence
  Description of Artificial Sequence: Synthetic oligonucleotide
  Mitotic kinesin microtubule-associated protein Eg5 (Kif11) siRNA
atgattttatccccaactgtggt

SEQ ID NO: 2184 - DNA, 23 bp, Artificial Sequence
  Description of Artificial Sequence: Synthetic oligonucleotide
  Mitotic kinesin microtubule-associated protein Eg5 (Kif11) siRNA
tgattttatccccaactgtggtg

SEQ ID NO: 2185 - DNA, 23 bp, Artificial Sequence
  Description of Artificial Sequence: Synthetic oligonucleotide
  Mitotic kinesin microtubule-associated protein Eg5 (Kif11) siRNA
gattttatccccaactgtggtgt

SEQ ID NO: 2186 - DNA, 23 bp, Artificial Sequence
  Description of Artificial Sequence: Synthetic oligonucleotide
  Mitotic kinesin microtubule-associated protein Eg5 (Kif11) siRNA
attttatccccaactgtggtgtc

SEQ ID NO: 2187 - DNA, 23 bp, Artificial Sequence
  Description of Artificial Sequence: Synthetic oligonucleotide
  Mitotic kinesin microtubule-associated protein Eg5 (Kif11) siRNA
ttttatccccaactgtggtgtct

SEQ ID NO: 2188 - DNA, 23 bp, Artificial Sequence
  Description of Artificial Sequence: Synthetic oligonucleotide
  Mitotic kinesin microtubule-associated protein Eg5 (Kif11) siRNA
tttatccccaactgtggtgtcta

SEQ ID NO: 2189 - DNA, 23 bp, Artificial Sequence
  Description of Artificial Sequence: Synthetic oligonucleotide
  Mitotic kinesin microtubule-associated protein Eg5 (Kif11) siRNA
ttatccccaactgtggtgtctat

SEQ ID NO: 2190 - DNA, 23 bp, Artificial Sequence
  Description of Artificial Sequence: Synthetic oligonucleotide
  Mitotic kinesin microtubule-associated protein Eg5 (Kif11) siRNA
tatccccaactgtggtgtctata

SEQ ID NO: 2191 - DNA, 23 bp, Artificial Sequence
  Description of Artificial Sequence: Synthetic oligonucleotide
  Mitotic kinesin microtubule-associated protein Eg5 (Kif11) siRNA
atccccaactgtggtgtctatac

SEQ ID NO: 2192 - DNA, 23 bp, Artificial Sequence
  Description of Artificial Sequence: Synthetic oligonucleotide
  Mitotic kinesin microtubule-associated protein Eg5 (Kif11) siRNA
tccccaactgtggtgtctatact

SEQ ID NO: 2193 - DNA, 23 bp, Artificial Sequence
  Description of Artificial Sequence: Synthetic oligonucleotide
  Mitotic kinesin microtubule-associated protein Eg5 (Kif11) siRNA
ccccaactgtggtgtctatactg

SEQ ID NO: 2194 - DNA, 23 bp, Artificial Sequence
  Description of Artificial Sequence: Synthetic oligonucleotide
  Mitotic kinesin microtubule-associated protein Eg5 (Kif11) siRNA
cccaactgtggtgtctatactga

SEQ ID NO: 2195 - DNA, 23 bp, Artificial Sequence
  Description of Artificial Sequence: Synthetic oligonucleotide
  Mitotic kinesin microtubule-associated protein Eg5 (Kif11) siRNA
ccaactgtggtgtctatactgaa

SEQ ID NO: 2196 - DNA, 23 bp, Artificial Sequence
  Description of Artificial Sequence: Synthetic oligonucleotide
  Mitotic kinesin microtubule-associated protein Eg5 (Kif11) siRNA
caactgtggtgtctatactgaaa

SEQ ID NO: 2197 - DNA, 23 bp, Artificial Sequence
  Description of Artificial Sequence: Synthetic oligonucleotide
  Mitotic kinesin microtubule-associated protein Eg5 (Kif11) siRNA
aactgtggtgtctatactgaaaa

SEQ ID NO: 2198 - DNA, 23 bp, Artificial Sequence
  Description of Artificial Sequence: Synthetic oligonucleotide
  Mitotic kinesin microtubule-associated protein Eg5 (Kif11) siRNA
actgtggtgtctatactgaaaat

SEQ ID NO: 2199 - DNA, 23 bp, Artificial Sequence
  Description of Artificial Sequence: Synthetic oligonucleotide
  Mitotic kinesin microtubule-associated protein Eg5 (Kif11) siRNA
ctgtggtgtctatactgaaaatc

SEQ ID NO: 2200 - DNA, 23 bp, Artificial Sequence
  Description of Artificial Sequence: Synthetic oligonucleotide
  Mitotic kinesin microtubule-associated protein Eg5 (Kif11) siRNA
tgtggtgtctatactgaaaatca

SEQ ID NO: 2201 - DNA, 23 bp, Artificial Sequence
  Description of Artificial Sequence: Synthetic oligonucleotide
  Mitotic kinesin microtubule-associated protein Eg5 (Kif11) siRNA
gtggtgtctatactgaaaatcaa

SEQ ID NO: 2202 - DNA, 23 bp, Artificial Sequence
  Description of Artificial Sequence: Synthetic oligonucleotide
  Mitotic kinesin microtubule-associated protein Eg5 (Kif11) siRNA
tggtgtctatactgaaaatcaat

SEQ ID NO: 2203 - DNA, 23 bp, Artificial Sequence
  Description of Artificial Sequence: Synthetic oligonucleotide
  Mitotic kinesin microtubule-associated protein Eg5 (Kif11) siRNA
ggtgtctatactgaaaatcaata

SEQ ID NO: 2204 - DNA, 23 bp, Artificial Sequence
  Description of Artificial Sequence: Synthetic oligonucleotide
  Mitotic kinesin microtubule-associated protein Eg5 (Kif11) siRNA
gtgtctatactgaaaatcaatag

SEQ ID NO: 2205 - DNA, 23 bp, Artificial Sequence
  Description of Artificial Sequence: Synthetic oligonucleotide
  Mitotic kinesin microtubule-associated protein Eg5 (Kif11) siRNA
tgtctatactgaaaatcaatagt

SEQ ID NO: 2206 - DNA, 23 bp, Artificial Sequence
  Description of Artificial Sequence: Synthetic oligonucleotide
  Mitotic kinesin microtubule-associated protein Eg5 (Kif11) siRNA
gtctatactgaaaatcaatagtc

SEQ ID NO: 2207 - DNA, 23 bp, Artificial Sequence
  Description of Artificial Sequence: Synthetic oligonucleotide
  Mitotic kinesin microtubule-associated protein Eg5 (Kif11) siRNA
tctatactgaaaatcaatagtca

SEQ ID NO: 2208 - DNA, 23 bp, Artificial Sequence
  Description of Artificial Sequence: Synthetic oligonucleotide
  Mitotic kinesin microtubule-associated protein Eg5 (Kif11) siRNA
ctatactgaaaatcaatagtcaa

SEQ ID NO: 2209 - DNA, 23 bp, Artificial Sequence
  Description of Artificial Sequence: Synthetic oligonucleotide
  Mitotic kinesin microtubule-associated protein Eg5 (Kif11) siRNA
tatactgaaaatcaatagtcaac

SEQ ID NO: 2210 - DNA, 23 bp, Artificial Sequence
  Description of Artificial Sequence: Synthetic oligonucleotide
  Mitotic kinesin microtubule-associated protein Eg5 (Kif11) siRNA
atactgaaaatcaatagtcaact

SEQ ID NO: 2211 - DNA, 23 bp, Artificial Sequence
  Description of Artificial Sequence: Synthetic oligonucleotide
  Mitotic kinesin microtubule-associated protein Eg5 (Kif11) siRNA
tactgaaaatcaatagtcaacta

SEQ ID NO: 2212 - DNA, 23 bp, Artificial Sequence
  Description of Artificial Sequence: Synthetic oligonucleotide
  Mitotic kinesin microtubule-associated protein Eg5 (Kif11) siRNA
actgaaaatcaatagtcaactaa

SEQ ID NO: 2213 - DNA, 23 bp, Artificial Sequence
  Description of Artificial Sequence: Synthetic oligonucleotide
  Mitotic kinesin microtubule-associated protein Eg5 (Kif11) siRNA
ctgaaaatcaatagtcaactaaa

SEQ ID NO: 2214 - DNA, 23 bp, Artificial Sequence
  Description of Artificial Sequence: Synthetic oligonucleotide
  Mitotic kinesin microtubule-associated protein Eg5 (Kif11) siRNA
tgaaaatcaatagtcaactaaag

SEQ ID NO: 2215 - DNA, 23 bp, Artificial Sequence
  Description of Artificial Sequence: Synthetic oligonucleotide
  Mitotic kinesin microtubule-associated protein Eg5 (Kif11) siRNA
gaaaatcaatagtcaactaaagc

SEQ ID NO: 2216 - DNA, 23 bp, Artificial Sequence
  Description of Artificial Sequence: Synthetic oligonucleotide
  Mitotic kinesin microtubule-associated protein Eg5 (Kif11) siRNA
aaaatcaatagtcaactaaagca

SEQ ID NO: 2217 - DNA, 23 bp, Artificial Sequence
  Description of Artificial Sequence: Synthetic oligonucleotide
  Mitotic kinesin microtubule-associated protein Eg5 (Kif11) siRNA
aaatcaatagtcaactaaagcat

SEQ ID NO: 2218 - DNA, 23 bp, Artificial Sequence
  Description of Artificial Sequence: Synthetic oligonucleotide
  Mitotic kinesin microtubule-associated protein Eg5 (Kif11) siRNA
aatcaatagtcaactaaagcata

SEQ ID NO: 2219 - DNA, 23 bp, Artificial Sequence
  Description of Artificial Sequence: Synthetic oligonucleotide
  Mitotic kinesin microtubule-associated protein Eg5 (Kif11) siRNA
atcaatagtcaactaaagcatat

SEQ ID NO: 2220 - DNA, 23 bp, Artificial Sequence
  Description of Artificial Sequence: Synthetic oligonucleotide
  Mitotic kinesin microtubule-associated protein Eg5 (Kif11) siRNA
tcaatagtcaactaaagcatatt

SEQ ID NO: 2221 - DNA, 23 bp, Artificial Sequence
  Description of Artificial Sequence: Synthetic oligonucleotide
  Mitotic kinesin microtubule-associated protein Eg5 (Kif11) siRNA
caatagtcaactaaagcatattt

SEQ ID NO: 2222 - DNA, 23 bp, Artificial Sequence
  Description of Artificial Sequence: Synthetic oligonucleotide
  Mitotic kinesin microtubule-associated protein Eg5 (Kif11) siRNA
aatagtcaactaaagcatatttt

SEQ ID NO: 2223 - DNA, 23 bp, Artificial Sequence
  Description of Artificial Sequence: Synthetic oligonucleotide
  Mitotic kinesin microtubule-associated protein Eg5 (Kif11) siRNA
atagtcaactaaagcatattttc

SEQ ID NO: 2224 - DNA, 23 bp, Artificial Sequence
  Description of Artificial Sequence: Synthetic oligonucleotide
  Mitotic kinesin microtubule-associated protein Eg5 (Kif11) siRNA
tagtcaactaaagcatattttca

SEQ ID NO: 2225 - DNA, 23 bp, Artificial Sequence
  Description of Artificial Sequence: Synthetic oligonucleotide
  Mitotic kinesin microtubule-associated protein Eg5 (Kif11) siRNA
agtcaactaaagcatattttcaa

SEQ ID NO: 2226 - DNA, 23 bp, Artificial Sequence
  Description of Artificial Sequence: Synthetic oligonucleotide
  Mitotic kinesin microtubule-associated protein Eg5 (Kif11) siRNA
gtcaactaaagcatattttcaag

SEQ ID NO: 2227 - DNA, 23 bp, Artificial Sequence
  Description of Artificial Sequence: Synthetic oligonucleotide
  Mitotic kinesin microtubule-associated protein Eg5 (Kif11) siRNA
tcaactaaagcatattttcaaga

SEQ ID NO: 2228 - DNA, 23 bp, Artificial Sequence
  Description of Artificial Sequence: Synthetic oligonucleotide
  Mitotic kinesin microtubule-associated protein Eg5 (Kif11) siRNA
caactaaagcatattttcaagac

SEQ ID NO: 2229 - DNA, 23 bp, Artificial Sequence
  Description of Artificial Sequence: Synthetic oligonucleotide
  Mitotic kinesin microtubule-associated protein Eg5 (Kif11) siRNA
aactaaagcatattttcaagact

SEQ ID NO: 2230 - DNA, 23 bp, Artificial Sequence
  Description of Artificial Sequence: Synthetic oligonucleotide
  Mitotic kinesin microtubule-associated protein Eg5 (Kif11) siRNA
actaaagcatattttcaagactt

SEQ ID NO: 2231 - DNA, 23 bp, Artificial Sequence
  Description of Artificial Sequence: Synthetic oligonucleotide
  Mitotic kinesin microtubule-associated protein Eg5 (Kif11) siRNA
ctaaagcatattttcaagacttc

SEQ ID NO: 2232 - DNA, 23 bp, Artificial Sequence
  Description of Artificial Sequence: Synthetic oligonucleotide
  Mitotic kinesin microtubule-associated protein Eg5 (Kif11) siRNA
taaagcatattttcaagacttca

SEQ ID NO: 2233 - DNA, 23 bp, Artificial Sequence
  Description of Artificial Sequence: Synthetic oligonucleotide
  Mitotic kinesin microtubule-associated protein Eg5 (Kif11) siRNA
aaagcatattttcaagacttcat

SEQ ID NO: 2234 - DNA, 23 bp, Artificial Sequence
  Description of Artificial Sequence: Synthetic oligonucleotide
  Mitotic kinesin microtubule-associated protein Eg5 (Kif11) siRNA
aagcatattttcaagacttcatt

SEQ ID NO: 2235 - DNA, 23 bp, Artificial Sequence
  Description of Artificial Sequence: Synthetic oligonucleotide
  Mitotic kinesin microtubule-associated protein Eg5 (Kif11) siRNA
agcatattttcaagacttcattg

SEQ ID NO: 2236 - DNA, 23 bp, Artificial Sequence
  Description of Artificial Sequence: Synthetic oligonucleotide
  Mitotic kinesin microtubule-associated protein Eg5 (Kif11) siRNA
gcatattttcaagacttcattga

SEQ ID NO: 2237 - DNA, 23 bp, Artificial Sequence
  Description of Artificial Sequence: Synthetic oligonucleotide
  Mitotic kinesin microtubule-associated protein Eg5 (Kif11) siRNA
catattttcaagacttcattgac

SEQ ID NO: 2238 - DNA, 23 bp, Artificial Sequence
  Description of Artificial Sequence: Synthetic oligonucleotide
  Mitotic kinesin microtubule-associated protein Eg5 (Kif11) siRNA
atattttcaagacttcattgaca

SEQ ID NO: 2239 - DNA, 23 bp, Artificial Sequence
  Description of Artificial Sequence: Synthetic oligonucleotide
  Mitotic kinesin microtubule-associated protein Eg5 (Kif11) siRNA
tattttcaagacttcattgacag

SEQ ID NO: 2240 - DNA, 23 bp, Artificial Sequence
  Description of Artificial Sequence: Synthetic oligonucleotide
  Mitotic kinesin microtubule-associated protein Eg5 (Kif11) siRNA
attttcaagacttcattgacagt

SEQ ID NO: 2241 - DNA, 23 bp, Artificial Sequence
  Description of Artificial Sequence: Synthetic oligonucleotide
  Mitotic kinesin microtubule-associated protein Eg5 (Kif11) siRNA
ttttcaagacttcattgacagtg

SEQ ID NO: 2242 - DNA, 23 bp, Artificial Sequence
  Description of Artificial Sequence: Synthetic oligonucleotide
  Mitotic kinesin microtubule-associated protein Eg5 (Kif11) siRNA
tttcaagacttcattgacagtgg

SEQ ID NO: 2243 - DNA, 23 bp, Artificial Sequence
  Description of Artificial Sequence: Synthetic oligonucleotide
  Mitotic kinesin microtubule-associated protein Eg5 (Kif11) siRNA
ttcaagacttcattgacagtggc

SEQ ID NO: 2244 - DNA, 23 bp, Artificial Sequence
  Description of Artificial Sequence: Synthetic oligonucleotide
  Mitotic kinesin microtubule-associated protein Eg5 (Kif11) siRNA
tcaagacttcattgacagtggcc

SEQ ID NO: 2245 - DNA, 23 bp, Artificial Sequence
  Description of Artificial Sequence: Synthetic oligonucleotide
  Mitotic kinesin microtubule-associated protein Eg5 (Kif11) siRNA
caagacttcattgacagtggccg

SEQ ID NO: 2246 - DNA, 23 bp, Artificial Sequence
  Description of Artificial Sequence: Synthetic oligonucleotide
  Mitotic kinesin microtubule-associated protein Eg5 (Kif11) siRNA
aagacttcattgacagtggccga

SEQ ID NO: 2247 - DNA, 23 bp, Artificial Sequence
  Description of Artificial Sequence: Synthetic oligonucleotide
  Mitotic kinesin microtubule-associated protein Eg5 (Kif11) siRNA
agacttcattgacagtggccgat

SEQ ID NO: 2248 - DNA, 23 bp, Artificial Sequence
  Description of Artificial Sequence: Synthetic oligonucleotide
  Mitotic kinesin microtubule-associated protein Eg5 (Kif11) siRNA
gacttcattgacagtggccgata

SEQ ID NO: 2249 - DNA, 23 bp, Artificial Sequence
  Description of Artificial Sequence: Synthetic oligonucleotide
  Mitotic kinesin microtubule-associated protein Eg5 (Kif11) siRNA
acttcattgacagtggccgataa

SEQ ID NO: 2250 - DNA, 23 bp, Artificial Sequence
  Description of Artificial Sequence: Synthetic oligonucleotide
  Mitotic kinesin microtubule-associated protein Eg5 (Kif11) siRNA
cttcattgacagtggccgataag

SEQ ID NO: 2251 - DNA, 23 bp, Artificial Sequence
  Description of Artificial Sequence: Synthetic oligonucleotide
  Mitotic kinesin microtubule-associated protein Eg5 (Kif11) siRNA
ttcattgacagtggccgataaga

SEQ ID NO: 2252 - DNA, 23 bp, Artificial Sequence
  Description of Artificial Sequence: Synthetic oligonucleotide
  Mitotic kinesin microtubule-associated protein Eg5 (Kif11) siRNA
tcattgacagtggccgataagat

SEQ ID NO: 2253 - DNA, 23 bp, Artificial Sequence
  Description of Artificial Sequence: Synthetic oligonucleotide
  Mitotic kinesin microtubule-associated protein Eg5 (Kif11) siRNA
cattgacagtggccgataagata

SEQ ID NO: 2254 - DNA, 23 bp, Artificial Sequence
  Description of Artificial Sequence: Synthetic oligonucleotide
  Mitotic kinesin microtubule-associated protein Eg5 (Kif11) siRNA
attgacagtggccgataagatag

SEQ ID NO: 2255 - DNA, 23 bp, Artificial Sequence
  Description of Artificial Sequence: Synthetic oligonucleotide
  Mitotic kinesin microtubule-associated protein Eg5 (Kif11) siRNA
ttgacagtggccgataagataga

SEQ ID NO: 2256 - DNA, 23 bp, Artificial Sequence
  Description of Artificial Sequence: Synthetic oligonucleotide
  Mitotic kinesin microtubule-associated protein Eg5 (Kif11) siRNA
tgacagtggccgataagatagaa

SEQ ID NO: 2257 - DNA, 23 bp, Artificial Sequence
  Description of Artificial Sequence: Synthetic oligonucleotide
  Mitotic kinesin microtubule-associated protein Eg5 (Kif11) siRNA
gacagtggccgataagatagaag

SEQ ID NO: 2258 - DNA, 23 bp, Artificial Sequence
  Description of Artificial Sequence: Synthetic oligonucleotide
  Mitotic kinesin microtubule-associated protein Eg5 (Kif11) siRNA
acagtggccgataagatagaaga

SEQ ID NO: 2259 - DNA, 23 bp, Artificial Sequence
  Description of Artificial Sequence: Synthetic oligonucleotide
  Mitotic kinesin microtubule-associated protein Eg5 (Kif11) siRNA
cagtggccgataagatagaagat

SEQ ID NO: 2260 - DNA, 23 bp, Artificial Sequence
  Description of Artificial Sequence: Synthetic oligonucleotide
  Mitotic kinesin microtubule-associated protein Eg5 (Kif11) siRNA
agtggccgataagatagaagatc

SEQ ID NO: 2261 - DNA, 23 bp, Artificial Sequence
  Description of Artificial Sequence: Synthetic oligonucleotide
  Mitotic kinesin microtubule-associated protein Eg5 (Kif11) siRNA
gtggccgataagatagaagatca

SEQ ID NO: 2262 - DNA, 23 bp, Artificial Sequence
  Description of Artificial Sequence: Synthetic oligonucleotide
  Mitotic kinesin microtubule-associated protein Eg5 (Kif11) siRNA
tggccgataagatagaagatcaa

SEQ ID NO: 2263 - DNA, 23 bp, Artificial Sequence
  Description of Artificial Sequence: Synthetic oligonucleotide
  Mitotic kinesin microtubule-associated protein Eg5 (Kif11) siRNA
ggccgataagatagaagatcaaa

SEQ ID NO: 2264 - DNA, 23 bp, Artificial Sequence
  Description of Artificial Sequence: Synthetic oligonucleotide
  Mitotic kinesin microtubule-associated protein Eg5 (Kif11) siRNA
gccgataagatagaagatcaaaa

SEQ ID NO: 2265 - DNA, 23 bp, Artificial Sequence
  Description of Artificial Sequence: Synthetic oligonucleotide
  Mitotic kinesin microtubule-associated protein Eg5 (Kif11) siRNA
ccgataagatagaagatcaaaaa

SEQ ID NO: 2266 - DNA, 23 bp, Artificial Sequence
  Description of Artificial Sequence: Synthetic oligonucleotide
  Mitotic kinesin microtubule-associated protein Eg5 (Kif11) siRNA
cgataagatagaagatcaaaaaa

SEQ ID NO: 2267 - DNA, 23 bp, Artificial Sequence
  Description of Artificial Sequence: Synthetic oligonucleotide
  Mitotic kinesin microtubule-associated protein Eg5 (Kif11) siRNA
gataagatagaagatcaaaaaaa

SEQ ID NO: 2268 - DNA, 23 bp, Artificial Sequence
  Description of Artificial Sequence: Synthetic oligonucleotide
  Mitotic kinesin microtubule-associated protein Eg5 (Kif11) siRNA
ataagatagaagatcaaaaaaag

SEQ ID NO: 2269 - DNA, 23 bp, Artificial Sequence
  Description of Artificial Sequence: Synthetic oligonucleotide
  Mitotic kinesin microtubule-associated protein Eg5 (Kif11) siRNA
taagatagaagatcaaaaaaagg

SEQ ID NO: 2270 - DNA, 23 bp, Artificial Sequence
  Description of Artificial Sequence: Synthetic oligonucleotide
  Mitotic kinesin microtubule-associated protein Eg5 (Kif11) siRNA
aagatagaagatcaaaaaaagga

SEQ ID NO: 2271 - DNA, 23 bp, Artificial Sequence
  Description of Artificial Sequence: Synthetic oligonucleotide
  Mitotic kinesin microtubule-associated protein Eg5 (Kif11) siRNA
agatagaagatcaaaaaaaggaa

SEQ ID NO: 2272 - DNA, 23 bp, Artificial Sequence
  Description of Artificial Sequence: Synthetic oligonucleotide
  Mitotic kinesin microtubule-associated protein Eg5 (Kif11) siRNA
gatagaagatcaaaaaaaggaac

SEQ ID NO: 2273 - DNA, 23 bp, Artificial Sequence
  Description of Artificial Sequence: Synthetic oligonucleotide
  Mitotic kinesin microtubule-associated protein Eg5 (Kif11) siRNA
atagaagatcaaaaaaaggaact

SEQ ID NO: 2274 - DNA, 23 bp, Artificial Sequence
  Description of Artificial Sequence: Synthetic oligonucleotide
  Mitotic kinesin microtubule-associated protein Eg5 (Kif11) siRNA
tagaagatcaaaaaaaggaacta

SEQ ID NO: 2275 - DNA, 23 bp, Artificial Sequence
  Description of Artificial Sequence: Synthetic oligonucleotide
  Mitotic kinesin microtubule-associated protein Eg5 (Kif11) siRNA
agaagatcaaaaaaaggaactag

SEQ ID NO: 2276 - DNA, 23 bp, Artificial Sequence
  Description of Artificial Sequence: Synthetic oligonucleotide
  Mitotic kinesin microtubule-associated protein Eg5 (Kif11) siRNA
gaagatcaaaaaaaggaactaga

SEQ ID NO: 2277 - DNA, 23 bp, Artificial Sequence
  Description of Artificial Sequence: Synthetic oligonucleotide
  Mitotic kinesin microtubule-associated protein Eg5 (Kif11) siRNA
aagatcaaaaaaaggaactagat

SEQ ID NO: 2278 - DNA, 23 bp, Artificial Sequence
  Description of Artificial Sequence: Synthetic oligonucleotide
  Mitotic kinesin microtubule-associated protein Eg5 (Kif11) siRNA
agatcaaaaaaaggaactagatg

SEQ ID NO: 2279 - DNA, 23 bp, Artificial Sequence
  Description of Artificial Sequence: Synthetic oligonucleotide
  Mitotic kinesin microtubule-associated protein Eg5 (Kif11) siRNA
gatcaaaaaaaggaactagatgg

SEQ ID NO: 2280 - DNA, 23 bp, Artificial Sequence
  Description of Artificial Sequence: Synthetic oligonucleotide
  Mitotic kinesin microtubule-associated protein Eg5 (Kif11) siRNA
atcaaaaaaaggaactagatggc

SEQ ID NO: 2281 - DNA, 23 bp, Artificial Sequence
  Description of Artificial Sequence: Synthetic oligonucleotide
  Mitotic kinesin microtubule-associated protein Eg5 (Kif11) siRNA
tcaaaaaaaggaactagatggct

SEQ ID NO: 2282 - DNA, 23 bp, Artificial Sequence
  Description of Artificial Sequence: Synthetic oligonucleotide
  Mitotic kinesin microtubule-associated protein Eg5 (Kif11) siRNA
caaaaaaaggaactagatggctt

SEQ ID NO: 2283 - DNA, 23 bp, Artificial Sequence
  Description of Artificial Sequence: Synthetic oligonucleotide
  Mitotic kinesin microtubule-associated protein Eg5 (Kif11) siRNA
aaaaaaaggaactagatggcttt

SEQ ID NO: 2284 - DNA, 23 bp, Artificial Sequence
  Description of Artificial Sequence: Synthetic oligonucleotide
  Mitotic kinesin microtubule-associated protein Eg5 (Kif11) siRNA
aaaaaaggaactagatggctttc

SEQ ID NO: 2285 - DNA, 23 bp, Artificial Sequence
  Description of Artificial Sequence: Synthetic oligonucleotide
  Mitotic kinesin microtubule-associated protein Eg5 (Kif11) siRNA
aaaaaggaactagatggctttct

SEQ ID NO: 2286 - DNA, 23 bp, Artificial Sequence
  Description of Artificial Sequence: Synthetic oligonucleotide
  Mitotic kinesin microtubule-associated protein Eg5 (Kif11) siRNA
aaaaggaactagatggctttctc

SEQ ID NO: 2287 - DNA, 23 bp, Artificial Sequence
  Description of Artificial Sequence: Synthetic oligonucleotide
  Mitotic kinesin microtubule-associated protein Eg5 (Kif11) siRNA
aaaggaactagatggctttctca

SEQ ID NO: 2288 - DNA, 23 bp, Artificial Sequence
  Description of Artificial Sequence: Synthetic oligonucleotide
  Mitotic kinesin microtubule-associated protein Eg5 (Kif11) siRNA
aaggaactagatggctttctcag

SEQ ID NO: 2289 - DNA, 23 bp, Artificial Sequence
  Description of Artificial Sequence: Synthetic oligonucleotide
  Mitotic kinesin microtubule-associated protein Eg5 (Kif11) siRNA
aggaactagatggctttctcagt

SEQ ID NO: 2290 - DNA, 23 bp, Artificial Sequence
  Description of Artificial Sequence: Synthetic oligonucleotide
  Mitotic kinesin microtubule-associated protein Eg5 (Kif11) siRNA
ggaactagatggctttctcagta

SEQ ID NO: 2291 - DNA, 23 bp, Artificial Sequence
  Description of Artificial Sequence: Synthetic oligonucleotide
  Mitotic kinesin microtubule-associated protein Eg5 (Kif11) siRNA
gaactagatggctttctcagtat

SEQ ID NO: 2292 - DNA, 23 bp, Artificial Sequence
  Description of Artificial Sequence: Synthetic oligonucleotide
  Mitotic kinesin microtubule-associated protein Eg5 (Kif11) siRNA
aactagatggctttctcagtata

SEQ ID NO: 2293 - DNA, 23 bp, Artificial Sequence
  Description of Artificial Sequence: Synthetic oligonucleotide
  Mitotic kinesin microtubule-associated protein Eg5 (Kif11) siRNA
actagatggctttctcagtatac

SEQ ID NO: 2294 - DNA, 23 bp, Artificial Sequence
  Description of Artificial Sequence: Synthetic oligonucleotide
  Mitotic kinesin microtubule-associated protein Eg5 (Kif11) siRNA
ctagatggctttctcagtatact

SEQ ID NO: 2295 - DNA, 23 bp, Artificial Sequence
  Description of Artificial Sequence: Synthetic oligonucleotide
  Mitotic kinesin microtubule-associated protein Eg5 (Kif11) siRNA
tagatggctttctcagtatactg

SEQ ID NO: 2296 - DNA, 23 bp, Artificial Sequence
  Description of Artificial Sequence: Synthetic oligonucleotide
  Mitotic kinesin microtubule-associated protein Eg5 (Kif11) siRNA
agatggctttctcagtatactgt

SEQ ID NO: 2297 - DNA, 23 bp, Artificial Sequence
  Description of Artificial Sequence: Synthetic oligonucleotide
  Mitotic kinesin microtubule-associated protein Eg5 (Kif11) siRNA
gatggctttctcagtatactgtg

SEQ ID NO: 2298 - DNA, 23 bp, Artificial Sequence
  Description of Artificial Sequence: Synthetic oligonucleotide
  Mitotic kinesin microtubule-associated protein Eg5 (Kif11) siRNA
atggctttctcagtatactgtgt

SEQ ID NO: 2299 - DNA, 23 bp, Artificial Sequence
  Description of Artificial Sequence: Synthetic oligonucleotide
  Mitotic kinesin microtubule-associated protein Eg5 (Kif11) siRNA
tggctttctcagtatactgtgta

SEQ ID NO: 2300 - DNA, 23 bp, Artificial Sequence
  Description of Artificial Sequence: Synthetic oligonucleotide
  Mitotic kinesin microtubule-associated protein Eg5 (Kif11) siRNA
ggctttctcagtatactgtgtaa

SEQ ID NO: 2301 - DNA, 23 bp, Artificial Sequence
  Description of Artificial Sequence: Synthetic oligonucleotide
  Mitotic kinesin microtubule-associated protein Eg5 (Kif11) siRNA
gctttctcagtatactgtgtaac

SEQ ID NO: 2302 - DNA, 23 bp, Artificial Sequence
  Description of Artificial Sequence: Synthetic oligonucleotide
  Mitotic kinesin microtubule-associated protein Eg5 (Kif11) siRNA
ctttctcagtatactgtgtaaca

SEQ ID NO: 2303 - DNA, 23 bp, Artificial Sequence
  Description of Artificial Sequence: Synthetic oligonucleotide
  Mitotic kinesin microtubule-associated protein Eg5 (Kif11) siRNA
tttctcagtatactgtgtaacaa

SEQ ID NO: 2304 - DNA, 23 bp, Artificial Sequence
  Description of Artificial Sequence: Synthetic oligonucleotide
  Mitotic kinesin microtubule-associated protein Eg5 (Kif11) siRNA
ttctcagtatactgtgtaacaat

SEQ ID NO: 2305 - DNA, 23 bp, Artificial Sequence
  Description of Artificial Sequence: Synthetic oligonucleotide
  Mitotic kinesin microtubule-associated protein Eg5 (Kif11) siRNA
tctcagtatactgtgtaacaatc

SEQ ID NO: 2306 - DNA, 23 bp, Artificial Sequence
  Description of Artificial Sequence: Synthetic oligonucleotide
  Mitotic kinesin microtubule-associated protein Eg5 (Kif11) siRNA
ctcagtatactgtgtaacaatct

SEQ ID NO: 2307 - DNA, 23 bp, Artificial Sequence
  Description of Artificial Sequence: Synthetic oligonucleotide
  Mitotic kinesin microtubule-associated protein Eg5 (Kif11) siRNA
tcagtatactgtgtaacaatcta

SEQ ID NO: 2308 - DNA, 23 bp, Artificial Sequence
  Description of Artificial Sequence: Synthetic oligonucleotide
  Mitotic kinesin microtubule-associated protein Eg5 (Kif11) siRNA
cagtatactgtgtaacaatctac

SEQ ID NO: 2309 - DNA, 23 bp, Artificial Sequence
  Description of Artificial Sequence: Synthetic oligonucleotide
  Mitotic kinesin microtubule-associated protein Eg5 (Kif11) siRNA
agtatactgtgtaacaatctaca

SEQ ID NO: 2310 - DNA, 23 bp, Artificial Sequence
  Description of Artificial Sequence: Synthetic oligonucleotide
  Mitotic kinesin microtubule-associated protein Eg5 (Kif11) siRNA
gtatactgtgtaacaatctacat

SEQ ID NO: 2311 - DNA, 23 bp, Artificial Sequence
  Description of Artificial Sequence: Synthetic oligonucleotide
  Mitotic kinesin microtubule-associated protein Eg5 (Kif11) siRNA
tatactgtgtaacaatctacatg

SEQ ID NO: 2312 - DNA, 23 bp, Artificial Sequence
  Description of Artificial Sequence: Synthetic oligonucleotide
  Mitotic kinesin microtubule-associated protein Eg5 (Kif11) siRNA
atactgtgtaacaatctacatga

SEQ ID NO: 2313 - DNA, 23 bp, Artificial Sequence
  Description of Artificial Sequence: Synthetic oligonucleotide
  Mitotic kinesin microtubule-associated protein Eg5 (Kif11) siRNA
tactgtgtaacaatctacatgaa

SEQ ID NO: 2314 - DNA, 23 bp, Artificial Sequence
  Description of Artificial Sequence: Synthetic oligonucleotide
  Mitotic kinesin microtubule-associated protein Eg5 (Kif11) siRNA
actgtgtaacaatctacatgaac

SEQ ID NO: 2315 - DNA, 23 bp, Artificial Sequence
  Description of Artificial Sequence: Synthetic oligonucleotide
  Mitotic kinesin microtubule-associated protein Eg5 (Kif11) siRNA
ctgtgtaacaatctacatgaact

SEQ ID NO: 2316 - DNA, 23 bp, Artificial Sequence
  Description of Artificial Sequence: Synthetic oligonucleotide
  Mitotic kinesin microtubule-associated protein Eg5 (Kif11) siRNA
tgtgtaacaatctacatgaacta

SEQ ID NO: 2317 - DNA, 23 bp, Artificial Sequence
  Description of Artificial Sequence: Synthetic oligonucleotide
  Mitotic kinesin microtubule-associated protein Eg5 (Kif11) siRNA
gtgtaacaatctacatgaactac

SEQ ID NO: 2318 - DNA, 23 bp, Artificial Sequence
  Description of Artificial Sequence: Synthetic oligonucleotide
  Mitotic kinesin microtubule-associated protein Eg5 (Kif11) siRNA
tgtaacaatctacatgaactaca

SEQ ID NO: 2319 - DNA, 23 bp, Artificial Sequence
  Description of Artificial Sequence: Synthetic oligonucleotide
  Mitotic kinesin microtubule-associated protein Eg5 (Kif11) siRNA
gtaacaatctacatgaactacaa

SEQ ID NO: 2320 - DNA, 23 bp, Artificial Sequence
  Description of Artificial Sequence: Synthetic oligonucleotide
  Mitotic kinesin microtubule-associated protein Eg5 (Kif11) siRNA
taacaatctacatgaactacaag

SEQ ID NO: 2321 - DNA, 23 bp, Artificial Sequence
  Description of Artificial Sequence: Synthetic oligonucleotide
  Mitotic kinesin microtubule-associated protein Eg5 (Kif11) siRNA
aacaatctacatgaactacaaga

SEQ ID NO: 2322 - DNA, 23 bp, Artificial Sequence
  Description of Artificial Sequence: Synthetic oligonucleotide
  Mitotic kinesin microtubule-associated protein Eg5 (Kif11) siRNA
acaatctacatgaactacaagaa

SEQ ID NO: 2323 - DNA, 23 bp, Artificial Sequence
  Description of Artificial Sequence: Synthetic oligonucleotide
  Mitotic kinesin microtubule-associated protein Eg5 (Kif11) siRNA
caatctacatgaactacaagaaa

SEQ ID NO: 2324 - DNA, 23 bp, Artificial Sequence
  Description of Artificial Sequence: Synthetic oligonucleotide
  Mitotic kinesin microtubule-associated protein Eg5 (Kif11) siRNA
aatctacatgaactacaagaaaa

SEQ ID NO: 2325 - DNA, 23 bp, Artificial Sequence
  Description of Artificial Sequence: Synthetic oligonucleotide
  Mitotic kinesin microtubule-associated protein Eg5 (Kif11) siRNA
atctacatgaactacaagaaaat

SEQ ID NO: 2326 - DNA, 23 bp, Artificial Sequence
  Description of Artificial Sequence: Synthetic oligonucleotide
  Mitotic kinesin microtubule-associated protein Eg5 (Kif11) siRNA
tctacatgaactacaagaaaata

SEQ ID NO: 2327 - DNA, 23 bp, Artificial Sequence
  Description of Artificial Sequence: Synthetic oligonucleotide
  Mitotic kinesin microtubule-associated protein Eg5 (Kif11) siRNA
ctacatgaactacaagaaaatac

SEQ ID NO: 2328 - DNA, 23 bp, Artificial Sequence
  Description of Artificial Sequence: Synthetic oligonucleotide
  Mitotic kinesin microtubule-associated protein Eg5 (Kif11) siRNA
tacatgaactacaagaaaatacc

SEQ ID NO: 2329 - DNA, 23 bp, Artificial Sequence
  Description of Artificial Sequence: Synthetic oligonucleotide
  Mitotic kinesin microtubule-associated protein Eg5 (Kif11) siRNA
acatgaactacaagaaaatacca

SEQ ID NO: 2330 - DNA, 23 bp, Artificial Sequence
  Description of Artificial Sequence: Synthetic oligonucleotide
  Mitotic kinesin microtubule-associated protein Eg5 (Kif11) siRNA
catgaactacaagaaaataccat

SEQ ID NO: 2331 - DNA, 23 bp, Artificial Sequence
  Description of Artificial Sequence: Synthetic oligonucleotide
  Mitotic kinesin microtubule-associated protein Eg5 (Kif11) siRNA
atgaactacaagaaaataccatt

SEQ ID NO: 2332 - DNA, 23 bp, Artificial Sequence
  Description of Artificial Sequence: Synthetic oligonucleotide
  Mitotic kinesin microtubule-associated protein Eg5 (Kif11) siRNA
tgaactacaagaaaataccattt

SEQ ID NO: 2333 - DNA, 23 bp, Artificial Sequence
  Description of Artificial Sequence: Synthetic oligonucleotide
  Mitotic kinesin microtubule-associated protein Eg5 (Kif11) siRNA
gaactacaagaaaataccatttg

SEQ ID NO: 2334 - DNA, 23 bp, Artificial Sequence
  Description of Artificial Sequence: Synthetic oligonucleotide
  Mitotic kinesin microtubule-associated protein Eg5 (Kif11) siRNA
aactacaagaaaataccatttgt

SEQ ID NO: 2335 - DNA, 23 bp, Artificial Sequence
  Description of Artificial Sequence: Synthetic oligonucleotide
  Mitotic kinesin microtubule-associated protein Eg5 (Kif11) siRNA
actacaagaaaataccatttgtt

SEQ ID NO: 2336 - DNA, 23 bp, Artificial Sequence
  Description of Artificial Sequence: Synthetic oligonucleotide
  Mitotic kinesin microtubule-associated protein Eg5 (Kif11) siRNA
ctacaagaaaataccatttgttc

SEQ ID NO: 2337 - DNA, 23 bp, Artificial Sequence
  Description of Artificial Sequence: Synthetic oligonucleotide
  Mitotic kinesin microtubule-associated protein Eg5 (Kif11) siRNA
tacaagaaaataccatttgttcc

SEQ ID NO: 2338 - DNA, 23 bp, Artificial Sequence
  Description of Artificial Sequence: Synthetic oligonucleotide
  Mitotic kinesin microtubule-associated protein Eg5 (Kif11) siRNA
acaagaaaataccatttgttcct

SEQ ID NO: 2339 - DNA, 23 bp, Artificial Sequence
  Description of Artificial Sequence: Synthetic oligonucleotide
  Mitotic kinesin microtubule-associated protein Eg5 (Kif11) siRNA
caagaaaataccatttgttcctt

SEQ ID NO: 2340 - DNA, 23 bp, Artificial Sequence
  Description of Artificial Sequence: Synthetic oligonucleotide
  Mitotic kinesin microtubule-associated protein Eg5 (Kif11) siRNA
aagaaaataccatttgttccttg

SEQ ID NO: 2341 - DNA, 23 bp, Artificial Sequence
  Description of Artificial Sequence: Synthetic oligonucleotide
  Mitotic kinesin microtubule-associated protein Eg5 (Kif11) siRNA
agaaaataccatttgttccttgg

SEQ ID NO: 2342 - DNA, 23 bp, Artificial Sequence
  Description of Artificial Sequence: Synthetic oligonucleotide
  Mitotic kinesin microtubule-associated protein Eg5 (Kif11) siRNA
gaaaataccatttgttccttggt

SEQ ID NO: 2343 - DNA, 23 bp, Artificial Sequence
  Description of Artificial Sequence: Synthetic oligonucleotide
  Mitotic kinesin microtubule-associated protein Eg5 (Kif11) siRNA
aaaataccatttgttccttggtt

SEQ ID NO: 2344 - DNA, 23 bp, Artificial Sequence
  Description of Artificial Sequence: Synthetic oligonucleotide
  Mitotic kinesin microtubule-associated protein Eg5 (Kif11) siRNA
aaataccatttgttccttggttg

SEQ ID NO: 2345 - DNA, 23 bp, Artificial Sequence
  Description of Artificial Sequence: Synthetic oligonucleotide
  Mitotic kinesin microtubule-associated protein Eg5 (Kif11) siRNA
aataccatttgttccttggttga

SEQ ID NO: 2346 - DNA, 23 bp, Artificial Sequence
  Description of Artificial Sequence: Synthetic oligonucleotide
  Mitotic kinesin microtubule-associated protein Eg5 (Kif11) siRNA
ataccatttgttccttggttgag

SEQ ID NO: 2347 - DNA, 23 bp, Artificial Sequence
  Description of Artificial Sequence: Synthetic oligonucleotide
  Mitotic kinesin microtubule-associated protein Eg5 (Kif11) siRNA
taccatttgttccttggttgagt

SEQ ID NO: 2348 - DNA, 23 bp, Artificial Sequence
  Description of Artificial Sequence: Synthetic oligonucleotide
  Mitotic kinesin microtubule-associated protein Eg5 (Kif11) siRNA
accatttgttccttggttgagtc

SEQ ID NO: 2349 - DNA, 23 bp, Artificial Sequence
  Description of Artificial Sequence: Synthetic oligonucleotide
  Mitotic kinesin microtubule-associated protein Eg5 (Kif11) siRNA
ccatttgttccttggttgagtca

SEQ ID NO: 2350 - DNA, 23 bp, Artificial Sequence
  Description of Artificial Sequence: Synthetic oligonucleotide
  Mitotic kinesin microtubule-associated protein Eg5 (Kif11) siRNA
catttgttccttggttgagtcac

SEQ ID NO: 2351 - DNA, 23 bp, Artificial Sequence
  Description of Artificial Sequence: Synthetic oligonucleotide
  Mitotic kinesin microtubule-associated protein Eg5 (Kif11) siRNA
atttgttccttggttgagtcaca

SEQ ID NO: 2352 - DNA, 23 bp, Artificial Sequence
  Description of Artificial Sequence: Synthetic oligonucleotide
  Mitotic kinesin microtubule-associated protein Eg5 (Kif11) siRNA
tttgttccttggttgagtcacaa

SEQ ID NO: 2353 - DNA, 23 bp, Artificial Sequence
  Description of Artificial Sequence: Synthetic oligonucleotide
  Mitotic kinesin microtubule-associated protein Eg5 (Kif11) siRNA
ttgttccttggttgagtcacaaa

SEQ ID NO: 2354 - DNA, 23 bp, Artificial Sequence
  Description of Artificial Sequence: Synthetic oligonucleotide
  Mitotic kinesin microtubule-associated protein Eg5 (Kif11) siRNA
tgttccttggttgagtcacaaaa

SEQ ID NO: 2355 - DNA, 23 bp, Artificial Sequence
  Description of Artificial Sequence: Synthetic oligonucleotide
  Mitotic kinesin microtubule-associated protein Eg5 (Kif11) siRNA
gttccttggttgagtcacaaaag

SEQ ID NO: 2356 - DNA, 23 bp, Artificial Sequence
  Description of Artificial Sequence: Synthetic oligonucleotide
  Mitotic kinesin microtubule-associated protein Eg5 (Kif11) siRNA
ttccttggttgagtcacaaaagc

SEQ ID NO: 2357 - DNA, 23 bp, Artificial Sequence
  Description of Artificial Sequence: Synthetic oligonucleotide
  Mitotic kinesin microtubule-associated protein Eg5 (Kif11) siRNA
tccttggttgagtcacaaaagca

SEQ ID NO: 2358 - DNA, 23 bp, Artificial Sequence
  Description of Artificial Sequence: Synthetic oligonucleotide
  Mitotic kinesin microtubule-associated protein Eg5 (Kif11) siRNA
ccttggttgagtcacaaaagcaa

SEQ ID NO: 2359 - DNA, 23 bp, Artificial Sequence
  Description of Artificial Sequence: Synthetic oligonucleotide
  Mitotic kinesin microtubule-associated protein Eg5 (Kif11) siRNA
cttggttgagtcacaaaagcaat

SEQ ID NO: 2360 - DNA, 23 bp, Artificial Sequence
  Description of Artificial Sequence: Synthetic oligonucleotide
  Mitotic kinesin microtubule-associated protein Eg5 (Kif11) siRNA
ttggttgagtcacaaaagcaatg

SEQ ID NO: 2361 - DNA, 23 bp, Artificial Sequence
  Description of Artificial Sequence: Synthetic oligonucleotide
  Mitotic kinesin microtubule-associated protein Eg5 (Kif11) siRNA
tggttgagtcacaaaagcaatgt

SEQ ID NO: 2362 - DNA, 23 bp, Artificial Sequence
  Description of Artificial Sequence: Synthetic oligonucleotide
  Mitotic kinesin microtubule-associated protein Eg5 (Kif11) siRNA
ggttgagtcacaaaagcaatgtg

SEQ ID NO: 2363 - DNA, 23 bp, Artificial Sequence
  Description of Artificial Sequence: Synthetic oligonucleotide
  Mitotic kinesin microtubule-associated protein Eg5 (Kif11) siRNA
gttgagtcacaaaagcaatgtgg

SEQ ID NO: 2364 - DNA, 23 bp, Artificial Sequence
  Description of Artificial Sequence: Synthetic oligonucleotide
  Mitotic kinesin microtubule-associated protein Eg5 (Kif11) siRNA
ttgagtcacaaaagcaatgtgga

SEQ ID NO: 2365 - DNA, 23 bp, Artificial Sequence
  Description of Artificial Sequence: Synthetic oligonucleotide
  Mitotic kinesin microtubule-associated protein Eg5 (Kif11) siRNA
tgagtcacaaaagcaatgtggaa

SEQ ID NO: 2366 - DNA, 23 bp, Artificial Sequence
  Description of Artificial Sequence: Synthetic oligonucleotide
  Mitotic kinesin microtubule-associated protein Eg5 (Kif11) siRNA
gagtcacaaaagcaatgtggaaa

SEQ ID NO: 2367 - DNA, 23 bp, Artificial Sequence
  Description of Artificial Sequence: Synthetic oligonucleotide
  Mitotic kinesin microtubule-associated protein Eg5 (Kif11) siRNA
agtcacaaaagcaatgtggaaac

SEQ ID NO: 2368 - DNA, 23 bp, Artificial Sequence
  Description of Artificial Sequence: Synthetic oligonucleotide
  Mitotic kinesin microtubule-associated protein Eg5 (Kif11) siRNA
gtcacaaaagcaatgtggaaacc

SEQ ID NO: 2369 - DNA, 23 bp, Artificial Sequence
  Description of Artificial Sequence: Synthetic oligonucleotide
  Mitotic kinesin microtubule-associated protein Eg5 (Kif11) siRNA
tcacaaaagcaatgtggaaacct

SEQ ID NO: 2370 - DNA, 23 bp, Artificial Sequence
  Description of Artificial Sequence: Synthetic oligonucleotide
  Mitotic kinesin microtubule-associated protein Eg5 (Kif11) siRNA
cacaaaagcaatgtggaaaccta

SEQ ID NO: 2371 - DNA, 23 bp, Artificial Sequence
  Description of Artificial Sequence: Synthetic oligonucleotide
  Mitotic kinesin microtubule-associated protein Eg5 (Kif11) siRNA
acaaaagcaatgtggaaacctaa

SEQ ID NO: 2372 - DNA, 23 bp, Artificial Sequence
  Description of Artificial Sequence: Synthetic oligonucleotide
  Mitotic kinesin microtubule-associated protein Eg5 (Kif11) siRNA
caaaagcaatgtggaaacctaac

SEQ ID NO: 2373 - DNA, 23 bp, Artificial Sequence
  Description of Artificial Sequence: Synthetic oligonucleotide
  Mitotic kinesin microtubule-associated protein Eg5 (Kif11) siRNA
aaaagcaatgtggaaacctaact

SEQ ID NO: 2374 - DNA, 23 bp, Artificial Sequence
  Description of Artificial Sequence: Synthetic oligonucleotide
  Mitotic kinesin microtubule-associated protein Eg5 (Kif11) siRNA
aaagcaatgtggaaacctaactg

SEQ ID NO: 2375 - DNA, 23 bp, Artificial Sequence
  Description of Artificial Sequence: Synthetic oligonucleotide
  Mitotic kinesin microtubule-associated protein Eg5 (Kif11) siRNA
aagcaatgtggaaacctaactga

SEQ ID NO: 2376 - DNA, 23 bp, Artificial Sequence
  Description of Artificial Sequence: Synthetic oligonucleotide
  Mitotic kinesin microtubule-associated protein Eg5 (Kif11) siRNA
agcaatgtggaaacctaactgaa

SEQ ID NO: 2377 - DNA, 23 bp, Artificial Sequence
  Description of Artificial Sequence: Synthetic oligonucleotide
  Mitotic kinesin microtubule-associated protein Eg5 (Kif11) siRNA
gcaatgtggaaacctaactgaag

SEQ ID NO: 2378 - DNA, 23 bp, Artificial Sequence
  Description of Artificial Sequence: Synthetic oligonucleotide
  Mitotic kinesin microtubule-associated protein Eg5 (Kif11) siRNA
caatgtggaaacctaactgaaga

SEQ ID NO: 2379 - DNA, 23 bp, Artificial Sequence
  Description of Artificial Sequence: Synthetic oligonucleotide
  Mitotic kinesin microtubule-associated protein Eg5 (Kif11) siRNA
aatgtggaaacctaactgaagac

SEQ ID NO: 2380 - DNA, 23 bp, Artificial Sequence
  Description of Artificial Sequence: Synthetic oligonucleotide
  Mitotic kinesin microtubule-associated protein Eg5 (Kif11) siRNA
atgtggaaacctaactgaagacc

SEQ ID NO: 2381 - DNA, 23 bp, Artificial Sequence
  Description of Artificial Sequence: Synthetic oligonucleotide
  Mitotic kinesin microtubule-associated protein Eg5 (Kif11) siRNA
tgtggaaacctaactgaagacct

SEQ ID NO: 2382 - DNA, 23 bp, Artificial Sequence
  Description of Artificial Sequence: Synthetic oligonucleotide
  Mitotic kinesin microtubule-associated protein Eg5 (Kif11) siRNA
gtggaaacctaactgaagacctg

SEQ ID NO: 2383 - DNA, 23 bp, Artificial Sequence
  Description of Artificial Sequence: Synthetic oligonucleotide
  Mitotic kinesin microtubule-associated protein Eg5 (Kif11) siRNA
tggaaacctaactgaagacctga

SEQ ID NO: 2384 - DNA, 23 bp, Artificial Sequence
  Description of Artificial Sequence: Synthetic oligonucleotide
  Mitotic kinesin microtubule-associated protein Eg5 (Kif11) siRNA
ggaaacctaactgaagacctgaa

SEQ ID NO: 2385 - DNA, 23 bp, Artificial Sequence
  Description of Artificial Sequence: Synthetic oligonucleotide
  Mitotic kinesin microtubule-associated protein Eg5 (Kif11) siRNA
gaaacctaactgaagacctgaag

SEQ ID NO: 2386 - DNA, 23 bp, Artificial Sequence
  Description of Artificial Sequence: Synthetic oligonucleotide
  Mitotic kinesin microtubule-associated protein Eg5 (Kif11) siRNA
aaacctaactgaagacctgaaga

SEQ ID NO: 2387 - DNA, 23 bp, Artificial Sequence
  Description of Artificial Sequence: Synthetic oligonucleotide
  Mitotic kinesin microtubule-associated protein Eg5 (Kif11) siRNA
aacctaactgaagacctgaagac

SEQ ID NO: 2388 - DNA, 23 bp, Artificial Sequence
  Description of Artificial Sequence: Synthetic oligonucleotide
  Mitotic kinesin microtubule-associated protein Eg5 (Kif11) siRNA
acctaactgaagacctgaagaca

SEQ ID NO: 2389 - DNA, 23 bp, Artificial Sequence
  Description of Artificial Sequence: Synthetic oligonucleotide
  Mitotic kinesin microtubule-associated protein Eg5 (Kif11) siRNA
cctaactgaagacctgaagacaa

SEQ ID NO: 2390 - DNA, 23 bp, Artificial Sequence
  Description of Artificial Sequence: Synthetic oligonucleotide
  Mitotic kinesin microtubule-associated protein Eg5 (Kif11) siRNA
ctaactgaagacctgaagacaat

SEQ ID NO: 2391 - DNA, 23 bp, Artificial Sequence
  Description of Artificial Sequence: Synthetic oligonucleotide
  Mitotic kinesin microtubule-associated protein Eg5 (Kif11) siRNA
taactgaagacctgaagacaata

SEQ ID NO: 2392 - DNA, 23 bp, Artificial Sequence
  Description of Artificial Sequence: Synthetic oligonucleotide
  Mitotic kinesin microtubule-associated protein Eg5 (Kif11) siRNA
aactgaagacctgaagacaataa

SEQ ID NO: 2393 - DNA, 23 bp, Artificial Sequence
  Description of Artificial Sequence: Synthetic oligonucleotide
  Mitotic kinesin microtubule-associated protein Eg5 (Kif11) siRNA
actgaagacctgaagacaataaa

SEQ ID NO: 2394 - DNA, 23 bp, Artificial Sequence
  Description of Artificial Sequence: Synthetic oligonucleotide
  Mitotic kinesin microtubule-associated protein Eg5 (Kif11) siRNA
ctgaagacctgaagacaataaag

SEQ ID NO: 2395 - DNA, 23 bp, Artificial Sequence
  Description of Artificial Sequence: Synthetic oligonucleotide
  Mitotic kinesin microtubule-associated protein Eg5 (Kif11) siRNA
tgaagacctgaagacaataaagc

SEQ ID NO: 2396 - DNA, 23 bp, Artificial Sequence
  Description of Artificial Sequence: Synthetic oligonucleotide
  Mitotic kinesin microtubule-associated protein Eg5 (Kif11) siRNA
gaagacctgaagacaataaagca

SEQ ID NO: 2397 - DNA, 23 bp, Artificial Sequence
  Description of Artificial Sequence: Synthetic oligonucleotide
  Mitotic kinesin microtubule-associated protein Eg5 (Kif11) siRNA
aagacctgaagacaataaagcag

SEQ ID NO: 2398 - DNA, 23 bp, Artificial Sequence
  Description of Artificial Sequence: Synthetic oligonucleotide
  Mitotic kinesin microtubule-associated protein Eg5 (Kif11) siRNA
agacctgaagacaataaagcaga

SEQ ID NO: 2399 - DNA, 23 bp, Artificial Sequence
  Description of Artificial Sequence: Synthetic oligonucleotide
  Mitotic kinesin microtubule-associated protein Eg5 (Kif11) siRNA
gacctgaagacaataaagcagac

SEQ ID NO: 2400 - DNA, 23 bp, Artificial Sequence
  Description of Artificial Sequence: Synthetic oligonucleotide
  Mitotic kinesin microtubule-associated protein Eg5 (Kif11) siRNA
acctgaagacaataaagcagacc

SEQ ID NO: 2401 - DNA, 23 bp, Artificial Sequence
  Description of Artificial Sequence: Synthetic oligonucleotide
  Mitotic kinesin microtubule-associated protein Eg5 (Kif11) siRNA
cctgaagacaataaagcagaccc

SEQ ID NO: 2402 - DNA, 23 bp, Artificial Sequence
  Description of Artificial Sequence: Synthetic oligonucleotide
  Mitotic kinesin microtubule-associated protein Eg5 (Kif11) siRNA
ctgaagacaataaagcagaccca

SEQ ID NO: 2403 - DNA, 23 bp, Artificial Sequence
  Description of Artificial Sequence: Synthetic oligonucleotide
  Mitotic kinesin microtubule-associated protein Eg5 (Kif11) siRNA
tgaagacaataaagcagacccat

SEQ ID NO: 2404 - DNA, 23 bp, Artificial Sequence
  Description of Artificial Sequence: Synthetic oligonucleotide
  Mitotic kinesin microtubule-associated protein Eg5 (Kif11) siRNA
gaagacaataaagcagacccatt

SEQ ID NO: 2405 - DNA, 23 bp, Artificial Sequence
  Description of Artificial Sequence: Synthetic oligonucleotide
  Mitotic kinesin microtubule-associated protein Eg5 (Kif11) siRNA
aagacaataaagcagacccattc

SEQ ID NO: 2406 - DNA, 23 bp, Artificial Sequence
  Description of Artificial Sequence: Synthetic oligonucleotide
  Mitotic kinesin microtubule-associated protein Eg5 (Kif11) siRNA
agacaataaagcagacccattcc

SEQ ID NO: 2407 - DNA, 23 bp, Artificial Sequence
  Description of Artificial Sequence: Synthetic oligonucleotide
  Mitotic kinesin microtubule-associated protein Eg5 (Kif11) siRNA
gacaataaagcagacccattccc

SEQ ID NO: 2408 - DNA, 23 bp, Artificial Sequence
  Description of Artificial Sequence: Synthetic oligonucleotide
  Mitotic kinesin microtubule-associated protein Eg5 (Kif11) siRNA
acaataaagcagacccattccca

SEQ ID NO: 2409 - DNA, 23 bp, Artificial Sequence
  Description of Artificial Sequence: Synthetic oligonucleotide
  Mitotic kinesin microtubule-associated protein Eg5 (Kif11) siRNA
caataaagcagacccattcccag

SEQ ID NO: 2410 - DNA, 23 bp, Artificial Sequence
  Description of Artificial Sequence: Synthetic oligonucleotide
  Mitotic kinesin microtubule-associated protein Eg5 (Kif11) siRNA
aataaagcagacccattcccagg

SEQ ID NO: 2411 - DNA, 23 bp, Artificial Sequence
  Description of Artificial Sequence: Synthetic oligonucleotide
  Mitotic kinesin microtubule-associated protein Eg5 (Kif11) siRNA
ataaagcagacccattcccagga

SEQ ID NO: 2412 - DNA, 23 bp, Artificial Sequence
  Description of Artificial Sequence: Synthetic oligonucleotide
  Mitotic kinesin microtubule-associated protein Eg5 (Kif11) siRNA
taaagcagacccattcccaggaa

SEQ ID NO: 2413 - DNA, 23 bp, Artificial Sequence
  Description of Artificial Sequence: Synthetic oligonucleotide
  Mitotic kinesin microtubule-associated protein Eg5 (Kif11) siRNA
aaagcagacccattcccaggaac

SEQ ID NO: 2414 - DNA, 23 bp, Artificial Sequence
  Description of Artificial Sequence: Synthetic oligonucleotide
  Mitotic kinesin microtubule-associated protein Eg5 (Kif11) siRNA
aagcagacccattcccaggaact

SEQ ID NO: 2415 - DNA, 23 bp, Artificial Sequence
  Description of Artificial Sequence: Synthetic oligonucleotide
  Mitotic kinesin microtubule-associated protein Eg5 (Kif11) siRNA
agcagacccattcccaggaactt

SEQ ID NO: 2416 - DNA, 23 bp, Artificial Sequence
  Description of Artificial Sequence: Synthetic oligonucleotide
  Mitotic kinesin microtubule-associated protein Eg5 (Kif11) siRNA
gcagacccattcccaggaacttt

SEQ ID NO: 2417 - DNA, 23 bp, Artificial Sequence
  Description of Artificial Sequence: Synthetic oligonucleotide
  Mitotic kinesin microtubule-associated protein Eg5 (Kif11) siRNA
cagacccattcccaggaactttg

SEQ ID NO: 2418 - DNA, 23 bp, Artificial Sequence
  Description of Artificial Sequence: Synthetic oligonucleotide
  Mitotic kinesin microtubule-associated protein Eg5 (Kif11) siRNA
agacccattcccaggaactttgc

SEQ ID NO: 2419 - DNA, 23 bp, Artificial Sequence
  Description of Artificial Sequence: Synthetic oligonucleotide
  Mitotic kinesin microtubule-associated protein Eg5 (Kif11) siRNA
gacccattcccaggaactttgca

SEQ ID NO: 2420 - DNA, 23 bp, Artificial Sequence
  Description of Artificial Sequence: Synthetic oligonucleotide
  Mitotic kinesin microtubule-associated protein Eg5 (Kif11) siRNA
acccattcccaggaactttgcaa

SEQ ID NO: 2421 - DNA, 23 bp, Artificial Sequence
  Description of Artificial Sequence: Synthetic oligonucleotide
  Mitotic kinesin microtubule-associated protein Eg5 (Kif11) siRNA
cccattcccaggaactttgcaag

SEQ ID NO: 2422 - DNA, 23 bp, Artificial Sequence
  Description of Artificial Sequence: Synthetic oligonucleotide
  Mitotic kinesin microtubule-associated protein Eg5 (Kif11) siRNA
ccattcccaggaactttgcaagt

SEQ ID NO: 2423 - DNA, 23 bp, Artificial Sequence
  Description of Artificial Sequence: Synthetic oligonucleotide
  Mitotic kinesin microtubule-associated protein Eg5 (Kif11) siRNA
cattcccaggaactttgcaagtt

SEQ ID NO: 2424 - DNA, 23 bp, Artificial Sequence
  Description of Artificial Sequence: Synthetic oligonucleotide
  Mitotic kinesin microtubule-associated protein Eg5 (Kif11) siRNA
attcccaggaactttgcaagtta

SEQ ID NO: 2425 - DNA, 23 bp, Artificial Sequence
  Description of Artificial Sequence: Synthetic oligonucleotide
  Mitotic kinesin microtubule-associated protein Eg5 (Kif11) siRNA
ttcccaggaactttgcaagttaa

SEQ ID NO: 2426 - DNA, 23 bp, Artificial Sequence
  Description of Artificial Sequence: Synthetic oligonucleotide
  Mitotic kinesin microtubule-associated protein Eg5 (Kif11) siRNA
tcccaggaactttgcaagttaat

SEQ ID NO: 2427 - DNA, 23 bp, Artificial Sequence
  Description of Artificial Sequence: Synthetic oligonucleotide
  Mitotic kinesin microtubule-associated protein Eg5 (Kif11) siRNA
cccaggaactttgcaagttaatg

SEQ ID NO: 2428 - DNA, 23 bp, Artificial Sequence
  Description of Artificial Sequence: Synthetic oligonucleotide
  Mitotic kinesin microtubule-associated protein Eg5 (Kif11) siRNA
ccaggaactttgcaagttaatga

SEQ ID NO: 2429 - DNA, 23 bp, Artificial Sequence
  Description of Artificial Sequence: Synthetic oligonucleotide
  Mitotic kinesin microtubule-associated protein Eg5 (Kif11) siRNA
caggaactttgcaagttaatgaa

SEQ ID NO: 2430 - DNA, 23 bp, Artificial Sequence
  Description of Artificial Sequence: Synthetic oligonucleotide
  Mitotic kinesin microtubule-associated protein Eg5 (Kif11) siRNA
aggaactttgcaagttaatgaat

SEQ ID NO: 2431 - DNA, 23 bp, Artificial Sequence
  Description of Artificial Sequence: Synthetic oligonucleotide
  Mitotic kinesin microtubule-associated protein Eg5 (Kif11) siRNA
ggaactttgcaagttaatgaatc

SEQ ID NO: 2432 - DNA, 23 bp, Artificial Sequence
  Description of Artificial Sequence: Synthetic oligonucleotide
  Mitotic kinesin microtubule-associated protein Eg5 (Kif11) siRNA
gaactttgcaagttaatgaatct

SEQ ID NO: 2433 - DNA, 23 bp, Artificial Sequence
  Description of Artificial Sequence: Synthetic oligonucleotide
  Mitotic kinesin microtubule-associated protein Eg5 (Kif11) siRNA
aactttgcaagttaatgaatctt

SEQ ID NO: 2434 - DNA, 23 bp, Artificial Sequence
  Description of Artificial Sequence: Synthetic oligonucleotide
  Mitotic kinesin microtubule-associated protein Eg5 (Kif11) siRNA
actttgcaagttaatgaatcttt

SEQ ID NO: 2435 - DNA, 23 bp, Artificial Sequence
  Description of Artificial Sequence: Synthetic oligonucleotide
  Mitotic kinesin microtubule-associated protein Eg5 (Kif11) siRNA
ctttgcaagttaatgaatctttg

SEQ ID NO: 2436 - DNA, 23 bp, Artificial Sequence
  Description of Artificial Sequence: Synthetic oligonucleotide
  Mitotic kinesin microtubule-associated protein Eg5 (Kif11) siRNA
tttgcaagttaatgaatctttgg

SEQ ID NO: 2437 - DNA, 23 bp, Artificial Sequence
  Description of Artificial Sequence: Synthetic oligonucleotide
  Mitotic kinesin microtubule-associated protein Eg5 (Kif11) siRNA
ttgcaagttaatgaatctttgga

SEQ ID NO: 2438 - DNA, 23 bp, Artificial Sequence
  Description of Artificial Sequence: Synthetic oligonucleotide
  Mitotic kinesin microtubule-associated protein Eg5 (Kif11) siRNA
tgcaagttaatgaatctttggac

SEQ ID NO: 2439 - DNA, 23 bp, Artificial Sequence
  Description of Artificial Sequence: Synthetic oligonucleotide
  Mitotic kinesin microtubule-associated protein Eg5 (Kif11) siRNA
gcaagttaatgaatctttggaca

SEQ ID NO: 2440 - DNA, 23 bp, Artificial Sequence
  Description of Artificial Sequence: Synthetic oligonucleotide
  Mitotic kinesin microtubule-associated protein Eg5 (Kif11) siRNA
caagttaatgaatctttggacag

SEQ ID NO: 2441 - DNA, 23 bp, Artificial Sequence
  Description of Artificial Sequence: Synthetic oligonucleotide
  Mitotic kinesin microtubule-associated protein Eg5 (Kif11) siRNA
aagttaatgaatctttggacaga

SEQ ID NO: 2442 - DNA, 23 bp, Artificial Sequence
  Description of Artificial Sequence: Synthetic oligonucleotide
  Mitotic kinesin microtubule-associated protein Eg5 (Kif11) siRNA
agttaatgaatctttggacagag

SEQ ID NO: 2443 - DNA, 23 bp, Artificial Sequence
  Description of Artificial Sequence: Synthetic oligonucleotide
  Mitotic kinesin microtubule-associated protein Eg5 (Kif11) siRNA
gttaatgaatctttggacagaga

SEQ ID NO: 2444 - DNA, 23 bp, Artificial Sequence
  Description of Artificial Sequence: Synthetic oligonucleotide
  Mitotic kinesin microtubule-associated protein Eg5 (Kif11) siRNA
ttaatgaatctttggacagagag

SEQ ID NO: 2445 - DNA, 23 bp, Artificial Sequence
  Description of Artificial Sequence: Synthetic oligonucleotide
  Mitotic kinesin microtubule-associated protein Eg5 (Kif11) siRNA
taatgaatctttggacagagaga

SEQ ID NO: 2446 - DNA, 23 bp, Artificial Sequence
  Description of Artificial Sequence: Synthetic oligonucleotide
  Mitotic kinesin microtubule-associated protein Eg5 (Kif11) siRNA
aatgaatctttggacagagagat

SEQ ID NO: 2447 - DNA, 23 bp, Artificial Sequence
  Description of Artificial Sequence: Synthetic oligonucleotide
  Mitotic kinesin microtubule-associated protein Eg5 (Kif11) siRNA
atgaatctttggacagagagatt

SEQ ID NO: 2448 - DNA, 23 bp, Artificial Sequence
  Description of Artificial Sequence: Synthetic oligonucleotide
  Mitotic kinesin microtubule-associated protein Eg5 (Kif11) siRNA
tgaatctttggacagagagattc

SEQ ID NO: 2449 - DNA, 23 bp, Artificial Sequence
  Description of Artificial Sequence: Synthetic oligonucleotide
  Mitotic kinesin microtubule-associated protein Eg5 (Kif11) siRNA
gaatctttggacagagagattct

SEQ ID NO: 2450 - DNA, 23 bp, Artificial Sequence
  Description of Artificial Sequence: Synthetic oligonucleotide
  Mitotic kinesin microtubule-associated protein Eg5 (Kif11) siRNA
aatctttggacagagagattctg

SEQ ID NO: 2451 - DNA, 23 bp, Artificial Sequence
  Description of Artificial Sequence: Synthetic oligonucleotide
  Mitotic kinesin microtubule-associated protein Eg5 (Kif11) siRNA
atctttggacagagagattctgt

SEQ ID NO: 2452 - DNA, 23 bp, Artificial Sequence
  Description of Artificial Sequence: Synthetic oligonucleotide
  Mitotic kinesin microtubule-associated protein Eg5 (Kif11) siRNA
tctttggacagagagattctgtg

SEQ ID NO: 2453 - DNA, 23 bp, Artificial Sequence
  Description of Artificial Sequence: Synthetic oligonucleotide
  Mitotic kinesin microtubule-associated protein Eg5 (Kif11) siRNA
ctttggacagagagattctgtgc

SEQ ID NO: 2454 - DNA, 23 bp, Artificial Sequence
  Description of Artificial Sequence: Synthetic oligonucleotide
  Mitotic kinesin microtubule-associated protein Eg5 (Kif11) siRNA
tttggacagagagattctgtgct

SEQ ID NO: 2455 - DNA, 23 bp, Artificial Sequence
  Description of Artificial Sequence: Synthetic oligonucleotide
  Mitotic kinesin microtubule-associated protein Eg5 (Kif11) siRNA
ttggacagagagattctgtgctt

SEQ ID NO: 2456 - DNA, 23 bp, Artificial Sequence
  Description of Artificial Sequence: Synthetic oligonucleotide
  Mitotic kinesin microtubule-associated protein Eg5 (Kif11) siRNA
tggacagagagattctgtgcttt

SEQ ID NO: 2457 - DNA, 23 bp, Artificial Sequence
  Description of Artificial Sequence: Synthetic oligonucleotide
  Mitotic kinesin microtubule-associated protein Eg5 (Kif11) siRNA
ggacagagagattctgtgctttg

SEQ ID NO: 2458 - DNA, 23 bp, Artificial Sequence
  Description of Artificial Sequence: Synthetic oligonucleotide
  Mitotic kinesin microtubule-associated protein Eg5 (Kif11) siRNA
gacagagagattctgtgctttgg

SEQ ID NO: 2459 - DNA, 23 bp, Artificial Sequence
  Description of Artificial Sequence: Synthetic oligonucleotide
  Mitotic kinesin microtubule-associated protein Eg5 (Kif11) siRNA
acagagagattctgtgctttgga

SEQ ID NO: 2460 - DNA, 23 bp, Artificial Sequence
  Description of Artificial Sequence: Synthetic oligonucleotide
  Mitotic kinesin microtubule-associated protein Eg5 (Kif11) siRNA
cagagagattctgtgctttggag

SEQ ID NO: 2461 - DNA, 23 bp, Artificial Sequence
  Description of Artificial Sequence: Synthetic oligonucleotide
  Mitotic kinesin microtubule-associated protein Eg5 (Kif11) siRNA
agagagattctgtgctttggagg

SEQ ID NO: 2462 - DNA, 23 bp, Artificial Sequence
  Description of Artificial Sequence: Synthetic oligonucleotide
  Mitotic kinesin microtubule-associated protein Eg5 (Kif11) siRNA
gagagattctgtgctttggagga

SEQ ID NO: 2463 - DNA, 23 bp, Artificial Sequence
  Description of Artificial Sequence: Synthetic oligonucleotide
  Mitotic kinesin microtubule-associated protein Eg5 (Kif11) siRNA
agagattctgtgctttggaggaa

SEQ ID NO: 2464 - DNA, 23 bp, Artificial Sequence
  Description of Artificial Sequence: Synthetic oligonucleotide
  Mitotic kinesin microtubule-associated protein Eg5 (Kif11) siRNA
gagattctgtgctttggaggaaa

SEQ ID NO: 2465 - DNA, 23 bp, Artificial Sequence
  Description of Artificial Sequence: Synthetic oligonucleotide
  Mitotic kinesin microtubule-associated protein Eg5 (Kif11) siRNA
agattctgtgctttggaggaaaa

SEQ ID NO: 2466 - DNA, 23 bp, Artificial Sequence
  Description of Artificial Sequence: Synthetic oligonucleotide
  Mitotic kinesin microtubule-associated protein Eg5 (Kif11) siRNA
gattctgtgctttggaggaaaag

SEQ ID NO: 2467 - DNA, 23 bp, Artificial Sequence
  Description of Artificial Sequence: Synthetic oligonucleotide
  Mitotic kinesin microtubule-associated protein Eg5 (Kif11) siRNA
attctgtgctttggaggaaaagt

SEQ ID NO: 2468 - DNA, 23 bp, Artificial Sequence
  Description of Artificial Sequence: Synthetic oligonucleotide
  Mitotic kinesin microtubule-associated protein Eg5 (Kif11) siRNA
ttctgtgctttggaggaaaagtg

SEQ ID NO: 2469 - DNA, 23 bp, Artificial Sequence
  Description of Artificial Sequence: Synthetic oligonucleotide
  Mitotic kinesin microtubule-associated protein Eg5 (Kif11) siRNA
tctgtgctttggaggaaaagtgt

SEQ ID NO: 2470 - DNA, 23 bp, Artificial Sequence
  Description of Artificial Sequence: Synthetic oligonucleotide
  Mitotic kinesin microtubule-associated protein Eg5 (Kif11) siRNA
ctgtgctttggaggaaaagtgtg

SEQ ID NO: 2471 - DNA, 23 bp, Artificial Sequence
  Description of Artificial Sequence: Synthetic oligonucleotide
  Mitotic kinesin microtubule-associated protein Eg5 (Kif11) siRNA
tgtgctttggaggaaaagtgtga

SEQ ID NO: 2472 - DNA, 23 bp, Artificial Sequence
  Description of Artificial Sequence: Synthetic oligonucleotide
  Mitotic kinesin microtubule-associated protein Eg5 (Kif11) siRNA
gtgctttggaggaaaagtgtgaa

SEQ ID NO: 2473 - DNA, 23 bp, Artificial Sequence
  Description of Artificial Sequence: Synthetic oligonucleotide
  Mitotic kinesin microtubule-associated protein Eg5 (Kif11) siRNA
tgctttggaggaaaagtgtgaaa

SEQ ID NO: 2474 - DNA, 23 bp, Artificial Sequence
  Description of Artificial Sequence: Synthetic oligonucleotide
  Mitotic kinesin microtubule-associated protein Eg5 (Kif11) siRNA
gctttggaggaaaagtgtgaaaa

SEQ ID NO: 2475 - DNA, 23 bp, Artificial Sequence
  Description of Artificial Sequence: Synthetic oligonucleotide
  Mitotic kinesin microtubule-associated protein Eg5 (Kif11) siRNA
ctttggaggaaaagtgtgaaaat

SEQ ID NO: 2476 - DNA, 23 bp, Artificial Sequence
  Description of Artificial Sequence: Synthetic oligonucleotide
  Mitotic kinesin microtubule-associated protein Eg5 (Kif11) siRNA
tttggaggaaaagtgtgaaaata

SEQ ID NO: 2477 - DNA, 23 bp, Artificial Sequence
  Description of Artificial Sequence: Synthetic oligonucleotide
  Mitotic kinesin microtubule-associated protein Eg5 (Kif11) siRNA
ttggaggaaaagtgtgaaaatat

SEQ ID NO: 2478 - DNA, 23 bp, Artificial Sequence
  Description of Artificial Sequence: Synthetic oligonucleotide
  Mitotic kinesin microtubule-associated protein Eg5 (Kif11) siRNA
tggaggaaaagtgtgaaaatata

SEQ ID NO: 2479 - DNA, 23 bp, Artificial Sequence
  Description of Artificial Sequence: Synthetic oligonucleotide
  Mitotic kinesin microtubule-associated protein Eg5 (Kif11) siRNA
ggaggaaaagtgtgaaaatatac

SEQ ID NO: 2480 - DNA, 23 bp, Artificial Sequence
  Description of Artificial Sequence: Synthetic oligonucleotide
  Mitotic kinesin microtubule-associated protein Eg5 (Kif11) siRNA
gaggaaaagtgtgaaaatataca

SEQ ID NO: 2481 - DNA, 23 bp, Artificial Sequence
  Description of Artificial Sequence: Synthetic oligonucleotide
  Mitotic kinesin microtubule-associated protein Eg5 (Kif11) siRNA
aggaaaagtgtgaaaatatacag

SEQ ID NO: 2482 - DNA, 23 bp, Artificial Sequence
  Description of Artificial Sequence: Synthetic oligonucleotide
  Mitotic kinesin microtubule-associated protein Eg5 (Kif11) siRNA
ggaaaagtgtgaaaatatacaga

SEQ ID NO: 2483 - DNA, 23 bp, Artificial Sequence
  Description of Artificial Sequence: Synthetic oligonucleotide
  Mitotic kinesin microtubule-associated protein Eg5 (Kif11) siRNA
gaaaagtgtgaaaatatacagaa

SEQ ID NO: 2484 - DNA, 23 bp, Artificial Sequence
  Description of Artificial Sequence: Synthetic oligonucleotide
  Mitotic kinesin microtubule-associated protein Eg5 (Kif11) siRNA
aaaagtgtgaaaatatacagaaa

SEQ ID NO: 2485 - DNA, 23 bp, Artificial Sequence
  Description of Artificial Sequence: Synthetic oligonucleotide
  Mitotic kinesin microtubule-associated protein Eg5 (Kif11) siRNA
aaagtgtgaaaatatacagaaac

SEQ ID NO: 2486 - DNA, 23 bp, Artificial Sequence
  Description of Artificial Sequence: Synthetic oligonucleotide
  Mitotic kinesin microtubule-associated protein Eg5 (Kif11) siRNA
aagtgtgaaaatatacagaaacc

SEQ ID NO: 2487 - DNA, 23 bp, Artificial Sequence
  Description of Artificial Sequence: Synthetic oligonucleotide
  Mitotic kinesin microtubule-associated protein Eg5 (Kif11) siRNA
agtgtgaaaatatacagaaacca

SEQ ID NO: 2488 - DNA, 23 bp, Artificial Sequence
  Description of Artificial Sequence: Synthetic oligonucleotide
  Mitotic kinesin microtubule-associated protein Eg5 (Kif11) siRNA
gtgtgaaaatatacagaaaccac

SEQ ID NO: 2489 - DNA, 23 bp, Artificial Sequence
  Description of Artificial Sequence: Synthetic oligonucleotide
  Mitotic kinesin microtubule-associated protein Eg5 (Kif11) siRNA
tgtgaaaatatacagaaaccact

SEQ ID NO: 2490 - DNA, 23 bp, Artificial Sequence
  Description of Artificial Sequence: Synthetic oligonucleotide
  Mitotic kinesin microtubule-associated protein Eg5 (Kif11) siRNA
gtgaaaatatacagaaaccactt

SEQ ID NO: 2491 - DNA, 23 bp, Artificial Sequence
  Description of Artificial Sequence: Synthetic oligonucleotide
  Mitotic kinesin microtubule-associated protein Eg5 (Kif11) siRNA
tgaaaatatacagaaaccactta

SEQ ID NO: 2492 - DNA, 23 bp, Artificial Sequence
  Description of Artificial Sequence: Synthetic oligonucleotide
  Mitotic kinesin microtubule-associated protein Eg5 (Kif11) siRNA
gaaaatatacagaaaccacttag

SEQ ID NO: 2493 - DNA, 23 bp, Artificial Sequence
  Description of Artificial Sequence: Synthetic oligonucleotide
  Mitotic kinesin microtubule-associated protein Eg5 (Kif11) siRNA
aaaatatacagaaaccacttagt

SEQ ID NO: 2494 - DNA, 23 bp, Artificial Sequence
  Description of Artificial Sequence: Synthetic oligonucleotide
  Mitotic kinesin microtubule-associated protein Eg5 (Kif11) siRNA
aaatatacagaaaccacttagta

SEQ ID NO: 2495 - DNA, 23 bp, Artificial Sequence
  Description of Artificial Sequence: Synthetic oligonucleotide
  Mitotic kinesin microtubule-associated protein Eg5 (Kif11) siRNA
aatatacagaaaccacttagtag

SEQ ID NO: 2496 - DNA, 23 bp, Artificial Sequence
  Description of Artificial Sequence: Synthetic oligonucleotide
  Mitotic kinesin microtubule-associated protein Eg5 (Kif11) siRNA
atatacagaaaccacttagtagt

SEQ ID NO: 2497 - DNA, 23 bp, Artificial Sequence
  Description of Artificial Sequence: Synthetic oligonucleotide
  Mitotic kinesin microtubule-associated protein Eg5 (Kif11) siRNA
tatacagaaaccacttagtagtg

SEQ ID NO: 2498 - DNA, 23 bp, Artificial Sequence
  Description of Artificial Sequence: Synthetic oligonucleotide
  Mitotic kinesin microtubule-associated protein Eg5 (Kif11) siRNA
atacagaaaccacttagtagtgt

SEQ ID NO: 2499 - DNA, 23 bp, Artificial Sequence
  Description of Artificial Sequence: Synthetic oligonucleotide
  Mitotic kinesin microtubule-associated protein Eg5 (Kif11) siRNA
tacagaaaccacttagtagtgtc

SEQ ID NO: 2500 - DNA, 23 bp, Artificial Sequence
  Description of Artificial Sequence: Synthetic oligonucleotide
  Mitotic kinesin microtubule-associated protein Eg5 (Kif11) siRNA
acagaaaccacttagtagtgtcc

SEQ ID NO: 2501 - DNA, 23 bp, Artificial Sequence
  Description of Artificial Sequence: Synthetic oligonucleotide
  Mitotic kinesin microtubule-associated protein Eg5 (Kif11) siRNA
cagaaaccacttagtagtgtcca

SEQ ID NO: 2502 - DNA, 23 bp, Artificial Sequence
  Description of Artificial Sequence: Synthetic oligonucleotide
  Mitotic kinesin microtubule-associated protein Eg5 (Kif11) siRNA
agaaaccacttagtagtgtccag

SEQ ID NO: 2503 - DNA, 23 bp, Artificial Sequence
  Description of Artificial Sequence: Synthetic oligonucleotide
  Mitotic kinesin microtubule-associated protein Eg5 (Kif11) siRNA
gaaaccacttagtagtgtccagg

SEQ ID NO: 2504 - DNA, 23 bp, Artificial Sequence
  Description of Artificial Sequence: Synthetic oligonucleotide
  Mitotic kinesin microtubule-associated protein Eg5 (Kif11) siRNA
aaaccacttagtagtgtccagga

SEQ ID NO: 2505 - DNA, 23 bp, Artificial Sequence
  Description of Artificial Sequence: Synthetic oligonucleotide
  Mitotic kinesin microtubule-associated protein Eg5 (Kif11) siRNA
aaccacttagtagtgtccaggaa

SEQ ID NO: 2506 - DNA, 23 bp, Artificial Sequence
  Description of Artificial Sequence: Synthetic oligonucleotide
  Mitotic kinesin microtubule-associated protein Eg5 (Kif11) siRNA
accacttagtagtgtccaggaaa

SEQ ID NO: 2507 - DNA, 23 bp, Artificial Sequence
  Description of Artificial Sequence: Synthetic oligonucleotide
  Mitotic kinesin microtubule-associated protein Eg5 (Kif11) siRNA
ccacttagtagtgtccaggaaaa

SEQ ID NO: 2508 - DNA, 23 bp, Artificial Sequence
  Description of Artificial Sequence: Synthetic oligonucleotide
  Mitotic kinesin microtubule-associated protein Eg5 (Kif11) siRNA
cacttagtagtgtccaggaaaat

SEQ ID NO: 2509 - DNA, 23 bp, Artificial Sequence
  Description of Artificial Sequence: Synthetic oligonucleotide
  Mitotic kinesin microtubule-associated protein Eg5 (Kif11) siRNA
acttagtagtgtccaggaaaata

SEQ ID NO: 2510 - DNA, 23 bp, Artificial Sequence
  Description of Artificial Sequence: Synthetic oligonucleotide
  Mitotic kinesin microtubule-associated protein Eg5 (Kif11) siRNA
cttagtagtgtccaggaaaatat

SEQ ID NO: 2511 - DNA, 23 bp, Artificial Sequence
  Description of Artificial Sequence: Synthetic oligonucleotide
  Mitotic kinesin microtubule-associated protein Eg5 (Kif11) siRNA
ttagtagtgtccaggaaaatata

SEQ ID NO: 2512 - DNA, 23 bp, Artificial Sequence
  Description of Artificial Sequence: Synthetic oligonucleotide
  Mitotic kinesin microtubule-associated protein Eg5 (Kif11) siRNA
tagtagtgtccaggaaaatatac

SEQ ID NO: 2513 - DNA, 23 bp, Artificial Sequence
  Description of Artificial Sequence: Synthetic oligonucleotide
  Mitotic kinesin microtubule-associated protein Eg5 (Kif11) siRNA
agtagtgtccaggaaaatataca

SEQ ID NO: 2514 - DNA, 23 bp, Artificial Sequence
  Description of Artificial Sequence: Synthetic oligonucleotide
  Mitotic kinesin microtubule-associated protein Eg5 (Kif11) siRNA
gtagtgtccaggaaaatatacag

SEQ ID NO: 2515 - DNA, 23 bp, Artificial Sequence
  Description of Artificial Sequence: Synthetic oligonucleotide
  Mitotic kinesin microtubule-associated protein Eg5 (Kif11) siRNA
tagtgtccaggaaaatatacagc

SEQ ID NO: 2516 - DNA, 23 bp, Artificial Sequence
  Description of Artificial Sequence: Synthetic oligonucleotide
  Mitotic kinesin microtubule-associated protein Eg5 (Kif11) siRNA
agtgtccaggaaaatatacagca

SEQ ID NO: 2517 - DNA, 23 bp, Artificial Sequence
  Description of Artificial Sequence: Synthetic oligonucleotide
  Mitotic kinesin microtubule-associated protein Eg5 (Kif11) siRNA
gtgtccaggaaaatatacagcag

SEQ ID NO: 2518 - DNA, 23 bp, Artificial Sequence
  Description of Artificial Sequence: Synthetic oligonucleotide
  Mitotic kinesin microtubule-associated protein Eg5 (Kif11) siRNA
tgtccaggaaaatatacagcaga

SEQ ID NO: 2519 - DNA, 23 bp, Artificial Sequence
  Description of Artificial Sequence: Synthetic oligonucleotide
  Mitotic kinesin microtubule-associated protein Eg5 (Kif11) siRNA
gtccaggaaaatatacagcagaa

SEQ ID NO: 2520 - DNA, 23 bp, Artificial Sequence
  Description of Artificial Sequence: Synthetic oligonucleotide
  Mitotic kinesin microtubule-associated protein Eg5 (Kif11) siRNA
tccaggaaaatatacagcagaaa

SEQ ID NO: 2521 - DNA, 23 bp, Artificial Sequence
  Description of Artificial Sequence: Synthetic oligonucleotide
  Mitotic kinesin microtubule-associated protein Eg5 (Kif11) siRNA
ccaggaaaatatacagcagaaat

SEQ ID NO: 2522 - DNA, 23 bp, Artificial Sequence
  Description of Artificial Sequence: Synthetic oligonucleotide
  Mitotic kinesin microtubule-associated protein Eg5 (Kif11) siRNA
caggaaaatatacagcagaaatc

SEQ ID NO: 2523 - DNA, 23 bp, Artificial Sequence
  Description of Artificial Sequence: Synthetic oligonucleotide
  Mitotic kinesin microtubule-associated protein Eg5 (Kif11) siRNA
aggaaaatatacagcagaaatct

SEQ ID NO: 2524 - DNA, 23 bp, Artificial Sequence
  Description of Artificial Sequence: Synthetic oligonucleotide
  Mitotic kinesin microtubule-associated protein Eg5 (Kif11) siRNA
ggaaaatatacagcagaaatcta

SEQ ID NO: 2525 - DNA, 23 bp, Artificial Sequence
  Description of Artificial Sequence: Synthetic oligonucleotide
  Mitotic kinesin microtubule-associated protein Eg5 (Kif11) siRNA
gaaaatatacagcagaaatctaa

SEQ ID NO: 2526 - DNA, 23 bp, Artificial Sequence
  Description of Artificial Sequence: Synthetic oligonucleotide
  Mitotic kinesin microtubule-associated protein Eg5 (Kif11) siRNA
aaaatatacagcagaaatctaag

SEQ ID NO: 2527 - DNA, 23 bp, Artificial Sequence
  Description of Artificial Sequence: Synthetic oligonucleotide
  Mitotic kinesin microtubule-associated protein Eg5 (Kif11) siRNA
aaatatacagcagaaatctaagg

SEQ ID NO: 2528 - DNA, 23 bp, Artificial Sequence
  Description of Artificial Sequence: Synthetic oligonucleotide
  Mitotic kinesin microtubule-associated protein Eg5 (Kif11) siRNA
aatatacagcagaaatctaagga

SEQ ID NO: 2529 - DNA, 23 bp, Artificial Sequence
  Description of Artificial Sequence: Synthetic oligonucleotide
  Mitotic kinesin microtubule-associated protein Eg5 (Kif11) siRNA
atatacagcagaaatctaaggat

SEQ ID NO: 2530 - DNA, 23 bp, Artificial Sequence
  Description of Artificial Sequence: Synthetic oligonucleotide
  Mitotic kinesin microtubule-associated protein Eg5 (Kif11) siRNA
tatacagcagaaatctaaggata

SEQ ID NO: 2531 - DNA, 23 bp, Artificial Sequence
  Description of Artificial Sequence: Synthetic oligonucleotide
  Mitotic kinesin microtubule-associated protein Eg5 (Kif11) siRNA
atacagcagaaatctaaggatat

SEQ ID NO: 2532 - DNA, 23 bp, Artificial Sequence
  Description of Artificial Sequence: Synthetic oligonucleotide
  Mitotic kinesin microtubule-associated protein Eg5 (Kif11) siRNA
tacagcagaaatctaaggatata

SEQ ID NO: 2533 - DNA, 23 bp, Artificial Sequence
  Description of Artificial Sequence: Synthetic oligonucleotide
  Mitotic kinesin microtubule-associated protein Eg5 (Kif11) siRNA
acagcagaaatctaaggatatag

SEQ ID NO: 2534 - DNA, 23 bp, Artificial Sequence
  Description of Artificial Sequence: Synthetic oligonucleotide
  Mitotic kinesin microtubule-associated protein Eg5 (Kif11) siRNA
cagcagaaatctaaggatatagt

SEQ ID NO: 2535 - DNA, 23 bp, Artificial Sequence
  Description of Artificial Sequence: Synthetic oligonucleotide
  Mitotic kinesin microtubule-associated protein Eg5 (Kif11) siRNA
agcagaaatctaaggatatagtc

SEQ ID NO: 2536 - DNA, 23 bp, Artificial Sequence
  Description of Artificial Sequence: Synthetic oligonucleotide
  Mitotic kinesin microtubule-associated protein Eg5 (Kif11) siRNA
gcagaaatctaaggatatagtca

SEQ ID NO: 2537 - DNA, 23 bp, Artificial Sequence
  Description of Artificial Sequence: Synthetic oligonucleotide
  Mitotic kinesin microtubule-associated protein Eg5 (Kif11) siRNA
cagaaatctaaggatatagtcaa

SEQ ID NO: 2538 - DNA, 23 bp, Artificial Sequence
  Description of Artificial Sequence: Synthetic oligonucleotide
  Mitotic kinesin microtubule-associated protein Eg5 (Kif11) siRNA
agaaatctaaggatatagtcaac

SEQ ID NO: 2539 - DNA, 23 bp, Artificial Sequence
  Description of Artificial Sequence: Synthetic oligonucleotide
  Mitotic kinesin microtubule-associated protein Eg5 (Kif11) siRNA
gaaatctaaggatatagtcaaca

SEQ ID NO: 2540 - DNA, 23 bp, Artificial Sequence
  Description of Artificial Sequence: Synthetic oligonucleotide
  Mitotic kinesin microtubule-associated protein Eg5 (Kif11) siRNA
aaatctaaggatatagtcaacaa

SEQ ID NO: 2541 - DNA, 23 bp, Artificial Sequence
  Description of Artificial Sequence: Synthetic oligonucleotide
  Mitotic kinesin microtubule-associated protein Eg5 (Kif11) siRNA
aatctaaggatatagtcaacaaa

SEQ ID NO: 2542 - DNA, 23 bp, Artificial Sequence
  Description of Artificial Sequence: Synthetic oligonucleotide
  Mitotic kinesin microtubule-associated protein Eg5 (Kif11) siRNA
atctaaggatatagtcaacaaaa

SEQ ID NO: 2543 - DNA, 23 bp, Artificial Sequence
  Description of Artificial Sequence: Synthetic oligonucleotide
  Mitotic kinesin microtubule-associated protein Eg5 (Kif11) siRNA
tctaaggatatagtcaacaaaat

SEQ ID NO: 2544 - DNA, 23 bp, Artificial Sequence
  Description of Artificial Sequence: Synthetic oligonucleotide
  Mitotic kinesin microtubule-associated protein Eg5 (Kif11) siRNA
ctaaggatatagtcaacaaaatg

SEQ ID NO: 2545 - DNA, 23 bp, Artificial Sequence
  Description of Artificial Sequence: Synthetic oligonucleotide
  Mitotic kinesin microtubule-associated protein Eg5 (Kif11) siRNA
taaggatatagtcaacaaaatga

SEQ ID NO: 2546 - DNA, 23 bp, Artificial Sequence
  Description of Artificial Sequence: Synthetic oligonucleotide
  Mitotic kinesin microtubule-associated protein Eg5 (Kif11) siRNA
aaggatatagtcaacaaaatgac

SEQ ID NO: 2547 - DNA, 23 bp, Artificial Sequence
  Description of Artificial Sequence: Synthetic oligonucleotide
  Mitotic kinesin microtubule-associated protein Eg5 (Kif11) siRNA
aggatatagtcaacaaaatgact

SEQ ID NO: 2548 - DNA, 23 bp, Artificial Sequence
  Description of Artificial Sequence: Synthetic oligonucleotide
  Mitotic kinesin microtubule-associated protein Eg5 (Kif11) siRNA
ggatatagtcaacaaaatgactt

SEQ ID NO: 2549 - DNA, 23 bp, Artificial Sequence
  Description of Artificial Sequence: Synthetic oligonucleotide
  Mitotic kinesin microtubule-associated protein Eg5 (Kif11) siRNA
gatatagtcaacaaaatgacttt

SEQ ID NO: 2550 - DNA, 23 bp, Artificial Sequence
  Description of Artificial Sequence: Synthetic oligonucleotide
  Mitotic kinesin microtubule-associated protein Eg5 (Kif11) siRNA
atatagtcaacaaaatgactttt

SEQ ID NO: 2551 - DNA, 23 bp, Artificial Sequence
  Description of Artificial Sequence: Synthetic oligonucleotide
  Mitotic kinesin microtubule-associated protein Eg5 (Kif11) siRNA
tatagtcaacaaaatgacttttc

SEQ ID NO: 2552 - DNA, 23 bp, Artificial Sequence
  Description of Artificial Sequence: Synthetic oligonucleotide
  Mitotic kinesin microtubule-associated protein Eg5 (Kif11) siRNA
atagtcaacaaaatgacttttca

SEQ ID NO: 2553 - DNA, 23 bp, Artificial Sequence
  Description of Artificial Sequence: Synthetic oligonucleotide
  Mitotic kinesin microtubule-associated protein Eg5 (Kif11) siRNA
tagtcaacaaaatgacttttcac

SEQ ID NO: 2554 - DNA, 23 bp, Artificial Sequence
  Description of Artificial Sequence: Synthetic oligonucleotide
  Mitotic kinesin microtubule-associated protein Eg5 (Kif11) siRNA
agtcaacaaaatgacttttcaca

SEQ ID NO: 2555 - DNA, 23 bp, Artificial Sequence
  Description of Artificial Sequence: Synthetic oligonucleotide
  Mitotic kinesin microtubule-associated protein Eg5 (Kif11) siRNA
gtcaacaaaatgacttttcacag

SEQ ID NO: 2556 - DNA, 23 bp, Artificial Sequence
  Description of Artificial Sequence: Synthetic oligonucleotide
  Mitotic kinesin microtubule-associated protein Eg5 (Kif11) siRNA
tcaacaaaatgacttttcacagt

SEQ ID NO: 2557 - DNA, 23 bp, Artificial Sequence
  Description of Artificial Sequence: Synthetic oligonucleotide
  Mitotic kinesin microtubule-associated protein Eg5 (Kif11) siRNA
caacaaaatgacttttcacagtc

SEQ ID NO: 2558 - DNA, 23 bp, Artificial Sequence
  Description of Artificial Sequence: Synthetic oligonucleotide
  Mitotic kinesin microtubule-associated protein Eg5 (Kif11) siRNA
aacaaaatgacttttcacagtca

SEQ ID NO: 2559 - DNA, 23 bp, Artificial Sequence
  Description of Artificial Sequence: Synthetic oligonucleotide
  Mitotic kinesin microtubule-associated protein Eg5 (Kif11) siRNA
acaaaatgacttttcacagtcaa

SEQ ID NO: 2560 - DNA, 23 bp, Artificial Sequence
  Description of Artificial Sequence: Synthetic oligonucleotide
  Mitotic kinesin microtubule-associated protein Eg5 (Kif11) siRNA
caaaatgacttttcacagtcaaa

SEQ ID NO: 2561 - DNA, 23 bp, Artificial Sequence
  Description of Artificial Sequence: Synthetic oligonucleotide
  Mitotic kinesin microtubule-associated protein Eg5 (Kif11) siRNA
aaaatgacttttcacagtcaaaa

SEQ ID NO: 2562 - DNA, 23 bp, Artificial Sequence
  Description of Artificial Sequence: Synthetic oligonucleotide
  Mitotic kinesin microtubule-associated protein Eg5 (Kif11) siRNA
aaatgacttttcacagtcaaaaa

SEQ ID NO: 2563 - DNA, 23 bp, Artificial Sequence
  Description of Artificial Sequence: Synthetic oligonucleotide
  Mitotic kinesin microtubule-associated protein Eg5 (Kif11) siRNA
aatgacttttcacagtcaaaaat

SEQ ID NO: 2564 - DNA, 23 bp, Artificial Sequence
  Description of Artificial Sequence: Synthetic oligonucleotide
  Mitotic kinesin microtubule-associated protein Eg5 (Kif11) siRNA
atgacttttcacagtcaaaaatt

SEQ ID NO: 2565 - DNA, 23 bp, Artificial Sequence
  Description of Artificial Sequence: Synthetic oligonucleotide
  Mitotic kinesin microtubule-associated protein Eg5 (Kif11) siRNA
tgacttttcacagtcaaaaattt

SEQ ID NO: 2566 - DNA, 23 bp, Artificial Sequence
  Description of Artificial Sequence: Synthetic oligonucleotide
  Mitotic kinesin microtubule-associated protein Eg5 (Kif11) siRNA
gacttttcacagtcaaaaatttt

SEQ ID NO: 2567 - DNA, 23 bp, Artificial Sequence
  Description of Artificial Sequence: Synthetic oligonucleotide
  Mitotic kinesin microtubule-associated protein Eg5 (Kif11) siRNA
acttttcacagtcaaaaattttg

SEQ ID NO: 2568 - DNA, 23 bp, Artificial Sequence
  Description of Artificial Sequence: Synthetic oligonucleotide
  Mitotic kinesin microtubule-associated protein Eg5 (Kif11) siRNA
cttttcacagtcaaaaattttgt

SEQ ID NO: 2569 - DNA, 23 bp, Artificial Sequence
  Description of Artificial Sequence: Synthetic oligonucleotide
  Mitotic kinesin microtubule-associated protein Eg5 (Kif11) siRNA
ttttcacagtcaaaaattttgtg

SEQ ID NO: 2570 - DNA, 23 bp, Artificial Sequence
  Description of Artificial Sequence: Synthetic oligonucleotide
  Mitotic kinesin microtubule-associated protein Eg5 (Kif11) siRNA
tttcacagtcaaaaattttgtgc

SEQ ID NO: 2571 - DNA, 23 bp, Artificial Sequence
  Description of Artificial Sequence: Synthetic oligonucleotide
  Mitotic kinesin microtubule-associated protein Eg5 (Kif11) siRNA
ttcacagtcaaaaattttgtgct

SEQ ID NO: 2572 - DNA, 23 bp, Artificial Sequence
  Description of Artificial Sequence: Synthetic oligonucleotide
  Mitotic kinesin microtubule-associated protein Eg5 (Kif11) siRNA
tcacagtcaaaaattttgtgctg

SEQ ID NO: 2573 - DNA, 23 bp, Artificial Sequence
  Description of Artificial Sequence: Synthetic oligonucleotide
  Mitotic kinesin microtubule-associated protein Eg5 (Kif11) siRNA
cacagtcaaaaattttgtgctga

SEQ ID NO: 2574 - DNA, 23 bp, Artificial Sequence
  Description of Artificial Sequence: Synthetic oligonucleotide
  Mitotic kinesin microtubule-associated protein Eg5 (Kif11) siRNA
acagtcaaaaattttgtgctgat

SEQ ID NO: 2575 - DNA, 23 bp, Artificial Sequence
  Description of Artificial Sequence: Synthetic oligonucleotide
  Mitotic kinesin microtubule-associated protein Eg5 (Kif11) siRNA
cagtcaaaaattttgtgctgatt

SEQ ID NO: 2576 - DNA, 23 bp, Artificial Sequence
  Description of Artificial Sequence: Synthetic oligonucleotide
  Mitotic kinesin microtubule-associated protein Eg5 (Kif11) siRNA
agtcaaaaattttgtgctgattc

SEQ ID NO: 2577 - DNA, 23 bp, Artificial Sequence
  Description of Artificial Sequence: Synthetic oligonucleotide
  Mitotic kinesin microtubule-associated protein Eg5 (Kif11) siRNA
gtcaaaaattttgtgctgattct

SEQ ID NO: 2578 - DNA, 23 bp, Artificial Sequence
  Description of Artificial Sequence: Synthetic oligonucleotide
  Mitotic kinesin microtubule-associated protein Eg5 (Kif11) siRNA
tcaaaaattttgtgctgattctg

SEQ ID NO: 2579 - DNA, 23 bp, Artificial Sequence
  Description of Artificial Sequence: Synthetic oligonucleotide
  Mitotic kinesin microtubule-associated protein Eg5 (Kif11) siRNA
caaaaattttgtgctgattctga

SEQ ID NO: 2580 - DNA, 23 bp, Artificial Sequence
  Description of Artificial Sequence: Synthetic oligonucleotide
  Mitotic kinesin microtubule-associated protein Eg5 (Kif11) siRNA
aaaaattttgtgctgattctgat

SEQ ID NO: 2581 - DNA, 23 bp, Artificial Sequence
  Description of Artificial Sequence: Synthetic oligonucleotide
  Mitotic kinesin microtubule-associated protein Eg5 (Kif11) siRNA
aaaattttgtgctgattctgatg

SEQ ID NO: 2582 - DNA, 23 bp, Artificial Sequence
  Description of Artificial Sequence: Synthetic oligonucleotide
  Mitotic kinesin microtubule-associated protein Eg5 (Kif11) siRNA
aaattttgtgctgattctgatgg

SEQ ID NO: 2583 - DNA, 23 bp, Artificial Sequence
  Description of Artificial Sequence: Synthetic oligonucleotide
  Mitotic kinesin microtubule-associated protein Eg5 (Kif11) siRNA
aattttgtgctgattctgatggc

SEQ ID NO: 2584 - DNA, 23 bp, Artificial Sequence
  Description of Artificial Sequence: Synthetic oligonucleotide
  Mitotic kinesin microtubule-associated protein Eg5 (Kif11) siRNA
attttgtgctgattctgatggct

SEQ ID NO: 2585 - DNA, 23 bp, Artificial Sequence
  Description of Artificial Sequence: Synthetic oligonucleotide
  Mitotic kinesin microtubule-associated protein Eg5 (Kif11) siRNA
ttttgtgctgattctgatggctt

SEQ ID NO: 2586 - DNA, 23 bp, Artificial Sequence
  Description of Artificial Sequence: Synthetic oligonucleotide
  Mitotic kinesin microtubule-associated protein Eg5 (Kif11) siRNA
tttgtgctgattctgatggcttc

SEQ ID NO: 2587 - DNA, 23 bp, Artificial Sequence
  Description of Artificial Sequence: Synthetic oligonucleotide
  Mitotic kinesin microtubule-associated protein Eg5 (Kif11) siRNA
ttgtgctgattctgatggcttct

SEQ ID NO: 2588 - DNA, 23 bp, Artificial Sequence
  Description of Artificial Sequence: Synthetic oligonucleotide
  Mitotic kinesin microtubule-associated protein Eg5 (Kif11) siRNA
tgtgctgattctgatggcttctc

SEQ ID NO: 2589 - DNA, 23 bp, Artificial Sequence
  Description of Artificial Sequence: Synthetic oligonucleotide
  Mitotic kinesin microtubule-associated protein Eg5 (Kif11) siRNA
gtgctgattctgatggcttctca

SEQ ID NO: 2590 - DNA, 23 bp, Artificial Sequence
  Description of Artificial Sequence: Synthetic oligonucleotide
  Mitotic kinesin microtubule-associated protein Eg5 (Kif11) siRNA
tgctgattctgatggcttctcac

SEQ ID NO: 2591 - DNA, 23 bp, Artificial Sequence
  Description of Artificial Sequence: Synthetic oligonucleotide
  Mitotic kinesin microtubule-associated protein Eg5 (Kif11) siRNA
gctgattctgatggcttctcaca

SEQ ID NO: 2592 - DNA, 23 bp, Artificial Sequence
  Description of Artificial Sequence: Synthetic oligonucleotide
  Mitotic kinesin microtubule-associated protein Eg5 (Kif11) siRNA
ctgattctgatggcttctcacag

SEQ ID NO: 2593 - DNA, 23 bp, Artificial Sequence
  Description of Artificial Sequence: Synthetic oligonucleotide
  Mitotic kinesin microtubule-associated protein Eg5 (Kif11) siRNA
tgattctgatggcttctcacagg

SEQ ID NO: 2594 - DNA, 23 bp, Artificial Sequence
  Description of Artificial Sequence: Synthetic oligonucleotide
  Mitotic kinesin microtubule-associated protein Eg5 (Kif11) siRNA
gattctgatggcttctcacagga

SEQ ID NO: 2595 - DNA, 23 bp, Artificial Sequence
  Description of Artificial Sequence: Synthetic oligonucleotide
  Mitotic kinesin microtubule-associated protein Eg5 (Kif11) siRNA
attctgatggcttctcacaggaa

SEQ ID NO: 2596 - DNA, 23 bp, Artificial Sequence
  Description of Artificial Sequence: Synthetic oligonucleotide
  Mitotic kinesin microtubule-associated protein Eg5 (Kif11) siRNA
ttctgatggcttctcacaggaac

SEQ ID NO: 2597 - DNA, 23 bp, Artificial Sequence
  Description of Artificial Sequence: Synthetic oligonucleotide
  Mitotic kinesin microtubule-associated protein Eg5 (Kif11) siRNA
tctgatggcttctcacaggaact

SEQ ID NO: 2598 - DNA, 23 bp, Artificial Sequence
  Description of Artificial Sequence: Synthetic oligonucleotide
  Mitotic kinesin microtubule-associated protein Eg5 (Kif11) siRNA
ctgatggcttctcacaggaactc

SEQ ID NO: 2599 - DNA, 23 bp, Artificial Sequence
  Description of Artificial Sequence: Synthetic oligonucleotide
  Mitotic kinesin microtubule-associated protein Eg5 (Kif11) siRNA
tgatggcttctcacaggaactca

SEQ ID NO: 2600 - DNA, 23 bp, Artificial Sequence
  Description of Artificial Sequence: Synthetic oligonucleotide
  Mitotic kinesin microtubule-associated protein Eg5 (Kif11) siRNA
gatggcttctcacaggaactcag

SEQ ID NO: 2601 - DNA, 23 bp, Artificial Sequence
  Description of Artificial Sequence: Synthetic oligonucleotide
  Mitotic kinesin microtubule-associated protein Eg5 (Kif11) siRNA
atggcttctcacaggaactcaga

SEQ ID NO: 2602 - DNA, 23 bp, Artificial Sequence
  Description of Artificial Sequence: Synthetic oligonucleotide
  Mitotic kinesin microtubule-associated protein Eg5 (Kif11) siRNA
tggcttctcacaggaactcagaa

SEQ ID NO: 2603 - DNA, 23 bp, Artificial Sequence
  Description of Artificial Sequence: Synthetic oligonucleotide
  Mitotic kinesin microtubule-associated protein Eg5 (Kif11) siRNA
ggcttctcacaggaactcagaaa

SEQ ID NO: 2604 - DNA, 23 bp, Artificial Sequence
  Description of Artificial Sequence: Synthetic oligonucleotide
  Mitotic kinesin microtubule-associated protein Eg5 (Kif11) siRNA
gcttctcacaggaactcagaaat

SEQ ID NO: 2605 - DNA, 23 bp, Artificial Sequence
  Description of Artificial Sequence: Synthetic oligonucleotide
  Mitotic kinesin microtubule-associated protein Eg5 (Kif11) siRNA
cttctcacaggaactcagaaatt

SEQ ID NO: 2606 - DNA, 23 bp, Artificial Sequence
  Description of Artificial Sequence: Synthetic oligonucleotide
  Mitotic kinesin microtubule-associated protein Eg5 (Kif11) siRNA
ttctcacaggaactcagaaattt

SEQ ID NO: 2607 - DNA, 23 bp, Artificial Sequence
  Description of Artificial Sequence: Synthetic oligonucleotide
  Mitotic kinesin microtubule-associated protein Eg5 (Kif11) siRNA
tctcacaggaactcagaaatttt

SEQ ID NO: 2608 - DNA, 23 bp, Artificial Sequence
  Description of Artificial Sequence: Synthetic oligonucleotide
  Mitotic kinesin microtubule-associated protein Eg5 (Kif11) siRNA
ctcacaggaactcagaaatttta

SEQ ID NO: 2609 - DNA, 23 bp, Artificial Sequence
  Description of Artificial Sequence: Synthetic oligonucleotide
  Mitotic kinesin microtubule-associated protein Eg5 (Kif11) siRNA
tcacaggaactcagaaattttaa

SEQ ID NO: 2610 - DNA, 23 bp, Artificial Sequence
  Description of Artificial Sequence: Synthetic oligonucleotide
  Mitotic kinesin microtubule-associated protein Eg5 (Kif11) siRNA
cacaggaactcagaaattttaac

SEQ ID NO: 2611 - DNA, 23 bp, Artificial Sequence
  Description of Artificial Sequence: Synthetic oligonucleotide
  Mitotic kinesin microtubule-associated protein Eg5 (Kif11) siRNA
acaggaactcagaaattttaacc

SEQ ID NO: 2612 - DNA, 23 bp, Artificial Sequence
  Description of Artificial Sequence: Synthetic oligonucleotide
  Mitotic kinesin microtubule-associated protein Eg5 (Kif11) siRNA
caggaactcagaaattttaacca

SEQ ID NO: 2613 - DNA, 23 bp, Artificial Sequence
  Description of Artificial Sequence: Synthetic oligonucleotide
  Mitotic kinesin microtubule-associated protein Eg5 (Kif11) siRNA
aggaactcagaaattttaaccaa

SEQ ID NO: 2614 - DNA, 23 bp, Artificial Sequence
  Description of Artificial Sequence: Synthetic oligonucleotide
  Mitotic kinesin microtubule-associated protein Eg5 (Kif11) siRNA
ggaactcagaaattttaaccaag

SEQ ID NO: 2615 - DNA, 23 bp, Artificial Sequence
  Description of Artificial Sequence: Synthetic oligonucleotide
  Mitotic kinesin microtubule-associated protein Eg5 (Kif11) siRNA
gaactcagaaattttaaccaaga

SEQ ID NO: 2616 - DNA, 23 bp, Artificial Sequence
  Description of Artificial Sequence: Synthetic oligonucleotide
  Mitotic kinesin microtubule-associated protein Eg5 (Kif11) siRNA
aactcagaaattttaaccaagaa

SEQ ID NO: 2617 - DNA, 23 bp, Artificial Sequence
  Description of Artificial Sequence: Synthetic oligonucleotide
  Mitotic kinesin microtubule-associated protein Eg5 (Kif11) siRNA
actcagaaattttaaccaagaag

SEQ ID NO: 2618 - DNA, 23 bp, Artificial Sequence
  Description of Artificial Sequence: Synthetic oligonucleotide
  Mitotic kinesin microtubule-associated protein Eg5 (Kif11) siRNA
ctcagaaattttaaccaagaagg

SEQ ID NO: 2619 - DNA, 23 bp, Artificial Sequence
  Description of Artificial Sequence: Synthetic oligonucleotide
  Mitotic kinesin microtubule-associated protein Eg5 (Kif11) siRNA
tcagaaattttaaccaagaaggt

SEQ ID NO: 2620 - DNA, 23 bp, Artificial Sequence
  Description of Artificial Sequence: Synthetic oligonucleotide
  Mitotic kinesin microtubule-associated protein Eg5 (Kif11) siRNA
cagaaattttaaccaagaaggta

SEQ ID NO: 2621 - DNA, 23 bp, Artificial Sequence
  Description of Artificial Sequence: Synthetic oligonucleotide
  Mitotic kinesin microtubule-associated protein Eg5 (Kif11) siRNA
agaaattttaaccaagaaggtac

SEQ ID NO: 2622 - DNA, 23 bp, Artificial Sequence
  Description of Artificial Sequence: Synthetic oligonucleotide
  Mitotic kinesin microtubule-associated protein Eg5 (Kif11) siRNA
gaaattttaaccaagaaggtaca

SEQ ID NO: 2623 - DNA, 23 bp, Artificial Sequence
  Description of Artificial Sequence: Synthetic oligonucleotide
  Mitotic kinesin microtubule-associated protein Eg5 (Kif11) siRNA
aaattttaaccaagaaggtacaa

SEQ ID NO: 2624 - DNA, 23 bp, Artificial Sequence
  Description of Artificial Sequence: Synthetic oligonucleotide
  Mitotic kinesin microtubule-associated protein Eg5 (Kif11) siRNA
aattttaaccaagaaggtacaaa

SEQ ID NO: 2625 - DNA, 23 bp, Artificial Sequence
  Description of Artificial Sequence: Synthetic oligonucleotide
  Mitotic kinesin microtubule-associated protein Eg5 (Kif11) siRNA
attttaaccaagaaggtacaaaa

SEQ ID NO: 2626 - DNA, 23 bp, Artificial Sequence
  Description of Artificial Sequence: Synthetic oligonucleotide
  Mitotic kinesin microtubule-associated protein Eg5 (Kif11) siRNA
ttttaaccaagaaggtacaaaat

SEQ ID NO: 2627 - DNA, 23 bp, Artificial Sequence
  Description of Artificial Sequence: Synthetic oligonucleotide
  Mitotic kinesin microtubule-associated protein Eg5 (Kif11) siRNA
tttaaccaagaaggtacaaaatt

SEQ ID NO: 2628 - DNA, 23 bp, Artificial Sequence
  Description of Artificial Sequence: Synthetic oligonucleotide
  Mitotic kinesin microtubule-associated protein Eg5 (Kif11) siRNA
ttaaccaagaaggtacaaaattg

SEQ ID NO: 2629 - DNA, 23 bp, Artificial Sequence
  Description of Artificial Sequence: Synthetic oligonucleotide
  Mitotic kinesin microtubule-associated protein Eg5 (Kif11) siRNA
taaccaagaaggtacaaaattgg

SEQ ID NO: 2630 - DNA, 23 bp, Artificial Sequence
  Description of Artificial Sequence: Synthetic oligonucleotide
  Mitotic kinesin microtubule-associated protein Eg5 (Kif11) siRNA
aaccaagaaggtacaaaattggt

SEQ ID NO: 2631 - DNA, 23 bp, Artificial Sequence
  Description of Artificial Sequence: Synthetic oligonucleotide
  Mitotic kinesin microtubule-associated protein Eg5 (Kif11) siRNA
accaagaaggtacaaaattggtt

SEQ ID NO: 2632 - DNA, 23 bp, Artificial Sequence
  Description of Artificial Sequence: Synthetic oligonucleotide
  Mitotic kinesin microtubule-associated protein Eg5 (Kif11) siRNA
ccaagaaggtacaaaattggttg

SEQ ID NO: 2633 - DNA, 23 bp, Artificial Sequence
  Description of Artificial Sequence: Synthetic oligonucleotide
  Mitotic kinesin microtubule-associated protein Eg5 (Kif11) siRNA
caagaaggtacaaaattggttga

SEQ ID NO: 2634 - DNA, 23 bp, Artificial Sequence
  Description of Artificial Sequence: Synthetic oligonucleotide
  Mitotic kinesin microtubule-associated protein Eg5 (Kif11) siRNA
aagaaggtacaaaattggttgaa

SEQ ID NO: 2635 - DNA, 23 bp, Artificial Sequence
  Description of Artificial Sequence: Synthetic oligonucleotide
  Mitotic kinesin microtubule-associated protein Eg5 (Kif11) siRNA
agaaggtacaaaattggttgaag

SEQ ID NO: 2636 - DNA, 23 bp, Artificial Sequence
  Description of Artificial Sequence: Synthetic oligonucleotide
  Mitotic kinesin microtubule-associated protein Eg5 (Kif11) siRNA
gaaggtacaaaattggttgaaga

SEQ ID NO: 2637 - DNA, 23 bp, Artificial Sequence
  Description of Artificial Sequence: Synthetic oligonucleotide
  Mitotic kinesin microtubule-associated protein Eg5 (Kif11) siRNA
aaggtacaaaattggttgaagaa

SEQ ID NO: 2638 - DNA, 23 bp, Artificial Sequence
  Description of Artificial Sequence: Synthetic oligonucleotide
  Mitotic kinesin microtubule-associated protein Eg5 (Kif11) siRNA
aggtacaaaattggttgaagaat

SEQ ID NO: 2639 - DNA, 23 bp, Artificial Sequence
  Description of Artificial Sequence: Synthetic oligonucleotide
  Mitotic kinesin microtubule-associated protein Eg5 (Kif11) siRNA
ggtacaaaattggttgaagaatc

SEQ ID NO: 2640 - DNA, 23 bp, Artificial Sequence
  Description of Artificial Sequence: Synthetic oligonucleotide
  Mitotic kinesin microtubule-associated protein Eg5 (Kif11) siRNA
gtacaaaattggttgaagaatct

SEQ ID NO: 2641 - DNA, 23 bp, Artificial Sequence
  Description of Artificial Sequence: Synthetic oligonucleotide
  Mitotic kinesin microtubule-associated protein Eg5 (Kif11) siRNA
tacaaaattggttgaagaatctg

SEQ ID NO: 2642 - DNA, 23 bp, Artificial Sequence
  Description of Artificial Sequence: Synthetic oligonucleotide
  Mitotic kinesin microtubule-associated protein Eg5 (Kif11) siRNA
acaaaattggttgaagaatctgt

SEQ ID NO: 2643 - DNA, 23 bp, Artificial Sequence
  Description of Artificial Sequence: Synthetic oligonucleotide
  Mitotic kinesin microtubule-associated protein Eg5 (Kif11) siRNA
caaaattggttgaagaatctgtg

SEQ ID NO: 2644 - DNA, 23 bp, Artificial Sequence
  Description of Artificial Sequence: Synthetic oligonucleotide
  Mitotic kinesin microtubule-associated protein Eg5 (Kif11) siRNA
aaaattggttgaagaatctgtga

SEQ ID NO: 2645 - DNA, 23 bp, Artificial Sequence
  Description of Artificial Sequence: Synthetic oligonucleotide
  Mitotic kinesin microtubule-associated protein Eg5 (Kif11) siRNA
aaattggttgaagaatctgtgaa

SEQ ID NO: 2646 - DNA, 23 bp, Artificial Sequence
  Description of Artificial Sequence: Synthetic oligonucleotide
  Mitotic kinesin microtubule-associated protein Eg5 (Kif11) siRNA
aattggttgaagaatctgtgaaa

SEQ ID NO: 2647 - DNA, 23 bp, Artificial Sequence
  Description of Artificial Sequence: Synthetic oligonucleotide
  Mitotic kinesin microtubule-associated protein Eg5 (Kif11) siRNA
attggttgaagaatctgtgaaac

SEQ ID NO: 2648 - DNA, 23 bp, Artificial Sequence
  Description of Artificial Sequence: Synthetic oligonucleotide
  Mitotic kinesin microtubule-associated protein Eg5 (Kif11) siRNA
ttggttgaagaatctgtgaaaca

SEQ ID NO: 2649 - DNA, 23 bp, Artificial Sequence
  Description of Artificial Sequence: Synthetic oligonucleotide
  Mitotic kinesin microtubule-associated protein Eg5 (Kif11) siRNA
tggttgaagaatctgtgaaacac

SEQ ID NO: 2650 - DNA, 23 bp, Artificial Sequence
  Description of Artificial Sequence: Synthetic oligonucleotide
  Mitotic kinesin microtubule-associated protein Eg5 (Kif11) siRNA
ggttgaagaatctgtgaaacact

SEQ ID NO: 2651 - DNA, 23 bp, Artificial Sequence
  Description of Artificial Sequence: Synthetic oligonucleotide
  Mitotic kinesin microtubule-associated protein Eg5 (Kif11) siRNA
gttgaagaatctgtgaaacactc

SEQ ID NO: 2652 - DNA, 23 bp, Artificial Sequence
  Description of Artificial Sequence: Synthetic oligonucleotide
  Mitotic kinesin microtubule-associated protein Eg5 (Kif11) siRNA
ttgaagaatctgtgaaacactct

SEQ ID NO: 2653 - DNA, 23 bp, Artificial Sequence
  Description of Artificial Sequence: Synthetic oligonucleotide
  Mitotic kinesin microtubule-associated protein Eg5 (Kif11) siRNA
tgaagaatctgtgaaacactctg

SEQ ID NO: 2654 - DNA, 23 bp, Artificial Sequence
  Description of Artificial Sequence: Synthetic oligonucleotide
  Mitotic kinesin microtubule-associated protein Eg5 (Kif11) siRNA
gaagaatctgtgaaacactctga

SEQ ID NO: 2655 - DNA, 23 bp, Artificial Sequence
  Description of Artificial Sequence: Synthetic oligonucleotide
  Mitotic kinesin microtubule-associated protein Eg5 (Kif11) siRNA
aagaatctgtgaaacactctgat

SEQ ID NO: 2656 - DNA, 23 bp, Artificial Sequence
  Description of Artificial Sequence: Synthetic oligonucleotide
  Mitotic kinesin microtubule-associated protein Eg5 (Kif11) siRNA
agaatctgtgaaacactctgata

SEQ ID NO: 2657 - DNA, 23 bp, Artificial Sequence
  Description of Artificial Sequence: Synthetic oligonucleotide
  Mitotic kinesin microtubule-associated protein Eg5 (Kif11) siRNA
gaatctgtgaaacactctgataa

SEQ ID NO: 2658 - DNA, 23 bp, Artificial Sequence
  Description of Artificial Sequence: Synthetic oligonucleotide
  Mitotic kinesin microtubule-associated protein Eg5 (Kif11) siRNA
aatctgtgaaacactctgataaa

SEQ ID NO: 2659 - DNA, 23 bp, Artificial Sequence
  Description of Artificial Sequence: Synthetic oligonucleotide
  Mitotic kinesin microtubule-associated protein Eg5 (Kif11) siRNA
atctgtgaaacactctgataaac

SEQ ID NO: 2660 - DNA, 23 bp, Artificial Sequence
  Description of Artificial Sequence: Synthetic oligonucleotide
  Mitotic kinesin microtubule-associated protein Eg5 (Kif11) siRNA
tctgtgaaacactctgataaact

SEQ ID NO: 2661 - DNA, 23 bp, Artificial Sequence
  Description of Artificial Sequence: Synthetic oligonucleotide
  Mitotic kinesin microtubule-associated protein Eg5 (Kif11) siRNA
ctgtgaaacactctgataaactc

SEQ ID NO: 2662 - DNA, 23 bp, Artificial Sequence
  Description of Artificial Sequence: Synthetic oligonucleotide
  Mitotic kinesin microtubule-associated protein Eg5 (Kif11) siRNA
tgtgaaacactctgataaactca

SEQ ID NO: 2663 - DNA, 23 bp, Artificial Sequence
  Description of Artificial Sequence: Synthetic oligonucleotide
  Mitotic kinesin microtubule-associated protein Eg5 (Kif11) siRNA
gtgaaacactctgataaactcaa

SEQ ID NO: 2664 - DNA, 23 bp, Artificial Sequence
  Description of Artificial Sequence: Synthetic oligonucleotide
  Mitotic kinesin microtubule-associated protein Eg5 (Kif11) siRNA
tgaaacactctgataaactcaat

SEQ ID NO: 2665 - DNA, 23 bp, Artificial Sequence
  Description of Artificial Sequence: Synthetic oligonucleotide
  Mitotic kinesin microtubule-associated protein Eg5 (Kif11) siRNA
gaaacactctgataaactcaatg

SEQ ID NO: 2666 - DNA, 23 bp, Artificial Sequence
  Description of Artificial Sequence: Synthetic oligonucleotide
  Mitotic kinesin microtubule-associated protein Eg5 (Kif11) siRNA
aaacactctgataaactcaatgg

SEQ ID NO: 2667 - DNA, 23 bp, Artificial Sequence
  Description of Artificial Sequence: Synthetic oligonucleotide
  Mitotic kinesin microtubule-associated protein Eg5 (Kif11) siRNA
aacactctgataaactcaatggc

SEQ ID NO: 2668 - DNA, 23 bp, Artificial Sequence
  Description of Artificial Sequence: Synthetic oligonucleotide
  Mitotic kinesin microtubule-associated protein Eg5 (Kif11) siRNA
acactctgataaactcaatggca

SEQ ID NO: 2669 - DNA, 23 bp, Artificial Sequence
  Description of Artificial Sequence: Synthetic oligonucleotide
  Mitotic kinesin microtubule-associated protein Eg5 (Kif11) siRNA
cactctgataaactcaatggcaa

SEQ ID NO: 2670 - DNA, 23 bp, Artificial Sequence
  Description of Artificial Sequence: Synthetic oligonucleotide
  Mitotic kinesin microtubule-associated protein Eg5 (Kif11) siRNA
actctgataaactcaatggcaac

SEQ ID NO: 2671 - DNA, 23 bp, Artificial Sequence
  Description of Artificial Sequence: Synthetic oligonucleotide
  Mitotic kinesin microtubule-associated protein Eg5 (Kif11) siRNA
ctctgataaactcaatggcaacc

SEQ ID NO: 2672 - DNA, 23 bp, Artificial Sequence
  Description of Artificial Sequence: Synthetic oligonucleotide
  Mitotic kinesin microtubule-associated protein Eg5 (Kif11) siRNA
tctgataaactcaatggcaacct

SEQ ID NO: 2673 - DNA, 23 bp, Artificial Sequence
  Description of Artificial Sequence: Synthetic oligonucleotide
  Mitotic kinesin microtubule-associated protein Eg5 (Kif11) siRNA
ctgataaactcaatggcaacctg

SEQ ID NO: 2674 - DNA, 23 bp, Artificial Sequence
  Description of Artificial Sequence: Synthetic oligonucleotide
  Mitotic kinesin microtubule-associated protein Eg5 (Kif11) siRNA
tgataaactcaatggcaacctgg

SEQ ID NO: 2675 - DNA, 23 bp, Artificial Sequence
  Description of Artificial Sequence: Synthetic oligonucleotide
  Mitotic kinesin microtubule-associated protein Eg5 (Kif11) siRNA
gataaactcaatggcaacctgga

SEQ ID NO: 2676 - DNA, 23 bp, Artificial Sequence
  Description of Artificial Sequence: Synthetic oligonucleotide
  Mitotic kinesin microtubule-associated protein Eg5 (Kif11) siRNA
ataaactcaatggcaacctggaa

SEQ ID NO: 2677 - DNA, 23 bp, Artificial Sequence
  Description of Artificial Sequence: Synthetic oligonucleotide
  Mitotic kinesin microtubule-associated protein Eg5 (Kif11) siRNA
taaactcaatggcaacctggaaa

SEQ ID NO: 2678 - DNA, 23 bp, Artificial Sequence
  Description of Artificial Sequence: Synthetic oligonucleotide
  Mitotic kinesin microtubule-associated protein Eg5 (Kif11) siRNA
aaactcaatggcaacctggaaaa

SEQ ID NO: 2679 - DNA, 23 bp, Artificial Sequence
  Description of Artificial Sequence: Synthetic oligonucleotide
  Mitotic kinesin microtubule-associated protein Eg5 (Kif11) siRNA
aactcaatggcaacctggaaaaa

SEQ ID NO: 2680 - DNA, 23 bp, Artificial Sequence
  Description of Artificial Sequence: Synthetic oligonucleotide
  Mitotic kinesin microtubule-associated protein Eg5 (Kif11) siRNA
actcaatggcaacctggaaaaaa

SEQ ID NO: 2681 - DNA, 23 bp, Artificial Sequence
  Description of Artificial Sequence: Synthetic oligonucleotide
  Mitotic kinesin microtubule-associated protein Eg5 (Kif11) siRNA
ctcaatggcaacctggaaaaaat

SEQ ID NO: 2682 - DNA, 23 bp, Artificial Sequence
  Description of Artificial Sequence: Synthetic oligonucleotide
  Mitotic kinesin microtubule-associated protein Eg5 (Kif11) siRNA
tcaatggcaacctggaaaaaata

SEQ ID NO: 2683 - DNA, 23 bp, Artificial Sequence
  Description of Artificial Sequence: Synthetic oligonucleotide
  Mitotic kinesin microtubule-associated protein Eg5 (Kif11) siRNA
caatggcaacctggaaaaaatat

SEQ ID NO: 2684 - DNA, 23 bp, Artificial Sequence
  Description of Artificial Sequence: Synthetic oligonucleotide
  Mitotic kinesin microtubule-associated protein Eg5 (Kif11) siRNA
aatggcaacctggaaaaaatatc

SEQ ID NO: 2685 - DNA, 23 bp, Artificial Sequence
  Description of Artificial Sequence: Synthetic oligonucleotide
  Mitotic kinesin microtubule-associated protein Eg5 (Kif11) siRNA
atggcaacctggaaaaaatatct

SEQ ID NO: 2686 - DNA, 23 bp, Artificial Sequence
  Description of Artificial Sequence: Synthetic oligonucleotide
  Mitotic kinesin microtubule-associated protein Eg5 (Kif11) siRNA
tggcaacctggaaaaaatatctc

SEQ ID NO: 2687 - DNA, 23 bp, Artificial Sequence
  Description of Artificial Sequence: Synthetic oligonucleotide
  Mitotic kinesin microtubule-associated protein Eg5 (Kif11) siRNA
ggcaacctggaaaaaatatctca

SEQ ID NO: 2688 - DNA, 23 bp, Artificial Sequence
  Description of Artificial Sequence: Synthetic oligonucleotide
  Mitotic kinesin microtubule-associated protein Eg5 (Kif11) siRNA
gcaacctggaaaaaatatctcaa

SEQ ID NO: 2689 - DNA, 23 bp, Artificial Sequence
  Description of Artificial Sequence: Synthetic oligonucleotide
  Mitotic kinesin microtubule-associated protein Eg5 (Kif11) siRNA
caacctggaaaaaatatctcaag

SEQ ID NO: 2690 - DNA, 23 bp, Artificial Sequence
  Description of Artificial Sequence: Synthetic oligonucleotide
  Mitotic kinesin microtubule-associated protein Eg5 (Kif11) siRNA
aacctggaaaaaatatctcaaga

SEQ ID NO: 2691 - DNA, 23 bp, Artificial Sequence
  Description of Artificial Sequence: Synthetic oligonucleotide
  Mitotic kinesin microtubule-associated protein Eg5 (Kif11) siRNA
acctggaaaaaatatctcaagag

SEQ ID NO: 2692 - DNA, 23 bp, Artificial Sequence
  Description of Artificial Sequence: Synthetic oligonucleotide
  Mitotic kinesin microtubule-associated protein Eg5 (Kif11) siRNA
cctggaaaaaatatctcaagaga

SEQ ID NO: 2693 - DNA, 23 bp, Artificial Sequence
  Description of Artificial Sequence: Synthetic oligonucleotide
  Mitotic kinesin microtubule-associated protein Eg5 (Kif11) siRNA
ctggaaaaaatatctcaagagac

SEQ ID NO: 2694 - DNA, 23 bp, Artificial Sequence
  Description of Artificial Sequence: Synthetic oligonucleotide
  Mitotic kinesin microtubule-associated protein Eg5 (Kif11) siRNA
tggaaaaaatatctcaagagact

SEQ ID NO: 2695 - DNA, 23 bp, Artificial Sequence
  Description of Artificial Sequence: Synthetic oligonucleotide
  Mitotic kinesin microtubule-associated protein Eg5 (Kif11) siRNA
ggaaaaaatatctcaagagactg

SEQ ID NO: 2696 - DNA, 23 bp, Artificial Sequence
  Description of Artificial Sequence: Synthetic oligonucleotide
  Mitotic kinesin microtubule-associated protein Eg5 (Kif11) siRNA
gaaaaaatatctcaagagactga

SEQ ID NO: 2697 - DNA, 23 bp, Artificial Sequence
  Description of Artificial Sequence: Synthetic oligonucleotide
  Mitotic kinesin microtubule-associated protein Eg5 (Kif11) siRNA
aaaaaatatctcaagagactgaa

SEQ ID NO: 2698 - DNA, 23 bp, Artificial Sequence
  Description of Artificial Sequence: Synthetic oligonucleotide
  Mitotic kinesin microtubule-associated protein Eg5 (Kif11) siRNA
aaaaatatctcaagagactgaac

SEQ ID NO: 2699 - DNA, 23 bp, Artificial Sequence
  Description of Artificial Sequence: Synthetic oligonucleotide
  Mitotic kinesin microtubule-associated protein Eg5 (Kif11) siRNA
aaaatatctcaagagactgaaca

SEQ ID NO: 2700 - DNA, 23 bp, Artificial Sequence
  Description of Artificial Sequence: Synthetic oligonucleotide
  Mitotic kinesin microtubule-associated protein Eg5 (Kif11) siRNA
aaatatctcaagagactgaacag

SEQ ID NO: 2701 - DNA, 23 bp, Artificial Sequence
  Description of Artificial Sequence: Synthetic oligonucleotide
  Mitotic kinesin microtubule-associated protein Eg5 (Kif11) siRNA
aatatctcaagagactgaacaga

SEQ ID NO: 2702 - DNA, 23 bp, Artificial Sequence
  Description of Artificial Sequence: Synthetic oligonucleotide
  Mitotic kinesin microtubule-associated protein Eg5 (Kif11) siRNA
atatctcaagagactgaacagag

SEQ ID NO: 2703 - DNA, 23 bp, Artificial Sequence
  Description of Artificial Sequence: Synthetic oligonucleotide
  Mitotic kinesin microtubule-associated protein Eg5 (Kif11) siRNA
tatctcaagagactgaacagaga

SEQ ID NO: 2704 - DNA, 23 bp, Artificial Sequence
  Description of Artificial Sequence: Synthetic oligonucleotide
  Mitotic kinesin microtubule-associated protein Eg5 (Kif11) siRNA
atctcaagagactgaacagagat

SEQ ID NO: 2705 - DNA, 23 bp, Artificial Sequence
  Description of Artificial Sequence: Synthetic oligonucleotide
  Mitotic kinesin microtubule-associated protein Eg5 (Kif11) siRNA
tctcaagagactgaacagagatg

SEQ ID NO: 2706 - DNA, 23 bp, Artificial Sequence
  Description of Artificial Sequence: Synthetic oligonucleotide
  Mitotic kinesin microtubule-associated protein Eg5 (Kif11) siRNA
ctcaagagactgaacagagatgt

SEQ ID NO: 2707 - DNA, 23 bp, Artificial Sequence
  Description of Artificial Sequence: Synthetic oligonucleotide
  Mitotic kinesin microtubule-associated protein Eg5 (Kif11) siRNA
tcaagagactgaacagagatgtg

SEQ ID NO: 2708 - DNA, 23 bp, Artificial Sequence
  Description of Artificial Sequence: Synthetic oligonucleotide
  Mitotic kinesin microtubule-associated protein Eg5 (Kif11) siRNA
caagagactgaacagagatgtga

SEQ ID NO: 2709 - DNA, 23 bp, Artificial Sequence
  Description of Artificial Sequence: Synthetic oligonucleotide
  Mitotic kinesin microtubule-associated protein Eg5 (Kif11) siRNA
aagagactgaacagagatgtgaa

SEQ ID NO: 2710 - DNA, 23 bp, Artificial Sequence
  Description of Artificial Sequence: Synthetic oligonucleotide
  Mitotic kinesin microtubule-associated protein Eg5 (Kif11) siRNA
agagactgaacagagatgtgaat

SEQ ID NO: 2711 - DNA, 23 bp, Artificial Sequence
  Description of Artificial Sequence: Synthetic oligonucleotide
  Mitotic kinesin microtubule-associated protein Eg5 (Kif11) siRNA
gagactgaacagagatgtgaatc

SEQ ID NO: 2712 - DNA, 23 bp, Artificial Sequence
  Description of Artificial Sequence: Synthetic oligonucleotide
  Mitotic kinesin microtubule-associated protein Eg5 (Kif11) siRNA
agactgaacagagatgtgaatct

SEQ ID NO: 2713 - DNA, 23 bp, Artificial Sequence
  Description of Artificial Sequence: Synthetic oligonucleotide
  Mitotic kinesin microtubule-associated protein Eg5 (Kif11) siRNA
gactgaacagagatgtgaatctc

SEQ ID NO: 2714 - DNA, 23 bp, Artificial Sequence
  Description of Artificial Sequence: Synthetic oligonucleotide
  Mitotic kinesin microtubule-associated protein Eg5 (Kif11) siRNA
actgaacagagatgtgaatctct

SEQ ID NO: 2715 - DNA, 23 bp, Artificial Sequence
  Description of Artificial Sequence: Synthetic oligonucleotide
  Mitotic kinesin microtubule-associated protein Eg5 (Kif11) siRNA
ctgaacagagatgtgaatctctg

SEQ ID NO: 2716 - DNA, 23 bp, Artificial Sequence
  Description of Artificial Sequence: Synthetic oligonucleotide
  Mitotic kinesin microtubule-associated protein Eg5 (Kif11) siRNA
tgaacagagatgtgaatctctga

SEQ ID NO: 2717 - DNA, 23 bp, Artificial Sequence
  Description of Artificial Sequence: Synthetic oligonucleotide
  Mitotic kinesin microtubule-associated protein Eg5 (Kif11) siRNA
gaacagagatgtgaatctctgaa

SEQ ID NO: 2718 - DNA, 23 bp, Artificial Sequence
  Description of Artificial Sequence: Synthetic oligonucleotide
  Mitotic kinesin microtubule-associated protein Eg5 (Kif11) siRNA
aacagagatgtgaatctctgaac

SEQ ID NO: 2719 - DNA, 23 bp, Artificial Sequence
  Description of Artificial Sequence: Synthetic oligonucleotide
  Mitotic kinesin microtubule-associated protein Eg5 (Kif11) siRNA
acagagatgtgaatctctgaaca

SEQ ID NO: 2720 - DNA, 23 bp, Artificial Sequence
  Description of Artificial Sequence: Synthetic oligonucleotide
  Mitotic kinesin microtubule-associated protein Eg5 (Kif11) siRNA
cagagatgtgaatctctgaacac

SEQ ID NO: 2721 - DNA, 23 bp, Artificial Sequence
  Description of Artificial Sequence: Synthetic oligonucleotide
  Mitotic kinesin microtubule-associated protein Eg5 (Kif11) siRNA
agagatgtgaatctctgaacaca

SEQ ID NO: 2722 - DNA, 23 bp, Artificial Sequence
  Description of Artificial Sequence: Synthetic oligonucleotide
  Mitotic kinesin microtubule-associated protein Eg5 (Kif11) siRNA
gagatgtgaatctctgaacacaa

SEQ ID NO: 2723 - DNA, 23 bp, Artificial Sequence
  Description of Artificial Sequence: Synthetic oligonucleotide
  Mitotic kinesin microtubule-associated protein Eg5 (Kif11) siRNA
agatgtgaatctctgaacacaag

SEQ ID NO: 2724 - DNA, 23 bp, Artificial Sequence
  Description of Artificial Sequence: Synthetic oligonucleotide
  Mitotic kinesin microtubule-associated protein Eg5 (Kif11) siRNA
gatgtgaatctctgaacacaaga

SEQ ID NO: 2725 - DNA, 23 bp, Artificial Sequence
  Description of Artificial Sequence: Synthetic oligonucleotide
  Mitotic kinesin microtubule-associated protein Eg5 (Kif11) siRNA
atgtgaatctctgaacacaagaa

SEQ ID NO: 2726 - DNA, 23 bp, Artificial Sequence
  Description of Artificial Sequence: Synthetic oligonucleotide
  Mitotic kinesin microtubule-associated protein Eg5 (Kif11) siRNA
tgtgaatctctgaacacaagaac

SEQ ID NO: 2727 - DNA, 23 bp, Artificial Sequence
  Description of Artificial Sequence: Synthetic oligonucleotide
  Mitotic kinesin microtubule-associated protein Eg5 (Kif11) siRNA
gtgaatctctgaacacaagaaca

SEQ ID NO: 2728 - DNA, 23 bp, Artificial Sequence
  Description of Artificial Sequence: Synthetic oligonucleotide
  Mitotic kinesin microtubule-associated protein Eg5 (Kif11) siRNA
tgaatctctgaacacaagaacag

SEQ ID NO: 2729 - DNA, 23 bp, Artificial Sequence
  Description of Artificial Sequence: Synthetic oligonucleotide
  Mitotic kinesin microtubule-associated protein Eg5 (Kif11) siRNA
gaatctctgaacacaagaacagt

SEQ ID NO: 2730 - DNA, 23 bp, Artificial Sequence
  Description of Artificial Sequence: Synthetic oligonucleotide
  Mitotic kinesin microtubule-associated protein Eg5 (Kif11) siRNA
aatctctgaacacaagaacagtt

SEQ ID NO: 2731 - DNA, 23 bp, Artificial Sequence
  Description of Artificial Sequence: Synthetic oligonucleotide
  Mitotic kinesin microtubule-associated protein Eg5 (Kif11) siRNA
atctctgaacacaagaacagttt

SEQ ID NO: 2732 - DNA, 23 bp, Artificial Sequence
  Description of Artificial Sequence: Synthetic oligonucleotide
  Mitotic kinesin microtubule-associated protein Eg5 (Kif11) siRNA
tctctgaacacaagaacagttta

SEQ ID NO: 2733 - DNA, 23 bp, Artificial Sequence
  Description of Artificial Sequence: Synthetic oligonucleotide
  Mitotic kinesin microtubule-associated protein Eg5 (Kif11) siRNA
ctctgaacacaagaacagtttat

SEQ ID NO: 2734 - DNA, 23 bp, Artificial Sequence
  Description of Artificial Sequence: Synthetic oligonucleotide
  Mitotic kinesin microtubule-associated protein Eg5 (Kif11) siRNA
tctgaacacaagaacagtttatt

SEQ ID NO: 2735 - DNA, 23 bp, Artificial Sequence
  Description of Artificial Sequence: Synthetic oligonucleotide
  Mitotic kinesin microtubule-associated protein Eg5 (Kif11) siRNA
ctgaacacaagaacagtttattt

SEQ ID NO: 2736 - DNA, 23 bp, Artificial Sequence
  Description of Artificial Sequence: Synthetic oligonucleotide
  Mitotic kinesin microtubule-associated protein Eg5 (Kif11) siRNA
tgaacacaagaacagtttatttt

SEQ ID NO: 2737 - DNA, 23 bp, Artificial Sequence
  Description of Artificial Sequence: Synthetic oligonucleotide
  Mitotic kinesin microtubule-associated protein Eg5 (Kif11) siRNA
gaacacaagaacagtttattttt

SEQ ID NO: 2738 - DNA, 23 bp, Artificial Sequence
  Description of Artificial Sequence: Synthetic oligonucleotide
  Mitotic kinesin microtubule-associated protein Eg5 (Kif11) siRNA
aacacaagaacagtttatttttc

SEQ ID NO: 2739 - DNA, 23 bp, Artificial Sequence
  Description of Artificial Sequence: Synthetic oligonucleotide
  Mitotic kinesin microtubule-associated protein Eg5 (Kif11) siRNA
acacaagaacagtttatttttct

SEQ ID NO: 2740 - DNA, 23 bp, Artificial Sequence
  Description of Artificial Sequence: Synthetic oligonucleotide
  Mitotic kinesin microtubule-associated protein Eg5 (Kif11) siRNA
cacaagaacagtttatttttctg

SEQ ID NO: 2741 - DNA, 23 bp, Artificial Sequence
  Description of Artificial Sequence: Synthetic oligonucleotide
  Mitotic kinesin microtubule-associated protein Eg5 (Kif11) siRNA
acaagaacagtttatttttctga

SEQ ID NO: 2742 - DNA, 23 bp, Artificial Sequence
  Description of Artificial Sequence: Synthetic oligonucleotide
  Mitotic kinesin microtubule-associated protein Eg5 (Kif11) siRNA
caagaacagtttatttttctgaa

SEQ ID NO: 2743 - DNA, 23 bp, Artificial Sequence
  Description of Artificial Sequence: Synthetic oligonucleotide
  Mitotic kinesin microtubule-associated protein Eg5 (Kif11) siRNA
aagaacagtttatttttctgaac

SEQ ID NO: 2744 - DNA, 23 bp, Artificial Sequence
  Description of Artificial Sequence: Synthetic oligonucleotide
  Mitotic kinesin microtubule-associated protein Eg5 (Kif11) siRNA
agaacagtttatttttctgaaca

SEQ ID NO: 2745 - DNA, 23 bp, Artificial Sequence
  Description of Artificial Sequence: Synthetic oligonucleotide
  Mitotic kinesin microtubule-associated protein Eg5 (Kif11) siRNA
gaacagtttatttttctgaacag

SEQ ID NO: 2746 - DNA, 23 bp, Artificial Sequence
  Description of Artificial Sequence: Synthetic oligonucleotide
  Mitotic kinesin microtubule-associated protein Eg5 (Kif11) siRNA
aacagtttatttttctgaacagt

SEQ ID NO: 2747 - DNA, 23 bp, Artificial Sequence
  Description of Artificial Sequence: Synthetic oligonucleotide
  Mitotic kinesin microtubule-associated protein Eg5 (Kif11) siRNA
acagtttatttttctgaacagtg

SEQ ID NO: 2748 - DNA, 23 bp, Artificial Sequence
  Description of Artificial Sequence: Synthetic oligonucleotide
  Mitotic kinesin microtubule-associated protein Eg5 (Kif11) siRNA
cagtttatttttctgaacagtgg

SEQ ID NO: 2749 - DNA, 23 bp, Artificial Sequence
  Description of Artificial Sequence: Synthetic oligonucleotide
  Mitotic kinesin microtubule-associated protein Eg5 (Kif11) siRNA
agtttatttttctgaacagtggg

SEQ ID NO: 2750 - DNA, 23 bp, Artificial Sequence
  Description of Artificial Sequence: Synthetic oligonucleotide
  Mitotic kinesin microtubule-associated protein Eg5 (Kif11) siRNA
gtttatttttctgaacagtgggt

SEQ ID NO: 2751 - DNA, 23 bp, Artificial Sequence
  Description of Artificial Sequence: Synthetic oligonucleotide
  Mitotic kinesin microtubule-associated protein Eg5 (Kif11) siRNA
tttatttttctgaacagtgggta

SEQ ID NO: 2752 - DNA, 23 bp, Artificial Sequence
  Description of Artificial Sequence: Synthetic oligonucleotide
  Mitotic kinesin microtubule-associated protein Eg5 (Kif11) siRNA
ttatttttctgaacagtgggtat

SEQ ID NO: 2753 - DNA, 23 bp, Artificial Sequence
  Description of Artificial Sequence: Synthetic oligonucleotide
  Mitotic kinesin microtubule-associated protein Eg5 (Kif11) siRNA
tatttttctgaacagtgggtatc

SEQ ID NO: 2754 - DNA, 23 bp, Artificial Sequence
  Description of Artificial Sequence: Synthetic oligonucleotide
  Mitotic kinesin microtubule-associated protein Eg5 (Kif11) siRNA
atttttctgaacagtgggtatct

SEQ ID NO: 2755 - DNA, 23 bp, Artificial Sequence
  Description of Artificial Sequence: Synthetic oligonucleotide
  Mitotic kinesin microtubule-associated protein Eg5 (Kif11) siRNA
tttttctgaacagtgggtatctt

SEQ ID NO: 2756 - DNA, 23 bp, Artificial Sequence
  Description of Artificial Sequence: Synthetic oligonucleotide
  Mitotic kinesin microtubule-associated protein Eg5 (Kif11) siRNA
ttttctgaacagtgggtatcttc

SEQ ID NO: 2757 - DNA, 23 bp, Artificial Sequence
  Description of Artificial Sequence: Synthetic oligonucleotide
  Mitotic kinesin microtubule-associated protein Eg5 (Kif11) siRNA
tttctgaacagtgggtatcttcc

SEQ ID NO: 2758 - DNA, 23 bp, Artificial Sequence
  Description of Artificial Sequence: Synthetic oligonucleotide
  Mitotic kinesin microtubule-associated protein Eg5 (Kif11) siRNA
ttctgaacagtgggtatcttcct

SEQ ID NO: 2759 - DNA, 23 bp, Artificial Sequence
  Description of Artificial Sequence: Synthetic oligonucleotide
  Mitotic kinesin microtubule-associated protein Eg5 (Kif11) siRNA
tctgaacagtgggtatcttcctt

SEQ ID NO: 2760 - DNA, 23 bp, Artificial Sequence
  Description of Artificial Sequence: Synthetic oligonucleotide
  Mitotic kinesin microtubule-associated protein Eg5 (Kif11) siRNA
ctgaacagtgggtatcttcctta

SEQ ID NO: 2761 - DNA, 23 bp, Artificial Sequence
  Description of Artificial Sequence: Synthetic oligonucleotide
  Mitotic kinesin microtubule-associated protein Eg5 (Kif11) siRNA
tgaacagtgggtatcttccttaa

SEQ ID NO: 2762 - DNA, 23 bp, Artificial Sequence
  Description of Artificial Sequence: Synthetic oligonucleotide
  Mitotic kinesin microtubule-associated protein Eg5 (Kif11) siRNA
gaacagtgggtatcttccttaaa

SEQ ID NO: 2763 - DNA, 23 bp, Artificial Sequence
  Description of Artificial Sequence: Synthetic oligonucleotide
  Mitotic kinesin microtubule-associated protein Eg5 (Kif11) siRNA
aacagtgggtatcttccttaaat

SEQ ID NO: 2764 - DNA, 23 bp, Artificial Sequence
  Description of Artificial Sequence: Synthetic oligonucleotide
  Mitotic kinesin microtubule-associated protein Eg5 (Kif11) siRNA
acagtgggtatcttccttaaatg

SEQ ID NO: 2765 - DNA, 23 bp, Artificial Sequence
  Description of Artificial Sequence: Synthetic oligonucleotide
  Mitotic kinesin microtubule-associated protein Eg5 (Kif11) siRNA
cagtgggtatcttccttaaatga

SEQ ID NO: 2766 - DNA, 23 bp, Artificial Sequence
  Description of Artificial Sequence: Synthetic oligonucleotide
  Mitotic kinesin microtubule-associated protein Eg5 (Kif11) siRNA
agtgggtatcttccttaaatgaa

SEQ ID NO: 2767 - DNA, 23 bp, Artificial Sequence
  Description of Artificial Sequence: Synthetic oligonucleotide
  Mitotic kinesin microtubule-associated protein Eg5 (Kif11) siRNA
gtgggtatcttccttaaatgaaa

SEQ ID NO: 2768 - DNA, 23 bp, Artificial Sequence
  Description of Artificial Sequence: Synthetic oligonucleotide
  Mitotic kinesin microtubule-associated protein Eg5 (Kif11) siRNA
tgggtatcttccttaaatgaaag

SEQ ID NO: 2769 - DNA, 23 bp, Artificial Sequence
  Description of Artificial Sequence: Synthetic oligonucleotide
  Mitotic kinesin microtubule-associated protein Eg5 (Kif11) siRNA
gggtatcttccttaaatgaaagg

SEQ ID NO: 2770 - DNA, 23 bp, Artificial Sequence
  Description of Artificial Sequence: Synthetic oligonucleotide
  Mitotic kinesin microtubule-associated protein Eg5 (Kif11) siRNA
ggtatcttccttaaatgaaaggg

SEQ ID NO: 2771 - DNA, 23 bp, Artificial Sequence
  Description of Artificial Sequence: Synthetic oligonucleotide
  Mitotic kinesin microtubule-associated protein Eg5 (Kif11) siRNA
gtatcttccttaaatgaaaggga

SEQ ID NO: 2772 - DNA, 23 bp, Artificial Sequence
  Description of Artificial Sequence: Synthetic oligonucleotide
  Mitotic kinesin microtubule-associated protein Eg5 (Kif11) siRNA
tatcttccttaaatgaaagggaa

SEQ ID NO: 2773 - DNA, 23 bp, Artificial Sequence
  Description of Artificial Sequence: Synthetic oligonucleotide
  Mitotic kinesin microtubule-associated protein Eg5 (Kif11) siRNA
atcttccttaaatgaaagggaac

SEQ ID NO: 2774 - DNA, 23 bp, Artificial Sequence
  Description of Artificial Sequence: Synthetic oligonucleotide
  Mitotic kinesin microtubule-associated protein Eg5 (Kif11) siRNA
tcttccttaaatgaaagggaaca

SEQ ID NO: 2775 - DNA, 23 bp, Artificial Sequence
  Description of Artificial Sequence: Synthetic oligonucleotide
  Mitotic kinesin microtubule-associated protein Eg5 (Kif11) siRNA
cttccttaaatgaaagggaacag

SEQ ID NO: 2776 - DNA, 23 bp, Artificial Sequence
  Description of Artificial Sequence: Synthetic oligonucleotide
  Mitotic kinesin microtubule-associated protein Eg5 (Kif11) siRNA
ttccttaaatgaaagggaacagg

SEQ ID NO: 2777 - DNA, 23 bp, Artificial Sequence
  Description of Artificial Sequence: Synthetic oligonucleotide
  Mitotic kinesin microtubule-associated protein Eg5 (Kif11) siRNA
tccttaaatgaaagggaacagga

SEQ ID NO: 2778 - DNA, 23 bp, Artificial Sequence
  Description of Artificial Sequence: Synthetic oligonucleotide
  Mitotic kinesin microtubule-associated protein Eg5 (Kif11) siRNA
ccttaaatgaaagggaacaggaa

SEQ ID NO: 2779 - DNA, 23 bp, Artificial Sequence
  Description of Artificial Sequence: Synthetic oligonucleotide
  Mitotic kinesin microtubule-associated protein Eg5 (Kif11) siRNA
cttaaatgaaagggaacaggaac

SEQ ID NO: 2780 - DNA, 23 bp, Artificial Sequence
  Description of Artificial Sequence: Synthetic oligonucleotide
  Mitotic kinesin microtubule-associated protein Eg5 (Kif11) siRNA
ttaaatgaaagggaacaggaact

SEQ ID NO: 2781 - DNA, 23 bp, Artificial Sequence
  Description of Artificial Sequence: Synthetic oligonucleotide
  Mitotic kinesin microtubule-associated protein Eg5 (Kif11) siRNA
taaatgaaagggaacaggaactt

SEQ ID NO: 2782 - DNA, 23 bp, Artificial Sequence
  Description of Artificial Sequence: Synthetic oligonucleotide
  Mitotic kinesin microtubule-associated protein Eg5 (Kif11) siRNA
aaatgaaagggaacaggaacttc

SEQ ID NO: 2783 - DNA, 23 bp, Artificial Sequence
  Description of Artificial Sequence: Synthetic oligonucleotide
  Mitotic kinesin microtubule-associated protein Eg5 (Kif11) siRNA
aatgaaagggaacaggaacttca

SEQ ID NO: 2784 - DNA, 23 bp, Artificial Sequence
  Description of Artificial Sequence: Synthetic oligonucleotide
  Mitotic kinesin microtubule-associated protein Eg5 (Kif11) siRNA
atgaaagggaacaggaacttcac

SEQ ID NO: 2785 - DNA, 23 bp, Artificial Sequence
  Description of Artificial Sequence: Synthetic oligonucleotide
  Mitotic kinesin microtubule-associated protein Eg5 (Kif11) siRNA
tgaaagggaacaggaacttcaca

SEQ ID NO: 2786 - DNA, 23 bp, Artificial Sequence
  Description of Artificial Sequence: Synthetic oligonucleotide
  Mitotic kinesin microtubule-associated protein Eg5 (Kif11) siRNA
gaaagggaacaggaacttcacaa

SEQ ID NO: 2787 - DNA, 23 bp, Artificial Sequence
  Description of Artificial Sequence: Synthetic oligonucleotide
  Mitotic kinesin microtubule-associated protein Eg5 (Kif11) siRNA
aaagggaacaggaacttcacaac

SEQ ID NO: 2788 - DNA, 23 bp, Artificial Sequence
  Description of Artificial Sequence: Synthetic oligonucleotide
  Mitotic kinesin microtubule-associated protein Eg5 (Kif11) siRNA
aagggaacaggaacttcacaact

SEQ ID NO: 2789 - DNA, 23 bp, Artificial Sequence
  Description of Artificial Sequence: Synthetic oligonucleotide
  Mitotic kinesin microtubule-associated protein Eg5 (Kif11) siRNA
agggaacaggaacttcacaactt

SEQ ID NO: 2790 - DNA, 23 bp, Artificial Sequence
  Description of Artificial Sequence: Synthetic oligonucleotide
  Mitotic kinesin microtubule-associated protein Eg5 (Kif11) siRNA
gggaacaggaacttcacaactta

SEQ ID NO: 2791 - DNA, 23 bp, Artificial Sequence
  Description of Artificial Sequence: Synthetic oligonucleotide
  Mitotic kinesin microtubule-associated protein Eg5 (Kif11) siRNA
ggaacaggaacttcacaacttat

SEQ ID NO: 2792 - DNA, 23 bp, Artificial Sequence
  Description of Artificial Sequence: Synthetic oligonucleotide
  Mitotic kinesin microtubule-associated protein Eg5 (Kif11) siRNA
gaacaggaacttcacaacttatt

SEQ ID NO: 2793 - DNA, 23 bp, Artificial Sequence
  Description of Artificial Sequence: Synthetic oligonucleotide
  Mitotic kinesin microtubule-associated protein Eg5 (Kif11) siRNA
aacaggaacttcacaacttattg

SEQ ID NO: 2794 - DNA, 23 bp, Artificial Sequence
  Description of Artificial Sequence: Synthetic oligonucleotide
  Mitotic kinesin microtubule-associated protein Eg5 (Kif11) siRNA
acaggaacttcacaacttattgg

SEQ ID NO: 2795 - DNA, 23 bp, Artificial Sequence
  Description of Artificial Sequence: Synthetic oligonucleotide
  Mitotic kinesin microtubule-associated protein Eg5 (Kif11) siRNA
caggaacttcacaacttattgga

SEQ ID NO: 2796 - DNA, 23 bp, Artificial Sequence
  Description of Artificial Sequence: Synthetic oligonucleotide
  Mitotic kinesin microtubule-associated protein Eg5 (Kif11) siRNA
aggaacttcacaacttattggag

SEQ ID NO: 2797 - DNA, 23 bp, Artificial Sequence
  Description of Artificial Sequence: Synthetic oligonucleotide
  Mitotic kinesin microtubule-associated protein Eg5 (Kif11) siRNA
ggaacttcacaacttattggagg

SEQ ID NO: 2798 - DNA, 23 bp, Artificial Sequence
  Description of Artificial Sequence: Synthetic oligonucleotide
  Mitotic kinesin microtubule-associated protein Eg5 (Kif11) siRNA
gaacttcacaacttattggaggt

SEQ ID NO: 2799 - DNA, 23 bp, Artificial Sequence
  Description of Artificial Sequence: Synthetic oligonucleotide
  Mitotic kinesin microtubule-associated protein Eg5 (Kif11) siRNA
aacttcacaacttattggaggtt

SEQ ID NO: 2800 - DNA, 23 bp, Artificial Sequence
  Description of Artificial Sequence: Synthetic oligonucleotide
  Mitotic kinesin microtubule-associated protein Eg5 (Kif11) siRNA
acttcacaacttattggaggttg

SEQ ID NO: 2801 - DNA, 23 bp, Artificial Sequence
  Description of Artificial Sequence: Synthetic oligonucleotide
  Mitotic kinesin microtubule-associated protein Eg5 (Kif11) siRNA
cttcacaacttattggaggttgt

SEQ ID NO: 2802 - DNA, 23 bp, Artificial Sequence
  Description of Artificial Sequence: Synthetic oligonucleotide
  Mitotic kinesin microtubule-associated protein Eg5 (Kif11) siRNA
ttcacaacttattggaggttgta

SEQ ID NO: 2803 - DNA, 23 bp, Artificial Sequence
  Description of Artificial Sequence: Synthetic oligonucleotide
  Mitotic kinesin microtubule-associated protein Eg5 (Kif11) siRNA
tcacaacttattggaggttgtaa

SEQ ID NO: 2804 - DNA, 23 bp, Artificial Sequence
  Description of Artificial Sequence: Synthetic oligonucleotide
  Mitotic kinesin microtubule-associated protein Eg5 (Kif11) siRNA
cacaacttattggaggttgtaag

SEQ ID NO: 2805 - DNA, 23 bp, Artificial Sequence
  Description of Artificial Sequence: Synthetic oligonucleotide
  Mitotic kinesin microtubule-associated protein Eg5 (Kif11) siRNA
acaacttattggaggttgtaagc

SEQ ID NO: 2806 - DNA, 23 bp, Artificial Sequence
  Description of Artificial Sequence: Synthetic oligonucleotide
  Mitotic kinesin microtubule-associated protein Eg5 (Kif11) siRNA
caacttattggaggttgtaagcc

SEQ ID NO: 2807 - DNA, 23 bp, Artificial Sequence
  Description of Artificial Sequence: Synthetic oligonucleotide
  Mitotic kinesin microtubule-associated protein Eg5 (Kif11) siRNA
aacttattggaggttgtaagcca

SEQ ID NO: 2808 - DNA, 23 bp, Artificial Sequence
  Description of Artificial Sequence: Synthetic oligonucleotide
  Mitotic kinesin microtubule-associated protein Eg5 (Kif11) siRNA
acttattggaggttgtaagccaa

SEQ ID NO: 2809 - DNA, 23 bp, Artificial Sequence
  Description of Artificial Sequence: Synthetic oligonucleotide
  Mitotic kinesin microtubule-associated protein Eg5 (Kif11) siRNA
cttattggaggttgtaagccaat

SEQ ID NO: 2810 - DNA, 23 bp, Artificial Sequence
  Description of Artificial Sequence: Synthetic oligonucleotide
  Mitotic kinesin microtubule-associated protein Eg5 (Kif11) siRNA
ttattggaggttgtaagccaatg

SEQ ID NO: 2811 - DNA, 23 bp, Artificial Sequence
  Description of Artificial Sequence: Synthetic oligonucleotide
  Mitotic kinesin microtubule-associated protein Eg5 (Kif11) siRNA
tattggaggttgtaagccaatgt

SEQ ID NO: 2812 - DNA, 23 bp, Artificial Sequence
  Description of Artificial Sequence: Synthetic oligonucleotide
  Mitotic kinesin microtubule-associated protein Eg5 (Kif11) siRNA
attggaggttgtaagccaatgtt

SEQ ID NO: 2813 - DNA, 23 bp, Artificial Sequence
  Description of Artificial Sequence: Synthetic oligonucleotide
  Mitotic kinesin microtubule-associated protein Eg5 (Kif11) siRNA
ttggaggttgtaagccaatgttg

SEQ ID NO: 2814 - DNA, 23 bp, Artificial Sequence
  Description of Artificial Sequence: Synthetic oligonucleotide
  Mitotic kinesin microtubule-associated protein Eg5 (Kif11) siRNA
tggaggttgtaagccaatgttgt

SEQ ID NO: 2815 - DNA, 23 bp, Artificial Sequence
  Description of Artificial Sequence: Synthetic oligonucleotide
  Mitotic kinesin microtubule-associated protein Eg5 (Kif11) siRNA
ggaggttgtaagccaatgttgtg

SEQ ID NO: 2816 - DNA, 23 bp, Artificial Sequence
  Description of Artificial Sequence: Synthetic oligonucleotide
  Mitotic kinesin microtubule-associated protein Eg5 (Kif11) siRNA
gaggttgtaagccaatgttgtga

SEQ ID NO: 2817 - DNA, 23 bp, Artificial Sequence
  Description of Artificial Sequence: Synthetic oligonucleotide
  Mitotic kinesin microtubule-associated protein Eg5 (Kif11) siRNA
aggttgtaagccaatgttgtgag

SEQ ID NO: 2818 - DNA, 23 bp, Artificial Sequence
  Description of Artificial Sequence: Synthetic oligonucleotide
  Mitotic kinesin microtubule-associated protein Eg5 (Kif11) siRNA
ggttgtaagccaatgttgtgagg

SEQ ID NO: 2819 - DNA, 23 bp, Artificial Sequence
  Description of Artificial Sequence: Synthetic oligonucleotide
  Mitotic kinesin microtubule-associated protein Eg5 (Kif11) siRNA
gttgtaagccaatgttgtgaggc

SEQ ID NO: 2820 - DNA, 23 bp, Artificial Sequence
  Description of Artificial Sequence: Synthetic oligonucleotide
  Mitotic kinesin microtubule-associated protein Eg5 (Kif11) siRNA
ttgtaagccaatgttgtgaggct

SEQ ID NO: 2821 - DNA, 23 bp, Artificial Sequence
  Description of Artificial Sequence: Synthetic oligonucleotide
  Mitotic kinesin microtubule-associated protein Eg5 (Kif11) siRNA
tgtaagccaatgttgtgaggctt

SEQ ID NO: 2822 - DNA, 23 bp, Artificial Sequence
  Description of Artificial Sequence: Synthetic oligonucleotide
  Mitotic kinesin microtubule-associated protein Eg5 (Kif11) siRNA
gtaagccaatgttgtgaggcttc

SEQ ID NO: 2823 - DNA, 23 bp, Artificial Sequence
  Description of Artificial Sequence: Synthetic oligonucleotide
  Mitotic kinesin microtubule-associated protein Eg5 (Kif11) siRNA
taagccaatgttgtgaggcttca

SEQ ID NO: 2824 - DNA, 23 bp, Artificial Sequence
  Description of Artificial Sequence: Synthetic oligonucleotide
  Mitotic kinesin microtubule-associated protein Eg5 (Kif11) siRNA
aagccaatgttgtgaggcttcaa

SEQ ID NO: 2825 - DNA, 23 bp, Artificial Sequence
  Description of Artificial Sequence: Synthetic oligonucleotide
  Mitotic kinesin microtubule-associated protein Eg5 (Kif11) siRNA
agccaatgttgtgaggcttcaag

SEQ ID NO: 2826 - DNA, 23 bp, Artificial Sequence
  Description of Artificial Sequence: Synthetic oligonucleotide
  Mitotic kinesin microtubule-associated protein Eg5 (Kif11) siRNA
gccaatgttgtgaggcttcaagt

SEQ ID NO: 2827 - DNA, 23 bp, Artificial Sequence
  Description of Artificial Sequence: Synthetic oligonucleotide
  Mitotic kinesin microtubule-associated protein Eg5 (Kif11) siRNA
ccaatgttgtgaggcttcaagtt

SEQ ID NO: 2828 - DNA, 23 bp, Artificial Sequence
  Description of Artificial Sequence: Synthetic oligonucleotide
  Mitotic kinesin microtubule-associated protein Eg5 (Kif11) siRNA
caatgttgtgaggcttcaagttc

SEQ ID NO: 2829 - DNA, 23 bp, Artificial Sequence
  Description of Artificial Sequence: Synthetic oligonucleotide
  Mitotic kinesin microtubule-associated protein Eg5 (Kif11) siRNA
aatgttgtgaggcttcaagttca

SEQ ID NO: 2830 - DNA, 23 bp, Artificial Sequence
  Description of Artificial Sequence: Synthetic oligonucleotide
  Mitotic kinesin microtubule-associated protein Eg5 (Kif11) siRNA
atgttgtgaggcttcaagttcag

SEQ ID NO: 2831 - DNA, 23 bp, Artificial Sequence
  Description of Artificial Sequence: Synthetic oligonucleotide
  Mitotic kinesin microtubule-associated protein Eg5 (Kif11) siRNA
tgttgtgaggcttcaagttcaga

SEQ ID NO: 2832 - DNA, 23 bp, Artificial Sequence
  Description of Artificial Sequence: Synthetic oligonucleotide
  Mitotic kinesin microtubule-associated protein Eg5 (Kif11) siRNA
gttgtgaggcttcaagttcagac

SEQ ID NO: 2833 - DNA, 23 bp, Artificial Sequence
  Description of Artificial Sequence: Synthetic oligonucleotide
  Mitotic kinesin microtubule-associated protein Eg5 (Kif11) siRNA
ttgtgaggcttcaagttcagaca

SEQ ID NO: 2834 - DNA, 23 bp, Artificial Sequence
  Description of Artificial Sequence: Synthetic oligonucleotide
  Mitotic kinesin microtubule-associated protein Eg5 (Kif11) siRNA
tgtgaggcttcaagttcagacat

SEQ ID NO: 2835 - DNA, 23 bp, Artificial Sequence
  Description of Artificial Sequence: Synthetic oligonucleotide
  Mitotic kinesin microtubule-associated protein Eg5 (Kif11) siRNA
gtgaggcttcaagttcagacatc

SEQ ID NO: 2836 - DNA, 23 bp, Artificial Sequence
  Description of Artificial Sequence: Synthetic oligonucleotide
  Mitotic kinesin microtubule-associated protein Eg5 (Kif11) siRNA
tgaggcttcaagttcagacatca

SEQ ID NO: 2837 - DNA, 23 bp, Artificial Sequence
  Description of Artificial Sequence: Synthetic oligonucleotide
  Mitotic kinesin microtubule-associated protein Eg5 (Kif11) siRNA
gaggcttcaagttcagacatcac

SEQ ID NO: 2838 - DNA, 23 bp, Artificial Sequence
  Description of Artificial Sequence: Synthetic oligonucleotide
  Mitotic kinesin microtubule-associated protein Eg5 (Kif11) siRNA
aggcttcaagttcagacatcact

SEQ ID NO: 2839 - DNA, 23 bp, Artificial Sequence
  Description of Artificial Sequence: Synthetic oligonucleotide
  Mitotic kinesin microtubule-associated protein Eg5 (Kif11) siRNA
ggcttcaagttcagacatcactg

SEQ ID NO: 2840 - DNA, 23 bp, Artificial Sequence
  Description of Artificial Sequence: Synthetic oligonucleotide
  Mitotic kinesin microtubule-associated protein Eg5 (Kif11) siRNA
gcttcaagttcagacatcactga

SEQ ID NO: 2841 - DNA, 23 bp, Artificial Sequence
  Description of Artificial Sequence: Synthetic oligonucleotide
  Mitotic kinesin microtubule-associated protein Eg5 (Kif11) siRNA
cttcaagttcagacatcactgag

SEQ ID NO: 2842 - DNA, 23 bp, Artificial Sequence
  Description of Artificial Sequence: Synthetic oligonucleotide
  Mitotic kinesin microtubule-associated protein Eg5 (Kif11) siRNA
ttcaagttcagacatcactgaga

SEQ ID NO: 2843 - DNA, 23 bp, Artificial Sequence
  Description of Artificial Sequence: Synthetic oligonucleotide
  Mitotic kinesin microtubule-associated protein Eg5 (Kif11) siRNA
tcaagttcagacatcactgagaa

SEQ ID NO: 2844 - DNA, 23 bp, Artificial Sequence
  Description of Artificial Sequence: Synthetic oligonucleotide
  Mitotic kinesin microtubule-associated protein Eg5 (Kif11) siRNA
caagttcagacatcactgagaaa

SEQ ID NO: 2845 - DNA, 23 bp, Artificial Sequence
  Description of Artificial Sequence: Synthetic oligonucleotide
  Mitotic kinesin microtubule-associated protein Eg5 (Kif11) siRNA
aagttcagacatcactgagaaat

SEQ ID NO: 2846 - DNA, 23 bp, Artificial Sequence
  Description of Artificial Sequence: Synthetic oligonucleotide
  Mitotic kinesin microtubule-associated protein Eg5 (Kif11) siRNA
agttcagacatcactgagaaatc

SEQ ID NO: 2847 - DNA, 23 bp, Artificial Sequence
  Description of Artificial Sequence: Synthetic oligonucleotide
  Mitotic kinesin microtubule-associated protein Eg5 (Kif11) siRNA
gttcagacatcactgagaaatca

SEQ ID NO: 2848 - DNA, 23 bp, Artificial Sequence
  Description of Artificial Sequence: Synthetic oligonucleotide
  Mitotic kinesin microtubule-associated protein Eg5 (Kif11) siRNA
ttcagacatcactgagaaatcag

SEQ ID NO: 2849 - DNA, 23 bp, Artificial Sequence
  Description of Artificial Sequence: Synthetic oligonucleotide
  Mitotic kinesin microtubule-associated protein Eg5 (Kif11) siRNA
tcagacatcactgagaaatcaga

SEQ ID NO: 2850 - DNA, 23 bp, Artificial Sequence
  Description of Artificial Sequence: Synthetic oligonucleotide
  Mitotic kinesin microtubule-associated protein Eg5 (Kif11) siRNA
cagacatcactgagaaatcagat

SEQ ID NO: 2851 - DNA, 23 bp, Artificial Sequence
  Description of Artificial Sequence: Synthetic oligonucleotide
  Mitotic kinesin microtubule-associated protein Eg5 (Kif11) siRNA
agacatcactgagaaatcagatg

SEQ ID NO: 2852 - DNA, 23 bp, Artificial Sequence
  Description of Artificial Sequence: Synthetic oligonucleotide
  Mitotic kinesin microtubule-associated protein Eg5 (Kif11) siRNA
gacatcactgagaaatcagatgg

SEQ ID NO: 2853 - DNA, 23 bp, Artificial Sequence
  Description of Artificial Sequence: Synthetic oligonucleotide
  Mitotic kinesin microtubule-associated protein Eg5 (Kif11) siRNA
acatcactgagaaatcagatgga

SEQ ID NO: 2854 - DNA, 23 bp, Artificial Sequence
  Description of Artificial Sequence: Synthetic oligonucleotide
  Mitotic kinesin microtubule-associated protein Eg5 (Kif11) siRNA
catcactgagaaatcagatggac

SEQ ID NO: 2855 - DNA, 23 bp, Artificial Sequence
  Description of Artificial Sequence: Synthetic oligonucleotide
  Mitotic kinesin microtubule-associated protein Eg5 (Kif11) siRNA
atcactgagaaatcagatggacg

SEQ ID NO: 2856 - DNA, 23 bp, Artificial Sequence
  Description of Artificial Sequence: Synthetic oligonucleotide
  Mitotic kinesin microtubule-associated protein Eg5 (Kif11) siRNA
tcactgagaaatcagatggacgt

SEQ ID NO: 2857 - DNA, 23 bp, Artificial Sequence
  Description of Artificial Sequence: Synthetic oligonucleotide
  Mitotic kinesin microtubule-associated protein Eg5 (Kif11) siRNA
cactgagaaatcagatggacgta

SEQ ID NO: 2858 - DNA, 23 bp, Artificial Sequence
  Description of Artificial Sequence: Synthetic oligonucleotide
  Mitotic kinesin microtubule-associated protein Eg5 (Kif11) siRNA
actgagaaatcagatggacgtaa

SEQ ID NO: 2859 - DNA, 23 bp, Artificial Sequence
  Description of Artificial Sequence: Synthetic oligonucleotide
  Mitotic kinesin microtubule-associated protein Eg5 (Kif11) siRNA
ctgagaaatcagatggacgtaag

SEQ ID NO: 2860 - DNA, 23 bp, Artificial Sequence
  Description of Artificial Sequence: Synthetic oligonucleotide
  Mitotic kinesin microtubule-associated protein Eg5 (Kif11) siRNA
tgagaaatcagatggacgtaagg

SEQ ID NO: 2861 - DNA, 23 bp, Artificial Sequence
  Description of Artificial Sequence: Synthetic oligonucleotide
  Mitotic kinesin microtubule-associated protein Eg5 (Kif11) siRNA
gagaaatcagatggacgtaaggc

SEQ ID NO: 2862 - DNA, 23 bp, Artificial Sequence
  Description of Artificial Sequence: Synthetic oligonucleotide
  Mitotic kinesin microtubule-associated protein Eg5 (Kif11) siRNA
agaaatcagatggacgtaaggca

SEQ ID NO: 2863 - DNA, 23 bp, Artificial Sequence
  Description of Artificial Sequence: Synthetic oligonucleotide
  Mitotic kinesin microtubule-associated protein Eg5 (Kif11) siRNA
gaaatcagatggacgtaaggcag

SEQ ID NO: 2864 - DNA, 23 bp, Artificial Sequence
  Description of Artificial Sequence: Synthetic oligonucleotide
  Mitotic kinesin microtubule-associated protein Eg5 (Kif11) siRNA
aaatcagatggacgtaaggcagc

SEQ ID NO: 2865 - DNA, 23 bp, Artificial Sequence
  Description of Artificial Sequence: Synthetic oligonucleotide
  Mitotic kinesin microtubule-associated protein Eg5 (Kif11) siRNA
aatcagatggacgtaaggcagct

SEQ ID NO: 2866 - DNA, 23 bp, Artificial Sequence
  Description of Artificial Sequence: Synthetic oligonucleotide
  Mitotic kinesin microtubule-associated protein Eg5 (Kif11) siRNA
atcagatggacgtaaggcagctc

SEQ ID NO: 2867 - DNA, 23 bp, Artificial Sequence
  Description of Artificial Sequence: Synthetic oligonucleotide
  Mitotic kinesin microtubule-associated protein Eg5 (Kif11) siRNA
tcagatggacgtaaggcagctca

SEQ ID NO: 2868 - DNA, 23 bp, Artificial Sequence
  Description of Artificial Sequence: Synthetic oligonucleotide
  Mitotic kinesin microtubule-associated protein Eg5 (Kif11) siRNA
cagatggacgtaaggcagctcat

SEQ ID NO: 2869 - DNA, 23 bp, Artificial Sequence
  Description of Artificial Sequence: Synthetic oligonucleotide
  Mitotic kinesin microtubule-associated protein Eg5 (Kif11) siRNA
agatggacgtaaggcagctcatg

SEQ ID NO: 2870 - DNA, 23 bp, Artificial Sequence
  Description of Artificial Sequence: Synthetic oligonucleotide
  Mitotic kinesin microtubule-associated protein Eg5 (Kif11) siRNA
gatggacgtaaggcagctcatga

SEQ ID NO: 2871 - DNA, 23 bp, Artificial Sequence
  Description of Artificial Sequence: Synthetic oligonucleotide
  Mitotic kinesin microtubule-associated protein Eg5 (Kif11) siRNA
atggacgtaaggcagctcatgag

SEQ ID NO: 2872 - DNA, 23 bp, Artificial Sequence
  Description of Artificial Sequence: Synthetic oligonucleotide
  Mitotic kinesin microtubule-associated protein Eg5 (Kif11) siRNA
tggacgtaaggcagctcatgaga

SEQ ID NO: 2873 - DNA, 23 bp, Artificial Sequence
  Description of Artificial Sequence: Synthetic oligonucleotide
  Mitotic kinesin microtubule-associated protein Eg5 (Kif11) siRNA
ggacgtaaggcagctcatgagaa

SEQ ID NO: 2874 - DNA, 23 bp, Artificial Sequence
  Description of Artificial Sequence: Synthetic oligonucleotide
  Mitotic kinesin microtubule-associated protein Eg5 (Kif11) siRNA
gacgtaaggcagctcatgagaaa

SEQ ID NO: 2875 - DNA, 23 bp, Artificial Sequence
  Description of Artificial Sequence: Synthetic oligonucleotide
  Mitotic kinesin microtubule-associated protein Eg5 (Kif11) siRNA
acgtaaggcagctcatgagaaac

SEQ ID NO: 2876 - DNA, 23 bp, Artificial Sequence
  Description of Artificial Sequence: Synthetic oligonucleotide
  Mitotic kinesin microtubule-associated protein Eg5 (Kif11) siRNA
cgtaaggcagctcatgagaaaca

SEQ ID NO: 2877 - DNA, 23 bp, Artificial Sequence
  Description of Artificial Sequence: Synthetic oligonucleotide
  Mitotic kinesin microtubule-associated protein Eg5 (Kif11) siRNA
gtaaggcagctcatgagaaacag

SEQ ID NO: 2878 - DNA, 23 bp, Artificial Sequence
  Description of Artificial Sequence: Synthetic oligonucleotide
  Mitotic kinesin microtubule-associated protein Eg5 (Kif11) siRNA
taaggcagctcatgagaaacagc

SEQ ID NO: 2879 - DNA, 23 bp, Artificial Sequence
  Description of Artificial Sequence: Synthetic oligonucleotide
  Mitotic kinesin microtubule-associated protein Eg5 (Kif11) siRNA
aaggcagctcatgagaaacagca

SEQ ID NO: 2880 - DNA, 23 bp, Artificial Sequence
  Description of Artificial Sequence: Synthetic oligonucleotide
  Mitotic kinesin microtubule-associated protein Eg5 (Kif11) siRNA
aggcagctcatgagaaacagcat

SEQ ID NO: 2881 - DNA, 23 bp, Artificial Sequence
  Description of Artificial Sequence: Synthetic oligonucleotide
  Mitotic kinesin microtubule-associated protein Eg5 (Kif11) siRNA
ggcagctcatgagaaacagcata

SEQ ID NO: 2882 - DNA, 23 bp, Artificial Sequence
  Description of Artificial Sequence: Synthetic oligonucleotide
  Mitotic kinesin microtubule-associated protein Eg5 (Kif11) siRNA
gcagctcatgagaaacagcataa

SEQ ID NO: 2883 - DNA, 23 bp, Artificial Sequence
  Description of Artificial Sequence: Synthetic oligonucleotide
  Mitotic kinesin microtubule-associated protein Eg5 (Kif11) siRNA
cagctcatgagaaacagcataac

SEQ ID NO: 2884 - DNA, 23 bp, Artificial Sequence
  Description of Artificial Sequence: Synthetic oligonucleotide
  Mitotic kinesin microtubule-associated protein Eg5 (Kif11) siRNA
agctcatgagaaacagcataaca

SEQ ID NO: 2885 - DNA, 23 bp, Artificial Sequence
  Description of Artificial Sequence: Synthetic oligonucleotide
  Mitotic kinesin microtubule-associated protein Eg5 (Kif11) siRNA
gctcatgagaaacagcataacat

SEQ ID NO: 2886 - DNA, 23 bp, Artificial Sequence
  Description of Artificial Sequence: Synthetic oligonucleotide
  Mitotic kinesin microtubule-associated protein Eg5 (Kif11) siRNA
ctcatgagaaacagcataacatt

SEQ ID NO: 2887 - DNA, 23 bp, Artificial Sequence
  Description of Artificial Sequence: Synthetic oligonucleotide
  Mitotic kinesin microtubule-associated protein Eg5 (Kif11) siRNA
tcatgagaaacagcataacattt

SEQ ID NO: 2888 - DNA, 23 bp, Artificial Sequence
  Description of Artificial Sequence: Synthetic oligonucleotide
  Mitotic kinesin microtubule-associated protein Eg5 (Kif11) siRNA
catgagaaacagcataacatttt

SEQ ID NO: 2889 - DNA, 23 bp, Artificial Sequence
  Description of Artificial Sequence: Synthetic oligonucleotide
  Mitotic kinesin microtubule-associated protein Eg5 (Kif11) siRNA
atgagaaacagcataacattttt

SEQ ID NO: 2890 - DNA, 23 bp, Artificial Sequence
  Description of Artificial Sequence: Synthetic oligonucleotide
  Mitotic kinesin microtubule-associated protein Eg5 (Kif11) siRNA
tgagaaacagcataacatttttc

SEQ ID NO: 2891 - DNA, 23 bp, Artificial Sequence
  Description of Artificial Sequence: Synthetic oligonucleotide
  Mitotic kinesin microtubule-associated protein Eg5 (Kif11) siRNA
gagaaacagcataacatttttct

SEQ ID NO: 2892 - DNA, 23 bp, Artificial Sequence
  Description of Artificial Sequence: Synthetic oligonucleotide
  Mitotic kinesin microtubule-associated protein Eg5 (Kif11) siRNA
agaaacagcataacatttttctt

SEQ ID NO: 2893 - DNA, 23 bp, Artificial Sequence
  Description of Artificial Sequence: Synthetic oligonucleotide
  Mitotic kinesin microtubule-associated protein Eg5 (Kif11) siRNA
gaaacagcataacatttttcttg

SEQ ID NO: 2894 - DNA, 23 bp, Artificial Sequence
  Description of Artificial Sequence: Synthetic oligonucleotide
  Mitotic kinesin microtubule-associated protein Eg5 (Kif11) siRNA
aaacagcataacatttttcttga

SEQ ID NO: 2895 - DNA, 23 bp, Artificial Sequence
  Description of Artificial Sequence: Synthetic oligonucleotide
  Mitotic kinesin microtubule-associated protein Eg5 (Kif11) siRNA
aacagcataacatttttcttgat

SEQ ID NO: 2896 - DNA, 23 bp, Artificial Sequence
  Description of Artificial Sequence: Synthetic oligonucleotide
  Mitotic kinesin microtubule-associated protein Eg5 (Kif11) siRNA
acagcataacatttttcttgatc

SEQ ID NO: 2897 - DNA, 23 bp, Artificial Sequence
  Description of Artificial Sequence: Synthetic oligonucleotide
  Mitotic kinesin microtubule-associated protein Eg5 (Kif11) siRNA
cagcataacatttttcttgatca

SEQ ID NO: 2898 - DNA, 23 bp, Artificial Sequence
  Description of Artificial Sequence: Synthetic oligonucleotide
  Mitotic kinesin microtubule-associated protein Eg5 (Kif11) siRNA
agcataacatttttcttgatcag

SEQ ID NO: 2899 - DNA, 23 bp, Artificial Sequence
  Description of Artificial Sequence: Synthetic oligonucleotide
  Mitotic kinesin microtubule-associated protein Eg5 (Kif11) siRNA
gcataacatttttcttgatcaga

SEQ ID NO: 2900 - DNA, 23 bp, Artificial Sequence
  Description of Artificial Sequence: Synthetic oligonucleotide
  Mitotic kinesin microtubule-associated protein Eg5 (Kif11) siRNA
cataacatttttcttgatcagat

SEQ ID NO: 2901 - DNA, 23 bp, Artificial Sequence
  Description of Artificial Sequence: Synthetic oligonucleotide
  Mitotic kinesin microtubule-associated protein Eg5 (Kif11) siRNA
ataacatttttcttgatcagatg

SEQ ID NO: 2902 - DNA, 23 bp, Artificial Sequence
  Description of Artificial Sequence: Synthetic oligonucleotide
  Mitotic kinesin microtubule-associated protein Eg5 (Kif11) siRNA
taacatttttcttgatcagatga

SEQ ID NO: 2903 - DNA, 23 bp, Artificial Sequence
  Description of Artificial Sequence: Synthetic oligonucleotide
  Mitotic kinesin microtubule-associated protein Eg5 (Kif11) siRNA
aacatttttcttgatcagatgac

SEQ ID NO: 2904 - DNA, 23 bp, Artificial Sequence
  Description of Artificial Sequence: Synthetic oligonucleotide
  Mitotic kinesin microtubule-associated protein Eg5 (Kif11) siRNA
acatttttcttgatcagatgact

SEQ ID NO: 2905 - DNA, 23 bp, Artificial Sequence
  Description of Artificial Sequence: Synthetic oligonucleotide
  Mitotic kinesin microtubule-associated protein Eg5 (Kif11) siRNA
catttttcttgatcagatgacta

SEQ ID NO: 2906 - DNA, 23 bp, Artificial Sequence
  Description of Artificial Sequence: Synthetic oligonucleotide
  Mitotic kinesin microtubule-associated protein Eg5 (Kif11) siRNA
atttttcttgatcagatgactat

SEQ ID NO: 2907 - DNA, 23 bp, Artificial Sequence
  Description of Artificial Sequence: Synthetic oligonucleotide
  Mitotic kinesin microtubule-associated protein Eg5 (Kif11) siRNA
tttttcttgatcagatgactatt

SEQ ID NO: 2908 - DNA, 23 bp, Artificial Sequence
  Description of Artificial Sequence: Synthetic oligonucleotide
  Mitotic kinesin microtubule-associated protein Eg5 (Kif11) siRNA
ttttcttgatcagatgactattg

SEQ ID NO: 2909 - DNA, 23 bp, Artificial Sequence
  Description of Artificial Sequence: Synthetic oligonucleotide
  Mitotic kinesin microtubule-associated protein Eg5 (Kif11) siRNA
tttcttgatcagatgactattga

SEQ ID NO: 2910 - DNA, 23 bp, Artificial Sequence
  Description of Artificial Sequence: Synthetic oligonucleotide
  Mitotic kinesin microtubule-associated protein Eg5 (Kif11) siRNA
ttcttgatcagatgactattgat

SEQ ID NO: 2911 - DNA, 23 bp, Artificial Sequence
  Description of Artificial Sequence: Synthetic oligonucleotide
  Mitotic kinesin microtubule-associated protein Eg5 (Kif11) siRNA
tcttgatcagatgactattgatg

SEQ ID NO: 2912 - DNA, 23 bp, Artificial Sequence
  Description of Artificial Sequence: Synthetic oligonucleotide
  Mitotic kinesin microtubule-associated protein Eg5 (Kif11) siRNA
cttgatcagatgactattgatga

SEQ ID NO: 2913 - DNA, 23 bp, Artificial Sequence
  Description of Artificial Sequence: Synthetic oligonucleotide
  Mitotic kinesin microtubule-associated protein Eg5 (Kif11) siRNA
ttgatcagatgactattgatgaa

SEQ ID NO: 2914 - DNA, 23 bp, Artificial Sequence
  Description of Artificial Sequence: Synthetic oligonucleotide
  Mitotic kinesin microtubule-associated protein Eg5 (Kif11) siRNA
tgatcagatgactattgatgaag

SEQ ID NO: 2915 - DNA, 23 bp, Artificial Sequence
  Description of Artificial Sequence: Synthetic oligonucleotide
  Mitotic kinesin microtubule-associated protein Eg5 (Kif11) siRNA
gatcagatgactattgatgaaga

SEQ ID NO: 2916 - DNA, 23 bp, Artificial Sequence
  Description of Artificial Sequence: Synthetic oligonucleotide
  Mitotic kinesin microtubule-associated protein Eg5 (Kif11) siRNA
atcagatgactattgatgaagat

SEQ ID NO: 2917 - DNA, 23 bp, Artificial Sequence
  Description of Artificial Sequence: Synthetic oligonucleotide
  Mitotic kinesin microtubule-associated protein Eg5 (Kif11) siRNA
tcagatgactattgatgaagata

SEQ ID NO: 2918 - DNA, 23 bp, Artificial Sequence
  Description of Artificial Sequence: Synthetic oligonucleotide
  Mitotic kinesin microtubule-associated protein Eg5 (Kif11) siRNA
cagatgactattgatgaagataa

SEQ ID NO: 2919 - DNA, 23 bp, Artificial Sequence
  Description of Artificial Sequence: Synthetic oligonucleotide
  Mitotic kinesin microtubule-associated protein Eg5 (Kif11) siRNA
agatgactattgatgaagataaa

SEQ ID NO: 2920 - DNA, 23 bp, Artificial Sequence
  Description of Artificial Sequence: Synthetic oligonucleotide
  Mitotic kinesin microtubule-associated protein Eg5 (Kif11) siRNA
gatgactattgatgaagataaat

SEQ ID NO: 2921 - DNA, 23 bp, Artificial Sequence
  Description of Artificial Sequence: Synthetic oligonucleotide
  Mitotic kinesin microtubule-associated protein Eg5 (Kif11) siRNA
atgactattgatgaagataaatt

SEQ ID NO: 2922 - DNA, 23 bp, Artificial Sequence
  Description of Artificial Sequence: Synthetic oligonucleotide
  Mitotic kinesin microtubule-associated protein Eg5 (Kif11) siRNA
tgactattgatgaagataaattg

SEQ ID NO: 2923 - DNA, 23 bp, Artificial Sequence
  Description of Artificial Sequence: Synthetic oligonucleotide
  Mitotic kinesin microtubule-associated protein Eg5 (Kif11) siRNA
gactattgatgaagataaattga

SEQ ID NO: 2924 - DNA, 23 bp, Artificial Sequence
  Description of Artificial Sequence: Synthetic oligonucleotide
  Mitotic kinesin microtubule-associated protein Eg5 (Kif11) siRNA
actattgatgaagataaattgat

SEQ ID NO: 2925 - DNA, 23 bp, Artificial Sequence
  Description of Artificial Sequence: Synthetic oligonucleotide
  Mitotic kinesin microtubule-associated protein Eg5 (Kif11) siRNA
ctattgatgaagataaattgata

SEQ ID NO: 2926 - DNA, 23 bp, Artificial Sequence
  Description of Artificial Sequence: Synthetic oligonucleotide
  Mitotic kinesin microtubule-associated protein Eg5 (Kif11) siRNA
tattgatgaagataaattgatag

SEQ ID NO: 2927 - DNA, 23 bp, Artificial Sequence
  Description of Artificial Sequence: Synthetic oligonucleotide
  Mitotic kinesin microtubule-associated protein Eg5 (Kif11) siRNA
attgatgaagataaattgatagc

SEQ ID NO: 2928 - DNA, 23 bp, Artificial Sequence
  Description of Artificial Sequence: Synthetic oligonucleotide
  Mitotic kinesin microtubule-associated protein Eg5 (Kif11) siRNA
ttgatgaagataaattgatagca

SEQ ID NO: 2929 - DNA, 23 bp, Artificial Sequence
  Description of Artificial Sequence: Synthetic oligonucleotide
  Mitotic kinesin microtubule-associated protein Eg5 (Kif11) siRNA
tgatgaagataaattgatagcac

SEQ ID NO: 2930 - DNA, 23 bp, Artificial Sequence
  Description of Artificial Sequence: Synthetic oligonucleotide
  Mitotic kinesin microtubule-associated protein Eg5 (Kif11) siRNA
gatgaagataaattgatagcaca

SEQ ID NO: 2931 - DNA, 23 bp, Artificial Sequence
  Description of Artificial Sequence: Synthetic oligonucleotide
  Mitotic kinesin microtubule-associated protein Eg5 (Kif11) siRNA
atgaagataaattgatagcacaa

SEQ ID NO: 2932 - DNA, 23 bp, Artificial Sequence
  Description of Artificial Sequence: Synthetic oligonucleotide
  Mitotic kinesin microtubule-associated protein Eg5 (Kif11) siRNA
tgaagataaattgatagcacaaa

SEQ ID NO: 2933 - DNA, 23 bp, Artificial Sequence
  Description of Artificial Sequence: Synthetic oligonucleotide
  Mitotic kinesin microtubule-associated protein Eg5 (Kif11) siRNA
gaagataaattgatagcacaaaa

SEQ ID NO: 2934 - DNA, 23 bp, Artificial Sequence
  Description of Artificial Sequence: Synthetic oligonucleotide
  Mitotic kinesin microtubule-associated protein Eg5 (Kif11) siRNA
aagataaattgatagcacaaaat

SEQ ID NO: 2935 - DNA, 23 bp, Artificial Sequence
  Description of Artificial Sequence: Synthetic oligonucleotide
  Mitotic kinesin microtubule-associated protein Eg5 (Kif11) siRNA
agataaattgatagcacaaaatc

SEQ ID NO: 2936 - DNA, 23 bp, Artificial Sequence
  Description of Artificial Sequence: Synthetic oligonucleotide
  Mitotic kinesin microtubule-associated protein Eg5 (Kif11) siRNA
gataaattgatagcacaaaatct

SEQ ID NO: 2937 - DNA, 23 bp, Artificial Sequence
  Description of Artificial Sequence: Synthetic oligonucleotide
  Mitotic kinesin microtubule-associated protein Eg5 (Kif11) siRNA
ataaattgatagcacaaaatcta

SEQ ID NO: 2938 - DNA, 23 bp, Artificial Sequence
  Description of Artificial Sequence: Synthetic oligonucleotide
  Mitotic kinesin microtubule-associated protein Eg5 (Kif11) siRNA
taaattgatagcacaaaatctag

SEQ ID NO: 2939 - DNA, 23 bp, Artificial Sequence
  Description of Artificial Sequence: Synthetic oligonucleotide
  Mitotic kinesin microtubule-associated protein Eg5 (Kif11) siRNA
aaattgatagcacaaaatctaga

SEQ ID NO: 2940 - DNA, 23 bp, Artificial Sequence
  Description of Artificial Sequence: Synthetic oligonucleotide
  Mitotic kinesin microtubule-associated protein Eg5 (Kif11) siRNA
aattgatagcacaaaatctagaa

SEQ ID NO: 2941 - DNA, 23 bp, Artificial Sequence
  Description of Artificial Sequence: Synthetic oligonucleotide
  Mitotic kinesin microtubule-associated protein Eg5 (Kif11) siRNA
attgatagcacaaaatctagaac

SEQ ID NO: 2942 - DNA, 23 bp, Artificial Sequence
  Description of Artificial Sequence: Synthetic oligonucleotide
  Mitotic kinesin microtubule-associated protein Eg5 (Kif11) siRNA
ttgatagcacaaaatctagaact

SEQ ID NO: 2943 - DNA, 23 bp, Artificial Sequence
  Description of Artificial Sequence: Synthetic oligonucleotide
  Mitotic kinesin microtubule-associated protein Eg5 (Kif11) siRNA
tgatagcacaaaatctagaactt

SEQ ID NO: 2944 - DNA, 23 bp, Artificial Sequence
  Description of Artificial Sequence: Synthetic oligonucleotide
  Mitotic kinesin microtubule-associated protein Eg5 (Kif11) siRNA
gatagcacaaaatctagaactta

SEQ ID NO: 2945 - DNA, 23 bp, Artificial Sequence
  Description of Artificial Sequence: Synthetic oligonucleotide
  Mitotic kinesin microtubule-associated protein Eg5 (Kif11) siRNA
atagcacaaaatctagaacttaa

SEQ ID NO: 2946 - DNA, 23 bp, Artificial Sequence
  Description of Artificial Sequence: Synthetic oligonucleotide
  Mitotic kinesin microtubule-associated protein Eg5 (Kif11) siRNA
tagcacaaaatctagaacttaat

SEQ ID NO: 2947 - DNA, 23 bp, Artificial Sequence
  Description of Artificial Sequence: Synthetic oligonucleotide
  Mitotic kinesin microtubule-associated protein Eg5 (Kif11) siRNA
agcacaaaatctagaacttaatg

SEQ ID NO: 2948 - DNA, 23 bp, Artificial Sequence
  Description of Artificial Sequence: Synthetic oligonucleotide
  Mitotic kinesin microtubule-associated protein Eg5 (Kif11) siRNA
gcacaaaatctagaacttaatga

SEQ ID NO: 2949 - DNA, 23 bp, Artificial Sequence
  Description of Artificial Sequence: Synthetic oligonucleotide
  Mitotic kinesin microtubule-associated protein Eg5 (Kif11) siRNA
cacaaaatctagaacttaatgaa

SEQ ID NO: 2950 - DNA, 23 bp, Artificial Sequence
  Description of Artificial Sequence: Synthetic oligonucleotide
  Mitotic kinesin microtubule-associated protein Eg5 (Kif11) siRNA
acaaaatctagaacttaatgaaa

SEQ ID NO: 2951 - DNA, 23 bp, Artificial Sequence
  Description of Artificial Sequence: Synthetic oligonucleotide
  Mitotic kinesin microtubule-associated protein Eg5 (Kif11) siRNA
caaaatctagaacttaatgaaac

SEQ ID NO: 2952 - DNA, 23 bp, Artificial Sequence
  Description of Artificial Sequence: Synthetic oligonucleotide
  Mitotic kinesin microtubule-associated protein Eg5 (Kif11) siRNA
aaaatctagaacttaatgaaacc

SEQ ID NO: 2953 - DNA, 23 bp, Artificial Sequence
  Description of Artificial Sequence: Synthetic oligonucleotide
  Mitotic kinesin microtubule-associated protein Eg5 (Kif11) siRNA
aaatctagaacttaatgaaacca

SEQ ID NO: 2954 - DNA, 23 bp, Artificial Sequence
  Description of Artificial Sequence: Synthetic oligonucleotide
  Mitotic kinesin microtubule-associated protein Eg5 (Kif11) siRNA
aatctagaacttaatgaaaccat

SEQ ID NO: 2955 - DNA, 23 bp, Artificial Sequence
  Description of Artificial Sequence: Synthetic oligonucleotide
  Mitotic kinesin microtubule-associated protein Eg5 (Kif11) siRNA
atctagaacttaatgaaaccata

SEQ ID NO: 2956 - DNA, 23 bp, Artificial Sequence
  Description of Artificial Sequence: Synthetic oligonucleotide
  Mitotic kinesin microtubule-associated protein Eg5 (Kif11) siRNA
tctagaacttaatgaaaccataa

SEQ ID NO: 2957 - DNA, 23 bp, Artificial Sequence
  Description of Artificial Sequence: Synthetic oligonucleotide
  Mitotic kinesin microtubule-associated protein Eg5 (Kif11) siRNA
ctagaacttaatgaaaccataaa

SEQ ID NO: 2958 - DNA, 23 bp, Artificial Sequence
  Description of Artificial Sequence: Synthetic oligonucleotide
  Mitotic kinesin microtubule-associated protein Eg5 (Kif11) siRNA
tagaacttaatgaaaccataaaa

SEQ ID NO: 2959 - DNA, 23 bp, Artificial Sequence
  Description of Artificial Sequence: Synthetic oligonucleotide
  Mitotic kinesin microtubule-associated protein Eg5 (Kif11) siRNA
agaacttaatgaaaccataaaaa

SEQ ID NO: 2960 - DNA, 23 bp, Artificial Sequence
  Description of Artificial Sequence: Synthetic oligonucleotide
  Mitotic kinesin microtubule-associated protein Eg5 (Kif11) siRNA
gaacttaatgaaaccataaaaat

SEQ ID NO: 2961 - DNA, 23 bp, Artificial Sequence
  Description of Artificial Sequence: Synthetic oligonucleotide
  Mitotic kinesin microtubule-associated protein Eg5 (Kif11) siRNA
aacttaatgaaaccataaaaatt

SEQ ID NO: 2962 - DNA, 23 bp, Artificial Sequence
  Description of Artificial Sequence: Synthetic oligonucleotide
  Mitotic kinesin microtubule-associated protein Eg5 (Kif11) siRNA
acttaatgaaaccataaaaattg

SEQ ID NO: 2963 - DNA, 23 bp, Artificial Sequence
  Description of Artificial Sequence: Synthetic oligonucleotide
  Mitotic kinesin microtubule-associated protein Eg5 (Kif11) siRNA
cttaatgaaaccataaaaattgg

SEQ ID NO: 2964 - DNA, 23 bp, Artificial Sequence
  Description of Artificial Sequence: Synthetic oligonucleotide
  Mitotic kinesin microtubule-associated protein Eg5 (Kif11) siRNA
ttaatgaaaccataaaaattggt

SEQ ID NO: 2965 - DNA, 23 bp, Artificial Sequence
  Description of Artificial Sequence: Synthetic oligonucleotide
  Mitotic kinesin microtubule-associated protein Eg5 (Kif11) siRNA
taatgaaaccataaaaattggtt

SEQ ID NO: 2966 - DNA, 23 bp, Artificial Sequence
  Description of Artificial Sequence: Synthetic oligonucleotide
  Mitotic kinesin microtubule-associated protein Eg5 (Kif11) siRNA
aatgaaaccataaaaattggttt

SEQ ID NO: 2967 - DNA, 23 bp, Artificial Sequence
  Description of Artificial Sequence: Synthetic oligonucleotide
  Mitotic kinesin microtubule-associated protein Eg5 (Kif11) siRNA
atgaaaccataaaaattggtttg

SEQ ID NO: 2968 - DNA, 23 bp, Artificial Sequence
  Description of Artificial Sequence: Synthetic oligonucleotide
  Mitotic kinesin microtubule-associated protein Eg5 (Kif11) siRNA
tgaaaccataaaaattggtttga

SEQ ID NO: 2969 - DNA, 23 bp, Artificial Sequence
  Description of Artificial Sequence: Synthetic oligonucleotide
  Mitotic kinesin microtubule-associated protein Eg5 (Kif11) siRNA
gaaaccataaaaattggtttgac

SEQ ID NO: 2970 - DNA, 23 bp, Artificial Sequence
  Description of Artificial Sequence: Synthetic oligonucleotide
  Mitotic kinesin microtubule-associated protein Eg5 (Kif11) siRNA
aaaccataaaaattggtttgact

SEQ ID NO: 2971 - DNA, 23 bp, Artificial Sequence
  Description of Artificial Sequence: Synthetic oligonucleotide
  Mitotic kinesin microtubule-associated protein Eg5 (Kif11) siRNA
aaccataaaaattggtttgacta

SEQ ID NO: 2972 - DNA, 23 bp, Artificial Sequence
  Description of Artificial Sequence: Synthetic oligonucleotide
  Mitotic kinesin microtubule-associated protein Eg5 (Kif11) siRNA
accataaaaattggtttgactaa

SEQ ID NO: 2973 - DNA, 23 bp, Artificial Sequence
  Description of Artificial Sequence: Synthetic oligonucleotide
  Mitotic kinesin microtubule-associated protein Eg5 (Kif11) siRNA
ccataaaaattggtttgactaag

SEQ ID NO: 2974 - DNA, 23 bp, Artificial Sequence
  Description of Artificial Sequence: Synthetic oligonucleotide
  Mitotic kinesin microtubule-associated protein Eg5 (Kif11) siRNA
cataaaaattggtttgactaagc

SEQ ID NO: 2975 - DNA, 23 bp, Artificial Sequence
  Description of Artificial Sequence: Synthetic oligonucleotide
  Mitotic kinesin microtubule-associated protein Eg5 (Kif11) siRNA
ataaaaattggtttgactaagct

SEQ ID NO: 2976 - DNA, 23 bp, Artificial Sequence
  Description of Artificial Sequence: Synthetic oligonucleotide
  Mitotic kinesin microtubule-associated protein Eg5 (Kif11) siRNA
taaaaattggtttgactaagctt

SEQ ID NO: 2977 - DNA, 23 bp, Artificial Sequence
  Description of Artificial Sequence: Synthetic oligonucleotide
  Mitotic kinesin microtubule-associated protein Eg5 (Kif11) siRNA
aaaaattggtttgactaagctta

SEQ ID NO: 2978 - DNA, 23 bp, Artificial Sequence
  Description of Artificial Sequence: Synthetic oligonucleotide
  Mitotic kinesin microtubule-associated protein Eg5 (Kif11) siRNA
aaaattggtttgactaagcttaa

SEQ ID NO: 2979 - DNA, 23 bp, Artificial Sequence
  Description of Artificial Sequence: Synthetic oligonucleotide
  Mitotic kinesin microtubule-associated protein Eg5 (Kif11) siRNA
aaattggtttgactaagcttaat

SEQ ID NO: 2980 - DNA, 23 bp, Artificial Sequence
  Description of Artificial Sequence: Synthetic oligonucleotide
  Mitotic kinesin microtubule-associated protein Eg5 (Kif11) siRNA
aattggtttgactaagcttaatt

SEQ ID NO: 2981 - DNA, 23 bp, Artificial Sequence
  Description of Artificial Sequence: Synthetic oligonucleotide
  Mitotic kinesin microtubule-associated protein Eg5 (Kif11) siRNA
attggtttgactaagcttaattg

SEQ ID NO: 2982 - DNA, 23 bp, Artificial Sequence
  Description of Artificial Sequence: Synthetic oligonucleotide
  Mitotic kinesin microtubule-associated protein Eg5 (Kif11) siRNA
ttggtttgactaagcttaattgc

SEQ ID NO: 2983 - DNA, 23 bp, Artificial Sequence
  Description of Artificial Sequence: Synthetic oligonucleotide
  Mitotic kinesin microtubule-associated protein Eg5 (Kif11) siRNA
tggtttgactaagcttaattgct

SEQ ID NO: 2984 - DNA, 23 bp, Artificial Sequence
  Description of Artificial Sequence: Synthetic oligonucleotide
  Mitotic kinesin microtubule-associated protein Eg5 (Kif11) siRNA
ggtttgactaagcttaattgctt

SEQ ID NO: 2985 - DNA, 23 bp, Artificial Sequence
  Description of Artificial Sequence: Synthetic oligonucleotide
  Mitotic kinesin microtubule-associated protein Eg5 (Kif11) siRNA
gtttgactaagcttaattgcttt

SEQ ID NO: 2986 - DNA, 23 bp, Artificial Sequence
  Description of Artificial Sequence: Synthetic oligonucleotide
  Mitotic kinesin microtubule-associated protein Eg5 (Kif11) siRNA
tttgactaagcttaattgctttc

SEQ ID NO: 2987 - DNA, 23 bp, Artificial Sequence
  Description of Artificial Sequence: Synthetic oligonucleotide
  Mitotic kinesin microtubule-associated protein Eg5 (Kif11) siRNA
ttgactaagcttaattgctttct

SEQ ID NO: 2988 - DNA, 23 bp, Artificial Sequence
  Description of Artificial Sequence: Synthetic oligonucleotide
  Mitotic kinesin microtubule-associated protein Eg5 (Kif11) siRNA
tgactaagcttaattgctttctg

SEQ ID NO: 2989 - DNA, 23 bp, Artificial Sequence
  Description of Artificial Sequence: Synthetic oligonucleotide
  Mitotic kinesin microtubule-associated protein Eg5 (Kif11) siRNA
gactaagcttaattgctttctgg

SEQ ID NO: 2990 - DNA, 23 bp, Artificial Sequence
  Description of Artificial Sequence: Synthetic oligonucleotide
  Mitotic kinesin microtubule-associated protein Eg5 (Kif11) siRNA
actaagcttaattgctttctgga

SEQ ID NO: 2991 - DNA, 23 bp, Artificial Sequence
  Description of Artificial Sequence: Synthetic oligonucleotide
  Mitotic kinesin microtubule-associated protein Eg5 (Kif11) siRNA
ctaagcttaattgctttctggaa

SEQ ID NO: 2992 - DNA, 23 bp, Artificial Sequence
  Description of Artificial Sequence: Synthetic oligonucleotide
  Mitotic kinesin microtubule-associated protein Eg5 (Kif11) siRNA
taagcttaattgctttctggaac

SEQ ID NO: 2993 - DNA, 23 bp, Artificial Sequence
  Description of Artificial Sequence: Synthetic oligonucleotide
  Mitotic kinesin microtubule-associated protein Eg5 (Kif11) siRNA
aagcttaattgctttctggaaca

SEQ ID NO: 2994 - DNA, 23 bp, Artificial Sequence
  Description of Artificial Sequence: Synthetic oligonucleotide
  Mitotic kinesin microtubule-associated protein Eg5 (Kif11) siRNA
agcttaattgctttctggaacag

SEQ ID NO: 2995 - DNA, 23 bp, Artificial Sequence
  Description of Artificial Sequence: Synthetic oligonucleotide
  Mitotic kinesin microtubule-associated protein Eg5 (Kif11) siRNA
gcttaattgctttctggaacagg

SEQ ID NO: 2996 - DNA, 23 bp, Artificial Sequence
  Description of Artificial Sequence: Synthetic oligonucleotide
  Mitotic kinesin microtubule-associated protein Eg5 (Kif11) siRNA
cttaattgctttctggaacagga

SEQ ID NO: 2997 - DNA, 23 bp, Artificial Sequence
  Description of Artificial Sequence: Synthetic oligonucleotide
  Mitotic kinesin microtubule-associated protein Eg5 (Kif11) siRNA
ttaattgctttctggaacaggat

SEQ ID NO: 2998 - DNA, 23 bp, Artificial Sequence
  Description of Artificial Sequence: Synthetic oligonucleotide
  Mitotic kinesin microtubule-associated protein Eg5 (Kif11) siRNA
taattgctttctggaacaggatc

SEQ ID NO: 2999 - DNA, 23 bp, Artificial Sequence
  Description of Artificial Sequence: Synthetic oligonucleotide
  Mitotic kinesin microtubule-associated protein Eg5 (Kif11) siRNA
aattgctttctggaacaggatct

SEQ ID NO: 3000 - DNA, 23 bp, Artificial Sequence
  Description of Artificial Sequence: Synthetic oligonucleotide
  Mitotic kinesin microtubule-associated protein Eg5 (Kif11) siRNA
attgctttctggaacaggatctg

SEQ ID NO: 3001 - DNA, 23 bp, Artificial Sequence
  Description of Artificial Sequence: Synthetic oligonucleotide
  Mitotic kinesin microtubule-associated protein Eg5 (Kif11) siRNA
ttgctttctggaacaggatctga

SEQ ID NO: 3002 - DNA, 23 bp, Artificial Sequence
  Description of Artificial Sequence: Synthetic oligonucleotide
  Mitotic kinesin microtubule-associated protein Eg5 (Kif11) siRNA
tgctttctggaacaggatctgaa

SEQ ID NO: 3003 - DNA, 23 bp, Artificial Sequence
  Description of Artificial Sequence: Synthetic oligonucleotide
  Mitotic kinesin microtubule-associated protein Eg5 (Kif11) siRNA
gctttctggaacaggatctgaaa

SEQ ID NO: 3004 - DNA, 23 bp, Artificial Sequence
  Description of Artificial Sequence: Synthetic oligonucleotide
  Mitotic kinesin microtubule-associated protein Eg5 (Kif11) siRNA
ctttctggaacaggatctgaaac

SEQ ID NO: 3005 - DNA, 23 bp, Artificial Sequence
  Description of Artificial Sequence: Synthetic oligonucleotide
  Mitotic kinesin microtubule-associated protein Eg5 (Kif11) siRNA
tttctggaacaggatctgaaact

SEQ ID NO: 3006 - DNA, 23 bp, Artificial Sequence
  Description of Artificial Sequence: Synthetic oligonucleotide
  Mitotic kinesin microtubule-associated protein Eg5 (Kif11) siRNA
ttctggaacaggatctgaaactg

SEQ ID NO: 3007 - DNA, 23 bp, Artificial Sequence
  Description of Artificial Sequence: Synthetic oligonucleotide
  Mitotic kinesin microtubule-associated protein Eg5 (Kif11) siRNA
tctggaacaggatctgaaactgg

SEQ ID NO: 3008 - DNA, 23 bp, Artificial Sequence
  Description of Artificial Sequence: Synthetic oligonucleotide
  Mitotic kinesin microtubule-associated protein Eg5 (Kif11) siRNA
ctggaacaggatctgaaactgga

SEQ ID NO: 3009 - DNA, 23 bp, Artificial Sequence
  Description of Artificial Sequence: Synthetic oligonucleotide
  Mitotic kinesin microtubule-associated protein Eg5 (Kif11) siRNA
tggaacaggatctgaaactggat

SEQ ID NO: 3010 - DNA, 23 bp, Artificial Sequence
  Description of Artificial Sequence: Synthetic oligonucleotide
  Mitotic kinesin microtubule-associated protein Eg5 (Kif11) siRNA
ggaacaggatctgaaactggata

SEQ ID NO: 3011 - DNA, 23 bp, Artificial Sequence
  Description of Artificial Sequence: Synthetic oligonucleotide
  Mitotic kinesin microtubule-associated protein Eg5 (Kif11) siRNA
gaacaggatctgaaactggatat

SEQ ID NO: 3012 - DNA, 23 bp, Artificial Sequence
  Description of Artificial Sequence: Synthetic oligonucleotide
  Mitotic kinesin microtubule-associated protein Eg5 (Kif11) siRNA
aacaggatctgaaactggatatc

SEQ ID NO: 3013 - DNA, 23 bp, Artificial Sequence
  Description of Artificial Sequence: Synthetic oligonucleotide
  Mitotic kinesin microtubule-associated protein Eg5 (Kif11) siRNA
acaggatctgaaactggatatcc

SEQ ID NO: 3014 - DNA, 23 bp, Artificial Sequence
  Description of Artificial Sequence: Synthetic oligonucleotide
  Mitotic kinesin microtubule-associated protein Eg5 (Kif11) siRNA
caggatctgaaactggatatccc

SEQ ID NO: 3015 - DNA, 23 bp, Artificial Sequence
  Description of Artificial Sequence: Synthetic oligonucleotide
  Mitotic kinesin microtubule-associated protein Eg5 (Kif11) siRNA
aggatctgaaactggatatccca

SEQ ID NO: 3016 - DNA, 23 bp, Artificial Sequence
  Description of Artificial Sequence: Synthetic oligonucleotide
  Mitotic kinesin microtubule-associated protein Eg5 (Kif11) siRNA
ggatctgaaactggatatcccaa

SEQ ID NO: 3017 - DNA, 23 bp, Artificial Sequence
  Description of Artificial Sequence: Synthetic oligonucleotide
  Mitotic kinesin microtubule-associated protein Eg5 (Kif11) siRNA
gatctgaaactggatatcccaac

SEQ ID NO: 3018 - DNA, 23 bp, Artificial Sequence
  Description of Artificial Sequence: Synthetic oligonucleotide
  Mitotic kinesin microtubule-associated protein Eg5 (Kif11) siRNA
atctgaaactggatatcccaaca

SEQ ID NO: 3019 - DNA, 23 bp, Artificial Sequence
  Description of Artificial Sequence: Synthetic oligonucleotide
  Mitotic kinesin microtubule-associated protein Eg5 (Kif11) siRNA
tctgaaactggatatcccaacag

SEQ ID NO: 3020 - DNA, 23 bp, Artificial Sequence
  Description of Artificial Sequence: Synthetic oligonucleotide
  Mitotic kinesin microtubule-associated protein Eg5 (Kif11) siRNA
ctgaaactggatatcccaacagg

SEQ ID NO: 3021 - DNA, 23 bp, Artificial Sequence
  Description of Artificial Sequence: Synthetic oligonucleotide
  Mitotic kinesin microtubule-associated protein Eg5 (Kif11) siRNA
tgaaactggatatcccaacaggt

SEQ ID NO: 3022 - DNA, 23 bp, Artificial Sequence
  Description of Artificial Sequence: Synthetic oligonucleotide
  Mitotic kinesin microtubule-associated protein Eg5 (Kif11) siRNA
gaaactggatatcccaacaggta

SEQ ID NO: 3023 - DNA, 23 bp, Artificial Sequence
  Description of Artificial Sequence: Synthetic oligonucleotide
  Mitotic kinesin microtubule-associated protein Eg5 (Kif11) siRNA
aaactggatatcccaacaggtac

SEQ ID NO: 3024 - DNA, 23 bp, Artificial Sequence
  Description of Artificial Sequence: Synthetic oligonucleotide
  Mitotic kinesin microtubule-associated protein Eg5 (Kif11) siRNA
aactggatatcccaacaggtacg

SEQ ID NO: 3025 - DNA, 23 bp, Artificial Sequence
  Description of Artificial Sequence: Synthetic oligonucleotide
  Mitotic kinesin microtubule-associated protein Eg5 (Kif11) siRNA
actggatatcccaacaggtacga

SEQ ID NO: 3026 - DNA, 23 bp, Artificial Sequence
  Description of Artificial Sequence: Synthetic oligonucleotide
  Mitotic kinesin microtubule-associated protein Eg5 (Kif11) siRNA
ctggatatcccaacaggtacgac

SEQ ID NO: 3027 - DNA, 23 bp, Artificial Sequence
  Description of Artificial Sequence: Synthetic oligonucleotide
  Mitotic kinesin microtubule-associated protein Eg5 (Kif11) siRNA
tggatatcccaacaggtacgaca

SEQ ID NO: 3028 - DNA, 23 bp, Artificial Sequence
  Description of Artificial Sequence: Synthetic oligonucleotide
  Mitotic kinesin microtubule-associated protein Eg5 (Kif11) siRNA
ggatatcccaacaggtacgacac

SEQ ID NO: 3029 - DNA, 23 bp, Artificial Sequence
  Description of Artificial Sequence: Synthetic oligonucleotide
  Mitotic kinesin microtubule-associated protein Eg5 (Kif11) siRNA
gatatcccaacaggtacgacacc

SEQ ID NO: 3030 - DNA, 23 bp, Artificial Sequence
  Description of Artificial Sequence: Synthetic oligonucleotide
  Mitotic kinesin microtubule-associated protein Eg5 (Kif11) siRNA
atatcccaacaggtacgacacca

SEQ ID NO: 3031 - DNA, 23 bp, Artificial Sequence
  Description of Artificial Sequence: Synthetic oligonucleotide
  Mitotic kinesin microtubule-associated protein Eg5 (Kif11) siRNA
tatcccaacaggtacgacaccac

SEQ ID NO: 3032 - DNA, 23 bp, Artificial Sequence
  Description of Artificial Sequence: Synthetic oligonucleotide
  Mitotic kinesin microtubule-associated protein Eg5 (Kif11) siRNA
atcccaacaggtacgacaccaca

SEQ ID NO: 3033 - DNA, 23 bp, Artificial Sequence
  Description of Artificial Sequence: Synthetic oligonucleotide
  Mitotic kinesin microtubule-associated protein Eg5 (Kif11) siRNA
tcccaacaggtacgacaccacag

SEQ ID NO: 3034 - DNA, 23 bp, Artificial Sequence
  Description of Artificial Sequence: Synthetic oligonucleotide
  Mitotic kinesin microtubule-associated protein Eg5 (Kif11) siRNA
cccaacaggtacgacaccacaga

SEQ ID NO: 3035 - DNA, 23 bp, Artificial Sequence
  Description of Artificial Sequence: Synthetic oligonucleotide
  Mitotic kinesin microtubule-associated protein Eg5 (Kif11) siRNA
ccaacaggtacgacaccacagag

SEQ ID NO: 3036 - DNA, 23 bp, Artificial Sequence
  Description of Artificial Sequence: Synthetic oligonucleotide
  Mitotic kinesin microtubule-associated protein Eg5 (Kif11) siRNA
caacaggtacgacaccacagagg

SEQ ID NO: 3037 - DNA, 23 bp, Artificial Sequence
  Description of Artificial Sequence: Synthetic oligonucleotide
  Mitotic kinesin microtubule-associated protein Eg5 (Kif11) siRNA
aacaggtacgacaccacagagga

SEQ ID NO: 3038 - DNA, 23 bp, Artificial Sequence
  Description of Artificial Sequence: Synthetic oligonucleotide
  Mitotic kinesin microtubule-associated protein Eg5 (Kif11) siRNA
acaggtacgacaccacagaggaa

SEQ ID NO: 3039 - DNA, 23 bp, Artificial Sequence
  Description of Artificial Sequence: Synthetic oligonucleotide
  Mitotic kinesin microtubule-associated protein Eg5 (Kif11) siRNA
caggtacgacaccacagaggaaa

SEQ ID NO: 3040 - DNA, 23 bp, Artificial Sequence
  Description of Artificial Sequence: Synthetic oligonucleotide
  Mitotic kinesin microtubule-associated protein Eg5 (Kif11) siRNA
aggtacgacaccacagaggaaaa

SEQ ID NO: 3041 - DNA, 23 bp, Artificial Sequence
  Description of Artificial Sequence: Synthetic oligonucleotide
  Mitotic kinesin microtubule-associated protein Eg5 (Kif11) siRNA
ggtacgacaccacagaggaaaag

SEQ ID NO: 3042 - DNA, 23 bp, Artificial Sequence
  Description of Artificial Sequence: Synthetic oligonucleotide
  Mitotic kinesin microtubule-associated protein Eg5 (Kif11) siRNA
gtacgacaccacagaggaaaagt

SEQ ID NO: 3043 - DNA, 23 bp, Artificial Sequence
  Description of Artificial Sequence: Synthetic oligonucleotide
  Mitotic kinesin microtubule-associated protein Eg5 (Kif11) siRNA
tacgacaccacagaggaaaagtt

SEQ ID NO: 3044 - DNA, 23 bp, Artificial Sequence
  Description of Artificial Sequence: Synthetic oligonucleotide
  Mitotic kinesin microtubule-associated protein Eg5 (Kif11) siRNA
acgacaccacagaggaaaagtta

SEQ ID NO: 3045 - DNA, 23 bp, Artificial Sequence
  Description of Artificial Sequence: Synthetic oligonucleotide
  Mitotic kinesin microtubule-associated protein Eg5 (Kif11) siRNA
cgacaccacagaggaaaagttat

SEQ ID NO: 3046 - DNA, 23 bp, Artificial Sequence
  Description of Artificial Sequence: Synthetic oligonucleotide
  Mitotic kinesin microtubule-associated protein Eg5 (Kif11) siRNA
gacaccacagaggaaaagttatt

SEQ ID NO: 3047 - DNA, 23 bp, Artificial Sequence
  Description of Artificial Sequence: Synthetic oligonucleotide
  Mitotic kinesin microtubule-associated protein Eg5 (Kif11) siRNA
acaccacagaggaaaagttattt

SEQ ID NO: 3048 - DNA, 23 bp, Artificial Sequence
  Description of Artificial Sequence: Synthetic oligonucleotide
  Mitotic kinesin microtubule-associated protein Eg5 (Kif11) siRNA
caccacagaggaaaagttattta

SEQ ID NO: 3049 - DNA, 23 bp, Artificial Sequence
  Description of Artificial Sequence: Synthetic oligonucleotide
  Mitotic kinesin microtubule-associated protein Eg5 (Kif11) siRNA
accacagaggaaaagttatttat

SEQ ID NO: 3050 - DNA, 23 bp, Artificial Sequence
  Description of Artificial Sequence: Synthetic oligonucleotide
  Mitotic kinesin microtubule-associated protein Eg5 (Kif11) siRNA
ccacagaggaaaagttatttata

SEQ ID NO: 3051 - DNA, 23 bp, Artificial Sequence
  Description of Artificial Sequence: Synthetic oligonucleotide
  Mitotic kinesin microtubule-associated protein Eg5 (Kif11) siRNA
cacagaggaaaagttatttatac

SEQ ID NO: 3052 - DNA, 23 bp, Artificial Sequence
  Description of Artificial Sequence: Synthetic oligonucleotide
  Mitotic kinesin microtubule-associated protein Eg5 (Kif11) siRNA
acagaggaaaagttatttatacc

SEQ ID NO: 3053 - DNA, 23 bp, Artificial Sequence
  Description of Artificial Sequence: Synthetic oligonucleotide
  Mitotic kinesin microtubule-associated protein Eg5 (Kif11) siRNA
cagaggaaaagttatttataccc

SEQ ID NO: 3054 - DNA, 23 bp, Artificial Sequence
  Description of Artificial Sequence: Synthetic oligonucleotide
  Mitotic kinesin microtubule-associated protein Eg5 (Kif11) siRNA
agaggaaaagttatttataccca

SEQ ID NO: 3055 - DNA, 23 bp, Artificial Sequence
  Description of Artificial Sequence: Synthetic oligonucleotide
  Mitotic kinesin microtubule-associated protein Eg5 (Kif11) siRNA
gaggaaaagttatttatacccat

SEQ ID NO: 3056 - DNA, 23 bp, Artificial Sequence
  Description of Artificial Sequence: Synthetic oligonucleotide
  Mitotic kinesin microtubule-associated protein Eg5 (Kif11) siRNA
aggaaaagttatttatacccatc

SEQ ID NO: 3057 - DNA, 23 bp, Artificial Sequence
  Description of Artificial Sequence: Synthetic oligonucleotide
  Mitotic kinesin microtubule-associated protein Eg5 (Kif11) siRNA
ggaaaagttatttatacccatca

SEQ ID NO: 3058 - DNA, 23 bp, Artificial Sequence
  Description of Artificial Sequence: Synthetic oligonucleotide
  Mitotic kinesin microtubule-associated protein Eg5 (Kif11) siRNA
gaaaagttatttatacccatcaa

SEQ ID NO: 3059 - DNA, 23 bp, Artificial Sequence
  Description of Artificial Sequence: Synthetic oligonucleotide
  Mitotic kinesin microtubule-associated protein Eg5 (Kif11) siRNA
aaaagttatttatacccatcaac

SEQ ID NO: 3060 - DNA, 23 bp, Artificial Sequence
  Description of Artificial Sequence: Synthetic oligonucleotide
  Mitotic kinesin microtubule-associated protein Eg5 (Kif11) siRNA
aaagttatttatacccatcaaca

SEQ ID NO: 3061 - DNA, 23 bp, Artificial Sequence
  Description of Artificial Sequence: Synthetic oligonucleotide
  Mitotic kinesin microtubule-associated protein Eg5 (Kif11) siRNA
aagttatttatacccatcaacac

SEQ ID NO: 3062 - DNA, 23 bp, Artificial Sequence
  Description of Artificial Sequence: Synthetic oligonucleotide
  Mitotic kinesin microtubule-associated protein Eg5 (Kif11) siRNA
agttatttatacccatcaacact

SEQ ID NO: 3063 - DNA, 23 bp, Artificial Sequence
  Description of Artificial Sequence: Synthetic oligonucleotide
  Mitotic kinesin microtubule-associated protein Eg5 (Kif11) siRNA
gttatttatacccatcaacactg

SEQ ID NO: 3064 - DNA, 23 bp, Artificial Sequence
  Description of Artificial Sequence: Synthetic oligonucleotide
  Mitotic kinesin microtubule-associated protein Eg5 (Kif11) siRNA
ttatttatacccatcaacactgg

SEQ ID NO: 3065 - DNA, 23 bp, Artificial Sequence
  Description of Artificial Sequence: Synthetic oligonucleotide
  Mitotic kinesin microtubule-associated protein Eg5 (Kif11) siRNA
tatttatacccatcaacactggt

SEQ ID NO: 3066 - DNA, 23 bp, Artificial Sequence
  Description of Artificial Sequence: Synthetic oligonucleotide
  Mitotic kinesin microtubule-associated protein Eg5 (Kif11) siRNA
atttatacccatcaacactggta

SEQ ID NO: 3067 - DNA, 23 bp, Artificial Sequence
  Description of Artificial Sequence: Synthetic oligonucleotide
  Mitotic kinesin microtubule-associated protein Eg5 (Kif11) siRNA
tttatacccatcaacactggtaa

SEQ ID NO: 3068 - DNA, 23 bp, Artificial Sequence
  Description of Artificial Sequence: Synthetic oligonucleotide
  Mitotic kinesin microtubule-associated protein Eg5 (Kif11) siRNA
ttatacccatcaacactggtaag

SEQ ID NO: 3069 - DNA, 23 bp, Artificial Sequence
  Description of Artificial Sequence: Synthetic oligonucleotide
  Mitotic kinesin microtubule-associated protein Eg5 (Kif11) siRNA
tatacccatcaacactggtaaga

SEQ ID NO: 3070 - DNA, 23 bp, Artificial Sequence
  Description of Artificial Sequence: Synthetic oligonucleotide
  Mitotic kinesin microtubule-associated protein Eg5 (Kif11) siRNA
atacccatcaacactggtaagaa

SEQ ID NO: 3071 - DNA, 23 bp, Artificial Sequence
  Description of Artificial Sequence: Synthetic oligonucleotide
  Mitotic kinesin microtubule-associated protein Eg5 (Kif11) siRNA
tacccatcaacactggtaagaac

SEQ ID NO: 3072 - DNA, 23 bp, Artificial Sequence
  Description of Artificial Sequence: Synthetic oligonucleotide
  Mitotic kinesin microtubule-associated protein Eg5 (Kif11) siRNA
acccatcaacactggtaagaact

SEQ ID NO: 3073 - DNA, 23 bp, Artificial Sequence
  Description of Artificial Sequence: Synthetic oligonucleotide
  Mitotic kinesin microtubule-associated protein Eg5 (Kif11) siRNA
cccatcaacactggtaagaactg

SEQ ID NO: 3074 - DNA, 23 bp, Artificial Sequence
  Description of Artificial Sequence: Synthetic oligonucleotide
  Mitotic kinesin microtubule-associated protein Eg5 (Kif11) siRNA
ccatcaacactggtaagaactga

SEQ ID NO: 3075 - DNA, 23 bp, Artificial Sequence
  Description of Artificial Sequence: Synthetic oligonucleotide
  Mitotic kinesin microtubule-associated protein Eg5 (Kif11) siRNA
catcaacactggtaagaactgaa

SEQ ID NO: 3076 - DNA, 23 bp, Artificial Sequence
  Description of Artificial Sequence: Synthetic oligonucleotide
  Mitotic kinesin microtubule-associated protein Eg5 (Kif11) siRNA
atcaacactggtaagaactgaac

SEQ ID NO: 3077 - DNA, 23 bp, Artificial Sequence
  Description of Artificial Sequence: Synthetic oligonucleotide
  Mitotic kinesin microtubule-associated protein Eg5 (Kif11) siRNA
tcaacactggtaagaactgaacc

SEQ ID NO: 3078 - DNA, 23 bp, Artificial Sequence
  Description of Artificial Sequence: Synthetic oligonucleotide
  Mitotic kinesin microtubule-associated protein Eg5 (Kif11) siRNA
caacactggtaagaactgaacca

SEQ ID NO: 3079 - DNA, 23 bp, Artificial Sequence
  Description of Artificial Sequence: Synthetic oligonucleotide
  Mitotic kinesin microtubule-associated protein Eg5 (Kif11) siRNA
aacactggtaagaactgaaccac

SEQ ID NO: 3080 - DNA, 23 bp, Artificial Sequence
  Description of Artificial Sequence: Synthetic oligonucleotide
  Mitotic kinesin microtubule-associated protein Eg5 (Kif11) siRNA
acactggtaagaactgaaccacg

SEQ ID NO: 3081 - DNA, 23 bp, Artificial Sequence
  Description of Artificial Sequence: Synthetic oligonucleotide
  Mitotic kinesin microtubule-associated protein Eg5 (Kif11) siRNA
cactggtaagaactgaaccacgt

SEQ ID NO: 3082 - DNA, 23 bp, Artificial Sequence
  Description of Artificial Sequence: Synthetic oligonucleotide
  Mitotic kinesin microtubule-associated protein Eg5 (Kif11) siRNA
actggtaagaactgaaccacgtg

SEQ ID NO: 3083 - DNA, 23 bp, Artificial Sequence
  Description of Artificial Sequence: Synthetic oligonucleotide
  Mitotic kinesin microtubule-associated protein Eg5 (Kif11) siRNA
ctggtaagaactgaaccacgtga

SEQ ID NO: 3084 - DNA, 23 bp, Artificial Sequence
  Description of Artificial Sequence: Synthetic oligonucleotide
  Mitotic kinesin microtubule-associated protein Eg5 (Kif11) siRNA
tggtaagaactgaaccacgtgaa

SEQ ID NO: 3085 - DNA, 23 bp, Artificial Sequence
  Description of Artificial Sequence: Synthetic oligonucleotide
  Mitotic kinesin microtubule-associated protein Eg5 (Kif11) siRNA
ggtaagaactgaaccacgtgaac

SEQ ID NO: 3086 - DNA, 23 bp, Artificial Sequence
  Description of Artificial Sequence: Synthetic oligonucleotide
  Mitotic kinesin microtubule-associated protein Eg5 (Kif11) siRNA
gtaagaactgaaccacgtgaaca

SEQ ID NO: 3087 - DNA, 23 bp, Artificial Sequence
  Description of Artificial Sequence: Synthetic oligonucleotide
  Mitotic kinesin microtubule-associated protein Eg5 (Kif11) siRNA
taagaactgaaccacgtgaacat

SEQ ID NO: 3088 - DNA, 23 bp, Artificial Sequence
  Description of Artificial Sequence: Synthetic oligonucleotide
  Mitotic kinesin microtubule-associated protein Eg5 (Kif11) siRNA
aagaactgaaccacgtgaacatc

SEQ ID NO: 3089 - DNA, 23 bp, Artificial Sequence
  Description of Artificial Sequence: Synthetic oligonucleotide
  Mitotic kinesin microtubule-associated protein Eg5 (Kif11) siRNA
agaactgaaccacgtgaacatct

SEQ ID NO: 3090 - DNA, 23 bp, Artificial Sequence
  Description of Artificial Sequence: Synthetic oligonucleotide
  Mitotic kinesin microtubule-associated protein Eg5 (Kif11) siRNA
gaactgaaccacgtgaacatctc

SEQ ID NO: 3091 - DNA, 23 bp, Artificial Sequence
  Description of Artificial Sequence: Synthetic oligonucleotide
  Mitotic kinesin microtubule-associated protein Eg5 (Kif11) siRNA
aactgaaccacgtgaacatctcc

SEQ ID NO: 3092 - DNA, 23 bp, Artificial Sequence
  Description of Artificial Sequence: Synthetic oligonucleotide
  Mitotic kinesin microtubule-associated protein Eg5 (Kif11) siRNA
actgaaccacgtgaacatctcct

SEQ ID NO: 3093 - DNA, 23 bp, Artificial Sequence
  Description of Artificial Sequence: Synthetic oligonucleotide
  Mitotic kinesin microtubule-associated protein Eg5 (Kif11) siRNA
ctgaaccacgtgaacatctcctt

SEQ ID NO: 3094 - DNA, 23 bp, Artificial Sequence
  Description of Artificial Sequence: Synthetic oligonucleotide
  Mitotic kinesin microtubule-associated protein Eg5 (Kif11) siRNA
tgaaccacgtgaacatctccttg

SEQ ID NO: 3095 - DNA, 23 bp, Artificial Sequence
  Description of Artificial Sequence: Synthetic oligonucleotide
  Mitotic kinesin microtubule-associated protein Eg5 (Kif11) siRNA
gaaccacgtgaacatctccttga

SEQ ID NO: 3096 - DNA, 23 bp, Artificial Sequence
  Description of Artificial Sequence: Synthetic oligonucleotide
  Mitotic kinesin microtubule-associated protein Eg5 (Kif11) siRNA
aaccacgtgaacatctccttgat

SEQ ID NO: 3097 - DNA, 23 bp, Artificial Sequence
  Description of Artificial Sequence: Synthetic oligonucleotide
  Mitotic kinesin microtubule-associated protein Eg5 (Kif11) siRNA
accacgtgaacatctccttgatc

SEQ ID NO: 3098 - DNA, 23 bp, Artificial Sequence
  Description of Artificial Sequence: Synthetic oligonucleotide
  Mitotic kinesin microtubule-associated protein Eg5 (Kif11) siRNA
ccacgtgaacatctccttgatca

SEQ ID NO: 3099 - DNA, 23 bp, Artificial Sequence
  Description of Artificial Sequence: Synthetic oligonucleotide
  Mitotic kinesin microtubule-associated protein Eg5 (Kif11) siRNA
cacgtgaacatctccttgatcag

SEQ ID NO: 3100 - DNA, 23 bp, Artificial Sequence
  Description of Artificial Sequence: Synthetic oligonucleotide
  Mitotic kinesin microtubule-associated protein Eg5 (Kif11) siRNA
acgtgaacatctccttgatcagc

SEQ ID NO: 3101 - DNA, 23 bp, Artificial Sequence
  Description of Artificial Sequence: Synthetic oligonucleotide
  Mitotic kinesin microtubule-associated protein Eg5 (Kif11) siRNA
cgtgaacatctccttgatcagct

SEQ ID NO: 3102 - DNA, 23 bp, Artificial Sequence
  Description of Artificial Sequence: Synthetic oligonucleotide
  Mitotic kinesin microtubule-associated protein Eg5 (Kif11) siRNA
gtgaacatctccttgatcagctg

SEQ ID NO: 3103 - DNA, 23 bp, Artificial Sequence
  Description of Artificial Sequence: Synthetic oligonucleotide
  Mitotic kinesin microtubule-associated protein Eg5 (Kif11) siRNA
tgaacatctccttgatcagctga

SEQ ID NO: 3104 - DNA, 23 bp, Artificial Sequence
  Description of Artificial Sequence: Synthetic oligonucleotide
  Mitotic kinesin microtubule-associated protein Eg5 (Kif11) siRNA
gaacatctccttgatcagctgaa

SEQ ID NO: 3105 - DNA, 23 bp, Artificial Sequence
  Description of Artificial Sequence: Synthetic oligonucleotide
  Mitotic kinesin microtubule-associated protein Eg5 (Kif11) siRNA
aacatctccttgatcagctgaaa

SEQ ID NO: 3106 - DNA, 23 bp, Artificial Sequence
  Description of Artificial Sequence: Synthetic oligonucleotide
  Mitotic kinesin microtubule-associated protein Eg5 (Kif11) siRNA
acatctccttgatcagctgaaaa

SEQ ID NO: 3107 - DNA, 23 bp, Artificial Sequence
  Description of Artificial Sequence: Synthetic oligonucleotide
  Mitotic kinesin microtubule-associated protein Eg5 (Kif11) siRNA
catctccttgatcagctgaaaag

SEQ ID NO: 3108 - DNA, 23 bp, Artificial Sequence
  Description of Artificial Sequence: Synthetic oligonucleotide
  Mitotic kinesin microtubule-associated protein Eg5 (Kif11) siRNA
atctccttgatcagctgaaaagg

SEQ ID NO: 3109 - DNA, 23 bp, Artificial Sequence
  Description of Artificial Sequence: Synthetic oligonucleotide
  Mitotic kinesin microtubule-associated protein Eg5 (Kif11) siRNA
tctccttgatcagctgaaaagga

SEQ ID NO: 3110 - DNA, 23 bp, Artificial Sequence
  Description of Artificial Sequence: Synthetic oligonucleotide
  Mitotic kinesin microtubule-associated protein Eg5 (Kif11) siRNA
ctccttgatcagctgaaaaggaa

SEQ ID NO: 3111 - DNA, 23 bp, Artificial Sequence
  Description of Artificial Sequence: Synthetic oligonucleotide
  Mitotic kinesin microtubule-associated protein Eg5 (Kif11) siRNA
tccttgatcagctgaaaaggaaa

SEQ ID NO: 3112 - DNA, 23 bp, Artificial Sequence
  Description of Artificial Sequence: Synthetic oligonucleotide
  Mitotic kinesin microtubule-associated protein Eg5 (Kif11) siRNA
ccttgatcagctgaaaaggaaac

SEQ ID NO: 3113 - DNA, 23 bp, Artificial Sequence
  Description of Artificial Sequence: Synthetic oligonucleotide
  Mitotic kinesin microtubule-associated protein Eg5 (Kif11) siRNA
cttgatcagctgaaaaggaaaca

SEQ ID NO: 3114 - DNA, 23 bp, Artificial Sequence
  Description of Artificial Sequence: Synthetic oligonucleotide
  Mitotic kinesin microtubule-associated protein Eg5 (Kif11) siRNA
ttgatcagctgaaaaggaaacag

SEQ ID NO: 3115 - DNA, 23 bp, Artificial Sequence
  Description of Artificial Sequence: Synthetic oligonucleotide
  Mitotic kinesin microtubule-associated protein Eg5 (Kif11) siRNA
tgatcagctgaaaaggaaacagc

SEQ ID NO: 3116 - DNA, 23 bp, Artificial Sequence
  Description of Artificial Sequence: Synthetic oligonucleotide
  Mitotic kinesin microtubule-associated protein Eg5 (Kif11) siRNA
gatcagctgaaaaggaaacagcc

SEQ ID NO: 3117 - DNA, 23 bp, Artificial Sequence
  Description of Artificial Sequence: Synthetic oligonucleotide
  Mitotic kinesin microtubule-associated protein Eg5 (Kif11) siRNA
atcagctgaaaaggaaacagcct

SEQ ID NO: 3118 - DNA, 23 bp, Artificial Sequence
  Description of Artificial Sequence: Synthetic oligonucleotide
  Mitotic kinesin microtubule-associated protein Eg5 (Kif11) siRNA
tcagctgaaaaggaaacagcctg

SEQ ID NO: 3119 - DNA, 23 bp, Artificial Sequence
  Description of Artificial Sequence: Synthetic oligonucleotide
  Mitotic kinesin microtubule-associated protein Eg5 (Kif11) siRNA
cagctgaaaaggaaacagcctga

SEQ ID NO: 3120 - DNA, 23 bp, Artificial Sequence
  Description of Artificial Sequence: Synthetic oligonucleotide
  Mitotic kinesin microtubule-associated protein Eg5 (Kif11) siRNA
agctgaaaaggaaacagcctgag

SEQ ID NO: 3121 - DNA, 23 bp, Artificial Sequence
  Description of Artificial Sequence: Synthetic oligonucleotide
  Mitotic kinesin microtubule-associated protein Eg5 (Kif11) siRNA
gctgaaaaggaaacagcctgagc

SEQ ID NO: 3122 - DNA, 23 bp, Artificial Sequence
  Description of Artificial Sequence: Synthetic oligonucleotide
  Mitotic kinesin microtubule-associated protein Eg5 (Kif11) siRNA
ctgaaaaggaaacagcctgagct

SEQ ID NO: 3123 - DNA, 23 bp, Artificial Sequence
  Description of Artificial Sequence: Synthetic oligonucleotide
  Mitotic kinesin microtubule-associated protein Eg5 (Kif11) siRNA
tgaaaaggaaacagcctgagctg

SEQ ID NO: 3124 - DNA, 23 bp, Artificial Sequence
  Description of Artificial Sequence: Synthetic oligonucleotide
  Mitotic kinesin microtubule-associated protein Eg5 (Kif11) siRNA
gaaaaggaaacagcctgagctgt

SEQ ID NO: 3125 - DNA, 23 bp, Artificial Sequence
  Description of Artificial Sequence: Synthetic oligonucleotide
  Mitotic kinesin microtubule-associated protein Eg5 (Kif11) siRNA
aaaaggaaacagcctgagctgtt

SEQ ID NO: 3126 - DNA, 23 bp, Artificial Sequence
  Description of Artificial Sequence: Synthetic oligonucleotide
  Mitotic kinesin microtubule-associated protein Eg5 (Kif11) siRNA
aaaggaaacagcctgagctgtta

SEQ ID NO: 3127 - DNA, 23 bp, Artificial Sequence
  Description of Artificial Sequence: Synthetic oligonucleotide
  Mitotic kinesin microtubule-associated protein Eg5 (Kif11) siRNA
aaggaaacagcctgagctgttaa

SEQ ID NO: 3128 - DNA, 23 bp, Artificial Sequence
  Description of Artificial Sequence: Synthetic oligonucleotide
  Mitotic kinesin microtubule-associated protein Eg5 (Kif11) siRNA
aggaaacagcctgagctgttaat

SEQ ID NO: 3129 - DNA, 23 bp, Artificial Sequence
  Description of Artificial Sequence: Synthetic oligonucleotide
  Mitotic kinesin microtubule-associated protein Eg5 (Kif11) siRNA
ggaaacagcctgagctgttaatg

SEQ ID NO: 3130 - DNA, 23 bp, Artificial Sequence
  Description of Artificial Sequence: Synthetic oligonucleotide
  Mitotic kinesin microtubule-associated protein Eg5 (Kif11) siRNA
gaaacagcctgagctgttaatga

SEQ ID NO: 3131 - DNA, 23 bp, Artificial Sequence
  Description of Artificial Sequence: Synthetic oligonucleotide
  Mitotic kinesin microtubule-associated protein Eg5 (Kif11) siRNA
aaacagcctgagctgttaatgat

SEQ ID NO: 3132 - DNA, 23 bp, Artificial Sequence
  Description of Artificial Sequence: Synthetic oligonucleotide
  Mitotic kinesin microtubule-associated protein Eg5 (Kif11) siRNA
aacagcctgagctgttaatgatg

SEQ ID NO: 3133 - DNA, 23 bp, Artificial Sequence
  Description of Artificial Sequence: Synthetic oligonucleotide
  Mitotic kinesin microtubule-associated protein Eg5 (Kif11) siRNA
acagcctgagctgttaatgatgc

SEQ ID NO: 3134 - DNA, 23 bp, Artificial Sequence
  Description of Artificial Sequence: Synthetic oligonucleotide
  Mitotic kinesin microtubule-associated protein Eg5 (Kif11) siRNA
cagcctgagctgttaatgatgct

SEQ ID NO: 3135 - DNA, 23 bp, Artificial Sequence
  Description of Artificial Sequence: Synthetic oligonucleotide
  Mitotic kinesin microtubule-associated protein Eg5 (Kif11) siRNA
agcctgagctgttaatgatgcta

SEQ ID NO: 3136 - DNA, 23 bp, Artificial Sequence
  Description of Artificial Sequence: Synthetic oligonucleotide
  Mitotic kinesin microtubule-associated protein Eg5 (Kif11) siRNA
gcctgagctgttaatgatgctaa

SEQ ID NO: 3137 - DNA, 23 bp, Artificial Sequence
  Description of Artificial Sequence: Synthetic oligonucleotide
  Mitotic kinesin microtubule-associated protein Eg5 (Kif11) siRNA
cctgagctgttaatgatgctaaa

SEQ ID NO: 3138 - DNA, 23 bp, Artificial Sequence
  Description of Artificial Sequence: Synthetic oligonucleotide
  Mitotic kinesin microtubule-associated protein Eg5 (Kif11) siRNA
ctgagctgttaatgatgctaaac

SEQ ID NO: 3139 - DNA, 23 bp, Artificial Sequence
  Description of Artificial Sequence: Synthetic oligonucleotide
  Mitotic kinesin microtubule-associated protein Eg5 (Kif11) siRNA
tgagctgttaatgatgctaaact

SEQ ID NO: 3140 - DNA, 23 bp, Artificial Sequence
  Description of Artificial Sequence: Synthetic oligonucleotide
  Mitotic kinesin microtubule-associated protein Eg5 (Kif11) siRNA
gagctgttaatgatgctaaactg

SEQ ID NO: 3141 - DNA, 23 bp, Artificial Sequence
  Description of Artificial Sequence: Synthetic oligonucleotide
  Mitotic kinesin microtubule-associated protein Eg5 (Kif11) siRNA
agctgttaatgatgctaaactgt

SEQ ID NO: 3142 - DNA, 23 bp, Artificial Sequence
  Description of Artificial Sequence: Synthetic oligonucleotide
  Mitotic kinesin microtubule-associated protein Eg5 (Kif11) siRNA
gctgttaatgatgctaaactgtt

SEQ ID NO: 3143 - DNA, 23 bp, Artificial Sequence
  Description of Artificial Sequence: Synthetic oligonucleotide
  Mitotic kinesin microtubule-associated protein Eg5 (Kif11) siRNA
ctgttaatgatgctaaactgttc

SEQ ID NO: 3144 - DNA, 23 bp, Artificial Sequence
  Description of Artificial Sequence: Synthetic oligonucleotide
  Mitotic kinesin microtubule-associated protein Eg5 (Kif11) siRNA
tgttaatgatgctaaactgttca

SEQ ID NO: 3145 - DNA, 23 bp, Artificial Sequence
  Description of Artificial Sequence: Synthetic oligonucleotide
  Mitotic kinesin microtubule-associated protein Eg5 (Kif11) siRNA
gttaatgatgctaaactgttcag

SEQ ID NO: 3146 - DNA, 23 bp, Artificial Sequence
  Description of Artificial Sequence: Synthetic oligonucleotide
  Mitotic kinesin microtubule-associated protein Eg5 (Kif11) siRNA
ttaatgatgctaaactgttcaga

SEQ ID NO: 3147 - DNA, 23 bp, Artificial Sequence
  Description of Artificial Sequence: Synthetic oligonucleotide
  Mitotic kinesin microtubule-associated protein Eg5 (Kif11) siRNA
taatgatgctaaactgttcagaa

SEQ ID NO: 3148 - DNA, 23 bp, Artificial Sequence
  Description of Artificial Sequence: Synthetic oligonucleotide
  Mitotic kinesin microtubule-associated protein Eg5 (Kif11) siRNA
aatgatgctaaactgttcagaaa

SEQ ID NO: 3149 - DNA, 23 bp, Artificial Sequence
  Description of Artificial Sequence: Synthetic oligonucleotide
  Mitotic kinesin microtubule-associated protein Eg5 (Kif11) siRNA
atgatgctaaactgttcagaaaa

SEQ ID NO: 3150 - DNA, 23 bp, Artificial Sequence
  Description of Artificial Sequence: Synthetic oligonucleotide
  Mitotic kinesin microtubule-associated protein Eg5 (Kif11) siRNA
tgatgctaaactgttcagaaaac

SEQ ID NO: 3151 - DNA, 23 bp, Artificial Sequence
  Description of Artificial Sequence: Synthetic oligonucleotide
  Mitotic kinesin microtubule-associated protein Eg5 (Kif11) siRNA
gatgctaaactgttcagaaaaca

SEQ ID NO: 3152 - DNA, 23 bp, Artificial Sequence
  Description of Artificial Sequence: Synthetic oligonucleotide
  Mitotic kinesin microtubule-associated protein Eg5 (Kif11) siRNA
atgctaaactgttcagaaaacaa

SEQ ID NO: 3153 - DNA, 23 bp, Artificial Sequence
  Description of Artificial Sequence: Synthetic oligonucleotide
  Mitotic kinesin microtubule-associated protein Eg5 (Kif11) siRNA
tgctaaactgttcagaaaacaac

SEQ ID NO: 3154 - DNA, 23 bp, Artificial Sequence
  Description of Artificial Sequence: Synthetic oligonucleotide
  Mitotic kinesin microtubule-associated protein Eg5 (Kif11) siRNA
gctaaactgttcagaaaacaaca

SEQ ID NO: 3155 - DNA, 23 bp, Artificial Sequence
  Description of Artificial Sequence: Synthetic oligonucleotide
  Mitotic kinesin microtubule-associated protein Eg5 (Kif11) siRNA
ctaaactgttcagaaaacaacaa

SEQ ID NO: 3156 - DNA, 23 bp, Artificial Sequence
  Description of Artificial Sequence: Synthetic oligonucleotide
  Mitotic kinesin microtubule-associated protein Eg5 (Kif11) siRNA
taaactgttcagaaaacaacaaa

SEQ ID NO: 3157 - DNA, 23 bp, Artificial Sequence
  Description of Artificial Sequence: Synthetic oligonucleotide
  Mitotic kinesin microtubule-associated protein Eg5 (Kif11) siRNA
aaactgttcagaaaacaacaaag

SEQ ID NO: 3158 - DNA, 23 bp, Artificial Sequence
  Description of Artificial Sequence: Synthetic oligonucleotide
  Mitotic kinesin microtubule-associated protein Eg5 (Kif11) siRNA
aactgttcagaaaacaacaaaga

SEQ ID NO: 3159 - DNA, 23 bp, Artificial Sequence
  Description of Artificial Sequence: Synthetic oligonucleotide
  Mitotic kinesin microtubule-associated protein Eg5 (Kif11) siRNA
actgttcagaaaacaacaaagaa

SEQ ID NO: 3160 - DNA, 23 bp, Artificial Sequence
  Description of Artificial Sequence: Synthetic oligonucleotide
  Mitotic kinesin microtubule-associated protein Eg5 (Kif11) siRNA
ctgttcagaaaacaacaaagaag

SEQ ID NO: 3161 - DNA, 23 bp, Artificial Sequence
  Description of Artificial Sequence: Synthetic oligonucleotide
  Mitotic kinesin microtubule-associated protein Eg5 (Kif11) siRNA
tgttcagaaaacaacaaagaaga

SEQ ID NO: 3162 - DNA, 23 bp, Artificial Sequence
  Description of Artificial Sequence: Synthetic oligonucleotide
  Mitotic kinesin microtubule-associated protein Eg5 (Kif11) siRNA
gttcagaaaacaacaaagaagag

SEQ ID NO: 3163 - DNA, 23 bp, Artificial Sequence
  Description of Artificial Sequence: Synthetic oligonucleotide
  Mitotic kinesin microtubule-associated protein Eg5 (Kif11) siRNA
ttcagaaaacaacaaagaagaga

SEQ ID NO: 3164 - DNA, 23 bp, Artificial Sequence
  Description of Artificial Sequence: Synthetic oligonucleotide
  Mitotic kinesin microtubule-associated protein Eg5 (Kif11) siRNA
tcagaaaacaacaaagaagagac

SEQ ID NO: 3165 - DNA, 23 bp, Artificial Sequence
  Description of Artificial Sequence: Synthetic oligonucleotide
  Mitotic kinesin microtubule-associated protein Eg5 (Kif11) siRNA
cagaaaacaacaaagaagagaca

SEQ ID NO: 3166 - DNA, 23 bp, Artificial Sequence
  Description of Artificial Sequence: Synthetic oligonucleotide
  Mitotic kinesin microtubule-associated protein Eg5 (Kif11) siRNA
agaaaacaacaaagaagagacaa

SEQ ID NO: 3167 - DNA, 23 bp, Artificial Sequence
  Description of Artificial Sequence: Synthetic oligonucleotide
  Mitotic kinesin microtubule-associated protein Eg5 (Kif11) siRNA
gaaaacaacaaagaagagacaat

SEQ ID NO: 3168 - DNA, 23 bp, Artificial Sequence
  Description of Artificial Sequence: Synthetic oligonucleotide
  Mitotic kinesin microtubule-associated protein Eg5 (Kif11) siRNA
aaaacaacaaagaagagacaatt

SEQ ID NO: 3169 - DNA, 23 bp, Artificial Sequence
  Description of Artificial Sequence: Synthetic oligonucleotide
  Mitotic kinesin microtubule-associated protein Eg5 (Kif11) siRNA
aaacaacaaagaagagacaattc

SEQ ID NO: 3170 - DNA, 23 bp, Artificial Sequence
  Description of Artificial Sequence: Synthetic oligonucleotide
  Mitotic kinesin microtubule-associated protein Eg5 (Kif11) siRNA
aacaacaaagaagagacaattcc

SEQ ID NO: 3171 - DNA, 23 bp, Artificial Sequence
  Description of Artificial Sequence: Synthetic oligonucleotide
  Mitotic kinesin microtubule-associated protein Eg5 (Kif11) siRNA
acaacaaagaagagacaattccg

SEQ ID NO: 3172 - DNA, 23 bp, Artificial Sequence
  Description of Artificial Sequence: Synthetic oligonucleotide
  Mitotic kinesin microtubule-associated protein Eg5 (Kif11) siRNA
caacaaagaagagacaattccgg

SEQ ID NO: 3173 - DNA, 23 bp, Artificial Sequence
  Description of Artificial Sequence: Synthetic oligonucleotide
  Mitotic kinesin microtubule-associated protein Eg5 (Kif11) siRNA
aacaaagaagagacaattccgga

SEQ ID NO: 3174 - DNA, 23 bp, Artificial Sequence
  Description of Artificial Sequence: Synthetic oligonucleotide
  Mitotic kinesin microtubule-associated protein Eg5 (Kif11) siRNA
acaaagaagagacaattccggat

SEQ ID NO: 3175 - DNA, 23 bp, Artificial Sequence
  Description of Artificial Sequence: Synthetic oligonucleotide
  Mitotic kinesin microtubule-associated protein Eg5 (Kif11) siRNA
caaagaagagacaattccggatg

SEQ ID NO: 3176 - DNA, 23 bp, Artificial Sequence
  Description of Artificial Sequence: Synthetic oligonucleotide
  Mitotic kinesin microtubule-associated protein Eg5 (Kif11) siRNA
aaagaagagacaattccggatgt

SEQ ID NO: 3177 - DNA, 23 bp, Artificial Sequence
  Description of Artificial Sequence: Synthetic oligonucleotide
  Mitotic kinesin microtubule-associated protein Eg5 (Kif11) siRNA
aagaagagacaattccggatgtg

SEQ ID NO: 3178 - DNA, 23 bp, Artificial Sequence
  Description of Artificial Sequence: Synthetic oligonucleotide
  Mitotic kinesin microtubule-associated protein Eg5 (Kif11) siRNA
agaagagacaattccggatgtgg

SEQ ID NO: 3179 - DNA, 23 bp, Artificial Sequence
  Description of Artificial Sequence: Synthetic oligonucleotide
  Mitotic kinesin microtubule-associated protein Eg5 (Kif11) siRNA
gaagagacaattccggatgtgga

SEQ ID NO: 3180 - DNA, 23 bp, Artificial Sequence
  Description of Artificial Sequence: Synthetic oligonucleotide
  Mitotic kinesin microtubule-associated protein Eg5 (Kif11) siRNA
aagagacaattccggatgtggat

SEQ ID NO: 3181 - DNA, 23 bp, Artificial Sequence
  Description of Artificial Sequence: Synthetic oligonucleotide
  Mitotic kinesin microtubule-associated protein Eg5 (Kif11) siRNA
agagacaattccggatgtggatg

SEQ ID NO: 3182 - DNA, 23 bp, Artificial Sequence
  Description of Artificial Sequence: Synthetic oligonucleotide
  Mitotic kinesin microtubule-associated protein Eg5 (Kif11) siRNA
gagacaattccggatgtggatgt

SEQ ID NO: 3183 - DNA, 23 bp, Artificial Sequence
  Description of Artificial Sequence: Synthetic oligonucleotide
  Mitotic kinesin microtubule-associated protein Eg5 (Kif11) siRNA
agacaattccggatgtggatgta

SEQ ID NO: 3184 - DNA, 23 bp, Artificial Sequence
  Description of Artificial Sequence: Synthetic oligonucleotide
  Mitotic kinesin microtubule-associated protein Eg5 (Kif11) siRNA
gacaattccggatgtggatgtag

SEQ ID NO: 3185 - DNA, 23 bp, Artificial Sequence
  Description of Artificial Sequence: Synthetic oligonucleotide
  Mitotic kinesin microtubule-associated protein Eg5 (Kif11) siRNA
acaattccggatgtggatgtaga

SEQ ID NO: 3186 - DNA, 23 bp, Artificial Sequence
  Description of Artificial Sequence: Synthetic oligonucleotide
  Mitotic kinesin microtubule-associated protein Eg5 (Kif11) siRNA
caattccggatgtggatgtagaa

SEQ ID NO: 3187 - DNA, 23 bp, Artificial Sequence
  Description of Artificial Sequence: Synthetic oligonucleotide
  Mitotic kinesin microtubule-associated protein Eg5 (Kif11) siRNA
aattccggatgtggatgtagaag

SEQ ID NO: 3188 - DNA, 23 bp, Artificial Sequence
  Description of Artificial Sequence: Synthetic oligonucleotide
  Mitotic kinesin microtubule-associated protein Eg5 (Kif11) siRNA
attccggatgtggatgtagaaga

SEQ ID NO: 3189 - DNA, 23 bp, Artificial Sequence
  Description of Artificial Sequence: Synthetic oligonucleotide
  Mitotic kinesin microtubule-associated protein Eg5 (Kif11) siRNA
ttccggatgtggatgtagaagag

SEQ ID NO: 3190 - DNA, 23 bp, Artificial Sequence
  Description of Artificial Sequence: Synthetic oligonucleotide
  Mitotic kinesin microtubule-associated protein Eg5 (Kif11) siRNA
tccggatgtggatgtagaagagg

SEQ ID NO: 3191 - DNA, 23 bp, Artificial Sequence
  Description of Artificial Sequence: Synthetic oligonucleotide
  Mitotic kinesin microtubule-associated protein Eg5 (Kif11) siRNA
ccggatgtggatgtagaagaggc

SEQ ID NO: 3192 - DNA, 23 bp, Artificial Sequence
  Description of Artificial Sequence: Synthetic oligonucleotide
  Mitotic kinesin microtubule-associated protein Eg5 (Kif11) siRNA
cggatgtggatgtagaagaggca

SEQ ID NO: 3193 - DNA, 23 bp, Artificial Sequence
  Description of Artificial Sequence: Synthetic oligonucleotide
  Mitotic kinesin microtubule-associated protein Eg5 (Kif11) siRNA
ggatgtggatgtagaagaggcag

SEQ ID NO: 3194 - DNA, 23 bp, Artificial Sequence
  Description of Artificial Sequence: Synthetic oligonucleotide
  Mitotic kinesin microtubule-associated protein Eg5 (Kif11) siRNA
gatgtggatgtagaagaggcagt

SEQ ID NO: 3195 - DNA, 23 bp, Artificial Sequence
  Description of Artificial Sequence: Synthetic oligonucleotide
  Mitotic kinesin microtubule-associated protein Eg5 (Kif11) siRNA
atgtggatgtagaagaggcagtt

SEQ ID NO: 3196 - DNA, 23 bp, Artificial Sequence
  Description of Artificial Sequence: Synthetic oligonucleotide
  Mitotic kinesin microtubule-associated protein Eg5 (Kif11) siRNA
tgtggatgtagaagaggcagttc

SEQ ID NO: 3197 - DNA, 23 bp, Artificial Sequence
  Description of Artificial Sequence: Synthetic oligonucleotide
  Mitotic kinesin microtubule-associated protein Eg5 (Kif11) siRNA
gtggatgtagaagaggcagttct

SEQ ID NO: 3198 - DNA, 23 bp, Artificial Sequence
  Description of Artificial Sequence: Synthetic oligonucleotide
  Mitotic kinesin microtubule-associated protein Eg5 (Kif11) siRNA
tggatgtagaagaggcagttctg

SEQ ID NO: 3199 - DNA, 23 bp, Artificial Sequence
  Description of Artificial Sequence: Synthetic oligonucleotide
  Mitotic kinesin microtubule-associated protein Eg5 (Kif11) siRNA
ggatgtagaagaggcagttctgg

SEQ ID NO: 3200 - DNA, 23 bp, Artificial Sequence
  Description of Artificial Sequence: Synthetic oligonucleotide
  Mitotic kinesin microtubule-associated protein Eg5 (Kif11) siRNA
gatgtagaagaggcagttctggg

SEQ ID NO: 3201 - DNA, 23 bp, Artificial Sequence
  Description of Artificial Sequence: Synthetic oligonucleotide
  Mitotic kinesin microtubule-associated protein Eg5 (Kif11) siRNA
atgtagaagaggcagttctgggg

SEQ ID NO: 3202 - DNA, 23 bp, Artificial Sequence
  Description of Artificial Sequence: Synthetic oligonucleotide
  Mitotic kinesin microtubule-associated protein Eg5 (Kif11) siRNA
tgtagaagaggcagttctggggc

SEQ ID NO: 3203 - DNA, 23 bp, Artificial Sequence
  Description of Artificial Sequence: Synthetic oligonucleotide
  Mitotic kinesin microtubule-associated protein Eg5 (Kif11) siRNA
gtagaagaggcagttctggggca

SEQ ID NO: 3204 - DNA, 23 bp, Artificial Sequence
  Description of Artificial Sequence: Synthetic oligonucleotide
  Mitotic kinesin microtubule-associated protein Eg5 (Kif11) siRNA
tagaagaggcagttctggggcag

SEQ ID NO: 3205 - DNA, 23 bp, Artificial Sequence
  Description of Artificial Sequence: Synthetic oligonucleotide
  Mitotic kinesin microtubule-associated protein Eg5 (Kif11) siRNA
agaagaggcagttctggggcagt

SEQ ID NO: 3206 - DNA, 23 bp, Artificial Sequence
  Description of Artificial Sequence: Synthetic oligonucleotide
  Mitotic kinesin microtubule-associated protein Eg5 (Kif11) siRNA
gaagaggcagttctggggcagta

SEQ ID NO: 3207 - DNA, 23 bp, Artificial Sequence
  Description of Artificial Sequence: Synthetic oligonucleotide
  Mitotic kinesin microtubule-associated protein Eg5 (Kif11) siRNA
aagaggcagttctggggcagtat

SEQ ID NO: 3208 - DNA, 23 bp, Artificial Sequence
  Description of Artificial Sequence: Synthetic oligonucleotide
  Mitotic kinesin microtubule-associated protein Eg5 (Kif11) siRNA
agaggcagttctggggcagtata

SEQ ID NO: 3209 - DNA, 23 bp, Artificial Sequence
  Description of Artificial Sequence: Synthetic oligonucleotide
  Mitotic kinesin microtubule-associated protein Eg5 (Kif11) siRNA
gaggcagttctggggcagtatac

SEQ ID NO: 3210 - DNA, 23 bp, Artificial Sequence
  Description of Artificial Sequence: Synthetic oligonucleotide
  Mitotic kinesin microtubule-associated protein Eg5 (Kif11) siRNA
aggcagttctggggcagtatact

SEQ ID NO: 3211 - DNA, 23 bp, Artificial Sequence
  Description of Artificial Sequence: Synthetic oligonucleotide
  Mitotic kinesin microtubule-associated protein Eg5 (Kif11) siRNA
ggcagttctggggcagtatactg

SEQ ID NO: 3212 - DNA, 23 bp, Artificial Sequence
  Description of Artificial Sequence: Synthetic oligonucleotide
  Mitotic kinesin microtubule-associated protein Eg5 (Kif11) siRNA
gcagttctggggcagtatactga

SEQ ID NO: 3213 - DNA, 23 bp, Artificial Sequence
  Description of Artificial Sequence: Synthetic oligonucleotide
  Mitotic kinesin microtubule-associated protein Eg5 (Kif11) siRNA
cagttctggggcagtatactgaa

SEQ ID NO: 3214 - DNA, 23 bp, Artificial Sequence
  Description of Artificial Sequence: Synthetic oligonucleotide
  Mitotic kinesin microtubule-associated protein Eg5 (Kif11) siRNA
agttctggggcagtatactgaag

SEQ ID NO: 3215 - DNA, 23 bp, Artificial Sequence
  Description of Artificial Sequence: Synthetic oligonucleotide
  Mitotic kinesin microtubule-associated protein Eg5 (Kif11) siRNA
gttctggggcagtatactgaaga

SEQ ID NO: 3216 - DNA, 23 bp, Artificial Sequence
  Description of Artificial Sequence: Synthetic oligonucleotide
  Mitotic kinesin microtubule-associated protein Eg5 (Kif11) siRNA
ttctggggcagtatactgaagaa

SEQ ID NO: 3217 - DNA, 23 bp, Artificial Sequence
  Description of Artificial Sequence: Synthetic oligonucleotide
  Mitotic kinesin microtubule-associated protein Eg5 (Kif11) siRNA
tctggggcagtatactgaagaac

SEQ ID NO: 3218 - DNA, 23 bp, Artificial Sequence
  Description of Artificial Sequence: Synthetic oligonucleotide
  Mitotic kinesin microtubule-associated protein Eg5 (Kif11) siRNA
ctggggcagtatactgaagaacc

SEQ ID NO: 3219 - DNA, 23 bp, Artificial Sequence
  Description of Artificial Sequence: Synthetic oligonucleotide
  Mitotic kinesin microtubule-associated protein Eg5 (Kif11) siRNA
tggggcagtatactgaagaacct

SEQ ID NO: 3220 - DNA, 23 bp, Artificial Sequence
  Description of Artificial Sequence: Synthetic oligonucleotide
  Mitotic kinesin microtubule-associated protein Eg5 (Kif11) siRNA
ggggcagtatactgaagaacctc

SEQ ID NO: 3221 - DNA, 23 bp, Artificial Sequence
  Description of Artificial Sequence: Synthetic oligonucleotide
  Mitotic kinesin microtubule-associated protein Eg5 (Kif11) siRNA
gggcagtatactgaagaacctct

SEQ ID NO: 3222 - DNA, 23 bp, Artificial Sequence
  Description of Artificial Sequence: Synthetic oligonucleotide
  Mitotic kinesin microtubule-associated protein Eg5 (Kif11) siRNA
ggcagtatactgaagaacctcta

SEQ ID NO: 3223 - DNA, 23 bp, Artificial Sequence
  Description of Artificial Sequence: Synthetic oligonucleotide
  Mitotic kinesin microtubule-associated protein Eg5 (Kif11) siRNA
gcagtatactgaagaacctctaa

SEQ ID NO: 3224 - DNA, 23 bp, Artificial Sequence
  Description of Artificial Sequence: Synthetic oligonucleotide
  Mitotic kinesin microtubule-associated protein Eg5 (Kif11) siRNA
cagtatactgaagaacctctaag

SEQ ID NO: 3225 - DNA, 23 bp, Artificial Sequence
  Description of Artificial Sequence: Synthetic oligonucleotide
  Mitotic kinesin microtubule-associated protein Eg5 (Kif11) siRNA
agtatactgaagaacctctaagt

SEQ ID NO: 3226 - DNA, 23 bp, Artificial Sequence
  Description of Artificial Sequence: Synthetic oligonucleotide
  Mitotic kinesin microtubule-associated protein Eg5 (Kif11) siRNA
gtatactgaagaacctctaagtc

SEQ ID NO: 3227 - DNA, 23 bp, Artificial Sequence
  Description of Artificial Sequence: Synthetic oligonucleotide
  Mitotic kinesin microtubule-associated protein Eg5 (Kif11) siRNA
tatactgaagaacctctaagtca

SEQ ID NO: 3228 - DNA, 23 bp, Artificial Sequence
  Description of Artificial Sequence: Synthetic oligonucleotide
  Mitotic kinesin microtubule-associated protein Eg5 (Kif11) siRNA
atactgaagaacctctaagtcaa

SEQ ID NO: 3229 - DNA, 23 bp, Artificial Sequence
  Description of Artificial Sequence: Synthetic oligonucleotide
  Mitotic kinesin microtubule-associated protein Eg5 (Kif11) siRNA
tactgaagaacctctaagtcaag

SEQ ID NO: 3230 - DNA, 23 bp, Artificial Sequence
  Description of Artificial Sequence: Synthetic oligonucleotide
  Mitotic kinesin microtubule-associated protein Eg5 (Kif11) siRNA
actgaagaacctctaagtcaaga

SEQ ID NO: 3231 - DNA, 23 bp, Artificial Sequence
  Description of Artificial Sequence: Synthetic oligonucleotide
  Mitotic kinesin microtubule-associated protein Eg5 (Kif11) siRNA
ctgaagaacctctaagtcaagag

SEQ ID NO: 3232 - DNA, 23 bp, Artificial Sequence
  Description of Artificial Sequence: Synthetic oligonucleotide
  Mitotic kinesin microtubule-associated protein Eg5 (Kif11) siRNA
tgaagaacctctaagtcaagagc

SEQ ID NO: 3233 - DNA, 23 bp, Artificial Sequence
  Description of Artificial Sequence: Synthetic oligonucleotide
  Mitotic kinesin microtubule-associated protein Eg5 (Kif11) siRNA
gaagaacctctaagtcaagagcc

SEQ ID NO: 3234 - DNA, 23 bp, Artificial Sequence
  Description of Artificial Sequence: Synthetic oligonucleotide
  Mitotic kinesin microtubule-associated protein Eg5 (Kif11) siRNA
aagaacctctaagtcaagagcca

SEQ ID NO: 3235 - DNA, 23 bp, Artificial Sequence
  Description of Artificial Sequence: Synthetic oligonucleotide
  Mitotic kinesin microtubule-associated protein Eg5 (Kif11) siRNA
agaacctctaagtcaagagccat

SEQ ID NO: 3236 - DNA, 23 bp, Artificial Sequence
  Description of Artificial Sequence: Synthetic oligonucleotide
  Mitotic kinesin microtubule-associated protein Eg5 (Kif11) siRNA
gaacctctaagtcaagagccatc

SEQ ID NO: 3237 - DNA, 23 bp, Artificial Sequence
  Description of Artificial Sequence: Synthetic oligonucleotide
  Mitotic kinesin microtubule-associated protein Eg5 (Kif11) siRNA
aacctctaagtcaagagccatct

SEQ ID NO: 3238 - DNA, 23 bp, Artificial Sequence
  Description of Artificial Sequence: Synthetic oligonucleotide
  Mitotic kinesin microtubule-associated protein Eg5 (Kif11) siRNA
acctctaagtcaagagccatctg

SEQ ID NO: 3239 - DNA, 23 bp, Artificial Sequence
  Description of Artificial Sequence: Synthetic oligonucleotide
  Mitotic kinesin microtubule-associated protein Eg5 (Kif11) siRNA
cctctaagtcaagagccatctgt

SEQ ID NO: 3240 - DNA, 23 bp, Artificial Sequence
  Description of Artificial Sequence: Synthetic oligonucleotide
  Mitotic kinesin microtubule-associated protein Eg5 (Kif11) siRNA
ctctaagtcaagagccatctgta

SEQ ID NO: 3241 - DNA, 23 bp, Artificial Sequence
  Description of Artificial Sequence: Synthetic oligonucleotide
  Mitotic kinesin microtubule-associated protein Eg5 (Kif11) siRNA
tctaagtcaagagccatctgtag

SEQ ID NO: 3242 - DNA, 23 bp, Artificial Sequence
  Description of Artificial Sequence: Synthetic oligonucleotide
  Mitotic kinesin microtubule-associated protein Eg5 (Kif11) siRNA
ctaagtcaagagccatctgtaga

SEQ ID NO: 3243 - DNA, 23 bp, Artificial Sequence
  Description of Artificial Sequence: Synthetic oligonucleotide
  Mitotic kinesin microtubule-associated protein Eg5 (Kif11) siRNA
taagtcaagagccatctgtagat

SEQ ID NO: 3244 - DNA, 23 bp, Artificial Sequence
  Description of Artificial Sequence: Synthetic oligonucleotide
  Mitotic kinesin microtubule-associated protein Eg5 (Kif11) siRNA
aagtcaagagccatctgtagatg

SEQ ID NO: 3245 - DNA, 23 bp, Artificial Sequence
  Description of Artificial Sequence: Synthetic oligonucleotide
  Mitotic kinesin microtubule-associated protein Eg5 (Kif11) siRNA
agtcaagagccatctgtagatgc

SEQ ID NO: 3246 - DNA, 23 bp, Artificial Sequence
  Description of Artificial Sequence: Synthetic oligonucleotide
  Mitotic kinesin microtubule-associated protein Eg5 (Kif11) siRNA
gtcaagagccatctgtagatgct

SEQ ID NO: 3247 - DNA, 23 bp, Artificial Sequence
  Description of Artificial Sequence: Synthetic oligonucleotide
  Mitotic kinesin microtubule-associated protein Eg5 (Kif11) siRNA
tcaagagccatctgtagatgctg

SEQ ID NO: 3248 - DNA, 23 bp, Artificial Sequence
  Description of Artificial Sequence: Synthetic oligonucleotide
  Mitotic kinesin microtubule-associated protein Eg5 (Kif11) siRNA
caagagccatctgtagatgctgg

SEQ ID NO: 3249 - DNA, 23 bp, Artificial Sequence
  Description of Artificial Sequence: Synthetic oligonucleotide
  Mitotic kinesin microtubule-associated protein Eg5 (Kif11) siRNA
aagagccatctgtagatgctggt

SEQ ID NO: 3250 - DNA, 23 bp, Artificial Sequence
  Description of Artificial Sequence: Synthetic oligonucleotide
  Mitotic kinesin microtubule-associated protein Eg5 (Kif11) siRNA
agagccatctgtagatgctggtg

SEQ ID NO: 3251 - DNA, 23 bp, Artificial Sequence
  Description of Artificial Sequence: Synthetic oligonucleotide
  Mitotic kinesin microtubule-associated protein Eg5 (Kif11) siRNA
gagccatctgtagatgctggtgt

SEQ ID NO: 3252 - DNA, 23 bp, Artificial Sequence
  Description of Artificial Sequence: Synthetic oligonucleotide
  Mitotic kinesin microtubule-associated protein Eg5 (Kif11) siRNA
agccatctgtagatgctggtgtg

SEQ ID NO: 3253 - DNA, 23 bp, Artificial Sequence
  Description of Artificial Sequence: Synthetic oligonucleotide
  Mitotic kinesin microtubule-associated protein Eg5 (Kif11) siRNA
gccatctgtagatgctggtgtgg

SEQ ID NO: 3254 - DNA, 23 bp, Artificial Sequence
  Description of Artificial Sequence: Synthetic oligonucleotide
  Mitotic kinesin microtubule-associated protein Eg5 (Kif11) siRNA
ccatctgtagatgctggtgtgga

SEQ ID NO: 3255 - DNA, 23 bp, Artificial Sequence
  Description of Artificial Sequence: Synthetic oligonucleotide
  Mitotic kinesin microtubule-associated protein Eg5 (Kif11) siRNA
catctgtagatgctggtgtggat

SEQ ID NO: 3256 - DNA, 23 bp, Artificial Sequence
  Description of Artificial Sequence: Synthetic oligonucleotide
  Mitotic kinesin microtubule-associated protein Eg5 (Kif11) siRNA
atctgtagatgctggtgtggatt

SEQ ID NO: 3257 - DNA, 23 bp, Artificial Sequence
  Description of Artificial Sequence: Synthetic oligonucleotide
  Mitotic kinesin microtubule-associated protein Eg5 (Kif11) siRNA
tctgtagatgctggtgtggattg

SEQ ID NO: 3258 - DNA, 23 bp, Artificial Sequence
  Description of Artificial Sequence: Synthetic oligonucleotide
  Mitotic kinesin microtubule-associated protein Eg5 (Kif11) siRNA
ctgtagatgctggtgtggattgt

SEQ ID NO: 3259 - DNA, 23 bp, Artificial Sequence
  Description of Artificial Sequence: Synthetic oligonucleotide
  Mitotic kinesin microtubule-associated protein Eg5 (Kif11) siRNA
tgtagatgctggtgtggattgtt

SEQ ID NO: 3260 - DNA, 23 bp, Artificial Sequence
  Description of Artificial Sequence: Synthetic oligonucleotide
  Mitotic kinesin microtubule-associated protein Eg5 (Kif11) siRNA
gtagatgctggtgtggattgttc

SEQ ID NO: 3261 - DNA, 23 bp, Artificial Sequence
  Description of Artificial Sequence: Synthetic oligonucleotide
  Mitotic kinesin microtubule-associated protein Eg5 (Kif11) siRNA
tagatgctggtgtggattgttca

SEQ ID NO: 3262 - DNA, 23 bp, Artificial Sequence
  Description of Artificial Sequence: Synthetic oligonucleotide
  Mitotic kinesin microtubule-associated protein Eg5 (Kif11) siRNA
agatgctggtgtggattgttcat

SEQ ID NO: 3263 - DNA, 23 bp, Artificial Sequence
  Description of Artificial Sequence: Synthetic oligonucleotide
  Mitotic kinesin microtubule-associated protein Eg5 (Kif11) siRNA
gatgctggtgtggattgttcatc

SEQ ID NO: 3264 - DNA, 23 bp, Artificial Sequence
  Description of Artificial Sequence: Synthetic oligonucleotide
  Mitotic kinesin microtubule-associated protein Eg5 (Kif11) siRNA
atgctggtgtggattgttcatca

SEQ ID NO: 3265 - DNA, 23 bp, Artificial Sequence
  Description of Artificial Sequence: Synthetic oligonucleotide
  Mitotic kinesin microtubule-associated protein Eg5 (Kif11) siRNA
tgctggtgtggattgttcatcaa

SEQ ID NO: 3266 - DNA, 23 bp, Artificial Sequence
  Description of Artificial Sequence: Synthetic oligonucleotide
  Mitotic kinesin microtubule-associated protein Eg5 (Kif11) siRNA
gctggtgtggattgttcatcaat

SEQ ID NO: 3267 - DNA, 23 bp, Artificial Sequence
  Description of Artificial Sequence: Synthetic oligonucleotide
  Mitotic kinesin microtubule-associated protein Eg5 (Kif11) siRNA
ctggtgtggattgttcatcaatt

SEQ ID NO: 3268 - DNA, 23 bp, Artificial Sequence
  Description of Artificial Sequence: Synthetic oligonucleotide
  Mitotic kinesin microtubule-associated protein Eg5 (Kif11) siRNA
tggtgtggattgttcatcaattg

SEQ ID NO: 3269 - DNA, 23 bp, Artificial Sequence
  Description of Artificial Sequence: Synthetic oligonucleotide
  Mitotic kinesin microtubule-associated protein Eg5 (Kif11) siRNA
ggtgtggattgttcatcaattgg

SEQ ID NO: 3270 - DNA, 23 bp, Artificial Sequence
  Description of Artificial Sequence: Synthetic oligonucleotide
  Mitotic kinesin microtubule-associated protein Eg5 (Kif11) siRNA
gtgtggattgttcatcaattggc

SEQ ID NO: 3271 - DNA, 23 bp, Artificial Sequence
  Description of Artificial Sequence: Synthetic oligonucleotide
  Mitotic kinesin microtubule-associated protein Eg5 (Kif11) siRNA
tgtggattgttcatcaattggcg

SEQ ID NO: 3272 - DNA, 23 bp, Artificial Sequence
  Description of Artificial Sequence: Synthetic oligonucleotide
  Mitotic kinesin microtubule-associated protein Eg5 (Kif11) siRNA
gtggattgttcatcaattggcgg

SEQ ID NO: 3273 - DNA, 23 bp, Artificial Sequence
  Description of Artificial Sequence: Synthetic oligonucleotide
  Mitotic kinesin microtubule-associated protein Eg5 (Kif11) siRNA
tggattgttcatcaattggcggg

SEQ ID NO: 3274 - DNA, 23 bp, Artificial Sequence
  Description of Artificial Sequence: Synthetic oligonucleotide
  Mitotic kinesin microtubule-associated protein Eg5 (Kif11) siRNA
ggattgttcatcaattggcgggg

SEQ ID NO: 3275 - DNA, 23 bp, Artificial Sequence
  Description of Artificial Sequence: Synthetic oligonucleotide
  Mitotic kinesin microtubule-associated protein Eg5 (Kif11) siRNA
gattgttcatcaattggcggggt

SEQ ID NO: 3276 - DNA, 23 bp, Artificial Sequence
  Description of Artificial Sequence: Synthetic oligonucleotide
  Mitotic kinesin microtubule-associated protein Eg5 (Kif11) siRNA
attgttcatcaattggcggggtt

SEQ ID NO: 3277 - DNA, 23 bp, Artificial Sequence
  Description of Artificial Sequence: Synthetic oligonucleotide
  Mitotic kinesin microtubule-associated protein Eg5 (Kif11) siRNA
ttgttcatcaattggcggggttc

SEQ ID NO: 3278 - DNA, 23 bp, Artificial Sequence
  Description of Artificial Sequence: Synthetic oligonucleotide
  Mitotic kinesin microtubule-associated protein Eg5 (Kif11) siRNA
tgttcatcaattggcggggttcc

SEQ ID NO: 3279 - DNA, 23 bp, Artificial Sequence
  Description of Artificial Sequence: Synthetic oligonucleotide
  Mitotic kinesin microtubule-associated protein Eg5 (Kif11) siRNA
gttcatcaattggcggggttcca

SEQ ID NO: 3280 - DNA, 23 bp, Artificial Sequence
  Description of Artificial Sequence: Synthetic oligonucleotide
  Mitotic kinesin microtubule-associated protein Eg5 (Kif11) siRNA
ttcatcaattggcggggttccat

SEQ ID NO: 3281 - DNA, 23 bp, Artificial Sequence
  Description of Artificial Sequence: Synthetic oligonucleotide
  Mitotic kinesin microtubule-associated protein Eg5 (Kif11) siRNA
tcatcaattggcggggttccatt

SEQ ID NO: 3282 - DNA, 23 bp, Artificial Sequence
  Description of Artificial Sequence: Synthetic oligonucleotide
  Mitotic kinesin microtubule-associated protein Eg5 (Kif11) siRNA
catcaattggcggggttccattt

SEQ ID NO: 3283 - DNA, 23 bp, Artificial Sequence
  Description of Artificial Sequence: Synthetic oligonucleotide
  Mitotic kinesin microtubule-associated protein Eg5 (Kif11) siRNA
atcaattggcggggttccatttt

SEQ ID NO: 3284 - DNA, 23 bp, Artificial Sequence
  Description of Artificial Sequence: Synthetic oligonucleotide
  Mitotic kinesin microtubule-associated protein Eg5 (Kif11) siRNA
tcaattggcggggttccattttt

SEQ ID NO: 3285 - DNA, 23 bp, Artificial Sequence
  Description of Artificial Sequence: Synthetic oligonucleotide
  Mitotic kinesin microtubule-associated protein Eg5 (Kif11) siRNA
caattggcggggttccatttttc

SEQ ID NO: 3286 - DNA, 23 bp, Artificial Sequence
  Description of Artificial Sequence: Synthetic oligonucleotide
  Mitotic kinesin microtubule-associated protein Eg5 (Kif11) siRNA
aattggcggggttccatttttcc

SEQ ID NO: 3287 - DNA, 23 bp, Artificial Sequence
  Description of Artificial Sequence: Synthetic oligonucleotide
  Mitotic kinesin microtubule-associated protein Eg5 (Kif11) siRNA
attggcggggttccatttttcca

SEQ ID NO: 3288 - DNA, 23 bp, Artificial Sequence
  Description of Artificial Sequence: Synthetic oligonucleotide
  Mitotic kinesin microtubule-associated protein Eg5 (Kif11) siRNA
ttggcggggttccatttttccag

SEQ ID NO: 3289 - DNA, 23 bp, Artificial Sequence
  Description of Artificial Sequence: Synthetic oligonucleotide
  Mitotic kinesin microtubule-associated protein Eg5 (Kif11) siRNA
tggcggggttccatttttccagc

SEQ ID NO: 3290 - DNA, 23 bp, Artificial Sequence
  Description of Artificial Sequence: Synthetic oligonucleotide
  Mitotic kinesin microtubule-associated protein Eg5 (Kif11) siRNA
ggcggggttccatttttccagca

SEQ ID NO: 3291 - DNA, 23 bp, Artificial Sequence
  Description of Artificial Sequence: Synthetic oligonucleotide
  Mitotic kinesin microtubule-associated protein Eg5 (Kif11) siRNA
gcggggttccatttttccagcat

SEQ ID NO: 3292 - DNA, 23 bp, Artificial Sequence
  Description of Artificial Sequence: Synthetic oligonucleotide
  Mitotic kinesin microtubule-associated protein Eg5 (Kif11) siRNA
cggggttccatttttccagcata

SEQ ID NO: 3293 - DNA, 23 bp, Artificial Sequence
  Description of Artificial Sequence: Synthetic oligonucleotide
  Mitotic kinesin microtubule-associated protein Eg5 (Kif11) siRNA
ggggttccatttttccagcataa

SEQ ID NO: 3294 - DNA, 23 bp, Artificial Sequence
  Description of Artificial Sequence: Synthetic oligonucleotide
  Mitotic kinesin microtubule-associated protein Eg5 (Kif11) siRNA
gggttccatttttccagcataaa

SEQ ID NO: 3295 - DNA, 23 bp, Artificial Sequence
  Description of Artificial Sequence: Synthetic oligonucleotide
  Mitotic kinesin microtubule-associated protein Eg5 (Kif11) siRNA
ggttccatttttccagcataaaa

SEQ ID NO: 3296 - DNA, 23 bp, Artificial Sequence
  Description of Artificial Sequence: Synthetic oligonucleotide
  Mitotic kinesin microtubule-associated protein Eg5 (Kif11) siRNA
gttccatttttccagcataaaaa

SEQ ID NO: 3297 - DNA, 23 bp, Artificial Sequence
  Description of Artificial Sequence: Synthetic oligonucleotide
  Mitotic kinesin microtubule-associated protein Eg5 (Kif11) siRNA
ttccatttttccagcataaaaaa

SEQ ID NO: 3298 - DNA, 23 bp, Artificial Sequence
  Description of Artificial Sequence: Synthetic oligonucleotide
  Mitotic kinesin microtubule-associated protein Eg5 (Kif11) siRNA
tccatttttccagcataaaaaat

SEQ ID NO: 3299 - DNA, 23 bp, Artificial Sequence
  Description of Artificial Sequence: Synthetic oligonucleotide
  Mitotic kinesin microtubule-associated protein Eg5 (Kif11) siRNA
ccatttttccagcataaaaaatc

SEQ ID NO: 3300 - DNA, 23 bp, Artificial Sequence
  Description of Artificial Sequence: Synthetic oligonucleotide
  Mitotic kinesin microtubule-associated protein Eg5 (Kif11) siRNA
catttttccagcataaaaaatca

SEQ ID NO: 3301 - DNA, 23 bp, Artificial Sequence
  Description of Artificial Sequence: Synthetic oligonucleotide
  Mitotic kinesin microtubule-associated protein Eg5 (Kif11) siRNA
atttttccagcataaaaaatcac

SEQ ID NO: 3302 - DNA, 23 bp, Artificial Sequence
  Description of Artificial Sequence: Synthetic oligonucleotide
  Mitotic kinesin microtubule-associated protein Eg5 (Kif11) siRNA
tttttccagcataaaaaatcaca

SEQ ID NO: 3303 - DNA, 23 bp, Artificial Sequence
  Description of Artificial Sequence: Synthetic oligonucleotide
  Mitotic kinesin microtubule-associated protein Eg5 (Kif11) siRNA
ttttccagcataaaaaatcacat

SEQ ID NO: 3304 - DNA, 23 bp, Artificial Sequence
  Description of Artificial Sequence: Synthetic oligonucleotide
  Mitotic kinesin microtubule-associated protein Eg5 (Kif11) siRNA
tttccagcataaaaaatcacatg

SEQ ID NO: 3305 - DNA, 23 bp, Artificial Sequence
  Description of Artificial Sequence: Synthetic oligonucleotide
  Mitotic kinesin microtubule-associated protein Eg5 (Kif11) siRNA
ttccagcataaaaaatcacatgg

SEQ ID NO: 3306 - DNA, 23 bp, Artificial Sequence
  Description of Artificial Sequence: Synthetic oligonucleotide
  Mitotic kinesin microtubule-associated protein Eg5 (Kif11) siRNA
tccagcataaaaaatcacatgga

SEQ ID NO: 3307 - DNA, 23 bp, Artificial Sequence
  Description of Artificial Sequence: Synthetic oligonucleotide
  Mitotic kinesin microtubule-associated protein Eg5 (Kif11) siRNA
ccagcataaaaaatcacatggaa

SEQ ID NO: 3308 - DNA, 23 bp, Artificial Sequence
  Description of Artificial Sequence: Synthetic oligonucleotide
  Mitotic kinesin microtubule-associated protein Eg5 (Kif11) siRNA
cagcataaaaaatcacatggaaa

SEQ ID NO: 3309 - DNA, 23 bp, Artificial Sequence
  Description of Artificial Sequence: Synthetic oligonucleotide
  Mitotic kinesin microtubule-associated protein Eg5 (Kif11) siRNA
agcataaaaaatcacatggaaaa

SEQ ID NO: 3310 - DNA, 23 bp, Artificial Sequence
  Description of Artificial Sequence: Synthetic oligonucleotide
  Mitotic kinesin microtubule-associated protein Eg5 (Kif11) siRNA
gcataaaaaatcacatggaaaag

SEQ ID NO: 3311 - DNA, 23 bp, Artificial Sequence
  Description of Artificial Sequence: Synthetic oligonucleotide
  Mitotic kinesin microtubule-associated protein Eg5 (Kif11) siRNA
cataaaaaatcacatggaaaaga

SEQ ID NO: 3312 - DNA, 23 bp, Artificial Sequence
  Description of Artificial Sequence: Synthetic oligonucleotide
  Mitotic kinesin microtubule-associated protein Eg5 (Kif11) siRNA
ataaaaaatcacatggaaaagac

SEQ ID NO: 3313 - DNA, 23 bp, Artificial Sequence
  Description of Artificial Sequence: Synthetic oligonucleotide
  Mitotic kinesin microtubule-associated protein Eg5 (Kif11) siRNA
taaaaaatcacatggaaaagaca

SEQ ID NO: 3314 - DNA, 23 bp, Artificial Sequence
  Description of Artificial Sequence: Synthetic oligonucleotide
  Mitotic kinesin microtubule-associated protein Eg5 (Kif11) siRNA
aaaaaatcacatggaaaagacaa

SEQ ID NO: 3315 - DNA, 23 bp, Artificial Sequence
  Description of Artificial Sequence: Synthetic oligonucleotide
  Mitotic kinesin microtubule-associated protein Eg5 (Kif11) siRNA
aaaaatcacatggaaaagacaaa

SEQ ID NO: 3316 - DNA, 23 bp, Artificial Sequence
  Description of Artificial Sequence: Synthetic oligonucleotide
  Mitotic kinesin microtubule-associated protein Eg5 (Kif11) siRNA
aaaatcacatggaaaagacaaag

SEQ ID NO: 3317 - DNA, 23 bp, Artificial Sequence
  Description of Artificial Sequence: Synthetic oligonucleotide
  Mitotic kinesin microtubule-associated protein Eg5 (Kif11) siRNA
aaatcacatggaaaagacaaaga

SEQ ID NO: 3318 - DNA, 23 bp, Artificial Sequence
  Description of Artificial Sequence: Synthetic oligonucleotide
  Mitotic kinesin microtubule-associated protein Eg5 (Kif11) siRNA
aatcacatggaaaagacaaagaa

SEQ ID NO: 3319 - DNA, 23 bp, Artificial Sequence
  Description of Artificial Sequence: Synthetic oligonucleotide
  Mitotic kinesin microtubule-associated protein Eg5 (Kif11) siRNA
atcacatggaaaagacaaagaaa

SEQ ID NO: 3320 - DNA, 23 bp, Artificial Sequence
  Description of Artificial Sequence: Synthetic oligonucleotide
  Mitotic kinesin microtubule-associated protein Eg5 (Kif11) siRNA
tcacatggaaaagacaaagaaaa

SEQ ID NO: 3321 - DNA, 23 bp, Artificial Sequence
  Description of Artificial Sequence: Synthetic oligonucleotide
  Mitotic kinesin microtubule-associated protein Eg5 (Kif11) siRNA
cacatggaaaagacaaagaaaac

SEQ ID NO: 3322 - DNA, 23 bp, Artificial Sequence
  Description of Artificial Sequence: Synthetic oligonucleotide
  Mitotic kinesin microtubule-associated protein Eg5 (Kif11) siRNA
acatggaaaagacaaagaaaaca

SEQ ID NO: 3323 - DNA, 23 bp, Artificial Sequence
  Description of Artificial Sequence: Synthetic oligonucleotide
  Mitotic kinesin microtubule-associated protein Eg5 (Kif11) siRNA
catggaaaagacaaagaaaacag

SEQ ID NO: 3324 - DNA, 23 bp, Artificial Sequence
  Description of Artificial Sequence: Synthetic oligonucleotide
  Mitotic kinesin microtubule-associated protein Eg5 (Kif11) siRNA
atggaaaagacaaagaaaacaga

SEQ ID NO: 3325 - DNA, 23 bp, Artificial Sequence
  Description of Artificial Sequence: Synthetic oligonucleotide
  Mitotic kinesin microtubule-associated protein Eg5 (Kif11) siRNA
tggaaaagacaaagaaaacagag

SEQ ID NO: 3326 - DNA, 23 bp, Artificial Sequence
  Description of Artificial Sequence: Synthetic oligonucleotide
  Mitotic kinesin microtubule-associated protein Eg5 (Kif11) siRNA
ggaaaagacaaagaaaacagagg

SEQ ID NO: 3327 - DNA, 23 bp, Artificial Sequence
  Description of Artificial Sequence: Synthetic oligonucleotide
  Mitotic kinesin microtubule-associated protein Eg5 (Kif11) siRNA
gaaaagacaaagaaaacagaggc

SEQ ID NO: 3328 - DNA, 23 bp, Artificial Sequence
  Description of Artificial Sequence: Synthetic oligonucleotide
  Mitotic kinesin microtubule-associated protein Eg5 (Kif11) siRNA
aaaagacaaagaaaacagaggca

SEQ ID NO: 3329 - DNA, 23 bp, Artificial Sequence
  Description of Artificial Sequence: Synthetic oligonucleotide
  Mitotic kinesin microtubule-associated protein Eg5 (Kif11) siRNA
aaagacaaagaaaacagaggcat

SEQ ID NO: 3330 - DNA, 23 bp, Artificial Sequence
  Description of Artificial Sequence: Synthetic oligonucleotide
  Mitotic kinesin microtubule-associated protein Eg5 (Kif11) siRNA
aagacaaagaaaacagaggcatt

SEQ ID NO: 3331 - DNA, 23 bp, Artificial Sequence
  Description of Artificial Sequence: Synthetic oligonucleotide
  Mitotic kinesin microtubule-associated protein Eg5 (Kif11) siRNA
agacaaagaaaacagaggcatta

SEQ ID NO: 3332 - DNA, 23 bp, Artificial Sequence
  Description of Artificial Sequence: Synthetic oligonucleotide
  Mitotic kinesin microtubule-associated protein Eg5 (Kif11) siRNA
gacaaagaaaacagaggcattaa

SEQ ID NO: 3333 - DNA, 23 bp, Artificial Sequence
  Description of Artificial Sequence: Synthetic oligonucleotide
  Mitotic kinesin microtubule-associated protein Eg5 (Kif11) siRNA
acaaagaaaacagaggcattaac

SEQ ID NO: 3334 - DNA, 23 bp, Artificial Sequence
  Description of Artificial Sequence: Synthetic oligonucleotide
  Mitotic kinesin microtubule-associated protein Eg5 (Kif11) siRNA
caaagaaaacagaggcattaaca

SEQ ID NO: 3335 - DNA, 23 bp, Artificial Sequence
  Description of Artificial Sequence: Synthetic oligonucleotide
  Mitotic kinesin microtubule-associated protein Eg5 (Kif11) siRNA
aaagaaaacagaggcattaacac

SEQ ID NO: 3336 - DNA, 23 bp, Artificial Sequence
  Description of Artificial Sequence: Synthetic oligonucleotide
  Mitotic kinesin microtubule-associated protein Eg5 (Kif11) siRNA
aagaaaacagaggcattaacaca

SEQ ID NO: 3337 - DNA, 23 bp, Artificial Sequence
  Description of Artificial Sequence: Synthetic oligonucleotide
  Mitotic kinesin microtubule-associated protein Eg5 (Kif11) siRNA
agaaaacagaggcattaacacac

SEQ ID NO: 3338 - DNA, 23 bp, Artificial Sequence
  Description of Artificial Sequence: Synthetic oligonucleotide
  Mitotic kinesin microtubule-associated protein Eg5 (Kif11) siRNA
gaaaacagaggcattaacacact

SEQ ID NO: 3339 - DNA, 23 bp, Artificial Sequence
  Description of Artificial Sequence: Synthetic oligonucleotide
  Mitotic kinesin microtubule-associated protein Eg5 (Kif11) siRNA
aaaacagaggcattaacacactg

SEQ ID NO: 3340 - DNA, 23 bp, Artificial Sequence
  Description of Artificial Sequence: Synthetic oligonucleotide
  Mitotic kinesin microtubule-associated protein Eg5 (Kif11) siRNA
aaacagaggcattaacacactgg

SEQ ID NO: 3341 - DNA, 23 bp, Artificial Sequence
  Description of Artificial Sequence: Synthetic oligonucleotide
  Mitotic kinesin microtubule-associated protein Eg5 (Kif11) siRNA
aacagaggcattaacacactgga

SEQ ID NO: 3342 - DNA, 23 bp, Artificial Sequence
  Description of Artificial Sequence: Synthetic oligonucleotide
  Mitotic kinesin microtubule-associated protein Eg5 (Kif11) siRNA
acagaggcattaacacactggag

SEQ ID NO: 3343 - DNA, 23 bp, Artificial Sequence
  Description of Artificial Sequence: Synthetic oligonucleotide
  Mitotic kinesin microtubule-associated protein Eg5 (Kif11) siRNA
cagaggcattaacacactggaga

SEQ ID NO: 3344 - DNA, 23 bp, Artificial Sequence
  Description of Artificial Sequence: Synthetic oligonucleotide
  Mitotic kinesin microtubule-associated protein Eg5 (Kif11) siRNA
agaggcattaacacactggagag

SEQ ID NO: 3345 - DNA, 23 bp, Artificial Sequence
  Description of Artificial Sequence: Synthetic oligonucleotide
  Mitotic kinesin microtubule-associated protein Eg5 (Kif11) siRNA
gaggcattaacacactggagagg

SEQ ID NO: 3346 - DNA, 23 bp, Artificial Sequence
  Description of Artificial Sequence: Synthetic oligonucleotide
  Mitotic kinesin microtubule-associated protein Eg5 (Kif11) siRNA
aggcattaacacactggagaggt

SEQ ID NO: 3347 - DNA, 23 bp, Artificial Sequence
  Description of Artificial Sequence: Synthetic oligonucleotide
  Mitotic kinesin microtubule-associated protein Eg5 (Kif11) siRNA
ggcattaacacactggagaggtc

SEQ ID NO: 3348 - DNA, 23 bp, Artificial Sequence
  Description of Artificial Sequence: Synthetic oligonucleotide
  Mitotic kinesin microtubule-associated protein Eg5 (Kif11) siRNA
gcattaacacactggagaggtct

SEQ ID NO: 3349 - DNA, 23 bp, Artificial Sequence
  Description of Artificial Sequence: Synthetic oligonucleotide
  Mitotic kinesin microtubule-associated protein Eg5 (Kif11) siRNA
cattaacacactggagaggtcta

SEQ ID NO: 3350 - DNA, 23 bp, Artificial Sequence
  Description of Artificial Sequence: Synthetic oligonucleotide
  Mitotic kinesin microtubule-associated protein Eg5 (Kif11) siRNA
attaacacactggagaggtctaa

SEQ ID NO: 3351 - DNA, 23 bp, Artificial Sequence
  Description of Artificial Sequence: Synthetic oligonucleotide
  Mitotic kinesin microtubule-associated protein Eg5 (Kif11) siRNA
ttaacacactggagaggtctaaa

SEQ ID NO: 3352 - DNA, 23 bp, Artificial Sequence
  Description of Artificial Sequence: Synthetic oligonucleotide
  Mitotic kinesin microtubule-associated protein Eg5 (Kif11) siRNA
taacacactggagaggtctaaag

SEQ ID NO: 3353 - DNA, 23 bp, Artificial Sequence
  Description of Artificial Sequence: Synthetic oligonucleotide
  Mitotic kinesin microtubule-associated protein Eg5 (Kif11) siRNA
aacacactggagaggtctaaagt

SEQ ID NO: 3354 - DNA, 23 bp, Artificial Sequence
  Description of Artificial Sequence: Synthetic oligonucleotide
  Mitotic kinesin microtubule-associated protein Eg5 (Kif11) siRNA
acacactggagaggtctaaagtg

SEQ ID NO: 3355 - DNA, 23 bp, Artificial Sequence
  Description of Artificial Sequence: Synthetic oligonucleotide
  Mitotic kinesin microtubule-associated protein Eg5 (Kif11) siRNA
cacactggagaggtctaaagtgg

SEQ ID NO: 3356 - DNA, 23 bp, Artificial Sequence
  Description of Artificial Sequence: Synthetic oligonucleotide
  Mitotic kinesin microtubule-associated protein Eg5 (Kif11) siRNA
acactggagaggtctaaagtgga

SEQ ID NO: 3357 - DNA, 23 bp, Artificial Sequence
  Description of Artificial Sequence: Synthetic oligonucleotide
  Mitotic kinesin microtubule-associated protein Eg5 (Kif11) siRNA
cactggagaggtctaaagtggaa

SEQ ID NO: 3358 - DNA, 23 bp, Artificial Sequence
  Description of Artificial Sequence: Synthetic oligonucleotide
  Mitotic kinesin microtubule-associated protein Eg5 (Kif11) siRNA
actggagaggtctaaagtggaag

SEQ ID NO: 3359 - DNA, 23 bp, Artificial Sequence
  Description of Artificial Sequence: Synthetic oligonucleotide
  Mitotic kinesin microtubule-associated protein Eg5 (Kif11) siRNA
ctggagaggtctaaagtggaaga

SEQ ID NO: 3360 - DNA, 23 bp, Artificial Sequence
  Description of Artificial Sequence: Synthetic oligonucleotide
  Mitotic kinesin microtubule-associated protein Eg5 (Kif11) siRNA
tggagaggtctaaagtggaagaa

SEQ ID NO: 3361 - DNA, 23 bp, Artificial Sequence
  Description of Artificial Sequence: Synthetic oligonucleotide
  Mitotic kinesin microtubule-associated protein Eg5 (Kif11) siRNA
ggagaggtctaaagtggaagaaa

SEQ ID NO: 3362 - DNA, 23 bp, Artificial Sequence
  Description of Artificial Sequence: Synthetic oligonucleotide
  Mitotic kinesin microtubule-associated protein Eg5 (Kif11) siRNA
gagaggtctaaagtggaagaaac

SEQ ID NO: 3363 - DNA, 23 bp, Artificial Sequence
  Description of Artificial Sequence: Synthetic oligonucleotide
  Mitotic kinesin microtubule-associated protein Eg5 (Kif11) siRNA
agaggtctaaagtggaagaaact

SEQ ID NO: 3364 - DNA, 23 bp, Artificial Sequence
  Description of Artificial Sequence: Synthetic oligonucleotide
  Mitotic kinesin microtubule-associated protein Eg5 (Kif11) siRNA
gaggtctaaagtggaagaaacta

SEQ ID NO: 3365 - DNA, 23 bp, Artificial Sequence
  Description of Artificial Sequence: Synthetic oligonucleotide
  Mitotic kinesin microtubule-associated protein Eg5 (Kif11) siRNA
aggtctaaagtggaagaaactac

SEQ ID NO: 3366 - DNA, 23 bp, Artificial Sequence
  Description of Artificial Sequence: Synthetic oligonucleotide
  Mitotic kinesin microtubule-associated protein Eg5 (Kif11) siRNA
ggtctaaagtggaagaaactaca

SEQ ID NO: 3367 - DNA, 23 bp, Artificial Sequence
  Description of Artificial Sequence: Synthetic oligonucleotide
  Mitotic kinesin microtubule-associated protein Eg5 (Kif11) siRNA
gtctaaagtggaagaaactacag

SEQ ID NO: 3368 - DNA, 23 bp, Artificial Sequence
  Description of Artificial Sequence: Synthetic oligonucleotide
  Mitotic kinesin microtubule-associated protein Eg5 (Kif11) siRNA
tctaaagtggaagaaactacaga

SEQ ID NO: 3369 - DNA, 23 bp, Artificial Sequence
  Description of Artificial Sequence: Synthetic oligonucleotide
  Mitotic kinesin microtubule-associated protein Eg5 (Kif11) siRNA
ctaaagtggaagaaactacagag

SEQ ID NO: 3370 - DNA, 23 bp, Artificial Sequence
  Description of Artificial Sequence: Synthetic oligonucleotide
  Mitotic kinesin microtubule-associated protein Eg5 (Kif11) siRNA
taaagtggaagaaactacagagc

SEQ ID NO: 3371 - DNA, 23 bp, Artificial Sequence
  Description of Artificial Sequence: Synthetic oligonucleotide
  Mitotic kinesin microtubule-associated protein Eg5 (Kif11) siRNA
aaagtggaagaaactacagagca

SEQ ID NO: 3372 - DNA, 23 bp, Artificial Sequence
  Description of Artificial Sequence: Synthetic oligonucleotide
  Mitotic kinesin microtubule-associated protein Eg5 (Kif11) siRNA
aagtggaagaaactacagagcac

SEQ ID NO: 3373 - DNA, 23 bp, Artificial Sequence
  Description of Artificial Sequence: Synthetic oligonucleotide
  Mitotic kinesin microtubule-associated protein Eg5 (Kif11) siRNA
agtggaagaaactacagagcact

SEQ ID NO: 3374 - DNA, 23 bp, Artificial Sequence
  Description of Artificial Sequence: Synthetic oligonucleotide
  Mitotic kinesin microtubule-associated protein Eg5 (Kif11) siRNA
gtggaagaaactacagagcactt

SEQ ID NO: 3375 - DNA, 23 bp, Artificial Sequence
  Description of Artificial Sequence: Synthetic oligonucleotide
  Mitotic kinesin microtubule-associated protein Eg5 (Kif11) siRNA
tggaagaaactacagagcacttg

SEQ ID NO: 3376 - DNA, 23 bp, Artificial Sequence
  Description of Artificial Sequence: Synthetic oligonucleotide
  Mitotic kinesin microtubule-associated protein Eg5 (Kif11) siRNA
ggaagaaactacagagcacttgg

SEQ ID NO: 3377 - DNA, 23 bp, Artificial Sequence
  Description of Artificial Sequence: Synthetic oligonucleotide
  Mitotic kinesin microtubule-associated protein Eg5 (Kif11) siRNA
gaagaaactacagagcacttggt

SEQ ID NO: 3378 - DNA, 23 bp, Artificial Sequence
  Description of Artificial Sequence: Synthetic oligonucleotide
  Mitotic kinesin microtubule-associated protein Eg5 (Kif11) siRNA
aagaaactacagagcacttggtt

SEQ ID NO: 3379 - DNA, 23 bp, Artificial Sequence
  Description of Artificial Sequence: Synthetic oligonucleotide
  Mitotic kinesin microtubule-associated protein Eg5 (Kif11) siRNA
agaaactacagagcacttggtta

SEQ ID NO: 3380 - DNA, 23 bp, Artificial Sequence
  Description of Artificial Sequence: Synthetic oligonucleotide
  Mitotic kinesin microtubule-associated protein Eg5 (Kif11) siRNA
gaaactacagagcacttggttac

SEQ ID NO: 3381 - DNA, 23 bp, Artificial Sequence
  Description of Artificial Sequence: Synthetic oligonucleotide
  Mitotic kinesin microtubule-associated protein Eg5 (Kif11) siRNA
aaactacagagcacttggttaca

SEQ ID NO: 3382 - DNA, 23 bp, Artificial Sequence
  Description of Artificial Sequence: Synthetic oligonucleotide
  Mitotic kinesin microtubule-associated protein Eg5 (Kif11) siRNA
aactacagagcacttggttacaa

SEQ ID NO: 3383 - DNA, 23 bp, Artificial Sequence
  Description of Artificial Sequence: Synthetic oligonucleotide
  Mitotic kinesin microtubule-associated protein Eg5 (Kif11) siRNA
actacagagcacttggttacaaa

SEQ ID NO: 3384 - DNA, 23 bp, Artificial Sequence
  Description of Artificial Sequence: Synthetic oligonucleotide
  Mitotic kinesin microtubule-associated protein Eg5 (Kif11) siRNA
ctacagagcacttggttacaaag

SEQ ID NO: 3385 - DNA, 23 bp, Artificial Sequence
  Description of Artificial Sequence: Synthetic oligonucleotide
  Mitotic kinesin microtubule-associated protein Eg5 (Kif11) siRNA
tacagagcacttggttacaaaga

SEQ ID NO: 3386 - DNA, 23 bp, Artificial Sequence
  Description of Artificial Sequence: Synthetic oligonucleotide
  Mitotic kinesin microtubule-associated protein Eg5 (Kif11) siRNA
acagagcacttggttacaaagag

SEQ ID NO: 3387 - DNA, 23 bp, Artificial Sequence
  Description of Artificial Sequence: Synthetic oligonucleotide
  Mitotic kinesin microtubule-associated protein Eg5 (Kif11) siRNA
cagagcacttggttacaaagagc

SEQ ID NO: 3388 - DNA, 23 bp, Artificial Sequence
  Description of Artificial Sequence: Synthetic oligonucleotide
  Mitotic kinesin microtubule-associated protein Eg5 (Kif11) siRNA
agagcacttggttacaaagagca

SEQ ID NO: 3389 - DNA, 23 bp, Artificial Sequence
  Description of Artificial Sequence: Synthetic oligonucleotide
  Mitotic kinesin microtubule-associated protein Eg5 (Kif11) siRNA
gagcacttggttacaaagagcag

SEQ ID NO: 3390 - DNA, 23 bp, Artificial Sequence
  Description of Artificial Sequence: Synthetic oligonucleotide
  Mitotic kinesin microtubule-associated protein Eg5 (Kif11) siRNA
agcacttggttacaaagagcaga

SEQ ID NO: 3391 - DNA, 23 bp, Artificial Sequence
  Description of Artificial Sequence: Synthetic oligonucleotide
  Mitotic kinesin microtubule-associated protein Eg5 (Kif11) siRNA
gcacttggttacaaagagcagat

SEQ ID NO: 3392 - DNA, 23 bp, Artificial Sequence
  Description of Artificial Sequence: Synthetic oligonucleotide
  Mitotic kinesin microtubule-associated protein Eg5 (Kif11) siRNA
cacttggttacaaagagcagatt

SEQ ID NO: 3393 - DNA, 23 bp, Artificial Sequence
  Description of Artificial Sequence: Synthetic oligonucleotide
  Mitotic kinesin microtubule-associated protein Eg5 (Kif11) siRNA
acttggttacaaagagcagatta

SEQ ID NO: 3394 - DNA, 23 bp, Artificial Sequence
  Description of Artificial Sequence: Synthetic oligonucleotide
  Mitotic kinesin microtubule-associated protein Eg5 (Kif11) siRNA
cttggttacaaagagcagattac

SEQ ID NO: 3395 - DNA, 23 bp, Artificial Sequence
  Description of Artificial Sequence: Synthetic oligonucleotide
  Mitotic kinesin microtubule-associated protein Eg5 (Kif11) siRNA
ttggttacaaagagcagattacc

SEQ ID NO: 3396 - DNA, 23 bp, Artificial Sequence
  Description of Artificial Sequence: Synthetic oligonucleotide
  Mitotic kinesin microtubule-associated protein Eg5 (Kif11) siRNA
tggttacaaagagcagattacct

SEQ ID NO: 3397 - DNA, 23 bp, Artificial Sequence
  Description of Artificial Sequence: Synthetic oligonucleotide
  Mitotic kinesin microtubule-associated protein Eg5 (Kif11) siRNA
ggttacaaagagcagattacctc

SEQ ID NO: 3398 - DNA, 23 bp, Artificial Sequence
  Description of Artificial Sequence: Synthetic oligonucleotide
  Mitotic kinesin microtubule-associated protein Eg5 (Kif11) siRNA
gttacaaagagcagattacctct

SEQ ID NO: 3399 - DNA, 23 bp, Artificial Sequence
  Description of Artificial Sequence: Synthetic oligonucleotide
  Mitotic kinesin microtubule-associated protein Eg5 (Kif11) siRNA
ttacaaagagcagattacctctg

SEQ ID NO: 3400 - DNA, 23 bp, Artificial Sequence
  Description of Artificial Sequence: Synthetic oligonucleotide
  Mitotic kinesin microtubule-associated protein Eg5 (Kif11) siRNA
tacaaagagcagattacctctgc

SEQ ID NO: 3401 - DNA, 23 bp, Artificial Sequence
  Description of Artificial Sequence: Synthetic oligonucleotide
  Mitotic kinesin microtubule-associated protein Eg5 (Kif11) siRNA
acaaagagcagattacctctgcg

SEQ ID NO: 3402 - DNA, 23 bp, Artificial Sequence
  Description of Artificial Sequence: Synthetic oligonucleotide
  Mitotic kinesin microtubule-associated protein Eg5 (Kif11) siRNA
caaagagcagattacctctgcga

SEQ ID NO: 3403 - DNA, 23 bp, Artificial Sequence
  Description of Artificial Sequence: Synthetic oligonucleotide
  Mitotic kinesin microtubule-associated protein Eg5 (Kif11) siRNA
aaagagcagattacctctgcgag

SEQ ID NO: 3404 - DNA, 23 bp, Artificial Sequence
  Description of Artificial Sequence: Synthetic oligonucleotide
  Mitotic kinesin microtubule-associated protein Eg5 (Kif11) siRNA
aagagcagattacctctgcgagc

SEQ ID NO: 3405 - DNA, 23 bp, Artificial Sequence
  Description of Artificial Sequence: Synthetic oligonucleotide
  Mitotic kinesin microtubule-associated protein Eg5 (Kif11) siRNA
agagcagattacctctgcgagcc

SEQ ID NO: 3406 - DNA, 23 bp, Artificial Sequence
  Description of Artificial Sequence: Synthetic oligonucleotide
  Mitotic kinesin microtubule-associated protein Eg5 (Kif11) siRNA
gagcagattacctctgcgagccc

SEQ ID NO: 3407 - DNA, 23 bp, Artificial Sequence
  Description of Artificial Sequence: Synthetic oligonucleotide
  Mitotic kinesin microtubule-associated protein Eg5 (Kif11) siRNA
agcagattacctctgcgagccca

SEQ ID NO: 3408 - DNA, 23 bp, Artificial Sequence
  Description of Artificial Sequence: Synthetic oligonucleotide
  Mitotic kinesin microtubule-associated protein Eg5 (Kif11) siRNA
gcagattacctctgcgagcccag

SEQ ID NO: 3409 - DNA, 23 bp, Artificial Sequence
  Description of Artificial Sequence: Synthetic oligonucleotide
  Mitotic kinesin microtubule-associated protein Eg5 (Kif11) siRNA
cagattacctctgcgagcccaga

SEQ ID NO: 3410 - DNA, 23 bp, Artificial Sequence
  Description of Artificial Sequence: Synthetic oligonucleotide
  Mitotic kinesin microtubule-associated protein Eg5 (Kif11) siRNA
agattacctctgcgagcccagat

SEQ ID NO: 3411 - DNA, 23 bp, Artificial Sequence
  Description of Artificial Sequence: Synthetic oligonucleotide
  Mitotic kinesin microtubule-associated protein Eg5 (Kif11) siRNA
gattacctctgcgagcccagatc

SEQ ID NO: 3412 - DNA, 23 bp, Artificial Sequence
  Description of Artificial Sequence: Synthetic oligonucleotide
  Mitotic kinesin microtubule-associated protein Eg5 (Kif11) siRNA
attacctctgcgagcccagatca

SEQ ID NO: 3413 - DNA, 23 bp, Artificial Sequence
  Description of Artificial Sequence: Synthetic oligonucleotide
  Mitotic kinesin microtubule-associated protein Eg5 (Kif11) siRNA
ttacctctgcgagcccagatcaa

SEQ ID NO: 3414 - DNA, 23 bp, Artificial Sequence
  Description of Artificial Sequence: Synthetic oligonucleotide
  Mitotic kinesin microtubule-associated protein Eg5 (Kif11) siRNA
tacctctgcgagcccagatcaac

SEQ ID NO: 3415 - DNA, 23 bp, Artificial Sequence
  Description of Artificial Sequence: Synthetic oligonucleotide
  Mitotic kinesin microtubule-associated protein Eg5 (Kif11) siRNA
acctctgcgagcccagatcaacc

SEQ ID NO: 3416 - DNA, 23 bp, Artificial Sequence
  Description of Artificial Sequence: Synthetic oligonucleotide
  Mitotic kinesin microtubule-associated protein Eg5 (Kif11) siRNA
cctctgcgagcccagatcaacct

SEQ ID NO: 3417 - DNA, 23 bp, Artificial Sequence
  Description of Artificial Sequence: Synthetic oligonucleotide
  Mitotic kinesin microtubule-associated protein Eg5 (Kif11) siRNA
ctctgcgagcccagatcaacctt

SEQ ID NO: 3418 - DNA, 23 bp, Artificial Sequence
  Description of Artificial Sequence: Synthetic oligonucleotide
  Mitotic kinesin microtubule-associated protein Eg5 (Kif11) siRNA
tctgcgagcccagatcaaccttt

SEQ ID NO: 3419 - DNA, 23 bp, Artificial Sequence
  Description of Artificial Sequence: Synthetic oligonucleotide
  Mitotic kinesin microtubule-associated protein Eg5 (Kif11) siRNA
ctgcgagcccagatcaaccttta

SEQ ID NO: 3420 - DNA, 23 bp, Artificial Sequence
  Description of Artificial Sequence: Synthetic oligonucleotide
  Mitotic kinesin microtubule-associated protein Eg5 (Kif11) siRNA
ttcacttgggggttggcaatttt

SEQ ID NO: 3421 - DNA, 23 bp, Artificial Sequence
  Description of Artificial Sequence: Synthetic oligonucleotide
  Mitotic kinesin microtubule-associated protein Eg5 (Kif11) siRNA
tcacttgggggttggcaatttta

SEQ ID NO: 3422 - DNA, 23 bp, Artificial Sequence
  Description of Artificial Sequence: Synthetic oligonucleotide
  Mitotic kinesin microtubule-associated protein Eg5 (Kif11) siRNA
cacttgggggttggcaattttat

SEQ ID NO: 3423 - DNA, 23 bp, Artificial Sequence
  Description of Artificial Sequence: Synthetic oligonucleotide
  Mitotic kinesin microtubule-associated protein Eg5 (Kif11) siRNA
acttgggggttggcaattttatt

SEQ ID NO: 3424 - DNA, 23 bp, Artificial Sequence
  Description of Artificial Sequence: Synthetic oligonucleotide
  Mitotic kinesin microtubule-associated protein Eg5 (Kif11) siRNA
cttgggggttggcaattttattt

SEQ ID NO: 3425 - DNA, 23 bp, Artificial Sequence
  Description of Artificial Sequence: Synthetic oligonucleotide
  Mitotic kinesin microtubule-associated protein Eg5 (Kif11) siRNA
ttgggggttggcaattttatttt

SEQ ID NO: 3426 - DNA, 23 bp, Artificial Sequence
  Description of Artificial Sequence: Synthetic oligonucleotide
  Mitotic kinesin microtubule-associated protein Eg5 (Kif11) siRNA
tgggggttggcaattttattttt

SEQ ID NO: 3427 - DNA, 23 bp, Artificial Sequence
  Description of Artificial Sequence: Synthetic oligonucleotide
  Mitotic kinesin microtubule-associated protein Eg5 (Kif11) siRNA
gggggttggcaattttattttta

SEQ ID NO: 3428 - DNA, 23 bp, Artificial Sequence
  Description of Artificial Sequence: Synthetic oligonucleotide
  Mitotic kinesin microtubule-associated protein Eg5 (Kif11) siRNA
ggggttggcaattttatttttaa

SEQ ID NO: 3429 - DNA, 23 bp, Artificial Sequence
  Description of Artificial Sequence: Synthetic oligonucleotide
  Mitotic kinesin microtubule-associated protein Eg5 (Kif11) siRNA
gggttggcaattttatttttaaa

SEQ ID NO: 3430 - DNA, 23 bp, Artificial Sequence
  Description of Artificial Sequence: Synthetic oligonucleotide
  Mitotic kinesin microtubule-associated protein Eg5 (Kif11) siRNA
ggttggcaattttatttttaaag

SEQ ID NO: 3431 - DNA, 23 bp, Artificial Sequence
  Description of Artificial Sequence: Synthetic oligonucleotide
  Mitotic kinesin microtubule-associated protein Eg5 (Kif11) siRNA
gttggcaattttatttttaaaga

SEQ ID NO: 3432 - DNA, 23 bp, Artificial Sequence
  Description of Artificial Sequence: Synthetic oligonucleotide
  Mitotic kinesin microtubule-associated protein Eg5 (Kif11) siRNA
ttggcaattttatttttaaagaa

SEQ ID NO: 3433 - DNA, 23 bp, Artificial Sequence
  Description of Artificial Sequence: Synthetic oligonucleotide
  Mitotic kinesin microtubule-associated protein Eg5 (Kif11) siRNA
tggcaattttatttttaaagaaa

SEQ ID NO: 3434 - DNA, 23 bp, Artificial Sequence
  Description of Artificial Sequence: Synthetic oligonucleotide
  Mitotic kinesin microtubule-associated protein Eg5 (Kif11) siRNA
ggcaattttatttttaaagaaaa

SEQ ID NO: 3435 - DNA, 23 bp, Artificial Sequence
  Description of Artificial Sequence: Synthetic oligonucleotide
  Mitotic kinesin microtubule-associated protein Eg5 (Kif11) siRNA
gcaattttatttttaaagaaaac

SEQ ID NO: 3436 - DNA, 23 bp, Artificial Sequence
  Description of Artificial Sequence: Synthetic oligonucleotide
  Mitotic kinesin microtubule-associated protein Eg5 (Kif11) siRNA
caattttatttttaaagaaaact

SEQ ID NO: 3437 - DNA, 23 bp, Artificial Sequence
  Description of Artificial Sequence: Synthetic oligonucleotide
  Mitotic kinesin microtubule-associated protein Eg5 (Kif11) siRNA
aattttatttttaaagaaaactt

SEQ ID NO: 3438 - DNA, 23 bp, Artificial Sequence
  Description of Artificial Sequence: Synthetic oligonucleotide
  Mitotic kinesin microtubule-associated protein Eg5 (Kif11) siRNA
attttatttttaaagaaaactta

SEQ ID NO: 3439 - DNA, 23 bp, Artificial Sequence
  Description of Artificial Sequence: Synthetic oligonucleotide
  Mitotic kinesin microtubule-associated protein Eg5 (Kif11) siRNA
ttttatttttaaagaaaacttaa

SEQ ID NO: 3440 - DNA, 23 bp, Artificial Sequence
  Description of Artificial Sequence: Synthetic oligonucleotide
  Mitotic kinesin microtubule-associated protein Eg5 (Kif11) siRNA
tttatttttaaagaaaacttaaa

SEQ ID NO: 3441 - DNA, 23 bp, Artificial Sequence
  Description of Artificial Sequence: Synthetic oligonucleotide
  Mitotic kinesin microtubule-associated protein Eg5 (Kif11) siRNA
ttatttttaaagaaaacttaaaa

SEQ ID NO: 3442 - DNA, 23 bp, Artificial Sequence
  Description of Artificial Sequence: Synthetic oligonucleotide
  Mitotic kinesin microtubule-associated protein Eg5 (Kif11) siRNA
tatttttaaagaaaacttaaaaa

SEQ ID NO: 3443 - DNA, 23 bp, Artificial Sequence
  Description of Artificial Sequence: Synthetic oligonucleotide
  Mitotic kinesin microtubule-associated protein Eg5 (Kif11) siRNA
atttttaaagaaaacttaaaaat

SEQ ID NO: 3444 - DNA, 23 bp, Artificial Sequence
  Description of Artificial Sequence: Synthetic oligonucleotide
  Mitotic kinesin microtubule-associated protein Eg5 (Kif11) siRNA
tttttaaagaaaacttaaaaata

SEQ ID NO: 3445 - DNA, 23 bp, Artificial Sequence
  Description of Artificial Sequence: Synthetic oligonucleotide
  Mitotic kinesin microtubule-associated protein Eg5 (Kif11) siRNA
ttttaaagaaaacttaaaaataa

SEQ ID NO: 3446 - DNA, 23 bp, Artificial Sequence
  Description of Artificial Sequence: Synthetic oligonucleotide
  Mitotic kinesin microtubule-associated protein Eg5 (Kif11) siRNA
tttaaagaaaacttaaaaataaa

SEQ ID NO: 3447 - DNA, 23 bp, Artificial Sequence
  Description of Artificial Sequence: Synthetic oligonucleotide
  Mitotic kinesin microtubule-associated protein Eg5 (Kif11) siRNA
ttaaagaaaacttaaaaataaaa

SEQ ID NO: 3448 - DNA, 23 bp, Artificial Sequence
  Description of Artificial Sequence: Synthetic oligonucleotide
  Mitotic kinesin microtubule-associated protein Eg5 (Kif11) siRNA
taaagaaaacttaaaaataaaac

SEQ ID NO: 3449 - DNA, 23 bp, Artificial Sequence
  Description of Artificial Sequence: Synthetic oligonucleotide
  Mitotic kinesin microtubule-associated protein Eg5 (Kif11) siRNA
aaagaaaacttaaaaataaaacc

SEQ ID NO: 3450 - DNA, 23 bp, Artificial Sequence
  Description of Artificial Sequence: Synthetic oligonucleotide
  Mitotic kinesin microtubule-associated protein Eg5 (Kif11) siRNA
aagaaaacttaaaaataaaacct

SEQ ID NO: 3451 - DNA, 23 bp, Artificial Sequence
  Description of Artificial Sequence: Synthetic oligonucleotide
  Mitotic kinesin microtubule-associated protein Eg5 (Kif11) siRNA
agaaaacttaaaaataaaacctg

SEQ ID NO: 3452 - DNA, 23 bp, Artificial Sequence
  Description of Artificial Sequence: Synthetic oligonucleotide
  Mitotic kinesin microtubule-associated protein Eg5 (Kif11) siRNA
gaaaacttaaaaataaaacctga

SEQ ID NO: 3453 - DNA, 23 bp, Artificial Sequence
  Description of Artificial Sequence: Synthetic oligonucleotide
  Mitotic kinesin microtubule-associated protein Eg5 (Kif11) siRNA
aaaacttaaaaataaaacctgaa

SEQ ID NO: 3454 - DNA, 23 bp, Artificial Sequence
  Description of Artificial Sequence: Synthetic oligonucleotide
  Mitotic kinesin microtubule-associated protein Eg5 (Kif11) siRNA
aaacttaaaaataaaacctgaaa

SEQ ID NO: 3455 - DNA, 23 bp, Artificial Sequence
  Description of Artificial Sequence: Synthetic oligonucleotide
  Mitotic kinesin microtubule-associated protein Eg5 (Kif11) siRNA
aacttaaaaataaaacctgaaac

SEQ ID NO: 3456 - DNA, 23 bp, Artificial Sequence
  Description of Artificial Sequence: Synthetic oligonucleotide
  Mitotic kinesin microtubule-associated protein Eg5 (Kif11) siRNA
acttaaaaataaaacctgaaacc

SEQ ID NO: 3457 - DNA, 23 bp, Artificial Sequence
  Description of Artificial Sequence: Synthetic oligonucleotide
  Mitotic kinesin microtubule-associated protein Eg5 (Kif11) siRNA
cttaaaaataaaacctgaaaccc

SEQ ID NO: 3458 - DNA, 23 bp, Artificial Sequence
  Description of Artificial Sequence: Synthetic oligonucleotide
  Mitotic kinesin microtubule-associated protein Eg5 (Kif11) siRNA
ttaaaaataaaacctgaaacccc

SEQ ID NO: 3459 - DNA, 23 bp, Artificial Sequence
  Description of Artificial Sequence: Synthetic oligonucleotide
  Mitotic kinesin microtubule-associated protein Eg5 (Kif11) siRNA
taaaaataaaacctgaaacccca

SEQ ID NO: 3460 - DNA, 23 bp, Artificial Sequence
  Description of Artificial Sequence: Synthetic oligonucleotide
  Mitotic kinesin microtubule-associated protein Eg5 (Kif11) siRNA
aaaaataaaacctgaaaccccag

SEQ ID NO: 3461 - DNA, 23 bp, Artificial Sequence
  Description of Artificial Sequence: Synthetic oligonucleotide
  Mitotic kinesin microtubule-associated protein Eg5 (Kif11) siRNA
aaaataaaacctgaaaccccaga

SEQ ID NO: 3462 - DNA, 23 bp, Artificial Sequence
  Description of Artificial Sequence: Synthetic oligonucleotide
  Mitotic kinesin microtubule-associated protein Eg5 (Kif11) siRNA
aaataaaacctgaaaccccagaa

SEQ ID NO: 3463 - DNA, 23 bp, Artificial Sequence
  Description of Artificial Sequence: Synthetic oligonucleotide
  Mitotic kinesin microtubule-associated protein Eg5 (Kif11) siRNA
aataaaacctgaaaccccagaac

SEQ ID NO: 3464 - DNA, 23 bp, Artificial Sequence
  Description of Artificial Sequence: Synthetic oligonucleotide
  Mitotic kinesin microtubule-associated protein Eg5 (Kif11) siRNA
ataaaacctgaaaccccagaact

SEQ ID NO: 3465 - DNA, 23 bp, Artificial Sequence
  Description of Artificial Sequence: Synthetic oligonucleotide
  Mitotic kinesin microtubule-associated protein Eg5 (Kif11) siRNA
taaaacctgaaaccccagaactt

SEQ ID NO: 3466 - DNA, 23 bp, Artificial Sequence
  Description of Artificial Sequence: Synthetic oligonucleotide
  Mitotic kinesin microtubule-associated protein Eg5 (Kif11) siRNA
aaaacctgaaaccccagaacttg

SEQ ID NO: 3467 - DNA, 23 bp, Artificial Sequence
  Description of Artificial Sequence: Synthetic oligonucleotide
  Mitotic kinesin microtubule-associated protein Eg5 (Kif11) siRNA
aaacctgaaaccccagaacttga

SEQ ID NO: 3468 - DNA, 23 bp, Artificial Sequence
  Description of Artificial Sequence: Synthetic oligonucleotide
  Mitotic kinesin microtubule-associated protein Eg5 (Kif11) siRNA
aacctgaaaccccagaacttgag

SEQ ID NO: 3469 - DNA, 23 bp, Artificial Sequence
  Description of Artificial Sequence: Synthetic oligonucleotide
  Mitotic kinesin microtubule-associated protein Eg5 (Kif11) siRNA
acctgaaaccccagaacttgagc

SEQ ID NO: 3470 - DNA, 23 bp, Artificial Sequence
  Description of Artificial Sequence: Synthetic oligonucleotide
  Mitotic kinesin microtubule-associated protein Eg5 (Kif11) siRNA
cctgaaaccccagaacttgagcc

SEQ ID NO: 3471 - DNA, 23 bp, Artificial Sequence
  Description of Artificial Sequence: Synthetic oligonucleotide
  Mitotic kinesin microtubule-associated protein Eg5 (Kif11) siRNA
ctgaaaccccagaacttgagcct

SEQ ID NO: 3472 - DNA, 23 bp, Artificial Sequence
  Description of Artificial Sequence: Synthetic oligonucleotide
  Mitotic kinesin microtubule-associated protein Eg5 (Kif11) siRNA
tgaaaccccagaacttgagcctt

SEQ ID NO: 3473 - DNA, 23 bp, Artificial Sequence
  Description of Artificial Sequence: Synthetic oligonucleotide
  Mitotic kinesin microtubule-associated protein Eg5 (Kif11) siRNA
gaaaccccagaacttgagccttg

SEQ ID NO: 3474 - DNA, 23 bp, Artificial Sequence
  Description of Artificial Sequence: Synthetic oligonucleotide
  Mitotic kinesin microtubule-associated protein Eg5 (Kif11) siRNA
aaaccccagaacttgagccttgt

SEQ ID NO: 3475 - DNA, 23 bp, Artificial Sequence
  Description of Artificial Sequence: Synthetic oligonucleotide
  Mitotic kinesin microtubule-associated protein Eg5 (Kif11) siRNA
aaccccagaacttgagccttgtg

SEQ ID NO: 3476 - DNA, 23 bp, Artificial Sequence
  Description of Artificial Sequence: Synthetic oligonucleotide
  Mitotic kinesin microtubule-associated protein Eg5 (Kif11) siRNA
accccagaacttgagccttgtgt

SEQ ID NO: 3477 - DNA, 23 bp, Artificial Sequence
  Description of Artificial Sequence: Synthetic oligonucleotide
  Mitotic kinesin microtubule-associated protein Eg5 (Kif11) siRNA
ccccagaacttgagccttgtgta

SEQ ID NO: 3478 - DNA, 23 bp, Artificial Sequence
  Description of Artificial Sequence: Synthetic oligonucleotide
  Mitotic kinesin microtubule-associated protein Eg5 (Kif11) siRNA
cccagaacttgagccttgtgtat

SEQ ID NO: 3479 - DNA, 23 bp, Artificial Sequence
  Description of Artificial Sequence: Synthetic oligonucleotide
  Mitotic kinesin microtubule-associated protein Eg5 (Kif11) siRNA
ccagaacttgagccttgtgtata

SEQ ID NO: 3480 - DNA, 23 bp, Artificial Sequence
  Description of Artificial Sequence: Synthetic oligonucleotide
  Mitotic kinesin microtubule-associated protein Eg5 (Kif11) siRNA
cagaacttgagccttgtgtatag

SEQ ID NO: 3481 - DNA, 23 bp, Artificial Sequence
  Description of Artificial Sequence: Synthetic oligonucleotide
  Mitotic kinesin microtubule-associated protein Eg5 (Kif11) siRNA
agaacttgagccttgtgtataga

SEQ ID NO: 3482 - DNA, 23 bp, Artificial Sequence
  Description of Artificial Sequence: Synthetic oligonucleotide
  Mitotic kinesin microtubule-associated protein Eg5 (Kif11) siRNA
gaacttgagccttgtgtatagat

SEQ ID NO: 3483 - DNA, 23 bp, Artificial Sequence
  Description of Artificial Sequence: Synthetic oligonucleotide
  Mitotic kinesin microtubule-associated protein Eg5 (Kif11) siRNA
aacttgagccttgtgtatagatt

SEQ ID NO: 3484 - DNA, 23 bp, Artificial Sequence
  Description of Artificial Sequence: Synthetic oligonucleotide
  Mitotic kinesin microtubule-associated protein Eg5 (Kif11) siRNA
acttgagccttgtgtatagattt

SEQ ID NO: 3485 - DNA, 23 bp, Artificial Sequence
  Description of Artificial Sequence: Synthetic oligonucleotide
  Mitotic kinesin microtubule-associated protein Eg5 (Kif11) siRNA
cttgagccttgtgtatagatttt

SEQ ID NO: 3486 - DNA, 23 bp, Artificial Sequence
  Description of Artificial Sequence: Synthetic oligonucleotide
  Mitotic kinesin microtubule-associated protein Eg5 (Kif11) siRNA
ttgagccttgtgtatagatttta

SEQ ID NO: 3487 - DNA, 23 bp, Artificial Sequence
  Description of Artificial Sequence: Synthetic oligonucleotide
  Mitotic kinesin microtubule-associated protein Eg5 (Kif11) siRNA
tgagccttgtgtatagattttaa

SEQ ID NO: 3488 - DNA, 23 bp, Artificial Sequence
  Description of Artificial Sequence: Synthetic oligonucleotide
  Mitotic kinesin microtubule-associated protein Eg5 (Kif11) siRNA
gagccttgtgtatagattttaaa

SEQ ID NO: 3489 - DNA, 23 bp, Artificial Sequence
  Description of Artificial Sequence: Synthetic oligonucleotide
  Mitotic kinesin microtubule-associated protein Eg5 (Kif11) siRNA
agccttgtgtatagattttaaaa

SEQ ID NO: 3490 - DNA, 23 bp, Artificial Sequence
  Description of Artificial Sequence: Synthetic oligonucleotide
  Mitotic kinesin microtubule-associated protein Eg5 (Kif11) siRNA
gccttgtgtatagattttaaaag

SEQ ID NO: 3491 - DNA, 23 bp, Artificial Sequence
  Description of Artificial Sequence: Synthetic oligonucleotide
  Mitotic kinesin microtubule-associated protein Eg5 (Kif11) siRNA
ccttgtgtatagattttaaaaga

SEQ ID NO: 3492 - DNA, 23 bp, Artificial Sequence
  Description of Artificial Sequence: Synthetic oligonucleotide
  Mitotic kinesin microtubule-associated protein Eg5 (Kif11) siRNA
cttgtgtatagattttaaaagaa

SEQ ID NO: 3493 - DNA, 23 bp, Artificial Sequence
  Description of Artificial Sequence: Synthetic oligonucleotide
  Mitotic kinesin microtubule-associated protein Eg5 (Kif11) siRNA
ttgtgtatagattttaaaagaat

SEQ ID NO: 3494 - DNA, 23 bp, Artificial Sequence
  Description of Artificial Sequence: Synthetic oligonucleotide
  Mitotic kinesin microtubule-associated protein Eg5 (Kif11) siRNA
tgtgtatagattttaaaagaata

SEQ ID NO: 3495 - DNA, 23 bp, Artificial Sequence
  Description of Artificial Sequence: Synthetic oligonucleotide
  Mitotic kinesin microtubule-associated protein Eg5 (Kif11) siRNA
gtgtatagattttaaaagaatat

SEQ ID NO: 3496 - DNA, 23 bp, Artificial Sequence
  Description of Artificial Sequence: Synthetic oligonucleotide
  Mitotic kinesin microtubule-associated protein Eg5 (Kif11) siRNA
tgtatagattttaaaagaatata

SEQ ID NO: 3497 - DNA, 23 bp, Artificial Sequence
  Description of Artificial Sequence: Synthetic oligonucleotide
  Mitotic kinesin microtubule-associated protein Eg5 (Kif11) siRNA
gtatagattttaaaagaatatat

SEQ ID NO: 3498 - DNA, 23 bp, Artificial Sequence
  Description of Artificial Sequence: Synthetic oligonucleotide
  Mitotic kinesin microtubule-associated protein Eg5 (Kif11) siRNA
tatagattttaaaagaatatata

SEQ ID NO: 3499 - DNA, 23 bp, Artificial Sequence
  Description of Artificial Sequence: Synthetic oligonucleotide
  Mitotic kinesin microtubule-associated protein Eg5 (Kif11) siRNA
atagattttaaaagaatatatat

SEQ ID NO: 3500 - DNA, 23 bp, Artificial Sequence
  Description of Artificial Sequence: Synthetic oligonucleotide
  Mitotic kinesin microtubule-associated protein Eg5 (Kif11) siRNA
tagattttaaaagaatatatata

SEQ ID NO: 3501 - DNA, 23 bp, Artificial Sequence
  Description of Artificial Sequence: Synthetic oligonucleotide
  Mitotic kinesin microtubule-associated protein Eg5 (Kif11) siRNA
agattttaaaagaatatatatat

SEQ ID NO: 3502 - DNA, 23 bp, Artificial Sequence
  Description of Artificial Sequence: Synthetic oligonucleotide
  Mitotic kinesin microtubule-associated protein Eg5 (Kif11) siRNA
gattttaaaagaatatatatatc

SEQ ID NO: 3503 - DNA, 23 bp, Artificial Sequence
  Description of Artificial Sequence: Synthetic oligonucleotide
  Mitotic kinesin microtubule-associated protein Eg5 (Kif11) siRNA
attttaaaagaatatatatatca

SEQ ID NO: 3504 - DNA, 23 bp, Artificial Sequence
  Description of Artificial Sequence: Synthetic oligonucleotide
  Mitotic kinesin microtubule-associated protein Eg5 (Kif11) siRNA
ttttaaaagaatatatatatcag

SEQ ID NO: 3505 - DNA, 23 bp, Artificial Sequence
  Description of Artificial Sequence: Synthetic oligonucleotide
  Mitotic kinesin microtubule-associated protein Eg5 (Kif11) siRNA
tttaaaagaatatatatatcagc

SEQ ID NO: 3506 - DNA, 23 bp, Artificial Sequence
  Description of Artificial Sequence: Synthetic oligonucleotide
  Mitotic kinesin microtubule-associated protein Eg5 (Kif11) siRNA
ttaaaagaatatatatatcagcc

SEQ ID NO: 3507 - DNA, 23 bp, Artificial Sequence
  Description of Artificial Sequence: Synthetic oligonucleotide
  Mitotic kinesin microtubule-associated protein Eg5 (Kif11) siRNA
taaaagaatatatatatcagccg

SEQ ID NO: 3508 - DNA, 23 bp, Artificial Sequence
  Description of Artificial Sequence: Synthetic oligonucleotide
  Mitotic kinesin microtubule-associated protein Eg5 (Kif11) siRNA
aaaagaatatatatatcagccgg

SEQ ID NO: 3509 - DNA, 23 bp, Artificial Sequence
  Description of Artificial Sequence: Synthetic oligonucleotide
  Mitotic kinesin microtubule-associated protein Eg5 (Kif11) siRNA
aaagaatatatatatcagccggg

SEQ ID NO: 3510 - DNA, 23 bp, Artificial Sequence
  Description of Artificial Sequence: Synthetic oligonucleotide
  Mitotic kinesin microtubule-associated protein Eg5 (Kif11) siRNA
aagaatatatatatcagccgggc

SEQ ID NO: 3511 - DNA, 23 bp, Artificial Sequence
  Description of Artificial Sequence: Synthetic oligonucleotide
  Mitotic kinesin microtubule-associated protein Eg5 (Kif11) siRNA
agaatatatatatcagccgggcg

SEQ ID NO: 3512 - DNA, 23 bp, Artificial Sequence
  Description of Artificial Sequence: Synthetic oligonucleotide
  Mitotic kinesin microtubule-associated protein Eg5 (Kif11) siRNA
gggcgcggtggctcatgcctgta

SEQ ID NO: 3513 - DNA, 23 bp, Artificial Sequence
  Description of Artificial Sequence: Synthetic oligonucleotide
  Mitotic kinesin microtubule-associated protein Eg5 (Kif11) siRNA
ggcgcggtggctcatgcctgtaa

SEQ ID NO: 3514 - DNA, 23 bp, Artificial Sequence
  Description of Artificial Sequence: Synthetic oligonucleotide
  Mitotic kinesin microtubule-associated protein Eg5 (Kif11) siRNA
gcgcggtggctcatgcctgtaat

SEQ ID NO: 3515 - DNA, 23 bp, Artificial Sequence
  Description of Artificial Sequence: Synthetic oligonucleotide
  Mitotic kinesin microtubule-associated protein Eg5 (Kif11) siRNA
cgcggtggctcatgcctgtaatc

SEQ ID NO: 3516 - DNA, 23 bp, Artificial Sequence
  Description of Artificial Sequence: Synthetic oligonucleotide
  Mitotic kinesin microtubule-associated protein Eg5 (Kif11) siRNA
gcggtggctcatgcctgtaatcc

SEQ ID NO: 3517 - DNA, 23 bp, Artificial Sequence
  Description of Artificial Sequence: Synthetic oligonucleotide
  Mitotic kinesin microtubule-associated protein Eg5 (Kif11) siRNA
cggtggctcatgcctgtaatccc

SEQ ID NO: 3518 - DNA, 23 bp, Artificial Sequence
  Description of Artificial Sequence: Synthetic oligonucleotide
  Mitotic kinesin microtubule-associated protein Eg5 (Kif11) siRNA
ggtggctcatgcctgtaatccca

SEQ ID NO: 3519 - DNA, 23 bp, Artificial Sequence
  Description of Artificial Sequence: Synthetic oligonucleotide
  Mitotic kinesin microtubule-associated protein Eg5 (Kif11) siRNA
gtggctcatgcctgtaatcccag

SEQ ID NO: 3520 - DNA, 23 bp, Artificial Sequence
  Description of Artificial Sequence: Synthetic oligonucleotide
  Mitotic kinesin microtubule-associated protein Eg5 (Kif11) siRNA
tggctcatgcctgtaatcccagc

SEQ ID NO: 3521 - DNA, 23 bp, Artificial Sequence
  Description of Artificial Sequence: Synthetic oligonucleotide
  Mitotic kinesin microtubule-associated protein Eg5 (Kif11) siRNA
ggctcatgcctgtaatcccagca

SEQ ID NO: 3522 - DNA, 23 bp, Artificial Sequence
  Description of Artificial Sequence: Synthetic oligonucleotide
  Mitotic kinesin microtubule-associated protein Eg5 (Kif11) siRNA
gctcatgcctgtaatcccagcac

SEQ ID NO: 3523 - DNA, 23 bp, Artificial Sequence
  Description of Artificial Sequence: Synthetic oligonucleotide
  Mitotic kinesin microtubule-associated protein Eg5 (Kif11) siRNA
ctcatgcctgtaatcccagcact

SEQ ID NO: 3524 - DNA, 23 bp, Artificial Sequence
  Description of Artificial Sequence: Synthetic oligonucleotide
  Mitotic kinesin microtubule-associated protein Eg5 (Kif11) siRNA
tcatgcctgtaatcccagcactt

SEQ ID NO: 3525 - DNA, 23 bp, Artificial Sequence
  Description of Artificial Sequence: Synthetic oligonucleotide
  Mitotic kinesin microtubule-associated protein Eg5 (Kif11) siRNA
catgcctgtaatcccagcacttt

SEQ ID NO: 3526 - DNA, 23 bp, Artificial Sequence
  Description of Artificial Sequence: Synthetic oligonucleotide
  Mitotic kinesin microtubule-associated protein Eg5 (Kif11) siRNA
atgcctgtaatcccagcactttg

SEQ ID NO: 3527 - DNA, 23 bp, Artificial Sequence
  Description of Artificial Sequence: Synthetic oligonucleotide
  Mitotic kinesin microtubule-associated protein Eg5 (Kif11) siRNA
tgcctgtaatcccagcactttgg

SEQ ID NO: 3528 - DNA, 23 bp, Artificial Sequence
  Description of Artificial Sequence: Synthetic oligonucleotide
  Mitotic kinesin microtubule-associated protein Eg5 (Kif11) siRNA
gcctgtaatcccagcactttggg

SEQ ID NO: 3529 - DNA, 23 bp, Artificial Sequence
  Description of Artificial Sequence: Synthetic oligonucleotide
  Mitotic kinesin microtubule-associated protein Eg5 (Kif11) siRNA
cctgtaatcccagcactttggga

SEQ ID NO: 3530 - DNA, 23 bp, Artificial Sequence
  Description of Artificial Sequence: Synthetic oligonucleotide
  Mitotic kinesin microtubule-associated protein Eg5 (Kif11) siRNA
ctgtaatcccagcactttgggag

SEQ ID NO: 3531 - DNA, 23 bp, Artificial Sequence
  Description of Artificial Sequence: Synthetic oligonucleotide
  Mitotic kinesin microtubule-associated protein Eg5 (Kif11) siRNA
tgtaatcccagcactttgggagg

SEQ ID NO: 3532 - DNA, 23 bp, Artificial Sequence
  Description of Artificial Sequence: Synthetic oligonucleotide
  Mitotic kinesin microtubule-associated protein Eg5 (Kif11) siRNA
gtaatcccagcactttgggaggc

SEQ ID NO: 3533 - DNA, 23 bp, Artificial Sequence
  Description of Artificial Sequence: Synthetic oligonucleotide
  Mitotic kinesin microtubule-associated protein Eg5 (Kif11) siRNA
taatcccagcactttgggaggct

SEQ ID NO: 3534 - DNA, 23 bp, Artificial Sequence
  Description of Artificial Sequence: Synthetic oligonucleotide
  Mitotic kinesin microtubule-associated protein Eg5 (Kif11) siRNA
aatcccagcactttgggaggctg

SEQ ID NO: 3535 - DNA, 23 bp, Artificial Sequence
  Description of Artificial Sequence: Synthetic oligonucleotide
  Mitotic kinesin microtubule-associated protein Eg5 (Kif11) siRNA
atcccagcactttgggaggctga

SEQ ID NO: 3536 - DNA, 23 bp, Artificial Sequence
  Description of Artificial Sequence: Synthetic oligonucleotide
  Mitotic kinesin microtubule-associated protein Eg5 (Kif11) siRNA
tcccagcactttgggaggctgag

SEQ ID NO: 3537 - DNA, 23 bp, Artificial Sequence
  Description of Artificial Sequence: Synthetic oligonucleotide
  Mitotic kinesin microtubule-associated protein Eg5 (Kif11) siRNA
cccagcactttgggaggctgagg

SEQ ID NO: 3538 - DNA, 23 bp, Artificial Sequence
  Description of Artificial Sequence: Synthetic oligonucleotide
  Mitotic kinesin microtubule-associated protein Eg5 (Kif11) siRNA
ccagcactttgggaggctgaggc

SEQ ID NO: 3539 - DNA, 23 bp, Artificial Sequence
  Description of Artificial Sequence: Synthetic oligonucleotide
  Mitotic kinesin microtubule-associated protein Eg5 (Kif11) siRNA
cagcactttgggaggctgaggcg

SEQ ID NO: 3540 - DNA, 23 bp, Artificial Sequence
  Description of Artificial Sequence: Synthetic oligonucleotide
  Mitotic kinesin microtubule-associated protein Eg5 (Kif11) siRNA
agcactttgggaggctgaggcgg

SEQ ID NO: 3541 - DNA, 23 bp, Artificial Sequence
  Description of Artificial Sequence: Synthetic oligonucleotide
  Mitotic kinesin microtubule-associated protein Eg5 (Kif11) siRNA
gcactttgggaggctgaggcggg

SEQ ID NO: 3542 - DNA, 23 bp, Artificial Sequence
  Description of Artificial Sequence: Synthetic oligonucleotide
  Mitotic kinesin microtubule-associated protein Eg5 (Kif11) siRNA
cactttgggaggctgaggcgggt

SEQ ID NO: 3543 - DNA, 23 bp, Artificial Sequence
  Description of Artificial Sequence: Synthetic oligonucleotide
  Mitotic kinesin microtubule-associated protein Eg5 (Kif11) siRNA
actttgggaggctgaggcgggtg

SEQ ID NO: 3544 - DNA, 23 bp, Artificial Sequence
  Description of Artificial Sequence: Synthetic oligonucleotide
  Mitotic kinesin microtubule-associated protein Eg5 (Kif11) siRNA
ctttgggaggctgaggcgggtgg

SEQ ID NO: 3545 - DNA, 23 bp, Artificial Sequence
  Description of Artificial Sequence: Synthetic oligonucleotide
  Mitotic kinesin microtubule-associated protein Eg5 (Kif11) siRNA
tttgggaggctgaggcgggtgga

SEQ ID NO: 3546 - DNA, 23 bp, Artificial Sequence
  Description of Artificial Sequence: Synthetic oligonucleotide
  Mitotic kinesin microtubule-associated protein Eg5 (Kif11) siRNA
ttgggaggctgaggcgggtggat

SEQ ID NO: 3547 - DNA, 23 bp, Artificial Sequence
  Description of Artificial Sequence: Synthetic oligonucleotide
  Mitotic kinesin microtubule-associated protein Eg5 (Kif11) siRNA
tgggaggctgaggcgggtggatt

SEQ ID NO: 3548 - DNA, 23 bp, Artificial Sequence
  Description of Artificial Sequence: Synthetic oligonucleotide
  Mitotic kinesin microtubule-associated protein Eg5 (Kif11) siRNA
gggaggctgaggcgggtggattg

SEQ ID NO: 3549 - DNA, 23 bp, Artificial Sequence
  Description of Artificial Sequence: Synthetic oligonucleotide
  Mitotic kinesin microtubule-associated protein Eg5 (Kif11) siRNA
ggaggctgaggcgggtggattgc

SEQ ID NO: 3550 - DNA, 23 bp, Artificial Sequence
  Description of Artificial Sequence: Synthetic oligonucleotide
  Mitotic kinesin microtubule-associated protein Eg5 (Kif11) siRNA
gaggctgaggcgggtggattgct

SEQ ID NO: 3551 - DNA, 23 bp, Artificial Sequence
  Description of Artificial Sequence: Synthetic oligonucleotide
  Mitotic kinesin microtubule-associated protein Eg5 (Kif11) siRNA
aggctgaggcgggtggattgctt

SEQ ID NO: 3552 - DNA, 23 bp, Artificial Sequence
  Description of Artificial Sequence: Synthetic oligonucleotide
  Mitotic kinesin microtubule-associated protein Eg5 (Kif11) siRNA
ggctgaggcgggtggattgcttg

SEQ ID NO: 3553 - DNA, 23 bp, Artificial Sequence
  Description of Artificial Sequence: Synthetic oligonucleotide
  Mitotic kinesin microtubule-associated protein Eg5 (Kif11) siRNA
gctgaggcgggtggattgcttga

SEQ ID NO: 3554 - DNA, 23 bp, Artificial Sequence
  Description of Artificial Sequence: Synthetic oligonucleotide
  Mitotic kinesin microtubule-associated protein Eg5 (Kif11) siRNA
ctgaggcgggtggattgcttgag

SEQ ID NO: 3555 - DNA, 23 bp, Artificial Sequence
  Description of Artificial Sequence: Synthetic oligonucleotide
  Mitotic kinesin microtubule-associated protein Eg5 (Kif11) siRNA
tgaggcgggtggattgcttgagc

SEQ ID NO: 3556 - DNA, 23 bp, Artificial Sequence
  Description of Artificial Sequence: Synthetic oligonucleotide
  Mitotic kinesin microtubule-associated protein Eg5 (Kif11) siRNA
gaggcgggtggattgcttgagcc

SEQ ID NO: 3557 - DNA, 23 bp, Artificial Sequence
  Description of Artificial Sequence: Synthetic oligonucleotide
  Mitotic kinesin microtubule-associated protein Eg5 (Kif11) siRNA
aggcgggtggattgcttgagccc

SEQ ID NO: 3558 - DNA, 23 bp, Artificial Sequence
  Description of Artificial Sequence: Synthetic oligonucleotide
  Mitotic kinesin microtubule-associated protein Eg5 (Kif11) siRNA
ggcgggtggattgcttgagccca

SEQ ID NO: 3559 - DNA, 23 bp, Artificial Sequence
  Description of Artificial Sequence: Synthetic oligonucleotide
  Mitotic kinesin microtubule-associated protein Eg5 (Kif11) siRNA
gcgggtggattgcttgagcccag

SEQ ID NO: 3560 - DNA, 23 bp, Artificial Sequence
  Description of Artificial Sequence: Synthetic oligonucleotide
  Mitotic kinesin microtubule-associated protein Eg5 (Kif11) siRNA
cgggtggattgcttgagcccagg

SEQ ID NO: 3561 - DNA, 23 bp, Artificial Sequence
  Description of Artificial Sequence: Synthetic oligonucleotide
  Mitotic kinesin microtubule-associated protein Eg5 (Kif11) siRNA
gggtggattgcttgagcccagga

SEQ ID NO: 3562 - DNA, 23 bp, Artificial Sequence
  Description of Artificial Sequence: Synthetic oligonucleotide
  Mitotic kinesin microtubule-associated protein Eg5 (Kif11) siRNA
ggtggattgcttgagcccaggag

SEQ ID NO: 3563 - DNA, 23 bp, Artificial Sequence
  Description of Artificial Sequence: Synthetic oligonucleotide
  Mitotic kinesin microtubule-associated protein Eg5 (Kif11) siRNA
gtggattgcttgagcccaggagt

SEQ ID NO: 3564 - DNA, 23 bp, Artificial Sequence
  Description of Artificial Sequence: Synthetic oligonucleotide
  Mitotic kinesin microtubule-associated protein Eg5 (Kif11) siRNA
tggattgcttgagcccaggagtt

SEQ ID NO: 3565 - DNA, 23 bp, Artificial Sequence
  Description of Artificial Sequence: Synthetic oligonucleotide
  Mitotic kinesin microtubule-associated protein Eg5 (Kif11) siRNA
ggattgcttgagcccaggagttt

SEQ ID NO: 3566 - DNA, 23 bp, Artificial Sequence
  Description of Artificial Sequence: Synthetic oligonucleotide
  Mitotic kinesin microtubule-associated protein Eg5 (Kif11) siRNA
gattgcttgagcccaggagtttg

SEQ ID NO: 3567 - DNA, 23 bp, Artificial Sequence
  Description of Artificial Sequence: Synthetic oligonucleotide
  Mitotic kinesin microtubule-associated protein Eg5 (Kif11) siRNA
attgcttgagcccaggagtttga

SEQ ID NO: 3568 - DNA, 23 bp, Artificial Sequence
  Description of Artificial Sequence: Synthetic oligonucleotide
  Mitotic kinesin microtubule-associated protein Eg5 (Kif11) siRNA
ttgcttgagcccaggagtttgag

SEQ ID NO: 3569 - DNA, 23 bp, Artificial Sequence
  Description of Artificial Sequence: Synthetic oligonucleotide
  Mitotic kinesin microtubule-associated protein Eg5 (Kif11) siRNA
tgcttgagcccaggagtttgaga

SEQ ID NO: 3570 - DNA, 23 bp, Artificial Sequence
  Description of Artificial Sequence: Synthetic oligonucleotide
  Mitotic kinesin microtubule-associated protein Eg5 (Kif11) siRNA
gcttgagcccaggagtttgagac

SEQ ID NO: 3571 - DNA, 23 bp, Artificial Sequence
  Description of Artificial Sequence: Synthetic oligonucleotide
  Mitotic kinesin microtubule-associated protein Eg5 (Kif11) siRNA
cttgagcccaggagtttgagacc

SEQ ID NO: 3572 - DNA, 23 bp, Artificial Sequence
  Description of Artificial Sequence: Synthetic oligonucleotide
  Mitotic kinesin microtubule-associated protein Eg5 (Kif11) siRNA
ttgagcccaggagtttgagacca

SEQ ID NO: 3573 - DNA, 23 bp, Artificial Sequence
  Description of Artificial Sequence: Synthetic oligonucleotide
  Mitotic kinesin microtubule-associated protein Eg5 (Kif11) siRNA
tgagcccaggagtttgagaccag

SEQ ID NO: 3574 - DNA, 23 bp, Artificial Sequence
  Description of Artificial Sequence: Synthetic oligonucleotide
  Mitotic kinesin microtubule-associated protein Eg5 (Kif11) siRNA
gagcccaggagtttgagaccagc

SEQ ID NO: 3575 - DNA, 23 bp, Artificial Sequence
  Description of Artificial Sequence: Synthetic oligonucleotide
  Mitotic kinesin microtubule-associated protein Eg5 (Kif11) siRNA
agcccaggagtttgagaccagcc

SEQ ID NO: 3576 - DNA, 23 bp, Artificial Sequence
  Description of Artificial Sequence: Synthetic oligonucleotide
  Mitotic kinesin microtubule-associated protein Eg5 (Kif11) siRNA
gcccaggagtttgagaccagcct

SEQ ID NO: 3577 - DNA, 23 bp, Artificial Sequence
  Description of Artificial Sequence: Synthetic oligonucleotide
  Mitotic kinesin microtubule-associated protein Eg5 (Kif11) siRNA
cccaggagtttgagaccagcctg

SEQ ID NO: 3578 - DNA, 23 bp, Artificial Sequence
  Description of Artificial Sequence: Synthetic oligonucleotide
  Mitotic kinesin microtubule-associated protein Eg5 (Kif11) siRNA
ccaggagtttgagaccagcctgg

SEQ ID NO: 3579 - DNA, 23 bp, Artificial Sequence
  Description of Artificial Sequence: Synthetic oligonucleotide
  Mitotic kinesin microtubule-associated protein Eg5 (Kif11) siRNA
caggagtttgagaccagcctggc

SEQ ID NO: 3580 - DNA, 23 bp, Artificial Sequence
  Description of Artificial Sequence: Synthetic oligonucleotide
  Mitotic kinesin microtubule-associated protein Eg5 (Kif11) siRNA
aggagtttgagaccagcctggcc

SEQ ID NO: 3581 - DNA, 23 bp, Artificial Sequence
  Description of Artificial Sequence: Synthetic oligonucleotide
  Mitotic kinesin microtubule-associated protein Eg5 (Kif11) siRNA
ggagtttgagaccagcctggcca

SEQ ID NO: 3582 - DNA, 23 bp, Artificial Sequence
  Description of Artificial Sequence: Synthetic oligonucleotide
  Mitotic kinesin microtubule-associated protein Eg5 (Kif11) siRNA
gagtttgagaccagcctggccaa

SEQ ID NO: 3583 - DNA, 23 bp, Artificial Sequence
  Description of Artificial Sequence: Synthetic oligonucleotide
  Mitotic kinesin microtubule-associated protein Eg5 (Kif11) siRNA
agtttgagaccagcctggccaac

SEQ ID NO: 3584 - DNA, 23 bp, Artificial Sequence
  Description of Artificial Sequence: Synthetic oligonucleotide
  Mitotic kinesin microtubule-associated protein Eg5 (Kif11) siRNA
gtttgagaccagcctggccaacg

SEQ ID NO: 3585 - DNA, 23 bp, Artificial Sequence
  Description of Artificial Sequence: Synthetic oligonucleotide
  Mitotic kinesin microtubule-associated protein Eg5 (Kif11) siRNA
tttgagaccagcctggccaacgt

SEQ ID NO: 3586 - DNA, 23 bp, Artificial Sequence
  Description of Artificial Sequence: Synthetic oligonucleotide
  Mitotic kinesin microtubule-associated protein Eg5 (Kif11) siRNA
ttgagaccagcctggccaacgtg

SEQ ID NO: 3587 - DNA, 23 bp, Artificial Sequence
  Description of Artificial Sequence: Synthetic oligonucleotide
  Mitotic kinesin microtubule-associated protein Eg5 (Kif11) siRNA
tgagaccagcctggccaacgtgg

SEQ ID NO: 3588 - DNA, 23 bp, Artificial Sequence
  Description of Artificial Sequence: Synthetic oligonucleotide
  Mitotic kinesin microtubule-associated protein Eg5 (Kif11) siRNA
gagaccagcctggccaacgtggc

SEQ ID NO: 3589 - DNA, 23 bp, Artificial Sequence
  Description of Artificial Sequence: Synthetic oligonucleotide
  Mitotic kinesin microtubule-associated protein Eg5 (Kif11) siRNA
agaccagcctggccaacgtggca

SEQ ID NO: 3590 - DNA, 23 bp, Artificial Sequence
  Description of Artificial Sequence: Synthetic oligonucleotide
  Mitotic kinesin microtubule-associated protein Eg5 (Kif11) siRNA
gaccagcctggccaacgtggcaa

SEQ ID NO: 3591 - DNA, 23 bp, Artificial Sequence
  Description of Artificial Sequence: Synthetic oligonucleotide
  Mitotic kinesin microtubule-associated protein Eg5 (Kif11) siRNA
accagcctggccaacgtggcaaa

SEQ ID NO: 3592 - DNA, 23 bp, Artificial Sequence
  Description of Artificial Sequence: Synthetic oligonucleotide
  Mitotic kinesin microtubule-associated protein Eg5 (Kif11) siRNA
ccagcctggccaacgtggcaaaa

SEQ ID NO: 3593 - DNA, 23 bp, Artificial Sequence
  Description of Artificial Sequence: Synthetic oligonucleotide
  Mitotic kinesin microtubule-associated protein Eg5 (Kif11) siRNA
cagcctggccaacgtggcaaaac

SEQ ID NO: 3594 - DNA, 23 bp, Artificial Sequence
  Description of Artificial Sequence: Synthetic oligonucleotide
  Mitotic kinesin microtubule-associated protein Eg5 (Kif11) siRNA
agcctggccaacgtggcaaaacc

SEQ ID NO: 3595 - DNA, 23 bp, Artificial Sequence
  Description of Artificial Sequence: Synthetic oligonucleotide
  Mitotic kinesin microtubule-associated protein Eg5 (Kif11) siRNA
gcctggccaacgtggcaaaacct

SEQ ID NO: 3596 - DNA, 23 bp, Artificial Sequence
  Description of Artificial Sequence: Synthetic oligonucleotide
  Mitotic kinesin microtubule-associated protein Eg5 (Kif11) siRNA
cctggccaacgtggcaaaacctc

SEQ ID NO: 3597 - DNA, 23 bp, Artificial Sequence
  Description of Artificial Sequence: Synthetic oligonucleotide
  Mitotic kinesin microtubule-associated protein Eg5 (Kif11) siRNA
ctggccaacgtggcaaaacctcg

SEQ ID NO: 3598 - DNA, 23 bp, Artificial Sequence
  Description of Artificial Sequence: Synthetic oligonucleotide
  Mitotic kinesin microtubule-associated protein Eg5 (Kif11) siRNA
tggccaacgtggcaaaacctcgt

SEQ ID NO: 3599 - DNA, 23 bp, Artificial Sequence
  Description of Artificial Sequence: Synthetic oligonucleotide
  Mitotic kinesin microtubule-associated protein Eg5 (Kif11) siRNA
ggccaacgtggcaaaacctcgtc

SEQ ID NO: 3600 - DNA, 23 bp, Artificial Sequence
  Description of Artificial Sequence: Synthetic oligonucleotide
  Mitotic kinesin microtubule-associated protein Eg5 (Kif11) siRNA
gccaacgtggcaaaacctcgtct

SEQ ID NO: 3601 - DNA, 23 bp, Artificial Sequence
  Description of Artificial Sequence: Synthetic oligonucleotide
  Mitotic kinesin microtubule-associated protein Eg5 (Kif11) siRNA
ccaacgtggcaaaacctcgtctc

SEQ ID NO: 3602 - DNA, 23 bp, Artificial Sequence
  Description of Artificial Sequence: Synthetic oligonucleotide
  Mitotic kinesin microtubule-associated protein Eg5 (Kif11) siRNA
caacgtggcaaaacctcgtctct

SEQ ID NO: 3603 - DNA, 23 bp, Artificial Sequence
  Description of Artificial Sequence: Synthetic oligonucleotide
  Mitotic kinesin microtubule-associated protein Eg5 (Kif11) siRNA
aacgtggcaaaacctcgtctctg

SEQ ID NO: 3604 - DNA, 23 bp, Artificial Sequence
  Description of Artificial Sequence: Synthetic oligonucleotide
  Mitotic kinesin microtubule-associated protein Eg5 (Kif11) siRNA
acgtggcaaaacctcgtctctgt

SEQ ID NO: 3605 - DNA, 23 bp, Artificial Sequence
  Description of Artificial Sequence: Synthetic oligonucleotide
  Mitotic kinesin microtubule-associated protein Eg5 (Kif11) siRNA
cgtggcaaaacctcgtctctgtt

SEQ ID NO: 3606 - DNA, 23 bp, Artificial Sequence
  Description of Artificial Sequence: Synthetic oligonucleotide
  Mitotic kinesin microtubule-associated protein Eg5 (Kif11) siRNA
gtggcaaaacctcgtctctgtta

SEQ ID NO: 3607 - DNA, 23 bp, Artificial Sequence
  Description of Artificial Sequence: Synthetic oligonucleotide
  Mitotic kinesin microtubule-associated protein Eg5 (Kif11) siRNA
tggcaaaacctcgtctctgttaa

SEQ ID NO: 3608 - DNA, 23 bp, Artificial Sequence
  Description of Artificial Sequence: Synthetic oligonucleotide
  Mitotic kinesin microtubule-associated protein Eg5 (Kif11) siRNA
ggcaaaacctcgtctctgttaaa

SEQ ID NO: 3609 - DNA, 23 bp, Artificial Sequence
  Description of Artificial Sequence: Synthetic oligonucleotide
  Mitotic kinesin microtubule-associated protein Eg5 (Kif11) siRNA
gcaaaacctcgtctctgttaaaa

SEQ ID NO: 3610 - DNA, 23 bp, Artificial Sequence
  Description of Artificial Sequence: Synthetic oligonucleotide
  Mitotic kinesin microtubule-associated protein Eg5 (Kif11) siRNA
caaaacctcgtctctgttaaaaa

SEQ ID NO: 3611 - DNA, 23 bp, Artificial Sequence
  Description of Artificial Sequence: Synthetic oligonucleotide
  Mitotic kinesin microtubule-associated protein Eg5 (Kif11) siRNA
aaaacctcgtctctgttaaaaat

SEQ ID NO: 3612 - DNA, 23 bp, Artificial Sequence
  Description of Artificial Sequence: Synthetic oligonucleotide
  Mitotic kinesin microtubule-associated protein Eg5 (Kif11) siRNA
aaacctcgtctctgttaaaaatt

SEQ ID NO: 3613 - DNA, 23 bp, Artificial Sequence
  Description of Artificial Sequence: Synthetic oligonucleotide
  Mitotic kinesin microtubule-associated protein Eg5 (Kif11) siRNA
aacctcgtctctgttaaaaatta

SEQ ID NO: 3614 - DNA, 23 bp, Artificial Sequence
  Description of Artificial Sequence: Synthetic oligonucleotide
  Mitotic kinesin microtubule-associated protein Eg5 (Kif11) siRNA
acctcgtctctgttaaaaattag

SEQ ID NO: 3615 - DNA, 23 bp, Artificial Sequence
  Description of Artificial Sequence: Synthetic oligonucleotide
  Mitotic kinesin microtubule-associated protein Eg5 (Kif11) siRNA
cctcgtctctgttaaaaattagc

SEQ ID NO: 3616 - DNA, 23 bp, Artificial Sequence
  Description of Artificial Sequence: Synthetic oligonucleotide
  Mitotic kinesin microtubule-associated protein Eg5 (Kif11) siRNA
ctcgtctctgttaaaaattagcc

SEQ ID NO: 3617 - DNA, 23 bp, Artificial Sequence
  Description of Artificial Sequence: Synthetic oligonucleotide
  Mitotic kinesin microtubule-associated protein Eg5 (Kif11) siRNA
tcgtctctgttaaaaattagccg

SEQ ID NO: 3618 - DNA, 23 bp, Artificial Sequence
  Description of Artificial Sequence: Synthetic oligonucleotide
  Mitotic kinesin microtubule-associated protein Eg5 (Kif11) siRNA
cgtctctgttaaaaattagccgg

SEQ ID NO: 3619 - DNA, 23 bp, Artificial Sequence
  Description of Artificial Sequence: Synthetic oligonucleotide
  Mitotic kinesin microtubule-associated protein Eg5 (Kif11) siRNA
gtctctgttaaaaattagccggg

SEQ ID NO: 3620 - DNA, 23 bp, Artificial Sequence
  Description of Artificial Sequence: Synthetic oligonucleotide
  Mitotic kinesin microtubule-associated protein Eg5 (Kif11) siRNA
tctctgttaaaaattagccgggc

SEQ ID NO: 3621 - DNA, 23 bp, Artificial Sequence
  Description of Artificial Sequence: Synthetic oligonucleotide
  Mitotic kinesin microtubule-associated protein Eg5 (Kif11) siRNA
ctctgttaaaaattagccgggcg

SEQ ID NO: 3622 - DNA, 23 bp, Artificial Sequence
  Description of Artificial Sequence: Synthetic oligonucleotide
  Mitotic kinesin microtubule-associated protein Eg5 (Kif11) siRNA
tctgttaaaaattagccgggcgt

SEQ ID NO: 3623 - DNA, 23 bp, Artificial Sequence
  Description of Artificial Sequence: Synthetic oligonucleotide
  Mitotic kinesin microtubule-associated protein Eg5 (Kif11) siRNA
ctgttaaaaattagccgggcgtg

SEQ ID NO: 3624 - DNA, 23 bp, Artificial Sequence
  Description of Artificial Sequence: Synthetic oligonucleotide
  Mitotic kinesin microtubule-associated protein Eg5 (Kif11) siRNA
tgttaaaaattagccgggcgtgg

SEQ ID NO: 3625 - DNA, 23 bp, Artificial Sequence
  Description of Artificial Sequence: Synthetic oligonucleotide
  Mitotic kinesin microtubule-associated protein Eg5 (Kif11) siRNA
gttaaaaattagccgggcgtggt

SEQ ID NO: 3626 - DNA, 23 bp, Artificial Sequence
  Description of Artificial Sequence: Synthetic oligonucleotide
  Mitotic kinesin microtubule-associated protein Eg5 (Kif11) siRNA
ttaaaaattagccgggcgtggtg

SEQ ID NO: 3627 - DNA, 23 bp, Artificial Sequence
  Description of Artificial Sequence: Synthetic oligonucleotide
  Mitotic kinesin microtubule-associated protein Eg5 (Kif11) siRNA
taaaaattagccgggcgtggtgg

SEQ ID NO: 3628 - DNA, 23 bp, Artificial Sequence
  Description of Artificial Sequence: Synthetic oligonucleotide
  Mitotic kinesin microtubule-associated protein Eg5 (Kif11) siRNA
aaaaattagccgggcgtggtggc

SEQ ID NO: 3629 - DNA, 23 bp, Artificial Sequence
  Description of Artificial Sequence: Synthetic oligonucleotide
  Mitotic kinesin microtubule-associated protein Eg5 (Kif11) siRNA
aaaattagccgggcgtggtggca

SEQ ID NO: 3630 - DNA, 23 bp, Artificial Sequence
  Description of Artificial Sequence: Synthetic oligonucleotide
  Mitotic kinesin microtubule-associated protein Eg5 (Kif11) siRNA
aaattagccgggcgtggtggcac

SEQ ID NO: 3631 - DNA, 23 bp, Artificial Sequence
  Description of Artificial Sequence: Synthetic oligonucleotide
  Mitotic kinesin microtubule-associated protein Eg5 (Kif11) siRNA
aattagccgggcgtggtggcaca

SEQ ID NO: 3632 - DNA, 23 bp, Artificial Sequence
  Description of Artificial Sequence: Synthetic oligonucleotide
  Mitotic kinesin microtubule-associated protein Eg5 (Kif11) siRNA
attagccgggcgtggtggcacac

SEQ ID NO: 3633 - DNA, 23 bp, Artificial Sequence
  Description of Artificial Sequence: Synthetic oligonucleotide
  Mitotic kinesin microtubule-associated protein Eg5 (Kif11) siRNA
ttagccgggcgtggtggcacact

SEQ ID NO: 3634 - DNA, 23 bp, Artificial Sequence
  Description of Artificial Sequence: Synthetic oligonucleotide
  Mitotic kinesin microtubule-associated protein Eg5 (Kif11) siRNA
tagccgggcgtggtggcacactc

SEQ ID NO: 3635 - DNA, 23 bp, Artificial Sequence
  Description of Artificial Sequence: Synthetic oligonucleotide
  Mitotic kinesin microtubule-associated protein Eg5 (Kif11) siRNA
agccgggcgtggtggcacactcc

SEQ ID NO: 3636 - DNA, 23 bp, Artificial Sequence
  Description of Artificial Sequence: Synthetic oligonucleotide
  Mitotic kinesin microtubule-associated protein Eg5 (Kif11) siRNA
gccgggcgtggtggcacactcct

SEQ ID NO: 3637 - DNA, 23 bp, Artificial Sequence
  Description of Artificial Sequence: Synthetic oligonucleotide
  Mitotic kinesin microtubule-associated protein Eg5 (Kif11) siRNA
ccgggcgtggtggcacactcctg

SEQ ID NO: 3638 - DNA, 23 bp, Artificial Sequence
  Description of Artificial Sequence: Synthetic oligonucleotide
  Mitotic kinesin microtubule-associated protein Eg5 (Kif11) siRNA
cgggcgtggtggcacactcctgt

SEQ ID NO: 3639 - DNA, 23 bp, Artificial Sequence
  Description of Artificial Sequence: Synthetic oligonucleotide
  Mitotic kinesin microtubule-associated protein Eg5 (Kif11) siRNA
gggcgtggtggcacactcctgta

SEQ ID NO: 3640 - DNA, 23 bp, Artificial Sequence
  Description of Artificial Sequence: Synthetic oligonucleotide
  Mitotic kinesin microtubule-associated protein Eg5 (Kif11) siRNA
ggcgtggtggcacactcctgtaa

SEQ ID NO: 3641 - DNA, 23 bp, Artificial Sequence
  Description of Artificial Sequence: Synthetic oligonucleotide
  Mitotic kinesin microtubule-associated protein Eg5 (Kif11) siRNA
gcgtggtggcacactcctgtaat

SEQ ID NO: 3642 - DNA, 23 bp, Artificial Sequence
  Description of Artificial Sequence: Synthetic oligonucleotide
  Mitotic kinesin microtubule-associated protein Eg5 (Kif11) siRNA
cgtggtggcacactcctgtaatc

SEQ ID NO: 3643 - DNA, 23 bp, Artificial Sequence
  Description of Artificial Sequence: Synthetic oligonucleotide
  Mitotic kinesin microtubule-associated protein Eg5 (Kif11) siRNA
gtggtggcacactcctgtaatcc

SEQ ID NO: 3644 - DNA, 23 bp, Artificial Sequence
  Description of Artificial Sequence: Synthetic oligonucleotide
  Mitotic kinesin microtubule-associated protein Eg5 (Kif11) siRNA
tggtggcacactcctgtaatccc

SEQ ID NO: 3645 - DNA, 23 bp, Artificial Sequence
  Description of Artificial Sequence: Synthetic oligonucleotide
  Mitotic kinesin microtubule-associated protein Eg5 (Kif11) siRNA
ggtggcacactcctgtaatccca

SEQ ID NO: 3646 - DNA, 23 bp, Artificial Sequence
  Description of Artificial Sequence: Synthetic oligonucleotide
  Mitotic kinesin microtubule-associated protein Eg5 (Kif11) siRNA
gtggcacactcctgtaatcccag

SEQ ID NO: 3647 - DNA, 23 bp, Artificial Sequence
  Description of Artificial Sequence: Synthetic oligonucleotide
  Mitotic kinesin microtubule-associated protein Eg5 (Kif11) siRNA
tggcacactcctgtaatcccagc

SEQ ID NO: 3648 - DNA, 23 bp, Artificial Sequence
  Description of Artificial Sequence: Synthetic oligonucleotide
  Mitotic kinesin microtubule-associated protein Eg5 (Kif11) siRNA
ggcacactcctgtaatcccagct

SEQ ID NO: 3649 - DNA, 23 bp, Artificial Sequence
  Description of Artificial Sequence: Synthetic oligonucleotide
  Mitotic kinesin microtubule-associated protein Eg5 (Kif11) siRNA
gcacactcctgtaatcccagcta

SEQ ID NO: 3650 - DNA, 23 bp, Artificial Sequence
  Description of Artificial Sequence: Synthetic oligonucleotide
  Mitotic kinesin microtubule-associated protein Eg5 (Kif11) siRNA
cacactcctgtaatcccagctac

SEQ ID NO: 3651 - DNA, 23 bp, Artificial Sequence
  Description of Artificial Sequence: Synthetic oligonucleotide
  Mitotic kinesin microtubule-associated protein Eg5 (Kif11) siRNA
acactcctgtaatcccagctact

SEQ ID NO: 3652 - DNA, 23 bp, Artificial Sequence
  Description of Artificial Sequence: Synthetic oligonucleotide
  Mitotic kinesin microtubule-associated protein Eg5 (Kif11) siRNA
cactcctgtaatcccagctactg

SEQ ID NO: 3653 - DNA, 23 bp, Artificial Sequence
  Description of Artificial Sequence: Synthetic oligonucleotide
  Mitotic kinesin microtubule-associated protein Eg5 (Kif11) siRNA
actcctgtaatcccagctactgg

SEQ ID NO: 3654 - DNA, 23 bp, Artificial Sequence
  Description of Artificial Sequence: Synthetic oligonucleotide
  Mitotic kinesin microtubule-associated protein Eg5 (Kif11) siRNA
ctcctgtaatcccagctactggg

SEQ ID NO: 3655 - DNA, 23 bp, Artificial Sequence
  Description of Artificial Sequence: Synthetic oligonucleotide
  Mitotic kinesin microtubule-associated protein Eg5 (Kif11) siRNA
tcctgtaatcccagctactgggg

SEQ ID NO: 3656 - DNA, 23 bp, Artificial Sequence
  Description of Artificial Sequence: Synthetic oligonucleotide
  Mitotic kinesin microtubule-associated protein Eg5 (Kif11) siRNA
cctgtaatcccagctactgggga

SEQ ID NO: 3657 - DNA, 23 bp, Artificial Sequence
  Description of Artificial Sequence: Synthetic oligonucleotide
  Mitotic kinesin microtubule-associated protein Eg5 (Kif11) siRNA
ctgtaatcccagctactggggag

SEQ ID NO: 3658 - DNA, 23 bp, Artificial Sequence
  Description of Artificial Sequence: Synthetic oligonucleotide
  Mitotic kinesin microtubule-associated protein Eg5 (Kif11) siRNA
tgtaatcccagctactggggagg

SEQ ID NO: 3659 - DNA, 23 bp, Artificial Sequence
  Description of Artificial Sequence: Synthetic oligonucleotide
  Mitotic kinesin microtubule-associated protein Eg5 (Kif11) siRNA
gtaatcccagctactggggaggc

SEQ ID NO: 3660 - DNA, 23 bp, Artificial Sequence
  Description of Artificial Sequence: Synthetic oligonucleotide
  Mitotic kinesin microtubule-associated protein Eg5 (Kif11) siRNA
taatcccagctactggggaggct

SEQ ID NO: 3661 - DNA, 23 bp, Artificial Sequence
  Description of Artificial Sequence: Synthetic oligonucleotide
  Mitotic kinesin microtubule-associated protein Eg5 (Kif11) siRNA
aatcccagctactggggaggctg

SEQ ID NO: 3662 - DNA, 23 bp, Artificial Sequence
  Description of Artificial Sequence: Synthetic oligonucleotide
  Mitotic kinesin microtubule-associated protein Eg5 (Kif11) siRNA
atcccagctactggggaggctga

SEQ ID NO: 3663 - DNA, 23 bp, Artificial Sequence
  Description of Artificial Sequence: Synthetic oligonucleotide
  Mitotic kinesin microtubule-associated protein Eg5 (Kif11) siRNA
tcccagctactggggaggctgag

SEQ ID NO: 3664 - DNA, 23 bp, Artificial Sequence
  Description of Artificial Sequence: Synthetic oligonucleotide
  Mitotic kinesin microtubule-associated protein Eg5 (Kif11) siRNA
cccagctactggggaggctgagg

SEQ ID NO: 3665 - DNA, 23 bp, Artificial Sequence
  Description of Artificial Sequence: Synthetic oligonucleotide
  Mitotic kinesin microtubule-associated protein Eg5 (Kif11) siRNA
ccagctactggggaggctgaggc

SEQ ID NO: 3666 - DNA, 23 bp, Artificial Sequence
  Description of Artificial Sequence: Synthetic oligonucleotide
  Mitotic kinesin microtubule-associated protein Eg5 (Kif11) siRNA
cagctactggggaggctgaggca

SEQ ID NO: 3667 - DNA, 23 bp, Artificial Sequence
  Description of Artificial Sequence: Synthetic oligonucleotide
  Mitotic kinesin microtubule-associated protein Eg5 (Kif11) siRNA
agctactggggaggctgaggcac

SEQ ID NO: 3668 - DNA, 23 bp, Artificial Sequence
  Description of Artificial Sequence: Synthetic oligonucleotide
  Mitotic kinesin microtubule-associated protein Eg5 (Kif11) siRNA
gctactggggaggctgaggcacg

SEQ ID NO: 3669 - DNA, 23 bp, Artificial Sequence
  Description of Artificial Sequence: Synthetic oligonucleotide
  Mitotic kinesin microtubule-associated protein Eg5 (Kif11) siRNA
ctactggggaggctgaggcacga

SEQ ID NO: 3670 - DNA, 23 bp, Artificial Sequence
  Description of Artificial Sequence: Synthetic oligonucleotide
  Mitotic kinesin microtubule-associated protein Eg5 (Kif11) siRNA
tactggggaggctgaggcacgag

SEQ ID NO: 3671 - DNA, 23 bp, Artificial Sequence
  Description of Artificial Sequence: Synthetic oligonucleotide
  Mitotic kinesin microtubule-associated protein Eg5 (Kif11) siRNA
actggggaggctgaggcacgaga

SEQ ID NO: 3672 - DNA, 23 bp, Artificial Sequence
  Description of Artificial Sequence: Synthetic oligonucleotide
  Mitotic kinesin microtubule-associated protein Eg5 (Kif11) siRNA
ctggggaggctgaggcacgagaa

SEQ ID NO: 3673 - DNA, 23 bp, Artificial Sequence
  Description of Artificial Sequence: Synthetic oligonucleotide
  Mitotic kinesin microtubule-associated protein Eg5 (Kif11) siRNA
tggggaggctgaggcacgagaat

SEQ ID NO: 3674 - DNA, 23 bp, Artificial Sequence
  Description of Artificial Sequence: Synthetic oligonucleotide
  Mitotic kinesin microtubule-associated protein Eg5 (Kif11) siRNA
ggggaggctgaggcacgagaatc

SEQ ID NO: 3675 - DNA, 23 bp, Artificial Sequence
  Description of Artificial Sequence: Synthetic oligonucleotide
  Mitotic kinesin microtubule-associated protein Eg5 (Kif11) siRNA
gggaggctgaggcacgagaatca

SEQ ID NO: 3676 - DNA, 23 bp, Artificial Sequence
  Description of Artificial Sequence: Synthetic oligonucleotide
  Mitotic kinesin microtubule-associated protein Eg5 (Kif11) siRNA
ggaggctgaggcacgagaatcac

SEQ ID NO: 3677 - DNA, 23 bp, Artificial Sequence
  Description of Artificial Sequence: Synthetic oligonucleotide
  Mitotic kinesin microtubule-associated protein Eg5 (Kif11) siRNA
gaggctgaggcacgagaatcact

SEQ ID NO: 3678 - DNA, 23 bp, Artificial Sequence
  Description of Artificial Sequence: Synthetic oligonucleotide
  Mitotic kinesin microtubule-associated protein Eg5 (Kif11) siRNA
aggctgaggcacgagaatcactt

SEQ ID NO: 3679 - DNA, 23 bp, Artificial Sequence
  Description of Artificial Sequence: Synthetic oligonucleotide
  Mitotic kinesin microtubule-associated protein Eg5 (Kif11) siRNA
ggctgaggcacgagaatcacttg

SEQ ID NO: 3680 - DNA, 23 bp, Artificial Sequence
  Description of Artificial Sequence: Synthetic oligonucleotide
  Mitotic kinesin microtubule-associated protein Eg5 (Kif11) siRNA
gctgaggcacgagaatcacttga

SEQ ID NO: 3681 - DNA, 23 bp, Artificial Sequence
  Description of Artificial Sequence: Synthetic oligonucleotide
  Mitotic kinesin microtubule-associated protein Eg5 (Kif11) siRNA
ctgaggcacgagaatcacttgaa

SEQ ID NO: 3682 - DNA, 23 bp, Artificial Sequence
  Description of Artificial Sequence: Synthetic oligonucleotide
  Mitotic kinesin microtubule-associated protein Eg5 (Kif11) siRNA
tgaggcacgagaatcacttgaac

SEQ ID NO: 3683 - DNA, 23 bp, Artificial Sequence
  Description of Artificial Sequence: Synthetic oligonucleotide
  Mitotic kinesin microtubule-associated protein Eg5 (Kif11) siRNA
gaggcacgagaatcacttgaacc

SEQ ID NO: 3684 - DNA, 23 bp, Artificial Sequence
  Description of Artificial Sequence: Synthetic oligonucleotide
  Mitotic kinesin microtubule-associated protein Eg5 (Kif11) siRNA
aggcacgagaatcacttgaaccc

SEQ ID NO: 3685 - DNA, 23 bp, Artificial Sequence
  Description of Artificial Sequence: Synthetic oligonucleotide
  Mitotic kinesin microtubule-associated protein Eg5 (Kif11) siRNA
ggcacgagaatcacttgaaccca

SEQ ID NO: 3686 - DNA, 23 bp, Artificial Sequence
  Description of Artificial Sequence: Synthetic oligonucleotide
  Mitotic kinesin microtubule-associated protein Eg5 (Kif11) siRNA
gcacgagaatcacttgaacccag

SEQ ID NO: 3687 - DNA, 23 bp, Artificial Sequence
  Description of Artificial Sequence: Synthetic oligonucleotide
  Mitotic kinesin microtubule-associated protein Eg5 (Kif11) siRNA
cacgagaatcacttgaacccagg

SEQ ID NO: 3688 - DNA, 23 bp, Artificial Sequence
  Description of Artificial Sequence: Synthetic oligonucleotide
  Mitotic kinesin microtubule-associated protein Eg5 (Kif11) siRNA
acgagaatcacttgaacccagga

SEQ ID NO: 3689 - DNA, 23 bp, Artificial Sequence
  Description of Artificial Sequence: Synthetic oligonucleotide
  Mitotic kinesin microtubule-associated protein Eg5 (Kif11) siRNA
cgagaatcacttgaacccaggaa

SEQ ID NO: 3690 - DNA, 23 bp, Artificial Sequence
  Description of Artificial Sequence: Synthetic oligonucleotide
  Mitotic kinesin microtubule-associated protein Eg5 (Kif11) siRNA
gagaatcacttgaacccaggaag

SEQ ID NO: 3691 - DNA, 23 bp, Artificial Sequence
  Description of Artificial Sequence: Synthetic oligonucleotide
  Mitotic kinesin microtubule-associated protein Eg5 (Kif11) siRNA
agaatcacttgaacccaggaagc

SEQ ID NO: 3692 - DNA, 23 bp, Artificial Sequence
  Description of Artificial Sequence: Synthetic oligonucleotide
  Mitotic kinesin microtubule-associated protein Eg5 (Kif11) siRNA
gaatcacttgaacccaggaagcg

SEQ ID NO: 3693 - DNA, 23 bp, Artificial Sequence
  Description of Artificial Sequence: Synthetic oligonucleotide
  Mitotic kinesin microtubule-associated protein Eg5 (Kif11) siRNA
aatcacttgaacccaggaagcgg

SEQ ID NO: 3694 - DNA, 23 bp, Artificial Sequence
  Description of Artificial Sequence: Synthetic oligonucleotide
  Mitotic kinesin microtubule-associated protein Eg5 (Kif11) siRNA
atcacttgaacccaggaagcggg

SEQ ID NO: 3695 - DNA, 23 bp, Artificial Sequence
  Description of Artificial Sequence: Synthetic oligonucleotide
  Mitotic kinesin microtubule-associated protein Eg5 (Kif11) siRNA
tcacttgaacccaggaagcgggg

SEQ ID NO: 3696 - DNA, 23 bp, Artificial Sequence
  Description of Artificial Sequence: Synthetic oligonucleotide
  Mitotic kinesin microtubule-associated protein Eg5 (Kif11) siRNA
cacttgaacccaggaagcggggt

SEQ ID NO: 3697 - DNA, 23 bp, Artificial Sequence
  Description of Artificial Sequence: Synthetic oligonucleotide
  Mitotic kinesin microtubule-associated protein Eg5 (Kif11) siRNA
acttgaacccaggaagcggggtt

SEQ ID NO: 3698 - DNA, 23 bp, Artificial Sequence
  Description of Artificial Sequence: Synthetic oligonucleotide
  Mitotic kinesin microtubule-associated protein Eg5 (Kif11) siRNA
cttgaacccaggaagcggggttg

SEQ ID NO: 3699 - DNA, 23 bp, Artificial Sequence
  Description of Artificial Sequence: Synthetic oligonucleotide
  Mitotic kinesin microtubule-associated protein Eg5 (Kif11) siRNA
ttgaacccaggaagcggggttgc

SEQ ID NO: 3700 - DNA, 23 bp, Artificial Sequence
  Description of Artificial Sequence: Synthetic oligonucleotide
  Mitotic kinesin microtubule-associated protein Eg5 (Kif11) siRNA
tgaacccaggaagcggggttgca

SEQ ID NO: 3701 - DNA, 23 bp, Artificial Sequence
  Description of Artificial Sequence: Synthetic oligonucleotide
  Mitotic kinesin microtubule-associated protein Eg5 (Kif11) siRNA
gaacccaggaagcggggttgcag

SEQ ID NO: 3702 - DNA, 23 bp, Artificial Sequence
  Description of Artificial Sequence: Synthetic oligonucleotide
  Mitotic kinesin microtubule-associated protein Eg5 (Kif11) siRNA
aacccaggaagcggggttgcagt

SEQ ID NO: 3703 - DNA, 23 bp, Artificial Sequence
  Description of Artificial Sequence: Synthetic oligonucleotide
  Mitotic kinesin microtubule-associated protein Eg5 (Kif11) siRNA
acccaggaagcggggttgcagtg

SEQ ID NO: 3704 - DNA, 23 bp, Artificial Sequence
  Description of Artificial Sequence: Synthetic oligonucleotide
  Mitotic kinesin microtubule-associated protein Eg5 (Kif11) siRNA
cccaggaagcggggttgcagtga

SEQ ID NO: 3705 - DNA, 23 bp, Artificial Sequence
  Description of Artificial Sequence: Synthetic oligonucleotide
  Mitotic kinesin microtubule-associated protein Eg5 (Kif11) siRNA
ccaggaagcggggttgcagtgag

SEQ ID NO: 3706 - DNA, 23 bp, Artificial Sequence
  Description of Artificial Sequence: Synthetic oligonucleotide
  Mitotic kinesin microtubule-associated protein Eg5 (Kif11) siRNA
caggaagcggggttgcagtgagc

SEQ ID NO: 3707 - DNA, 23 bp, Artificial Sequence
  Description of Artificial Sequence: Synthetic oligonucleotide
  Mitotic kinesin microtubule-associated protein Eg5 (Kif11) siRNA
aggaagcggggttgcagtgagcc

SEQ ID NO: 3708 - DNA, 23 bp, Artificial Sequence
  Description of Artificial Sequence: Synthetic oligonucleotide
  Mitotic kinesin microtubule-associated protein Eg5 (Kif11) siRNA
ggaagcggggttgcagtgagcca

SEQ ID NO: 3709 - DNA, 23 bp, Artificial Sequence
  Description of Artificial Sequence: Synthetic oligonucleotide
  Mitotic kinesin microtubule-associated protein Eg5 (Kif11) siRNA
gaagcggggttgcagtgagccaa

SEQ ID NO: 3710 - DNA, 23 bp, Artificial Sequence
  Description of Artificial Sequence: Synthetic oligonucleotide
  Mitotic kinesin microtubule-associated protein Eg5 (Kif11) siRNA
aagcggggttgcagtgagccaaa

SEQ ID NO: 3711 - DNA, 23 bp, Artificial Sequence
  Description of Artificial Sequence: Synthetic oligonucleotide
  Mitotic kinesin microtubule-associated protein Eg5 (Kif11) siRNA
agcggggttgcagtgagccaaag

SEQ ID NO: 3712 - DNA, 23 bp, Artificial Sequence
  Description of Artificial Sequence: Synthetic oligonucleotide
  Mitotic kinesin microtubule-associated protein Eg5 (Kif11) siRNA
gcggggttgcagtgagccaaagg

SEQ ID NO: 3713 - DNA, 23 bp, Artificial Sequence
  Description of Artificial Sequence: Synthetic oligonucleotide
  Mitotic kinesin microtubule-associated protein Eg5 (Kif11) siRNA
cggggttgcagtgagccaaaggt

SEQ ID NO: 3714 - DNA, 23 bp, Artificial Sequence
  Description of Artificial Sequence: Synthetic oligonucleotide
  Mitotic kinesin microtubule-associated protein Eg5 (Kif11) siRNA
ggggttgcagtgagccaaaggta

SEQ ID NO: 3715 - DNA, 23 bp, Artificial Sequence
  Description of Artificial Sequence: Synthetic oligonucleotide
  Mitotic kinesin microtubule-associated protein Eg5 (Kif11) siRNA
gggttgcagtgagccaaaggtac

SEQ ID NO: 3716 - DNA, 23 bp, Artificial Sequence
  Description of Artificial Sequence: Synthetic oligonucleotide
  Mitotic kinesin microtubule-associated protein Eg5 (Kif11) siRNA
ggttgcagtgagccaaaggtaca

SEQ ID NO: 3717 - DNA, 23 bp, Artificial Sequence
  Description of Artificial Sequence: Synthetic oligonucleotide
  Mitotic kinesin microtubule-associated protein Eg5 (Kif11) siRNA
gttgcagtgagccaaaggtacac

SEQ ID NO: 3718 - DNA, 23 bp, Artificial Sequence
  Description of Artificial Sequence: Synthetic oligonucleotide
  Mitotic kinesin microtubule-associated protein Eg5 (Kif11) siRNA
ttgcagtgagccaaaggtacacc

SEQ ID NO: 3719 - DNA, 23 bp, Artificial Sequence
  Description of Artificial Sequence: Synthetic oligonucleotide
  Mitotic kinesin microtubule-associated protein Eg5 (Kif11) siRNA
tgcagtgagccaaaggtacacca

SEQ ID NO: 3720 - DNA, 23 bp, Artificial Sequence
  Description of Artificial Sequence: Synthetic oligonucleotide
  Mitotic kinesin microtubule-associated protein Eg5 (Kif11) siRNA
gcagtgagccaaaggtacaccac

SEQ ID NO: 3721 - DNA, 23 bp, Artificial Sequence
  Description of Artificial Sequence: Synthetic oligonucleotide
  Mitotic kinesin microtubule-associated protein Eg5 (Kif11) siRNA
cagtgagccaaaggtacaccact

SEQ ID NO: 3722 - DNA, 23 bp, Artificial Sequence
  Description of Artificial Sequence: Synthetic oligonucleotide
  Mitotic kinesin microtubule-associated protein Eg5 (Kif11) siRNA
agtgagccaaaggtacaccacta

SEQ ID NO: 3723 - DNA, 23 bp, Artificial Sequence
  Description of Artificial Sequence: Synthetic oligonucleotide
  Mitotic kinesin microtubule-associated protein Eg5 (Kif11) siRNA
gtgagccaaaggtacaccactac

SEQ ID NO: 3724 - DNA, 23 bp, Artificial Sequence
  Description of Artificial Sequence: Synthetic oligonucleotide
  Mitotic kinesin microtubule-associated protein Eg5 (Kif11) siRNA
tgagccaaaggtacaccactaca

SEQ ID NO: 3725 - DNA, 23 bp, Artificial Sequence
  Description of Artificial Sequence: Synthetic oligonucleotide
  Mitotic kinesin microtubule-associated protein Eg5 (Kif11) siRNA
gagccaaaggtacaccactacac

SEQ ID NO: 3726 - DNA, 23 bp, Artificial Sequence
  Description of Artificial Sequence: Synthetic oligonucleotide
  Mitotic kinesin microtubule-associated protein Eg5 (Kif11) siRNA
agccaaaggtacaccactacact

SEQ ID NO: 3727 - DNA, 23 bp, Artificial Sequence
  Description of Artificial Sequence: Synthetic oligonucleotide
  Mitotic kinesin microtubule-associated protein Eg5 (Kif11) siRNA
gccaaaggtacaccactacactc

SEQ ID NO: 3728 - DNA, 23 bp, Artificial Sequence
  Description of Artificial Sequence: Synthetic oligonucleotide
  Mitotic kinesin microtubule-associated protein Eg5 (Kif11) siRNA
ccaaaggtacaccactacactcc

SEQ ID NO: 3729 - DNA, 23 bp, Artificial Sequence
  Description of Artificial Sequence: Synthetic oligonucleotide
  Mitotic kinesin microtubule-associated protein Eg5 (Kif11) siRNA
caaaggtacaccactacactcca

SEQ ID NO: 3730 - DNA, 23 bp, Artificial Sequence
  Description of Artificial Sequence: Synthetic oligonucleotide
  Mitotic kinesin microtubule-associated protein Eg5 (Kif11) siRNA
aaaggtacaccactacactccag

SEQ ID NO: 3731 - DNA, 23 bp, Artificial Sequence
  Description of Artificial Sequence: Synthetic oligonucleotide
  Mitotic kinesin microtubule-associated protein Eg5 (Kif11) siRNA
aaggtacaccactacactccagc

SEQ ID NO: 3732 - DNA, 23 bp, Artificial Sequence
  Description of Artificial Sequence: Synthetic oligonucleotide
  Mitotic kinesin microtubule-associated protein Eg5 (Kif11) siRNA
aggtacaccactacactccagcc

SEQ ID NO: 3733 - DNA, 23 bp, Artificial Sequence
  Description of Artificial Sequence: Synthetic oligonucleotide
  Mitotic kinesin microtubule-associated protein Eg5 (Kif11) siRNA
ggtacaccactacactccagcct

SEQ ID NO: 3734 - DNA, 23 bp, Artificial Sequence
  Description of Artificial Sequence: Synthetic oligonucleotide
  Mitotic kinesin microtubule-associated protein Eg5 (Kif11) siRNA
gtacaccactacactccagcctg

SEQ ID NO: 3735 - DNA, 23 bp, Artificial Sequence
  Description of Artificial Sequence: Synthetic oligonucleotide
  Mitotic kinesin microtubule-associated protein Eg5 (Kif11) siRNA
tacaccactacactccagcctgg

SEQ ID NO: 3736 - DNA, 23 bp, Artificial Sequence
  Description of Artificial Sequence: Synthetic oligonucleotide
  Mitotic kinesin microtubule-associated protein Eg5 (Kif11) siRNA
acaccactacactccagcctggg

SEQ ID NO: 3737 - DNA, 23 bp, Artificial Sequence
  Description of Artificial Sequence: Synthetic oligonucleotide
  Mitotic kinesin microtubule-associated protein Eg5 (Kif11) siRNA
caccactacactccagcctgggc

SEQ ID NO: 3738 - DNA, 23 bp, Artificial Sequence
  Description of Artificial Sequence: Synthetic oligonucleotide
  Mitotic kinesin microtubule-associated protein Eg5 (Kif11) siRNA
accactacactccagcctgggca

SEQ ID NO: 3739 - DNA, 23 bp, Artificial Sequence
  Description of Artificial Sequence: Synthetic oligonucleotide
  Mitotic kinesin microtubule-associated protein Eg5 (Kif11) siRNA
ccactacactccagcctgggcaa

SEQ ID NO: 3740 - DNA, 23 bp, Artificial Sequence
  Description of Artificial Sequence: Synthetic oligonucleotide
  Mitotic kinesin microtubule-associated protein Eg5 (Kif11) siRNA
cactacactccagcctgggcaac

SEQ ID NO: 3741 - DNA, 23 bp, Artificial Sequence
  Description of Artificial Sequence: Synthetic oligonucleotide
  Mitotic kinesin microtubule-associated protein Eg5 (Kif11) siRNA
actacactccagcctgggcaaca

SEQ ID NO: 3742 - DNA, 23 bp, Artificial Sequence
  Description of Artificial Sequence: Synthetic oligonucleotide
  Mitotic kinesin microtubule-associated protein Eg5 (Kif11) siRNA
ctacactccagcctgggcaacag

SEQ ID NO: 3743 - DNA, 23 bp, Artificial Sequence
  Description of Artificial Sequence: Synthetic oligonucleotide
  Mitotic kinesin microtubule-associated protein Eg5 (Kif11) siRNA
tacactccagcctgggcaacaga

SEQ ID NO: 3744 - DNA, 23 bp, Artificial Sequence
  Description of Artificial Sequence: Synthetic oligonucleotide
  Mitotic kinesin microtubule-associated protein Eg5 (Kif11) siRNA
acactccagcctgggcaacagag

SEQ ID NO: 3745 - DNA, 23 bp, Artificial Sequence
  Description of Artificial Sequence: Synthetic oligonucleotide
  Mitotic kinesin microtubule-associated protein Eg5 (Kif11) siRNA
cactccagcctgggcaacagagc

SEQ ID NO: 3746 - DNA, 23 bp, Artificial Sequence
  Description of Artificial Sequence: Synthetic oligonucleotide
  Mitotic kinesin microtubule-associated protein Eg5 (Kif11) siRNA
actccagcctgggcaacagagca

SEQ ID NO: 3747 - DNA, 23 bp, Artificial Sequence
  Description of Artificial Sequence: Synthetic oligonucleotide
  Mitotic kinesin microtubule-associated protein Eg5 (Kif11) siRNA
ctccagcctgggcaacagagcaa

SEQ ID NO: 3748 - DNA, 23 bp, Artificial Sequence
  Description of Artificial Sequence: Synthetic oligonucleotide
  Mitotic kinesin microtubule-associated protein Eg5 (Kif11) siRNA
tccagcctgggcaacagagcaag

SEQ ID NO: 3749 - DNA, 23 bp, Artificial Sequence
  Description of Artificial Sequence: Synthetic oligonucleotide
  Mitotic kinesin microtubule-associated protein Eg5 (Kif11) siRNA
ccagcctgggcaacagagcaaga

SEQ ID NO: 3750 - DNA, 23 bp, Artificial Sequence
  Description of Artificial Sequence: Synthetic oligonucleotide
  Mitotic kinesin microtubule-associated protein Eg5 (Kif11) siRNA
cagcctgggcaacagagcaagac

SEQ ID NO: 3751 - DNA, 23 bp, Artificial Sequence
  Description of Artificial Sequence: Synthetic oligonucleotide
  Mitotic kinesin microtubule-associated protein Eg5 (Kif11) siRNA
agcctgggcaacagagcaagact

SEQ ID NO: 3752 - DNA, 23 bp, Artificial Sequence
  Description of Artificial Sequence: Synthetic oligonucleotide
  Mitotic kinesin microtubule-associated protein Eg5 (Kif11) siRNA
gcctgggcaacagagcaagactc

SEQ ID NO: 3753 - DNA, 23 bp, Artificial Sequence
  Description of Artificial Sequence: Synthetic oligonucleotide
  Mitotic kinesin microtubule-associated protein Eg5 (Kif11) siRNA
cctgggcaacagagcaagactcg

SEQ ID NO: 3754 - DNA, 23 bp, Artificial Sequence
  Description of Artificial Sequence: Synthetic oligonucleotide
  Mitotic kinesin microtubule-associated protein Eg5 (Kif11) siRNA
ctgggcaacagagcaagactcgg

SEQ ID NO: 3755 - DNA, 23 bp, Artificial Sequence
  Description of Artificial Sequence: Synthetic oligonucleotide
  Mitotic kinesin microtubule-associated protein Eg5 (Kif11) siRNA
tgggcaacagagcaagactcggt

SEQ ID NO: 3756 - DNA, 23 bp, Artificial Sequence
  Description of Artificial Sequence: Synthetic oligonucleotide
  Mitotic kinesin microtubule-associated protein Eg5 (Kif11) siRNA
gggcaacagagcaagactcggtc

SEQ ID NO: 3757 - DNA, 23 bp, Artificial Sequence
  Description of Artificial Sequence: Synthetic oligonucleotide
  Mitotic kinesin microtubule-associated protein Eg5 (Kif11) siRNA
ggcaacagagcaagactcggtct

SEQ ID NO: 3758 - DNA, 23 bp, Artificial Sequence
  Description of Artificial Sequence: Synthetic oligonucleotide
  Mitotic kinesin microtubule-associated protein Eg5 (Kif11) siRNA
gcaacagagcaagactcggtctc

SEQ ID NO: 3759 - DNA, 23 bp, Artificial Sequence
  Description of Artificial Sequence: Synthetic oligonucleotide
  Mitotic kinesin microtubule-associated protein Eg5 (Kif11) siRNA
caacagagcaagactcggtctca

SEQ ID NO: 3760 - DNA, 23 bp, Artificial Sequence
  Description of Artificial Sequence: Synthetic oligonucleotide
  Mitotic kinesin microtubule-associated protein Eg5 (Kif11) siRNA
aacagagcaagactcggtctcaa

SEQ ID NO: 3761 - DNA, 23 bp, Artificial Sequence
  Description of Artificial Sequence: Synthetic oligonucleotide
  Mitotic kinesin microtubule-associated protein Eg5 (Kif11) siRNA
acagagcaagactcggtctcaaa

SEQ ID NO: 3762 - DNA, 23 bp, Artificial Sequence
  Description of Artificial Sequence: Synthetic oligonucleotide
  Mitotic kinesin microtubule-associated protein Eg5 (Kif11) siRNA
cagagcaagactcggtctcaaaa

SEQ ID NO: 3763 - DNA, 23 bp, Artificial Sequence
  Description of Artificial Sequence: Synthetic oligonucleotide
  Mitotic kinesin microtubule-associated protein Eg5 (Kif11) siRNA
agagcaagactcggtctcaaaaa

SEQ ID NO: 3764 - DNA, 23 bp, Artificial Sequence
  Description of Artificial Sequence: Synthetic oligonucleotide
  Mitotic kinesin microtubule-associated protein Eg5 (Kif11) siRNA
gagcaagactcggtctcaaaaac

SEQ ID NO: 3765 - DNA, 23 bp, Artificial Sequence
  Description of Artificial Sequence: Synthetic oligonucleotide
  Mitotic kinesin microtubule-associated protein Eg5 (Kif11) siRNA
agcaagactcggtctcaaaaaca

SEQ ID NO: 3766 - DNA, 23 bp, Artificial Sequence
  Description of Artificial Sequence: Synthetic oligonucleotide
  Mitotic kinesin microtubule-associated protein Eg5 (Kif11) siRNA
gcaagactcggtctcaaaaacaa

SEQ ID NO: 3767 - DNA, 23 bp, Artificial Sequence
  Description of Artificial Sequence: Synthetic oligonucleotide
  Mitotic kinesin microtubule-associated protein Eg5 (Kif11) siRNA
caagactcggtctcaaaaacaaa

SEQ ID NO: 3768 - DNA, 23 bp, Artificial Sequence
  Description of Artificial Sequence: Synthetic oligonucleotide
  Mitotic kinesin microtubule-associated protein Eg5 (Kif11) siRNA
aagactcggtctcaaaaacaaaa

SEQ ID NO: 3769 - DNA, 23 bp, Artificial Sequence
  Description of Artificial Sequence: Synthetic oligonucleotide
  Mitotic kinesin microtubule-associated protein Eg5 (Kif11) siRNA
agactcggtctcaaaaacaaaat

SEQ ID NO: 3770 - DNA, 23 bp, Artificial Sequence
  Description of Artificial Sequence: Synthetic oligonucleotide
  Mitotic kinesin microtubule-associated protein Eg5 (Kif11) siRNA
gactcggtctcaaaaacaaaatt

SEQ ID NO: 3771 - DNA, 23 bp, Artificial Sequence
  Description of Artificial Sequence: Synthetic oligonucleotide
  Mitotic kinesin microtubule-associated protein Eg5 (Kif11) siRNA
actcggtctcaaaaacaaaattt

SEQ ID NO: 3772 - DNA, 23 bp, Artificial Sequence
  Description of Artificial Sequence: Synthetic oligonucleotide
  Mitotic kinesin microtubule-associated protein Eg5 (Kif11) siRNA
ctcggtctcaaaaacaaaattta

SEQ ID NO: 3773 - DNA, 23 bp, Artificial Sequence
  Description of Artificial Sequence: Synthetic oligonucleotide
  Mitotic kinesin microtubule-associated protein Eg5 (Kif11) siRNA
tcggtctcaaaaacaaaatttaa

SEQ ID NO: 3774 - DNA, 23 bp, Artificial Sequence
  Description of Artificial Sequence: Synthetic oligonucleotide
  Mitotic kinesin microtubule-associated protein Eg5 (Kif11) siRNA
cggtctcaaaaacaaaatttaaa

SEQ ID NO: 3775 - DNA, 23 bp, Artificial Sequence
  Description of Artificial Sequence: Synthetic oligonucleotide
  Mitotic kinesin microtubule-associated protein Eg5 (Kif11) siRNA
ggtctcaaaaacaaaatttaaaa

SEQ ID NO: 3776 - DNA, 23 bp, Artificial Sequence
  Description of Artificial Sequence: Synthetic oligonucleotide
  Mitotic kinesin microtubule-associated protein Eg5 (Kif11) siRNA
gtctcaaaaacaaaatttaaaaa

SEQ ID NO: 3777 - DNA, 23 bp, Artificial Sequence
  Description of Artificial Sequence: Synthetic oligonucleotide
  Mitotic kinesin microtubule-associated protein Eg5 (Kif11) siRNA
tctcaaaaacaaaatttaaaaaa

SEQ ID NO: 3778 - DNA, 23 bp, Artificial Sequence
  Description of Artificial Sequence: Synthetic oligonucleotide
  Mitotic kinesin microtubule-associated protein Eg5 (Kif11) siRNA
ctcaaaaacaaaatttaaaaaag

SEQ ID NO: 3779 - DNA, 23 bp, Artificial Sequence
  Description of Artificial Sequence: Synthetic oligonucleotide
  Mitotic kinesin microtubule-associated protein Eg5 (Kif11) siRNA
tcaaaaacaaaatttaaaaaaga

SEQ ID NO: 3780 - DNA, 23 bp, Artificial Sequence
  Description of Artificial Sequence: Synthetic oligonucleotide
  Mitotic kinesin microtubule-associated protein Eg5 (Kif11) siRNA
caaaaacaaaatttaaaaaagat

SEQ ID NO: 3781 - DNA, 23 bp, Artificial Sequence
  Description of Artificial Sequence: Synthetic oligonucleotide
  Mitotic kinesin microtubule-associated protein Eg5 (Kif11) siRNA
aaaaacaaaatttaaaaaagata

SEQ ID NO: 3782 - DNA, 23 bp, Artificial Sequence
  Description of Artificial Sequence: Synthetic oligonucleotide
  Mitotic kinesin microtubule-associated protein Eg5 (Kif11) siRNA
aaaacaaaatttaaaaaagatat

SEQ ID NO: 3783 - DNA, 23 bp, Artificial Sequence
  Description of Artificial Sequence: Synthetic oligonucleotide
  Mitotic kinesin microtubule-associated protein Eg5 (Kif11) siRNA
aaacaaaatttaaaaaagatata

SEQ ID NO: 3784 - DNA, 23 bp, Artificial Sequence
  Description of Artificial Sequence: Synthetic oligonucleotide
  Mitotic kinesin microtubule-associated protein Eg5 (Kif11) siRNA
aacaaaatttaaaaaagatataa

SEQ ID NO: 3785 - DNA, 23 bp, Artificial Sequence
  Description of Artificial Sequence: Synthetic oligonucleotide
  Mitotic kinesin microtubule-associated protein Eg5 (Kif11) siRNA
acaaaatttaaaaaagatataag

SEQ ID NO: 3786 - DNA, 23 bp, Artificial Sequence
  Description of Artificial Sequence: Synthetic oligonucleotide
  Mitotic kinesin microtubule-associated protein Eg5 (Kif11) siRNA
caaaatttaaaaaagatataagg

SEQ ID NO: 3787 - DNA, 23 bp, Artificial Sequence
  Description of Artificial Sequence: Synthetic oligonucleotide
  Mitotic kinesin microtubule-associated protein Eg5 (Kif11) siRNA
aaaatttaaaaaagatataaggc

SEQ ID NO: 3788 - DNA, 23 bp, Artificial Sequence
  Description of Artificial Sequence: Synthetic oligonucleotide
  Mitotic kinesin microtubule-associated protein Eg5 (Kif11) siRNA
aaatttaaaaaagatataaggca

SEQ ID NO: 3789 - DNA, 23 bp, Artificial Sequence
  Description of Artificial Sequence: Synthetic oligonucleotide
  Mitotic kinesin microtubule-associated protein Eg5 (Kif11) siRNA
aatttaaaaaagatataaggcag

SEQ ID NO: 3790 - DNA, 23 bp, Artificial Sequence
  Description of Artificial Sequence: Synthetic oligonucleotide
  Mitotic kinesin microtubule-associated protein Eg5 (Kif11) siRNA
atttaaaaaagatataaggcagt

SEQ ID NO: 3791 - DNA, 23 bp, Artificial Sequence
  Description of Artificial Sequence: Synthetic oligonucleotide
  Mitotic kinesin microtubule-associated protein Eg5 (Kif11) siRNA
tttaaaaaagatataaggcagta

SEQ ID NO: 3792 - DNA, 23 bp, Artificial Sequence
  Description of Artificial Sequence: Synthetic oligonucleotide
  Mitotic kinesin microtubule-associated protein Eg5 (Kif11) siRNA
ttaaaaaagatataaggcagtac

SEQ ID NO: 3793 - DNA, 23 bp, Artificial Sequence
  Description of Artificial Sequence: Synthetic oligonucleotide
  Mitotic kinesin microtubule-associated protein Eg5 (Kif11) siRNA
taaaaaagatataaggcagtact

SEQ ID NO: 3794 - DNA, 23 bp, Artificial Sequence
  Description of Artificial Sequence: Synthetic oligonucleotide
  Mitotic kinesin microtubule-associated protein Eg5 (Kif11) siRNA
aaaaaagatataaggcagtactg

SEQ ID NO: 3795 - DNA, 23 bp, Artificial Sequence
  Description of Artificial Sequence: Synthetic oligonucleotide
  Mitotic kinesin microtubule-associated protein Eg5 (Kif11) siRNA
aaaaagatataaggcagtactgt

SEQ ID NO: 3796 - DNA, 23 bp, Artificial Sequence
  Description of Artificial Sequence: Synthetic oligonucleotide
  Mitotic kinesin microtubule-associated protein Eg5 (Kif11) siRNA
aaaagatataaggcagtactgta

SEQ ID NO: 3797 - DNA, 23 bp, Artificial Sequence
  Description of Artificial Sequence: Synthetic oligonucleotide
  Mitotic kinesin microtubule-associated protein Eg5 (Kif11) siRNA
aaagatataaggcagtactgtaa

SEQ ID NO: 3798 - DNA, 23 bp, Artificial Sequence
  Description of Artificial Sequence: Synthetic oligonucleotide
  Mitotic kinesin microtubule-associated protein Eg5 (Kif11) siRNA
aagatataaggcagtactgtaaa

SEQ ID NO: 3799 - DNA, 23 bp, Artificial Sequence
  Description of Artificial Sequence: Synthetic oligonucleotide
  Mitotic kinesin microtubule-associated protein Eg5 (Kif11) siRNA
agatataaggcagtactgtaaat

SEQ ID NO: 3800 - DNA, 23 bp, Artificial Sequence
  Description of Artificial Sequence: Synthetic oligonucleotide
  Mitotic kinesin microtubule-associated protein Eg5 (Kif11) siRNA
gatataaggcagtactgtaaatt

SEQ ID NO: 3801 - DNA, 23 bp, Artificial Sequence
  Description of Artificial Sequence: Synthetic oligonucleotide
  Mitotic kinesin microtubule-associated protein Eg5 (Kif11) siRNA
atataaggcagtactgtaaattc

SEQ ID NO: 3802 - DNA, 23 bp, Artificial Sequence
  Description of Artificial Sequence: Synthetic oligonucleotide
  Mitotic kinesin microtubule-associated protein Eg5 (Kif11) siRNA
tataaggcagtactgtaaattca

SEQ ID NO: 3803 - DNA, 23 bp, Artificial Sequence
  Description of Artificial Sequence: Synthetic oligonucleotide
  Mitotic kinesin microtubule-associated protein Eg5 (Kif11) siRNA
ataaggcagtactgtaaattcag

SEQ ID NO: 3804 - DNA, 23 bp, Artificial Sequence
  Description of Artificial Sequence: Synthetic oligonucleotide
  Mitotic kinesin microtubule-associated protein Eg5 (Kif11) siRNA
taaggcagtactgtaaattcagt

SEQ ID NO: 3805 - DNA, 23 bp, Artificial Sequence
  Description of Artificial Sequence: Synthetic oligonucleotide
  Mitotic kinesin microtubule-associated protein Eg5 (Kif11) siRNA
aaggcagtactgtaaattcagtt

SEQ ID NO: 3806 - DNA, 23 bp, Artificial Sequence
  Description of Artificial Sequence: Synthetic oligonucleotide
  Mitotic kinesin microtubule-associated protein Eg5 (Kif11) siRNA
aggcagtactgtaaattcagttg

SEQ ID NO: 3807 - DNA, 23 bp, Artificial Sequence
  Description of Artificial Sequence: Synthetic oligonucleotide
  Mitotic kinesin microtubule-associated protein Eg5 (Kif11) siRNA
ggcagtactgtaaattcagttga

SEQ ID NO: 3808 - DNA, 23 bp, Artificial Sequence
  Description of Artificial Sequence: Synthetic oligonucleotide
  Mitotic kinesin microtubule-associated protein Eg5 (Kif11) siRNA
gcagtactgtaaattcagttgaa

SEQ ID NO: 3809 - DNA, 23 bp, Artificial Sequence
  Description of Artificial Sequence: Synthetic oligonucleotide
  Mitotic kinesin microtubule-associated protein Eg5 (Kif11) siRNA
cagtactgtaaattcagttgaat

SEQ ID NO: 3810 - DNA, 23 bp, Artificial Sequence
  Description of Artificial Sequence: Synthetic oligonucleotide
  Mitotic kinesin microtubule-associated protein Eg5 (Kif11) siRNA
agtactgtaaattcagttgaatt

SEQ ID NO: 3811 - DNA, 23 bp, Artificial Sequence
  Description of Artificial Sequence: Synthetic oligonucleotide
  Mitotic kinesin microtubule-associated protein Eg5 (Kif11) siRNA
gtactgtaaattcagttgaattt

SEQ ID NO: 3812 - DNA, 23 bp, Artificial Sequence
  Description of Artificial Sequence: Synthetic oligonucleotide
  Mitotic kinesin microtubule-associated protein Eg5 (Kif11) siRNA
tactgtaaattcagttgaatttt

SEQ ID NO: 3813 - DNA, 23 bp, Artificial Sequence
  Description of Artificial Sequence: Synthetic oligonucleotide
  Mitotic kinesin microtubule-associated protein Eg5 (Kif11) siRNA
actgtaaattcagttgaattttg

SEQ ID NO: 3814 - DNA, 23 bp, Artificial Sequence
  Description of Artificial Sequence: Synthetic oligonucleotide
  Mitotic kinesin microtubule-associated protein Eg5 (Kif11) siRNA
ctgtaaattcagttgaattttga

SEQ ID NO: 3815 - DNA, 23 bp, Artificial Sequence
  Description of Artificial Sequence: Synthetic oligonucleotide
  Mitotic kinesin microtubule-associated protein Eg5 (Kif11) siRNA
tgtaaattcagttgaattttgat

SEQ ID NO: 3816 - DNA, 23 bp, Artificial Sequence
  Description of Artificial Sequence: Synthetic oligonucleotide
  Mitotic kinesin microtubule-associated protein Eg5 (Kif11) siRNA
gtaaattcagttgaattttgata

SEQ ID NO: 3817 - DNA, 23 bp, Artificial Sequence
  Description of Artificial Sequence: Synthetic oligonucleotide
  Mitotic kinesin microtubule-associated protein Eg5 (Kif11) siRNA
taaattcagttgaattttgatat

SEQ ID NO: 3818 - DNA, 23 bp, Artificial Sequence
  Description of Artificial Sequence: Synthetic oligonucleotide
  Mitotic kinesin microtubule-associated protein Eg5 (Kif11) siRNA
aaattcagttgaattttgatatc

SEQ ID NO: 3819 - DNA, 23 bp, Artificial Sequence
  Description of Artificial Sequence: Synthetic oligonucleotide
  Mitotic kinesin microtubule-associated protein Eg5 (Kif11) siRNA
aattcagttgaattttgatatct

SEQ ID NO: 3820 - DNA, 23 bp, Artificial Sequence
  Description of Artificial Sequence: Synthetic oligonucleotide
  Mitotic kinesin microtubule-associated protein Eg5 (Kif11) siRNA
attcagttgaattttgatatcta

SEQ ID NO: 3821 - DNA, 23 bp, Artificial Sequence
  Description of Artificial Sequence: Synthetic oligonucleotide
  Mitotic kinesin microtubule-associated protein Eg5 (Kif11) siRNA
ttcagttgaattttgatatctac

SEQ ID NO: 3822 - DNA, 23 bp, Artificial Sequence
  Description of Artificial Sequence: Synthetic oligonucleotide
  Mitotic kinesin microtubule-associated protein Eg5 (Kif11) siRNA
tcagttgaattttgatatctacc

SEQ ID NO: 3823 - DNA, 23 bp, Artificial Sequence
  Description of Artificial Sequence: Synthetic oligonucleotide
  Mitotic kinesin microtubule-associated protein Eg5 (Kif11) siRNA
cagttgaattttgatatctaccc

SEQ ID NO: 3824 - DNA, 23 bp, Artificial Sequence
  Description of Artificial Sequence: Synthetic oligonucleotide
  Mitotic kinesin microtubule-associated protein Eg5 (Kif11) siRNA
agttgaattttgatatctaccca

SEQ ID NO: 3825 - DNA, 23 bp, Artificial Sequence
  Description of Artificial Sequence: Synthetic oligonucleotide
  Mitotic kinesin microtubule-associated protein Eg5 (Kif11) siRNA
gttgaattttgatatctacccat

SEQ ID NO: 3826 - DNA, 23 bp, Artificial Sequence
  Description of Artificial Sequence: Synthetic oligonucleotide
  Mitotic kinesin microtubule-associated protein Eg5 (Kif11) siRNA
ttgaattttgatatctacccatt

SEQ ID NO: 3827 - DNA, 23 bp, Artificial Sequence
  Description of Artificial Sequence: Synthetic oligonucleotide
  Mitotic kinesin microtubule-associated protein Eg5 (Kif11) siRNA
tgaattttgatatctacccattt

SEQ ID NO: 3828 - DNA, 23 bp, Artificial Sequence
  Description of Artificial Sequence: Synthetic oligonucleotide
  Mitotic kinesin microtubule-associated protein Eg5 (Kif11) siRNA
gaattttgatatctacccatttt

SEQ ID NO: 3829 - DNA, 23 bp, Artificial Sequence
  Description of Artificial Sequence: Synthetic oligonucleotide
  Mitotic kinesin microtubule-associated protein Eg5 (Kif11) siRNA
aattttgatatctacccattttt

SEQ ID NO: 3830 - DNA, 23 bp, Artificial Sequence
  Description of Artificial Sequence: Synthetic oligonucleotide
  Mitotic kinesin microtubule-associated protein Eg5 (Kif11) siRNA
attttgatatctacccatttttc

SEQ ID NO: 3831 - DNA, 23 bp, Artificial Sequence
  Description of Artificial Sequence: Synthetic oligonucleotide
  Mitotic kinesin microtubule-associated protein Eg5 (Kif11) siRNA
ttttgatatctacccatttttct

SEQ ID NO: 3832 - DNA, 23 bp, Artificial Sequence
  Description of Artificial Sequence: Synthetic oligonucleotide
  Mitotic kinesin microtubule-associated protein Eg5 (Kif11) siRNA
tttgatatctacccatttttctg

SEQ ID NO: 3833 - DNA, 23 bp, Artificial Sequence
  Description of Artificial Sequence: Synthetic oligonucleotide
  Mitotic kinesin microtubule-associated protein Eg5 (Kif11) siRNA
ttgatatctacccatttttctgt

SEQ ID NO: 3834 - DNA, 23 bp, Artificial Sequence
  Description of Artificial Sequence: Synthetic oligonucleotide
  Mitotic kinesin microtubule-associated protein Eg5 (Kif11) siRNA
tgatatctacccatttttctgtc

SEQ ID NO: 3835 - DNA, 23 bp, Artificial Sequence
  Description of Artificial Sequence: Synthetic oligonucleotide
  Mitotic kinesin microtubule-associated protein Eg5 (Kif11) siRNA
gatatctacccatttttctgtca

SEQ ID NO: 3836 - DNA, 23 bp, Artificial Sequence
  Description of Artificial Sequence: Synthetic oligonucleotide
  Mitotic kinesin microtubule-associated protein Eg5 (Kif11) siRNA
atatctacccatttttctgtcat

SEQ ID NO: 3837 - DNA, 23 bp, Artificial Sequence
  Description of Artificial Sequence: Synthetic oligonucleotide
  Mitotic kinesin microtubule-associated protein Eg5 (Kif11) siRNA
tatctacccatttttctgtcatc

SEQ ID NO: 3838 - DNA, 23 bp, Artificial Sequence
  Description of Artificial Sequence: Synthetic oligonucleotide
  Mitotic kinesin microtubule-associated protein Eg5 (Kif11) siRNA
atctacccatttttctgtcatcc

SEQ ID NO: 3839 - DNA, 23 bp, Artificial Sequence
  Description of Artificial Sequence: Synthetic oligonucleotide
  Mitotic kinesin microtubule-associated protein Eg5 (Kif11) siRNA
tctacccatttttctgtcatccc

SEQ ID NO: 3840 - DNA, 23 bp, Artificial Sequence
  Description of Artificial Sequence: Synthetic oligonucleotide
  Mitotic kinesin microtubule-associated protein Eg5 (Kif11) siRNA
ctacccatttttctgtcatccct

SEQ ID NO: 3841 - DNA, 23 bp, Artificial Sequence
  Description of Artificial Sequence: Synthetic oligonucleotide
  Mitotic kinesin microtubule-associated protein Eg5 (Kif11) siRNA
tacccatttttctgtcatcccta

SEQ ID NO: 3842 - DNA, 23 bp, Artificial Sequence
  Description of Artificial Sequence: Synthetic oligonucleotide
  Mitotic kinesin microtubule-associated protein Eg5 (Kif11) siRNA
acccatttttctgtcatccctat

SEQ ID NO: 3843 - DNA, 23 bp, Artificial Sequence
  Description of Artificial Sequence: Synthetic oligonucleotide
  Mitotic kinesin microtubule-associated protein Eg5 (Kif11) siRNA
cccatttttctgtcatccctata

SEQ ID NO: 3844 - DNA, 23 bp, Artificial Sequence
  Description of Artificial Sequence: Synthetic oligonucleotide
  Mitotic kinesin microtubule-associated protein Eg5 (Kif11) siRNA
ccatttttctgtcatccctatag

SEQ ID NO: 3845 - DNA, 23 bp, Artificial Sequence
  Description of Artificial Sequence: Synthetic oligonucleotide
  Mitotic kinesin microtubule-associated protein Eg5 (Kif11) siRNA
catttttctgtcatccctatagt

SEQ ID NO: 3846 - DNA, 23 bp, Artificial Sequence
  Description of Artificial Sequence: Synthetic oligonucleotide
  Mitotic kinesin microtubule-associated protein Eg5 (Kif11) siRNA
atttttctgtcatccctatagtt

SEQ ID NO: 3847 - DNA, 23 bp, Artificial Sequence
  Description of Artificial Sequence: Synthetic oligonucleotide
  Mitotic kinesin microtubule-associated protein Eg5 (Kif11) siRNA
tttttctgtcatccctatagttc

SEQ ID NO: 3848 - DNA, 23 bp, Artificial Sequence
  Description of Artificial Sequence: Synthetic oligonucleotide
  Mitotic kinesin microtubule-associated protein Eg5 (Kif11) siRNA
ttttctgtcatccctatagttca

SEQ ID NO: 3849 - DNA, 23 bp, Artificial Sequence
  Description of Artificial Sequence: Synthetic oligonucleotide
  Mitotic kinesin microtubule-associated protein Eg5 (Kif11) siRNA
tttctgtcatccctatagttcac

SEQ ID NO: 3850 - DNA, 23 bp, Artificial Sequence
  Description of Artificial Sequence: Synthetic oligonucleotide
  Mitotic kinesin microtubule-associated protein Eg5 (Kif11) siRNA
ttctgtcatccctatagttcact

SEQ ID NO: 3851 - DNA, 23 bp, Artificial Sequence
  Description of Artificial Sequence: Synthetic oligonucleotide
  Mitotic kinesin microtubule-associated protein Eg5 (Kif11) siRNA
tctgtcatccctatagttcactt

SEQ ID NO: 3852 - DNA, 23 bp, Artificial Sequence
  Description of Artificial Sequence: Synthetic oligonucleotide
  Mitotic kinesin microtubule-associated protein Eg5 (Kif11) siRNA
ctgtcatccctatagttcacttt

SEQ ID NO: 3853 - DNA, 23 bp, Artificial Sequence
  Description of Artificial Sequence: Synthetic oligonucleotide
  Mitotic kinesin microtubule-associated protein Eg5 (Kif11) siRNA
tgtcatccctatagttcactttg

SEQ ID NO: 3854 - DNA, 23 bp, Artificial Sequence
  Description of Artificial Sequence: Synthetic oligonucleotide
  Mitotic kinesin microtubule-associated protein Eg5 (Kif11) siRNA
gtcatccctatagttcactttgt

SEQ ID NO: 3855 - DNA, 23 bp, Artificial Sequence
  Description of Artificial Sequence: Synthetic oligonucleotide
  Mitotic kinesin microtubule-associated protein Eg5 (Kif11) siRNA
tcatccctatagttcactttgta

SEQ ID NO: 3856 - DNA, 23 bp, Artificial Sequence
  Description of Artificial Sequence: Synthetic oligonucleotide
  Mitotic kinesin microtubule-associated protein Eg5 (Kif11) siRNA
catccctatagttcactttgtat

SEQ ID NO: 3857 - DNA, 23 bp, Artificial Sequence
  Description of Artificial Sequence: Synthetic oligonucleotide
  Mitotic kinesin microtubule-associated protein Eg5 (Kif11) siRNA
atccctatagttcactttgtatt

SEQ ID NO: 3858 - DNA, 23 bp, Artificial Sequence
  Description of Artificial Sequence: Synthetic oligonucleotide
  Mitotic kinesin microtubule-associated protein Eg5 (Kif11) siRNA
tccctatagttcactttgtatta

SEQ ID NO: 3859 - DNA, 23 bp, Artificial Sequence
  Description of Artificial Sequence: Synthetic oligonucleotide
  Mitotic kinesin microtubule-associated protein Eg5 (Kif11) siRNA
ccctatagttcactttgtattaa

SEQ ID NO: 3860 - DNA, 23 bp, Artificial Sequence
  Description of Artificial Sequence: Synthetic oligonucleotide
  Mitotic kinesin microtubule-associated protein Eg5 (Kif11) siRNA
cctatagttcactttgtattaaa

SEQ ID NO: 3861 - DNA, 23 bp, Artificial Sequence
  Description of Artificial Sequence: Synthetic oligonucleotide
  Mitotic kinesin microtubule-associated protein Eg5 (Kif11) siRNA
ctatagttcactttgtattaaat

SEQ ID NO: 3862 - DNA, 23 bp, Artificial Sequence
  Description of Artificial Sequence: Synthetic oligonucleotide
  Mitotic kinesin microtubule-associated protein Eg5 (Kif11) siRNA
tatagttcactttgtattaaatt

SEQ ID NO: 3863 - DNA, 23 bp, Artificial Sequence
  Description of Artificial Sequence: Synthetic oligonucleotide
  Mitotic kinesin microtubule-associated protein Eg5 (Kif11) siRNA
atagttcactttgtattaaattg

SEQ ID NO: 3864 - DNA, 23 bp, Artificial Sequence
  Description of Artificial Sequence: Synthetic oligonucleotide
  Mitotic kinesin microtubule-associated protein Eg5 (Kif11) siRNA
tagttcactttgtattaaattgg

SEQ ID NO: 3865 - DNA, 23 bp, Artificial Sequence
  Description of Artificial Sequence: Synthetic oligonucleotide
  Mitotic kinesin microtubule-associated protein Eg5 (Kif11) siRNA
agttcactttgtattaaattggg

SEQ ID NO: 3866 - DNA, 23 bp, Artificial Sequence
  Description of Artificial Sequence: Synthetic oligonucleotide
  Mitotic kinesin microtubule-associated protein Eg5 (Kif11) siRNA
gttcactttgtattaaattgggt

SEQ ID NO: 3867 - DNA, 23 bp, Artificial Sequence
  Description of Artificial Sequence: Synthetic oligonucleotide
  Mitotic kinesin microtubule-associated protein Eg5 (Kif11) siRNA
ttcactttgtattaaattgggtt

SEQ ID NO: 3868 - DNA, 23 bp, Artificial Sequence
  Description of Artificial Sequence: Synthetic oligonucleotide
  Mitotic kinesin microtubule-associated protein Eg5 (Kif11) siRNA
tcactttgtattaaattgggttt

SEQ ID NO: 3869 - DNA, 23 bp, Artificial Sequence
  Description of Artificial Sequence: Synthetic oligonucleotide
  Mitotic kinesin microtubule-associated protein Eg5 (Kif11) siRNA
cactttgtattaaattgggtttc

SEQ ID NO: 3870 - DNA, 23 bp, Artificial Sequence
  Description of Artificial Sequence: Synthetic oligonucleotide
  Mitotic kinesin microtubule-associated protein Eg5 (Kif11) siRNA
actttgtattaaattgggtttca

SEQ ID NO: 3871 - DNA, 23 bp, Artificial Sequence
  Description of Artificial Sequence: Synthetic oligonucleotide
  Mitotic kinesin microtubule-associated protein Eg5 (Kif11) siRNA
ctttgtattaaattgggtttcat

SEQ ID NO: 3872 - DNA, 23 bp, Artificial Sequence
  Description of Artificial Sequence: Synthetic oligonucleotide
  Mitotic kinesin microtubule-associated protein Eg5 (Kif11) siRNA
tttgtattaaattgggtttcatt

SEQ ID NO: 3873 - DNA, 23 bp, Artificial Sequence
  Description of Artificial Sequence: Synthetic oligonucleotide
  Mitotic kinesin microtubule-associated protein Eg5 (Kif11) siRNA
ttgtattaaattgggtttcattt

SEQ ID NO: 3874 - DNA, 23 bp, Artificial Sequence
  Description of Artificial Sequence: Synthetic oligonucleotide
  Mitotic kinesin microtubule-associated protein Eg5 (Kif11) siRNA
tgtattaaattgggtttcatttg

SEQ ID NO: 3875 - DNA, 23 bp, Artificial Sequence
  Description of Artificial Sequence: Synthetic oligonucleotide
  Mitotic kinesin microtubule-associated protein Eg5 (Kif11) siRNA
gtattaaattgggtttcatttgg

SEQ ID NO: 3876 - DNA, 23 bp, Artificial Sequence
  Description of Artificial Sequence: Synthetic oligonucleotide
  Mitotic kinesin microtubule-associated protein Eg5 (Kif11) siRNA
tattaaattgggtttcatttggg

SEQ ID NO: 3877 - DNA, 23 bp, Artificial Sequence
  Description of Artificial Sequence: Synthetic oligonucleotide
  Mitotic kinesin microtubule-associated protein Eg5 (Kif11) siRNA
attaaattgggtttcatttggga

SEQ ID NO: 3878 - DNA, 23 bp, Artificial Sequence
  Description of Artificial Sequence: Synthetic oligonucleotide
  Mitotic kinesin microtubule-associated protein Eg5 (Kif11) siRNA
ttaaattgggtttcatttgggat

SEQ ID NO: 3879 - DNA, 23 bp, Artificial Sequence
  Description of Artificial Sequence: Synthetic oligonucleotide
  Mitotic kinesin microtubule-associated protein Eg5 (Kif11) siRNA
taaattgggtttcatttgggatt

SEQ ID NO: 3880 - DNA, 23 bp, Artificial Sequence
  Description of Artificial Sequence: Synthetic oligonucleotide
  Mitotic kinesin microtubule-associated protein Eg5 (Kif11) siRNA
aaattgggtttcatttgggattt

SEQ ID NO: 3881 - DNA, 23 bp, Artificial Sequence
  Description of Artificial Sequence: Synthetic oligonucleotide
  Mitotic kinesin microtubule-associated protein Eg5 (Kif11) siRNA
aattgggtttcatttgggatttg

SEQ ID NO: 3882 - DNA, 23 bp, Artificial Sequence
  Description of Artificial Sequence: Synthetic oligonucleotide
  Mitotic kinesin microtubule-associated protein Eg5 (Kif11) siRNA
attgggtttcatttgggatttgc

SEQ ID NO: 3883 - DNA, 23 bp, Artificial Sequence
  Description of Artificial Sequence: Synthetic oligonucleotide
  Mitotic kinesin microtubule-associated protein Eg5 (Kif11) siRNA
ttgggtttcatttgggatttgca

SEQ ID NO: 3884 - DNA, 23 bp, Artificial Sequence
  Description of Artificial Sequence: Synthetic oligonucleotide
  Mitotic kinesin microtubule-associated protein Eg5 (Kif11) siRNA
tgggtttcatttgggatttgcaa

SEQ ID NO: 3885 - DNA, 23 bp, Artificial Sequence
  Description of Artificial Sequence: Synthetic oligonucleotide
  Mitotic kinesin microtubule-associated protein Eg5 (Kif11) siRNA
gggtttcatttgggatttgcaat

SEQ ID NO: 3886 - DNA, 23 bp, Artificial Sequence
  Description of Artificial Sequence: Synthetic oligonucleotide
  Mitotic kinesin microtubule-associated protein Eg5 (Kif11) siRNA
ggtttcatttgggatttgcaatg

SEQ ID NO: 3887 - DNA, 23 bp, Artificial Sequence
  Description of Artificial Sequence: Synthetic oligonucleotide
  Mitotic kinesin microtubule-associated protein Eg5 (Kif11) siRNA
gtttcatttgggatttgcaatgt

SEQ ID NO: 3888 - DNA, 23 bp, Artificial Sequence
  Description of Artificial Sequence: Synthetic oligonucleotide
  Mitotic kinesin microtubule-associated protein Eg5 (Kif11) siRNA
tttcatttgggatttgcaatgta

SEQ ID NO: 3889 - DNA, 23 bp, Artificial Sequence
  Description of Artificial Sequence: Synthetic oligonucleotide
  Mitotic kinesin microtubule-associated protein Eg5 (Kif11) siRNA
ttcatttgggatttgcaatgtaa

SEQ ID NO: 3890 - DNA, 23 bp, Artificial Sequence
  Description of Artificial Sequence: Synthetic oligonucleotide
  Mitotic kinesin microtubule-associated protein Eg5 (Kif11) siRNA
tcatttgggatttgcaatgtaaa

SEQ ID NO: 3891 - DNA, 23 bp, Artificial Sequence
  Description of Artificial Sequence: Synthetic oligonucleotide
  Mitotic kinesin microtubule-associated protein Eg5 (Kif11) siRNA
catttgggatttgcaatgtaaat

SEQ ID NO: 3892 - DNA, 23 bp, Artificial Sequence
  Description of Artificial Sequence: Synthetic oligonucleotide
  Mitotic kinesin microtubule-associated protein Eg5 (Kif11) siRNA
atttgggatttgcaatgtaaata

SEQ ID NO: 3893 - DNA, 23 bp, Artificial Sequence
  Description of Artificial Sequence: Synthetic oligonucleotide
  Mitotic kinesin microtubule-associated protein Eg5 (Kif11) siRNA
tttgggatttgcaatgtaaatac

SEQ ID NO: 3894 - DNA, 23 bp, Artificial Sequence
  Description of Artificial Sequence: Synthetic oligonucleotide
  Mitotic kinesin microtubule-associated protein Eg5 (Kif11) siRNA
ttgggatttgcaatgtaaatacg

SEQ ID NO: 3895 - DNA, 23 bp, Artificial Sequence
  Description of Artificial Sequence: Synthetic oligonucleotide
  Mitotic kinesin microtubule-associated protein Eg5 (Kif11) siRNA
tgggatttgcaatgtaaatacgt

SEQ ID NO: 3896 - DNA, 23 bp, Artificial Sequence
  Description of Artificial Sequence: Synthetic oligonucleotide
  Mitotic kinesin microtubule-associated protein Eg5 (Kif11) siRNA
gggatttgcaatgtaaatacgta

SEQ ID NO: 3897 - DNA, 23 bp, Artificial Sequence
  Description of Artificial Sequence: Synthetic oligonucleotide
  Mitotic kinesin microtubule-associated protein Eg5 (Kif11) siRNA
ggatttgcaatgtaaatacgtat

SEQ ID NO: 3898 - DNA, 23 bp, Artificial Sequence
  Description of Artificial Sequence: Synthetic oligonucleotide
  Mitotic kinesin microtubule-associated protein Eg5 (Kif11) siRNA
gatttgcaatgtaaatacgtatt

SEQ ID NO: 3899 - DNA, 23 bp, Artificial Sequence
  Description of Artificial Sequence: Synthetic oligonucleotide
  Mitotic kinesin microtubule-associated protein Eg5 (Kif11) siRNA
atttgcaatgtaaatacgtattt

SEQ ID NO: 3900 - DNA, 23 bp, Artificial Sequence
  Description of Artificial Sequence: Synthetic oligonucleotide
  Mitotic kinesin microtubule-associated protein Eg5 (Kif11) siRNA
tttgcaatgtaaatacgtatttc

SEQ ID NO: 3901 - DNA, 23 bp, Artificial Sequence
  Description of Artificial Sequence: Synthetic oligonucleotide
  Mitotic kinesin microtubule-associated protein Eg5 (Kif11) siRNA
ttgcaatgtaaatacgtatttct

SEQ ID NO: 3902 - DNA, 23 bp, Artificial Sequence
  Description of Artificial Sequence: Synthetic oligonucleotide
  Mitotic kinesin microtubule-associated protein Eg5 (Kif11) siRNA
tgcaatgtaaatacgtatttcta

SEQ ID NO: 3903 - DNA, 23 bp, Artificial Sequence
  Description of Artificial Sequence: Synthetic oligonucleotide
  Mitotic kinesin microtubule-associated protein Eg5 (Kif11) siRNA
gcaatgtaaatacgtatttctag

SEQ ID NO: 3904 - DNA, 23 bp, Artificial Sequence
  Description of Artificial Sequence: Synthetic oligonucleotide
  Mitotic kinesin microtubule-associated protein Eg5 (Kif11) siRNA
caatgtaaatacgtatttctagt

SEQ ID NO: 3905 - DNA, 23 bp, Artificial Sequence
  Description of Artificial Sequence: Synthetic oligonucleotide
  Mitotic kinesin microtubule-associated protein Eg5 (Kif11) siRNA
aatgtaaatacgtatttctagtt

SEQ ID NO: 3906 - DNA, 23 bp, Artificial Sequence
  Description of Artificial Sequence: Synthetic oligonucleotide
  Mitotic kinesin microtubule-associated protein Eg5 (Kif11) siRNA
atgtaaatacgtatttctagttt

SEQ ID NO: 3907 - DNA, 23 bp, Artificial Sequence
  Description of Artificial Sequence: Synthetic oligonucleotide
  Mitotic kinesin microtubule-associated protein Eg5 (Kif11) siRNA
tgtaaatacgtatttctagtttt

SEQ ID NO: 3908 - DNA, 23 bp, Artificial Sequence
  Description of Artificial Sequence: Synthetic oligonucleotide
  Mitotic kinesin microtubule-associated protein Eg5 (Kif11) siRNA
gtaaatacgtatttctagttttc

SEQ ID NO: 3909 - DNA, 23 bp, Artificial Sequence
  Description of Artificial Sequence: Synthetic oligonucleotide
  Mitotic kinesin microtubule-associated protein Eg5 (Kif11) siRNA
taaatacgtatttctagttttca

SEQ ID NO: 3910 - DNA, 23 bp, Artificial Sequence
  Description of Artificial Sequence: Synthetic oligonucleotide
  Mitotic kinesin microtubule-associated protein Eg5 (Kif11) siRNA
aaatacgtatttctagttttcat

SEQ ID NO: 3911 - DNA, 23 bp, Artificial Sequence
  Description of Artificial Sequence: Synthetic oligonucleotide
  Mitotic kinesin microtubule-associated protein Eg5 (Kif11) siRNA
aatacgtatttctagttttcata

SEQ ID NO: 3912 - DNA, 23 bp, Artificial Sequence
  Description of Artificial Sequence: Synthetic oligonucleotide
  Mitotic kinesin microtubule-associated protein Eg5 (Kif11) siRNA
atacgtatttctagttttcatat

SEQ ID NO: 3913 - DNA, 23 bp, Artificial Sequence
  Description of Artificial Sequence: Synthetic oligonucleotide
  Mitotic kinesin microtubule-associated protein Eg5 (Kif11) siRNA
tacgtatttctagttttcatata

SEQ ID NO: 3914 - DNA, 23 bp, Artificial Sequence
  Description of Artificial Sequence: Synthetic oligonucleotide
  Mitotic kinesin microtubule-associated protein Eg5 (Kif11) siRNA
acgtatttctagttttcatataa

SEQ ID NO: 3915 - DNA, 23 bp, Artificial Sequence
  Description of Artificial Sequence: Synthetic oligonucleotide
  Mitotic kinesin microtubule-associated protein Eg5 (Kif11) siRNA
cgtatttctagttttcatataaa

SEQ ID NO: 3916 - DNA, 23 bp, Artificial Sequence
  Description of Artificial Sequence: Synthetic oligonucleotide
  Mitotic kinesin microtubule-associated protein Eg5 (Kif11) siRNA
gtatttctagttttcatataaag

SEQ ID NO: 3917 - DNA, 23 bp, Artificial Sequence
  Description of Artificial Sequence: Synthetic oligonucleotide
  Mitotic kinesin microtubule-associated protein Eg5 (Kif11) siRNA
tatttctagttttcatataaagt

SEQ ID NO: 3918 - DNA, 23 bp, Artificial Sequence
  Description of Artificial Sequence: Synthetic oligonucleotide
  Mitotic kinesin microtubule-associated protein Eg5 (Kif11) siRNA
atttctagttttcatataaagta

SEQ ID NO: 3919 - DNA, 23 bp, Artificial Sequence
  Description of Artificial Sequence: Synthetic oligonucleotide
  Mitotic kinesin microtubule-associated protein Eg5 (Kif11) siRNA
tttctagttttcatataaagtag

SEQ ID NO: 3920 - DNA, 23 bp, Artificial Sequence
  Description of Artificial Sequence: Synthetic oligonucleotide
  Mitotic kinesin microtubule-associated protein Eg5 (Kif11) siRNA
ttctagttttcatataaagtagt

SEQ ID NO: 3921 - DNA, 23 bp, Artificial Sequence
  Description of Artificial Sequence: Synthetic oligonucleotide
  Mitotic kinesin microtubule-associated protein Eg5 (Kif11) siRNA
tctagttttcatataaagtagtt

SEQ ID NO: 3922 - DNA, 23 bp, Artificial Sequence
  Description of Artificial Sequence: Synthetic oligonucleotide
  Mitotic kinesin microtubule-associated protein Eg5 (Kif11) siRNA
ctagttttcatataaagtagttc

SEQ ID NO: 3923 - DNA, 23 bp, Artificial Sequence
  Description of Artificial Sequence: Synthetic oligonucleotide
  Mitotic kinesin microtubule-associated protein Eg5 (Kif11) siRNA
tagttttcatataaagtagttct

SEQ ID NO: 3924 - DNA, 23 bp, Artificial Sequence
  Description of Artificial Sequence: Synthetic oligonucleotide
  Mitotic kinesin microtubule-associated protein Eg5 (Kif11) siRNA
agttttcatataaagtagttctt

SEQ ID NO: 3925 - DNA, 23 bp, Artificial Sequence
  Description of Artificial Sequence: Synthetic oligonucleotide
  Mitotic kinesin microtubule-associated protein Eg5 (Kif11) siRNA
gttttcatataaagtagttcttt

SEQ ID NO: 3926 - DNA, 23 bp, Artificial Sequence
  Description of Artificial Sequence: Synthetic oligonucleotide
  Mitotic kinesin microtubule-associated protein Eg5 (Kif11) siRNA
ttttcatataaagtagttctttt

SEQ ID NO: 3927 - DNA, 23 bp, Artificial Sequence
  Description of Artificial Sequence: Synthetic oligonucleotide
  Mitotic kinesin microtubule-associated protein Eg5 (Kif11) siRNA
tttcatataaagtagttctttta

SEQ ID NO: 3928 - DNA, 23 bp, Artificial Sequence
  Description of Artificial Sequence: Synthetic oligonucleotide
  Mitotic kinesin microtubule-associated protein Eg5 (Kif11) siRNA
ttcatataaagtagttcttttat

SEQ ID NO: 3929 - DNA, 23 bp, Artificial Sequence
  Description of Artificial Sequence: Synthetic oligonucleotide
  Mitotic kinesin microtubule-associated protein Eg5 (Kif11) siRNA
tcatataaagtagttcttttata

SEQ ID NO: 3930 - DNA, 23 bp, Artificial Sequence
  Description of Artificial Sequence: Synthetic oligonucleotide
  Mitotic kinesin microtubule-associated protein Eg5 (Kif11) siRNA
catataaagtagttcttttataa

SEQ ID NO: 3931 - DNA, 23 bp, Artificial Sequence
  Description of Artificial Sequence: Synthetic oligonucleotide
  Mitotic kinesin microtubule-associated protein Eg5 (Kif11) siRNA
atataaagtagttcttttataac

SEQ ID NO: 3932 - DNA, 23 bp, Artificial Sequence
  Description of Artificial Sequence: Synthetic oligonucleotide
  Mitotic kinesin microtubule-associated protein Eg5 (Kif11) siRNA
tataaagtagttcttttataaca

SEQ ID NO: 3933 - DNA, 23 bp, Artificial Sequence
  Description of Artificial Sequence: Synthetic oligonucleotide
  Mitotic kinesin microtubule-associated protein Eg5 (Kif11) siRNA
ataaagtagttcttttataacaa

SEQ ID NO: 3934 - DNA, 23 bp, Artificial Sequence
  Description of Artificial Sequence: Synthetic oligonucleotide
  Mitotic kinesin microtubule-associated protein Eg5 (Kif11) siRNA
taaagtagttcttttataacaaa

SEQ ID NO: 3935 - DNA, 23 bp, Artificial Sequence
  Description of Artificial Sequence: Synthetic oligonucleotide
  Mitotic kinesin microtubule-associated protein Eg5 (Kif11) siRNA
aaagtagttcttttataacaaat

SEQ ID NO: 3936 - DNA, 23 bp, Artificial Sequence
  Description of Artificial Sequence: Synthetic oligonucleotide
  Mitotic kinesin microtubule-associated protein Eg5 (Kif11) siRNA
aagtagttcttttataacaaatg

SEQ ID NO: 3937 - DNA, 23 bp, Artificial Sequence
  Description of Artificial Sequence: Synthetic oligonucleotide
  Mitotic kinesin microtubule-associated protein Eg5 (Kif11) siRNA
agtagttcttttataacaaatga

SEQ ID NO: 3938 - DNA, 23 bp, Artificial Sequence
  Description of Artificial Sequence: Synthetic oligonucleotide
  Mitotic kinesin microtubule-associated protein Eg5 (Kif11) siRNA
gtagttcttttataacaaatgaa

SEQ ID NO: 3939 - DNA, 23 bp, Artificial Sequence
  Description of Artificial Sequence: Synthetic oligonucleotide
  Mitotic kinesin microtubule-associated protein Eg5 (Kif11) siRNA
tagttcttttataacaaatgaaa

SEQ ID NO: 3940 - DNA, 23 bp, Artificial Sequence
  Description of Artificial Sequence: Synthetic oligonucleotide
  Mitotic kinesin microtubule-associated protein Eg5 (Kif11) siRNA
agttcttttataacaaatgaaaa

SEQ ID NO: 3941 - DNA, 23 bp, Artificial Sequence
  Description of Artificial Sequence: Synthetic oligonucleotide
  Mitotic kinesin microtubule-associated protein Eg5 (Kif11) siRNA
gttcttttataacaaatgaaaag

SEQ ID NO: 3942 - DNA, 23 bp, Artificial Sequence
  Description of Artificial Sequence: Synthetic oligonucleotide
  Mitotic kinesin microtubule-associated protein Eg5 (Kif11) siRNA
ttcttttataacaaatgaaaagt

SEQ ID NO: 3943 - DNA, 23 bp, Artificial Sequence
  Description of Artificial Sequence: Synthetic oligonucleotide
  Mitotic kinesin microtubule-associated protein Eg5 (Kif11) siRNA
tcttttataacaaatgaaaagta

SEQ ID NO: 3944 - DNA, 23 bp, Artificial Sequence
  Description of Artificial Sequence: Synthetic oligonucleotide
  Mitotic kinesin microtubule-associated protein Eg5 (Kif11) siRNA
cttttataacaaatgaaaagtat

SEQ ID NO: 3945 - DNA, 23 bp, Artificial Sequence
  Description of Artificial Sequence: Synthetic oligonucleotide
  Mitotic kinesin microtubule-associated protein Eg5 (Kif11) siRNA
ttttataacaaatgaaaagtatt

SEQ ID NO: 3946 - DNA, 23 bp, Artificial Sequence
  Description of Artificial Sequence: Synthetic oligonucleotide
  Mitotic kinesin microtubule-associated protein Eg5 (Kif11) siRNA
tttataacaaatgaaaagtattt

SEQ ID NO: 3947 - DNA, 23 bp, Artificial Sequence
  Description of Artificial Sequence: Synthetic oligonucleotide
  Mitotic kinesin microtubule-associated protein Eg5 (Kif11) siRNA
ttataacaaatgaaaagtatttt

SEQ ID NO: 3948 - DNA, 23 bp, Artificial Sequence
  Description of Artificial Sequence: Synthetic oligonucleotide
  Mitotic kinesin microtubule-associated protein Eg5 (Kif11) siRNA
tataacaaatgaaaagtattttt

SEQ ID NO: 3949 - DNA, 23 bp, Artificial Sequence
  Description of Artificial Sequence: Synthetic oligonucleotide
  Mitotic kinesin microtubule-associated protein Eg5 (Kif11) siRNA
ataacaaatgaaaagtatttttc

SEQ ID NO: 3950 - DNA, 23 bp, Artificial Sequence
  Description of Artificial Sequence: Synthetic oligonucleotide
  Mitotic kinesin microtubule-associated protein Eg5 (Kif11) siRNA
taacaaatgaaaagtatttttct

SEQ ID NO: 3951 - DNA, 23 bp, Artificial Sequence
  Description of Artificial Sequence: Synthetic oligonucleotide
  Mitotic kinesin microtubule-associated protein Eg5 (Kif11) siRNA
aacaaatgaaaagtatttttctt

SEQ ID NO: 3952 - DNA, 23 bp, Artificial Sequence
  Description of Artificial Sequence: Synthetic oligonucleotide
  Mitotic kinesin microtubule-associated protein Eg5 (Kif11) siRNA
acaaatgaaaagtatttttcttg

SEQ ID NO: 3953 - DNA, 23 bp, Artificial Sequence
  Description of Artificial Sequence: Synthetic oligonucleotide
  Mitotic kinesin microtubule-associated protein Eg5 (Kif11) siRNA
caaatgaaaagtatttttcttgt

SEQ ID NO: 3954 - DNA, 23 bp, Artificial Sequence
  Description of Artificial Sequence: Synthetic oligonucleotide
  Mitotic kinesin microtubule-associated protein Eg5 (Kif11) siRNA
aaatgaaaagtatttttcttgta

SEQ ID NO: 3955 - DNA, 23 bp, Artificial Sequence
  Description of Artificial Sequence: Synthetic oligonucleotide
  Mitotic kinesin microtubule-associated protein Eg5 (Kif11) siRNA
aatgaaaagtatttttcttgtat

SEQ ID NO: 3956 - DNA, 23 bp, Artificial Sequence
  Description of Artificial Sequence: Synthetic oligonucleotide
  Mitotic kinesin microtubule-associated protein Eg5 (Kif11) siRNA
atgaaaagtatttttcttgtata

SEQ ID NO: 3957 - DNA, 23 bp, Artificial Sequence
  Description of Artificial Sequence: Synthetic oligonucleotide
  Mitotic kinesin microtubule-associated protein Eg5 (Kif11) siRNA
tgaaaagtatttttcttgtatat

SEQ ID NO: 3958 - DNA, 23 bp, Artificial Sequence
  Description of Artificial Sequence: Synthetic oligonucleotide
  Mitotic kinesin microtubule-associated protein Eg5 (Kif11) siRNA
gaaaagtatttttcttgtatatt

SEQ ID NO: 3959 - DNA, 23 bp, Artificial Sequence
  Description of Artificial Sequence: Synthetic oligonucleotide
  Mitotic kinesin microtubule-associated protein Eg5 (Kif11) siRNA
aaaagtatttttcttgtatatta

SEQ ID NO: 3960 - DNA, 23 bp, Artificial Sequence
  Description of Artificial Sequence: Synthetic oligonucleotide
  Mitotic kinesin microtubule-associated protein Eg5 (Kif11) siRNA
aaagtatttttcttgtatattat

SEQ ID NO: 3961 - DNA, 23 bp, Artificial Sequence
  Description of Artificial Sequence: Synthetic oligonucleotide
  Mitotic kinesin microtubule-associated protein Eg5 (Kif11) siRNA
aagtatttttcttgtatattatt

SEQ ID NO: 3962 - DNA, 23 bp, Artificial Sequence
  Description of Artificial Sequence: Synthetic oligonucleotide
  Mitotic kinesin microtubule-associated protein Eg5 (Kif11) siRNA
agtatttttcttgtatattatta

SEQ ID NO: 3963 - DNA, 23 bp, Artificial Sequence
  Description of Artificial Sequence: Synthetic oligonucleotide
  Mitotic kinesin microtubule-associated protein Eg5 (Kif11) siRNA
gtatttttcttgtatattattaa

SEQ ID NO: 3964 - DNA, 23 bp, Artificial Sequence
  Description of Artificial Sequence: Synthetic oligonucleotide
  Mitotic kinesin microtubule-associated protein Eg5 (Kif11) siRNA
tatttttcttgtatattattaag

SEQ ID NO: 3965 - DNA, 23 bp, Artificial Sequence
  Description of Artificial Sequence: Synthetic oligonucleotide
  Mitotic kinesin microtubule-associated protein Eg5 (Kif11) siRNA
atttttcttgtatattattaagt

SEQ ID NO: 3966 - DNA, 23 bp, Artificial Sequence
  Description of Artificial Sequence: Synthetic oligonucleotide
  Mitotic kinesin microtubule-associated protein Eg5 (Kif11) siRNA
tttttcttgtatattattaagta

SEQ ID NO: 3967 - DNA, 23 bp, Artificial Sequence
  Description of Artificial Sequence: Synthetic oligonucleotide
  Mitotic kinesin microtubule-associated protein Eg5 (Kif11) siRNA
ttttcttgtatattattaagtaa

SEQ ID NO: 3968 - DNA, 23 bp, Artificial Sequence
  Description of Artificial Sequence: Synthetic oligonucleotide
  Mitotic kinesin microtubule-associated protein Eg5 (Kif11) siRNA
tttcttgtatattattaagtaat

SEQ ID NO: 3969 - DNA, 23 bp, Artificial Sequence
  Description of Artificial Sequence: Synthetic oligonucleotide
  Mitotic kinesin microtubule-associated protein Eg5 (Kif11) siRNA
ttcttgtatattattaagtaatg

SEQ ID NO: 3970 - DNA, 23 bp, Artificial Sequence
  Description of Artificial Sequence: Synthetic oligonucleotide
  Mitotic kinesin microtubule-associated protein Eg5 (Kif11) siRNA
tcttgtatattattaagtaatga

SEQ ID NO: 3971 - DNA, 23 bp, Artificial Sequence
  Description of Artificial Sequence: Synthetic oligonucleotide
  Mitotic kinesin microtubule-associated protein Eg5 (Kif11) siRNA
cttgtatattattaagtaatgaa

SEQ ID NO: 3972 - DNA, 23 bp, Artificial Sequence
  Description of Artificial Sequence: Synthetic oligonucleotide
  Mitotic kinesin microtubule-associated protein Eg5 (Kif11) siRNA
ttgtatattattaagtaatgaat

SEQ ID NO: 3973 - DNA, 23 bp, Artificial Sequence
  Description of Artificial Sequence: Synthetic oligonucleotide
  Mitotic kinesin microtubule-associated protein Eg5 (Kif11) siRNA
tgtatattattaagtaatgaata

SEQ ID NO: 3974 - DNA, 23 bp, Artificial Sequence
  Description of Artificial Sequence: Synthetic oligonucleotide
  Mitotic kinesin microtubule-associated protein Eg5 (Kif11) siRNA
gtatattattaagtaatgaatat

SEQ ID NO: 3975 - DNA, 23 bp, Artificial Sequence
  Description of Artificial Sequence: Synthetic oligonucleotide
  Mitotic kinesin microtubule-associated protein Eg5 (Kif11) siRNA
tatattattaagtaatgaatata

SEQ ID NO: 3976 - DNA, 23 bp, Artificial Sequence
  Description of Artificial Sequence: Synthetic oligonucleotide
  Mitotic kinesin microtubule-associated protein Eg5 (Kif11) siRNA
atattattaagtaatgaatatat

SEQ ID NO: 3977 - DNA, 23 bp, Artificial Sequence
  Description of Artificial Sequence: Synthetic oligonucleotide
  Mitotic kinesin microtubule-associated protein Eg5 (Kif11) siRNA
tattattaagtaatgaatatata

SEQ ID NO: 3978 - DNA, 23 bp, Artificial Sequence
  Description of Artificial Sequence: Synthetic oligonucleotide
  Mitotic kinesin microtubule-associated protein Eg5 (Kif11) siRNA
attattaagtaatgaatatataa

SEQ ID NO: 3979 - DNA, 23 bp, Artificial Sequence
  Description of Artificial Sequence: Synthetic oligonucleotide
  Mitotic kinesin microtubule-associated protein Eg5 (Kif11) siRNA
ttattaagtaatgaatatataag

SEQ ID NO: 3980 - DNA, 23 bp, Artificial Sequence
  Description of Artificial Sequence: Synthetic oligonucleotide
  Mitotic kinesin microtubule-associated protein Eg5 (Kif11) siRNA
tattaagtaatgaatatataaga

SEQ ID NO: 3981 - DNA, 23 bp, Artificial Sequence
  Description of Artificial Sequence: Synthetic oligonucleotide
  Mitotic kinesin microtubule-associated protein Eg5 (Kif11) siRNA
attaagtaatgaatatataagaa

SEQ ID NO: 3982 - DNA, 23 bp, Artificial Sequence
  Description of Artificial Sequence: Synthetic oligonucleotide
  Mitotic kinesin microtubule-associated protein Eg5 (Kif11) siRNA
ttaagtaatgaatatataagaac

SEQ ID NO: 3983 - DNA, 23 bp, Artificial Sequence
  Description of Artificial Sequence: Synthetic oligonucleotide
  Mitotic kinesin microtubule-associated protein Eg5 (Kif11) siRNA
taagtaatgaatatataagaact

SEQ ID NO: 3984 - DNA, 23 bp, Artificial Sequence
  Description of Artificial Sequence: Synthetic oligonucleotide
  Mitotic kinesin microtubule-associated protein Eg5 (Kif11) siRNA
aagtaatgaatatataagaactg

SEQ ID NO: 3985 - DNA, 23 bp, Artificial Sequence
  Description of Artificial Sequence: Synthetic oligonucleotide
  Mitotic kinesin microtubule-associated protein Eg5 (Kif11) siRNA
agtaatgaatatataagaactgt

SEQ ID NO: 3986 - DNA, 23 bp, Artificial Sequence
  Description of Artificial Sequence: Synthetic oligonucleotide
  Mitotic kinesin microtubule-associated protein Eg5 (Kif11) siRNA
gtaatgaatatataagaactgta

SEQ ID NO: 3987 - DNA, 23 bp, Artificial Sequence
  Description of Artificial Sequence: Synthetic oligonucleotide
  Mitotic kinesin microtubule-associated protein Eg5 (Kif11) siRNA
taatgaatatataagaactgtac

SEQ ID NO: 3988 - DNA, 23 bp, Artificial Sequence
  Description of Artificial Sequence: Synthetic oligonucleotide
  Mitotic kinesin microtubule-associated protein Eg5 (Kif11) siRNA
aatgaatatataagaactgtact

SEQ ID NO: 3989 - DNA, 23 bp, Artificial Sequence
  Description of Artificial Sequence: Synthetic oligonucleotide
  Mitotic kinesin microtubule-associated protein Eg5 (Kif11) siRNA
atgaatatataagaactgtactc

SEQ ID NO: 3990 - DNA, 23 bp, Artificial Sequence
  Description of Artificial Sequence: Synthetic oligonucleotide
  Mitotic kinesin microtubule-associated protein Eg5 (Kif11) siRNA
tgaatatataagaactgtactct

SEQ ID NO: 3991 - DNA, 23 bp, Artificial Sequence
  Description of Artificial Sequence: Synthetic oligonucleotide
  Mitotic kinesin microtubule-associated protein Eg5 (Kif11) siRNA
gaatatataagaactgtactctt

SEQ ID NO: 3992 - DNA, 23 bp, Artificial Sequence
  Description of Artificial Sequence: Synthetic oligonucleotide
  Mitotic kinesin microtubule-associated protein Eg5 (Kif11) siRNA
aatatataagaactgtactcttc

SEQ ID NO: 3993 - DNA, 23 bp, Artificial Sequence
  Description of Artificial Sequence: Synthetic oligonucleotide
  Mitotic kinesin microtubule-associated protein Eg5 (Kif11) siRNA
atatataagaactgtactcttct

SEQ ID NO: 3994 - DNA, 23 bp, Artificial Sequence
  Description of Artificial Sequence: Synthetic oligonucleotide
  Mitotic kinesin microtubule-associated protein Eg5 (Kif11) siRNA
tatataagaactgtactcttctc

SEQ ID NO: 3995 - DNA, 23 bp, Artificial Sequence
  Description of Artificial Sequence: Synthetic oligonucleotide
  Mitotic kinesin microtubule-associated protein Eg5 (Kif11) siRNA
atataagaactgtactcttctca

SEQ ID NO: 3996 - DNA, 23 bp, Artificial Sequence
  Description of Artificial Sequence: Synthetic oligonucleotide
  Mitotic kinesin microtubule-associated protein Eg5 (Kif11) siRNA
tataagaactgtactcttctcag

SEQ ID NO: 3997 - DNA, 23 bp, Artificial Sequence
  Description of Artificial Sequence: Synthetic oligonucleotide
  Mitotic kinesin microtubule-associated protein Eg5 (Kif11) siRNA
ataagaactgtactcttctcagc

SEQ ID NO: 3998 - DNA, 23 bp, Artificial Sequence
  Description of Artificial Sequence: Synthetic oligonucleotide
  Mitotic kinesin microtubule-associated protein Eg5 (Kif11) siRNA
taagaactgtactcttctcagct

SEQ ID NO: 3999 - DNA, 23 bp, Artificial Sequence
  Description of Artificial Sequence: Synthetic oligonucleotide
  Mitotic kinesin microtubule-associated protein Eg5 (Kif11) siRNA
aagaactgtactcttctcagctt

SEQ ID NO: 4000 - DNA, 23 bp, Artificial Sequence
  Description of Artificial Sequence: Synthetic oligonucleotide
  Mitotic kinesin microtubule-associated protein Eg5 (Kif11) siRNA
agaactgtactcttctcagcttg

SEQ ID NO: 4001 - DNA, 23 bp, Artificial Sequence
  Description of Artificial Sequence: Synthetic oligonucleotide
  Mitotic kinesin microtubule-associated protein Eg5 (Kif11) siRNA
gaactgtactcttctcagcttga

SEQ ID NO: 4002 - DNA, 23 bp, Artificial Sequence
  Description of Artificial Sequence: Synthetic oligonucleotide
  Mitotic kinesin microtubule-associated protein Eg5 (Kif11) siRNA
aactgtactcttctcagcttgag

SEQ ID NO: 4003 - DNA, 23 bp, Artificial Sequence
  Description of Artificial Sequence: Synthetic oligonucleotide
  Mitotic kinesin microtubule-associated protein Eg5 (Kif11) siRNA
actgtactcttctcagcttgagc

SEQ ID NO: 4004 - DNA, 23 bp, Artificial Sequence
  Description of Artificial Sequence: Synthetic oligonucleotide
  Mitotic kinesin microtubule-associated protein Eg5 (Kif11) siRNA
ctgtactcttctcagcttgagct

SEQ ID NO: 4005 - DNA, 23 bp, Artificial Sequence
  Description of Artificial Sequence: Synthetic oligonucleotide
  Mitotic kinesin microtubule-associated protein Eg5 (Kif11) siRNA
tgtactcttctcagcttgagctt

SEQ ID NO: 4006 - DNA, 23 bp, Artificial Sequence
  Description of Artificial Sequence: Synthetic oligonucleotide
  Mitotic kinesin microtubule-associated protein Eg5 (Kif11) siRNA
gtactcttctcagcttgagctta

SEQ ID NO: 4007 - DNA, 23 bp, Artificial Sequence
  Description of Artificial Sequence: Synthetic oligonucleotide
  Mitotic kinesin microtubule-associated protein Eg5 (Kif11) siRNA
tactcttctcagcttgagcttaa

SEQ ID NO: 4008 - DNA, 23 bp, Artificial Sequence
  Description of Artificial Sequence: Synthetic oligonucleotide
  Mitotic kinesin microtubule-associated protein Eg5 (Kif11) siRNA
actcttctcagcttgagcttaac

SEQ ID NO: 4009 - DNA, 23 bp, Artificial Sequence
  Description of Artificial Sequence: Synthetic oligonucleotide
  Mitotic kinesin microtubule-associated protein Eg5 (Kif11) siRNA
ctcttctcagcttgagcttaaca

SEQ ID NO: 4010 - DNA, 23 bp, Artificial Sequence
  Description of Artificial Sequence: Synthetic oligonucleotide
  Mitotic kinesin microtubule-associated protein Eg5 (Kif11) siRNA
tcttctcagcttgagcttaacat

SEQ ID NO: 4011 - DNA, 23 bp, Artificial Sequence
  Description of Artificial Sequence: Synthetic oligonucleotide
  Mitotic kinesin microtubule-associated protein Eg5 (Kif11) siRNA
cttctcagcttgagcttaacata

SEQ ID NO: 4012 - DNA, 23 bp, Artificial Sequence
  Description of Artificial Sequence: Synthetic oligonucleotide
  Mitotic kinesin microtubule-associated protein Eg5 (Kif11) siRNA
ttctcagcttgagcttaacatag

SEQ ID NO: 4013 - DNA, 23 bp, Artificial Sequence
  Description of Artificial Sequence: Synthetic oligonucleotide
  Mitotic kinesin microtubule-associated protein Eg5 (Kif11) siRNA
tctcagcttgagcttaacatagg

SEQ ID NO: 4014 - DNA, 23 bp, Artificial Sequence
  Description of Artificial Sequence: Synthetic oligonucleotide
  Mitotic kinesin microtubule-associated protein Eg5 (Kif11) siRNA
ctcagcttgagcttaacataggt

SEQ ID NO: 4015 - DNA, 23 bp, Artificial Sequence
  Description of Artificial Sequence: Synthetic oligonucleotide
  Mitotic kinesin microtubule-associated protein Eg5 (Kif11) siRNA
tcagcttgagcttaacataggta

SEQ ID NO: 4016 - DNA, 23 bp, Artificial Sequence
  Description of Artificial Sequence: Synthetic oligonucleotide
  Mitotic kinesin microtubule-associated protein Eg5 (Kif11) siRNA
cagcttgagcttaacataggtaa

SEQ ID NO: 4017 - DNA, 23 bp, Artificial Sequence
  Description of Artificial Sequence: Synthetic oligonucleotide
  Mitotic kinesin microtubule-associated protein Eg5 (Kif11) siRNA
agcttgagcttaacataggtaaa

SEQ ID NO: 4018 - DNA, 23 bp, Artificial Sequence
  Description of Artificial Sequence: Synthetic oligonucleotide
  Mitotic kinesin microtubule-associated protein Eg5 (Kif11) siRNA
gcttgagcttaacataggtaaat

SEQ ID NO: 4019 - DNA, 23 bp, Artificial Sequence
  Description of Artificial Sequence: Synthetic oligonucleotide
  Mitotic kinesin microtubule-associated protein Eg5 (Kif11) siRNA
cttgagcttaacataggtaaata

SEQ ID NO: 4020 - DNA, 23 bp, Artificial Sequence
  Description of Artificial Sequence: Synthetic oligonucleotide
  Mitotic kinesin microtubule-associated protein Eg5 (Kif11) siRNA
ttgagcttaacataggtaaatat

SEQ ID NO: 4021 - DNA, 23 bp, Artificial Sequence
  Description of Artificial Sequence: Synthetic oligonucleotide
  Mitotic kinesin microtubule-associated protein Eg5 (Kif11) siRNA
tgagcttaacataggtaaatatc

SEQ ID NO: 4022 - DNA, 23 bp, Artificial Sequence
  Description of Artificial Sequence: Synthetic oligonucleotide
  Mitotic kinesin microtubule-associated protein Eg5 (Kif11) siRNA
gagcttaacataggtaaatatca

SEQ ID NO: 4023 - DNA, 23 bp, Artificial Sequence
  Description of Artificial Sequence: Synthetic oligonucleotide
  Mitotic kinesin microtubule-associated protein Eg5 (Kif11) siRNA
agcttaacataggtaaatatcac

SEQ ID NO: 4024 - DNA, 23 bp, Artificial Sequence
  Description of Artificial Sequence: Synthetic oligonucleotide
  Mitotic kinesin microtubule-associated protein Eg5 (Kif11) siRNA
gcttaacataggtaaatatcacc

SEQ ID NO: 4025 - DNA, 23 bp, Artificial Sequence
  Description of Artificial Sequence: Synthetic oligonucleotide
  Mitotic kinesin microtubule-associated protein Eg5 (Kif11) siRNA
cttaacataggtaaatatcacca

SEQ ID NO: 4026 - DNA, 23 bp, Artificial Sequence
  Description of Artificial Sequence: Synthetic oligonucleotide
  Mitotic kinesin microtubule-associated protein Eg5 (Kif11) siRNA
ttaacataggtaaatatcaccaa

SEQ ID NO: 4027 - DNA, 23 bp, Artificial Sequence
  Description of Artificial Sequence: Synthetic oligonucleotide
  Mitotic kinesin microtubule-associated protein Eg5 (Kif11) siRNA
taacataggtaaatatcaccaac

SEQ ID NO: 4028 - DNA, 23 bp, Artificial Sequence
  Description of Artificial Sequence: Synthetic oligonucleotide
  Mitotic kinesin microtubule-associated protein Eg5 (Kif11) siRNA
aacataggtaaatatcaccaaca

SEQ ID NO: 4029 - DNA, 23 bp, Artificial Sequence
  Description of Artificial Sequence: Synthetic oligonucleotide
  Mitotic kinesin microtubule-associated protein Eg5 (Kif11) siRNA
acataggtaaatatcaccaacat

SEQ ID NO: 4030 - DNA, 23 bp, Artificial Sequence
  Description of Artificial Sequence: Synthetic oligonucleotide
  Mitotic kinesin microtubule-associated protein Eg5 (Kif11) siRNA
cataggtaaatatcaccaacatc

SEQ ID NO: 4031 - DNA, 23 bp, Artificial Sequence
  Description of Artificial Sequence: Synthetic oligonucleotide
  Mitotic kinesin microtubule-associated protein Eg5 (Kif11) siRNA
ataggtaaatatcaccaacatct

SEQ ID NO: 4032 - DNA, 23 bp, Artificial Sequence
  Description of Artificial Sequence: Synthetic oligonucleotide
  Mitotic kinesin microtubule-associated protein Eg5 (Kif11) siRNA
taggtaaatatcaccaacatctg

SEQ ID NO: 4033 - DNA, 23 bp, Artificial Sequence
  Description of Artificial Sequence: Synthetic oligonucleotide
  Mitotic kinesin microtubule-associated protein Eg5 (Kif11) siRNA
aggtaaatatcaccaacatctgt

SEQ ID NO: 4034 - DNA, 23 bp, Artificial Sequence
  Description of Artificial Sequence: Synthetic oligonucleotide
  Mitotic kinesin microtubule-associated protein Eg5 (Kif11) siRNA
ggtaaatatcaccaacatctgtc

SEQ ID NO: 4035 - DNA, 23 bp, Artificial Sequence
  Description of Artificial Sequence: Synthetic oligonucleotide
  Mitotic kinesin microtubule-associated protein Eg5 (Kif11) siRNA
gtaaatatcaccaacatctgtcc

SEQ ID NO: 4036 - DNA, 23 bp, Artificial Sequence
  Description of Artificial Sequence: Synthetic oligonucleotide
  Mitotic kinesin microtubule-associated protein Eg5 (Kif11) siRNA
taaatatcaccaacatctgtcct

SEQ ID NO: 4037 - DNA, 23 bp, Artificial Sequence
  Description of Artificial Sequence: Synthetic oligonucleotide
  Mitotic kinesin microtubule-associated protein Eg5 (Kif11) siRNA
aaatatcaccaacatctgtcctt

SEQ ID NO: 4038 - DNA, 23 bp, Artificial Sequence
  Description of Artificial Sequence: Synthetic oligonucleotide
  Mitotic kinesin microtubule-associated protein Eg5 (Kif11) siRNA
aatatcaccaacatctgtcctta

SEQ ID NO: 4039 - DNA, 23 bp, Artificial Sequence
  Description of Artificial Sequence: Synthetic oligonucleotide
  Mitotic kinesin microtubule-associated protein Eg5 (Kif11) siRNA
atatcaccaacatctgtccttag

SEQ ID NO: 4040 - DNA, 23 bp, Artificial Sequence
  Description of Artificial Sequence: Synthetic oligonucleotide
  Mitotic kinesin microtubule-associated protein Eg5 (Kif11) siRNA
tatcaccaacatctgtccttaga

SEQ ID NO: 4041 - DNA, 23 bp, Artificial Sequence
  Description of Artificial Sequence: Synthetic oligonucleotide
  Mitotic kinesin microtubule-associated protein Eg5 (Kif11) siRNA
atcaccaacatctgtccttagaa

SEQ ID NO: 4042 - DNA, 23 bp, Artificial Sequence
  Description of Artificial Sequence: Synthetic oligonucleotide
  Mitotic kinesin microtubule-associated protein Eg5 (Kif11) siRNA
tcaccaacatctgtccttagaaa

SEQ ID NO: 4043 - DNA, 23 bp, Artificial Sequence
  Description of Artificial Sequence: Synthetic oligonucleotide
  Mitotic kinesin microtubule-associated protein Eg5 (Kif11) siRNA
caccaacatctgtccttagaaag

SEQ ID NO: 4044 - DNA, 23 bp, Artificial Sequence
  Description of Artificial Sequence: Synthetic oligonucleotide
  Mitotic kinesin microtubule-associated protein Eg5 (Kif11) siRNA
accaacatctgtccttagaaagg

SEQ ID NO: 4045 - DNA, 23 bp, Artificial Sequence
  Description of Artificial Sequence: Synthetic oligonucleotide
  Mitotic kinesin microtubule-associated protein Eg5 (Kif11) siRNA
ccaacatctgtccttagaaagga

SEQ ID NO: 4046 - DNA, 23 bp, Artificial Sequence
  Description of Artificial Sequence: Synthetic oligonucleotide
  Mitotic kinesin microtubule-associated protein Eg5 (Kif11) siRNA
caacatctgtccttagaaaggac

SEQ ID NO: 4047 - DNA, 23 bp, Artificial Sequence
  Description of Artificial Sequence: Synthetic oligonucleotide
  Mitotic kinesin microtubule-associated protein Eg5 (Kif11) siRNA
aacatctgtccttagaaaggacc

SEQ ID NO: 4048 - DNA, 23 bp, Artificial Sequence
  Description of Artificial Sequence: Synthetic oligonucleotide
  Mitotic kinesin microtubule-associated protein Eg5 (Kif11) siRNA
acatctgtccttagaaaggacca

SEQ ID NO: 4049 - DNA, 23 bp, Artificial Sequence
  Description of Artificial Sequence: Synthetic oligonucleotide
  Mitotic kinesin microtubule-associated protein Eg5 (Kif11) siRNA
catctgtccttagaaaggaccat

SEQ ID NO: 4050 - DNA, 23 bp, Artificial Sequence
  Description of Artificial Sequence: Synthetic oligonucleotide
  Mitotic kinesin microtubule-associated protein Eg5 (Kif11) siRNA
atctgtccttagaaaggaccatc

SEQ ID NO: 4051 - DNA, 23 bp, Artificial Sequence
  Description of Artificial Sequence: Synthetic oligonucleotide
  Mitotic kinesin microtubule-associated protein Eg5 (Kif11) siRNA
tctgtccttagaaaggaccatct

SEQ ID NO: 4052 - DNA, 23 bp, Artificial Sequence
  Description of Artificial Sequence: Synthetic oligonucleotide
  Mitotic kinesin microtubule-associated protein Eg5 (Kif11) siRNA
ctgtccttagaaaggaccatctc

SEQ ID NO: 4053 - DNA, 23 bp, Artificial Sequence
  Description of Artificial Sequence: Synthetic oligonucleotide
  Mitotic kinesin microtubule-associated protein Eg5 (Kif11) siRNA
tgtccttagaaaggaccatctca

SEQ ID NO: 4054 - DNA, 23 bp, Artificial Sequence
  Description of Artificial Sequence: Synthetic oligonucleotide
  Mitotic kinesin microtubule-associated protein Eg5 (Kif11) siRNA
gtccttagaaaggaccatctcat

SEQ ID NO: 4055 - DNA, 23 bp, Artificial Sequence
  Description of Artificial Sequence: Synthetic oligonucleotide
  Mitotic kinesin microtubule-associated protein Eg5 (Kif11) siRNA
tccttagaaaggaccatctcatg

SEQ ID NO: 4056 - DNA, 23 bp, Artificial Sequence
  Description of Artificial Sequence: Synthetic oligonucleotide
  Mitotic kinesin microtubule-associated protein Eg5 (Kif11) siRNA
ccttagaaaggaccatctcatgt

SEQ ID NO: 4057 - DNA, 23 bp, Artificial Sequence
  Description of Artificial Sequence: Synthetic oligonucleotide
  Mitotic kinesin microtubule-associated protein Eg5 (Kif11) siRNA
cttagaaaggaccatctcatgtt

SEQ ID NO: 4058 - DNA, 23 bp, Artificial Sequence
  Description of Artificial Sequence: Synthetic oligonucleotide
  Mitotic kinesin microtubule-associated protein Eg5 (Kif11) siRNA
ttagaaaggaccatctcatgttt

SEQ ID NO: 4059 - DNA, 23 bp, Artificial Sequence
  Description of Artificial Sequence: Synthetic oligonucleotide
  Mitotic kinesin microtubule-associated protein Eg5 (Kif11) siRNA
tagaaaggaccatctcatgtttt

SEQ ID NO: 4060 - DNA, 23 bp, Artificial Sequence
  Description of Artificial Sequence: Synthetic oligonucleotide
  Mitotic kinesin microtubule-associated protein Eg5 (Kif11) siRNA
agaaaggaccatctcatgttttt

SEQ ID NO: 4061 - DNA, 23 bp, Artificial Sequence
  Description of Artificial Sequence: Synthetic oligonucleotide
  Mitotic kinesin microtubule-associated protein Eg5 (Kif11) siRNA
gaaaggaccatctcatgtttttt

SEQ ID NO: 4062 - DNA, 23 bp, Artificial Sequence
  Description of Artificial Sequence: Synthetic oligonucleotide
  Mitotic kinesin microtubule-associated protein Eg5 (Kif11) siRNA
aaaggaccatctcatgttttttt

SEQ ID NO: 4063 - DNA, 23 bp, Artificial Sequence
  Description of Artificial Sequence: Synthetic oligonucleotide
  Mitotic kinesin microtubule-associated protein Eg5 (Kif11) siRNA
aaggaccatctcatgtttttttt

SEQ ID NO: 4064 - DNA, 23 bp, Artificial Sequence
  Description of Artificial Sequence: Synthetic oligonucleotide
  Mitotic kinesin microtubule-associated protein Eg5 (Kif11) siRNA
aggaccatctcatgttttttttc

SEQ ID NO: 4065 - DNA, 23 bp, Artificial Sequence
  Description of Artificial Sequence: Synthetic oligonucleotide
  Mitotic kinesin microtubule-associated protein Eg5 (Kif11) siRNA
ggaccatctcatgttttttttct

SEQ ID NO: 4066 - DNA, 23 bp, Artificial Sequence
  Description of Artificial Sequence: Synthetic oligonucleotide
  Mitotic kinesin microtubule-associated protein Eg5 (Kif11) siRNA
gaccatctcatgttttttttctt

SEQ ID NO: 4067 - DNA, 23 bp, Artificial Sequence
  Description of Artificial Sequence: Synthetic oligonucleotide
  Mitotic kinesin microtubule-associated protein Eg5 (Kif11) siRNA
accatctcatgttttttttcttg

SEQ ID NO: 4068 - DNA, 23 bp, Artificial Sequence
  Description of Artificial Sequence: Synthetic oligonucleotide
  Mitotic kinesin microtubule-associated protein Eg5 (Kif11) siRNA
ccatctcatgttttttttcttgc

SEQ ID NO: 4069 - DNA, 23 bp, Artificial Sequence
  Description of Artificial Sequence: Synthetic oligonucleotide
  Mitotic kinesin microtubule-associated protein Eg5 (Kif11) siRNA
catctcatgttttttttcttgct

SEQ ID NO: 4070 - DNA, 23 bp, Artificial Sequence
  Description of Artificial Sequence: Synthetic oligonucleotide
  Mitotic kinesin microtubule-associated protein Eg5 (Kif11) siRNA
atctcatgttttttttcttgcta

SEQ ID NO: 4071 - DNA, 23 bp, Artificial Sequence
  Description of Artificial Sequence: Synthetic oligonucleotide
  Mitotic kinesin microtubule-associated protein Eg5 (Kif11) siRNA
tctcatgttttttttcttgctat

SEQ ID NO: 4072 - DNA, 23 bp, Artificial Sequence
  Description of Artificial Sequence: Synthetic oligonucleotide
  Mitotic kinesin microtubule-associated protein Eg5 (Kif11) siRNA
ctcatgttttttttcttgctatg

SEQ ID NO: 4073 - DNA, 23 bp, Artificial Sequence
  Description of Artificial Sequence: Synthetic oligonucleotide
  Mitotic kinesin microtubule-associated protein Eg5 (Kif11) siRNA
tcatgttttttttcttgctatga

SEQ ID NO: 4074 - DNA, 23 bp, Artificial Sequence
  Description of Artificial Sequence: Synthetic oligonucleotide
  Mitotic kinesin microtubule-associated protein Eg5 (Kif11) siRNA
catgttttttttcttgctatgac

SEQ ID NO: 4075 - DNA, 23 bp, Artificial Sequence
  Description of Artificial Sequence: Synthetic oligonucleotide
  Mitotic kinesin microtubule-associated protein Eg5 (Kif11) siRNA
atgttttttttcttgctatgact

SEQ ID NO: 4076 - DNA, 23 bp, Artificial Sequence
  Description of Artificial Sequence: Synthetic oligonucleotide
  Mitotic kinesin microtubule-associated protein Eg5 (Kif11) siRNA
tgttttttttcttgctatgactt

SEQ ID NO: 4077 - DNA, 23 bp, Artificial Sequence
  Description of Artificial Sequence: Synthetic oligonucleotide
  Mitotic kinesin microtubule-associated protein Eg5 (Kif11) siRNA
gttttttttcttgctatgacttg

SEQ ID NO: 4078 - DNA, 23 bp, Artificial Sequence
  Description of Artificial Sequence: Synthetic oligonucleotide
  Mitotic kinesin microtubule-associated protein Eg5 (Kif11) siRNA
ttttttttcttgctatgacttgt

SEQ ID NO: 4079 - DNA, 23 bp, Artificial Sequence
  Description of Artificial Sequence: Synthetic oligonucleotide
  Mitotic kinesin microtubule-associated protein Eg5 (Kif11) siRNA
tttttttcttgctatgacttgtg

SEQ ID NO: 4080 - DNA, 23 bp, Artificial Sequence
  Description of Artificial Sequence: Synthetic oligonucleotide
  Mitotic kinesin microtubule-associated protein Eg5 (Kif11) siRNA
ttttttcttgctatgacttgtgt

SEQ ID NO: 4081 - DNA, 23 bp, Artificial Sequence
  Description of Artificial Sequence: Synthetic oligonucleotide
  Mitotic kinesin microtubule-associated protein Eg5 (Kif11) siRNA
tttttcttgctatgacttgtgta

SEQ ID NO: 4082 - DNA, 23 bp, Artificial Sequence
  Description of Artificial Sequence: Synthetic oligonucleotide
  Mitotic kinesin microtubule-associated protein Eg5 (Kif11) siRNA
ttttcttgctatgacttgtgtat

SEQ ID NO: 4083 - DNA, 23 bp, Artificial Sequence
  Description of Artificial Sequence: Synthetic oligonucleotide
  Mitotic kinesin microtubule-associated protein Eg5 (Kif11) siRNA
tttcttgctatgacttgtgtatt

SEQ ID NO: 4084 - DNA, 23 bp, Artificial Sequence
  Description of Artificial Sequence: Synthetic oligonucleotide
  Mitotic kinesin microtubule-associated protein Eg5 (Kif11) siRNA
ttcttgctatgacttgtgtattt

SEQ ID NO: 4085 - DNA, 23 bp, Artificial Sequence
  Description of Artificial Sequence: Synthetic oligonucleotide
  Mitotic kinesin microtubule-associated protein Eg5 (Kif11) siRNA
tcttgctatgacttgtgtatttt

SEQ ID NO: 4086 - DNA, 23 bp, Artificial Sequence
  Description of Artificial Sequence: Synthetic oligonucleotide
  Mitotic kinesin microtubule-associated protein Eg5 (Kif11) siRNA
cttgctatgacttgtgtattttc

SEQ ID NO: 4087 - DNA, 23 bp, Artificial Sequence
  Description of Artificial Sequence: Synthetic oligonucleotide
  Mitotic kinesin microtubule-associated protein Eg5 (Kif11) siRNA
ttgctatgacttgtgtattttct

SEQ ID NO: 4088 - DNA, 23 bp, Artificial Sequence
  Description of Artificial Sequence: Synthetic oligonucleotide
  Mitotic kinesin microtubule-associated protein Eg5 (Kif11) siRNA
tgctatgacttgtgtattttctt

SEQ ID NO: 4089 - DNA, 23 bp, Artificial Sequence
  Description of Artificial Sequence: Synthetic oligonucleotide
  Mitotic kinesin microtubule-associated protein Eg5 (Kif11) siRNA
gctatgacttgtgtattttcttg

SEQ ID NO: 4090 - DNA, 23 bp, Artificial Sequence
  Description of Artificial Sequence: Synthetic oligonucleotide
  Mitotic kinesin microtubule-associated protein Eg5 (Kif11) siRNA
ctatgacttgtgtattttcttgc

SEQ ID NO: 4091 - DNA, 23 bp, Artificial Sequence
  Description of Artificial Sequence: Synthetic oligonucleotide
  Mitotic kinesin microtubule-associated protein Eg5 (Kif11) siRNA
tatgacttgtgtattttcttgca

SEQ ID NO: 4092 - DNA, 23 bp, Artificial Sequence
  Description of Artificial Sequence: Synthetic oligonucleotide
  Mitotic kinesin microtubule-associated protein Eg5 (Kif11) siRNA
atgacttgtgtattttcttgcat

SEQ ID NO: 4093 - DNA, 23 bp, Artificial Sequence
  Description of Artificial Sequence: Synthetic oligonucleotide
  Mitotic kinesin microtubule-associated protein Eg5 (Kif11) siRNA
tgacttgtgtattttcttgcatc

SEQ ID NO: 4094 - DNA, 23 bp, Artificial Sequence
  Description of Artificial Sequence: Synthetic oligonucleotide
  Mitotic kinesin microtubule-associated protein Eg5 (Kif11) siRNA
gacttgtgtattttcttgcatcc

SEQ ID NO: 4095 - DNA, 23 bp, Artificial Sequence
  Description of Artificial Sequence: Synthetic oligonucleotide
  Mitotic kinesin microtubule-associated protein Eg5 (Kif11) siRNA
acttgtgtattttcttgcatcct

SEQ ID NO: 4096 - DNA, 23 bp, Artificial Sequence
  Description of Artificial Sequence: Synthetic oligonucleotide
  Mitotic kinesin microtubule-associated protein Eg5 (Kif11) siRNA
cttgtgtattttcttgcatcctc

SEQ ID NO: 4097 - DNA, 23 bp, Artificial Sequence
  Description of Artificial Sequence: Synthetic oligonucleotide
  Mitotic kinesin microtubule-associated protein Eg5 (Kif11) siRNA
ttgtgtattttcttgcatcctcc

SEQ ID NO: 4098 - DNA, 23 bp, Artificial Sequence
  Description of Artificial Sequence: Synthetic oligonucleotide
  Mitotic kinesin microtubule-associated protein Eg5 (Kif11) siRNA
tgtgtattttcttgcatcctccc

SEQ ID NO: 4099 - DNA, 23 bp, Artificial Sequence
  Description of Artificial Sequence: Synthetic oligonucleotide
  Mitotic kinesin microtubule-associated protein Eg5 (Kif11) siRNA
gtgtattttcttgcatcctccct

SEQ ID NO: 4100 - DNA, 23 bp, Artificial Sequence
  Description of Artificial Sequence: Synthetic oligonucleotide
  Mitotic kinesin microtubule-associated protein Eg5 (Kif11) siRNA
tgtattttcttgcatcctcccta

SEQ ID NO: 4101 - DNA, 23 bp, Artificial Sequence
  Description of Artificial Sequence: Synthetic oligonucleotide
  Mitotic kinesin microtubule-associated protein Eg5 (Kif11) siRNA
gtattttcttgcatcctccctag

SEQ ID NO: 4102 - DNA, 23 bp, Artificial Sequence
  Description of Artificial Sequence: Synthetic oligonucleotide
  Mitotic kinesin microtubule-associated protein Eg5 (Kif11) siRNA
tattttcttgcatcctccctaga

SEQ ID NO: 4103 - DNA, 23 bp, Artificial Sequence
  Description of Artificial Sequence: Synthetic oligonucleotide
  Mitotic kinesin microtubule-associated protein Eg5 (Kif11) siRNA
attttcttgcatcctccctagac

SEQ ID NO: 4104 - DNA, 23 bp, Artificial Sequence
  Description of Artificial Sequence: Synthetic oligonucleotide
  Mitotic kinesin microtubule-associated protein Eg5 (Kif11) siRNA
ttttcttgcatcctccctagact

SEQ ID NO: 4105 - DNA, 23 bp, Artificial Sequence
  Description of Artificial Sequence: Synthetic oligonucleotide
  Mitotic kinesin microtubule-associated protein Eg5 (Kif11) siRNA
tttcttgcatcctccctagactt

SEQ ID NO: 4106 - DNA, 23 bp, Artificial Sequence
  Description of Artificial Sequence: Synthetic oligonucleotide
  Mitotic kinesin microtubule-associated protein Eg5 (Kif11) siRNA
ttcttgcatcctccctagacttc

SEQ ID NO: 4107 - DNA, 23 bp, Artificial Sequence
  Description of Artificial Sequence: Synthetic oligonucleotide
  Mitotic kinesin microtubule-associated protein Eg5 (Kif11) siRNA
tcttgcatcctccctagacttcc

SEQ ID NO: 4108 - DNA, 23 bp, Artificial Sequence
  Description of Artificial Sequence: Synthetic oligonucleotide
  Mitotic kinesin microtubule-associated protein Eg5 (Kif11) siRNA
cttgcatcctccctagacttccc

SEQ ID NO: 4109 - DNA, 23 bp, Artificial Sequence
  Description of Artificial Sequence: Synthetic oligonucleotide
  Mitotic kinesin microtubule-associated protein Eg5 (Kif11) siRNA
ttgcatcctccctagacttccct

SEQ ID NO: 4110 - DNA, 23 bp, Artificial Sequence
  Description of Artificial Sequence: Synthetic oligonucleotide
  Mitotic kinesin microtubule-associated protein Eg5 (Kif11) siRNA
tgcatcctccctagacttcccta

SEQ ID NO: 4111 - DNA, 23 bp, Artificial Sequence
  Description of Artificial Sequence: Synthetic oligonucleotide
  Mitotic kinesin microtubule-associated protein Eg5 (Kif11) siRNA
gcatcctccctagacttccctat

SEQ ID NO: 4112 - DNA, 23 bp, Artificial Sequence
  Description of Artificial Sequence: Synthetic oligonucleotide
  Mitotic kinesin microtubule-associated protein Eg5 (Kif11) siRNA
catcctccctagacttccctatt

SEQ ID NO: 4113 - DNA, 23 bp, Artificial Sequence
  Description of Artificial Sequence: Synthetic oligonucleotide
  Mitotic kinesin microtubule-associated protein Eg5 (Kif11) siRNA
atcctccctagacttccctattt

SEQ ID NO: 4114 - DNA, 23 bp, Artificial Sequence
  Description of Artificial Sequence: Synthetic oligonucleotide
  Mitotic kinesin microtubule-associated protein Eg5 (Kif11) siRNA
tcctccctagacttccctatttc

SEQ ID NO: 4115 - DNA, 23 bp, Artificial Sequence
  Description of Artificial Sequence: Synthetic oligonucleotide
  Mitotic kinesin microtubule-associated protein Eg5 (Kif11) siRNA
cctccctagacttccctatttcg

SEQ ID NO: 4116 - DNA, 23 bp, Artificial Sequence
  Description of Artificial Sequence: Synthetic oligonucleotide
  Mitotic kinesin microtubule-associated protein Eg5 (Kif11) siRNA
ctccctagacttccctatttcgc

SEQ ID NO: 4117 - DNA, 23 bp, Artificial Sequence
  Description of Artificial Sequence: Synthetic oligonucleotide
  Mitotic kinesin microtubule-associated protein Eg5 (Kif11) siRNA
tccctagacttccctatttcgct

SEQ ID NO: 4118 - DNA, 23 bp, Artificial Sequence
  Description of Artificial Sequence: Synthetic oligonucleotide
  Mitotic kinesin microtubule-associated protein Eg5 (Kif11) siRNA
ccctagacttccctatttcgctt

SEQ ID NO: 4119 - DNA, 23 bp, Artificial Sequence
  Description of Artificial Sequence: Synthetic oligonucleotide
  Mitotic kinesin microtubule-associated protein Eg5 (Kif11) siRNA
cctagacttccctatttcgcttt

SEQ ID NO: 4120 - DNA, 23 bp, Artificial Sequence
  Description of Artificial Sequence: Synthetic oligonucleotide
  Mitotic kinesin microtubule-associated protein Eg5 (Kif11) siRNA
ctagacttccctatttcgctttc

SEQ ID NO: 4121 - DNA, 23 bp, Artificial Sequence
  Description of Artificial Sequence: Synthetic oligonucleotide
  Mitotic kinesin microtubule-associated protein Eg5 (Kif11) siRNA
tagacttccctatttcgctttct

SEQ ID NO: 4122 - DNA, 23 bp, Artificial Sequence
  Description of Artificial Sequence: Synthetic oligonucleotide
  Mitotic kinesin microtubule-associated protein Eg5 (Kif11) siRNA
agacttccctatttcgctttctc

SEQ ID NO: 4123 - DNA, 23 bp, Artificial Sequence
  Description of Artificial Sequence: Synthetic oligonucleotide
  Mitotic kinesin microtubule-associated protein Eg5 (Kif11) siRNA
gacttccctatttcgctttctcc

SEQ ID NO: 4124 - DNA, 23 bp, Artificial Sequence
  Description of Artificial Sequence: Synthetic oligonucleotide
  Mitotic kinesin microtubule-associated protein Eg5 (Kif11) siRNA
acttccctatttcgctttctcct

SEQ ID NO: 4125 - DNA, 23 bp, Artificial Sequence
  Description of Artificial Sequence: Synthetic oligonucleotide
  Mitotic kinesin microtubule-associated protein Eg5 (Kif11) siRNA
cttccctatttcgctttctcctc

SEQ ID NO: 4126 - DNA, 23 bp, Artificial Sequence
  Description of Artificial Sequence: Synthetic oligonucleotide
  Mitotic kinesin microtubule-associated protein Eg5 (Kif11) siRNA
ttccctatttcgctttctcctcg

SEQ ID NO: 4127 - DNA, 23 bp, Artificial Sequence
  Description of Artificial Sequence: Synthetic oligonucleotide
  Mitotic kinesin microtubule-associated protein Eg5 (Kif11) siRNA
tccctatttcgctttctcctcgg

SEQ ID NO: 4128 - DNA, 23 bp, Artificial Sequence
  Description of Artificial Sequence: Synthetic oligonucleotide
  Mitotic kinesin microtubule-associated protein Eg5 (Kif11) siRNA
ccctatttcgctttctcctcggc

SEQ ID NO: 4129 - DNA, 23 bp, Artificial Sequence
  Description of Artificial Sequence: Synthetic oligonucleotide
  Mitotic kinesin microtubule-associated protein Eg5 (Kif11) siRNA
cctatttcgctttctcctcggct

SEQ ID NO: 4130 - DNA, 23 bp, Artificial Sequence
  Description of Artificial Sequence: Synthetic oligonucleotide
  Mitotic kinesin microtubule-associated protein Eg5 (Kif11) siRNA
ctatttcgctttctcctcggctc

SEQ ID NO: 4131 - DNA, 23 bp, Artificial Sequence
  Description of Artificial Sequence: Synthetic oligonucleotide
  Mitotic kinesin microtubule-associated protein Eg5 (Kif11) siRNA
tatttcgctttctcctcggctca

SEQ ID NO: 4132 - DNA, 23 bp, Artificial Sequence
  Description of Artificial Sequence: Synthetic oligonucleotide
  Mitotic kinesin microtubule-associated protein Eg5 (Kif11) siRNA
atttcgctttctcctcggctcac

SEQ ID NO: 4133 - DNA, 23 bp, Artificial Sequence
  Description of Artificial Sequence: Synthetic oligonucleotide
  Mitotic kinesin microtubule-associated protein Eg5 (Kif11) siRNA
tttcgctttctcctcggctcact

SEQ ID NO: 4134 - DNA, 23 bp, Artificial Sequence
  Description of Artificial Sequence: Synthetic oligonucleotide
  Mitotic kinesin microtubule-associated protein Eg5 (Kif11) siRNA
ttcgctttctcctcggctcactt

SEQ ID NO: 4135 - DNA, 23 bp, Artificial Sequence
  Description of Artificial Sequence: Synthetic oligonucleotide
  Mitotic kinesin microtubule-associated protein Eg5 (Kif11) siRNA
tcgctttctcctcggctcacttt

SEQ ID NO: 4136 - DNA, 23 bp, Artificial Sequence
  Description of Artificial Sequence: Synthetic oligonucleotide
  Mitotic kinesin microtubule-associated protein Eg5 (Kif11) siRNA
cgctttctcctcggctcactttc

SEQ ID NO: 4137 - DNA, 23 bp, Artificial Sequence
  Description of Artificial Sequence: Synthetic oligonucleotide
  Mitotic kinesin microtubule-associated protein Eg5 (Kif11) siRNA
gctttctcctcggctcactttct

SEQ ID NO: 4138 - DNA, 23 bp, Artificial Sequence
  Description of Artificial Sequence: Synthetic oligonucleotide
  Mitotic kinesin microtubule-associated protein Eg5 (Kif11) siRNA
ctttctcctcggctcactttctc

SEQ ID NO: 4139 - DNA, 23 bp, Artificial Sequence
  Description of Artificial Sequence: Synthetic oligonucleotide
  Mitotic kinesin microtubule-associated protein Eg5 (Kif11) siRNA
tttctcctcggctcactttctcc

SEQ ID NO: 4140 - DNA, 23 bp, Artificial Sequence
  Description of Artificial Sequence: Synthetic oligonucleotide
  Mitotic kinesin microtubule-associated protein Eg5 (Kif11) siRNA
ttctcctcggctcactttctccc

SEQ ID NO: 4141 - DNA, 23 bp, Artificial Sequence
  Description of Artificial Sequence: Synthetic oligonucleotide
  Mitotic kinesin microtubule-associated protein Eg5 (Kif11) siRNA
tctcctcggctcactttctccct

SEQ ID NO: 4142 - DNA, 23 bp, Artificial Sequence
  Description of Artificial Sequence: Synthetic oligonucleotide
  Mitotic kinesin microtubule-associated protein Eg5 (Kif11) siRNA
ctcctcggctcactttctccctt

SEQ ID NO: 4143 - DNA, 23 bp, Artificial Sequence
  Description of Artificial Sequence: Synthetic oligonucleotide
  Mitotic kinesin microtubule-associated protein Eg5 (Kif11) siRNA
tcctcggctcactttctcccttt

SEQ ID NO: 4144 - DNA, 23 bp, Artificial Sequence
  Description of Artificial Sequence: Synthetic oligonucleotide
  Mitotic kinesin microtubule-associated protein Eg5 (Kif11) siRNA
cctcggctcactttctccctttt

SEQ ID NO: 4145 - DNA, 23 bp, Artificial Sequence
  Description of Artificial Sequence: Synthetic oligonucleotide
  Mitotic kinesin microtubule-associated protein Eg5 (Kif11) siRNA
ctcggctcactttctcccttttt

SEQ ID NO: 4146 - DNA, 23 bp, Artificial Sequence
  Description of Artificial Sequence: Synthetic oligonucleotide
  Mitotic kinesin microtubule-associated protein Eg5 (Kif11) siRNA
tcggctcactttctcccttttta

SEQ ID NO: 4147 - DNA, 23 bp, Artificial Sequence
  Description of Artificial Sequence: Synthetic oligonucleotide
  Mitotic kinesin microtubule-associated protein Eg5 (Kif11) siRNA
cggctcactttctccctttttat

SEQ ID NO: 4148 - DNA, 23 bp, Artificial Sequence
  Description of Artificial Sequence: Synthetic oligonucleotide
  Mitotic kinesin microtubule-associated protein Eg5 (Kif11) siRNA
ggctcactttctccctttttatt

SEQ ID NO: 4149 - DNA, 23 bp, Artificial Sequence
  Description of Artificial Sequence: Synthetic oligonucleotide
  Mitotic kinesin microtubule-associated protein Eg5 (Kif11) siRNA
gctcactttctccctttttattt

SEQ ID NO: 4150 - DNA, 23 bp, Artificial Sequence
  Description of Artificial Sequence: Synthetic oligonucleotide
  Mitotic kinesin microtubule-associated protein Eg5 (Kif11) siRNA
ctcactttctccctttttatttt

SEQ ID NO: 4151 - DNA, 23 bp, Artificial Sequence
  Description of Artificial Sequence: Synthetic oligonucleotide
  Mitotic kinesin microtubule-associated protein Eg5 (Kif11) siRNA
tcactttctccctttttattttt

SEQ ID NO: 4152 - DNA, 23 bp, Artificial Sequence
  Description of Artificial Sequence: Synthetic oligonucleotide
  Mitotic kinesin microtubule-associated protein Eg5 (Kif11) siRNA
cactttctccctttttatttttc

SEQ ID NO: 4153 - DNA, 23 bp, Artificial Sequence
  Description of Artificial Sequence: Synthetic oligonucleotide
  Mitotic kinesin microtubule-associated protein Eg5 (Kif11) siRNA
actttctccctttttatttttca

SEQ ID NO: 4154 - DNA, 23 bp, Artificial Sequence
  Description of Artificial Sequence: Synthetic oligonucleotide
  Mitotic kinesin microtubule-associated protein Eg5 (Kif11) siRNA
ctttctccctttttatttttcac

SEQ ID NO: 4155 - DNA, 23 bp, Artificial Sequence
  Description of Artificial Sequence: Synthetic oligonucleotide
  Mitotic kinesin microtubule-associated protein Eg5 (Kif11) siRNA
tttctccctttttatttttcacc

SEQ ID NO: 4156 - DNA, 23 bp, Artificial Sequence
  Description of Artificial Sequence: Synthetic oligonucleotide
  Mitotic kinesin microtubule-associated protein Eg5 (Kif11) siRNA
ttctccctttttatttttcacca

SEQ ID NO: 4157 - DNA, 23 bp, Artificial Sequence
  Description of Artificial Sequence: Synthetic oligonucleotide
  Mitotic kinesin microtubule-associated protein Eg5 (Kif11) siRNA
tctccctttttatttttcaccaa

SEQ ID NO: 4158 - DNA, 23 bp, Artificial Sequence
  Description of Artificial Sequence: Synthetic oligonucleotide
  Mitotic kinesin microtubule-associated protein Eg5 (Kif11) siRNA
ctccctttttatttttcaccaaa

SEQ ID NO: 4159 - DNA, 23 bp, Artificial Sequence
  Description of Artificial Sequence: Synthetic oligonucleotide
  Mitotic kinesin microtubule-associated protein Eg5 (Kif11) siRNA
tccctttttatttttcaccaaac

SEQ ID NO: 4160 - DNA, 23 bp, Artificial Sequence
  Description of Artificial Sequence: Synthetic oligonucleotide
  Mitotic kinesin microtubule-associated protein Eg5 (Kif11) siRNA
ccctttttatttttcaccaaacc

SEQ ID NO: 4161 - DNA, 23 bp, Artificial Sequence
  Description of Artificial Sequence: Synthetic oligonucleotide
  Mitotic kinesin microtubule-associated protein Eg5 (Kif11) siRNA
cctttttatttttcaccaaacca

SEQ ID NO: 4162 - DNA, 23 bp, Artificial Sequence
  Description of Artificial Sequence: Synthetic oligonucleotide
  Mitotic kinesin microtubule-associated protein Eg5 (Kif11) siRNA
ctttttatttttcaccaaaccat

SEQ ID NO: 4163 - DNA, 23 bp, Artificial Sequence
  Description of Artificial Sequence: Synthetic oligonucleotide
  Mitotic kinesin microtubule-associated protein Eg5 (Kif11) siRNA
tttttatttttcaccaaaccatt

SEQ ID NO: 4164 - DNA, 23 bp, Artificial Sequence
  Description of Artificial Sequence: Synthetic oligonucleotide
  Mitotic kinesin microtubule-associated protein Eg5 (Kif11) siRNA
ttttatttttcaccaaaccattt

SEQ ID NO: 4165 - DNA, 23 bp, Artificial Sequence
  Description of Artificial Sequence: Synthetic oligonucleotide
  Mitotic kinesin microtubule-associated protein Eg5 (Kif11) siRNA
tttatttttcaccaaaccatttg

SEQ ID NO: 4166 - DNA, 23 bp, Artificial Sequence
  Description of Artificial Sequence: Synthetic oligonucleotide
  Mitotic kinesin microtubule-associated protein Eg5 (Kif11) siRNA
ttatttttcaccaaaccatttgt

SEQ ID NO: 4167 - DNA, 23 bp, Artificial Sequence
  Description of Artificial Sequence: Synthetic oligonucleotide
  Mitotic kinesin microtubule-associated protein Eg5 (Kif11) siRNA
tatttttcaccaaaccatttgta

SEQ ID NO: 4168 - DNA, 23 bp, Artificial Sequence
  Description of Artificial Sequence: Synthetic oligonucleotide
  Mitotic kinesin microtubule-associated protein Eg5 (Kif11) siRNA
atttttcaccaaaccatttgtag

SEQ ID NO: 4169 - DNA, 23 bp, Artificial Sequence
  Description of Artificial Sequence: Synthetic oligonucleotide
  Mitotic kinesin microtubule-associated protein Eg5 (Kif11) siRNA
tttttcaccaaaccatttgtaga

SEQ ID NO: 4170 - DNA, 23 bp, Artificial Sequence
  Description of Artificial Sequence: Synthetic oligonucleotide
  Mitotic kinesin microtubule-associated protein Eg5 (Kif11) siRNA
ttttcaccaaaccatttgtagag

SEQ ID NO: 4171 - DNA, 23 bp, Artificial Sequence
  Description of Artificial Sequence: Synthetic oligonucleotide
  Mitotic kinesin microtubule-associated protein Eg5 (Kif11) siRNA
tttcaccaaaccatttgtagagc

SEQ ID NO: 4172 - DNA, 23 bp, Artificial Sequence
  Description of Artificial Sequence: Synthetic oligonucleotide
  Mitotic kinesin microtubule-associated protein Eg5 (Kif11) siRNA
ttcaccaaaccatttgtagagct

SEQ ID NO: 4173 - DNA, 23 bp, Artificial Sequence
  Description of Artificial Sequence: Synthetic oligonucleotide
  Mitotic kinesin microtubule-associated protein Eg5 (Kif11) siRNA
tcaccaaaccatttgtagagcta

SEQ ID NO: 4174 - DNA, 23 bp, Artificial Sequence
  Description of Artificial Sequence: Synthetic oligonucleotide
  Mitotic kinesin microtubule-associated protein Eg5 (Kif11) siRNA
caccaaaccatttgtagagctac

SEQ ID NO: 4175 - DNA, 23 bp, Artificial Sequence
  Description of Artificial Sequence: Synthetic oligonucleotide
  Mitotic kinesin microtubule-associated protein Eg5 (Kif11) siRNA
accaaaccatttgtagagctaca

SEQ ID NO: 4176 - DNA, 23 bp, Artificial Sequence
  Description of Artificial Sequence: Synthetic oligonucleotide
  Mitotic kinesin microtubule-associated protein Eg5 (Kif11) siRNA
ccaaaccatttgtagagctacaa

SEQ ID NO: 4177 - DNA, 23 bp, Artificial Sequence
  Description of Artificial Sequence: Synthetic oligonucleotide
  Mitotic kinesin microtubule-associated protein Eg5 (Kif11) siRNA
caaaccatttgtagagctacaaa

SEQ ID NO: 4178 - DNA, 23 bp, Artificial Sequence
  Description of Artificial Sequence: Synthetic oligonucleotide
  Mitotic kinesin microtubule-associated protein Eg5 (Kif11) siRNA
aaaccatttgtagagctacaaaa

SEQ ID NO: 4179 - DNA, 23 bp, Artificial Sequence
  Description of Artificial Sequence: Synthetic oligonucleotide
  Mitotic kinesin microtubule-associated protein Eg5 (Kif11) siRNA
aaccatttgtagagctacaaaac

SEQ ID NO: 4180 - DNA, 23 bp, Artificial Sequence
  Description of Artificial Sequence: Synthetic oligonucleotide
  Mitotic kinesin microtubule-associated protein Eg5 (Kif11) siRNA
accatttgtagagctacaaaacc

SEQ ID NO: 4181 - DNA, 23 bp, Artificial Sequence
  Description of Artificial Sequence: Synthetic oligonucleotide
  Mitotic kinesin microtubule-associated protein Eg5 (Kif11) siRNA
ccatttgtagagctacaaaacct

SEQ ID NO: 4182 - DNA, 23 bp, Artificial Sequence
  Description of Artificial Sequence: Synthetic oligonucleotide
  Mitotic kinesin microtubule-associated protein Eg5 (Kif11) siRNA
catttgtagagctacaaaaccta

SEQ ID NO: 4183 - DNA, 23 bp, Artificial Sequence
  Description of Artificial Sequence: Synthetic oligonucleotide
  Mitotic kinesin microtubule-associated protein Eg5 (Kif11) siRNA
atttgtagagctacaaaacctat

SEQ ID NO: 4184 - DNA, 23 bp, Artificial Sequence
  Description of Artificial Sequence: Synthetic oligonucleotide
  Mitotic kinesin microtubule-associated protein Eg5 (Kif11) siRNA
tttgtagagctacaaaacctatc

SEQ ID NO: 4185 - DNA, 23 bp, Artificial Sequence
  Description of Artificial Sequence: Synthetic oligonucleotide
  Mitotic kinesin microtubule-associated protein Eg5 (Kif11) siRNA
ttgtagagctacaaaacctatcc

SEQ ID NO: 4186 - DNA, 23 bp, Artificial Sequence
  Description of Artificial Sequence: Synthetic oligonucleotide
  Mitotic kinesin microtubule-associated protein Eg5 (Kif11) siRNA
tgtagagctacaaaacctatcct

SEQ ID NO: 4187 - DNA, 23 bp, Artificial Sequence
  Description of Artificial Sequence: Synthetic oligonucleotide
  Mitotic kinesin microtubule-associated protein Eg5 (Kif11) siRNA
gtagagctacaaaacctatcctt

SEQ ID NO: 4188 - DNA, 23 bp, Artificial Sequence
  Description of Artificial Sequence: Synthetic oligonucleotide
  Mitotic kinesin microtubule-associated protein Eg5 (Kif11) siRNA
tagagctacaaaacctatccttt

SEQ ID NO: 4189 - DNA, 23 bp, Artificial Sequence
  Description of Artificial Sequence: Synthetic oligonucleotide
  Mitotic kinesin microtubule-associated protein Eg5 (Kif11) siRNA
agagctacaaaacctatcctttc

SEQ ID NO: 4190 - DNA, 23 bp, Artificial Sequence
  Description of Artificial Sequence: Synthetic oligonucleotide
  Mitotic kinesin microtubule-associated protein Eg5 (Kif11) siRNA
gagctacaaaacctatcctttct

SEQ ID NO: 4191 - DNA, 23 bp, Artificial Sequence
  Description of Artificial Sequence: Synthetic oligonucleotide
  Mitotic kinesin microtubule-associated protein Eg5 (Kif11) siRNA
agctacaaaacctatcctttctt

SEQ ID NO: 4192 - DNA, 23 bp, Artificial Sequence
  Description of Artificial Sequence: Synthetic oligonucleotide
  Mitotic kinesin microtubule-associated protein Eg5 (Kif11) siRNA
gctacaaaacctatcctttctta

SEQ ID NO: 4193 - DNA, 23 bp, Artificial Sequence
  Description of Artificial Sequence: Synthetic oligonucleotide
  Mitotic kinesin microtubule-associated protein Eg5 (Kif11) siRNA
ctacaaaacctatcctttcttat

SEQ ID NO: 4194 - DNA, 23 bp, Artificial Sequence
  Description of Artificial Sequence: Synthetic oligonucleotide
  Mitotic kinesin microtubule-associated protein Eg5 (Kif11) siRNA
tacaaaacctatcctttcttatt

SEQ ID NO: 4195 - DNA, 23 bp, Artificial Sequence
  Description of Artificial Sequence: Synthetic oligonucleotide
  Mitotic kinesin microtubule-associated protein Eg5 (Kif11) siRNA
acaaaacctatcctttcttattt

SEQ ID NO: 4196 - DNA, 23 bp, Artificial Sequence
  Description of Artificial Sequence: Synthetic oligonucleotide
  Mitotic kinesin microtubule-associated protein Eg5 (Kif11) siRNA
caaaacctatcctttcttatttt

SEQ ID NO: 4197 - DNA, 23 bp, Artificial Sequence
  Description of Artificial Sequence: Synthetic oligonucleotide
  Mitotic kinesin microtubule-associated protein Eg5 (Kif11) siRNA
aaaacctatcctttcttattttc

SEQ ID NO: 4198 - DNA, 23 bp, Artificial Sequence
  Description of Artificial Sequence: Synthetic oligonucleotide
  Mitotic kinesin microtubule-associated protein Eg5 (Kif11) siRNA
aaacctatcctttcttattttca

SEQ ID NO: 4199 - DNA, 23 bp, Artificial Sequence
  Description of Artificial Sequence: Synthetic oligonucleotide
  Mitotic kinesin microtubule-associated protein Eg5 (Kif11) siRNA
aacctatcctttcttattttcag

SEQ ID NO: 4200 - DNA, 23 bp, Artificial Sequence
  Description of Artificial Sequence: Synthetic oligonucleotide
  Mitotic kinesin microtubule-associated protein Eg5 (Kif11) siRNA
acctatcctttcttattttcagt

SEQ ID NO: 4201 - DNA, 23 bp, Artificial Sequence
  Description of Artificial Sequence: Synthetic oligonucleotide
  Mitotic kinesin microtubule-associated protein Eg5 (Kif11) siRNA
cctatcctttcttattttcagta

SEQ ID NO: 4202 - DNA, 23 bp, Artificial Sequence
  Description of Artificial Sequence: Synthetic oligonucleotide
  Mitotic kinesin microtubule-associated protein Eg5 (Kif11) siRNA
ctatcctttcttattttcagtag

SEQ ID NO: 4203 - DNA, 23 bp, Artificial Sequence
  Description of Artificial Sequence: Synthetic oligonucleotide
  Mitotic kinesin microtubule-associated protein Eg5 (Kif11) siRNA
tatcctttcttattttcagtagt

SEQ ID NO: 4204 - DNA, 23 bp, Artificial Sequence
  Description of Artificial Sequence: Synthetic oligonucleotide
  Mitotic kinesin microtubule-associated protein Eg5 (Kif11) siRNA
atcctttcttattttcagtagtc

SEQ ID NO: 4205 - DNA, 23 bp, Artificial Sequence
  Description of Artificial Sequence: Synthetic oligonucleotide
  Mitotic kinesin microtubule-associated protein Eg5 (Kif11) siRNA
tcctttcttattttcagtagtca

SEQ ID NO: 4206 - DNA, 23 bp, Artificial Sequence
  Description of Artificial Sequence: Synthetic oligonucleotide
  Mitotic kinesin microtubule-associated protein Eg5 (Kif11) siRNA
cctttcttattttcagtagtcag

SEQ ID NO: 4207 - DNA, 23 bp, Artificial Sequence
  Description of Artificial Sequence: Synthetic oligonucleotide
  Mitotic kinesin microtubule-associated protein Eg5 (Kif11) siRNA
ctttcttattttcagtagtcaga

SEQ ID NO: 4208 - DNA, 23 bp, Artificial Sequence
  Description of Artificial Sequence: Synthetic oligonucleotide
  Mitotic kinesin microtubule-associated protein Eg5 (Kif11) siRNA
tttcttattttcagtagtcagaa

SEQ ID NO: 4209 - DNA, 23 bp, Artificial Sequence
  Description of Artificial Sequence: Synthetic oligonucleotide
  Mitotic kinesin microtubule-associated protein Eg5 (Kif11) siRNA
ttcttattttcagtagtcagaat

SEQ ID NO: 4210 - DNA, 23 bp, Artificial Sequence
  Description of Artificial Sequence: Synthetic oligonucleotide
  Mitotic kinesin microtubule-associated protein Eg5 (Kif11) siRNA
tcttattttcagtagtcagaatt

SEQ ID NO: 4211 - DNA, 23 bp, Artificial Sequence
  Description of Artificial Sequence: Synthetic oligonucleotide
  Mitotic kinesin microtubule-associated protein Eg5 (Kif11) siRNA
cttattttcagtagtcagaattt

SEQ ID NO: 4212 - DNA, 23 bp, Artificial Sequence
  Description of Artificial Sequence: Synthetic oligonucleotide
  Mitotic kinesin microtubule-associated protein Eg5 (Kif11) siRNA
ttattttcagtagtcagaatttt

SEQ ID NO: 4213 - DNA, 23 bp, Artificial Sequence
  Description of Artificial Sequence: Synthetic oligonucleotide
  Mitotic kinesin microtubule-associated protein Eg5 (Kif11) siRNA
tattttcagtagtcagaatttta

SEQ ID NO: 4214 - DNA, 23 bp, Artificial Sequence
  Description of Artificial Sequence: Synthetic oligonucleotide
  Mitotic kinesin microtubule-associated protein Eg5 (Kif11) siRNA
attttcagtagtcagaattttat

SEQ ID NO: 4215 - DNA, 23 bp, Artificial Sequence
  Description of Artificial Sequence: Synthetic oligonucleotide
  Mitotic kinesin microtubule-associated protein Eg5 (Kif11) siRNA
ttttcagtagtcagaattttatc

SEQ ID NO: 4216 - DNA, 23 bp, Artificial Sequence
  Description of Artificial Sequence: Synthetic oligonucleotide
  Mitotic kinesin microtubule-associated protein Eg5 (Kif11) siRNA
tttcagtagtcagaattttatct

SEQ ID NO: 4217 - DNA, 23 bp, Artificial Sequence
  Description of Artificial Sequence: Synthetic oligonucleotide
  Mitotic kinesin microtubule-associated protein Eg5 (Kif11) siRNA
ttcagtagtcagaattttatcta

SEQ ID NO: 4218 - DNA, 23 bp, Artificial Sequence
  Description of Artificial Sequence: Synthetic oligonucleotide
  Mitotic kinesin microtubule-associated protein Eg5 (Kif11) siRNA
tcagtagtcagaattttatctag

SEQ ID NO: 4219 - DNA, 23 bp, Artificial Sequence
  Description of Artificial Sequence: Synthetic oligonucleotide
  Mitotic kinesin microtubule-associated protein Eg5 (Kif11) siRNA
cagtagtcagaattttatctaga

SEQ ID NO: 4220 - DNA, 23 bp, Artificial Sequence
  Description of Artificial Sequence: Synthetic oligonucleotide
  Mitotic kinesin microtubule-associated protein Eg5 (Kif11) siRNA
agtagtcagaattttatctagaa

SEQ ID NO: 4221 - DNA, 23 bp, Artificial Sequence
  Description of Artificial Sequence: Synthetic oligonucleotide
  Mitotic kinesin microtubule-associated protein Eg5 (Kif11) siRNA
gtagtcagaattttatctagaaa

SEQ ID NO: 4222 - DNA, 23 bp, Artificial Sequence
  Description of Artificial Sequence: Synthetic oligonucleotide
  Mitotic kinesin microtubule-associated protein Eg5 (Kif11) siRNA
tagtcagaattttatctagaaat

SEQ ID NO: 4223 - DNA, 23 bp, Artificial Sequence
  Description of Artificial Sequence: Synthetic oligonucleotide
  Mitotic kinesin microtubule-associated protein Eg5 (Kif11) siRNA
agtcagaattttatctagaaatc

SEQ ID NO: 4224 - DNA, 23 bp, Artificial Sequence
  Description of Artificial Sequence: Synthetic oligonucleotide
  Mitotic kinesin microtubule-associated protein Eg5 (Kif11) siRNA
gtcagaattttatctagaaatct

SEQ ID NO: 4225 - DNA, 23 bp, Artificial Sequence
  Description of Artificial Sequence: Synthetic oligonucleotide
  Mitotic kinesin microtubule-associated protein Eg5 (Kif11) siRNA
tcagaattttatctagaaatctt

SEQ ID NO: 4226 - DNA, 23 bp, Artificial Sequence
  Description of Artificial Sequence: Synthetic oligonucleotide
  Mitotic kinesin microtubule-associated protein Eg5 (Kif11) siRNA
cagaattttatctagaaatcttt

SEQ ID NO: 4227 - DNA, 23 bp, Artificial Sequence
  Description of Artificial Sequence: Synthetic oligonucleotide
  Mitotic kinesin microtubule-associated protein Eg5 (Kif11) siRNA
agaattttatctagaaatctttt

SEQ ID NO: 4228 - DNA, 23 bp, Artificial Sequence
  Description of Artificial Sequence: Synthetic oligonucleotide
  Mitotic kinesin microtubule-associated protein Eg5 (Kif11) siRNA
gaattttatctagaaatctttta

SEQ ID NO: 4229 - DNA, 23 bp, Artificial Sequence
  Description of Artificial Sequence: Synthetic oligonucleotide
  Mitotic kinesin microtubule-associated protein Eg5 (Kif11) siRNA
aattttatctagaaatcttttaa

SEQ ID NO: 4230 - DNA, 23 bp, Artificial Sequence
  Description of Artificial Sequence: Synthetic oligonucleotide
  Mitotic kinesin microtubule-associated protein Eg5 (Kif11) siRNA
attttatctagaaatcttttaac

SEQ ID NO: 4231 - DNA, 23 bp, Artificial Sequence
  Description of Artificial Sequence: Synthetic oligonucleotide
  Mitotic kinesin microtubule-associated protein Eg5 (Kif11) siRNA
ttttatctagaaatcttttaaca

SEQ ID NO: 4232 - DNA, 23 bp, Artificial Sequence
  Description of Artificial Sequence: Synthetic oligonucleotide
  Mitotic kinesin microtubule-associated protein Eg5 (Kif11) siRNA
tttatctagaaatcttttaacac

SEQ ID NO: 4233 - DNA, 23 bp, Artificial Sequence
  Description of Artificial Sequence: Synthetic oligonucleotide
  Mitotic kinesin microtubule-associated protein Eg5 (Kif11) siRNA
ttatctagaaatcttttaacacc

SEQ ID NO: 4234 - DNA, 23 bp, Artificial Sequence
  Description of Artificial Sequence: Synthetic oligonucleotide
  Mitotic kinesin microtubule-associated protein Eg5 (Kif11) siRNA
tatctagaaatcttttaacacct

SEQ ID NO: 4235 - DNA, 23 bp, Artificial Sequence
  Description of Artificial Sequence: Synthetic oligonucleotide
  Mitotic kinesin microtubule-associated protein Eg5 (Kif11) siRNA
atctagaaatcttttaacacctt

SEQ ID NO: 4236 - DNA, 23 bp, Artificial Sequence
  Description of Artificial Sequence: Synthetic oligonucleotide
  Mitotic kinesin microtubule-associated protein Eg5 (Kif11) siRNA
tctagaaatcttttaacaccttt

SEQ ID NO: 4237 - DNA, 23 bp, Artificial Sequence
  Description of Artificial Sequence: Synthetic oligonucleotide
  Mitotic kinesin microtubule-associated protein Eg5 (Kif11) siRNA
ctagaaatcttttaacacctttt

SEQ ID NO: 4238 - DNA, 23 bp, Artificial Sequence
  Description of Artificial Sequence: Synthetic oligonucleotide
  Mitotic kinesin microtubule-associated protein Eg5 (Kif11) siRNA
tagaaatcttttaacaccttttt

SEQ ID NO: 4239 - DNA, 23 bp, Artificial Sequence
  Description of Artificial Sequence: Synthetic oligonucleotide
  Mitotic kinesin microtubule-associated protein Eg5 (Kif11) siRNA
agaaatcttttaacaccttttta

SEQ ID NO: 4240 - DNA, 23 bp, Artificial Sequence
  Description of Artificial Sequence: Synthetic oligonucleotide
  Mitotic kinesin microtubule-associated protein Eg5 (Kif11) siRNA
gaaatcttttaacacctttttag

SEQ ID NO: 4241 - DNA, 23 bp, Artificial Sequence
  Description of Artificial Sequence: Synthetic oligonucleotide
  Mitotic kinesin microtubule-associated protein Eg5 (Kif11) siRNA
aaatcttttaacacctttttagt

SEQ ID NO: 4242 - DNA, 23 bp, Artificial Sequence
  Description of Artificial Sequence: Synthetic oligonucleotide
  Mitotic kinesin microtubule-associated protein Eg5 (Kif11) siRNA
aatcttttaacacctttttagtg

SEQ ID NO: 4243 - DNA, 23 bp, Artificial Sequence
  Description of Artificial Sequence: Synthetic oligonucleotide
  Mitotic kinesin microtubule-associated protein Eg5 (Kif11) siRNA
atcttttaacacctttttagtgg

SEQ ID NO: 4244 - DNA, 23 bp, Artificial Sequence
  Description of Artificial Sequence: Synthetic oligonucleotide
  Mitotic kinesin microtubule-associated protein Eg5 (Kif11) siRNA
tcttttaacacctttttagtggt

SEQ ID NO: 4245 - DNA, 23 bp, Artificial Sequence
  Description of Artificial Sequence: Synthetic oligonucleotide
  Mitotic kinesin microtubule-associated protein Eg5 (Kif11) siRNA
cttttaacacctttttagtggtt

SEQ ID NO: 4246 - DNA, 23 bp, Artificial Sequence
  Description of Artificial Sequence: Synthetic oligonucleotide
  Mitotic kinesin microtubule-associated protein Eg5 (Kif11) siRNA
ttttaacacctttttagtggtta

SEQ ID NO: 4247 - DNA, 23 bp, Artificial Sequence
  Description of Artificial Sequence: Synthetic oligonucleotide
  Mitotic kinesin microtubule-associated protein Eg5 (Kif11) siRNA
tttaacacctttttagtggttat

SEQ ID NO: 4248 - DNA, 23 bp, Artificial Sequence
  Description of Artificial Sequence: Synthetic oligonucleotide
  Mitotic kinesin microtubule-associated protein Eg5 (Kif11) siRNA
ttaacacctttttagtggttatt

SEQ ID NO: 4249 - DNA, 23 bp, Artificial Sequence
  Description of Artificial Sequence: Synthetic oligonucleotide
  Mitotic kinesin microtubule-associated protein Eg5 (Kif11) siRNA
taacacctttttagtggttattt

SEQ ID NO: 4250 - DNA, 23 bp, Artificial Sequence
  Description of Artificial Sequence: Synthetic oligonucleotide
  Mitotic kinesin microtubule-associated protein Eg5 (Kif11) siRNA
aacacctttttagtggttatttc

SEQ ID NO: 4251 - DNA, 23 bp, Artificial Sequence
  Description of Artificial Sequence: Synthetic oligonucleotide
  Mitotic kinesin microtubule-associated protein Eg5 (Kif11) siRNA
acacctttttagtggttatttct

SEQ ID NO: 4252 - DNA, 23 bp, Artificial Sequence
  Description of Artificial Sequence: Synthetic oligonucleotide
  Mitotic kinesin microtubule-associated protein Eg5 (Kif11) siRNA
cacctttttagtggttatttcta

SEQ ID NO: 4253 - DNA, 23 bp, Artificial Sequence
  Description of Artificial Sequence: Synthetic oligonucleotide
  Mitotic kinesin microtubule-associated protein Eg5 (Kif11) siRNA
acctttttagtggttatttctaa

SEQ ID NO: 4254 - DNA, 23 bp, Artificial Sequence
  Description of Artificial Sequence: Synthetic oligonucleotide
  Mitotic kinesin microtubule-associated protein Eg5 (Kif11) siRNA
cctttttagtggttatttctaaa

SEQ ID NO: 4255 - DNA, 23 bp, Artificial Sequence
  Description of Artificial Sequence: Synthetic oligonucleotide
  Mitotic kinesin microtubule-associated protein Eg5 (Kif11) siRNA
ctttttagtggttatttctaaaa

SEQ ID NO: 4256 - DNA, 23 bp, Artificial Sequence
  Description of Artificial Sequence: Synthetic oligonucleotide
  Mitotic kinesin microtubule-associated protein Eg5 (Kif11) siRNA
tttttagtggttatttctaaaat

SEQ ID NO: 4257 - DNA, 23 bp, Artificial Sequence
  Description of Artificial Sequence: Synthetic oligonucleotide
  Mitotic kinesin microtubule-associated protein Eg5 (Kif11) siRNA
ttttagtggttatttctaaaatc

SEQ ID NO: 4258 - DNA, 23 bp, Artificial Sequence
  Description of Artificial Sequence: Synthetic oligonucleotide
  Mitotic kinesin microtubule-associated protein Eg5 (Kif11) siRNA
tttagtggttatttctaaaatca

SEQ ID NO: 4259 - DNA, 23 bp, Artificial Sequence
  Description of Artificial Sequence: Synthetic oligonucleotide
  Mitotic kinesin microtubule-associated protein Eg5 (Kif11) siRNA
ttagtggttatttctaaaatcac

SEQ ID NO: 4260 - DNA, 23 bp, Artificial Sequence
  Description of Artificial Sequence: Synthetic oligonucleotide
  Mitotic kinesin microtubule-associated protein Eg5 (Kif11) siRNA
tagtggttatttctaaaatcact

SEQ ID NO: 4261 - DNA, 23 bp, Artificial Sequence
  Description of Artificial Sequence: Synthetic oligonucleotide
  Mitotic kinesin microtubule-associated protein Eg5 (Kif11) siRNA
agtggttatttctaaaatcactg

SEQ ID NO: 4262 - DNA, 23 bp, Artificial Sequence
  Description of Artificial Sequence: Synthetic oligonucleotide
  Mitotic kinesin microtubule-associated protein Eg5 (Kif11) siRNA
gtggttatttctaaaatcactgt

SEQ ID NO: 4263 - DNA, 23 bp, Artificial Sequence
  Description of Artificial Sequence: Synthetic oligonucleotide
  Mitotic kinesin microtubule-associated protein Eg5 (Kif11) siRNA
tggttatttctaaaatcactgtc

SEQ ID NO: 4264 - DNA, 23 bp, Artificial Sequence
  Description of Artificial Sequence: Synthetic oligonucleotide
  Mitotic kinesin microtubule-associated protein Eg5 (Kif11) siRNA
ggttatttctaaaatcactgtca

SEQ ID NO: 4265 - DNA, 23 bp, Artificial Sequence
  Description of Artificial Sequence: Synthetic oligonucleotide
  Mitotic kinesin microtubule-associated protein Eg5 (Kif11) siRNA
gttatttctaaaatcactgtcaa

SEQ ID NO: 4266 - DNA, 23 bp, Artificial Sequence
  Description of Artificial Sequence: Synthetic oligonucleotide
  Mitotic kinesin microtubule-associated protein Eg5 (Kif11) siRNA
ttatttctaaaatcactgtcaac

SEQ ID NO: 4267 - DNA, 23 bp, Artificial Sequence
  Description of Artificial Sequence: Synthetic oligonucleotide
  Mitotic kinesin microtubule-associated protein Eg5 (Kif11) siRNA
tatttctaaaatcactgtcaaca

SEQ ID NO: 4268 - DNA, 23 bp, Artificial Sequence
  Description of Artificial Sequence: Synthetic oligonucleotide
  Mitotic kinesin microtubule-associated protein Eg5 (Kif11) siRNA
atttctaaaatcactgtcaacaa

SEQ ID NO: 4269 - DNA, 23 bp, Artificial Sequence
  Description of Artificial Sequence: Synthetic oligonucleotide
  Mitotic kinesin microtubule-associated protein Eg5 (Kif11) siRNA
tttctaaaatcactgtcaacaat

SEQ ID NO: 4270 - DNA, 23 bp, Artificial Sequence
  Description of Artificial Sequence: Synthetic oligonucleotide
  Mitotic kinesin microtubule-associated protein Eg5 (Kif11) siRNA
ttctaaaatcactgtcaacaata

SEQ ID NO: 4271 - DNA, 23 bp, Artificial Sequence
  Description of Artificial Sequence: Synthetic oligonucleotide
  Mitotic kinesin microtubule-associated protein Eg5 (Kif11) siRNA
tctaaaatcactgtcaacaataa

SEQ ID NO: 4272 - DNA, 23 bp, Artificial Sequence
  Description of Artificial Sequence: Synthetic oligonucleotide
  Mitotic kinesin microtubule-associated protein Eg5 (Kif11) siRNA
ctaaaatcactgtcaacaataaa

SEQ ID NO: 4273 - DNA, 23 bp, Artificial Sequence
  Description of Artificial Sequence: Synthetic oligonucleotide
  Mitotic kinesin microtubule-associated protein Eg5 (Kif11) siRNA
taaaatcactgtcaacaataaat

SEQ ID NO: 4274 - DNA, 23 bp, Artificial Sequence
  Description of Artificial Sequence: Synthetic oligonucleotide
  Mitotic kinesin microtubule-associated protein Eg5 (Kif11) siRNA
aaaatcactgtcaacaataaatc

SEQ ID NO: 4275 - DNA, 23 bp, Artificial Sequence
  Description of Artificial Sequence: Synthetic oligonucleotide
  Mitotic kinesin microtubule-associated protein Eg5 (Kif11) siRNA
aaatcactgtcaacaataaatct

SEQ ID NO: 4276 - DNA, 23 bp, Artificial Sequence
  Description of Artificial Sequence: Synthetic oligonucleotide
  Mitotic kinesin microtubule-associated protein Eg5 (Kif11) siRNA
aatcactgtcaacaataaatcta

SEQ ID NO: 4277 - DNA, 23 bp, Artificial Sequence
  Description of Artificial Sequence: Synthetic oligonucleotide
  Mitotic kinesin microtubule-associated protein Eg5 (Kif11) siRNA
atcactgtcaacaataaatctaa

SEQ ID NO: 4278 - DNA, 23 bp, Artificial Sequence
  Description of Artificial Sequence: Synthetic oligonucleotide
  Mitotic kinesin microtubule-associated protein Eg5 (Kif11) siRNA
tcactgtcaacaataaatctaac

SEQ ID NO: 4279 - DNA, 23 bp, Artificial Sequence
  Description of Artificial Sequence: Synthetic oligonucleotide
  Mitotic kinesin microtubule-associated protein Eg5 (Kif11) siRNA
cactgtcaacaataaatctaacc

SEQ ID NO: 4280 - DNA, 23 bp, Artificial Sequence
  Description of Artificial Sequence: Synthetic oligonucleotide
  Mitotic kinesin microtubule-associated protein Eg5 (Kif11) siRNA
actgtcaacaataaatctaaccc

SEQ ID NO: 4281 - DNA, 23 bp, Artificial Sequence
  Description of Artificial Sequence: Synthetic oligonucleotide
  Mitotic kinesin microtubule-associated protein Eg5 (Kif11) siRNA
ctgtcaacaataaatctaaccct

SEQ ID NO: 4282 - DNA, 23 bp, Artificial Sequence
  Description of Artificial Sequence: Synthetic oligonucleotide
  Mitotic kinesin microtubule-associated protein Eg5 (Kif11) siRNA
tgtcaacaataaatctaacccta

SEQ ID NO: 4283 - DNA, 23 bp, Artificial Sequence
  Description of Artificial Sequence: Synthetic oligonucleotide
  Mitotic kinesin microtubule-associated protein Eg5 (Kif11) siRNA
gtcaacaataaatctaaccctag

SEQ ID NO: 4284 - DNA, 23 bp, Artificial Sequence
  Description of Artificial Sequence: Synthetic oligonucleotide
  Mitotic kinesin microtubule-associated protein Eg5 (Kif11) siRNA
tcaacaataaatctaaccctagt

SEQ ID NO: 4285 - DNA, 23 bp, Artificial Sequence
  Description of Artificial Sequence: Synthetic oligonucleotide
  Mitotic kinesin microtubule-associated protein Eg5 (Kif11) siRNA
caacaataaatctaaccctagtt

SEQ ID NO: 4286 - DNA, 23 bp, Artificial Sequence
  Description of Artificial Sequence: Synthetic oligonucleotide
  Mitotic kinesin microtubule-associated protein Eg5 (Kif11) siRNA
aacaataaatctaaccctagttg

SEQ ID NO: 4287 - DNA, 23 bp, Artificial Sequence
  Description of Artificial Sequence: Synthetic oligonucleotide
  Mitotic kinesin microtubule-associated protein Eg5 (Kif11) siRNA
acaataaatctaaccctagttgt

SEQ ID NO: 4288 - DNA, 23 bp, Artificial Sequence
  Description of Artificial Sequence: Synthetic oligonucleotide
  Mitotic kinesin microtubule-associated protein Eg5 (Kif11) siRNA
caataaatctaaccctagttgta

SEQ ID NO: 4289 - DNA, 23 bp, Artificial Sequence
  Description of Artificial Sequence: Synthetic oligonucleotide
  Mitotic kinesin microtubule-associated protein Eg5 (Kif11) siRNA
aataaatctaaccctagttgtat

SEQ ID NO: 4290 - DNA, 23 bp, Artificial Sequence
  Description of Artificial Sequence: Synthetic oligonucleotide
  Mitotic kinesin microtubule-associated protein Eg5 (Kif11) siRNA
ataaatctaaccctagttgtatc

SEQ ID NO: 4291 - DNA, 23 bp, Artificial Sequence
  Description of Artificial Sequence: Synthetic oligonucleotide
  Mitotic kinesin microtubule-associated protein Eg5 (Kif11) siRNA
taaatctaaccctagttgtatcc

SEQ ID NO: 4292 - DNA, 23 bp, Artificial Sequence
  Description of Artificial Sequence: Synthetic oligonucleotide
  Mitotic kinesin microtubule-associated protein Eg5 (Kif11) siRNA
aaatctaaccctagttgtatccc

SEQ ID NO: 4293 - DNA, 23 bp, Artificial Sequence
  Description of Artificial Sequence: Synthetic oligonucleotide
  Mitotic kinesin microtubule-associated protein Eg5 (Kif11) siRNA
aatctaaccctagttgtatccct

SEQ ID NO: 4294 - DNA, 23 bp, Artificial Sequence
  Description of Artificial Sequence: Synthetic oligonucleotide
  Mitotic kinesin microtubule-associated protein Eg5 (Kif11) siRNA
atctaaccctagttgtatccctc

SEQ ID NO: 4295 - DNA, 23 bp, Artificial Sequence
  Description of Artificial Sequence: Synthetic oligonucleotide
  Mitotic kinesin microtubule-associated protein Eg5 (Kif11) siRNA
tctaaccctagttgtatccctcc

SEQ ID NO: 4296 - DNA, 23 bp, Artificial Sequence
  Description of Artificial Sequence: Synthetic oligonucleotide
  Mitotic kinesin microtubule-associated protein Eg5 (Kif11) siRNA
ctaaccctagttgtatccctcct

SEQ ID NO: 4297 - DNA, 23 bp, Artificial Sequence
  Description of Artificial Sequence: Synthetic oligonucleotide
  Mitotic kinesin microtubule-associated protein Eg5 (Kif11) siRNA
taaccctagttgtatccctcctt

SEQ ID NO: 4298 - DNA, 23 bp, Artificial Sequence
  Description of Artificial Sequence: Synthetic oligonucleotide
  Mitotic kinesin microtubule-associated protein Eg5 (Kif11) siRNA
aaccctagttgtatccctccttt

SEQ ID NO: 4299 - DNA, 23 bp, Artificial Sequence
  Description of Artificial Sequence: Synthetic oligonucleotide
  Mitotic kinesin microtubule-associated protein Eg5 (Kif11) siRNA
accctagttgtatccctccttta

SEQ ID NO: 4300 - DNA, 23 bp, Artificial Sequence
  Description of Artificial Sequence: Synthetic oligonucleotide
  Mitotic kinesin microtubule-associated protein Eg5 (Kif11) siRNA
ccctagttgtatccctcctttaa

SEQ ID NO: 4301 - DNA, 23 bp, Artificial Sequence
  Description of Artificial Sequence: Synthetic oligonucleotide
  Mitotic kinesin microtubule-associated protein Eg5 (Kif11) siRNA
cctagttgtatccctcctttaag

SEQ ID NO: 4302 - DNA, 23 bp, Artificial Sequence
  Description of Artificial Sequence: Synthetic oligonucleotide
  Mitotic kinesin microtubule-associated protein Eg5 (Kif11) siRNA
ctagttgtatccctcctttaagt

SEQ ID NO: 4303 - DNA, 23 bp, Artificial Sequence
  Description of Artificial Sequence: Synthetic oligonucleotide
  Mitotic kinesin microtubule-associated protein Eg5 (Kif11) siRNA
tagttgtatccctcctttaagta

SEQ ID NO: 4304 - DNA, 23 bp, Artificial Sequence
  Description of Artificial Sequence: Synthetic oligonucleotide
  Mitotic kinesin microtubule-associated protein Eg5 (Kif11) siRNA
agttgtatccctcctttaagtat

SEQ ID NO: 4305 - DNA, 23 bp, Artificial Sequence
  Description of Artificial Sequence: Synthetic oligonucleotide
  Mitotic kinesin microtubule-associated protein Eg5 (Kif11) siRNA
gttgtatccctcctttaagtatt

SEQ ID NO: 4306 - DNA, 23 bp, Artificial Sequence
  Description of Artificial Sequence: Synthetic oligonucleotide
  Mitotic kinesin microtubule-associated protein Eg5 (Kif11) siRNA
ttgtatccctcctttaagtattt

SEQ ID NO: 4307 - DNA, 23 bp, Artificial Sequence
  Description of Artificial Sequence: Synthetic oligonucleotide
  Mitotic kinesin microtubule-associated protein Eg5 (Kif11) siRNA
tgtatccctcctttaagtattta

SEQ ID NO: 4308 - DNA, 23 bp, Artificial Sequence
  Description of Artificial Sequence: Synthetic oligonucleotide
  Mitotic kinesin microtubule-associated protein Eg5 (Kif11) siRNA
gtatccctcctttaagtatttaa

SEQ ID NO: 4309 - DNA, 23 bp, Artificial Sequence
  Description of Artificial Sequence: Synthetic oligonucleotide
  Mitotic kinesin microtubule-associated protein Eg5 (Kif11) siRNA
tatccctcctttaagtatttaaa

SEQ ID NO: 4310 - DNA, 23 bp, Artificial Sequence
  Description of Artificial Sequence: Synthetic oligonucleotide
  Mitotic kinesin microtubule-associated protein Eg5 (Kif11) siRNA
atccctcctttaagtatttaaaa

SEQ ID NO: 4311 - DNA, 23 bp, Artificial Sequence
  Description of Artificial Sequence: Synthetic oligonucleotide
  Mitotic kinesin microtubule-associated protein Eg5 (Kif11) siRNA
tccctcctttaagtatttaaaac

SEQ ID NO: 4312 - DNA, 23 bp, Artificial Sequence
  Description of Artificial Sequence: Synthetic oligonucleotide
  Mitotic kinesin microtubule-associated protein Eg5 (Kif11) siRNA
ccctcctttaagtatttaaaact

SEQ ID NO: 4313 - DNA, 23 bp, Artificial Sequence
  Description of Artificial Sequence: Synthetic oligonucleotide
  Mitotic kinesin microtubule-associated protein Eg5 (Kif11) siRNA
cctcctttaagtatttaaaactt

SEQ ID NO: 4314 - DNA, 23 bp, Artificial Sequence
  Description of Artificial Sequence: Synthetic oligonucleotide
  Mitotic kinesin microtubule-associated protein Eg5 (Kif11) siRNA
ctcctttaagtatttaaaacttg

SEQ ID NO: 4315 - DNA, 23 bp, Artificial Sequence
  Description of Artificial Sequence: Synthetic oligonucleotide
  Mitotic kinesin microtubule-associated protein Eg5 (Kif11) siRNA
tcctttaagtatttaaaacttgt

SEQ ID NO: 4316 - DNA, 23 bp, Artificial Sequence
  Description of Artificial Sequence: Synthetic oligonucleotide
  Mitotic kinesin microtubule-associated protein Eg5 (Kif11) siRNA
cctttaagtatttaaaacttgtt

SEQ ID NO: 4317 - DNA, 23 bp, Artificial Sequence
  Description of Artificial Sequence: Synthetic oligonucleotide
  Mitotic kinesin microtubule-associated protein Eg5 (Kif11) siRNA
ctttaagtatttaaaacttgttg

SEQ ID NO: 4318 - DNA, 23 bp, Artificial Sequence
  Description of Artificial Sequence: Synthetic oligonucleotide
  Mitotic kinesin microtubule-associated protein Eg5 (Kif11) siRNA
tttaagtatttaaaacttgttgc

SEQ ID NO: 4319 - DNA, 23 bp, Artificial Sequence
  Description of Artificial Sequence: Synthetic oligonucleotide
  Mitotic kinesin microtubule-associated protein Eg5 (Kif11) siRNA
ttaagtatttaaaacttgttgcc

SEQ ID NO: 4320 - DNA, 23 bp, Artificial Sequence
  Description of Artificial Sequence: Synthetic oligonucleotide
  Mitotic kinesin microtubule-associated protein Eg5 (Kif11) siRNA
taagtatttaaaacttgttgccc

SEQ ID NO: 4321 - DNA, 23 bp, Artificial Sequence
  Description of Artificial Sequence: Synthetic oligonucleotide
  Mitotic kinesin microtubule-associated protein Eg5 (Kif11) siRNA
aagtatttaaaacttgttgcccc

SEQ ID NO: 4322 - DNA, 23 bp, Artificial Sequence
  Description of Artificial Sequence: Synthetic oligonucleotide
  Mitotic kinesin microtubule-associated protein Eg5 (Kif11) siRNA
agtatttaaaacttgttgcccca

SEQ ID NO: 4323 - DNA, 23 bp, Artificial Sequence
  Description of Artificial Sequence: Synthetic oligonucleotide
  Mitotic kinesin microtubule-associated protein Eg5 (Kif11) siRNA
gtatttaaaacttgttgccccaa

SEQ ID NO: 4324 - DNA, 23 bp, Artificial Sequence
  Description of Artificial Sequence: Synthetic oligonucleotide
  Mitotic kinesin microtubule-associated protein Eg5 (Kif11) siRNA
tatttaaaacttgttgccccaaa

SEQ ID NO: 4325 - DNA, 23 bp, Artificial Sequence
  Description of Artificial Sequence: Synthetic oligonucleotide
  Mitotic kinesin microtubule-associated protein Eg5 (Kif11) siRNA
atttaaaacttgttgccccaaat

SEQ ID NO: 4326 - DNA, 23 bp, Artificial Sequence
  Description of Artificial Sequence: Synthetic oligonucleotide
  Mitotic kinesin microtubule-associated protein Eg5 (Kif11) siRNA
tttaaaacttgttgccccaaatg

SEQ ID NO: 4327 - DNA, 23 bp, Artificial Sequence
  Description of Artificial Sequence: Synthetic oligonucleotide
  Mitotic kinesin microtubule-associated protein Eg5 (Kif11) siRNA
ttaaaacttgttgccccaaatgt

SEQ ID NO: 4328 - DNA, 23 bp, Artificial Sequence
  Description of Artificial Sequence: Synthetic oligonucleotide
  Mitotic kinesin microtubule-associated protein Eg5 (Kif11) siRNA
taaaacttgttgccccaaatgtg

SEQ ID NO: 4329 - DNA, 23 bp, Artificial Sequence
  Description of Artificial Sequence: Synthetic oligonucleotide
  Mitotic kinesin microtubule-associated protein Eg5 (Kif11) siRNA
aaaacttgttgccccaaatgtga

SEQ ID NO: 4330 - DNA, 23 bp, Artificial Sequence
  Description of Artificial Sequence: Synthetic oligonucleotide
  Mitotic kinesin microtubule-associated protein Eg5 (Kif11) siRNA
aaacttgttgccccaaatgtgaa

SEQ ID NO: 4331 - DNA, 23 bp, Artificial Sequence
  Description of Artificial Sequence: Synthetic oligonucleotide
  Mitotic kinesin microtubule-associated protein Eg5 (Kif11) siRNA
aacttgttgccccaaatgtgaaa

SEQ ID NO: 4332 - DNA, 23 bp, Artificial Sequence
  Description of Artificial Sequence: Synthetic oligonucleotide
  Mitotic kinesin microtubule-associated protein Eg5 (Kif11) siRNA
acttgttgccccaaatgtgaaag

SEQ ID NO: 4333 - DNA, 23 bp, Artificial Sequence
  Description of Artificial Sequence: Synthetic oligonucleotide
  Mitotic kinesin microtubule-associated protein Eg5 (Kif11) siRNA
cttgttgccccaaatgtgaaagc

SEQ ID NO: 4334 - DNA, 23 bp, Artificial Sequence
  Description of Artificial Sequence: Synthetic oligonucleotide
  Mitotic kinesin microtubule-associated protein Eg5 (Kif11) siRNA
ttgttgccccaaatgtgaaagca

SEQ ID NO: 4335 - DNA, 23 bp, Artificial Sequence
  Description of Artificial Sequence: Synthetic oligonucleotide
  Mitotic kinesin microtubule-associated protein Eg5 (Kif11) siRNA
tgttgccccaaatgtgaaagcat

SEQ ID NO: 4336 - DNA, 23 bp, Artificial Sequence
  Description of Artificial Sequence: Synthetic oligonucleotide
  Mitotic kinesin microtubule-associated protein Eg5 (Kif11) siRNA
gttgccccaaatgtgaaagcatt

SEQ ID NO: 4337 - DNA, 23 bp, Artificial Sequence
  Description of Artificial Sequence: Synthetic oligonucleotide
  Mitotic kinesin microtubule-associated protein Eg5 (Kif11) siRNA
ttgccccaaatgtgaaagcattt

SEQ ID NO: 4338 - DNA, 23 bp, Artificial Sequence
  Description of Artificial Sequence: Synthetic oligonucleotide
  Mitotic kinesin microtubule-associated protein Eg5 (Kif11) siRNA
tgccccaaatgtgaaagcattta

SEQ ID NO: 4339 - DNA, 23 bp, Artificial Sequence
  Description of Artificial Sequence: Synthetic oligonucleotide
  Mitotic kinesin microtubule-associated protein Eg5 (Kif11) siRNA
gccccaaatgtgaaagcatttaa

SEQ ID NO: 4340 - DNA, 23 bp, Artificial Sequence
  Description of Artificial Sequence: Synthetic oligonucleotide
  Mitotic kinesin microtubule-associated protein Eg5 (Kif11) siRNA
ccccaaatgtgaaagcatttaat

SEQ ID NO: 4341 - DNA, 23 bp, Artificial Sequence
  Description of Artificial Sequence: Synthetic oligonucleotide
  Mitotic kinesin microtubule-associated protein Eg5 (Kif11) siRNA
cccaaatgtgaaagcatttaatt

SEQ ID NO: 4342 - DNA, 23 bp, Artificial Sequence
  Description of Artificial Sequence: Synthetic oligonucleotide
  Mitotic kinesin microtubule-associated protein Eg5 (Kif11) siRNA
ccaaatgtgaaagcatttaattc

SEQ ID NO: 4343 - DNA, 23 bp, Artificial Sequence
  Description of Artificial Sequence: Synthetic oligonucleotide
  Mitotic kinesin microtubule-associated protein Eg5 (Kif11) siRNA
caaatgtgaaagcatttaattcc

SEQ ID NO: 4344 - DNA, 23 bp, Artificial Sequence
  Description of Artificial Sequence: Synthetic oligonucleotide
  Mitotic kinesin microtubule-associated protein Eg5 (Kif11) siRNA
aaatgtgaaagcatttaattcct

SEQ ID NO: 4345 - DNA, 23 bp, Artificial Sequence
  Description of Artificial Sequence: Synthetic oligonucleotide
  Mitotic kinesin microtubule-associated protein Eg5 (Kif11) siRNA
aatgtgaaagcatttaattcctt

SEQ ID NO: 4346 - DNA, 23 bp, Artificial Sequence
  Description of Artificial Sequence: Synthetic oligonucleotide
  Mitotic kinesin microtubule-associated protein Eg5 (Kif11) siRNA
atgtgaaagcatttaattccttt

SEQ ID NO: 4347 - DNA, 23 bp, Artificial Sequence
  Description of Artificial Sequence: Synthetic oligonucleotide
  Mitotic kinesin microtubule-associated protein Eg5 (Kif11) siRNA
tgtgaaagcatttaattccttta

SEQ ID NO: 4348 - DNA, 23 bp, Artificial Sequence
  Description of Artificial Sequence: Synthetic oligonucleotide
  Mitotic kinesin microtubule-associated protein Eg5 (Kif11) siRNA
gtgaaagcatttaattcctttaa

SEQ ID NO: 4349 - DNA, 23 bp, Artificial Sequence
  Description of Artificial Sequence: Synthetic oligonucleotide
  Mitotic kinesin microtubule-associated protein Eg5 (Kif11) siRNA
tgaaagcatttaattcctttaag

SEQ ID NO: 4350 - DNA, 23 bp, Artificial Sequence
  Description of Artificial Sequence: Synthetic oligonucleotide
  Mitotic kinesin microtubule-associated protein Eg5 (Kif11) siRNA
gaaagcatttaattcctttaaga

SEQ ID NO: 4351 - DNA, 23 bp, Artificial Sequence
  Description of Artificial Sequence: Synthetic oligonucleotide
  Mitotic kinesin microtubule-associated protein Eg5 (Kif11) siRNA
aaagcatttaattcctttaagag

SEQ ID NO: 4352 - DNA, 23 bp, Artificial Sequence
  Description of Artificial Sequence: Synthetic oligonucleotide
  Mitotic kinesin microtubule-associated protein Eg5 (Kif11) siRNA
aagcatttaattcctttaagagg

SEQ ID NO: 4353 - DNA, 23 bp, Artificial Sequence
  Description of Artificial Sequence: Synthetic oligonucleotide
  Mitotic kinesin microtubule-associated protein Eg5 (Kif11) siRNA
agcatttaattcctttaagaggc

SEQ ID NO: 4354 - DNA, 23 bp, Artificial Sequence
  Description of Artificial Sequence: Synthetic oligonucleotide
  Mitotic kinesin microtubule-associated protein Eg5 (Kif11) siRNA
gcatttaattcctttaagaggcc

SEQ ID NO: 4355 - DNA, 23 bp, Artificial Sequence
  Description of Artificial Sequence: Synthetic oligonucleotide
  Mitotic kinesin microtubule-associated protein Eg5 (Kif11) siRNA
catttaattcctttaagaggcct

SEQ ID NO: 4356 - DNA, 23 bp, Artificial Sequence
  Description of Artificial Sequence: Synthetic oligonucleotide
  Mitotic kinesin microtubule-associated protein Eg5 (Kif11) siRNA
atttaattcctttaagaggccta

SEQ ID NO: 4357 - DNA, 23 bp, Artificial Sequence
  Description of Artificial Sequence: Synthetic oligonucleotide
  Mitotic kinesin microtubule-associated protein Eg5 (Kif11) siRNA
tttaattcctttaagaggcctaa

SEQ ID NO: 4358 - DNA, 23 bp, Artificial Sequence
  Description of Artificial Sequence: Synthetic oligonucleotide
  Mitotic kinesin microtubule-associated protein Eg5 (Kif11) siRNA
ttaattcctttaagaggcctaac

SEQ ID NO: 4359 - DNA, 23 bp, Artificial Sequence
  Description of Artificial Sequence: Synthetic oligonucleotide
  Mitotic kinesin microtubule-associated protein Eg5 (Kif11) siRNA
taattcctttaagaggcctaact

SEQ ID NO: 4360 - DNA, 23 bp, Artificial Sequence
  Description of Artificial Sequence: Synthetic oligonucleotide
  Mitotic kinesin microtubule-associated protein Eg5 (Kif11) siRNA
aattcctttaagaggcctaactc

SEQ ID NO: 4361 - DNA, 23 bp, Artificial Sequence
  Description of Artificial Sequence: Synthetic oligonucleotide
  Mitotic kinesin microtubule-associated protein Eg5 (Kif11) siRNA
attcctttaagaggcctaactca

SEQ ID NO: 4362 - DNA, 23 bp, Artificial Sequence
  Description of Artificial Sequence: Synthetic oligonucleotide
  Mitotic kinesin microtubule-associated protein Eg5 (Kif11) siRNA
ttcctttaagaggcctaactcat

SEQ ID NO: 4363 - DNA, 23 bp, Artificial Sequence
  Description of Artificial Sequence: Synthetic oligonucleotide
  Mitotic kinesin microtubule-associated protein Eg5 (Kif11) siRNA
tcctttaagaggcctaactcatt

SEQ ID NO: 4364 - DNA, 23 bp, Artificial Sequence
  Description of Artificial Sequence: Synthetic oligonucleotide
  Mitotic kinesin microtubule-associated protein Eg5 (Kif11) siRNA
cctttaagaggcctaactcattc

SEQ ID NO: 4365 - DNA, 23 bp, Artificial Sequence
  Description of Artificial Sequence: Synthetic oligonucleotide
  Mitotic kinesin microtubule-associated protein Eg5 (Kif11) siRNA
ctttaagaggcctaactcattca

SEQ ID NO: 4366 - DNA, 23 bp, Artificial Sequence
  Description of Artificial Sequence: Synthetic oligonucleotide
  Mitotic kinesin microtubule-associated protein Eg5 (Kif11) siRNA
tttaagaggcctaactcattcac

SEQ ID NO: 4367 - DNA, 23 bp, Artificial Sequence
  Description of Artificial Sequence: Synthetic oligonucleotide
  Mitotic kinesin microtubule-associated protein Eg5 (Kif11) siRNA
ttaagaggcctaactcattcacc

SEQ ID NO: 4368 - DNA, 23 bp, Artificial Sequence
  Description of Artificial Sequence: Synthetic oligonucleotide
  Mitotic kinesin microtubule-associated protein Eg5 (Kif11) siRNA
taagaggcctaactcattcaccc

SEQ ID NO: 4369 - DNA, 23 bp, Artificial Sequence
  Description of Artificial Sequence: Synthetic oligonucleotide
  Mitotic kinesin microtubule-associated protein Eg5 (Kif11) siRNA
aagaggcctaactcattcaccct

SEQ ID NO: 4370 - DNA, 23 bp, Artificial Sequence
  Description of Artificial Sequence: Synthetic oligonucleotide
  Mitotic kinesin microtubule-associated protein Eg5 (Kif11) siRNA
agaggcctaactcattcaccctg

SEQ ID NO: 4371 - DNA, 23 bp, Artificial Sequence
  Description of Artificial Sequence: Synthetic oligonucleotide
  Mitotic kinesin microtubule-associated protein Eg5 (Kif11) siRNA
gaggcctaactcattcaccctga

SEQ ID NO: 4372 - DNA, 23 bp, Artificial Sequence
  Description of Artificial Sequence: Synthetic oligonucleotide
  Mitotic kinesin microtubule-associated protein Eg5 (Kif11) siRNA
aggcctaactcattcaccctgac

SEQ ID NO: 4373 - DNA, 23 bp, Artificial Sequence
  Description of Artificial Sequence: Synthetic oligonucleotide
  Mitotic kinesin microtubule-associated protein Eg5 (Kif11) siRNA
ggcctaactcattcaccctgaca

SEQ ID NO: 4374 - DNA, 23 bp, Artificial Sequence
  Description of Artificial Sequence: Synthetic oligonucleotide
  Mitotic kinesin microtubule-associated protein Eg5 (Kif11) siRNA
gcctaactcattcaccctgacag

SEQ ID NO: 4375 - DNA, 23 bp, Artificial Sequence
  Description of Artificial Sequence: Synthetic oligonucleotide
  Mitotic kinesin microtubule-associated protein Eg5 (Kif11) siRNA
cctaactcattcaccctgacaga

SEQ ID NO: 4376 - DNA, 23 bp, Artificial Sequence
  Description of Artificial Sequence: Synthetic oligonucleotide
  Mitotic kinesin microtubule-associated protein Eg5 (Kif11) siRNA
ctaactcattcaccctgacagag

SEQ ID NO: 4377 - DNA, 23 bp, Artificial Sequence
  Description of Artificial Sequence: Synthetic oligonucleotide
  Mitotic kinesin microtubule-associated protein Eg5 (Kif11) siRNA
taactcattcaccctgacagagt

SEQ ID NO: 4378 - DNA, 23 bp, Artificial Sequence
  Description of Artificial Sequence: Synthetic oligonucleotide
  Mitotic kinesin microtubule-associated protein Eg5 (Kif11) siRNA
aactcattcaccctgacagagtt

SEQ ID NO: 4379 - DNA, 23 bp, Artificial Sequence
  Description of Artificial Sequence: Synthetic oligonucleotide
  Mitotic kinesin microtubule-associated protein Eg5 (Kif11) siRNA
actcattcaccctgacagagttc

SEQ ID NO: 4380 - DNA, 23 bp, Artificial Sequence
  Description of Artificial Sequence: Synthetic oligonucleotide
  Mitotic kinesin microtubule-associated protein Eg5 (Kif11) siRNA
ctcattcaccctgacagagttca

SEQ ID NO: 4381 - DNA, 23 bp, Artificial Sequence
  Description of Artificial Sequence: Synthetic oligonucleotide
  Mitotic kinesin microtubule-associated protein Eg5 (Kif11) siRNA
tcattcaccctgacagagttcac

SEQ ID NO: 4382 - DNA, 23 bp, Artificial Sequence
  Description of Artificial Sequence: Synthetic oligonucleotide
  Mitotic kinesin microtubule-associated protein Eg5 (Kif11) siRNA
cattcaccctgacagagttcaca

SEQ ID NO: 4383 - DNA, 23 bp, Artificial Sequence
  Description of Artificial Sequence: Synthetic oligonucleotide
  Mitotic kinesin microtubule-associated protein Eg5 (Kif11) siRNA
attcaccctgacagagttcacaa

SEQ ID NO: 4384 - DNA, 23 bp, Artificial Sequence
  Description of Artificial Sequence: Synthetic oligonucleotide
  Mitotic kinesin microtubule-associated protein Eg5 (Kif11) siRNA
ttcaccctgacagagttcacaaa

SEQ ID NO: 4385 - DNA, 23 bp, Artificial Sequence
  Description of Artificial Sequence: Synthetic oligonucleotide
  Mitotic kinesin microtubule-associated protein Eg5 (Kif11) siRNA
tcaccctgacagagttcacaaaa

SEQ ID NO: 4386 - DNA, 23 bp, Artificial Sequence
  Description of Artificial Sequence: Synthetic oligonucleotide
  Mitotic kinesin microtubule-associated protein Eg5 (Kif11) siRNA
caccctgacagagttcacaaaaa

SEQ ID NO: 4387 - DNA, 23 bp, Artificial Sequence
  Description of Artificial Sequence: Synthetic oligonucleotide
  Mitotic kinesin microtubule-associated protein Eg5 (Kif11) siRNA
accctgacagagttcacaaaaag

SEQ ID NO: 4388 - DNA, 23 bp, Artificial Sequence
  Description of Artificial Sequence: Synthetic oligonucleotide
  Mitotic kinesin microtubule-associated protein Eg5 (Kif11) siRNA
ccctgacagagttcacaaaaagc

SEQ ID NO: 4389 - DNA, 23 bp, Artificial Sequence
  Description of Artificial Sequence: Synthetic oligonucleotide
  Mitotic kinesin microtubule-associated protein Eg5 (Kif11) siRNA
cctgacagagttcacaaaaagcc

SEQ ID NO: 4390 - DNA, 23 bp, Artificial Sequence
  Description of Artificial Sequence: Synthetic oligonucleotide
  Mitotic kinesin microtubule-associated protein Eg5 (Kif11) siRNA
ctgacagagttcacaaaaagccc

SEQ ID NO: 4391 - DNA, 23 bp, Artificial Sequence
  Description of Artificial Sequence: Synthetic oligonucleotide
  Mitotic kinesin microtubule-associated protein Eg5 (Kif11) siRNA
tgacagagttcacaaaaagccca

SEQ ID NO: 4392 - DNA, 23 bp, Artificial Sequence
  Description of Artificial Sequence: Synthetic oligonucleotide
  Mitotic kinesin microtubule-associated protein Eg5 (Kif11) siRNA
gacagagttcacaaaaagcccac

SEQ ID NO: 4393 - DNA, 23 bp, Artificial Sequence
  Description of Artificial Sequence: Synthetic oligonucleotide
  Mitotic kinesin microtubule-associated protein Eg5 (Kif11) siRNA
acagagttcacaaaaagcccact

SEQ ID NO: 4394 - DNA, 23 bp, Artificial Sequence
  Description of Artificial Sequence: Synthetic oligonucleotide
  Mitotic kinesin microtubule-associated protein Eg5 (Kif11) siRNA
cagagttcacaaaaagcccactt

SEQ ID NO: 4395 - DNA, 23 bp, Artificial Sequence
  Description of Artificial Sequence: Synthetic oligonucleotide
  Mitotic kinesin microtubule-associated protein Eg5 (Kif11) siRNA
agagttcacaaaaagcccacttt

SEQ ID NO: 4396 - DNA, 23 bp, Artificial Sequence
  Description of Artificial Sequence: Synthetic oligonucleotide
  Mitotic kinesin microtubule-associated protein Eg5 (Kif11) siRNA
gagttcacaaaaagcccacttta

SEQ ID NO: 4397 - DNA, 23 bp, Artificial Sequence
  Description of Artificial Sequence: Synthetic oligonucleotide
  Mitotic kinesin microtubule-associated protein Eg5 (Kif11) siRNA
agttcacaaaaagcccactttag

SEQ ID NO: 4398 - DNA, 23 bp, Artificial Sequence
  Description of Artificial Sequence: Synthetic oligonucleotide
  Mitotic kinesin microtubule-associated protein Eg5 (Kif11) siRNA
gttcacaaaaagcccactttaga

SEQ ID NO: 4399 - DNA, 23 bp, Artificial Sequence
  Description of Artificial Sequence: Synthetic oligonucleotide
  Mitotic kinesin microtubule-associated protein Eg5 (Kif11) siRNA
ttcacaaaaagcccactttagag

SEQ ID NO: 4400 - DNA, 23 bp, Artificial Sequence
  Description of Artificial Sequence: Synthetic oligonucleotide
  Mitotic kinesin microtubule-associated protein Eg5 (Kif11) siRNA
tcacaaaaagcccactttagagt

SEQ ID NO: 4401 - DNA, 23 bp, Artificial Sequence
  Description of Artificial Sequence: Synthetic oligonucleotide
  Mitotic kinesin microtubule-associated protein Eg5 (Kif11) siRNA
cacaaaaagcccactttagagta

SEQ ID NO: 4402 - DNA, 23 bp, Artificial Sequence
  Description of Artificial Sequence: Synthetic oligonucleotide
  Mitotic kinesin microtubule-associated protein Eg5 (Kif11) siRNA
acaaaaagcccactttagagtat

SEQ ID NO: 4403 - DNA, 23 bp, Artificial Sequence
  Description of Artificial Sequence: Synthetic oligonucleotide
  Mitotic kinesin microtubule-associated protein Eg5 (Kif11) siRNA
caaaaagcccactttagagtata

SEQ ID NO: 4404 - DNA, 23 bp, Artificial Sequence
  Description of Artificial Sequence: Synthetic oligonucleotide
  Mitotic kinesin microtubule-associated protein Eg5 (Kif11) siRNA
aaaaagcccactttagagtatac

SEQ ID NO: 4405 - DNA, 23 bp, Artificial Sequence
  Description of Artificial Sequence: Synthetic oligonucleotide
  Mitotic kinesin microtubule-associated protein Eg5 (Kif11) siRNA
aaaagcccactttagagtataca

SEQ ID NO: 4406 - DNA, 23 bp, Artificial Sequence
  Description of Artificial Sequence: Synthetic oligonucleotide
  Mitotic kinesin microtubule-associated protein Eg5 (Kif11) siRNA
aaagcccactttagagtatacat

SEQ ID NO: 4407 - DNA, 23 bp, Artificial Sequence
  Description of Artificial Sequence: Synthetic oligonucleotide
  Mitotic kinesin microtubule-associated protein Eg5 (Kif11) siRNA
aagcccactttagagtatacatt

SEQ ID NO: 4408 - DNA, 23 bp, Artificial Sequence
  Description of Artificial Sequence: Synthetic oligonucleotide
  Mitotic kinesin microtubule-associated protein Eg5 (Kif11) siRNA
agcccactttagagtatacattg

SEQ ID NO: 4409 - DNA, 23 bp, Artificial Sequence
  Description of Artificial Sequence: Synthetic oligonucleotide
  Mitotic kinesin microtubule-associated protein Eg5 (Kif11) siRNA
gcccactttagagtatacattgc

SEQ ID NO: 4410 - DNA, 23 bp, Artificial Sequence
  Description of Artificial Sequence: Synthetic oligonucleotide
  Mitotic kinesin microtubule-associated protein Eg5 (Kif11) siRNA
cccactttagagtatacattgct

SEQ ID NO: 4411 - DNA, 23 bp, Artificial Sequence
  Description of Artificial Sequence: Synthetic oligonucleotide
  Mitotic kinesin microtubule-associated protein Eg5 (Kif11) siRNA
ccactttagagtatacattgcta

SEQ ID NO: 4412 - DNA, 23 bp, Artificial Sequence
  Description of Artificial Sequence: Synthetic oligonucleotide
  Mitotic kinesin microtubule-associated protein Eg5 (Kif11) siRNA
cactttagagtatacattgctat

SEQ ID NO: 4413 - DNA, 23 bp, Artificial Sequence
  Description of Artificial Sequence: Synthetic oligonucleotide
  Mitotic kinesin microtubule-associated protein Eg5 (Kif11) siRNA
actttagagtatacattgctatt

SEQ ID NO: 4414 - DNA, 23 bp, Artificial Sequence
  Description of Artificial Sequence: Synthetic oligonucleotide
  Mitotic kinesin microtubule-associated protein Eg5 (Kif11) siRNA
ctttagagtatacattgctatta

SEQ ID NO: 4415 - DNA, 23 bp, Artificial Sequence
  Description of Artificial Sequence: Synthetic oligonucleotide
  Mitotic kinesin microtubule-associated protein Eg5 (Kif11) siRNA
tttagagtatacattgctattat

SEQ ID NO: 4416 - DNA, 23 bp, Artificial Sequence
  Description of Artificial Sequence: Synthetic oligonucleotide
  Mitotic kinesin microtubule-associated protein Eg5 (Kif11) siRNA
ttagagtatacattgctattatg

SEQ ID NO: 4417 - DNA, 23 bp, Artificial Sequence
  Description of Artificial Sequence: Synthetic oligonucleotide
  Mitotic kinesin microtubule-associated protein Eg5 (Kif11) siRNA
tagagtatacattgctattatgg

SEQ ID NO: 4418 - DNA, 23 bp, Artificial Sequence
  Description of Artificial Sequence: Synthetic oligonucleotide
  Mitotic kinesin microtubule-associated protein Eg5 (Kif11) siRNA
agagtatacattgctattatggg

SEQ ID NO: 4419 - DNA, 23 bp, Artificial Sequence
  Description of Artificial Sequence: Synthetic oligonucleotide
  Mitotic kinesin microtubule-associated protein Eg5 (Kif11) siRNA
gagtatacattgctattatggga

SEQ ID NO: 4420 - DNA, 23 bp, Artificial Sequence
  Description of Artificial Sequence: Synthetic oligonucleotide
  Mitotic kinesin microtubule-associated protein Eg5 (Kif11) siRNA
agtatacattgctattatgggag

SEQ ID NO: 4421 - DNA, 23 bp, Artificial Sequence
  Description of Artificial Sequence: Synthetic oligonucleotide
  Mitotic kinesin microtubule-associated protein Eg5 (Kif11) siRNA
gtatacattgctattatgggaga

SEQ ID NO: 4422 - DNA, 23 bp, Artificial Sequence
  Description of Artificial Sequence: Synthetic oligonucleotide
  Mitotic kinesin microtubule-associated protein Eg5 (Kif11) siRNA
tatacattgctattatgggagac

SEQ ID NO: 4423 - DNA, 23 bp, Artificial Sequence
  Description of Artificial Sequence: Synthetic oligonucleotide
  Mitotic kinesin microtubule-associated protein Eg5 (Kif11) siRNA
atacattgctattatgggagacc

SEQ ID NO: 4424 - DNA, 23 bp, Artificial Sequence
  Description of Artificial Sequence: Synthetic oligonucleotide
  Mitotic kinesin microtubule-associated protein Eg5 (Kif11) siRNA
tacattgctattatgggagacca

SEQ ID NO: 4425 - DNA, 23 bp, Artificial Sequence
  Description of Artificial Sequence: Synthetic oligonucleotide
  Mitotic kinesin microtubule-associated protein Eg5 (Kif11) siRNA
acattgctattatgggagaccac

SEQ ID NO: 4426 - DNA, 23 bp, Artificial Sequence
  Description of Artificial Sequence: Synthetic oligonucleotide
  Mitotic kinesin microtubule-associated protein Eg5 (Kif11) siRNA
cattgctattatgggagaccacc

SEQ ID NO: 4427 - DNA, 23 bp, Artificial Sequence
  Description of Artificial Sequence: Synthetic oligonucleotide
  Mitotic kinesin microtubule-associated protein Eg5 (Kif11) siRNA
attgctattatgggagaccaccc

SEQ ID NO: 4428 - DNA, 23 bp, Artificial Sequence
  Description of Artificial Sequence: Synthetic oligonucleotide
  Mitotic kinesin microtubule-associated protein Eg5 (Kif11) siRNA
ttgctattatgggagaccaccca

SEQ ID NO: 4429 - DNA, 23 bp, Artificial Sequence
  Description of Artificial Sequence: Synthetic oligonucleotide
  Mitotic kinesin microtubule-associated protein Eg5 (Kif11) siRNA
tgctattatgggagaccacccag

SEQ ID NO: 4430 - DNA, 23 bp, Artificial Sequence
  Description of Artificial Sequence: Synthetic oligonucleotide
  Mitotic kinesin microtubule-associated protein Eg5 (Kif11) siRNA
gctattatgggagaccacccaga

SEQ ID NO: 4431 - DNA, 23 bp, Artificial Sequence
  Description of Artificial Sequence: Synthetic oligonucleotide
  Mitotic kinesin microtubule-associated protein Eg5 (Kif11) siRNA
ctattatgggagaccacccagac

SEQ ID NO: 4432 - DNA, 23 bp, Artificial Sequence
  Description of Artificial Sequence: Synthetic oligonucleotide
  Mitotic kinesin microtubule-associated protein Eg5 (Kif11) siRNA
tattatgggagaccacccagaca

SEQ ID NO: 4433 - DNA, 23 bp, Artificial Sequence
  Description of Artificial Sequence: Synthetic oligonucleotide
  Mitotic kinesin microtubule-associated protein Eg5 (Kif11) siRNA
attatgggagaccacccagacat

SEQ ID NO: 4434 - DNA, 23 bp, Artificial Sequence
  Description of Artificial Sequence: Synthetic oligonucleotide
  Mitotic kinesin microtubule-associated protein Eg5 (Kif11) siRNA
ttatgggagaccacccagacatc

SEQ ID NO: 4435 - DNA, 23 bp, Artificial Sequence
  Description of Artificial Sequence: Synthetic oligonucleotide
  Mitotic kinesin microtubule-associated protein Eg5 (Kif11) siRNA
tatgggagaccacccagacatct

SEQ ID NO: 4436 - DNA, 23 bp, Artificial Sequence
  Description of Artificial Sequence: Synthetic oligonucleotide
  Mitotic kinesin microtubule-associated protein Eg5 (Kif11) siRNA
atgggagaccacccagacatctg

SEQ ID NO: 4437 - DNA, 23 bp, Artificial Sequence
  Description of Artificial Sequence: Synthetic oligonucleotide
  Mitotic kinesin microtubule-associated protein Eg5 (Kif11) siRNA
tgggagaccacccagacatctga

SEQ ID NO: 4438 - DNA, 23 bp, Artificial Sequence
  Description of Artificial Sequence: Synthetic oligonucleotide
  Mitotic kinesin microtubule-associated protein Eg5 (Kif11) siRNA
gggagaccacccagacatctgac

SEQ ID NO: 4439 - DNA, 23 bp, Artificial Sequence
  Description of Artificial Sequence: Synthetic oligonucleotide
  Mitotic kinesin microtubule-associated protein Eg5 (Kif11) siRNA
ggagaccacccagacatctgact

SEQ ID NO: 4440 - DNA, 23 bp, Artificial Sequence
  Description of Artificial Sequence: Synthetic oligonucleotide
  Mitotic kinesin microtubule-associated protein Eg5 (Kif11) siRNA
gagaccacccagacatctgacta

SEQ ID NO: 4441 - DNA, 23 bp, Artificial Sequence
  Description of Artificial Sequence: Synthetic oligonucleotide
  Mitotic kinesin microtubule-associated protein Eg5 (Kif11) siRNA
agaccacccagacatctgactaa

SEQ ID NO: 4442 - DNA, 23 bp, Artificial Sequence
  Description of Artificial Sequence: Synthetic oligonucleotide
  Mitotic kinesin microtubule-associated protein Eg5 (Kif11) siRNA
gaccacccagacatctgactaat

SEQ ID NO: 4443 - DNA, 23 bp, Artificial Sequence
  Description of Artificial Sequence: Synthetic oligonucleotide
  Mitotic kinesin microtubule-associated protein Eg5 (Kif11) siRNA
accacccagacatctgactaatg

SEQ ID NO: 4444 - DNA, 23 bp, Artificial Sequence
  Description of Artificial Sequence: Synthetic oligonucleotide
  Mitotic kinesin microtubule-associated protein Eg5 (Kif11) siRNA
ccacccagacatctgactaatgg

SEQ ID NO: 4445 - DNA, 23 bp, Artificial Sequence
  Description of Artificial Sequence: Synthetic oligonucleotide
  Mitotic kinesin microtubule-associated protein Eg5 (Kif11) siRNA
cacccagacatctgactaatggc

SEQ ID NO: 4446 - DNA, 23 bp, Artificial Sequence
  Description of Artificial Sequence: Synthetic oligonucleotide
  Mitotic kinesin microtubule-associated protein Eg5 (Kif11) siRNA
acccagacatctgactaatggct

SEQ ID NO: 4447 - DNA, 23 bp, Artificial Sequence
  Description of Artificial Sequence: Synthetic oligonucleotide
  Mitotic kinesin microtubule-associated protein Eg5 (Kif11) siRNA
cccagacatctgactaatggctc

SEQ ID NO: 4448 - DNA, 23 bp, Artificial Sequence
  Description of Artificial Sequence: Synthetic oligonucleotide
  Mitotic kinesin microtubule-associated protein Eg5 (Kif11) siRNA
ccagacatctgactaatggctct

SEQ ID NO: 4449 - DNA, 23 bp, Artificial Sequence
  Description of Artificial Sequence: Synthetic oligonucleotide
  Mitotic kinesin microtubule-associated protein Eg5 (Kif11) siRNA
cagacatctgactaatggctctg

SEQ ID NO: 4450 - DNA, 23 bp, Artificial Sequence
  Description of Artificial Sequence: Synthetic oligonucleotide
  Mitotic kinesin microtubule-associated protein Eg5 (Kif11) siRNA
agacatctgactaatggctctgt

SEQ ID NO: 4451 - DNA, 23 bp, Artificial Sequence
  Description of Artificial Sequence: Synthetic oligonucleotide
  Mitotic kinesin microtubule-associated protein Eg5 (Kif11) siRNA
gacatctgactaatggctctgtg

SEQ ID NO: 4452 - DNA, 23 bp, Artificial Sequence
  Description of Artificial Sequence: Synthetic oligonucleotide
  Mitotic kinesin microtubule-associated protein Eg5 (Kif11) siRNA
acatctgactaatggctctgtgc

SEQ ID NO: 4453 - DNA, 23 bp, Artificial Sequence
  Description of Artificial Sequence: Synthetic oligonucleotide
  Mitotic kinesin microtubule-associated protein Eg5 (Kif11) siRNA
catctgactaatggctctgtgcc

SEQ ID NO: 4454 - DNA, 23 bp, Artificial Sequence
  Description of Artificial Sequence: Synthetic oligonucleotide
  Mitotic kinesin microtubule-associated protein Eg5 (Kif11) siRNA
atctgactaatggctctgtgcca

SEQ ID NO: 4455 - DNA, 23 bp, Artificial Sequence
  Description of Artificial Sequence: Synthetic oligonucleotide
  Mitotic kinesin microtubule-associated protein Eg5 (Kif11) siRNA
tctgactaatggctctgtgccac

SEQ ID NO: 4456 - DNA, 23 bp, Artificial Sequence
  Description of Artificial Sequence: Synthetic oligonucleotide
  Mitotic kinesin microtubule-associated protein Eg5 (Kif11) siRNA
ctgactaatggctctgtgccaca

SEQ ID NO: 4457 - DNA, 23 bp, Artificial Sequence
  Description of Artificial Sequence: Synthetic oligonucleotide
  Mitotic kinesin microtubule-associated protein Eg5 (Kif11) siRNA
tgactaatggctctgtgccacac

SEQ ID NO: 4458 - DNA, 23 bp, Artificial Sequence
  Description of Artificial Sequence: Synthetic oligonucleotide
  Mitotic kinesin microtubule-associated protein Eg5 (Kif11) siRNA
gactaatggctctgtgccacact

SEQ ID NO: 4459 - DNA, 23 bp, Artificial Sequence
  Description of Artificial Sequence: Synthetic oligonucleotide
  Mitotic kinesin microtubule-associated protein Eg5 (Kif11) siRNA
actaatggctctgtgccacactc

SEQ ID NO: 4460 - DNA, 23 bp, Artificial Sequence
  Description of Artificial Sequence: Synthetic oligonucleotide
  Mitotic kinesin microtubule-associated protein Eg5 (Kif11) siRNA
ctaatggctctgtgccacactcc

SEQ ID NO: 4461 - DNA, 23 bp, Artificial Sequence
  Description of Artificial Sequence: Synthetic oligonucleotide
  Mitotic kinesin microtubule-associated protein Eg5 (Kif11) siRNA
taatggctctgtgccacactcca

SEQ ID NO: 4462 - DNA, 23 bp, Artificial Sequence
  Description of Artificial Sequence: Synthetic oligonucleotide
  Mitotic kinesin microtubule-associated protein Eg5 (Kif11) siRNA
aatggctctgtgccacactccaa

SEQ ID NO: 4463 - DNA, 23 bp, Artificial Sequence
  Description of Artificial Sequence: Synthetic oligonucleotide
  Mitotic kinesin microtubule-associated protein Eg5 (Kif11) siRNA
atggctctgtgccacactccaag

SEQ ID NO: 4464 - DNA, 23 bp, Artificial Sequence
  Description of Artificial Sequence: Synthetic oligonucleotide
  Mitotic kinesin microtubule-associated protein Eg5 (Kif11) siRNA
tggctctgtgccacactccaaga

SEQ ID NO: 4465 - DNA, 23 bp, Artificial Sequence
  Description of Artificial Sequence: Synthetic oligonucleotide
  Mitotic kinesin microtubule-associated protein Eg5 (Kif11) siRNA
ggctctgtgccacactccaagac

SEQ ID NO: 4466 - DNA, 23 bp, Artificial Sequence
  Description of Artificial Sequence: Synthetic oligonucleotide
  Mitotic kinesin microtubule-associated protein Eg5 (Kif11) siRNA
gctctgtgccacactccaagacc

SEQ ID NO: 4467 - DNA, 23 bp, Artificial Sequence
  Description of Artificial Sequence: Synthetic oligonucleotide
  Mitotic kinesin microtubule-associated protein Eg5 (Kif11) siRNA
ctctgtgccacactccaagacct

SEQ ID NO: 4468 - DNA, 23 bp, Artificial Sequence
  Description of Artificial Sequence: Synthetic oligonucleotide
  Mitotic kinesin microtubule-associated protein Eg5 (Kif11) siRNA
tctgtgccacactccaagacctg

SEQ ID NO: 4469 - DNA, 23 bp, Artificial Sequence
  Description of Artificial Sequence: Synthetic oligonucleotide
  Mitotic kinesin microtubule-associated protein Eg5 (Kif11) siRNA
ctgtgccacactccaagacctgt

SEQ ID NO: 4470 - DNA, 23 bp, Artificial Sequence
  Description of Artificial Sequence: Synthetic oligonucleotide
  Mitotic kinesin microtubule-associated protein Eg5 (Kif11) siRNA
tgtgccacactccaagacctgtg

SEQ ID NO: 4471 - DNA, 23 bp, Artificial Sequence
  Description of Artificial Sequence: Synthetic oligonucleotide
  Mitotic kinesin microtubule-associated protein Eg5 (Kif11) siRNA
gtgccacactccaagacctgtgc

SEQ ID NO: 4472 - DNA, 23 bp, Artificial Sequence
  Description of Artificial Sequence: Synthetic oligonucleotide
  Mitotic kinesin microtubule-associated protein Eg5 (Kif11) siRNA
tgccacactccaagacctgtgcc

SEQ ID NO: 4473 - DNA, 23 bp, Artificial Sequence
  Description of Artificial Sequence: Synthetic oligonucleotide
  Mitotic kinesin microtubule-associated protein Eg5 (Kif11) siRNA
gccacactccaagacctgtgcct

SEQ ID NO: 4474 - DNA, 23 bp, Artificial Sequence
  Description of Artificial Sequence: Synthetic oligonucleotide
  Mitotic kinesin microtubule-associated protein Eg5 (Kif11) siRNA
ccacactccaagacctgtgcctt

SEQ ID NO: 4475 - DNA, 23 bp, Artificial Sequence
  Description of Artificial Sequence: Synthetic oligonucleotide
  Mitotic kinesin microtubule-associated protein Eg5 (Kif11) siRNA
cacactccaagacctgtgccttt

SEQ ID NO: 4476 - DNA, 23 bp, Artificial Sequence
  Description of Artificial Sequence: Synthetic oligonucleotide
  Mitotic kinesin microtubule-associated protein Eg5 (Kif11) siRNA
acactccaagacctgtgcctttt

SEQ ID NO: 4477 - DNA, 23 bp, Artificial Sequence
  Description of Artificial Sequence: Synthetic oligonucleotide
  Mitotic kinesin microtubule-associated protein Eg5 (Kif11) siRNA
cactccaagacctgtgcctttta

SEQ ID NO: 4478 - DNA, 23 bp, Artificial Sequence
  Description of Artificial Sequence: Synthetic oligonucleotide
  Mitotic kinesin microtubule-associated protein Eg5 (Kif11) siRNA
actccaagacctgtgccttttag

SEQ ID NO: 4479 - DNA, 23 bp, Artificial Sequence
  Description of Artificial Sequence: Synthetic oligonucleotide
  Mitotic kinesin microtubule-associated protein Eg5 (Kif11) siRNA
ctccaagacctgtgccttttaga

SEQ ID NO: 4480 - DNA, 23 bp, Artificial Sequence
  Description of Artificial Sequence: Synthetic oligonucleotide
  Mitotic kinesin microtubule-associated protein Eg5 (Kif11) siRNA
tccaagacctgtgccttttagag

SEQ ID NO: 4481 - DNA, 23 bp, Artificial Sequence
  Description of Artificial Sequence: Synthetic oligonucleotide
  Mitotic kinesin microtubule-associated protein Eg5 (Kif11) siRNA
ccaagacctgtgccttttagaga

SEQ ID NO: 4482 - DNA, 23 bp, Artificial Sequence
  Description of Artificial Sequence: Synthetic oligonucleotide
  Mitotic kinesin microtubule-associated protein Eg5 (Kif11) siRNA
caagacctgtgccttttagagaa

SEQ ID NO: 4483 - DNA, 23 bp, Artificial Sequence
  Description of Artificial Sequence: Synthetic oligonucleotide
  Mitotic kinesin microtubule-associated protein Eg5 (Kif11) siRNA
aagacctgtgccttttagagaag

SEQ ID NO: 4484 - DNA, 23 bp, Artificial Sequence
  Description of Artificial Sequence: Synthetic oligonucleotide
  Mitotic kinesin microtubule-associated protein Eg5 (Kif11) siRNA
agacctgtgccttttagagaagc

SEQ ID NO: 4485 - DNA, 23 bp, Artificial Sequence
  Description of Artificial Sequence: Synthetic oligonucleotide
  Mitotic kinesin microtubule-associated protein Eg5 (Kif11) siRNA
gacctgtgccttttagagaagct

SEQ ID NO: 4486 - DNA, 23 bp, Artificial Sequence
  Description of Artificial Sequence: Synthetic oligonucleotide
  Mitotic kinesin microtubule-associated protein Eg5 (Kif11) siRNA
acctgtgccttttagagaagctc

SEQ ID NO: 4487 - DNA, 23 bp, Artificial Sequence
  Description of Artificial Sequence: Synthetic oligonucleotide
  Mitotic kinesin microtubule-associated protein Eg5 (Kif11) siRNA
cctgtgccttttagagaagctca

SEQ ID NO: 4488 - DNA, 23 bp, Artificial Sequence
  Description of Artificial Sequence: Synthetic oligonucleotide
  Mitotic kinesin microtubule-associated protein Eg5 (Kif11) siRNA
ctgtgccttttagagaagctcac

SEQ ID NO: 4489 - DNA, 23 bp, Artificial Sequence
  Description of Artificial Sequence: Synthetic oligonucleotide
  Mitotic kinesin microtubule-associated protein Eg5 (Kif11) siRNA
tgtgccttttagagaagctcaca

SEQ ID NO: 4490 - DNA, 23 bp, Artificial Sequence
  Description of Artificial Sequence: Synthetic oligonucleotide
  Mitotic kinesin microtubule-associated protein Eg5 (Kif11) siRNA
gtgccttttagagaagctcacaa

SEQ ID NO: 4491 - DNA, 23 bp, Artificial Sequence
  Description of Artificial Sequence: Synthetic oligonucleotide
  Mitotic kinesin microtubule-associated protein Eg5 (Kif11) siRNA
tgccttttagagaagctcacaat

SEQ ID NO: 4492 - DNA, 23 bp, Artificial Sequence
  Description of Artificial Sequence: Synthetic oligonucleotide
  Mitotic kinesin microtubule-associated protein Eg5 (Kif11) siRNA
gccttttagagaagctcacaatg

SEQ ID NO: 4493 - DNA, 23 bp, Artificial Sequence
  Description of Artificial Sequence: Synthetic oligonucleotide
  Mitotic kinesin microtubule-associated protein Eg5 (Kif11) siRNA
ccttttagagaagctcacaatga

SEQ ID NO: 4494 - DNA, 23 bp, Artificial Sequence
  Description of Artificial Sequence: Synthetic oligonucleotide
  Mitotic kinesin microtubule-associated protein Eg5 (Kif11) siRNA
cttttagagaagctcacaatgat

SEQ ID NO: 4495 - DNA, 23 bp, Artificial Sequence
  Description of Artificial Sequence: Synthetic oligonucleotide
  Mitotic kinesin microtubule-associated protein Eg5 (Kif11) siRNA
ttttagagaagctcacaatgatt

SEQ ID NO: 4496 - DNA, 23 bp, Artificial Sequence
  Description of Artificial Sequence: Synthetic oligonucleotide
  Mitotic kinesin microtubule-associated protein Eg5 (Kif11) siRNA
tttagagaagctcacaatgattt

SEQ ID NO: 4497 - DNA, 23 bp, Artificial Sequence
  Description of Artificial Sequence: Synthetic oligonucleotide
  Mitotic kinesin microtubule-associated protein Eg5 (Kif11) siRNA
ttagagaagctcacaatgattta

SEQ ID NO: 4498 - DNA, 23 bp, Artificial Sequence
  Description of Artificial Sequence: Synthetic oligonucleotide
  Mitotic kinesin microtubule-associated protein Eg5 (Kif11) siRNA
tagagaagctcacaatgatttaa

SEQ ID NO: 4499 - DNA, 23 bp, Artificial Sequence
  Description of Artificial Sequence: Synthetic oligonucleotide
  Mitotic kinesin microtubule-associated protein Eg5 (Kif11) siRNA
agagaagctcacaatgatttaag

SEQ ID NO: 4500 - DNA, 23 bp, Artificial Sequence
  Description of Artificial Sequence: Synthetic oligonucleotide
  Mitotic kinesin microtubule-associated protein Eg5 (Kif11) siRNA
gagaagctcacaatgatttaagg

SEQ ID NO: 4501 - DNA, 23 bp, Artificial Sequence
  Description of Artificial Sequence: Synthetic oligonucleotide
  Mitotic kinesin microtubule-associated protein Eg5 (Kif11) siRNA
agaagctcacaatgatttaagga

SEQ ID NO: 4502 - DNA, 23 bp, Artificial Sequence
  Description of Artificial Sequence: Synthetic oligonucleotide
  Mitotic kinesin microtubule-associated protein Eg5 (Kif11) siRNA
gaagctcacaatgatttaaggac

SEQ ID NO: 4503 - DNA, 23 bp, Artificial Sequence
  Description of Artificial Sequence: Synthetic oligonucleotide
  Mitotic kinesin microtubule-associated protein Eg5 (Kif11) siRNA
aagctcacaatgatttaaggact

SEQ ID NO: 4504 - DNA, 23 bp, Artificial Sequence
  Description of Artificial Sequence: Synthetic oligonucleotide
  Mitotic kinesin microtubule-associated protein Eg5 (Kif11) siRNA
agctcacaatgatttaaggactg

SEQ ID NO: 4505 - DNA, 23 bp, Artificial Sequence
  Description of Artificial Sequence: Synthetic oligonucleotide
  Mitotic kinesin microtubule-associated protein Eg5 (Kif11) siRNA
gctcacaatgatttaaggactgt

SEQ ID NO: 4506 - DNA, 23 bp, Artificial Sequence
  Description of Artificial Sequence: Synthetic oligonucleotide
  Mitotic kinesin microtubule-associated protein Eg5 (Kif11) siRNA
ctcacaatgatttaaggactgtt

SEQ ID NO: 4507 - DNA, 23 bp, Artificial Sequence
  Description of Artificial Sequence: Synthetic oligonucleotide
  Mitotic kinesin microtubule-associated protein Eg5 (Kif11) siRNA
tcacaatgatttaaggactgttt

SEQ ID NO: 4508 - DNA, 23 bp, Artificial Sequence
  Description of Artificial Sequence: Synthetic oligonucleotide
  Mitotic kinesin microtubule-associated protein Eg5 (Kif11) siRNA
cacaatgatttaaggactgtttg

SEQ ID NO: 4509 - DNA, 23 bp, Artificial Sequence
  Description of Artificial Sequence: Synthetic oligonucleotide
  Mitotic kinesin microtubule-associated protein Eg5 (Kif11) siRNA
acaatgatttaaggactgtttga

SEQ ID NO: 4510 - DNA, 23 bp, Artificial Sequence
  Description of Artificial Sequence: Synthetic oligonucleotide
  Mitotic kinesin microtubule-associated protein Eg5 (Kif11) siRNA
caatgatttaaggactgtttgaa

SEQ ID NO: 4511 - DNA, 23 bp, Artificial Sequence
  Description of Artificial Sequence: Synthetic oligonucleotide
  Mitotic kinesin microtubule-associated protein Eg5 (Kif11) siRNA
aatgatttaaggactgtttgaaa

SEQ ID NO: 4512 - DNA, 23 bp, Artificial Sequence
  Description of Artificial Sequence: Synthetic oligonucleotide
  Mitotic kinesin microtubule-associated protein Eg5 (Kif11) siRNA
atgatttaaggactgtttgaaac

SEQ ID NO: 4513 - DNA, 23 bp, Artificial Sequence
  Description of Artificial Sequence: Synthetic oligonucleotide
  Mitotic kinesin microtubule-associated protein Eg5 (Kif11) siRNA
tgatttaaggactgtttgaaact

SEQ ID NO: 4514 - DNA, 23 bp, Artificial Sequence
  Description of Artificial Sequence: Synthetic oligonucleotide
  Mitotic kinesin microtubule-associated protein Eg5 (Kif11) siRNA
gatttaaggactgtttgaaactt

SEQ ID NO: 4515 - DNA, 23 bp, Artificial Sequence
  Description of Artificial Sequence: Synthetic oligonucleotide
  Mitotic kinesin microtubule-associated protein Eg5 (Kif11) siRNA
atttaaggactgtttgaaacttc

SEQ ID NO: 4516 - DNA, 23 bp, Artificial Sequence
  Description of Artificial Sequence: Synthetic oligonucleotide
  Mitotic kinesin microtubule-associated protein Eg5 (Kif11) siRNA
tttaaggactgtttgaaacttcc

SEQ ID NO: 4517 - DNA, 23 bp, Artificial Sequence
  Description of Artificial Sequence: Synthetic oligonucleotide
  Mitotic kinesin microtubule-associated protein Eg5 (Kif11) siRNA
ttaaggactgtttgaaacttcca

SEQ ID NO: 4518 - DNA, 23 bp, Artificial Sequence
  Description of Artificial Sequence: Synthetic oligonucleotide
  Mitotic kinesin microtubule-associated protein Eg5 (Kif11) siRNA
taaggactgtttgaaacttccaa

SEQ ID NO: 4519 - DNA, 23 bp, Artificial Sequence
  Description of Artificial Sequence: Synthetic oligonucleotide
  Mitotic kinesin microtubule-associated protein Eg5 (Kif11) siRNA
aaggactgtttgaaacttccaat

SEQ ID NO: 4520 - DNA, 23 bp, Artificial Sequence
  Description of Artificial Sequence: Synthetic oligonucleotide
  Mitotic kinesin microtubule-associated protein Eg5 (Kif11) siRNA
aggactgtttgaaacttccaatt

SEQ ID NO: 4521 - DNA, 23 bp, Artificial Sequence
  Description of Artificial Sequence: Synthetic oligonucleotide
  Mitotic kinesin microtubule-associated protein Eg5 (Kif11) siRNA
ggactgtttgaaacttccaatta

SEQ ID NO: 4522 - DNA, 23 bp, Artificial Sequence
  Description of Artificial Sequence: Synthetic oligonucleotide
  Mitotic kinesin microtubule-associated protein Eg5 (Kif11) siRNA
gactgtttgaaacttccaattat

SEQ ID NO: 4523 - DNA, 23 bp, Artificial Sequence
  Description of Artificial Sequence: Synthetic oligonucleotide
  Mitotic kinesin microtubule-associated protein Eg5 (Kif11) siRNA
actgtttgaaacttccaattatg

SEQ ID NO: 4524 - DNA, 23 bp, Artificial Sequence
  Description of Artificial Sequence: Synthetic oligonucleotide
  Mitotic kinesin microtubule-associated protein Eg5 (Kif11) siRNA
ctgtttgaaacttccaattatgt

SEQ ID NO: 4525 - DNA, 23 bp, Artificial Sequence
  Description of Artificial Sequence: Synthetic oligonucleotide
  Mitotic kinesin microtubule-associated protein Eg5 (Kif11) siRNA
tgtttgaaacttccaattatgtc

SEQ ID NO: 4526 - DNA, 23 bp, Artificial Sequence
  Description of Artificial Sequence: Synthetic oligonucleotide
  Mitotic kinesin microtubule-associated protein Eg5 (Kif11) siRNA
gtttgaaacttccaattatgtct

SEQ ID NO: 4527 - DNA, 23 bp, Artificial Sequence
  Description of Artificial Sequence: Synthetic oligonucleotide
  Mitotic kinesin microtubule-associated protein Eg5 (Kif11) siRNA
tttgaaacttccaattatgtcta

SEQ ID NO: 4528 - DNA, 23 bp, Artificial Sequence
  Description of Artificial Sequence: Synthetic oligonucleotide
  Mitotic kinesin microtubule-associated protein Eg5 (Kif11) siRNA
ttgaaacttccaattatgtctat

SEQ ID NO: 4529 - DNA, 23 bp, Artificial Sequence
  Description of Artificial Sequence: Synthetic oligonucleotide
  Mitotic kinesin microtubule-associated protein Eg5 (Kif11) siRNA
tgaaacttccaattatgtctata

SEQ ID NO: 4530 - DNA, 23 bp, Artificial Sequence
  Description of Artificial Sequence: Synthetic oligonucleotide
  Mitotic kinesin microtubule-associated protein Eg5 (Kif11) siRNA
gaaacttccaattatgtctataa

SEQ ID NO: 4531 - DNA, 23 bp, Artificial Sequence
  Description of Artificial Sequence: Synthetic oligonucleotide
  Mitotic kinesin microtubule-associated protein Eg5 (Kif11) siRNA
aaacttccaattatgtctataat

SEQ ID NO: 4532 - DNA, 23 bp, Artificial Sequence
  Description of Artificial Sequence: Synthetic oligonucleotide
  Mitotic kinesin microtubule-associated protein Eg5 (Kif11) siRNA
aacttccaattatgtctataatt

SEQ ID NO: 4533 - DNA, 23 bp, Artificial Sequence
  Description of Artificial Sequence: Synthetic oligonucleotide
  Mitotic kinesin microtubule-associated protein Eg5 (Kif11) siRNA
acttccaattatgtctataattt

SEQ ID NO: 4534 - DNA, 23 bp, Artificial Sequence
  Description of Artificial Sequence: Synthetic oligonucleotide
  Mitotic kinesin microtubule-associated protein Eg5 (Kif11) siRNA
cttccaattatgtctataattta

SEQ ID NO: 4535 - DNA, 23 bp, Artificial Sequence
  Description of Artificial Sequence: Synthetic oligonucleotide
  Mitotic kinesin microtubule-associated protein Eg5 (Kif11) siRNA
ttccaattatgtctataatttat

SEQ ID NO: 4536 - DNA, 23 bp, Artificial Sequence
  Description of Artificial Sequence: Synthetic oligonucleotide
  Mitotic kinesin microtubule-associated protein Eg5 (Kif11) siRNA
tccaattatgtctataatttata

SEQ ID NO: 4537 - DNA, 23 bp, Artificial Sequence
  Description of Artificial Sequence: Synthetic oligonucleotide
  Mitotic kinesin microtubule-associated protein Eg5 (Kif11) siRNA
ccaattatgtctataatttatat

SEQ ID NO: 4538 - DNA, 23 bp, Artificial Sequence
  Description of Artificial Sequence: Synthetic oligonucleotide
  Mitotic kinesin microtubule-associated protein Eg5 (Kif11) siRNA
caattatgtctataatttatatt

SEQ ID NO: 4539 - DNA, 23 bp, Artificial Sequence
  Description of Artificial Sequence: Synthetic oligonucleotide
  Mitotic kinesin microtubule-associated protein Eg5 (Kif11) siRNA
aattatgtctataatttatattc

SEQ ID NO: 4540 - DNA, 23 bp, Artificial Sequence
  Description of Artificial Sequence: Synthetic oligonucleotide
  Mitotic kinesin microtubule-associated protein Eg5 (Kif11) siRNA
attatgtctataatttatattct

SEQ ID NO: 4541 - DNA, 23 bp, Artificial Sequence
  Description of Artificial Sequence: Synthetic oligonucleotide
  Mitotic kinesin microtubule-associated protein Eg5 (Kif11) siRNA
ttatgtctataatttatattctt

SEQ ID NO: 4542 - DNA, 23 bp, Artificial Sequence
  Description of Artificial Sequence: Synthetic oligonucleotide
  Mitotic kinesin microtubule-associated protein Eg5 (Kif11) siRNA
tatgtctataatttatattcttt

SEQ ID NO: 4543 - DNA, 23 bp, Artificial Sequence
  Description of Artificial Sequence: Synthetic oligonucleotide
  Mitotic kinesin microtubule-associated protein Eg5 (Kif11) siRNA
atgtctataatttatattctttt

SEQ ID NO: 4544 - DNA, 23 bp, Artificial Sequence
  Description of Artificial Sequence: Synthetic oligonucleotide
  Mitotic kinesin microtubule-associated protein Eg5 (Kif11) siRNA
tgtctataatttatattcttttg

SEQ ID NO: 4545 - DNA, 23 bp, Artificial Sequence
  Description of Artificial Sequence: Synthetic oligonucleotide
  Mitotic kinesin microtubule-associated protein Eg5 (Kif11) siRNA
gtctataatttatattcttttgt

SEQ ID NO: 4546 - DNA, 23 bp, Artificial Sequence
  Description of Artificial Sequence: Synthetic oligonucleotide
  Mitotic kinesin microtubule-associated protein Eg5 (Kif11) siRNA
tctataatttatattcttttgtt

SEQ ID NO: 4547 - DNA, 23 bp, Artificial Sequence
  Description of Artificial Sequence: Synthetic oligonucleotide
  Mitotic kinesin microtubule-associated protein Eg5 (Kif11) siRNA
ctataatttatattcttttgttt

SEQ ID NO: 4548 - DNA, 23 bp, Artificial Sequence
  Description of Artificial Sequence: Synthetic oligonucleotide
  Mitotic kinesin microtubule-associated protein Eg5 (Kif11) siRNA
tataatttatattcttttgttta

SEQ ID NO: 4549 - DNA, 23 bp, Artificial Sequence
  Description of Artificial Sequence: Synthetic oligonucleotide
  Mitotic kinesin microtubule-associated protein Eg5 (Kif11) siRNA
ataatttatattcttttgtttac

SEQ ID NO: 4550 - DNA, 23 bp, Artificial Sequence
  Description of Artificial Sequence: Synthetic oligonucleotide
  Mitotic kinesin microtubule-associated protein Eg5 (Kif11) siRNA
taatttatattcttttgtttaca

SEQ ID NO: 4551 - DNA, 23 bp, Artificial Sequence
  Description of Artificial Sequence: Synthetic oligonucleotide
  Mitotic kinesin microtubule-associated protein Eg5 (Kif11) siRNA
aatttatattcttttgtttacat

SEQ ID NO: 4552 - DNA, 23 bp, Artificial Sequence
  Description of Artificial Sequence: Synthetic oligonucleotide
  Mitotic kinesin microtubule-associated protein Eg5 (Kif11) siRNA
atttatattcttttgtttacatg

SEQ ID NO: 4553 - DNA, 23 bp, Artificial Sequence
  Description of Artificial Sequence: Synthetic oligonucleotide
  Mitotic kinesin microtubule-associated protein Eg5 (Kif11) siRNA
tttatattcttttgtttacatga

SEQ ID NO: 4554 - DNA, 23 bp, Artificial Sequence
  Description of Artificial Sequence: Synthetic oligonucleotide
  Mitotic kinesin microtubule-associated protein Eg5 (Kif11) siRNA
ttatattcttttgtttacatgat

SEQ ID NO: 4555 - DNA, 23 bp, Artificial Sequence
  Description of Artificial Sequence: Synthetic oligonucleotide
  Mitotic kinesin microtubule-associated protein Eg5 (Kif11) siRNA
tatattcttttgtttacatgatg

SEQ ID NO: 4556 - DNA, 23 bp, Artificial Sequence
  Description of Artificial Sequence: Synthetic oligonucleotide
  Mitotic kinesin microtubule-associated protein Eg5 (Kif11) siRNA
atattcttttgtttacatgatga

SEQ ID NO: 4557 - DNA, 23 bp, Artificial Sequence
  Description of Artificial Sequence: Synthetic oligonucleotide
  Mitotic kinesin microtubule-associated protein Eg5 (Kif11) siRNA
tattcttttgtttacatgatgaa

SEQ ID NO: 4558 - DNA, 23 bp, Artificial Sequence
  Description of Artificial Sequence: Synthetic oligonucleotide
  Mitotic kinesin microtubule-associated protein Eg5 (Kif11) siRNA
attcttttgtttacatgatgaaa

SEQ ID NO: 4559 - DNA, 23 bp, Artificial Sequence
  Description of Artificial Sequence: Synthetic oligonucleotide
  Mitotic kinesin microtubule-associated protein Eg5 (Kif11) siRNA
ttcttttgtttacatgatgaaac

SEQ ID NO: 4560 - DNA, 23 bp, Artificial Sequence
  Description of Artificial Sequence: Synthetic oligonucleotide
  Mitotic kinesin microtubule-associated protein Eg5 (Kif11) siRNA
tcttttgtttacatgatgaaact

SEQ ID NO: 4561 - DNA, 23 bp, Artificial Sequence
  Description of Artificial Sequence: Synthetic oligonucleotide
  Mitotic kinesin microtubule-associated protein Eg5 (Kif11) siRNA
cttttgtttacatgatgaaactt

SEQ ID NO: 4562 - DNA, 23 bp, Artificial Sequence
  Description of Artificial Sequence: Synthetic oligonucleotide
  Mitotic kinesin microtubule-associated protein Eg5 (Kif11) siRNA
ttttgtttacatgatgaaacttt

SEQ ID NO: 4563 - DNA, 23 bp, Artificial Sequence
  Description of Artificial Sequence: Synthetic oligonucleotide
  Mitotic kinesin microtubule-associated protein Eg5 (Kif11) siRNA
tttgtttacatgatgaaactttt

SEQ ID NO: 4564 - DNA, 23 bp, Artificial Sequence
  Description of Artificial Sequence: Synthetic oligonucleotide
  Mitotic kinesin microtubule-associated protein Eg5 (Kif11) siRNA
ttgtttacatgatgaaacttttt

SEQ ID NO: 4565 - DNA, 23 bp, Artificial Sequence
  Description of Artificial Sequence: Synthetic oligonucleotide
  Mitotic kinesin microtubule-associated protein Eg5 (Kif11) siRNA
tgtttacatgatgaaactttttg

SEQ ID NO: 4566 - DNA, 23 bp, Artificial Sequence
  Description of Artificial Sequence: Synthetic oligonucleotide
  Mitotic kinesin microtubule-associated protein Eg5 (Kif11) siRNA
gtttacatgatgaaactttttgt

SEQ ID NO: 4567 - DNA, 23 bp, Artificial Sequence
  Description of Artificial Sequence: Synthetic oligonucleotide
  Mitotic kinesin microtubule-associated protein Eg5 (Kif11) siRNA
tttacatgatgaaactttttgtt

SEQ ID NO: 4568 - DNA, 23 bp, Artificial Sequence
  Description of Artificial Sequence: Synthetic oligonucleotide
  Mitotic kinesin microtubule-associated protein Eg5 (Kif11) siRNA
ttacatgatgaaactttttgttg

SEQ ID NO: 4569 - DNA, 23 bp, Artificial Sequence
  Description of Artificial Sequence: Synthetic oligonucleotide
  Mitotic kinesin microtubule-associated protein Eg5 (Kif11) siRNA
tacatgatgaaactttttgttgt

SEQ ID NO: 4570 - DNA, 23 bp, Artificial Sequence
  Description of Artificial Sequence: Synthetic oligonucleotide
  Mitotic kinesin microtubule-associated protein Eg5 (Kif11) siRNA
acatgatgaaactttttgttgtt

SEQ ID NO: 4571 - DNA, 23 bp, Artificial Sequence
  Description of Artificial Sequence: Synthetic oligonucleotide
  Mitotic kinesin microtubule-associated protein Eg5 (Kif11) siRNA
catgatgaaactttttgttgttg

SEQ ID NO: 4572 - DNA, 23 bp, Artificial Sequence
  Description of Artificial Sequence: Synthetic oligonucleotide
  Mitotic kinesin microtubule-associated protein Eg5 (Kif11) siRNA
atgatgaaactttttgttgttgc

SEQ ID NO: 4573 - DNA, 23 bp, Artificial Sequence
  Description of Artificial Sequence: Synthetic oligonucleotide
  Mitotic kinesin microtubule-associated protein Eg5 (Kif11) siRNA
tgatgaaactttttgttgttgct

SEQ ID NO: 4574 - DNA, 23 bp, Artificial Sequence
  Description of Artificial Sequence: Synthetic oligonucleotide
  Mitotic kinesin microtubule-associated protein Eg5 (Kif11) siRNA
gatgaaactttttgttgttgctt

SEQ ID NO: 4575 - DNA, 23 bp, Artificial Sequence
  Description of Artificial Sequence: Synthetic oligonucleotide
  Mitotic kinesin microtubule-associated protein Eg5 (Kif11) siRNA
atgaaactttttgttgttgcttg

SEQ ID NO: 4576 - DNA, 23 bp, Artificial Sequence
  Description of Artificial Sequence: Synthetic oligonucleotide
  Mitotic kinesin microtubule-associated protein Eg5 (Kif11) siRNA
tgaaactttttgttgttgcttgt

SEQ ID NO: 4577 - DNA, 23 bp, Artificial Sequence
  Description of Artificial Sequence: Synthetic oligonucleotide
  Mitotic kinesin microtubule-associated protein Eg5 (Kif11) siRNA
gaaactttttgttgttgcttgtt

SEQ ID NO: 4578 - DNA, 23 bp, Artificial Sequence
  Description of Artificial Sequence: Synthetic oligonucleotide
  Mitotic kinesin microtubule-associated protein Eg5 (Kif11) siRNA
aaactttttgttgttgcttgttt

SEQ ID NO: 4579 - DNA, 23 bp, Artificial Sequence
  Description of Artificial Sequence: Synthetic oligonucleotide
  Mitotic kinesin microtubule-associated protein Eg5 (Kif11) siRNA
aactttttgttgttgcttgtttg

SEQ ID NO: 4580 - DNA, 23 bp, Artificial Sequence
  Description of Artificial Sequence: Synthetic oligonucleotide
  Mitotic kinesin microtubule-associated protein Eg5 (Kif11) siRNA
actttttgttgttgcttgtttgt

SEQ ID NO: 4581 - DNA, 23 bp, Artificial Sequence
  Description of Artificial Sequence: Synthetic oligonucleotide
  Mitotic kinesin microtubule-associated protein Eg5 (Kif11) siRNA
ctttttgttgttgcttgtttgta

SEQ ID NO: 4582 - DNA, 23 bp, Artificial Sequence
  Description of Artificial Sequence: Synthetic oligonucleotide
  Mitotic kinesin microtubule-associated protein Eg5 (Kif11) siRNA
tttttgttgttgcttgtttgtat

SEQ ID NO: 4583 - DNA, 23 bp, Artificial Sequence
  Description of Artificial Sequence: Synthetic oligonucleotide
  Mitotic kinesin microtubule-associated protein Eg5 (Kif11) siRNA
ttttgttgttgcttgtttgtata

SEQ ID NO: 4584 - DNA, 23 bp, Artificial Sequence
  Description of Artificial Sequence: Synthetic oligonucleotide
  Mitotic kinesin microtubule-associated protein Eg5 (Kif11) siRNA
tttgttgttgcttgtttgtatat

SEQ ID NO: 4585 - DNA, 23 bp, Artificial Sequence
  Description of Artificial Sequence: Synthetic oligonucleotide
  Mitotic kinesin microtubule-associated protein Eg5 (Kif11) siRNA
ttgttgttgcttgtttgtatata

SEQ ID NO: 4586 - DNA, 23 bp, Artificial Sequence
  Description of Artificial Sequence: Synthetic oligonucleotide
  Mitotic kinesin microtubule-associated protein Eg5 (Kif11) siRNA
tgttgttgcttgtttgtatataa

SEQ ID NO: 4587 - DNA, 23 bp, Artificial Sequence
  Description of Artificial Sequence: Synthetic oligonucleotide
  Mitotic kinesin microtubule-associated protein Eg5 (Kif11) siRNA
gttgttgcttgtttgtatataat

SEQ ID NO: 4588 - DNA, 23 bp, Artificial Sequence
  Description of Artificial Sequence: Synthetic oligonucleotide
  Mitotic kinesin microtubule-associated protein Eg5 (Kif11) siRNA
ttgttgcttgtttgtatataata

SEQ ID NO: 4589 - DNA, 23 bp, Artificial Sequence
  Description of Artificial Sequence: Synthetic oligonucleotide
  Mitotic kinesin microtubule-associated protein Eg5 (Kif11) siRNA
tgttgcttgtttgtatataatac

SEQ ID NO: 4590 - DNA, 23 bp, Artificial Sequence
  Description of Artificial Sequence: Synthetic oligonucleotide
  Mitotic kinesin microtubule-associated protein Eg5 (Kif11) siRNA
gttgcttgtttgtatataataca

SEQ ID NO: 4591 - DNA, 23 bp, Artificial Sequence
  Description of Artificial Sequence: Synthetic oligonucleotide
  Mitotic kinesin microtubule-associated protein Eg5 (Kif11) siRNA
ttgcttgtttgtatataatacaa

SEQ ID NO: 4592 - DNA, 23 bp, Artificial Sequence
  Description of Artificial Sequence: Synthetic oligonucleotide
  Mitotic kinesin microtubule-associated protein Eg5 (Kif11) siRNA
tgcttgtttgtatataatacaat

SEQ ID NO: 4593 - DNA, 23 bp, Artificial Sequence
  Description of Artificial Sequence: Synthetic oligonucleotide
  Mitotic kinesin microtubule-associated protein Eg5 (Kif11) siRNA
gcttgtttgtatataatacaatg

SEQ ID NO: 4594 - DNA, 23 bp, Artificial Sequence
  Description of Artificial Sequence: Synthetic oligonucleotide
  Mitotic kinesin microtubule-associated protein Eg5 (Kif11) siRNA
cttgtttgtatataatacaatgt

SEQ ID NO: 4595 - DNA, 23 bp, Artificial Sequence
  Description of Artificial Sequence: Synthetic oligonucleotide
  Mitotic kinesin microtubule-associated protein Eg5 (Kif11) siRNA
ttgtttgtatataatacaatgtg

SEQ ID NO: 4596 - DNA, 23 bp, Artificial Sequence
  Description of Artificial Sequence: Synthetic oligonucleotide
  Mitotic kinesin microtubule-associated protein Eg5 (Kif11) siRNA
tgtttgtatataatacaatgtgt

SEQ ID NO: 4597 - DNA, 23 bp, Artificial Sequence
  Description of Artificial Sequence: Synthetic oligonucleotide
  Mitotic kinesin microtubule-associated protein Eg5 (Kif11) siRNA
gtttgtatataatacaatgtgta

SEQ ID NO: 4598 - DNA, 23 bp, Artificial Sequence
  Description of Artificial Sequence: Synthetic oligonucleotide
  Mitotic kinesin microtubule-associated protein Eg5 (Kif11) siRNA
tttgtatataatacaatgtgtac

SEQ ID NO: 4599 - DNA, 23 bp, Artificial Sequence
  Description of Artificial Sequence: Synthetic oligonucleotide
  Mitotic kinesin microtubule-associated protein Eg5 (Kif11) siRNA
ttgtatataatacaatgtgtaca

SEQ ID NO: 4600 - DNA, 23 bp, Artificial Sequence
  Description of Artificial Sequence: Synthetic oligonucleotide
  Mitotic kinesin microtubule-associated protein Eg5 (Kif11) siRNA
tgtatataatacaatgtgtacat

SEQ ID NO: 4601 - DNA, 23 bp, Artificial Sequence
  Description of Artificial Sequence: Synthetic oligonucleotide
  Mitotic kinesin microtubule-associated protein Eg5 (Kif11) siRNA
gtatataatacaatgtgtacatg

SEQ ID NO: 4602 - DNA, 23 bp, Artificial Sequence
  Description of Artificial Sequence: Synthetic oligonucleotide
  Mitotic kinesin microtubule-associated protein Eg5 (Kif11) siRNA
tatataatacaatgtgtacatgt

SEQ ID NO: 4603 - DNA, 23 bp, Artificial Sequence
  Description of Artificial Sequence: Synthetic oligonucleotide
  Mitotic kinesin microtubule-associated protein Eg5 (Kif11) siRNA
atataatacaatgtgtacatgta

SEQ ID NO: 4604 - DNA, 23 bp, Artificial Sequence
  Description of Artificial Sequence: Synthetic oligonucleotide
  Mitotic kinesin microtubule-associated protein Eg5 (Kif11) siRNA
tataatacaatgtgtacatgtat

SEQ ID NO: 4605 - DNA, 23 bp, Artificial Sequence
  Description of Artificial Sequence: Synthetic oligonucleotide
  Mitotic kinesin microtubule-associated protein Eg5 (Kif11) siRNA
ataatacaatgtgtacatgtatc

SEQ ID NO: 4606 - DNA, 23 bp, Artificial Sequence
  Description of Artificial Sequence: Synthetic oligonucleotide
  Mitotic kinesin microtubule-associated protein Eg5 (Kif11) siRNA
taatacaatgtgtacatgtatct

SEQ ID NO: 4607 - DNA, 23 bp, Artificial Sequence
  Description of Artificial Sequence: Synthetic oligonucleotide
  Mitotic kinesin microtubule-associated protein Eg5 (Kif11) siRNA
aatacaatgtgtacatgtatctt

SEQ ID NO: 4608 - DNA, 23 bp, Artificial Sequence
  Description of Artificial Sequence: Synthetic oligonucleotide
  Mitotic kinesin microtubule-associated protein Eg5 (Kif11) siRNA
atacaatgtgtacatgtatcttt

SEQ ID NO: 4609 - DNA, 23 bp, Artificial Sequence
  Description of Artificial Sequence: Synthetic oligonucleotide
  Mitotic kinesin microtubule-associated protein Eg5 (Kif11) siRNA
tacaatgtgtacatgtatctttt

SEQ ID NO: 4610 - DNA, 23 bp, Artificial Sequence
  Description of Artificial Sequence: Synthetic oligonucleotide
  Mitotic kinesin microtubule-associated protein Eg5 (Kif11) siRNA
acaatgtgtacatgtatcttttt

SEQ ID NO: 4611 - DNA, 23 bp, Artificial Sequence
  Description of Artificial Sequence: Synthetic oligonucleotide
  Mitotic kinesin microtubule-associated protein Eg5 (Kif11) siRNA
caatgtgtacatgtatctttttc

SEQ ID NO: 4612 - DNA, 23 bp, Artificial Sequence
  Description of Artificial Sequence: Synthetic oligonucleotide
  Mitotic kinesin microtubule-associated protein Eg5 (Kif11) siRNA
aatgtgtacatgtatctttttct

SEQ ID NO: 4613 - DNA, 23 bp, Artificial Sequence
  Description of Artificial Sequence: Synthetic oligonucleotide
  Mitotic kinesin microtubule-associated protein Eg5 (Kif11) siRNA
atgtgtacatgtatctttttctc

SEQ ID NO: 4614 - DNA, 23 bp, Artificial Sequence
  Description of Artificial Sequence: Synthetic oligonucleotide
  Mitotic kinesin microtubule-associated protein Eg5 (Kif11) siRNA
tgtgtacatgtatctttttctcg

SEQ ID NO: 4615 - DNA, 23 bp, Artificial Sequence
  Description of Artificial Sequence: Synthetic oligonucleotide
  Mitotic kinesin microtubule-associated protein Eg5 (Kif11) siRNA
gtgtacatgtatctttttctcga

SEQ ID NO: 4616 - DNA, 23 bp, Artificial Sequence
  Description of Artificial Sequence: Synthetic oligonucleotide
  Mitotic kinesin microtubule-associated protein Eg5 (Kif11) siRNA
tgtacatgtatctttttctcgat

SEQ ID NO: 4617 - DNA, 23 bp, Artificial Sequence
  Description of Artificial Sequence: Synthetic oligonucleotide
  Mitotic kinesin microtubule-associated protein Eg5 (Kif11) siRNA
gtacatgtatctttttctcgatt

SEQ ID NO: 4618 - DNA, 23 bp, Artificial Sequence
  Description of Artificial Sequence: Synthetic oligonucleotide
  Mitotic kinesin microtubule-associated protein Eg5 (Kif11) siRNA
tacatgtatctttttctcgattc

SEQ ID NO: 4619 - DNA, 23 bp, Artificial Sequence
  Description of Artificial Sequence: Synthetic oligonucleotide
  Mitotic kinesin microtubule-associated protein Eg5 (Kif11) siRNA
acatgtatctttttctcgattca

SEQ ID NO: 4620 - DNA, 23 bp, Artificial Sequence
  Description of Artificial Sequence: Synthetic oligonucleotide
  Mitotic kinesin microtubule-associated protein Eg5 (Kif11) siRNA
catgtatctttttctcgattcaa

SEQ ID NO: 4621 - DNA, 23 bp, Artificial Sequence
  Description of Artificial Sequence: Synthetic oligonucleotide
  Mitotic kinesin microtubule-associated protein Eg5 (Kif11) siRNA
atgtatctttttctcgattcaaa

SEQ ID NO: 4622 - DNA, 23 bp, Artificial Sequence
  Description of Artificial Sequence: Synthetic oligonucleotide
  Mitotic kinesin microtubule-associated protein Eg5 (Kif11) siRNA
tgtatctttttctcgattcaaat

SEQ ID NO: 4623 - DNA, 23 bp, Artificial Sequence
  Description of Artificial Sequence: Synthetic oligonucleotide
  Mitotic kinesin microtubule-associated protein Eg5 (Kif11) siRNA
gtatctttttctcgattcaaatc

SEQ ID NO: 4624 - DNA, 23 bp, Artificial Sequence
  Description of Artificial Sequence: Synthetic oligonucleotide
  Mitotic kinesin microtubule-associated protein Eg5 (Kif11) siRNA
tatctttttctcgattcaaatct

SEQ ID NO: 4625 - DNA, 23 bp, Artificial Sequence
  Description of Artificial Sequence: Synthetic oligonucleotide
  Mitotic kinesin microtubule-associated protein Eg5 (Kif11) siRNA
atctttttctcgattcaaatctt

SEQ ID NO: 4626 - DNA, 23 bp, Artificial Sequence
  Description of Artificial Sequence: Synthetic oligonucleotide
  Mitotic kinesin microtubule-associated protein Eg5 (Kif11) siRNA
tctttttctcgattcaaatctta

SEQ ID NO: 4627 - DNA, 23 bp, Artificial Sequence
  Description of Artificial Sequence: Synthetic oligonucleotide
  Mitotic kinesin microtubule-associated protein Eg5 (Kif11) siRNA
ctttttctcgattcaaatcttaa

SEQ ID NO: 4628 - DNA, 23 bp, Artificial Sequence
  Description of Artificial Sequence: Synthetic oligonucleotide
  Mitotic kinesin microtubule-associated protein Eg5 (Kif11) siRNA
tttttctcgattcaaatcttaac

SEQ ID NO: 4629 - DNA, 23 bp, Artificial Sequence
  Description of Artificial Sequence: Synthetic oligonucleotide
  Mitotic kinesin microtubule-associated protein Eg5 (Kif11) siRNA
ttttctcgattcaaatcttaacc

SEQ ID NO: 4630 - DNA, 23 bp, Artificial Sequence
  Description of Artificial Sequence: Synthetic oligonucleotide
  Mitotic kinesin microtubule-associated protein Eg5 (Kif11) siRNA
tttctcgattcaaatcttaaccc

SEQ ID NO: 4631 - DNA, 23 bp, Artificial Sequence
  Description of Artificial Sequence: Synthetic oligonucleotide
  Mitotic kinesin microtubule-associated protein Eg5 (Kif11) siRNA
ttctcgattcaaatcttaaccct

SEQ ID NO: 4632 - DNA, 23 bp, Artificial Sequence
  Description of Artificial Sequence: Synthetic oligonucleotide
  Mitotic kinesin microtubule-associated protein Eg5 (Kif11) siRNA
tctcgattcaaatcttaaccctt

SEQ ID NO: 4633 - DNA, 23 bp, Artificial Sequence
  Description of Artificial Sequence: Synthetic oligonucleotide
  Mitotic kinesin microtubule-associated protein Eg5 (Kif11) siRNA
ctcgattcaaatcttaaccctta

SEQ ID NO: 4634 - DNA, 23 bp, Artificial Sequence
  Description of Artificial Sequence: Synthetic oligonucleotide
  Mitotic kinesin microtubule-associated protein Eg5 (Kif11) siRNA
tcgattcaaatcttaacccttag

SEQ ID NO: 4635 - DNA, 23 bp, Artificial Sequence
  Description of Artificial Sequence: Synthetic oligonucleotide
  Mitotic kinesin microtubule-associated protein Eg5 (Kif11) siRNA
cgattcaaatcttaacccttagg

SEQ ID NO: 4636 - DNA, 23 bp, Artificial Sequence
  Description of Artificial Sequence: Synthetic oligonucleotide
  Mitotic kinesin microtubule-associated protein Eg5 (Kif11) siRNA
gattcaaatcttaacccttagga

SEQ ID NO: 4637 - DNA, 23 bp, Artificial Sequence
  Description of Artificial Sequence: Synthetic oligonucleotide
  Mitotic kinesin microtubule-associated protein Eg5 (Kif11) siRNA
attcaaatcttaacccttaggac

SEQ ID NO: 4638 - DNA, 23 bp, Artificial Sequence
  Description of Artificial Sequence: Synthetic oligonucleotide
  Mitotic kinesin microtubule-associated protein Eg5 (Kif11) siRNA
ttcaaatcttaacccttaggact

SEQ ID NO: 4639 - DNA, 23 bp, Artificial Sequence
  Description of Artificial Sequence: Synthetic oligonucleotide
  Mitotic kinesin microtubule-associated protein Eg5 (Kif11) siRNA
tcaaatcttaacccttaggactc

SEQ ID NO: 4640 - DNA, 23 bp, Artificial Sequence
  Description of Artificial Sequence: Synthetic oligonucleotide
  Mitotic kinesin microtubule-associated protein Eg5 (Kif11) siRNA
caaatcttaacccttaggactct

SEQ ID NO: 4641 - DNA, 23 bp, Artificial Sequence
  Description of Artificial Sequence: Synthetic oligonucleotide
  Mitotic kinesin microtubule-associated protein Eg5 (Kif11) siRNA
aaatcttaacccttaggactctg

SEQ ID NO: 4642 - DNA, 23 bp, Artificial Sequence
  Description of Artificial Sequence: Synthetic oligonucleotide
  Mitotic kinesin microtubule-associated protein Eg5 (Kif11) siRNA
aatcttaacccttaggactctgg

SEQ ID NO: 4643 - DNA, 23 bp, Artificial Sequence
  Description of Artificial Sequence: Synthetic oligonucleotide
  Mitotic kinesin microtubule-associated protein Eg5 (Kif11) siRNA
atcttaacccttaggactctggt

SEQ ID NO: 4644 - DNA, 23 bp, Artificial Sequence
  Description of Artificial Sequence: Synthetic oligonucleotide
  Mitotic kinesin microtubule-associated protein Eg5 (Kif11) siRNA
tcttaacccttaggactctggta

SEQ ID NO: 4645 - DNA, 23 bp, Artificial Sequence
  Description of Artificial Sequence: Synthetic oligonucleotide
  Mitotic kinesin microtubule-associated protein Eg5 (Kif11) siRNA
cttaacccttaggactctggtat

SEQ ID NO: 4646 - DNA, 23 bp, Artificial Sequence
  Description of Artificial Sequence: Synthetic oligonucleotide
  Mitotic kinesin microtubule-associated protein Eg5 (Kif11) siRNA
ttaacccttaggactctggtatt

SEQ ID NO: 4647 - DNA, 23 bp, Artificial Sequence
  Description of Artificial Sequence: Synthetic oligonucleotide
  Mitotic kinesin microtubule-associated protein Eg5 (Kif11) siRNA
taacccttaggactctggtattt

SEQ ID NO: 4648 - DNA, 23 bp, Artificial Sequence
  Description of Artificial Sequence: Synthetic oligonucleotide
  Mitotic kinesin microtubule-associated protein Eg5 (Kif11) siRNA
aacccttaggactctggtatttt

SEQ ID NO: 4649 - DNA, 23 bp, Artificial Sequence
  Description of Artificial Sequence: Synthetic oligonucleotide
  Mitotic kinesin microtubule-associated protein Eg5 (Kif11) siRNA
acccttaggactctggtattttt

SEQ ID NO: 4650 - DNA, 23 bp, Artificial Sequence
  Description of Artificial Sequence: Synthetic oligonucleotide
  Mitotic kinesin microtubule-associated protein Eg5 (Kif11) siRNA
cccttaggactctggtatttttg

SEQ ID NO: 4651 - DNA, 23 bp, Artificial Sequence
  Description of Artificial Sequence: Synthetic oligonucleotide
  Mitotic kinesin microtubule-associated protein Eg5 (Kif11) siRNA
ccttaggactctggtatttttga

SEQ ID NO: 4652 - DNA, 23 bp, Artificial Sequence
  Description of Artificial Sequence: Synthetic oligonucleotide
  Mitotic kinesin microtubule-associated protein Eg5 (Kif11) siRNA
cttaggactctggtatttttgat

SEQ ID NO: 4653 - DNA, 23 bp, Artificial Sequence
  Description of Artificial Sequence: Synthetic oligonucleotide
  Mitotic kinesin microtubule-associated protein Eg5 (Kif11) siRNA
ttaggactctggtatttttgatc

SEQ ID NO: 4654 - DNA, 23 bp, Artificial Sequence
  Description of Artificial Sequence: Synthetic oligonucleotide
  Mitotic kinesin microtubule-associated protein Eg5 (Kif11) siRNA
taggactctggtatttttgatct

SEQ ID NO: 4655 - DNA, 23 bp, Artificial Sequence
  Description of Artificial Sequence: Synthetic oligonucleotide
  Mitotic kinesin microtubule-associated protein Eg5 (Kif11) siRNA
aggactctggtatttttgatctg

SEQ ID NO: 4656 - DNA, 23 bp, Artificial Sequence
  Description of Artificial Sequence: Synthetic oligonucleotide
  Mitotic kinesin microtubule-associated protein Eg5 (Kif11) siRNA
ggactctggtatttttgatctgg

SEQ ID NO: 4657 - DNA, 23 bp, Artificial Sequence
  Description of Artificial Sequence: Synthetic oligonucleotide
  Mitotic kinesin microtubule-associated protein Eg5 (Kif11) siRNA
gactctggtatttttgatctggc

SEQ ID NO: 4658 - DNA, 23 bp, Artificial Sequence
  Description of Artificial Sequence: Synthetic oligonucleotide
  Mitotic kinesin microtubule-associated protein Eg5 (Kif11) siRNA
actctggtatttttgatctggca

SEQ ID NO: 4659 - DNA, 23 bp, Artificial Sequence
  Description of Artificial Sequence: Synthetic oligonucleotide
  Mitotic kinesin microtubule-associated protein Eg5 (Kif11) siRNA
ctctggtatttttgatctggcaa

SEQ ID NO: 4660 - DNA, 23 bp, Artificial Sequence
  Description of Artificial Sequence: Synthetic oligonucleotide
  Mitotic kinesin microtubule-associated protein Eg5 (Kif11) siRNA
tctggtatttttgatctggcaac

SEQ ID NO: 4661 - DNA, 23 bp, Artificial Sequence
  Description of Artificial Sequence: Synthetic oligonucleotide
  Mitotic kinesin microtubule-associated protein Eg5 (Kif11) siRNA
ctggtatttttgatctggcaacc

SEQ ID NO: 4662 - DNA, 23 bp, Artificial Sequence
  Description of Artificial Sequence: Synthetic oligonucleotide
  Mitotic kinesin microtubule-associated protein Eg5 (Kif11) siRNA
tggtatttttgatctggcaacca

SEQ ID NO: 4663 - DNA, 23 bp, Artificial Sequence
  Description of Artificial Sequence: Synthetic oligonucleotide
  Mitotic kinesin microtubule-associated protein Eg5 (Kif11) siRNA
ggtatttttgatctggcaaccat

SEQ ID NO: 4664 - DNA, 23 bp, Artificial Sequence
  Description of Artificial Sequence: Synthetic oligonucleotide
  Mitotic kinesin microtubule-associated protein Eg5 (Kif11) siRNA
gtatttttgatctggcaaccata

SEQ ID NO: 4665 - DNA, 23 bp, Artificial Sequence
  Description of Artificial Sequence: Synthetic oligonucleotide
  Mitotic kinesin microtubule-associated protein Eg5 (Kif11) siRNA
tatttttgatctggcaaccatat

SEQ ID NO: 4666 - DNA, 23 bp, Artificial Sequence
  Description of Artificial Sequence: Synthetic oligonucleotide
  Mitotic kinesin microtubule-associated protein Eg5 (Kif11) siRNA
atttttgatctggcaaccatatt

SEQ ID NO: 4667 - DNA, 23 bp, Artificial Sequence
  Description of Artificial Sequence: Synthetic oligonucleotide
  Mitotic kinesin microtubule-associated protein Eg5 (Kif11) siRNA
tttttgatctggcaaccatattt

SEQ ID NO: 4668 - DNA, 23 bp, Artificial Sequence
  Description of Artificial Sequence: Synthetic oligonucleotide
  Mitotic kinesin microtubule-associated protein Eg5 (Kif11) siRNA
ttttgatctggcaaccatatttc

SEQ ID NO: 4669 - DNA, 23 bp, Artificial Sequence
  Description of Artificial Sequence: Synthetic oligonucleotide
  Mitotic kinesin microtubule-associated protein Eg5 (Kif11) siRNA
tttgatctggcaaccatatttct

SEQ ID NO: 4670 - DNA, 23 bp, Artificial Sequence
  Description of Artificial Sequence: Synthetic oligonucleotide
  Mitotic kinesin microtubule-associated protein Eg5 (Kif11) siRNA
ttgatctggcaaccatatttctg

SEQ ID NO: 4671 - DNA, 23 bp, Artificial Sequence
  Description of Artificial Sequence: Synthetic oligonucleotide
  Mitotic kinesin microtubule-associated protein Eg5 (Kif11) siRNA
tgatctggcaaccatatttctgg

SEQ ID NO: 4672 - DNA, 23 bp, Artificial Sequence
  Description of Artificial Sequence: Synthetic oligonucleotide
  Mitotic kinesin microtubule-associated protein Eg5 (Kif11) siRNA
gatctggcaaccatatttctgga

SEQ ID NO: 4673 - DNA, 23 bp, Artificial Sequence
  Description of Artificial Sequence: Synthetic oligonucleotide
  Mitotic kinesin microtubule-associated protein Eg5 (Kif11) siRNA
atctggcaaccatatttctggaa

SEQ ID NO: 4674 - DNA, 23 bp, Artificial Sequence
  Description of Artificial Sequence: Synthetic oligonucleotide
  Mitotic kinesin microtubule-associated protein Eg5 (Kif11) siRNA
tctggcaaccatatttctggaag

SEQ ID NO: 4675 - DNA, 23 bp, Artificial Sequence
  Description of Artificial Sequence: Synthetic oligonucleotide
  Mitotic kinesin microtubule-associated protein Eg5 (Kif11) siRNA
ctggcaaccatatttctggaagt

SEQ ID NO: 4676 - DNA, 23 bp, Artificial Sequence
  Description of Artificial Sequence: Synthetic oligonucleotide
  Mitotic kinesin microtubule-associated protein Eg5 (Kif11) siRNA
tggcaaccatatttctggaagtt

SEQ ID NO: 4677 - DNA, 23 bp, Artificial Sequence
  Description of Artificial Sequence: Synthetic oligonucleotide
  Mitotic kinesin microtubule-associated protein Eg5 (Kif11) siRNA
ggcaaccatatttctggaagttg

SEQ ID NO: 4678 - DNA, 23 bp, Artificial Sequence
  Description of Artificial Sequence: Synthetic oligonucleotide
  Mitotic kinesin microtubule-associated protein Eg5 (Kif11) siRNA
gcaaccatatttctggaagttga

SEQ ID NO: 4679 - DNA, 23 bp, Artificial Sequence
  Description of Artificial Sequence: Synthetic oligonucleotide
  Mitotic kinesin microtubule-associated protein Eg5 (Kif11) siRNA
caaccatatttctggaagttgag

SEQ ID NO: 4680 - DNA, 23 bp, Artificial Sequence
  Description of Artificial Sequence: Synthetic oligonucleotide
  Mitotic kinesin microtubule-associated protein Eg5 (Kif11) siRNA
aaccatatttctggaagttgaga

SEQ ID NO: 4681 - DNA, 23 bp, Artificial Sequence
  Description of Artificial Sequence: Synthetic oligonucleotide
  Mitotic kinesin microtubule-associated protein Eg5 (Kif11) siRNA
accatatttctggaagttgagat

SEQ ID NO: 4682 - DNA, 23 bp, Artificial Sequence
  Description of Artificial Sequence: Synthetic oligonucleotide
  Mitotic kinesin microtubule-associated protein Eg5 (Kif11) siRNA
ccatatttctggaagttgagatg

SEQ ID NO: 4683 - DNA, 23 bp, Artificial Sequence
  Description of Artificial Sequence: Synthetic oligonucleotide
  Mitotic kinesin microtubule-associated protein Eg5 (Kif11) siRNA
catatttctggaagttgagatgt

SEQ ID NO: 4684 - DNA, 23 bp, Artificial Sequence
  Description of Artificial Sequence: Synthetic oligonucleotide
  Mitotic kinesin microtubule-associated protein Eg5 (Kif11) siRNA
atatttctggaagttgagatgtt

SEQ ID NO: 4685 - DNA, 23 bp, Artificial Sequence
  Description of Artificial Sequence: Synthetic oligonucleotide
  Mitotic kinesin microtubule-associated protein Eg5 (Kif11) siRNA
tatttctggaagttgagatgttt

SEQ ID NO: 4686 - DNA, 23 bp, Artificial Sequence
  Description of Artificial Sequence: Synthetic oligonucleotide
  Mitotic kinesin microtubule-associated protein Eg5 (Kif11) siRNA
atttctggaagttgagatgtttc

SEQ ID NO: 4687 - DNA, 23 bp, Artificial Sequence
  Description of Artificial Sequence: Synthetic oligonucleotide
  Mitotic kinesin microtubule-associated protein Eg5 (Kif11) siRNA
tttctggaagttgagatgtttca

SEQ ID NO: 4688 - DNA, 23 bp, Artificial Sequence
  Description of Artificial Sequence: Synthetic oligonucleotide
  Mitotic kinesin microtubule-associated protein Eg5 (Kif11) siRNA
ttctggaagttgagatgtttcag

SEQ ID NO: 4689 - DNA, 23 bp, Artificial Sequence
  Description of Artificial Sequence: Synthetic oligonucleotide
  Mitotic kinesin microtubule-associated protein Eg5 (Kif11) siRNA
tctggaagttgagatgtttcagc

SEQ ID NO: 4690 - DNA, 23 bp, Artificial Sequence
  Description of Artificial Sequence: Synthetic oligonucleotide
  Mitotic kinesin microtubule-associated protein Eg5 (Kif11) siRNA
ctggaagttgagatgtttcagct

SEQ ID NO: 4691 - DNA, 23 bp, Artificial Sequence
  Description of Artificial Sequence: Synthetic oligonucleotide
  Mitotic kinesin microtubule-associated protein Eg5 (Kif11) siRNA
tggaagttgagatgtttcagctt

SEQ ID NO: 4692 - DNA, 23 bp, Artificial Sequence
  Description of Artificial Sequence: Synthetic oligonucleotide
  Mitotic kinesin microtubule-associated protein Eg5 (Kif11) siRNA
ggaagttgagatgtttcagcttg

SEQ ID NO: 4693 - DNA, 23 bp, Artificial Sequence
  Description of Artificial Sequence: Synthetic oligonucleotide
  Mitotic kinesin microtubule-associated protein Eg5 (Kif11) siRNA
gaagttgagatgtttcagcttga

SEQ ID NO: 4694 - DNA, 23 bp, Artificial Sequence
  Description of Artificial Sequence: Synthetic oligonucleotide
  Mitotic kinesin microtubule-associated protein Eg5 (Kif11) siRNA
aagttgagatgtttcagcttgaa

SEQ ID NO: 4695 - DNA, 23 bp, Artificial Sequence
  Description of Artificial Sequence: Synthetic oligonucleotide
  Mitotic kinesin microtubule-associated protein Eg5 (Kif11) siRNA
agttgagatgtttcagcttgaag

SEQ ID NO: 4696 - DNA, 23 bp, Artificial Sequence
  Description of Artificial Sequence: Synthetic oligonucleotide
  Mitotic kinesin microtubule-associated protein Eg5 (Kif11) siRNA
gttgagatgtttcagcttgaaga

SEQ ID NO: 4697 - DNA, 23 bp, Artificial Sequence
  Description of Artificial Sequence: Synthetic oligonucleotide
  Mitotic kinesin microtubule-associated protein Eg5 (Kif11) siRNA
ttgagatgtttcagcttgaagaa

SEQ ID NO: 4698 - DNA, 23 bp, Artificial Sequence
  Description of Artificial Sequence: Synthetic oligonucleotide
  Mitotic kinesin microtubule-associated protein Eg5 (Kif11) siRNA
tgagatgtttcagcttgaagaac

SEQ ID NO: 4699 - DNA, 23 bp, Artificial Sequence
  Description of Artificial Sequence: Synthetic oligonucleotide
  Mitotic kinesin microtubule-associated protein Eg5 (Kif11) siRNA
gagatgtttcagcttgaagaacc

SEQ ID NO: 4700 - DNA, 23 bp, Artificial Sequence
  Description of Artificial Sequence: Synthetic oligonucleotide
  Mitotic kinesin microtubule-associated protein Eg5 (Kif11) siRNA
agatgtttcagcttgaagaacca

SEQ ID NO: 4701 - DNA, 23 bp, Artificial Sequence
  Description of Artificial Sequence: Synthetic oligonucleotide
  Mitotic kinesin microtubule-associated protein Eg5 (Kif11) siRNA
gatgtttcagcttgaagaaccaa

SEQ ID NO: 4702 - DNA, 23 bp, Artificial Sequence
  Description of Artificial Sequence: Synthetic oligonucleotide
  Mitotic kinesin microtubule-associated protein Eg5 (Kif11) siRNA
atgtttcagcttgaagaaccaaa

SEQ ID NO: 4703 - DNA, 23 bp, Artificial Sequence
  Description of Artificial Sequence: Synthetic oligonucleotide
  Mitotic kinesin microtubule-associated protein Eg5 (Kif11) siRNA
tgtttcagcttgaagaaccaaaa

SEQ ID NO: 4704 - DNA, 23 bp, Artificial Sequence
  Description of Artificial Sequence: Synthetic oligonucleotide
  Mitotic kinesin microtubule-associated protein Eg5 (Kif11) siRNA
gtttcagcttgaagaaccaaaac

SEQ ID NO: 4705 - DNA, 23 bp, Artificial Sequence
  Description of Artificial Sequence: Synthetic oligonucleotide
  Mitotic kinesin microtubule-associated protein Eg5 (Kif11) siRNA
tttcagcttgaagaaccaaaaca

SEQ ID NO: 4706 - DNA, 23 bp, Artificial Sequence
  Description of Artificial Sequence: Synthetic oligonucleotide
  Mitotic kinesin microtubule-associated protein Eg5 (Kif11) siRNA
ttcagcttgaagaaccaaaacag

SEQ ID NO: 4707 - DNA, 23 bp, Artificial Sequence
  Description of Artificial Sequence: Synthetic oligonucleotide
  Mitotic kinesin microtubule-associated protein Eg5 (Kif11) siRNA
tcagcttgaagaaccaaaacaga

SEQ ID NO: 4708 - DNA, 23 bp, Artificial Sequence
  Description of Artificial Sequence: Synthetic oligonucleotide
  Mitotic kinesin microtubule-associated protein Eg5 (Kif11) siRNA
cagcttgaagaaccaaaacagaa

SEQ ID NO: 4709 - DNA, 23 bp, Artificial Sequence
  Description of Artificial Sequence: Synthetic oligonucleotide
  Mitotic kinesin microtubule-associated protein Eg5 (Kif11) siRNA
agcttgaagaaccaaaacagaag

SEQ ID NO: 4710 - DNA, 23 bp, Artificial Sequence
  Description of Artificial Sequence: Synthetic oligonucleotide
  Mitotic kinesin microtubule-associated protein Eg5 (Kif11) siRNA
gcttgaagaaccaaaacagaagg

SEQ ID NO: 4711 - DNA, 23 bp, Artificial Sequence
  Description of Artificial Sequence: Synthetic oligonucleotide
  Mitotic kinesin microtubule-associated protein Eg5 (Kif11) siRNA
cttgaagaaccaaaacagaagga

SEQ ID NO: 4712 - DNA, 23 bp, Artificial Sequence
  Description of Artificial Sequence: Synthetic oligonucleotide
  Mitotic kinesin microtubule-associated protein Eg5 (Kif11) siRNA
ttgaagaaccaaaacagaaggaa

SEQ ID NO: 4713 - DNA, 23 bp, Artificial Sequence
  Description of Artificial Sequence: Synthetic oligonucleotide
  Mitotic kinesin microtubule-associated protein Eg5 (Kif11) siRNA
tgaagaaccaaaacagaaggaat

SEQ ID NO: 4714 - DNA, 23 bp, Artificial Sequence
  Description of Artificial Sequence: Synthetic oligonucleotide
  Mitotic kinesin microtubule-associated protein Eg5 (Kif11) siRNA
gaagaaccaaaacagaaggaata

SEQ ID NO: 4715 - DNA, 23 bp, Artificial Sequence
  Description of Artificial Sequence: Synthetic oligonucleotide
  Mitotic kinesin microtubule-associated protein Eg5 (Kif11) siRNA
aagaaccaaaacagaaggaatat

SEQ ID NO: 4716 - DNA, 23 bp, Artificial Sequence
  Description of Artificial Sequence: Synthetic oligonucleotide
  Mitotic kinesin microtubule-associated protein Eg5 (Kif11) siRNA
agaaccaaaacagaaggaatatg

SEQ ID NO: 4717 - DNA, 23 bp, Artificial Sequence
  Description of Artificial Sequence: Synthetic oligonucleotide
  Mitotic kinesin microtubule-associated protein Eg5 (Kif11) siRNA
gaaccaaaacagaaggaatatgt

SEQ ID NO: 4718 - DNA, 23 bp, Artificial Sequence
  Description of Artificial Sequence: Synthetic oligonucleotide
  Mitotic kinesin microtubule-associated protein Eg5 (Kif11) siRNA
aaccaaaacagaaggaatatgta

SEQ ID NO: 4719 - DNA, 23 bp, Artificial Sequence
  Description of Artificial Sequence: Synthetic oligonucleotide
  Mitotic kinesin microtubule-associated protein Eg5 (Kif11) siRNA
accaaaacagaaggaatatgtac

SEQ ID NO: 4720 - DNA, 23 bp, Artificial Sequence
  Description of Artificial Sequence: Synthetic oligonucleotide
  Mitotic kinesin microtubule-associated protein Eg5 (Kif11) siRNA
ccaaaacagaaggaatatgtaca

SEQ ID NO: 4721 - DNA, 23 bp, Artificial Sequence
  Description of Artificial Sequence: Synthetic oligonucleotide
  Mitotic kinesin microtubule-associated protein Eg5 (Kif11) siRNA
caaaacagaaggaatatgtacaa

SEQ ID NO: 4722 - DNA, 23 bp, Artificial Sequence
  Description of Artificial Sequence: Synthetic oligonucleotide
  Mitotic kinesin microtubule-associated protein Eg5 (Kif11) siRNA
aaaacagaaggaatatgtacaaa

SEQ ID NO: 4723 - DNA, 23 bp, Artificial Sequence
  Description of Artificial Sequence: Synthetic oligonucleotide
  Mitotic kinesin microtubule-associated protein Eg5 (Kif11) siRNA
aaacagaaggaatatgtacaaag

SEQ ID NO: 4724 - DNA, 23 bp, Artificial Sequence
  Description of Artificial Sequence: Synthetic oligonucleotide
  Mitotic kinesin microtubule-associated protein Eg5 (Kif11) siRNA
aacagaaggaatatgtacaaaga

SEQ ID NO: 4725 - DNA, 23 bp, Artificial Sequence
  Description of Artificial Sequence: Synthetic oligonucleotide
  Mitotic kinesin microtubule-associated protein Eg5 (Kif11) siRNA
acagaaggaatatgtacaaagaa

SEQ ID NO: 4726 - DNA, 23 bp, Artificial Sequence
  Description of Artificial Sequence: Synthetic oligonucleotide
  Mitotic kinesin microtubule-associated protein Eg5 (Kif11) siRNA
cagaaggaatatgtacaaagaat

SEQ ID NO: 4727 - DNA, 23 bp, Artificial Sequence
  Description of Artificial Sequence: Synthetic oligonucleotide
  Mitotic kinesin microtubule-associated protein Eg5 (Kif11) siRNA
agaaggaatatgtacaaagaata

SEQ ID NO: 4728 - DNA, 23 bp, Artificial Sequence
  Description of Artificial Sequence: Synthetic oligonucleotide
  Mitotic kinesin microtubule-associated protein Eg5 (Kif11) siRNA
gaaggaatatgtacaaagaataa

SEQ ID NO: 4729 - DNA, 23 bp, Artificial Sequence
  Description of Artificial Sequence: Synthetic oligonucleotide
  Mitotic kinesin microtubule-associated protein Eg5 (Kif11) siRNA
aaggaatatgtacaaagaataaa

SEQ ID NO: 4730 - DNA, 23 bp, Artificial Sequence
  Description of Artificial Sequence: Synthetic oligonucleotide
  Mitotic kinesin microtubule-associated protein Eg5 (Kif11) siRNA
aggaatatgtacaaagaataaat

SEQ ID NO: 4731 - DNA, 23 bp, Artificial Sequence
  Description of Artificial Sequence: Synthetic oligonucleotide
  Mitotic kinesin microtubule-associated protein Eg5 (Kif11) siRNA
ggaatatgtacaaagaataaatt

SEQ ID NO: 4732 - DNA, 23 bp, Artificial Sequence
  Description of Artificial Sequence: Synthetic oligonucleotide
  Mitotic kinesin microtubule-associated protein Eg5 (Kif11) siRNA
gaatatgtacaaagaataaattt

SEQ ID NO: 4733 - DNA, 23 bp, Artificial Sequence
  Description of Artificial Sequence: Synthetic oligonucleotide
  Mitotic kinesin microtubule-associated protein Eg5 (Kif11) siRNA
aatatgtacaaagaataaatttt

SEQ ID NO: 4734 - DNA, 23 bp, Artificial Sequence
  Description of Artificial Sequence: Synthetic oligonucleotide
  Mitotic kinesin microtubule-associated protein Eg5 (Kif11) siRNA
atatgtacaaagaataaattttc

SEQ ID NO: 4735 - DNA, 23 bp, Artificial Sequence
  Description of Artificial Sequence: Synthetic oligonucleotide
  Mitotic kinesin microtubule-associated protein Eg5 (Kif11) siRNA
tatgtacaaagaataaattttct

SEQ ID NO: 4736 - DNA, 23 bp, Artificial Sequence
  Description of Artificial Sequence: Synthetic oligonucleotide
  Mitotic kinesin microtubule-associated protein Eg5 (Kif11) siRNA
atgtacaaagaataaattttctg

SEQ ID NO: 4737 - DNA, 23 bp, Artificial Sequence
  Description of Artificial Sequence: Synthetic oligonucleotide
  Mitotic kinesin microtubule-associated protein Eg5 (Kif11) siRNA
tgtacaaagaataaattttctgc

SEQ ID NO: 4738 - DNA, 23 bp, Artificial Sequence
  Description of Artificial Sequence: Synthetic oligonucleotide
  Mitotic kinesin microtubule-associated protein Eg5 (Kif11) siRNA
gtacaaagaataaattttctgct

SEQ ID NO: 4739 - DNA, 23 bp, Artificial Sequence
  Description of Artificial Sequence: Synthetic oligonucleotide
  Mitotic kinesin microtubule-associated protein Eg5 (Kif11) siRNA
tacaaagaataaattttctgctc

SEQ ID NO: 4740 - DNA, 23 bp, Artificial Sequence
  Description of Artificial Sequence: Synthetic oligonucleotide
  Mitotic kinesin microtubule-associated protein Eg5 (Kif11) siRNA
acaaagaataaattttctgctca

SEQ ID NO: 4741 - DNA, 23 bp, Artificial Sequence
  Description of Artificial Sequence: Synthetic oligonucleotide
  Mitotic kinesin microtubule-associated protein Eg5 (Kif11) siRNA
caaagaataaattttctgctcac

SEQ ID NO: 4742 - DNA, 23 bp, Artificial Sequence
  Description of Artificial Sequence: Synthetic oligonucleotide
  Mitotic kinesin microtubule-associated protein Eg5 (Kif11) siRNA
aaagaataaattttctgctcacg

SEQ ID NO: 4743 - DNA, 23 bp, Artificial Sequence
  Description of Artificial Sequence: Synthetic oligonucleotide
  Mitotic kinesin microtubule-associated protein Eg5 (Kif11) siRNA
aagaataaattttctgctcacga

SEQ ID NO: 4744 - DNA, 23 bp, Artificial Sequence
  Description of Artificial Sequence: Synthetic oligonucleotide
  Mitotic kinesin microtubule-associated protein Eg5 (Kif11) siRNA
agaataaattttctgctcacgat

SEQ ID NO: 4745 - DNA, 23 bp, Artificial Sequence
  Description of Artificial Sequence: Synthetic oligonucleotide
  Mitotic kinesin microtubule-associated protein Eg5 (Kif11) siRNA
gaataaattttctgctcacgatg

SEQ ID NO: 4746 - DNA, 23 bp, Artificial Sequence
  Description of Artificial Sequence: Synthetic oligonucleotide
  Mitotic kinesin microtubule-associated protein Eg5 (Kif11) siRNA
aataaattttctgctcacgatga

SEQ ID NO: 4747 - DNA, 23 bp, Artificial Sequence
  Description of Artificial Sequence: Synthetic oligonucleotide
  Mitotic kinesin microtubule-associated protein Eg5 (Kif11) siRNA
ataaattttctgctcacgatgag

SEQ ID NO: 4748 - DNA, 23 bp, Artificial Sequence
  Description of Artificial Sequence: Synthetic oligonucleotide
  Mitotic kinesin microtubule-associated protein Eg5 (Kif11) siRNA
taaattttctgctcacgatgagt

SEQ ID NO: 4749 - DNA, 23 bp, Artificial Sequence
  Description of Artificial Sequence: Synthetic oligonucleotide
  Mitotic kinesin microtubule-associated protein Eg5 (Kif11) siRNA
aaattttctgctcacgatgagtt

SEQ ID NO: 4750 - DNA, 23 bp, Artificial Sequence
  Description of Artificial Sequence: Synthetic oligonucleotide
  Mitotic kinesin microtubule-associated protein Eg5 (Kif11) siRNA
aattttctgctcacgatgagttt

SEQ ID NO: 4751 - DNA, 23 bp, Artificial Sequence
  Description of Artificial Sequence: Synthetic oligonucleotide
  Mitotic kinesin microtubule-associated protein Eg5 (Kif11) siRNA
attttctgctcacgatgagttta

SEQ ID NO: 4752 - DNA, 23 bp, Artificial Sequence
  Description of Artificial Sequence: Synthetic oligonucleotide
  Mitotic kinesin microtubule-associated protein Eg5 (Kif11) siRNA
ttttctgctcacgatgagtttag

SEQ ID NO: 4753 - DNA, 23 bp, Artificial Sequence
  Description of Artificial Sequence: Synthetic oligonucleotide
  Mitotic kinesin microtubule-associated protein Eg5 (Kif11) siRNA
tttctgctcacgatgagtttagt

SEQ ID NO: 4754 - DNA, 23 bp, Artificial Sequence
  Description of Artificial Sequence: Synthetic oligonucleotide
  Mitotic kinesin microtubule-associated protein Eg5 (Kif11) siRNA
ttctgctcacgatgagtttagtg

SEQ ID NO: 4755 - DNA, 23 bp, Artificial Sequence
  Description of Artificial Sequence: Synthetic oligonucleotide
  Mitotic kinesin microtubule-associated protein Eg5 (Kif11) siRNA
tctgctcacgatgagtttagtgt

SEQ ID NO: 4756 - DNA, 23 bp, Artificial Sequence
  Description of Artificial Sequence: Synthetic oligonucleotide
  Mitotic kinesin microtubule-associated protein Eg5 (Kif11) siRNA
ctgctcacgatgagtttagtgtg

SEQ ID NO: 4757 - DNA, 23 bp, Artificial Sequence
  Description of Artificial Sequence: Synthetic oligonucleotide
  Mitotic kinesin microtubule-associated protein Eg5 (Kif11) siRNA
tgctcacgatgagtttagtgtgt

SEQ ID NO: 4758 - DNA, 23 bp, Artificial Sequence
  Description of Artificial Sequence: Synthetic oligonucleotide
  Mitotic kinesin microtubule-associated protein Eg5 (Kif11) siRNA
gctcacgatgagtttagtgtgta

SEQ ID NO: 4759 - DNA, 23 bp, Artificial Sequence
  Description of Artificial Sequence: Synthetic oligonucleotide
  Mitotic kinesin microtubule-associated protein Eg5 (Kif11) siRNA
ctcacgatgagtttagtgtgtaa

SEQ ID NO: 4760 - DNA, 23 bp, Artificial Sequence
  Description of Artificial Sequence: Synthetic oligonucleotide
  Mitotic kinesin microtubule-associated protein Eg5 (Kif11) siRNA
tcacgatgagtttagtgtgtaaa

SEQ ID NO: 4761 - DNA, 23 bp, Artificial Sequence
  Description of Artificial Sequence: Synthetic oligonucleotide
  Mitotic kinesin microtubule-associated protein Eg5 (Kif11) siRNA
cacgatgagtttagtgtgtaaag

SEQ ID NO: 4762 - DNA, 23 bp, Artificial Sequence
  Description of Artificial Sequence: Synthetic oligonucleotide
  Mitotic kinesin microtubule-associated protein Eg5 (Kif11) siRNA
acgatgagtttagtgtgtaaagt

SEQ ID NO: 4763 - DNA, 23 bp, Artificial Sequence
  Description of Artificial Sequence: Synthetic oligonucleotide
  Mitotic kinesin microtubule-associated protein Eg5 (Kif11) siRNA
cgatgagtttagtgtgtaaagtt

SEQ ID NO: 4764 - DNA, 23 bp, Artificial Sequence
  Description of Artificial Sequence: Synthetic oligonucleotide
  Mitotic kinesin microtubule-associated protein Eg5 (Kif11) siRNA
gatgagtttagtgtgtaaagttt

SEQ ID NO: 4765 - DNA, 23 bp, Artificial Sequence
  Description of Artificial Sequence: Synthetic oligonucleotide
  Mitotic kinesin microtubule-associated protein Eg5 (Kif11) siRNA
atgagtttagtgtgtaaagttta

SEQ ID NO: 4766 - DNA, 23 bp, Artificial Sequence
  Description of Artificial Sequence: Synthetic oligonucleotide
  Mitotic kinesin microtubule-associated protein Eg5 (Kif11) siRNA
tgagtttagtgtgtaaagtttag

SEQ ID NO: 4767 - DNA, 23 bp, Artificial Sequence
  Description of Artificial Sequence: Synthetic oligonucleotide
  Mitotic kinesin microtubule-associated protein Eg5 (Kif11) siRNA
gagtttagtgtgtaaagtttaga

SEQ ID NO: 4768 - DNA, 23 bp, Artificial Sequence
  Description of Artificial Sequence: Synthetic oligonucleotide
  Mitotic kinesin microtubule-associated protein Eg5 (Kif11) siRNA
agtttagtgtgtaaagtttagag

SEQ ID NO: 4769 - DNA, 23 bp, Artificial Sequence
  Description of Artificial Sequence: Synthetic oligonucleotide
  Mitotic kinesin microtubule-associated protein Eg5 (Kif11) siRNA
gtttagtgtgtaaagtttagaga

SEQ ID NO: 4770 - DNA, 23 bp, Artificial Sequence
  Description of Artificial Sequence: Synthetic oligonucleotide
  Mitotic kinesin microtubule-associated protein Eg5 (Kif11) siRNA
tttagtgtgtaaagtttagagac

SEQ ID NO: 4771 - DNA, 23 bp, Artificial Sequence
  Description of Artificial Sequence: Synthetic oligonucleotide
  Mitotic kinesin microtubule-associated protein Eg5 (Kif11) siRNA
ttagtgtgtaaagtttagagaca

SEQ ID NO: 4772 - DNA, 23 bp, Artificial Sequence
  Description of Artificial Sequence: Synthetic oligonucleotide
  Mitotic kinesin microtubule-associated protein Eg5 (Kif11) siRNA
tagtgtgtaaagtttagagacat

SEQ ID NO: 4773 - DNA, 23 bp, Artificial Sequence
  Description of Artificial Sequence: Synthetic oligonucleotide
  Mitotic kinesin microtubule-associated protein Eg5 (Kif11) siRNA
agtgtgtaaagtttagagacatc

SEQ ID NO: 4774 - DNA, 23 bp, Artificial Sequence
  Description of Artificial Sequence: Synthetic oligonucleotide
  Mitotic kinesin microtubule-associated protein Eg5 (Kif11) siRNA
gtgtgtaaagtttagagacatct

SEQ ID NO: 4775 - DNA, 23 bp, Artificial Sequence
  Description of Artificial Sequence: Synthetic oligonucleotide
  Mitotic kinesin microtubule-associated protein Eg5 (Kif11) siRNA
tgtgtaaagtttagagacatctg

SEQ ID NO: 4776 - DNA, 23 bp, Artificial Sequence
  Description of Artificial Sequence: Synthetic oligonucleotide
  Mitotic kinesin microtubule-associated protein Eg5 (Kif11) siRNA
gtgtaaagtttagagacatctga

SEQ ID NO: 4777 - DNA, 23 bp, Artificial Sequence
  Description of Artificial Sequence: Synthetic oligonucleotide
  Mitotic kinesin microtubule-associated protein Eg5 (Kif11) siRNA
tgtaaagtttagagacatctgac

SEQ ID NO: 4778 - DNA, 23 bp, Artificial Sequence
  Description of Artificial Sequence: Synthetic oligonucleotide
  Mitotic kinesin microtubule-associated protein Eg5 (Kif11) siRNA
gtaaagtttagagacatctgact

SEQ ID NO: 4779 - DNA, 23 bp, Artificial Sequence
  Description of Artificial Sequence: Synthetic oligonucleotide
  Mitotic kinesin microtubule-associated protein Eg5 (Kif11) siRNA
taaagtttagagacatctgactt

SEQ ID NO: 4780 - DNA, 23 bp, Artificial Sequence
  Description of Artificial Sequence: Synthetic oligonucleotide
  Mitotic kinesin microtubule-associated protein Eg5 (Kif11) siRNA
aaagtttagagacatctgacttt

SEQ ID NO: 4781 - DNA, 23 bp, Artificial Sequence
  Description of Artificial Sequence: Synthetic oligonucleotide
  Mitotic kinesin microtubule-associated protein Eg5 (Kif11) siRNA
aagtttagagacatctgactttg

SEQ ID NO: 4782 - DNA, 23 bp, Artificial Sequence
  Description of Artificial Sequence: Synthetic oligonucleotide
  Mitotic kinesin microtubule-associated protein Eg5 (Kif11) siRNA
agtttagagacatctgactttga

SEQ ID NO: 4783 - DNA, 23 bp, Artificial Sequence
  Description of Artificial Sequence: Synthetic oligonucleotide
  Mitotic kinesin microtubule-associated protein Eg5 (Kif11) siRNA
gtttagagacatctgactttgat

SEQ ID NO: 4784 - DNA, 23 bp, Artificial Sequence
  Description of Artificial Sequence: Synthetic oligonucleotide
  Mitotic kinesin microtubule-associated protein Eg5 (Kif11) siRNA
tttagagacatctgactttgata

SEQ ID NO: 4785 - DNA, 23 bp, Artificial Sequence
  Description of Artificial Sequence: Synthetic oligonucleotide
  Mitotic kinesin microtubule-associated protein Eg5 (Kif11) siRNA
ttagagacatctgactttgatag

SEQ ID NO: 4786 - DNA, 23 bp, Artificial Sequence
  Description of Artificial Sequence: Synthetic oligonucleotide
  Mitotic kinesin microtubule-associated protein Eg5 (Kif11) siRNA
tagagacatctgactttgatagc

SEQ ID NO: 4787 - DNA, 23 bp, Artificial Sequence
  Description of Artificial Sequence: Synthetic oligonucleotide
  Mitotic kinesin microtubule-associated protein Eg5 (Kif11) siRNA
agagacatctgactttgatagct

SEQ ID NO: 4788 - DNA, 23 bp, Artificial Sequence
  Description of Artificial Sequence: Synthetic oligonucleotide
  Mitotic kinesin microtubule-associated protein Eg5 (Kif11) siRNA
gagacatctgactttgatagcta

SEQ ID NO: 4789 - DNA, 23 bp, Artificial Sequence
  Description of Artificial Sequence: Synthetic oligonucleotide
  Mitotic kinesin microtubule-associated protein Eg5 (Kif11) siRNA
agacatctgactttgatagctaa

SEQ ID NO: 4790 - DNA, 23 bp, Artificial Sequence
  Description of Artificial Sequence: Synthetic oligonucleotide
  Mitotic kinesin microtubule-associated protein Eg5 (Kif11) siRNA
gacatctgactttgatagctaaa

SEQ ID NO: 4791 - DNA, 23 bp, Artificial Sequence
  Description of Artificial Sequence: Synthetic oligonucleotide
  Mitotic kinesin microtubule-associated protein Eg5 (Kif11) siRNA
acatctgactttgatagctaaat

SEQ ID NO: 4792 - DNA, 23 bp, Artificial Sequence
  Description of Artificial Sequence: Synthetic oligonucleotide
  Mitotic kinesin microtubule-associated protein Eg5 (Kif11) siRNA
catctgactttgatagctaaatt

SEQ ID NO: 4793 - DNA, 23 bp, Artificial Sequence
  Description of Artificial Sequence: Synthetic oligonucleotide
  Mitotic kinesin microtubule-associated protein Eg5 (Kif11) siRNA
atctgactttgatagctaaatta

SEQ ID NO: 4794 - DNA, 23 bp, Artificial Sequence
  Description of Artificial Sequence: Synthetic oligonucleotide
  Mitotic kinesin microtubule-associated protein Eg5 (Kif11) siRNA
tctgactttgatagctaaattaa

SEQ ID NO: 4795 - DNA, 23 bp, Artificial Sequence
  Description of Artificial Sequence: Synthetic oligonucleotide
  Mitotic kinesin microtubule-associated protein Eg5 (Kif11) siRNA
ctgactttgatagctaaattaaa

SEQ ID NO: 4796 - DNA, 23 bp, Artificial Sequence
  Description of Artificial Sequence: Synthetic oligonucleotide
  Mitotic kinesin microtubule-associated protein Eg5 (Kif11) siRNA
tgactttgatagctaaattaaac

SEQ ID NO: 4797 - DNA, 23 bp, Artificial Sequence
  Description of Artificial Sequence: Synthetic oligonucleotide
  Mitotic kinesin microtubule-associated protein Eg5 (Kif11) siRNA
gactttgatagctaaattaaacc

SEQ ID NO: 4798 - DNA, 23 bp, Artificial Sequence
  Description of Artificial Sequence: Synthetic oligonucleotide
  Mitotic kinesin microtubule-associated protein Eg5 (Kif11) siRNA
actttgatagctaaattaaacca

SEQ ID NO: 4799 - DNA, 23 bp, Artificial Sequence
  Description of Artificial Sequence: Synthetic oligonucleotide
  Mitotic kinesin microtubule-associated protein Eg5 (Kif11) siRNA
ctttgatagctaaattaaaccaa

SEQ ID NO: 4800 - DNA, 23 bp, Artificial Sequence
  Description of Artificial Sequence: Synthetic oligonucleotide
  Mitotic kinesin microtubule-associated protein Eg5 (Kif11) siRNA
tttgatagctaaattaaaccaaa

SEQ ID NO: 4801 - DNA, 23 bp, Artificial Sequence
  Description of Artificial Sequence: Synthetic oligonucleotide
  Mitotic kinesin microtubule-associated protein Eg5 (Kif11) siRNA
ttgatagctaaattaaaccaaac

SEQ ID NO: 4802 - DNA, 23 bp, Artificial Sequence
  Description of Artificial Sequence: Synthetic oligonucleotide
  Mitotic kinesin microtubule-associated protein Eg5 (Kif11) siRNA
tgatagctaaattaaaccaaacc

SEQ ID NO: 4803 - DNA, 23 bp, Artificial Sequence
  Description of Artificial Sequence: Synthetic oligonucleotide
  Mitotic kinesin microtubule-associated protein Eg5 (Kif11) siRNA
gatagctaaattaaaccaaaccc

SEQ ID NO: 4804 - DNA, 23 bp, Artificial Sequence
  Description of Artificial Sequence: Synthetic oligonucleotide
  Mitotic kinesin microtubule-associated protein Eg5 (Kif11) siRNA
atagctaaattaaaccaaaccct

SEQ ID NO: 4805 - DNA, 23 bp, Artificial Sequence
  Description of Artificial Sequence: Synthetic oligonucleotide
  Mitotic kinesin microtubule-associated protein Eg5 (Kif11) siRNA
tagctaaattaaaccaaacccta

SEQ ID NO: 4806 - DNA, 23 bp, Artificial Sequence
  Description of Artificial Sequence: Synthetic oligonucleotide
  Mitotic kinesin microtubule-associated protein Eg5 (Kif11) siRNA
agctaaattaaaccaaaccctat

SEQ ID NO: 4807 - DNA, 23 bp, Artificial Sequence
  Description of Artificial Sequence: Synthetic oligonucleotide
  Mitotic kinesin microtubule-associated protein Eg5 (Kif11) siRNA
gctaaattaaaccaaaccctatt

SEQ ID NO: 4808 - DNA, 23 bp, Artificial Sequence
  Description of Artificial Sequence: Synthetic oligonucleotide
  Mitotic kinesin microtubule-associated protein Eg5 (Kif11) siRNA
ctaaattaaaccaaaccctattg

SEQ ID NO: 4809 - DNA, 23 bp, Artificial Sequence
  Description of Artificial Sequence: Synthetic oligonucleotide
  Mitotic kinesin microtubule-associated protein Eg5 (Kif11) siRNA
taaattaaaccaaaccctattga

SEQ ID NO: 4810 - DNA, 23 bp, Artificial Sequence
  Description of Artificial Sequence: Synthetic oligonucleotide
  Mitotic kinesin microtubule-associated protein Eg5 (Kif11) siRNA
aaattaaaccaaaccctattgaa

SEQ ID NO: 4811 - DNA, 23 bp, Artificial Sequence
  Description of Artificial Sequence: Synthetic oligonucleotide
  Mitotic kinesin microtubule-associated protein Eg5 (Kif11) siRNA
aattaaaccaaaccctattgaag

SEQ ID NO: 4812 - DNA, 23 bp, Artificial Sequence
  Description of Artificial Sequence: Synthetic oligonucleotide
  Mitotic kinesin microtubule-associated protein Eg5 (Kif11) siRNA
attaaaccaaaccctattgaaga

SEQ ID NO: 4813 - DNA, 23 bp, Artificial Sequence
  Description of Artificial Sequence: Synthetic oligonucleotide
  Mitotic kinesin microtubule-associated protein Eg5 (Kif11) siRNA
ttaaaccaaaccctattgaagaa

SEQ ID NO: 4814 - DNA, 23 bp, Artificial Sequence
  Description of Artificial Sequence: Synthetic oligonucleotide
  Mitotic kinesin microtubule-associated protein Eg5 (Kif11) siRNA
taaaccaaaccctattgaagaat

SEQ ID NO: 4815 - DNA, 23 bp, Artificial Sequence
  Description of Artificial Sequence: Synthetic oligonucleotide
  Mitotic kinesin microtubule-associated protein Eg5 (Kif11) siRNA
aaaccaaaccctattgaagaatt

SEQ ID NO: 4816 - DNA, 23 bp, Artificial Sequence
  Description of Artificial Sequence: Synthetic oligonucleotide
  Mitotic kinesin microtubule-associated protein Eg5 (Kif11) siRNA
aaccaaaccctattgaagaattg

SEQ ID NO: 4817 - DNA, 23 bp, Artificial Sequence
  Description of Artificial Sequence: Synthetic oligonucleotide
  Mitotic kinesin microtubule-associated protein Eg5 (Kif11) siRNA
accaaaccctattgaagaattga

SEQ ID NO: 4818 - DNA, 23 bp, Artificial Sequence
  Description of Artificial Sequence: Synthetic oligonucleotide
  Mitotic kinesin microtubule-associated protein Eg5 (Kif11) siRNA
ccaaaccctattgaagaattgaa

SEQ ID NO: 4819 - DNA, 23 bp, Artificial Sequence
  Description of Artificial Sequence: Synthetic oligonucleotide
  Mitotic kinesin microtubule-associated protein Eg5 (Kif11) siRNA
caaaccctattgaagaattgaat

SEQ ID NO: 4820 - DNA, 23 bp, Artificial Sequence
  Description of Artificial Sequence: Synthetic oligonucleotide
  Mitotic kinesin microtubule-associated protein Eg5 (Kif11) siRNA
aaaccctattgaagaattgaata

SEQ ID NO: 4821 - DNA, 23 bp, Artificial Sequence
  Description of Artificial Sequence: Synthetic oligonucleotide
  Mitotic kinesin microtubule-associated protein Eg5 (Kif11) siRNA
aaccctattgaagaattgaatat

SEQ ID NO: 4822 - DNA, 23 bp, Artificial Sequence
  Description of Artificial Sequence: Synthetic oligonucleotide
  Mitotic kinesin microtubule-associated protein Eg5 (Kif11) siRNA
accctattgaagaattgaatata

SEQ ID NO: 4823 - DNA, 23 bp, Artificial Sequence
  Description of Artificial Sequence: Synthetic oligonucleotide
  Mitotic kinesin microtubule-associated protein Eg5 (Kif11) siRNA
ccctattgaagaattgaatatat

SEQ ID NO: 4824 - DNA, 23 bp, Artificial Sequence
  Description of Artificial Sequence: Synthetic oligonucleotide
  Mitotic kinesin microtubule-associated protein Eg5 (Kif11) siRNA
cctattgaagaattgaatatatg

SEQ ID NO: 4825 - DNA, 23 bp, Artificial Sequence
  Description of Artificial Sequence: Synthetic oligonucleotide
  Mitotic kinesin microtubule-associated protein Eg5 (Kif11) siRNA
ctattgaagaattgaatatatgc

SEQ ID NO: 4826 - DNA, 23 bp, Artificial Sequence
  Description of Artificial Sequence: Synthetic oligonucleotide
  Mitotic kinesin microtubule-associated protein Eg5 (Kif11) siRNA
tattgaagaattgaatatatgct

SEQ ID NO: 4827 - DNA, 23 bp, Artificial Sequence
  Description of Artificial Sequence: Synthetic oligonucleotide
  Mitotic kinesin microtubule-associated protein Eg5 (Kif11) siRNA
attgaagaattgaatatatgcta

SEQ ID NO: 4828 - DNA, 23 bp, Artificial Sequence
  Description of Artificial Sequence: Synthetic oligonucleotide
  Mitotic kinesin microtubule-associated protein Eg5 (Kif11) siRNA
ttgaagaattgaatatatgctac

SEQ ID NO: 4829 - DNA, 23 bp, Artificial Sequence
  Description of Artificial Sequence: Synthetic oligonucleotide
  Mitotic kinesin microtubule-associated protein Eg5 (Kif11) siRNA
tgaagaattgaatatatgctact

SEQ ID NO: 4830 - DNA, 23 bp, Artificial Sequence
  Description of Artificial Sequence: Synthetic oligonucleotide
  Mitotic kinesin microtubule-associated protein Eg5 (Kif11) siRNA
gaagaattgaatatatgctactt

SEQ ID NO: 4831 - DNA, 23 bp, Artificial Sequence
  Description of Artificial Sequence: Synthetic oligonucleotide
  Mitotic kinesin microtubule-associated protein Eg5 (Kif11) siRNA
aagaattgaatatatgctacttc

SEQ ID NO: 4832 - DNA, 23 bp, Artificial Sequence
  Description of Artificial Sequence: Synthetic oligonucleotide
  Mitotic kinesin microtubule-associated protein Eg5 (Kif11) siRNA
agaattgaatatatgctacttca

SEQ ID NO: 4833 - DNA, 23 bp, Artificial Sequence
  Description of Artificial Sequence: Synthetic oligonucleotide
  Mitotic kinesin microtubule-associated protein Eg5 (Kif11) siRNA
gaattgaatatatgctacttcaa

SEQ ID NO: 4834 - DNA, 23 bp, Artificial Sequence
  Description of Artificial Sequence: Synthetic oligonucleotide
  Mitotic kinesin microtubule-associated protein Eg5 (Kif11) siRNA
aattgaatatatgctacttcaag

SEQ ID NO: 4835 - DNA, 23 bp, Artificial Sequence
  Description of Artificial Sequence: Synthetic oligonucleotide
  Mitotic kinesin microtubule-associated protein Eg5 (Kif11) siRNA
attgaatatatgctacttcaaga

SEQ ID NO: 4836 - DNA, 23 bp, Artificial Sequence
  Description of Artificial Sequence: Synthetic oligonucleotide
  Mitotic kinesin microtubule-associated protein Eg5 (Kif11) siRNA
ttgaatatatgctacttcaagaa

SEQ ID NO: 4837 - DNA, 23 bp, Artificial Sequence
  Description of Artificial Sequence: Synthetic oligonucleotide
  Mitotic kinesin microtubule-associated protein Eg5 (Kif11) siRNA
tgaatatatgctacttcaagaaa

SEQ ID NO: 4838 - DNA, 23 bp, Artificial Sequence
  Description of Artificial Sequence: Synthetic oligonucleotide
  Mitotic kinesin microtubule-associated protein Eg5 (Kif11) siRNA
gaatatatgctacttcaagaaac

SEQ ID NO: 4839 - DNA, 23 bp, Artificial Sequence
  Description of Artificial Sequence: Synthetic oligonucleotide
  Mitotic kinesin microtubule-associated protein Eg5 (Kif11) siRNA
aatatatgctacttcaagaaact

SEQ ID NO: 4840 - DNA, 23 bp, Artificial Sequence
  Description of Artificial Sequence: Synthetic oligonucleotide
  Mitotic kinesin microtubule-associated protein Eg5 (Kif11) siRNA
atatatgctacttcaagaaacta

SEQ ID NO: 4841 - DNA, 23 bp, Artificial Sequence
  Description of Artificial Sequence: Synthetic oligonucleotide
  Mitotic kinesin microtubule-associated protein Eg5 (Kif11) siRNA
tatatgctacttcaagaaactaa

SEQ ID NO: 4842 - DNA, 23 bp, Artificial Sequence
  Description of Artificial Sequence: Synthetic oligonucleotide
  Mitotic kinesin microtubule-associated protein Eg5 (Kif11) siRNA
atatgctacttcaagaaactaaa

SEQ ID NO: 4843 - DNA, 23 bp, Artificial Sequence
  Description of Artificial Sequence: Synthetic oligonucleotide
  Mitotic kinesin microtubule-associated protein Eg5 (Kif11) siRNA
tatgctacttcaagaaactaaat

SEQ ID NO: 4844 - DNA, 23 bp, Artificial Sequence
  Description of Artificial Sequence: Synthetic oligonucleotide
  Mitotic kinesin microtubule-associated protein Eg5 (Kif11) siRNA
atgctacttcaagaaactaaatt

SEQ ID NO: 4845 - DNA, 23 bp, Artificial Sequence
  Description of Artificial Sequence: Synthetic oligonucleotide
  Mitotic kinesin microtubule-associated protein Eg5 (Kif11) siRNA
tgctacttcaagaaactaaattg

SEQ ID NO: 4846 - DNA, 23 bp, Artificial Sequence
  Description of Artificial Sequence: Synthetic oligonucleotide
  Mitotic kinesin microtubule-associated protein Eg5 (Kif11) siRNA
gctacttcaagaaactaaattga

SEQ ID NO: 4847 - DNA, 23 bp, Artificial Sequence
  Description of Artificial Sequence: Synthetic oligonucleotide
  Mitotic kinesin microtubule-associated protein Eg5 (Kif11) siRNA
ctacttcaagaaactaaattgat

SEQ ID NO: 4848 - DNA, 23 bp, Artificial Sequence
  Description of Artificial Sequence: Synthetic oligonucleotide
  Mitotic kinesin microtubule-associated protein Eg5 (Kif11) siRNA
tacttcaagaaactaaattgatc

SEQ ID NO: 4849 - DNA, 23 bp, Artificial Sequence
  Description of Artificial Sequence: Synthetic oligonucleotide
  Mitotic kinesin microtubule-associated protein Eg5 (Kif11) siRNA
acttcaagaaactaaattgatct

SEQ ID NO: 4850 - DNA, 23 bp, Artificial Sequence
  Description of Artificial Sequence: Synthetic oligonucleotide
  Mitotic kinesin microtubule-associated protein Eg5 (Kif11) siRNA
cttcaagaaactaaattgatctc

SEQ ID NO: 4851 - DNA, 23 bp, Artificial Sequence
  Description of Artificial Sequence: Synthetic oligonucleotide
  Mitotic kinesin microtubule-associated protein Eg5 (Kif11) siRNA
ttcaagaaactaaattgatctcg

SEQ ID NO: 4852 - DNA, 23 bp, Artificial Sequence
  Description of Artificial Sequence: Synthetic oligonucleotide
  Mitotic kinesin microtubule-associated protein Eg5 (Kif11) siRNA
tcaagaaactaaattgatctcgt

SEQ ID NO: 4853 - DNA, 23 bp, Artificial Sequence
  Description of Artificial Sequence: Synthetic oligonucleotide
  Mitotic kinesin microtubule-associated protein Eg5 (Kif11) siRNA
caagaaactaaattgatctcgta

SEQ ID NO: 4854 - DNA, 23 bp, Artificial Sequence
  Description of Artificial Sequence: Synthetic oligonucleotide
  Mitotic kinesin microtubule-associated protein Eg5 (Kif11) siRNA
aagaaactaaattgatctcgtag

SEQ ID NO: 4855 - DNA, 23 bp, Artificial Sequence
  Description of Artificial Sequence: Synthetic oligonucleotide
  Mitotic kinesin microtubule-associated protein Eg5 (Kif11) siRNA
agaaactaaattgatctcgtaga

SEQ ID NO: 4856 - DNA, 23 bp, Artificial Sequence
  Description of Artificial Sequence: Synthetic oligonucleotide
  Mitotic kinesin microtubule-associated protein Eg5 (Kif11) siRNA
gaaactaaattgatctcgtagaa

SEQ ID NO: 4857 - DNA, 23 bp, Artificial Sequence
  Description of Artificial Sequence: Synthetic oligonucleotide
  Mitotic kinesin microtubule-associated protein Eg5 (Kif11) siRNA
aaactaaattgatctcgtagaat

SEQ ID NO: 4858 - DNA, 23 bp, Artificial Sequence
  Description of Artificial Sequence: Synthetic oligonucleotide
  Mitotic kinesin microtubule-associated protein Eg5 (Kif11) siRNA
aactaaattgatctcgtagaatt

SEQ ID NO: 4859 - DNA, 23 bp, Artificial Sequence
  Description of Artificial Sequence: Synthetic oligonucleotide
  Mitotic kinesin microtubule-associated protein Eg5 (Kif11) siRNA
actaaattgatctcgtagaatta

SEQ ID NO: 4860 - DNA, 23 bp, Artificial Sequence
  Description of Artificial Sequence: Synthetic oligonucleotide
  Mitotic kinesin microtubule-associated protein Eg5 (Kif11) siRNA
ctaaattgatctcgtagaattat

SEQ ID NO: 4861 - DNA, 23 bp, Artificial Sequence
  Description of Artificial Sequence: Synthetic oligonucleotide
  Mitotic kinesin microtubule-associated protein Eg5 (Kif11) siRNA
taaattgatctcgtagaattatc

SEQ ID NO: 4862 - DNA, 23 bp, Artificial Sequence
  Description of Artificial Sequence: Synthetic oligonucleotide
  Mitotic kinesin microtubule-associated protein Eg5 (Kif11) siRNA
aaattgatctcgtagaattatct

SEQ ID NO: 4863 - DNA, 23 bp, Artificial Sequence
  Description of Artificial Sequence: Synthetic oligonucleotide
  Mitotic kinesin microtubule-associated protein Eg5 (Kif11) siRNA
aattgatctcgtagaattatctt

SEQ ID NO: 4864 - DNA, 23 bp, Artificial Sequence
  Description of Artificial Sequence: Synthetic oligonucleotide
  Mitotic kinesin microtubule-associated protein Eg5 (Kif11) siRNA
attgatctcgtagaattatctta

SEQ ID NO: 4865 - DNA, 23 bp, Artificial Sequence
  Description of Artificial Sequence: Synthetic oligonucleotide
  Mitotic kinesin microtubule-associated protein Eg5 (Kif11) siRNA
ttgatctcgtagaattatcttaa

SEQ ID NO: 4866 - DNA, 23 bp, Artificial Sequence
  Description of Artificial Sequence: Synthetic oligonucleotide
  Mitotic kinesin microtubule-associated protein Eg5 (Kif11) siRNA
tgatctcgtagaattatcttaat

SEQ ID NO: 4867 - DNA, 23 bp, Artificial Sequence
  Description of Artificial Sequence: Synthetic oligonucleotide
  Mitotic kinesin microtubule-associated protein Eg5 (Kif11) siRNA
gatctcgtagaattatcttaata

SEQ ID NO: 4868 - DNA, 23 bp, Artificial Sequence
  Description of Artificial Sequence: Synthetic oligonucleotide
  Mitotic kinesin microtubule-associated protein Eg5 (Kif11) siRNA
atctcgtagaattatcttaataa

SEQ ID NO: 4869 - DNA, 23 bp, Artificial Sequence
  Description of Artificial Sequence: Synthetic oligonucleotide
  Mitotic kinesin microtubule-associated protein Eg5 (Kif11) siRNA
tctcgtagaattatcttaataaa

SEQ ID NO: 4870 - DNA, 23 bp, Artificial Sequence
  Description of Artificial Sequence: Synthetic oligonucleotide
  Mitotic kinesin microtubule-associated protein Eg5 (Kif11) siRNA
ctcgtagaattatcttaataaaa

SEQ ID NO: 4871 - DNA, 23 bp, Artificial Sequence
  Description of Artificial Sequence: Synthetic oligonucleotide
  Mitotic kinesin microtubule-associated protein Eg5 (Kif11) siRNA
tcgtagaattatcttaataaaat

SEQ ID NO: 4872 - DNA, 23 bp, Artificial Sequence
  Description of Artificial Sequence: Synthetic oligonucleotide
  Mitotic kinesin microtubule-associated protein Eg5 (Kif11) siRNA
cgtagaattatcttaataaaata

SEQ ID NO: 4873 - DNA, 23 bp, Artificial Sequence
  Description of Artificial Sequence: Synthetic oligonucleotide
  Mitotic kinesin microtubule-associated protein Eg5 (Kif11) siRNA
gtagaattatcttaataaaataa

SEQ ID NO: 4874 - DNA, 23 bp, Artificial Sequence
  Description of Artificial Sequence: Synthetic oligonucleotide
  Mitotic kinesin microtubule-associated protein Eg5 (Kif11) siRNA
tagaattatcttaataaaataat

SEQ ID NO: 4875 - DNA, 23 bp, Artificial Sequence
  Description of Artificial Sequence: Synthetic oligonucleotide
  Mitotic kinesin microtubule-associated protein Eg5 (Kif11) siRNA
agaattatcttaataaaataatg

SEQ ID NO: 4876 - DNA, 23 bp, Artificial Sequence
  Description of Artificial Sequence: Synthetic oligonucleotide
  Mitotic kinesin microtubule-associated protein Eg5 (Kif11) siRNA
gaattatcttaataaaataatgg

SEQ ID NO: 4877 - DNA, 23 bp, Artificial Sequence
  Description of Artificial Sequence: Synthetic oligonucleotide
  Mitotic kinesin microtubule-associated protein Eg5 (Kif11) siRNA
aattatcttaataaaataatggc

SEQ ID NO: 4878 - DNA, 23 bp, Artificial Sequence
  Description of Artificial Sequence: Synthetic oligonucleotide
  Mitotic kinesin microtubule-associated protein Eg5 (Kif11) siRNA
attatcttaataaaataatggct

SEQ ID NO: 4879 - DNA, 23 bp, Artificial Sequence
  Description of Artificial Sequence: Synthetic oligonucleotide
  Mitotic kinesin microtubule-associated protein Eg5 (Kif11) siRNA
ttatcttaataaaataatggcta

SEQ ID NO: 4880 - DNA, 23 bp, Artificial Sequence
  Description of Artificial Sequence: Synthetic oligonucleotide
  Mitotic kinesin microtubule-associated protein Eg5 (Kif11) siRNA
tatcttaataaaataatggctat

SEQ ID NO: 4881 - DNA, 23 bp, Artificial Sequence
  Description of Artificial Sequence: Synthetic oligonucleotide
  Mitotic kinesin microtubule-associated protein Eg5 (Kif11) siRNA
atcttaataaaataatggctata

SEQ ID NO: 4882 - DNA, 23 bp, Artificial Sequence
  Description of Artificial Sequence: Synthetic oligonucleotide
  Mitotic kinesin microtubule-associated protein Eg5 (Kif11) siRNA
tcttaataaaataatggctataa

SEQ ID NO: 4883 - DNA, 23 bp, Artificial Sequence
  Description of Artificial Sequence: Synthetic oligonucleotide
  Mitotic kinesin microtubule-associated protein Eg5 (Kif11) siRNA
cttaataaaataatggctataat

SEQ ID NO: 4884 - DNA, 23 bp, Artificial Sequence
  Description of Artificial Sequence: Synthetic oligonucleotide
  Mitotic kinesin microtubule-associated protein Eg5 (Kif11) siRNA
ttaataaaataatggctataatt

SEQ ID NO: 4885 - DNA, 23 bp, Artificial Sequence
  Description of Artificial Sequence: Synthetic oligonucleotide
  Mitotic kinesin microtubule-associated protein Eg5 (Kif11) siRNA
taataaaataatggctataattt

SEQ ID NO: 4886 - DNA, 23 bp, Artificial Sequence
  Description of Artificial Sequence: Synthetic oligonucleotide
  Mitotic kinesin microtubule-associated protein Eg5 (Kif11) siRNA
aataaaataatggctataatttc

SEQ ID NO: 4887 - DNA, 23 bp, Artificial Sequence
  Description of Artificial Sequence: Synthetic oligonucleotide
  Mitotic kinesin microtubule-associated protein Eg5 (Kif11) siRNA
ataaaataatggctataatttct

SEQ ID NO: 4888 - DNA, 23 bp, Artificial Sequence
  Description of Artificial Sequence: Synthetic oligonucleotide
  Mitotic kinesin microtubule-associated protein Eg5 (Kif11) siRNA
taaaataatggctataatttctc

SEQ ID NO: 4889 - DNA, 23 bp, Artificial Sequence
  Description of Artificial Sequence: Synthetic oligonucleotide
  Mitotic kinesin microtubule-associated protein Eg5 (Kif11) siRNA
aaaataatggctataatttctct

SEQ ID NO: 4890 - DNA, 23 bp, Artificial Sequence
  Description of Artificial Sequence: Synthetic oligonucleotide
  Mitotic kinesin microtubule-associated protein Eg5 (Kif11) siRNA
aaataatggctataatttctctg

SEQ ID NO: 4891 - DNA, 23 bp, Artificial Sequence
  Description of Artificial Sequence: Synthetic oligonucleotide
  Mitotic kinesin microtubule-associated protein Eg5 (Kif11) siRNA
aataatggctataatttctctgc

SEQ ID NO: 4892 - DNA, 23 bp, Artificial Sequence
  Description of Artificial Sequence: Synthetic oligonucleotide
  Mitotic kinesin microtubule-associated protein Eg5 (Kif11) siRNA
ataatggctataatttctctgca

SEQ ID NO: 4893 - DNA, 23 bp, Artificial Sequence
  Description of Artificial Sequence: Synthetic oligonucleotide
  Mitotic kinesin microtubule-associated protein Eg5 (Kif11) siRNA
taatggctataatttctctgcaa

SEQ ID NO: 4894 - DNA, 23 bp, Artificial Sequence
  Description of Artificial Sequence: Synthetic oligonucleotide
  Mitotic kinesin microtubule-associated protein Eg5 (Kif11) siRNA
aatggctataatttctctgcaaa

SEQ ID NO: 4895 - DNA, 23 bp, Artificial Sequence
  Description of Artificial Sequence: Synthetic oligonucleotide
  Mitotic kinesin microtubule-associated protein Eg5 (Kif11) siRNA
atggctataatttctctgcaaaa

SEQ ID NO: 4896 - DNA, 23 bp, Artificial Sequence
  Description of Artificial Sequence: Synthetic oligonucleotide
  Mitotic kinesin microtubule-associated protein Eg5 (Kif11) siRNA
tggctataatttctctgcaaaat

SEQ ID NO: 4897 - DNA, 23 bp, Artificial Sequence
  Description of Artificial Sequence: Synthetic oligonucleotide
  Mitotic kinesin microtubule-associated protein Eg5 (Kif11) siRNA
ggctataatttctctgcaaaatc

SEQ ID NO: 4898 - DNA, 23 bp, Artificial Sequence
  Description of Artificial Sequence: Synthetic oligonucleotide
  Mitotic kinesin microtubule-associated protein Eg5 (Kif11) siRNA
gctataatttctctgcaaaatca

SEQ ID NO: 4899 - DNA, 23 bp, Artificial Sequence
  Description of Artificial Sequence: Synthetic oligonucleotide
  Mitotic kinesin microtubule-associated protein Eg5 (Kif11) siRNA
ctataatttctctgcaaaatcag

SEQ ID NO: 4900 - DNA, 23 bp, Artificial Sequence
  Description of Artificial Sequence: Synthetic oligonucleotide
  Mitotic kinesin microtubule-associated protein Eg5 (Kif11) siRNA
tataatttctctgcaaaatcaga

SEQ ID NO: 4901 - DNA, 23 bp, Artificial Sequence
  Description of Artificial Sequence: Synthetic oligonucleotide
  Mitotic kinesin microtubule-associated protein Eg5 (Kif11) siRNA
ataatttctctgcaaaatcagat

SEQ ID NO: 4902 - DNA, 23 bp, Artificial Sequence
  Description of Artificial Sequence: Synthetic oligonucleotide
  Mitotic kinesin microtubule-associated protein Eg5 (Kif11) siRNA
taatttctctgcaaaatcagatg

SEQ ID NO: 4903 - DNA, 23 bp, Artificial Sequence
  Description of Artificial Sequence: Synthetic oligonucleotide
  Mitotic kinesin microtubule-associated protein Eg5 (Kif11) siRNA
aatttctctgcaaaatcagatgt

SEQ ID NO: 4904 - DNA, 23 bp, Artificial Sequence
  Description of Artificial Sequence: Synthetic oligonucleotide
  Mitotic kinesin microtubule-associated protein Eg5 (Kif11) siRNA
atttctctgcaaaatcagatgtc

SEQ ID NO: 4905 - DNA, 23 bp, Artificial Sequence
  Description of Artificial Sequence: Synthetic oligonucleotide
  Mitotic kinesin microtubule-associated protein Eg5 (Kif11) siRNA
tttctctgcaaaatcagatgtca

SEQ ID NO: 4906 - DNA, 23 bp, Artificial Sequence
  Description of Artificial Sequence: Synthetic oligonucleotide
  Mitotic kinesin microtubule-associated protein Eg5 (Kif11) siRNA
ttctctgcaaaatcagatgtcag

SEQ ID NO: 4907 - DNA, 23 bp, Artificial Sequence
  Description of Artificial Sequence: Synthetic oligonucleotide
  Mitotic kinesin microtubule-associated protein Eg5 (Kif11) siRNA
tctctgcaaaatcagatgtcagc

SEQ ID NO: 4908 - DNA, 23 bp, Artificial Sequence
  Description of Artificial Sequence: Synthetic oligonucleotide
  Mitotic kinesin microtubule-associated protein Eg5 (Kif11) siRNA
ctctgcaaaatcagatgtcagca

SEQ ID NO: 4909 - DNA, 23 bp, Artificial Sequence
  Description of Artificial Sequence: Synthetic oligonucleotide
  Mitotic kinesin microtubule-associated protein Eg5 (Kif11) siRNA
tctgcaaaatcagatgtcagcat

SEQ ID NO: 4910 - DNA, 23 bp, Artificial Sequence
  Description of Artificial Sequence: Synthetic oligonucleotide
  Mitotic kinesin microtubule-associated protein Eg5 (Kif11) siRNA
ctgcaaaatcagatgtcagcata

SEQ ID NO: 4911 - DNA, 23 bp, Artificial Sequence
  Description of Artificial Sequence: Synthetic oligonucleotide
  Mitotic kinesin microtubule-associated protein Eg5 (Kif11) siRNA
tgcaaaatcagatgtcagcataa

SEQ ID NO: 4912 - DNA, 23 bp, Artificial Sequence
  Description of Artificial Sequence: Synthetic oligonucleotide
  Mitotic kinesin microtubule-associated protein Eg5 (Kif11) siRNA
gcaaaatcagatgtcagcataag

SEQ ID NO: 4913 - DNA, 23 bp, Artificial Sequence
  Description of Artificial Sequence: Synthetic oligonucleotide
  Mitotic kinesin microtubule-associated protein Eg5 (Kif11) siRNA
caaaatcagatgtcagcataagc

SEQ ID NO: 4914 - DNA, 23 bp, Artificial Sequence
  Description of Artificial Sequence: Synthetic oligonucleotide
  Mitotic kinesin microtubule-associated protein Eg5 (Kif11) siRNA
aaaatcagatgtcagcataagcg

SEQ ID NO: 4915 - DNA, 23 bp, Artificial Sequence
  Description of Artificial Sequence: Synthetic oligonucleotide
  Mitotic kinesin microtubule-associated protein Eg5 (Kif11) siRNA
aaatcagatgtcagcataagcga

SEQ ID NO: 4916 - DNA, 23 bp, Artificial Sequence
  Description of Artificial Sequence: Synthetic oligonucleotide
  Mitotic kinesin microtubule-associated protein Eg5 (Kif11) siRNA
aatcagatgtcagcataagcgat

SEQ ID NO: 4917 - DNA, 23 bp, Artificial Sequence
  Description of Artificial Sequence: Synthetic oligonucleotide
  Mitotic kinesin microtubule-associated protein Eg5 (Kif11) siRNA
atcagatgtcagcataagcgatg

SEQ ID NO: 4918 - DNA, 23 bp, Artificial Sequence
  Description of Artificial Sequence: Synthetic oligonucleotide
  Mitotic kinesin microtubule-associated protein Eg5 (Kif11) siRNA
tcagatgtcagcataagcgatgg

SEQ ID NO: 4919 - DNA, 23 bp, Artificial Sequence
  Description of Artificial Sequence: Synthetic oligonucleotide
  Mitotic kinesin microtubule-associated protein Eg5 (Kif11) siRNA
cagatgtcagcataagcgatgga

SEQ ID NO: 4920 - DNA, 23 bp, Artificial Sequence
  Description of Artificial Sequence: Synthetic oligonucleotide
  Mitotic kinesin microtubule-associated protein Eg5 (Kif11) siRNA
agatgtcagcataagcgatggat

SEQ ID NO: 4921 - DNA, 23 bp, Artificial Sequence
  Description of Artificial Sequence: Synthetic oligonucleotide
  Mitotic kinesin microtubule-associated protein Eg5 (Kif11) siRNA
gatgtcagcataagcgatggata

SEQ ID NO: 4922 - DNA, 23 bp, Artificial Sequence
  Description of Artificial Sequence: Synthetic oligonucleotide
  Mitotic kinesin microtubule-associated protein Eg5 (Kif11) siRNA
atgtcagcataagcgatggataa

SEQ ID NO: 4923 - DNA, 23 bp, Artificial Sequence
  Description of Artificial Sequence: Synthetic oligonucleotide
  Mitotic kinesin microtubule-associated protein Eg5 (Kif11) siRNA
tgtcagcataagcgatggataat

SEQ ID NO: 4924 - DNA, 23 bp, Artificial Sequence
  Description of Artificial Sequence: Synthetic oligonucleotide
  Mitotic kinesin microtubule-associated protein Eg5 (Kif11) siRNA
gtcagcataagcgatggataata

SEQ ID NO: 4925 - DNA, 23 bp, Artificial Sequence
  Description of Artificial Sequence: Synthetic oligonucleotide
  Mitotic kinesin microtubule-associated protein Eg5 (Kif11) siRNA
tcagcataagcgatggataatac

SEQ ID NO: 4926 - DNA, 23 bp, Artificial Sequence
  Description of Artificial Sequence: Synthetic oligonucleotide
  Mitotic kinesin microtubule-associated protein Eg5 (Kif11) siRNA
cagcataagcgatggataatacc

SEQ ID NO: 4927 - DNA, 23 bp, Artificial Sequence
  Description of Artificial Sequence: Synthetic oligonucleotide
  Mitotic kinesin microtubule-associated protein Eg5 (Kif11) siRNA
agcataagcgatggataatacct

SEQ ID NO: 4928 - DNA, 23 bp, Artificial Sequence
  Description of Artificial Sequence: Synthetic oligonucleotide
  Mitotic kinesin microtubule-associated protein Eg5 (Kif11) siRNA
gcataagcgatggataataccta

SEQ ID NO: 4929 - DNA, 23 bp, Artificial Sequence
  Description of Artificial Sequence: Synthetic oligonucleotide
  Mitotic kinesin microtubule-associated protein Eg5 (Kif11) siRNA
cataagcgatggataatacctaa

SEQ ID NO: 4930 - DNA, 23 bp, Artificial Sequence
  Description of Artificial Sequence: Synthetic oligonucleotide
  Mitotic kinesin microtubule-associated protein Eg5 (Kif11) siRNA
ataagcgatggataatacctaat

SEQ ID NO: 4931 - DNA, 23 bp, Artificial Sequence
  Description of Artificial Sequence: Synthetic oligonucleotide
  Mitotic kinesin microtubule-associated protein Eg5 (Kif11) siRNA
taagcgatggataatacctaata

SEQ ID NO: 4932 - DNA, 23 bp, Artificial Sequence
  Description of Artificial Sequence: Synthetic oligonucleotide
  Mitotic kinesin microtubule-associated protein Eg5 (Kif11) siRNA
aagcgatggataatacctaataa

SEQ ID NO: 4933 - DNA, 23 bp, Artificial Sequence
  Description of Artificial Sequence: Synthetic oligonucleotide
  Mitotic kinesin microtubule-associated protein Eg5 (Kif11) siRNA
agcgatggataatacctaataaa

SEQ ID NO: 4934 - DNA, 23 bp, Artificial Sequence
  Description of Artificial Sequence: Synthetic oligonucleotide
  Mitotic kinesin microtubule-associated protein Eg5 (Kif11) siRNA
gcgatggataatacctaataaac

SEQ ID NO: 4935 - DNA, 23 bp, Artificial Sequence
  Description of Artificial Sequence: Synthetic oligonucleotide
  Mitotic kinesin microtubule-associated protein Eg5 (Kif11) siRNA
cgatggataatacctaataaact

SEQ ID NO: 4936 - DNA, 23 bp, Artificial Sequence
  Description of Artificial Sequence: Synthetic oligonucleotide
  Mitotic kinesin microtubule-associated protein Eg5 (Kif11) siRNA
gatggataatacctaataaactg

SEQ ID NO: 4937 - DNA, 23 bp, Artificial Sequence
  Description of Artificial Sequence: Synthetic oligonucleotide
  Mitotic kinesin microtubule-associated protein Eg5 (Kif11) siRNA
atggataatacctaataaactgc

SEQ ID NO: 4938 - DNA, 23 bp, Artificial Sequence
  Description of Artificial Sequence: Synthetic oligonucleotide
  Mitotic kinesin microtubule-associated protein Eg5 (Kif11) siRNA
tggataatacctaataaactgcc

SEQ ID NO: 4939 - DNA, 23 bp, Artificial Sequence
  Description of Artificial Sequence: Synthetic oligonucleotide
  Mitotic kinesin microtubule-associated protein Eg5 (Kif11) siRNA
ggataatacctaataaactgccc

SEQ ID NO: 4940 - DNA, 23 bp, Artificial Sequence
  Description of Artificial Sequence: Synthetic oligonucleotide
  Mitotic kinesin microtubule-associated protein Eg5 (Kif11) siRNA
gataatacctaataaactgccct

SEQ ID NO: 4941 - DNA, 23 bp, Artificial Sequence
  Description of Artificial Sequence: Synthetic oligonucleotide
  Mitotic kinesin microtubule-associated protein Eg5 (Kif11) siRNA
ataatacctaataaactgccctc

SEQ ID NO: 4942 - DNA, 23 bp, Artificial Sequence
  Description of Artificial Sequence: Synthetic oligonucleotide
  Mitotic kinesin microtubule-associated protein Eg5 (Kif11) siRNA
taatacctaataaactgccctca

SEQ ID NO: 4943 - DNA, 23 bp, Artificial Sequence
  Description of Artificial Sequence: Synthetic oligonucleotide
  Mitotic kinesin microtubule-associated protein Eg5 (Kif11) siRNA
aatacctaataaactgccctcag

SEQ ID NO: 4944 - DNA, 23 bp, Artificial Sequence
  Description of Artificial Sequence: Synthetic oligonucleotide
  Mitotic kinesin microtubule-associated protein Eg5 (Kif11) siRNA
atacctaataaactgccctcagt

SEQ ID NO: 4945 - DNA, 23 bp, Artificial Sequence
  Description of Artificial Sequence: Synthetic oligonucleotide
  Mitotic kinesin microtubule-associated protein Eg5 (Kif11) siRNA
tacctaataaactgccctcagta

SEQ ID NO: 4946 - DNA, 23 bp, Artificial Sequence
  Description of Artificial Sequence: Synthetic oligonucleotide
  Mitotic kinesin microtubule-associated protein Eg5 (Kif11) siRNA
acctaataaactgccctcagtaa

SEQ ID NO: 4947 - DNA, 23 bp, Artificial Sequence
  Description of Artificial Sequence: Synthetic oligonucleotide
  Mitotic kinesin microtubule-associated protein Eg5 (Kif11) siRNA
cctaataaactgccctcagtaaa

SEQ ID NO: 4948 - DNA, 23 bp, Artificial Sequence
  Description of Artificial Sequence: Synthetic oligonucleotide
  Mitotic kinesin microtubule-associated protein Eg5 (Kif11) siRNA
ctaataaactgccctcagtaaat

SEQ ID NO: 4949 - DNA, 23 bp, Artificial Sequence
  Description of Artificial Sequence: Synthetic oligonucleotide
  Mitotic kinesin microtubule-associated protein Eg5 (Kif11) siRNA
taataaactgccctcagtaaatc

SEQ ID NO: 4950 - DNA, 23 bp, Artificial Sequence
  Description of Artificial Sequence: Synthetic oligonucleotide
  Mitotic kinesin microtubule-associated protein Eg5 (Kif11) siRNA
aataaactgccctcagtaaatcc

SEQ ID NO: 4951 - DNA, 23 bp, Artificial Sequence
  Description of Artificial Sequence: Synthetic oligonucleotide
  Mitotic kinesin microtubule-associated protein Eg5 (Kif11) siRNA
ataaactgccctcagtaaatcca

SEQ ID NO: 4952 - DNA, 23 bp, Artificial Sequence
  Description of Artificial Sequence: Synthetic oligonucleotide
  Mitotic kinesin microtubule-associated protein Eg5 (Kif11) siRNA
taaactgccctcagtaaatccat

SEQ ID NO: 4953 - DNA, 23 bp, Artificial Sequence
  Description of Artificial Sequence: Synthetic oligonucleotide
  Mitotic kinesin microtubule-associated protein Eg5 (Kif11) siRNA
aaactgccctcagtaaatccatg

SEQ ID NO: 4954 - DNA, 23 bp, Artificial Sequence
  Description of Artificial Sequence: Synthetic oligonucleotide
  Mitotic kinesin microtubule-associated protein Eg5 (Kif11) siRNA
aactgccctcagtaaatccatgg

SEQ ID NO: 4955 - DNA, 23 bp, Artificial Sequence
  Description of Artificial Sequence: Synthetic oligonucleotide
  Mitotic kinesin microtubule-associated protein Eg5 (Kif11) siRNA
actgccctcagtaaatccatggt

SEQ ID NO: 4956 - DNA, 23 bp, Artificial Sequence
  Description of Artificial Sequence: Synthetic oligonucleotide
  Mitotic kinesin microtubule-associated protein Eg5 (Kif11) siRNA
ctgccctcagtaaatccatggtt

SEQ ID NO: 4957 - DNA, 23 bp, Artificial Sequence
  Description of Artificial Sequence: Synthetic oligonucleotide
  Mitotic kinesin microtubule-associated protein Eg5 (Kif11) siRNA
tgccctcagtaaatccatggtta

SEQ ID NO: 4958 - DNA, 23 bp, Artificial Sequence
  Description of Artificial Sequence: Synthetic oligonucleotide
  Mitotic kinesin microtubule-associated protein Eg5 (Kif11) siRNA
gccctcagtaaatccatggttaa

SEQ ID NO: 4959 - DNA, 23 bp, Artificial Sequence
  Description of Artificial Sequence: Synthetic oligonucleotide
  Mitotic kinesin microtubule-associated protein Eg5 (Kif11) siRNA
ccctcagtaaatccatggttaat

SEQ ID NO: 4960 - DNA, 23 bp, Artificial Sequence
  Description of Artificial Sequence: Synthetic oligonucleotide
  Mitotic kinesin microtubule-associated protein Eg5 (Kif11) siRNA
cctcagtaaatccatggttaata

SEQ ID NO: 4961 - DNA, 23 bp, Artificial Sequence
  Description of Artificial Sequence: Synthetic oligonucleotide
  Mitotic kinesin microtubule-associated protein Eg5 (Kif11) siRNA
ctcagtaaatccatggttaataa

SEQ ID NO: 4962 - DNA, 23 bp, Artificial Sequence
  Description of Artificial Sequence: Synthetic oligonucleotide
  Mitotic kinesin microtubule-associated protein Eg5 (Kif11) siRNA
tcagtaaatccatggttaataaa

SEQ ID NO: 4963 - DNA, 23 bp, Artificial Sequence
  Description of Artificial Sequence: Synthetic oligonucleotide
  Mitotic kinesin microtubule-associated protein Eg5 (Kif11) siRNA
cagtaaatccatggttaataaat

SEQ ID NO: 4964 - DNA, 23 bp, Artificial Sequence
  Description of Artificial Sequence: Synthetic oligonucleotide
  Mitotic kinesin microtubule-associated protein Eg5 (Kif11) siRNA
agtaaatccatggttaataaatg

SEQ ID NO: 4965 - DNA, 23 bp, Artificial Sequence
  Description of Artificial Sequence: Synthetic oligonucleotide
  Mitotic kinesin microtubule-associated protein Eg5 (Kif11) siRNA
gtaaatccatggttaataaatgt

SEQ ID NO: 4966 - DNA, 23 bp, Artificial Sequence
  Description of Artificial Sequence: Synthetic oligonucleotide
  Mitotic kinesin microtubule-associated protein Eg5 (Kif11) siRNA
taaatccatggttaataaatgtg

SEQ ID NO: 4967 - DNA, 23 bp, Artificial Sequence
  Description of Artificial Sequence: Synthetic oligonucleotide
  Mitotic kinesin microtubule-associated protein Eg5 (Kif11) siRNA
aaatccatggttaataaatgtgg

SEQ ID NO: 4968 - DNA, 23 bp, Artificial Sequence
  Description of Artificial Sequence: Synthetic oligonucleotide
  Mitotic kinesin microtubule-associated protein Eg5 (Kif11) siRNA
aatccatggttaataaatgtggt

SEQ ID NO: 4969 - DNA, 23 bp, Artificial Sequence
  Description of Artificial Sequence: Synthetic oligonucleotide
  Mitotic kinesin microtubule-associated protein Eg5 (Kif11) siRNA
atccatggttaataaatgtggtt

SEQ ID NO: 4970 - DNA, 23 bp, Artificial Sequence
  Description of Artificial Sequence: Synthetic oligonucleotide
  Mitotic kinesin microtubule-associated protein Eg5 (Kif11) siRNA
tccatggttaataaatgtggttt

SEQ ID NO: 4971 - DNA, 23 bp, Artificial Sequence
  Description of Artificial Sequence: Synthetic oligonucleotide
  Mitotic kinesin microtubule-associated protein Eg5 (Kif11) siRNA
ccatggttaataaatgtggtttc

SEQ ID NO: 4972 - DNA, 23 bp, Artificial Sequence
  Description of Artificial Sequence: Synthetic oligonucleotide
  Mitotic kinesin microtubule-associated protein Eg5 (Kif11) siRNA
catggttaataaatgtggtttct

SEQ ID NO: 4973 - DNA, 23 bp, Artificial Sequence
  Description of Artificial Sequence: Synthetic oligonucleotide
  Mitotic kinesin microtubule-associated protein Eg5 (Kif11) siRNA
atggttaataaatgtggtttcta

SEQ ID NO: 4974 - DNA, 23 bp, Artificial Sequence
  Description of Artificial Sequence: Synthetic oligonucleotide
  Mitotic kinesin microtubule-associated protein Eg5 (Kif11) siRNA
tggttaataaatgtggtttctac

SEQ ID NO: 4975 - DNA, 23 bp, Artificial Sequence
  Description of Artificial Sequence: Synthetic oligonucleotide
  Mitotic kinesin microtubule-associated protein Eg5 (Kif11) siRNA
ggttaataaatgtggtttctaca

SEQ ID NO: 4976 - DNA, 23 bp, Artificial Sequence
  Description of Artificial Sequence: Synthetic oligonucleotide
  Mitotic kinesin microtubule-associated protein Eg5 (Kif11) siRNA
gttaataaatgtggtttctacat

SEQ ID NO: 4977 - DNA, 23 bp, Artificial Sequence
  Description of Artificial Sequence: Synthetic oligonucleotide
  Mitotic kinesin microtubule-associated protein Eg5 (Kif11) siRNA
ttaataaatgtggtttctacatt

SEQ ID NO: 4978 - DNA, 23 bp, Artificial Sequence
  Description of Artificial Sequence: Synthetic oligonucleotide
  Epidermal growth factor receptor (EGFR), ERBB1 phosphotyrosine kinase siRNA
gcggccgcagcagcctccgcccc

SEQ ID NO: 4979 - DNA, 23 bp, Artificial Sequence
  Description of Artificial Sequence: Synthetic oligonucleotide
  Epidermal growth factor receptor (EGFR), ERBB1 phosphotyrosine kinase siRNA
cggccgcagcagcctccgccccc

SEQ ID NO: 4980 - DNA, 23 bp, Artificial Sequence
  Description of Artificial Sequence: Synthetic oligonucleotide
  Epidermal growth factor receptor (EGFR), ERBB1 phosphotyrosine kinase siRNA
ccccccgcacggtgtgagcgccc

SEQ ID NO: 4981 - DNA, 23 bp, Artificial Sequence
  Description of Artificial Sequence: Synthetic oligonucleotide
  Epidermal growth factor receptor (EGFR), ERBB1 phosphotyrosine kinase siRNA
cccccgcacggtgtgagcgcccg

SEQ ID NO: 4982 - DNA, 23 bp, Artificial Sequence
  Description of Artificial Sequence: Synthetic oligonucleotide
  Epidermal growth factor receptor (EGFR), ERBB1 phosphotyrosine kinase siRNA
ccccgcacggtgtgagcgcccga

SEQ ID NO: 4983 - DNA, 23 bp, Artificial Sequence
  Description of Artificial Sequence: Synthetic oligonucleotide
  Epidermal growth factor receptor (EGFR), ERBB1 phosphotyrosine kinase siRNA
cccgcacggtgtgagcgcccgac

SEQ ID NO: 4984 - DNA, 23 bp, Artificial Sequence
  Description of Artificial Sequence: Synthetic oligonucleotide
  Epidermal growth factor receptor (EGFR), ERBB1 phosphotyrosine kinase siRNA
ccgcacggtgtgagcgcccgacg

SEQ ID NO: 4985 - DNA, 23 bp, Artificial Sequence
  Description of Artificial Sequence: Synthetic oligonucleotide
  Epidermal growth factor receptor (EGFR), ERBB1 phosphotyrosine kinase siRNA
cgcacggtgtgagcgcccgacgc

SEQ ID NO: 4986 - DNA, 23 bp, Artificial Sequence
  Description of Artificial Sequence: Synthetic oligonucleotide
  Epidermal growth factor receptor (EGFR), ERBB1 phosphotyrosine kinase siRNA
gcacggtgtgagcgcccgacgcg

SEQ ID NO: 4987 - DNA, 23 bp, Artificial Sequence
  Description of Artificial Sequence: Synthetic oligonucleotide
  Epidermal growth factor receptor (EGFR), ERBB1 phosphotyrosine kinase siRNA
cacggtgtgagcgcccgacgcgg

SEQ ID NO: 4988 - DNA, 23 bp, Artificial Sequence
  Description of Artificial Sequence: Synthetic oligonucleotide
  Epidermal growth factor receptor (EGFR), ERBB1 phosphotyrosine kinase siRNA
acggtgtgagcgcccgacgcggc

SEQ ID NO: 4989 - DNA, 23 bp, Artificial Sequence
  Description of Artificial Sequence: Synthetic oligonucleotide
  Epidermal growth factor receptor (EGFR), ERBB1 phosphotyrosine kinase siRNA
cggtgtgagcgcccgacgcggcc

SEQ ID NO: 4990 - DNA, 23 bp, Artificial Sequence
  Description of Artificial Sequence: Synthetic oligonucleotide
  Epidermal growth factor receptor (EGFR), ERBB1 phosphotyrosine kinase siRNA
ggtgtgagcgcccgacgcggccg

SEQ ID NO: 4991 - DNA, 23 bp, Artificial Sequence
  Description of Artificial Sequence: Synthetic oligonucleotide
  Epidermal growth factor receptor (EGFR), ERBB1 phosphotyrosine kinase siRNA
gtgtgagcgcccgacgcggccga

SEQ ID NO: 4992 - DNA, 23 bp, Artificial Sequence
  Description of Artificial Sequence: Synthetic oligonucleotide
  Epidermal growth factor receptor (EGFR), ERBB1 phosphotyrosine kinase siRNA
tgtgagcgcccgacgcggccgag

SEQ ID NO: 4993 - DNA, 23 bp, Artificial Sequence
  Description of Artificial Sequence: Synthetic oligonucleotide
  Epidermal growth factor receptor (EGFR), ERBB1 phosphotyrosine kinase siRNA
gtgagcgcccgacgcggccgagg

SEQ ID NO: 4994 - DNA, 23 bp, Artificial Sequence
  Description of Artificial Sequence: Synthetic oligonucleotide
  Epidermal growth factor receptor (EGFR), ERBB1 phosphotyrosine kinase siRNA
tgagcgcccgacgcggccgaggc

SEQ ID NO: 4995 - DNA, 23 bp, Artificial Sequence
  Description of Artificial Sequence: Synthetic oligonucleotide
  Epidermal growth factor receptor (EGFR), ERBB1 phosphotyrosine kinase siRNA
gagcgcccgacgcggccgaggcg

SEQ ID NO: 4996 - DNA, 23 bp, Artificial Sequence
  Description of Artificial Sequence: Synthetic oligonucleotide
  Epidermal growth factor receptor (EGFR), ERBB1 phosphotyrosine kinase siRNA
agcgcccgacgcggccgaggcgg

SEQ ID NO: 4997 - DNA, 23 bp, Artificial Sequence
  Description of Artificial Sequence: Synthetic oligonucleotide
  Epidermal growth factor receptor (EGFR), ERBB1 phosphotyrosine kinase siRNA
gcgcccgacgcggccgaggcggc

SEQ ID NO: 4998 - DNA, 23 bp, Artificial Sequence
  Description of Artificial Sequence: Synthetic oligonucleotide
  Epidermal growth factor receptor (EGFR), ERBB1 phosphotyrosine kinase siRNA
cgcccgacgcggccgaggcggcc

SEQ ID NO: 4999 - DNA, 23 bp, Artificial Sequence
  Description of Artificial Sequence: Synthetic oligonucleotide
  Epidermal growth factor receptor (EGFR), ERBB1 phosphotyrosine kinase siRNA
gcccgacgcggccgaggcggccg

SEQ ID NO: 5000 - DNA, 23 bp, Artificial Sequence
  Description of Artificial Sequence: Synthetic oligonucleotide
  Epidermal growth factor receptor (EGFR), ERBB1 phosphotyrosine kinase siRNA
gcggccggagtcccgagctagcc

SEQ ID NO: 5001 - DNA, 23 bp, Artificial Sequence
  Description of Artificial Sequence: Synthetic oligonucleotide
  Epidermal growth factor receptor (EGFR), ERBB1 phosphotyrosine kinase siRNA
cggccggagtcccgagctagccc

SEQ ID NO: 5002 - DNA, 23 bp, Artificial Sequence
  Description of Artificial Sequence: Synthetic oligonucleotide
  Epidermal growth factor receptor (EGFR), ERBB1 phosphotyrosine kinase siRNA
ggccggagtcccgagctagcccc

SEQ ID NO: 5003 - DNA, 23 bp, Artificial Sequence
  Description of Artificial Sequence: Synthetic oligonucleotide
  Epidermal growth factor receptor (EGFR), ERBB1 phosphotyrosine kinase siRNA
gccggagtcccgagctagccccg

SEQ ID NO: 5004 - DNA, 23 bp, Artificial Sequence
  Description of Artificial Sequence: Synthetic oligonucleotide
  Epidermal growth factor receptor (EGFR), ERBB1 phosphotyrosine kinase siRNA
ccggagtcccgagctagccccgg

SEQ ID NO: 5005 - DNA, 23 bp, Artificial Sequence
  Description of Artificial Sequence: Synthetic oligonucleotide
  Epidermal growth factor receptor (EGFR), ERBB1 phosphotyrosine kinase siRNA
cggagtcccgagctagccccggc

SEQ ID NO: 5006 - DNA, 23 bp, Artificial Sequence
  Description of Artificial Sequence: Synthetic oligonucleotide
  Epidermal growth factor receptor (EGFR), ERBB1 phosphotyrosine kinase siRNA
cgccgcccagaccggacgacagg

SEQ ID NO: 5007 - DNA, 23 bp, Artificial Sequence
  Description of Artificial Sequence: Synthetic oligonucleotide
  Epidermal growth factor receptor (EGFR), ERBB1 phosphotyrosine kinase siRNA
gccgcccagaccggacgacaggc

SEQ ID NO: 5008 - DNA, 23 bp, Artificial Sequence
  Description of Artificial Sequence: Synthetic oligonucleotide
  Epidermal growth factor receptor (EGFR), ERBB1 phosphotyrosine kinase siRNA
ccgcccagaccggacgacaggcc

SEQ ID NO: 5009 - DNA, 23 bp, Artificial Sequence
  Description of Artificial Sequence: Synthetic oligonucleotide
  Epidermal growth factor receptor (EGFR), ERBB1 phosphotyrosine kinase siRNA
cgcccagaccggacgacaggcca

SEQ ID NO: 5010 - DNA, 23 bp, Artificial Sequence
  Description of Artificial Sequence: Synthetic oligonucleotide
  Epidermal growth factor receptor (EGFR), ERBB1 phosphotyrosine kinase siRNA
gcccagaccggacgacaggccac

SEQ ID NO: 5011 - DNA, 23 bp, Artificial Sequence
  Description of Artificial Sequence: Synthetic oligonucleotide
  Epidermal growth factor receptor (EGFR), ERBB1 phosphotyrosine kinase siRNA
cccagaccggacgacaggccacc

SEQ ID NO: 5012 - DNA, 23 bp, Artificial Sequence
  Description of Artificial Sequence: Synthetic oligonucleotide
  Epidermal growth factor receptor (EGFR), ERBB1 phosphotyrosine kinase siRNA
ccagaccggacgacaggccacct

SEQ ID NO: 5013 - DNA, 23 bp, Artificial Sequence
  Description of Artificial Sequence: Synthetic oligonucleotide
  Epidermal growth factor receptor (EGFR), ERBB1 phosphotyrosine kinase siRNA
cagaccggacgacaggccacctc

SEQ ID NO: 5014 - DNA, 23 bp, Artificial Sequence
  Description of Artificial Sequence: Synthetic oligonucleotide
  Epidermal growth factor receptor (EGFR), ERBB1 phosphotyrosine kinase siRNA
agaccggacgacaggccacctcg

SEQ ID NO: 5015 - DNA, 23 bp, Artificial Sequence
  Description of Artificial Sequence: Synthetic oligonucleotide
  Epidermal growth factor receptor (EGFR), ERBB1 phosphotyrosine kinase siRNA
gaccggacgacaggccacctcgt

SEQ ID NO: 5016 - DNA, 23 bp, Artificial Sequence
  Description of Artificial Sequence: Synthetic oligonucleotide
  Epidermal growth factor receptor (EGFR), ERBB1 phosphotyrosine kinase siRNA
accggacgacaggccacctcgtc

SEQ ID NO: 5017 - DNA, 23 bp, Artificial Sequence
  Description of Artificial Sequence: Synthetic oligonucleotide
  Epidermal growth factor receptor (EGFR), ERBB1 phosphotyrosine kinase siRNA
ccggacgacaggccacctcgtcg

SEQ ID NO: 5018 - DNA, 23 bp, Artificial Sequence
  Description of Artificial Sequence: Synthetic oligonucleotide
  Epidermal growth factor receptor (EGFR), ERBB1 phosphotyrosine kinase siRNA
cggacgacaggccacctcgtcgg

SEQ ID NO: 5019 - DNA, 23 bp, Artificial Sequence
  Description of Artificial Sequence: Synthetic oligonucleotide
  Epidermal growth factor receptor (EGFR), ERBB1 phosphotyrosine kinase siRNA
ggacgacaggccacctcgtcggc

SEQ ID NO: 5020 - DNA, 23 bp, Artificial Sequence
  Description of Artificial Sequence: Synthetic oligonucleotide
  Epidermal growth factor receptor (EGFR), ERBB1 phosphotyrosine kinase siRNA
gacgacaggccacctcgtcggcg

SEQ ID NO: 5021 - DNA, 23 bp, Artificial Sequence
  Description of Artificial Sequence: Synthetic oligonucleotide
  Epidermal growth factor receptor (EGFR), ERBB1 phosphotyrosine kinase siRNA
acgacaggccacctcgtcggcgt

SEQ ID NO: 5022 - DNA, 23 bp, Artificial Sequence
  Description of Artificial Sequence: Synthetic oligonucleotide
  Epidermal growth factor receptor (EGFR), ERBB1 phosphotyrosine kinase siRNA
cgacaggccacctcgtcggcgtc

SEQ ID NO: 5023 - DNA, 23 bp, Artificial Sequence
  Description of Artificial Sequence: Synthetic oligonucleotide
  Epidermal growth factor receptor (EGFR), ERBB1 phosphotyrosine kinase siRNA
gacaggccacctcgtcggcgtcc

SEQ ID NO: 5024 - DNA, 23 bp, Artificial Sequence
  Description of Artificial Sequence: Synthetic oligonucleotide
  Epidermal growth factor receptor (EGFR), ERBB1 phosphotyrosine kinase siRNA
acaggccacctcgtcggcgtccg

SEQ ID NO: 5025 - DNA, 23 bp, Artificial Sequence
  Description of Artificial Sequence: Synthetic oligonucleotide
  Epidermal growth factor receptor (EGFR), ERBB1 phosphotyrosine kinase siRNA
caggccacctcgtcggcgtccgc

SEQ ID NO: 5026 - DNA, 23 bp, Artificial Sequence
  Description of Artificial Sequence: Synthetic oligonucleotide
  Epidermal growth factor receptor (EGFR), ERBB1 phosphotyrosine kinase siRNA
aggccacctcgtcggcgtccgcc

SEQ ID NO: 5027 - DNA, 23 bp, Artificial Sequence
  Description of Artificial Sequence: Synthetic oligonucleotide
  Epidermal growth factor receptor (EGFR), ERBB1 phosphotyrosine kinase siRNA
ggccacctcgtcggcgtccgccc

SEQ ID NO: 5028 - DNA, 23 bp, Artificial Sequence
  Description of Artificial Sequence: Synthetic oligonucleotide
  Epidermal growth factor receptor (EGFR), ERBB1 phosphotyrosine kinase siRNA
gccacctcgtcggcgtccgcccg

SEQ ID NO: 5029 - DNA, 23 bp, Artificial Sequence
  Description of Artificial Sequence: Synthetic oligonucleotide
  Epidermal growth factor receptor (EGFR), ERBB1 phosphotyrosine kinase siRNA
ccacctcgtcggcgtccgcccga

SEQ ID NO: 5030 - DNA, 23 bp, Artificial Sequence
  Description of Artificial Sequence: Synthetic oligonucleotide
  Epidermal growth factor receptor (EGFR), ERBB1 phosphotyrosine kinase siRNA
cacctcgtcggcgtccgcccgag

SEQ ID NO: 5031 - DNA, 23 bp, Artificial Sequence
  Description of Artificial Sequence: Synthetic oligonucleotide
  Epidermal growth factor receptor (EGFR), ERBB1 phosphotyrosine kinase siRNA
acctcgtcggcgtccgcccgagt

SEQ ID NO: 5032 - DNA, 23 bp, Artificial Sequence
  Description of Artificial Sequence: Synthetic oligonucleotide
  Epidermal growth factor receptor (EGFR), ERBB1 phosphotyrosine kinase siRNA
cctcgtcggcgtccgcccgagtc

SEQ ID NO: 5033 - DNA, 23 bp, Artificial Sequence
  Description of Artificial Sequence: Synthetic oligonucleotide
  Epidermal growth factor receptor (EGFR), ERBB1 phosphotyrosine kinase siRNA
ctcgtcggcgtccgcccgagtcc

SEQ ID NO: 5034 - DNA, 23 bp, Artificial Sequence
  Description of Artificial Sequence: Synthetic oligonucleotide
  Epidermal growth factor receptor (EGFR), ERBB1 phosphotyrosine kinase siRNA
tcgtcggcgtccgcccgagtccc

SEQ ID NO: 5035 - DNA, 23 bp, Artificial Sequence
  Description of Artificial Sequence: Synthetic oligonucleotide
  Epidermal growth factor receptor (EGFR), ERBB1 phosphotyrosine kinase siRNA
cgtcggcgtccgcccgagtcccc

SEQ ID NO: 5036 - DNA, 23 bp, Artificial Sequence
  Description of Artificial Sequence: Synthetic oligonucleotide
  Epidermal growth factor receptor (EGFR), ERBB1 phosphotyrosine kinase siRNA
gtcggcgtccgcccgagtccccg

SEQ ID NO: 5037 - DNA, 23 bp, Artificial Sequence
  Description of Artificial Sequence: Synthetic oligonucleotide
  Epidermal growth factor receptor (EGFR), ERBB1 phosphotyrosine kinase siRNA
tcggcgtccgcccgagtccccgc

SEQ ID NO: 5038 - DNA, 23 bp, Artificial Sequence
  Description of Artificial Sequence: Synthetic oligonucleotide
  Epidermal growth factor receptor (EGFR), ERBB1 phosphotyrosine kinase siRNA
cggcgtccgcccgagtccccgcc

SEQ ID NO: 5039 - DNA, 23 bp, Artificial Sequence
  Description of Artificial Sequence: Synthetic oligonucleotide
  Epidermal growth factor receptor (EGFR), ERBB1 phosphotyrosine kinase siRNA
ggcgtccgcccgagtccccgcct

SEQ ID NO: 5040 - DNA, 23 bp, Artificial Sequence
  Description of Artificial Sequence: Synthetic oligonucleotide
  Epidermal growth factor receptor (EGFR), ERBB1 phosphotyrosine kinase siRNA
gcgtccgcccgagtccccgcctc

SEQ ID NO: 5041 - DNA, 23 bp, Artificial Sequence
  Description of Artificial Sequence: Synthetic oligonucleotide
  Epidermal growth factor receptor (EGFR), ERBB1 phosphotyrosine kinase siRNA
cgtccgcccgagtccccgcctcg

SEQ ID NO: 5042 - DNA, 23 bp, Artificial Sequence
  Description of Artificial Sequence: Synthetic oligonucleotide
  Epidermal growth factor receptor (EGFR), ERBB1 phosphotyrosine kinase siRNA
gtccgcccgagtccccgcctcgc

SEQ ID NO: 5043 - DNA, 23 bp, Artificial Sequence
  Description of Artificial Sequence: Synthetic oligonucleotide
  Epidermal growth factor receptor (EGFR), ERBB1 phosphotyrosine kinase siRNA
tccgcccgagtccccgcctcgcc

SEQ ID NO: 5044 - DNA, 23 bp, Artificial Sequence
  Description of Artificial Sequence: Synthetic oligonucleotide
  Epidermal growth factor receptor (EGFR), ERBB1 phosphotyrosine kinase siRNA
ccgcccgagtccccgcctcgccg

SEQ ID NO: 5045 - DNA, 23 bp, Artificial Sequence
  Description of Artificial Sequence: Synthetic oligonucleotide
  Epidermal growth factor receptor (EGFR), ERBB1 phosphotyrosine kinase siRNA
cgcccgagtccccgcctcgccgc

SEQ ID NO: 5046 - DNA, 23 bp, Artificial Sequence
  Description of Artificial Sequence: Synthetic oligonucleotide
  Epidermal growth factor receptor (EGFR), ERBB1 phosphotyrosine kinase siRNA
gcccgagtccccgcctcgccgcc

SEQ ID NO: 5047 - DNA, 23 bp, Artificial Sequence
  Description of Artificial Sequence: Synthetic oligonucleotide
  Epidermal growth factor receptor (EGFR), ERBB1 phosphotyrosine kinase siRNA
cccgagtccccgcctcgccgcca

SEQ ID NO: 5048 - DNA, 23 bp, Artificial Sequence
  Description of Artificial Sequence: Synthetic oligonucleotide
  Epidermal growth factor receptor (EGFR), ERBB1 phosphotyrosine kinase siRNA
ccgagtccccgcctcgccgccaa

SEQ ID NO: 5049 - DNA, 23 bp, Artificial Sequence
  Description of Artificial Sequence: Synthetic oligonucleotide
  Epidermal growth factor receptor (EGFR), ERBB1 phosphotyrosine kinase siRNA
cgagtccccgcctcgccgccaac

SEQ ID NO: 5050 - DNA, 23 bp, Artificial Sequence
  Description of Artificial Sequence: Synthetic oligonucleotide
  Epidermal growth factor receptor (EGFR), ERBB1 phosphotyrosine kinase siRNA
gagtccccgcctcgccgccaacg

SEQ ID NO: 5051 - DNA, 23 bp, Artificial Sequence
  Description of Artificial Sequence: Synthetic oligonucleotide
  Epidermal growth factor receptor (EGFR), ERBB1 phosphotyrosine kinase siRNA
agtccccgcctcgccgccaacgc

SEQ ID NO: 5052 - DNA, 23 bp, Artificial Sequence
  Description of Artificial Sequence: Synthetic oligonucleotide
  Epidermal growth factor receptor (EGFR), ERBB1 phosphotyrosine kinase siRNA
gtccccgcctcgccgccaacgcc

SEQ ID NO: 5053 - DNA, 23 bp, Artificial Sequence
  Description of Artificial Sequence: Synthetic oligonucleotide
  Epidermal growth factor receptor (EGFR), ERBB1 phosphotyrosine kinase siRNA
tccccgcctcgccgccaacgcca

SEQ ID NO: 5054 - DNA, 23 bp, Artificial Sequence
  Description of Artificial Sequence: Synthetic oligonucleotide
  Epidermal growth factor receptor (EGFR), ERBB1 phosphotyrosine kinase siRNA
ccccgcctcgccgccaacgccac

SEQ ID NO: 5055 - DNA, 23 bp, Artificial Sequence
  Description of Artificial Sequence: Synthetic oligonucleotide
  Epidermal growth factor receptor (EGFR), ERBB1 phosphotyrosine kinase siRNA
cccgcctcgccgccaacgccaca

SEQ ID NO: 5056 - DNA, 23 bp, Artificial Sequence
  Description of Artificial Sequence: Synthetic oligonucleotide
  Epidermal growth factor receptor (EGFR), ERBB1 phosphotyrosine kinase siRNA
ccgcctcgccgccaacgccacaa

SEQ ID NO: 5057 - DNA, 23 bp, Artificial Sequence
  Description of Artificial Sequence: Synthetic oligonucleotide
  Epidermal growth factor receptor (EGFR), ERBB1 phosphotyrosine kinase siRNA
cgcctcgccgccaacgccacaac

SEQ ID NO: 5058 - DNA, 23 bp, Artificial Sequence
  Description of Artificial Sequence: Synthetic oligonucleotide
  Epidermal growth factor receptor (EGFR), ERBB1 phosphotyrosine kinase siRNA
gcctcgccgccaacgccacaacc

SEQ ID NO: 5059 - DNA, 23 bp, Artificial Sequence
  Description of Artificial Sequence: Synthetic oligonucleotide
  Epidermal growth factor receptor (EGFR), ERBB1 phosphotyrosine kinase siRNA
cctcgccgccaacgccacaacca

SEQ ID NO: 5060 - DNA, 23 bp, Artificial Sequence
  Description of Artificial Sequence: Synthetic oligonucleotide
  Epidermal growth factor receptor (EGFR), ERBB1 phosphotyrosine kinase siRNA
ctcgccgccaacgccacaaccac

SEQ ID NO: 5061 - DNA, 23 bp, Artificial Sequence
  Description of Artificial Sequence: Synthetic oligonucleotide
  Epidermal growth factor receptor (EGFR), ERBB1 phosphotyrosine kinase siRNA
tcgccgccaacgccacaaccacc

SEQ ID NO: 5062 - DNA, 23 bp, Artificial Sequence
  Description of Artificial Sequence: Synthetic oligonucleotide
  Epidermal growth factor receptor (EGFR), ERBB1 phosphotyrosine kinase siRNA
cgccgccaacgccacaaccaccg

SEQ ID NO: 5063 - DNA, 23 bp, Artificial Sequence
  Description of Artificial Sequence: Synthetic oligonucleotide
  Epidermal growth factor receptor (EGFR), ERBB1 phosphotyrosine kinase siRNA
gccgccaacgccacaaccaccgc

SEQ ID NO: 5064 - DNA, 23 bp, Artificial Sequence
  Description of Artificial Sequence: Synthetic oligonucleotide
  Epidermal growth factor receptor (EGFR), ERBB1 phosphotyrosine kinase siRNA
ccgccaacgccacaaccaccgcg

SEQ ID NO: 5065 - DNA, 23 bp, Artificial Sequence
  Description of Artificial Sequence: Synthetic oligonucleotide
  Epidermal growth factor receptor (EGFR), ERBB1 phosphotyrosine kinase siRNA
cgccaacgccacaaccaccgcgc

SEQ ID NO: 5066 - DNA, 23 bp, Artificial Sequence
  Description of Artificial Sequence: Synthetic oligonucleotide
  Epidermal growth factor receptor (EGFR), ERBB1 phosphotyrosine kinase siRNA
gccaacgccacaaccaccgcgca

SEQ ID NO: 5067 - DNA, 23 bp, Artificial Sequence
  Description of Artificial Sequence: Synthetic oligonucleotide
  Epidermal growth factor receptor (EGFR), ERBB1 phosphotyrosine kinase siRNA
ccaacgccacaaccaccgcgcac

SEQ ID NO: 5068 - DNA, 23 bp, Artificial Sequence
  Description of Artificial Sequence: Synthetic oligonucleotide
  Epidermal growth factor receptor (EGFR), ERBB1 phosphotyrosine kinase siRNA
caacgccacaaccaccgcgcacg

SEQ ID NO: 5069 - DNA, 23 bp, Artificial Sequence
  Description of Artificial Sequence: Synthetic oligonucleotide
  Epidermal growth factor receptor (EGFR), ERBB1 phosphotyrosine kinase siRNA
aacgccacaaccaccgcgcacgg

SEQ ID NO: 5070 - DNA, 23 bp, Artificial Sequence
  Description of Artificial Sequence: Synthetic oligonucleotide
  Epidermal growth factor receptor (EGFR), ERBB1 phosphotyrosine kinase siRNA
acgccacaaccaccgcgcacggc

SEQ ID NO: 5071 - DNA, 23 bp, Artificial Sequence
  Description of Artificial Sequence: Synthetic oligonucleotide
  Epidermal growth factor receptor (EGFR), ERBB1 phosphotyrosine kinase siRNA
cgccacaaccaccgcgcacggcc

SEQ ID NO: 5072 - DNA, 23 bp, Artificial Sequence
  Description of Artificial Sequence: Synthetic oligonucleotide
  Epidermal growth factor receptor (EGFR), ERBB1 phosphotyrosine kinase siRNA
gccacaaccaccgcgcacggccc

SEQ ID NO: 5073 - DNA, 23 bp, Artificial Sequence
  Description of Artificial Sequence: Synthetic oligonucleotide
  Epidermal growth factor receptor (EGFR), ERBB1 phosphotyrosine kinase siRNA
ccacaaccaccgcgcacggcccc

SEQ ID NO: 5074 - DNA, 23 bp, Artificial Sequence
  Description of Artificial Sequence: Synthetic oligonucleotide
  Epidermal growth factor receptor (EGFR), ERBB1 phosphotyrosine kinase siRNA
cacaaccaccgcgcacggccccc

SEQ ID NO: 5075 - DNA, 23 bp, Artificial Sequence
  Description of Artificial Sequence: Synthetic oligonucleotide
  Epidermal growth factor receptor (EGFR), ERBB1 phosphotyrosine kinase siRNA
acaaccaccgcgcacggccccct

SEQ ID NO: 5076 - DNA, 23 bp, Artificial Sequence
  Description of Artificial Sequence: Synthetic oligonucleotide
  Epidermal growth factor receptor (EGFR), ERBB1 phosphotyrosine kinase siRNA
caaccaccgcgcacggccccctg

SEQ ID NO: 5077 - DNA, 23 bp, Artificial Sequence
  Description of Artificial Sequence: Synthetic oligonucleotide
  Epidermal growth factor receptor (EGFR), ERBB1 phosphotyrosine kinase siRNA
aaccaccgcgcacggccccctga

SEQ ID NO: 5078 - DNA, 23 bp, Artificial Sequence
  Description of Artificial Sequence: Synthetic oligonucleotide
  Epidermal growth factor receptor (EGFR), ERBB1 phosphotyrosine kinase siRNA
accaccgcgcacggccccctgac

SEQ ID NO: 5079 - DNA, 23 bp, Artificial Sequence
  Description of Artificial Sequence: Synthetic oligonucleotide
  Epidermal growth factor receptor (EGFR), ERBB1 phosphotyrosine kinase siRNA
ccaccgcgcacggccccctgact

SEQ ID NO: 5080 - DNA, 23 bp, Artificial Sequence
  Description of Artificial Sequence: Synthetic oligonucleotide
  Epidermal growth factor receptor (EGFR), ERBB1 phosphotyrosine kinase siRNA
caccgcgcacggccccctgactc

SEQ ID NO: 5081 - DNA, 23 bp, Artificial Sequence
  Description of Artificial Sequence: Synthetic oligonucleotide
  Epidermal growth factor receptor (EGFR), ERBB1 phosphotyrosine kinase siRNA
accgcgcacggccccctgactcc

SEQ ID NO: 5082 - DNA, 23 bp, Artificial Sequence
  Description of Artificial Sequence: Synthetic oligonucleotide
  Epidermal growth factor receptor (EGFR), ERBB1 phosphotyrosine kinase siRNA
ccgcgcacggccccctgactccg

SEQ ID NO: 5083 - DNA, 23 bp, Artificial Sequence
  Description of Artificial Sequence: Synthetic oligonucleotide
  Epidermal growth factor receptor (EGFR), ERBB1 phosphotyrosine kinase siRNA
cgcgcacggccccctgactccgt

SEQ ID NO: 5084 - DNA, 23 bp, Artificial Sequence
  Description of Artificial Sequence: Synthetic oligonucleotide
  Epidermal growth factor receptor (EGFR), ERBB1 phosphotyrosine kinase siRNA
gcgcacggccccctgactccgtc

SEQ ID NO: 5085 - DNA, 23 bp, Artificial Sequence
  Description of Artificial Sequence: Synthetic oligonucleotide
  Epidermal growth factor receptor (EGFR), ERBB1 phosphotyrosine kinase siRNA
cgcacggccccctgactccgtcc

SEQ ID NO: 5086 - DNA, 23 bp, Artificial Sequence
  Description of Artificial Sequence: Synthetic oligonucleotide
  Epidermal growth factor receptor (EGFR), ERBB1 phosphotyrosine kinase siRNA
gcacggccccctgactccgtcca

SEQ ID NO: 5087 - DNA, 23 bp, Artificial Sequence
  Description of Artificial Sequence: Synthetic oligonucleotide
  Epidermal growth factor receptor (EGFR), ERBB1 phosphotyrosine kinase siRNA
cacggccccctgactccgtccag

SEQ ID NO: 5088 - DNA, 23 bp, Artificial Sequence
  Description of Artificial Sequence: Synthetic oligonucleotide
  Epidermal growth factor receptor (EGFR), ERBB1 phosphotyrosine kinase siRNA
acggccccctgactccgtccagt

SEQ ID NO: 5089 - DNA, 23 bp, Artificial Sequence
  Description of Artificial Sequence: Synthetic oligonucleotide
  Epidermal growth factor receptor (EGFR), ERBB1 phosphotyrosine kinase siRNA
cggccccctgactccgtccagta

SEQ ID NO: 5090 - DNA, 23 bp, Artificial Sequence
  Description of Artificial Sequence: Synthetic oligonucleotide
  Epidermal growth factor receptor (EGFR), ERBB1 phosphotyrosine kinase siRNA
ggccccctgactccgtccagtat

SEQ ID NO: 5091 - DNA, 23 bp, Artificial Sequence
  Description of Artificial Sequence: Synthetic oligonucleotide
  Epidermal growth factor receptor (EGFR), ERBB1 phosphotyrosine kinase siRNA
gccccctgactccgtccagtatt

SEQ ID NO: 5092 - DNA, 23 bp, Artificial Sequence
  Description of Artificial Sequence: Synthetic oligonucleotide
  Epidermal growth factor receptor (EGFR), ERBB1 phosphotyrosine kinase siRNA
ccccctgactccgtccagtattg

SEQ ID NO: 5093 - DNA, 23 bp, Artificial Sequence
  Description of Artificial Sequence: Synthetic oligonucleotide
  Epidermal growth factor receptor (EGFR), ERBB1 phosphotyrosine kinase siRNA
cccctgactccgtccagtattga

SEQ ID NO: 5094 - DNA, 23 bp, Artificial Sequence
  Description of Artificial Sequence: Synthetic oligonucleotide
  Epidermal growth factor receptor (EGFR), ERBB1 phosphotyrosine kinase siRNA
ccctgactccgtccagtattgat

SEQ ID NO: 5095 - DNA, 23 bp, Artificial Sequence
  Description of Artificial Sequence: Synthetic oligonucleotide
  Epidermal growth factor receptor (EGFR), ERBB1 phosphotyrosine kinase siRNA
cctgactccgtccagtattgatc

SEQ ID NO: 5096 - DNA, 23 bp, Artificial Sequence
  Description of Artificial Sequence: Synthetic oligonucleotide
  Epidermal growth factor receptor (EGFR), ERBB1 phosphotyrosine kinase siRNA
ctgactccgtccagtattgatcg

SEQ ID NO: 5097 - DNA, 23 bp, Artificial Sequence
  Description of Artificial Sequence: Synthetic oligonucleotide
  Epidermal growth factor receptor (EGFR), ERBB1 phosphotyrosine kinase siRNA
tgactccgtccagtattgatcgg

SEQ ID NO: 5098 - DNA, 23 bp, Artificial Sequence
  Description of Artificial Sequence: Synthetic oligonucleotide
  Epidermal growth factor receptor (EGFR), ERBB1 phosphotyrosine kinase siRNA
gactccgtccagtattgatcggg

SEQ ID NO: 5099 - DNA, 23 bp, Artificial Sequence
  Description of Artificial Sequence: Synthetic oligonucleotide
  Epidermal growth factor receptor (EGFR), ERBB1 phosphotyrosine kinase siRNA
actccgtccagtattgatcggga

SEQ ID NO: 5100 - DNA, 23 bp, Artificial Sequence
  Description of Artificial Sequence: Synthetic oligonucleotide
  Epidermal growth factor receptor (EGFR), ERBB1 phosphotyrosine kinase siRNA
ctccgtccagtattgatcgggag

SEQ ID NO: 5101 - DNA, 23 bp, Artificial Sequence
  Description of Artificial Sequence: Synthetic oligonucleotide
  Epidermal growth factor receptor (EGFR), ERBB1 phosphotyrosine kinase siRNA
tccgtccagtattgatcgggaga

SEQ ID NO: 5102 - DNA, 23 bp, Artificial Sequence
  Description of Artificial Sequence: Synthetic oligonucleotide
  Epidermal growth factor receptor (EGFR), ERBB1 phosphotyrosine kinase siRNA
ccgtccagtattgatcgggagag

SEQ ID NO: 5103 - DNA, 23 bp, Artificial Sequence
  Description of Artificial Sequence: Synthetic oligonucleotide
  Epidermal growth factor receptor (EGFR), ERBB1 phosphotyrosine kinase siRNA
cgtccagtattgatcgggagagc

SEQ ID NO: 5104 - DNA, 23 bp, Artificial Sequence
  Description of Artificial Sequence: Synthetic oligonucleotide
  Epidermal growth factor receptor (EGFR), ERBB1 phosphotyrosine kinase siRNA
gtccagtattgatcgggagagcc

SEQ ID NO: 5105 - DNA, 23 bp, Artificial Sequence
  Description of Artificial Sequence: Synthetic oligonucleotide
  Epidermal growth factor receptor (EGFR), ERBB1 phosphotyrosine kinase siRNA
tccagtattgatcgggagagccg

SEQ ID NO: 5106 - DNA, 23 bp, Artificial Sequence
  Description of Artificial Sequence: Synthetic oligonucleotide
  Epidermal growth factor receptor (EGFR), ERBB1 phosphotyrosine kinase siRNA
ccagtattgatcgggagagccgg

SEQ ID NO: 5107 - DNA, 23 bp, Artificial Sequence
  Description of Artificial Sequence: Synthetic oligonucleotide
  Epidermal growth factor receptor (EGFR), ERBB1 phosphotyrosine kinase siRNA
cagtattgatcgggagagccgga

SEQ ID NO: 5108 - DNA, 23 bp, Artificial Sequence
  Description of Artificial Sequence: Synthetic oligonucleotide
  Epidermal growth factor receptor (EGFR), ERBB1 phosphotyrosine kinase siRNA
agtattgatcgggagagccggag

SEQ ID NO: 5109 - DNA, 23 bp, Artificial Sequence
  Description of Artificial Sequence: Synthetic oligonucleotide
  Epidermal growth factor receptor (EGFR), ERBB1 phosphotyrosine kinase siRNA
gtattgatcgggagagccggagc

SEQ ID NO: 5110 - DNA, 23 bp, Artificial Sequence
  Description of Artificial Sequence: Synthetic oligonucleotide
  Epidermal growth factor receptor (EGFR), ERBB1 phosphotyrosine kinase siRNA
tattgatcgggagagccggagcg

SEQ ID NO: 5111 - DNA, 23 bp, Artificial Sequence
  Description of Artificial Sequence: Synthetic oligonucleotide
  Epidermal growth factor receptor (EGFR), ERBB1 phosphotyrosine kinase siRNA
attgatcgggagagccggagcga

SEQ ID NO: 5112 - DNA, 23 bp, Artificial Sequence
  Description of Artificial Sequence: Synthetic oligonucleotide
  Epidermal growth factor receptor (EGFR), ERBB1 phosphotyrosine kinase siRNA
ttgatcgggagagccggagcgag

SEQ ID NO: 5113 - DNA, 23 bp, Artificial Sequence
  Description of Artificial Sequence: Synthetic oligonucleotide
  Epidermal growth factor receptor (EGFR), ERBB1 phosphotyrosine kinase siRNA
tgatcgggagagccggagcgagc

SEQ ID NO: 5114 - DNA, 23 bp, Artificial Sequence
  Description of Artificial Sequence: Synthetic oligonucleotide
  Epidermal growth factor receptor (EGFR), ERBB1 phosphotyrosine kinase siRNA
gatcgggagagccggagcgagct

SEQ ID NO: 5115 - DNA, 23 bp, Artificial Sequence
  Description of Artificial Sequence: Synthetic oligonucleotide
  Epidermal growth factor receptor (EGFR), ERBB1 phosphotyrosine kinase siRNA
atcgggagagccggagcgagctc

SEQ ID NO: 5116 - DNA, 23 bp, Artificial Sequence
  Description of Artificial Sequence: Synthetic oligonucleotide
  Epidermal growth factor receptor (EGFR), ERBB1 phosphotyrosine kinase siRNA
tcgggagagccggagcgagctct

SEQ ID NO: 5117 - DNA, 23 bp, Artificial Sequence
  Description of Artificial Sequence: Synthetic oligonucleotide
  Epidermal growth factor receptor (EGFR), ERBB1 phosphotyrosine kinase siRNA
cgggagagccggagcgagctctt

SEQ ID NO: 5118 - DNA, 23 bp, Artificial Sequence
  Description of Artificial Sequence: Synthetic oligonucleotide
  Epidermal growth factor receptor (EGFR), ERBB1 phosphotyrosine kinase siRNA
gggagagccggagcgagctcttc

SEQ ID NO: 5119 - DNA, 23 bp, Artificial Sequence
  Description of Artificial Sequence: Synthetic oligonucleotide
  Epidermal growth factor receptor (EGFR), ERBB1 phosphotyrosine kinase siRNA
ggagagccggagcgagctcttcg

SEQ ID NO: 5120 - DNA, 23 bp, Artificial Sequence
  Description of Artificial Sequence: Synthetic oligonucleotide
  Epidermal growth factor receptor (EGFR), ERBB1 phosphotyrosine kinase siRNA
gagagccggagcgagctcttcgg

SEQ ID NO: 5121 - DNA, 23 bp, Artificial Sequence
  Description of Artificial Sequence: Synthetic oligonucleotide
  Epidermal growth factor receptor (EGFR), ERBB1 phosphotyrosine kinase siRNA
agagccggagcgagctcttcggg

SEQ ID NO: 5122 - DNA, 23 bp, Artificial Sequence
  Description of Artificial Sequence: Synthetic oligonucleotide
  Epidermal growth factor receptor (EGFR), ERBB1 phosphotyrosine kinase siRNA
gagccggagcgagctcttcgggg

SEQ ID NO: 5123 - DNA, 23 bp, Artificial Sequence
  Description of Artificial Sequence: Synthetic oligonucleotide
  Epidermal growth factor receptor (EGFR), ERBB1 phosphotyrosine kinase siRNA
agccggagcgagctcttcgggga

SEQ ID NO: 5124 - DNA, 23 bp, Artificial Sequence
  Description of Artificial Sequence: Synthetic oligonucleotide
  Epidermal growth factor receptor (EGFR), ERBB1 phosphotyrosine kinase siRNA
gccggagcgagctcttcggggag

SEQ ID NO: 5125 - DNA, 23 bp, Artificial Sequence
  Description of Artificial Sequence: Synthetic oligonucleotide
  Epidermal growth factor receptor (EGFR), ERBB1 phosphotyrosine kinase siRNA
ccggagcgagctcttcggggagc

SEQ ID NO: 5126 - DNA, 23 bp, Artificial Sequence
  Description of Artificial Sequence: Synthetic oligonucleotide
  Epidermal growth factor receptor (EGFR), ERBB1 phosphotyrosine kinase siRNA
cggagcgagctcttcggggagca

SEQ ID NO: 5127 - DNA, 23 bp, Artificial Sequence
  Description of Artificial Sequence: Synthetic oligonucleotide
  Epidermal growth factor receptor (EGFR), ERBB1 phosphotyrosine kinase siRNA
ggagcgagctcttcggggagcag

SEQ ID NO: 5128 - DNA, 23 bp, Artificial Sequence
  Description of Artificial Sequence: Synthetic oligonucleotide
  Epidermal growth factor receptor (EGFR), ERBB1 phosphotyrosine kinase siRNA
gagcgagctcttcggggagcagc

SEQ ID NO: 5129 - DNA, 23 bp, Artificial Sequence
  Description of Artificial Sequence: Synthetic oligonucleotide
  Epidermal growth factor receptor (EGFR), ERBB1 phosphotyrosine kinase siRNA
atgcgaccctccgggacggccgg

SEQ ID NO: 5130 - DNA, 23 bp, Artificial Sequence
  Description of Artificial Sequence: Synthetic oligonucleotide
  Epidermal growth factor receptor (EGFR), ERBB1 phosphotyrosine kinase siRNA
tgcgaccctccgggacggccggg

SEQ ID NO: 5131 - DNA, 23 bp, Artificial Sequence
  Description of Artificial Sequence: Synthetic oligonucleotide
  Epidermal growth factor receptor (EGFR), ERBB1 phosphotyrosine kinase siRNA
gccggggcagcgctcctggcgct

SEQ ID NO: 5132 - DNA, 23 bp, Artificial Sequence
  Description of Artificial Sequence: Synthetic oligonucleotide
  Epidermal growth factor receptor (EGFR), ERBB1 phosphotyrosine kinase siRNA
ccggggcagcgctcctggcgctg

SEQ ID NO: 5133 - DNA, 23 bp, Artificial Sequence
  Description of Artificial Sequence: Synthetic oligonucleotide
  Epidermal growth factor receptor (EGFR), ERBB1 phosphotyrosine kinase siRNA
cggggcagcgctcctggcgctgc

SEQ ID NO: 5134 - DNA, 23 bp, Artificial Sequence
  Description of Artificial Sequence: Synthetic oligonucleotide
  Epidermal growth factor receptor (EGFR), ERBB1 phosphotyrosine kinase siRNA
ggggcagcgctcctggcgctgct

SEQ ID NO: 5135 - DNA, 23 bp, Artificial Sequence
  Description of Artificial Sequence: Synthetic oligonucleotide
  Epidermal growth factor receptor (EGFR), ERBB1 phosphotyrosine kinase siRNA
gggcagcgctcctggcgctgctg

SEQ ID NO: 5136 - DNA, 23 bp, Artificial Sequence
  Description of Artificial Sequence: Synthetic oligonucleotide
  Epidermal growth factor receptor (EGFR), ERBB1 phosphotyrosine kinase siRNA
ggcagcgctcctggcgctgctgg

SEQ ID NO: 5137 - DNA, 23 bp, Artificial Sequence
  Description of Artificial Sequence: Synthetic oligonucleotide
  Epidermal growth factor receptor (EGFR), ERBB1 phosphotyrosine kinase siRNA
gcagcgctcctggcgctgctggc

SEQ ID NO: 5138 - DNA, 23 bp, Artificial Sequence
  Description of Artificial Sequence: Synthetic oligonucleotide
  Epidermal growth factor receptor (EGFR), ERBB1 phosphotyrosine kinase siRNA
cagcgctcctggcgctgctggct

SEQ ID NO: 5139 - DNA, 23 bp, Artificial Sequence
  Description of Artificial Sequence: Synthetic oligonucleotide
  Epidermal growth factor receptor (EGFR), ERBB1 phosphotyrosine kinase siRNA
agcgctcctggcgctgctggctg

SEQ ID NO: 5140 - DNA, 23 bp, Artificial Sequence
  Description of Artificial Sequence: Synthetic oligonucleotide
  Epidermal growth factor receptor (EGFR), ERBB1 phosphotyrosine kinase siRNA
gcgctcctggcgctgctggctgc

SEQ ID NO: 5141 - DNA, 23 bp, Artificial Sequence
  Description of Artificial Sequence: Synthetic oligonucleotide
  Epidermal growth factor receptor (EGFR), ERBB1 phosphotyrosine kinase siRNA
cgctcctggcgctgctggctgcg

SEQ ID NO: 5142 - DNA, 23 bp, Artificial Sequence
  Description of Artificial Sequence: Synthetic oligonucleotide
  Epidermal growth factor receptor (EGFR), ERBB1 phosphotyrosine kinase siRNA
gctcctggcgctgctggctgcgc

SEQ ID NO: 5143 - DNA, 23 bp, Artificial Sequence
  Description of Artificial Sequence: Synthetic oligonucleotide
  Epidermal growth factor receptor (EGFR), ERBB1 phosphotyrosine kinase siRNA
ctcctggcgctgctggctgcgct

SEQ ID NO: 5144 - DNA, 23 bp, Artificial Sequence
  Description of Artificial Sequence: Synthetic oligonucleotide
  Epidermal growth factor receptor (EGFR), ERBB1 phosphotyrosine kinase siRNA
tcctggcgctgctggctgcgctc

SEQ ID NO: 5145 - DNA, 23 bp, Artificial Sequence
  Description of Artificial Sequence: Synthetic oligonucleotide
  Epidermal growth factor receptor (EGFR), ERBB1 phosphotyrosine kinase siRNA
cctggcgctgctggctgcgctct

SEQ ID NO: 5146 - DNA, 23 bp, Artificial Sequence
  Description of Artificial Sequence: Synthetic oligonucleotide
  Epidermal growth factor receptor (EGFR), ERBB1 phosphotyrosine kinase siRNA
ctggcgctgctggctgcgctctg

SEQ ID NO: 5147 - DNA, 23 bp, Artificial Sequence
  Description of Artificial Sequence: Synthetic oligonucleotide
  Epidermal growth factor receptor (EGFR), ERBB1 phosphotyrosine kinase siRNA
tggcgctgctggctgcgctctgc

SEQ ID NO: 5148 - DNA, 23 bp, Artificial Sequence
  Description of Artificial Sequence: Synthetic oligonucleotide
  Epidermal growth factor receptor (EGFR), ERBB1 phosphotyrosine kinase siRNA
ggcgctgctggctgcgctctgcc

SEQ ID NO: 5149 - DNA, 23 bp, Artificial Sequence
  Description of Artificial Sequence: Synthetic oligonucleotide
  Epidermal growth factor receptor (EGFR), ERBB1 phosphotyrosine kinase siRNA
gcgctgctggctgcgctctgccc

SEQ ID NO: 5150 - DNA, 23 bp, Artificial Sequence
  Description of Artificial Sequence: Synthetic oligonucleotide
  Epidermal growth factor receptor (EGFR), ERBB1 phosphotyrosine kinase siRNA
cgctgctggctgcgctctgcccg

SEQ ID NO: 5151 - DNA, 23 bp, Artificial Sequence
  Description of Artificial Sequence: Synthetic oligonucleotide
  Epidermal growth factor receptor (EGFR), ERBB1 phosphotyrosine kinase siRNA
gctgctggctgcgctctgcccgg

SEQ ID NO: 5152 - DNA, 23 bp, Artificial Sequence
  Description of Artificial Sequence: Synthetic oligonucleotide
  Epidermal growth factor receptor (EGFR), ERBB1 phosphotyrosine kinase siRNA
ctgctggctgcgctctgcccggc

SEQ ID NO: 5153 - DNA, 23 bp, Artificial Sequence
  Description of Artificial Sequence: Synthetic oligonucleotide
  Epidermal growth factor receptor (EGFR), ERBB1 phosphotyrosine kinase siRNA
tgctggctgcgctctgcccggcg

SEQ ID NO: 5154 - DNA, 23 bp, Artificial Sequence
  Description of Artificial Sequence: Synthetic oligonucleotide
  Epidermal growth factor receptor (EGFR), ERBB1 phosphotyrosine kinase siRNA
gctggctgcgctctgcccggcga

SEQ ID NO: 5155 - DNA, 23 bp, Artificial Sequence
  Description of Artificial Sequence: Synthetic oligonucleotide
  Epidermal growth factor receptor (EGFR), ERBB1 phosphotyrosine kinase siRNA
ctggctgcgctctgcccggcgag

SEQ ID NO: 5156 - DNA, 23 bp, Artificial Sequence
  Description of Artificial Sequence: Synthetic oligonucleotide
  Epidermal growth factor receptor (EGFR), ERBB1 phosphotyrosine kinase siRNA
tggctgcgctctgcccggcgagt

SEQ ID NO: 5157 - DNA, 23 bp, Artificial Sequence
  Description of Artificial Sequence: Synthetic oligonucleotide
  Epidermal growth factor receptor (EGFR), ERBB1 phosphotyrosine kinase siRNA
ggctgcgctctgcccggcgagtc

SEQ ID NO: 5158 - DNA, 23 bp, Artificial Sequence
  Description of Artificial Sequence: Synthetic oligonucleotide
  Epidermal growth factor receptor (EGFR), ERBB1 phosphotyrosine kinase siRNA
gctgcgctctgcccggcgagtcg

SEQ ID NO: 5159 - DNA, 23 bp, Artificial Sequence
  Description of Artificial Sequence: Synthetic oligonucleotide
  Epidermal growth factor receptor (EGFR), ERBB1 phosphotyrosine kinase siRNA
ctgcgctctgcccggcgagtcgg

SEQ ID NO: 5160 - DNA, 23 bp, Artificial Sequence
  Description of Artificial Sequence: Synthetic oligonucleotide
  Epidermal growth factor receptor (EGFR), ERBB1 phosphotyrosine kinase siRNA
tgcgctctgcccggcgagtcggg

SEQ ID NO: 5161 - DNA, 23 bp, Artificial Sequence
  Description of Artificial Sequence: Synthetic oligonucleotide
  Epidermal growth factor receptor (EGFR), ERBB1 phosphotyrosine kinase siRNA
gcgctctgcccggcgagtcgggc

SEQ ID NO: 5162 - DNA, 23 bp, Artificial Sequence
  Description of Artificial Sequence: Synthetic oligonucleotide
  Epidermal growth factor receptor (EGFR), ERBB1 phosphotyrosine kinase siRNA
cgctctgcccggcgagtcgggct

SEQ ID NO: 5163 - DNA, 23 bp, Artificial Sequence
  Description of Artificial Sequence: Synthetic oligonucleotide
  Epidermal growth factor receptor (EGFR), ERBB1 phosphotyrosine kinase siRNA
gctctgcccggcgagtcgggctc

SEQ ID NO: 5164 - DNA, 23 bp, Artificial Sequence
  Description of Artificial Sequence: Synthetic oligonucleotide
  Epidermal growth factor receptor (EGFR), ERBB1 phosphotyrosine kinase siRNA
ctctgcccggcgagtcgggctct

SEQ ID NO: 5165 - DNA, 23 bp, Artificial Sequence
  Description of Artificial Sequence: Synthetic oligonucleotide
  Epidermal growth factor receptor (EGFR), ERBB1 phosphotyrosine kinase siRNA
tctgcccggcgagtcgggctctg

SEQ ID NO: 5166 - DNA, 23 bp, Artificial Sequence
  Description of Artificial Sequence: Synthetic oligonucleotide
  Epidermal growth factor receptor (EGFR), ERBB1 phosphotyrosine kinase siRNA
ctgcccggcgagtcgggctctgg

SEQ ID NO: 5167 - DNA, 23 bp, Artificial Sequence
  Description of Artificial Sequence: Synthetic oligonucleotide
  Epidermal growth factor receptor (EGFR), ERBB1 phosphotyrosine kinase siRNA
tgcccggcgagtcgggctctgga

SEQ ID NO: 5168 - DNA, 23 bp, Artificial Sequence
  Description of Artificial Sequence: Synthetic oligonucleotide
  Epidermal growth factor receptor (EGFR), ERBB1 phosphotyrosine kinase siRNA
gcccggcgagtcgggctctggag

SEQ ID NO: 5169 - DNA, 23 bp, Artificial Sequence
  Description of Artificial Sequence: Synthetic oligonucleotide
  Epidermal growth factor receptor (EGFR), ERBB1 phosphotyrosine kinase siRNA
cccggcgagtcgggctctggagg

SEQ ID NO: 5170 - DNA, 23 bp, Artificial Sequence
  Description of Artificial Sequence: Synthetic oligonucleotide
  Epidermal growth factor receptor (EGFR), ERBB1 phosphotyrosine kinase siRNA
ccggcgagtcgggctctggagga

SEQ ID NO: 5171 - DNA, 23 bp, Artificial Sequence
  Description of Artificial Sequence: Synthetic oligonucleotide
  Epidermal growth factor receptor (EGFR), ERBB1 phosphotyrosine kinase siRNA
cggcgagtcgggctctggaggaa

SEQ ID NO: 5172 - DNA, 23 bp, Artificial Sequence
  Description of Artificial Sequence: Synthetic oligonucleotide
  Epidermal growth factor receptor (EGFR), ERBB1 phosphotyrosine kinase siRNA
ggcgagtcgggctctggaggaaa

SEQ ID NO: 5173 - DNA, 23 bp, Artificial Sequence
  Description of Artificial Sequence: Synthetic oligonucleotide
  Epidermal growth factor receptor (EGFR), ERBB1 phosphotyrosine kinase siRNA
gcgagtcgggctctggaggaaaa

SEQ ID NO: 5174 - DNA, 23 bp, Artificial Sequence
  Description of Artificial Sequence: Synthetic oligonucleotide
  Epidermal growth factor receptor (EGFR), ERBB1 phosphotyrosine kinase siRNA
cgagtcgggctctggaggaaaag

SEQ ID NO: 5175 - DNA, 23 bp, Artificial Sequence
  Description of Artificial Sequence: Synthetic oligonucleotide
  Epidermal growth factor receptor (EGFR), ERBB1 phosphotyrosine kinase siRNA
gagtcgggctctggaggaaaaga

SEQ ID NO: 5176 - DNA, 23 bp, Artificial Sequence
  Description of Artificial Sequence: Synthetic oligonucleotide
  Epidermal growth factor receptor (EGFR), ERBB1 phosphotyrosine kinase siRNA
agtcgggctctggaggaaaagaa

SEQ ID NO: 5177 - DNA, 23 bp, Artificial Sequence
  Description of Artificial Sequence: Synthetic oligonucleotide
  Epidermal growth factor receptor (EGFR), ERBB1 phosphotyrosine kinase siRNA
gtcgggctctggaggaaaagaaa

SEQ ID NO: 5178 - DNA, 23 bp, Artificial Sequence
  Description of Artificial Sequence: Synthetic oligonucleotide
  Epidermal growth factor receptor (EGFR), ERBB1 phosphotyrosine kinase siRNA
tcgggctctggaggaaaagaaag

SEQ ID NO: 5179 - DNA, 23 bp, Artificial Sequence
  Description of Artificial Sequence: Synthetic oligonucleotide
  Epidermal growth factor receptor (EGFR), ERBB1 phosphotyrosine kinase siRNA
cgggctctggaggaaaagaaagt

SEQ ID NO: 5180 - DNA, 23 bp, Artificial Sequence
  Description of Artificial Sequence: Synthetic oligonucleotide
  Epidermal growth factor receptor (EGFR), ERBB1 phosphotyrosine kinase siRNA
gggctctggaggaaaagaaagtt

SEQ ID NO: 5181 - DNA, 23 bp, Artificial Sequence
  Description of Artificial Sequence: Synthetic oligonucleotide
  Epidermal growth factor receptor (EGFR), ERBB1 phosphotyrosine kinase siRNA
ggctctggaggaaaagaaagttt

SEQ ID NO: 5182 - DNA, 23 bp, Artificial Sequence
  Description of Artificial Sequence: Synthetic oligonucleotide
  Epidermal growth factor receptor (EGFR), ERBB1 phosphotyrosine kinase siRNA
gctctggaggaaaagaaagtttg

SEQ ID NO: 5183 - DNA, 23 bp, Artificial Sequence
  Description of Artificial Sequence: Synthetic oligonucleotide
  Epidermal growth factor receptor (EGFR), ERBB1 phosphotyrosine kinase siRNA
ctctggaggaaaagaaagtttgc

SEQ ID NO: 5184 - DNA, 23 bp, Artificial Sequence
  Description of Artificial Sequence: Synthetic oligonucleotide
  Epidermal growth factor receptor (EGFR), ERBB1 phosphotyrosine kinase siRNA
tctggaggaaaagaaagtttgcc

SEQ ID NO: 5185 - DNA, 23 bp, Artificial Sequence
  Description of Artificial Sequence: Synthetic oligonucleotide
  Epidermal growth factor receptor (EGFR), ERBB1 phosphotyrosine kinase siRNA
ctggaggaaaagaaagtttgcca

SEQ ID NO: 5186 - DNA, 23 bp, Artificial Sequence
  Description of Artificial Sequence: Synthetic oligonucleotide
  Epidermal growth factor receptor (EGFR), ERBB1 phosphotyrosine kinase siRNA
tggaggaaaagaaagtttgccaa

SEQ ID NO: 5187 - DNA, 23 bp, Artificial Sequence
  Description of Artificial Sequence: Synthetic oligonucleotide
  Epidermal growth factor receptor (EGFR), ERBB1 phosphotyrosine kinase siRNA
ggaggaaaagaaagtttgccaag

SEQ ID NO: 5188 - DNA, 23 bp, Artificial Sequence
  Description of Artificial Sequence: Synthetic oligonucleotide
  Epidermal growth factor receptor (EGFR), ERBB1 phosphotyrosine kinase siRNA
gaggaaaagaaagtttgccaagg

SEQ ID NO: 5189 - DNA, 23 bp, Artificial Sequence
  Description of Artificial Sequence: Synthetic oligonucleotide
  Epidermal growth factor receptor (EGFR), ERBB1 phosphotyrosine kinase siRNA
aggaaaagaaagtttgccaaggc

SEQ ID NO: 5190 - DNA, 23 bp, Artificial Sequence
  Description of Artificial Sequence: Synthetic oligonucleotide
  Epidermal growth factor receptor (EGFR), ERBB1 phosphotyrosine kinase siRNA
ggaaaagaaagtttgccaaggca

SEQ ID NO: 5191 - DNA, 23 bp, Artificial Sequence
  Description of Artificial Sequence: Synthetic oligonucleotide
  Epidermal growth factor receptor (EGFR), ERBB1 phosphotyrosine kinase siRNA
gaaaagaaagtttgccaaggcac

SEQ ID NO: 5192 - DNA, 23 bp, Artificial Sequence
  Description of Artificial Sequence: Synthetic oligonucleotide
  Epidermal growth factor receptor (EGFR), ERBB1 phosphotyrosine kinase siRNA
aaaagaaagtttgccaaggcacg

SEQ ID NO: 5193 - DNA, 23 bp, Artificial Sequence
  Description of Artificial Sequence: Synthetic oligonucleotide
  Epidermal growth factor receptor (EGFR), ERBB1 phosphotyrosine kinase siRNA
aaagaaagtttgccaaggcacga

SEQ ID NO: 5194 - DNA, 23 bp, Artificial Sequence
  Description of Artificial Sequence: Synthetic oligonucleotide
  Epidermal growth factor receptor (EGFR), ERBB1 phosphotyrosine kinase siRNA
aagaaagtttgccaaggcacgag

SEQ ID NO: 5195 - DNA, 23 bp, Artificial Sequence
  Description of Artificial Sequence: Synthetic oligonucleotide
  Epidermal growth factor receptor (EGFR), ERBB1 phosphotyrosine kinase siRNA
agaaagtttgccaaggcacgagt

SEQ ID NO: 5196 - DNA, 23 bp, Artificial Sequence
  Description of Artificial Sequence: Synthetic oligonucleotide
  Epidermal growth factor receptor (EGFR), ERBB1 phosphotyrosine kinase siRNA
gaaagtttgccaaggcacgagta

SEQ ID NO: 5197 - DNA, 23 bp, Artificial Sequence
  Description of Artificial Sequence: Synthetic oligonucleotide
  Epidermal growth factor receptor (EGFR), ERBB1 phosphotyrosine kinase siRNA
aaagtttgccaaggcacgagtaa

SEQ ID NO: 5198 - DNA, 23 bp, Artificial Sequence
  Description of Artificial Sequence: Synthetic oligonucleotide
  Epidermal growth factor receptor (EGFR), ERBB1 phosphotyrosine kinase siRNA
aagtttgccaaggcacgagtaac

SEQ ID NO: 5199 - DNA, 23 bp, Artificial Sequence
  Description of Artificial Sequence: Synthetic oligonucleotide
  Epidermal growth factor receptor (EGFR), ERBB1 phosphotyrosine kinase siRNA
agtttgccaaggcacgagtaaca

SEQ ID NO: 5200 - DNA, 23 bp, Artificial Sequence
  Description of Artificial Sequence: Synthetic oligonucleotide
  Epidermal growth factor receptor (EGFR), ERBB1 phosphotyrosine kinase siRNA
gtttgccaaggcacgagtaacaa

SEQ ID NO: 5201 - DNA, 23 bp, Artificial Sequence
  Description of Artificial Sequence: Synthetic oligonucleotide
  Epidermal growth factor receptor (EGFR), ERBB1 phosphotyrosine kinase siRNA
tttgccaaggcacgagtaacaag

SEQ ID NO: 5202 - DNA, 23 bp, Artificial Sequence
  Description of Artificial Sequence: Synthetic oligonucleotide
  Epidermal growth factor receptor (EGFR), ERBB1 phosphotyrosine kinase siRNA
ttgccaaggcacgagtaacaagc

SEQ ID NO: 5203 - DNA, 23 bp, Artificial Sequence
  Description of Artificial Sequence: Synthetic oligonucleotide
  Epidermal growth factor receptor (EGFR), ERBB1 phosphotyrosine kinase siRNA
tgccaaggcacgagtaacaagct

SEQ ID NO: 5204 - DNA, 23 bp, Artificial Sequence
  Description of Artificial Sequence: Synthetic oligonucleotide
  Epidermal growth factor receptor (EGFR), ERBB1 phosphotyrosine kinase siRNA
gccaaggcacgagtaacaagctc

SEQ ID NO: 5205 - DNA, 23 bp, Artificial Sequence
  Description of Artificial Sequence: Synthetic oligonucleotide
  Epidermal growth factor receptor (EGFR), ERBB1 phosphotyrosine kinase siRNA
ccaaggcacgagtaacaagctca

SEQ ID NO: 5206 - DNA, 23 bp, Artificial Sequence
  Description of Artificial Sequence: Synthetic oligonucleotide
  Epidermal growth factor receptor (EGFR), ERBB1 phosphotyrosine kinase siRNA
caaggcacgagtaacaagctcac

SEQ ID NO: 5207 - DNA, 23 bp, Artificial Sequence
  Description of Artificial Sequence: Synthetic oligonucleotide
  Epidermal growth factor receptor (EGFR), ERBB1 phosphotyrosine kinase siRNA
aaggcacgagtaacaagctcacg

SEQ ID NO: 5208 - DNA, 23 bp, Artificial Sequence
  Description of Artificial Sequence: Synthetic oligonucleotide
  Epidermal growth factor receptor (EGFR), ERBB1 phosphotyrosine kinase siRNA
aggcacgagtaacaagctcacgc

SEQ ID NO: 5209 - DNA, 23 bp, Artificial Sequence
  Description of Artificial Sequence: Synthetic oligonucleotide
  Epidermal growth factor receptor (EGFR), ERBB1 phosphotyrosine kinase siRNA
ggcacgagtaacaagctcacgca

SEQ ID NO: 5210 - DNA, 23 bp, Artificial Sequence
  Description of Artificial Sequence: Synthetic oligonucleotide
  Epidermal growth factor receptor (EGFR), ERBB1 phosphotyrosine kinase siRNA
gcacgagtaacaagctcacgcag

SEQ ID NO: 5211 - DNA, 23 bp, Artificial Sequence
  Description of Artificial Sequence: Synthetic oligonucleotide
  Epidermal growth factor receptor (EGFR), ERBB1 phosphotyrosine kinase siRNA
cacgagtaacaagctcacgcagt

SEQ ID NO: 5212 - DNA, 23 bp, Artificial Sequence
  Description of Artificial Sequence: Synthetic oligonucleotide
  Epidermal growth factor receptor (EGFR), ERBB1 phosphotyrosine kinase siRNA
acgagtaacaagctcacgcagtt

SEQ ID NO: 5213 - DNA, 23 bp, Artificial Sequence
  Description of Artificial Sequence: Synthetic oligonucleotide
  Epidermal growth factor receptor (EGFR), ERBB1 phosphotyrosine kinase siRNA
cgagtaacaagctcacgcagttg

SEQ ID NO: 5214 - DNA, 23 bp, Artificial Sequence
  Description of Artificial Sequence: Synthetic oligonucleotide
  Epidermal growth factor receptor (EGFR), ERBB1 phosphotyrosine kinase siRNA
gagtaacaagctcacgcagttgg

SEQ ID NO: 5215 - DNA, 23 bp, Artificial Sequence
  Description of Artificial Sequence: Synthetic oligonucleotide
  Epidermal growth factor receptor (EGFR), ERBB1 phosphotyrosine kinase siRNA
agtaacaagctcacgcagttggg

SEQ ID NO: 5216 - DNA, 23 bp, Artificial Sequence
  Description of Artificial Sequence: Synthetic oligonucleotide
  Epidermal growth factor receptor (EGFR), ERBB1 phosphotyrosine kinase siRNA
gtaacaagctcacgcagttgggc

SEQ ID NO: 5217 - DNA, 23 bp, Artificial Sequence
  Description of Artificial Sequence: Synthetic oligonucleotide
  Epidermal growth factor receptor (EGFR), ERBB1 phosphotyrosine kinase siRNA
taacaagctcacgcagttgggca

SEQ ID NO: 5218 - DNA, 23 bp, Artificial Sequence
  Description of Artificial Sequence: Synthetic oligonucleotide
  Epidermal growth factor receptor (EGFR), ERBB1 phosphotyrosine kinase siRNA
aacaagctcacgcagttgggcac

SEQ ID NO: 5219 - DNA, 23 bp, Artificial Sequence
  Description of Artificial Sequence: Synthetic oligonucleotide
  Epidermal growth factor receptor (EGFR), ERBB1 phosphotyrosine kinase siRNA
acaagctcacgcagttgggcact

SEQ ID NO: 5220 - DNA, 23 bp, Artificial Sequence
  Description of Artificial Sequence: Synthetic oligonucleotide
  Epidermal growth factor receptor (EGFR), ERBB1 phosphotyrosine kinase siRNA
caagctcacgcagttgggcactt

SEQ ID NO: 5221 - DNA, 23 bp, Artificial Sequence
  Description of Artificial Sequence: Synthetic oligonucleotide
  Epidermal growth factor receptor (EGFR), ERBB1 phosphotyrosine kinase siRNA
aagctcacgcagttgggcacttt

SEQ ID NO: 5222 - DNA, 23 bp, Artificial Sequence
  Description of Artificial Sequence: Synthetic oligonucleotide
  Epidermal growth factor receptor (EGFR), ERBB1 phosphotyrosine kinase siRNA
agctcacgcagttgggcactttt

SEQ ID NO: 5223 - DNA, 23 bp, Artificial Sequence
  Description of Artificial Sequence: Synthetic oligonucleotide
  Epidermal growth factor receptor (EGFR), ERBB1 phosphotyrosine kinase siRNA
gctcacgcagttgggcacttttg

SEQ ID NO: 5224 - DNA, 23 bp, Artificial Sequence
  Description of Artificial Sequence: Synthetic oligonucleotide
  Epidermal growth factor receptor (EGFR), ERBB1 phosphotyrosine kinase siRNA
ctcacgcagttgggcacttttga

SEQ ID NO: 5225 - DNA, 23 bp, Artificial Sequence
  Description of Artificial Sequence: Synthetic oligonucleotide
  Epidermal growth factor receptor (EGFR), ERBB1 phosphotyrosine kinase siRNA
tcacgcagttgggcacttttgaa

SEQ ID NO: 5226 - DNA, 23 bp, Artificial Sequence
  Description of Artificial Sequence: Synthetic oligonucleotide
  Epidermal growth factor receptor (EGFR), ERBB1 phosphotyrosine kinase siRNA
cacgcagttgggcacttttgaag

SEQ ID NO: 5227 - DNA, 23 bp, Artificial Sequence
  Description of Artificial Sequence: Synthetic oligonucleotide
  Epidermal growth factor receptor (EGFR), ERBB1 phosphotyrosine kinase siRNA
acgcagttgggcacttttgaaga

SEQ ID NO: 5228 - DNA, 23 bp, Artificial Sequence
  Description of Artificial Sequence: Synthetic oligonucleotide
  Epidermal growth factor receptor (EGFR), ERBB1 phosphotyrosine kinase siRNA
cgcagttgggcacttttgaagat

SEQ ID NO: 5229 - DNA, 23 bp, Artificial Sequence
  Description of Artificial Sequence: Synthetic oligonucleotide
  Epidermal growth factor receptor (EGFR), ERBB1 phosphotyrosine kinase siRNA
gcagttgggcacttttgaagatc

SEQ ID NO: 5230 - DNA, 23 bp, Artificial Sequence
  Description of Artificial Sequence: Synthetic oligonucleotide
  Epidermal growth factor receptor (EGFR), ERBB1 phosphotyrosine kinase siRNA
cagttgggcacttttgaagatca

SEQ ID NO: 5231 - DNA, 23 bp, Artificial Sequence
  Description of Artificial Sequence: Synthetic oligonucleotide
  Epidermal growth factor receptor (EGFR), ERBB1 phosphotyrosine kinase siRNA
agttgggcacttttgaagatcat

SEQ ID NO: 5232 - DNA, 23 bp, Artificial Sequence
  Description of Artificial Sequence: Synthetic oligonucleotide
  Epidermal growth factor receptor (EGFR), ERBB1 phosphotyrosine kinase siRNA
gttgggcacttttgaagatcatt

SEQ ID NO: 5233 - DNA, 23 bp, Artificial Sequence
  Description of Artificial Sequence: Synthetic oligonucleotide
  Epidermal growth factor receptor (EGFR), ERBB1 phosphotyrosine kinase siRNA
ttgggcacttttgaagatcattt

SEQ ID NO: 5234 - DNA, 23 bp, Artificial Sequence
  Description of Artificial Sequence: Synthetic oligonucleotide
  Epidermal growth factor receptor (EGFR), ERBB1 phosphotyrosine kinase siRNA
tgggcacttttgaagatcatttt

SEQ ID NO: 5235 - DNA, 23 bp, Artificial Sequence
  Description of Artificial Sequence: Synthetic oligonucleotide
  Epidermal growth factor receptor (EGFR), ERBB1 phosphotyrosine kinase siRNA
gggcacttttgaagatcattttc

SEQ ID NO: 5236 - DNA, 23 bp, Artificial Sequence
  Description of Artificial Sequence: Synthetic oligonucleotide
  Epidermal growth factor receptor (EGFR), ERBB1 phosphotyrosine kinase siRNA
ggcacttttgaagatcattttct

SEQ ID NO: 5237 - DNA, 23 bp, Artificial Sequence
  Description of Artificial Sequence: Synthetic oligonucleotide
  Epidermal growth factor receptor (EGFR), ERBB1 phosphotyrosine kinase siRNA
gcacttttgaagatcattttctc

SEQ ID NO: 5238 - DNA, 23 bp, Artificial Sequence
  Description of Artificial Sequence: Synthetic oligonucleotide
  Epidermal growth factor receptor (EGFR), ERBB1 phosphotyrosine kinase siRNA
cacttttgaagatcattttctca

SEQ ID NO: 5239 - DNA, 23 bp, Artificial Sequence
  Description of Artificial Sequence: Synthetic oligonucleotide
  Epidermal growth factor receptor (EGFR), ERBB1 phosphotyrosine kinase siRNA
acttttgaagatcattttctcag

SEQ ID NO: 5240 - DNA, 23 bp, Artificial Sequence
  Description of Artificial Sequence: Synthetic oligonucleotide
  Epidermal growth factor receptor (EGFR), ERBB1 phosphotyrosine kinase siRNA
cttttgaagatcattttctcagc

SEQ ID NO: 5241 - DNA, 23 bp, Artificial Sequence
  Description of Artificial Sequence: Synthetic oligonucleotide
  Epidermal growth factor receptor (EGFR), ERBB1 phosphotyrosine kinase siRNA
ttttgaagatcattttctcagcc

SEQ ID NO: 5242 - DNA, 23 bp, Artificial Sequence
  Description of Artificial Sequence: Synthetic oligonucleotide
  Epidermal growth factor receptor (EGFR), ERBB1 phosphotyrosine kinase siRNA
tttgaagatcattttctcagcct

SEQ ID NO: 5243 - DNA, 23 bp, Artificial Sequence
  Description of Artificial Sequence: Synthetic oligonucleotide
  Epidermal growth factor receptor (EGFR), ERBB1 phosphotyrosine kinase siRNA
ttgaagatcattttctcagcctc

SEQ ID NO: 5244 - DNA, 23 bp, Artificial Sequence
  Description of Artificial Sequence: Synthetic oligonucleotide
  Epidermal growth factor receptor (EGFR), ERBB1 phosphotyrosine kinase siRNA
tgaagatcattttctcagcctcc

SEQ ID NO: 5245 - DNA, 23 bp, Artificial Sequence
  Description of Artificial Sequence: Synthetic oligonucleotide
  Epidermal growth factor receptor (EGFR), ERBB1 phosphotyrosine kinase siRNA
gaagatcattttctcagcctcca

SEQ ID NO: 5246 - DNA, 23 bp, Artificial Sequence
  Description of Artificial Sequence: Synthetic oligonucleotide
  Epidermal growth factor receptor (EGFR), ERBB1 phosphotyrosine kinase siRNA
aagatcattttctcagcctccag

SEQ ID NO: 5247 - DNA, 23 bp, Artificial Sequence
  Description of Artificial Sequence: Synthetic oligonucleotide
  Epidermal growth factor receptor (EGFR), ERBB1 phosphotyrosine kinase siRNA
agatcattttctcagcctccaga

SEQ ID NO: 5248 - DNA, 23 bp, Artificial Sequence
  Description of Artificial Sequence: Synthetic oligonucleotide
  Epidermal growth factor receptor (EGFR), ERBB1 phosphotyrosine kinase siRNA
gatcattttctcagcctccagag

SEQ ID NO: 5249 - DNA, 23 bp, Artificial Sequence
  Description of Artificial Sequence: Synthetic oligonucleotide
  Epidermal growth factor receptor (EGFR), ERBB1 phosphotyrosine kinase siRNA
atcattttctcagcctccagagg

SEQ ID NO: 5250 - DNA, 23 bp, Artificial Sequence
  Description of Artificial Sequence: Synthetic oligonucleotide
  Epidermal growth factor receptor (EGFR), ERBB1 phosphotyrosine kinase siRNA
tcattttctcagcctccagagga

SEQ ID NO: 5251 - DNA, 23 bp, Artificial Sequence
  Description of Artificial Sequence: Synthetic oligonucleotide
  Epidermal growth factor receptor (EGFR), ERBB1 phosphotyrosine kinase siRNA
cattttctcagcctccagaggat

SEQ ID NO: 5252 - DNA, 23 bp, Artificial Sequence
  Description of Artificial Sequence: Synthetic oligonucleotide
  Epidermal growth factor receptor (EGFR), ERBB1 phosphotyrosine kinase siRNA
attttctcagcctccagaggatg

SEQ ID NO: 5253 - DNA, 23 bp, Artificial Sequence
  Description of Artificial Sequence: Synthetic oligonucleotide
  Epidermal growth factor receptor (EGFR), ERBB1 phosphotyrosine kinase siRNA
ttttctcagcctccagaggatgt

SEQ ID NO: 5254 - DNA, 23 bp, Artificial Sequence
  Description of Artificial Sequence: Synthetic oligonucleotide
  Epidermal growth factor receptor (EGFR), ERBB1 phosphotyrosine kinase siRNA
tttctcagcctccagaggatgtt

SEQ ID NO: 5255 - DNA, 23 bp, Artificial Sequence
  Description of Artificial Sequence: Synthetic oligonucleotide
  Epidermal growth factor receptor (EGFR), ERBB1 phosphotyrosine kinase siRNA
ttctcagcctccagaggatgttc

SEQ ID NO: 5256 - DNA, 23 bp, Artificial Sequence
  Description of Artificial Sequence: Synthetic oligonucleotide
  Epidermal growth factor receptor (EGFR), ERBB1 phosphotyrosine kinase siRNA
tctcagcctccagaggatgttca

SEQ ID NO: 5257 - DNA, 23 bp, Artificial Sequence
  Description of Artificial Sequence: Synthetic oligonucleotide
  Epidermal growth factor receptor (EGFR), ERBB1 phosphotyrosine kinase siRNA
ctcagcctccagaggatgttcaa

SEQ ID NO: 5258 - DNA, 23 bp, Artificial Sequence
  Description of Artificial Sequence: Synthetic oligonucleotide
  Epidermal growth factor receptor (EGFR), ERBB1 phosphotyrosine kinase siRNA
tcagcctccagaggatgttcaat

SEQ ID NO: 5259 - DNA, 23 bp, Artificial Sequence
  Description of Artificial Sequence: Synthetic oligonucleotide
  Epidermal growth factor receptor (EGFR), ERBB1 phosphotyrosine kinase siRNA
cagcctccagaggatgttcaata

SEQ ID NO: 5260 - DNA, 23 bp, Artificial Sequence
  Description of Artificial Sequence: Synthetic oligonucleotide
  Epidermal growth factor receptor (EGFR), ERBB1 phosphotyrosine kinase siRNA
agcctccagaggatgttcaataa

SEQ ID NO: 5261 - DNA, 23 bp, Artificial Sequence
  Description of Artificial Sequence: Synthetic oligonucleotide
  Epidermal growth factor receptor (EGFR), ERBB1 phosphotyrosine kinase siRNA
gcctccagaggatgttcaataac

SEQ ID NO: 5262 - DNA, 23 bp, Artificial Sequence
  Description of Artificial Sequence: Synthetic oligonucleotide
  Epidermal growth factor receptor (EGFR), ERBB1 phosphotyrosine kinase siRNA
cctccagaggatgttcaataact

SEQ ID NO: 5263 - DNA, 23 bp, Artificial Sequence
  Description of Artificial Sequence: Synthetic oligonucleotide
  Epidermal growth factor receptor (EGFR), ERBB1 phosphotyrosine kinase siRNA
ctccagaggatgttcaataactg

SEQ ID NO: 5264 - DNA, 23 bp, Artificial Sequence
  Description of Artificial Sequence: Synthetic oligonucleotide
  Epidermal growth factor receptor (EGFR), ERBB1 phosphotyrosine kinase siRNA
tccagaggatgttcaataactgt

SEQ ID NO: 5265 - DNA, 23 bp, Artificial Sequence
  Description of Artificial Sequence: Synthetic oligonucleotide
  Epidermal growth factor receptor (EGFR), ERBB1 phosphotyrosine kinase siRNA
ccagaggatgttcaataactgtg

SEQ ID NO: 5266 - DNA, 23 bp, Artificial Sequence
  Description of Artificial Sequence: Synthetic oligonucleotide
  Epidermal growth factor receptor (EGFR), ERBB1 phosphotyrosine kinase siRNA
cagaggatgttcaataactgtga

SEQ ID NO: 5267 - DNA, 23 bp, Artificial Sequence
  Description of Artificial Sequence: Synthetic oligonucleotide
  Epidermal growth factor receptor (EGFR), ERBB1 phosphotyrosine kinase siRNA
agaggatgttcaataactgtgag

SEQ ID NO: 5268 - DNA, 23 bp, Artificial Sequence
  Description of Artificial Sequence: Synthetic oligonucleotide
  Epidermal growth factor receptor (EGFR), ERBB1 phosphotyrosine kinase siRNA
gaggatgttcaataactgtgagg

SEQ ID NO: 5269 - DNA, 23 bp, Artificial Sequence
  Description of Artificial Sequence: Synthetic oligonucleotide
  Epidermal growth factor receptor (EGFR), ERBB1 phosphotyrosine kinase siRNA
aggatgttcaataactgtgaggt

SEQ ID NO: 5270 - DNA, 23 bp, Artificial Sequence
  Description of Artificial Sequence: Synthetic oligonucleotide
  Epidermal growth factor receptor (EGFR), ERBB1 phosphotyrosine kinase siRNA
ggatgttcaataactgtgaggtg

SEQ ID NO: 5271 - DNA, 23 bp, Artificial Sequence
  Description of Artificial Sequence: Synthetic oligonucleotide
  Epidermal growth factor receptor (EGFR), ERBB1 phosphotyrosine kinase siRNA
gatgttcaataactgtgaggtgg

SEQ ID NO: 5272 - DNA, 23 bp, Artificial Sequence
  Description of Artificial Sequence: Synthetic oligonucleotide
  Epidermal growth factor receptor (EGFR), ERBB1 phosphotyrosine kinase siRNA
atgttcaataactgtgaggtggt

SEQ ID NO: 5273 - DNA, 23 bp, Artificial Sequence
  Description of Artificial Sequence: Synthetic oligonucleotide
  Epidermal growth factor receptor (EGFR), ERBB1 phosphotyrosine kinase siRNA
tgttcaataactgtgaggtggtc

SEQ ID NO: 5274 - DNA, 23 bp, Artificial Sequence
  Description of Artificial Sequence: Synthetic oligonucleotide
  Epidermal growth factor receptor (EGFR), ERBB1 phosphotyrosine kinase siRNA
gttcaataactgtgaggtggtcc

SEQ ID NO: 5275 - DNA, 23 bp, Artificial Sequence
  Description of Artificial Sequence: Synthetic oligonucleotide
  Epidermal growth factor receptor (EGFR), ERBB1 phosphotyrosine kinase siRNA
ttcaataactgtgaggtggtcct

SEQ ID NO: 5276 - DNA, 23 bp, Artificial Sequence
  Description of Artificial Sequence: Synthetic oligonucleotide
  Epidermal growth factor receptor (EGFR), ERBB1 phosphotyrosine kinase siRNA
tcaataactgtgaggtggtcctt

SEQ ID NO: 5277 - DNA, 23 bp, Artificial Sequence
  Description of Artificial Sequence: Synthetic oligonucleotide
  Epidermal growth factor receptor (EGFR), ERBB1 phosphotyrosine kinase siRNA
caataactgtgaggtggtccttg

SEQ ID NO: 5278 - DNA, 23 bp, Artificial Sequence
  Description of Artificial Sequence: Synthetic oligonucleotide
  Epidermal growth factor receptor (EGFR), ERBB1 phosphotyrosine kinase siRNA
aataactgtgaggtggtccttgg

SEQ ID NO: 5279 - DNA, 23 bp, Artificial Sequence
  Description of Artificial Sequence: Synthetic oligonucleotide
  Epidermal growth factor receptor (EGFR), ERBB1 phosphotyrosine kinase siRNA
ataactgtgaggtggtccttggg

SEQ ID NO: 5280 - DNA, 23 bp, Artificial Sequence
  Description of Artificial Sequence: Synthetic oligonucleotide
  Epidermal growth factor receptor (EGFR), ERBB1 phosphotyrosine kinase siRNA
taactgtgaggtggtccttggga

SEQ ID NO: 5281 - DNA, 23 bp, Artificial Sequence
  Description of Artificial Sequence: Synthetic oligonucleotide
  Epidermal growth factor receptor (EGFR), ERBB1 phosphotyrosine kinase siRNA
aactgtgaggtggtccttgggaa

SEQ ID NO: 5282 - DNA, 23 bp, Artificial Sequence
  Description of Artificial Sequence: Synthetic oligonucleotide
  Epidermal growth factor receptor (EGFR), ERBB1 phosphotyrosine kinase siRNA
actgtgaggtggtccttgggaat

SEQ ID NO: 5283 - DNA, 23 bp, Artificial Sequence
  Description of Artificial Sequence: Synthetic oligonucleotide
  Epidermal growth factor receptor (EGFR), ERBB1 phosphotyrosine kinase siRNA
ctgtgaggtggtccttgggaatt

SEQ ID NO: 5284 - DNA, 23 bp, Artificial Sequence
  Description of Artificial Sequence: Synthetic oligonucleotide
  Epidermal growth factor receptor (EGFR), ERBB1 phosphotyrosine kinase siRNA
tgtgaggtggtccttgggaattt

SEQ ID NO: 5285 - DNA, 23 bp, Artificial Sequence
  Description of Artificial Sequence: Synthetic oligonucleotide
  Epidermal growth factor receptor (EGFR), ERBB1 phosphotyrosine kinase siRNA
gtgaggtggtccttgggaatttg

SEQ ID NO: 5286 - DNA, 23 bp, Artificial Sequence
  Description of Artificial Sequence: Synthetic oligonucleotide
  Epidermal growth factor receptor (EGFR), ERBB1 phosphotyrosine kinase siRNA
tgaggtggtccttgggaatttgg

SEQ ID NO: 5287 - DNA, 23 bp, Artificial Sequence
  Description of Artificial Sequence: Synthetic oligonucleotide
  Epidermal growth factor receptor (EGFR), ERBB1 phosphotyrosine kinase siRNA
gaggtggtccttgggaatttgga

SEQ ID NO: 5288 - DNA, 23 bp, Artificial Sequence
  Description of Artificial Sequence: Synthetic oligonucleotide
  Epidermal growth factor receptor (EGFR), ERBB1 phosphotyrosine kinase siRNA
aggtggtccttgggaatttggaa

SEQ ID NO: 5289 - DNA, 23 bp, Artificial Sequence
  Description of Artificial Sequence: Synthetic oligonucleotide
  Epidermal growth factor receptor (EGFR), ERBB1 phosphotyrosine kinase siRNA
ggtggtccttgggaatttggaaa

SEQ ID NO: 5290 - DNA, 23 bp, Artificial Sequence
  Description of Artificial Sequence: Synthetic oligonucleotide
  Epidermal growth factor receptor (EGFR), ERBB1 phosphotyrosine kinase siRNA
gtggtccttgggaatttggaaat

SEQ ID NO: 5291 - DNA, 23 bp, Artificial Sequence
  Description of Artificial Sequence: Synthetic oligonucleotide
  Epidermal growth factor receptor (EGFR), ERBB1 phosphotyrosine kinase siRNA
tggtccttgggaatttggaaatt

SEQ ID NO: 5292 - DNA, 23 bp, Artificial Sequence
  Description of Artificial Sequence: Synthetic oligonucleotide
  Epidermal growth factor receptor (EGFR), ERBB1 phosphotyrosine kinase siRNA
ggtccttgggaatttggaaatta

SEQ ID NO: 5293 - DNA, 23 bp, Artificial Sequence
  Description of Artificial Sequence: Synthetic oligonucleotide
  Epidermal growth factor receptor (EGFR), ERBB1 phosphotyrosine kinase siRNA
gtccttgggaatttggaaattac

SEQ ID NO: 5294 - DNA, 23 bp, Artificial Sequence
  Description of Artificial Sequence: Synthetic oligonucleotide
  Epidermal growth factor receptor (EGFR), ERBB1 phosphotyrosine kinase siRNA
tccttgggaatttggaaattacc

SEQ ID NO: 5295 - DNA, 23 bp, Artificial Sequence
  Description of Artificial Sequence: Synthetic oligonucleotide
  Epidermal growth factor receptor (EGFR), ERBB1 phosphotyrosine kinase siRNA
ccttgggaatttggaaattacct

SEQ ID NO: 5296 - DNA, 23 bp, Artificial Sequence
  Description of Artificial Sequence: Synthetic oligonucleotide
  Epidermal growth factor receptor (EGFR), ERBB1 phosphotyrosine kinase siRNA
cttgggaatttggaaattaccta

SEQ ID NO: 5297 - DNA, 23 bp, Artificial Sequence
  Description of Artificial Sequence: Synthetic oligonucleotide
  Epidermal growth factor receptor (EGFR), ERBB1 phosphotyrosine kinase siRNA
ttgggaatttggaaattacctat

SEQ ID NO: 5298 - DNA, 23 bp, Artificial Sequence
  Description of Artificial Sequence: Synthetic oligonucleotide
  Epidermal growth factor receptor (EGFR), ERBB1 phosphotyrosine kinase siRNA
tgggaatttggaaattacctatg

SEQ ID NO: 5299 - DNA, 23 bp, Artificial Sequence
  Description of Artificial Sequence: Synthetic oligonucleotide
  Epidermal growth factor receptor (EGFR), ERBB1 phosphotyrosine kinase siRNA
gggaatttggaaattacctatgt

SEQ ID NO: 5300 - DNA, 23 bp, Artificial Sequence
  Description of Artificial Sequence: Synthetic oligonucleotide
  Epidermal growth factor receptor (EGFR), ERBB1 phosphotyrosine kinase siRNA
ggaatttggaaattacctatgtg

SEQ ID NO: 5301 - DNA, 23 bp, Artificial Sequence
  Description of Artificial Sequence: Synthetic oligonucleotide
  Epidermal growth factor receptor (EGFR), ERBB1 phosphotyrosine kinase siRNA
gaatttggaaattacctatgtgc

SEQ ID NO: 5302 - DNA, 23 bp, Artificial Sequence
  Description of Artificial Sequence: Synthetic oligonucleotide
  Epidermal growth factor receptor (EGFR), ERBB1 phosphotyrosine kinase siRNA
aatttggaaattacctatgtgca

SEQ ID NO: 5303 - DNA, 23 bp, Artificial Sequence
  Description of Artificial Sequence: Synthetic oligonucleotide
  Epidermal growth factor receptor (EGFR), ERBB1 phosphotyrosine kinase siRNA
atttggaaattacctatgtgcag

SEQ ID NO: 5304 - DNA, 23 bp, Artificial Sequence
  Description of Artificial Sequence: Synthetic oligonucleotide
  Epidermal growth factor receptor (EGFR), ERBB1 phosphotyrosine kinase siRNA
tttggaaattacctatgtgcaga

SEQ ID NO: 5305 - DNA, 23 bp, Artificial Sequence
  Description of Artificial Sequence: Synthetic oligonucleotide
  Epidermal growth factor receptor (EGFR), ERBB1 phosphotyrosine kinase siRNA
ttggaaattacctatgtgcagag

SEQ ID NO: 5306 - DNA, 23 bp, Artificial Sequence
  Description of Artificial Sequence: Synthetic oligonucleotide
  Epidermal growth factor receptor (EGFR), ERBB1 phosphotyrosine kinase siRNA
tggaaattacctatgtgcagagg

SEQ ID NO: 5307 - DNA, 23 bp, Artificial Sequence
  Description of Artificial Sequence: Synthetic oligonucleotide
  Epidermal growth factor receptor (EGFR), ERBB1 phosphotyrosine kinase siRNA
ggaaattacctatgtgcagagga

SEQ ID NO: 5308 - DNA, 23 bp, Artificial Sequence
  Description of Artificial Sequence: Synthetic oligonucleotide
  Epidermal growth factor receptor (EGFR), ERBB1 phosphotyrosine kinase siRNA
gaaattacctatgtgcagaggaa

SEQ ID NO: 5309 - DNA, 23 bp, Artificial Sequence
  Description of Artificial Sequence: Synthetic oligonucleotide
  Epidermal growth factor receptor (EGFR), ERBB1 phosphotyrosine kinase siRNA
aaattacctatgtgcagaggaat

SEQ ID NO: 5310 - DNA, 23 bp, Artificial Sequence
  Description of Artificial Sequence: Synthetic oligonucleotide
  Epidermal growth factor receptor (EGFR), ERBB1 phosphotyrosine kinase siRNA
aattacctatgtgcagaggaatt

SEQ ID NO: 5311 - DNA, 23 bp, Artificial Sequence
  Description of Artificial Sequence: Synthetic oligonucleotide
  Epidermal growth factor receptor (EGFR), ERBB1 phosphotyrosine kinase siRNA
attacctatgtgcagaggaatta

SEQ ID NO: 5312 - DNA, 23 bp, Artificial Sequence
  Description of Artificial Sequence: Synthetic oligonucleotide
  Epidermal growth factor receptor (EGFR), ERBB1 phosphotyrosine kinase siRNA
ttacctatgtgcagaggaattat

SEQ ID NO: 5313 - DNA, 23 bp, Artificial Sequence
  Description of Artificial Sequence: Synthetic oligonucleotide
  Epidermal growth factor receptor (EGFR), ERBB1 phosphotyrosine kinase siRNA
tacctatgtgcagaggaattatg

SEQ ID NO: 5314 - DNA, 23 bp, Artificial Sequence
  Description of Artificial Sequence: Synthetic oligonucleotide
  Epidermal growth factor receptor (EGFR), ERBB1 phosphotyrosine kinase siRNA
acctatgtgcagaggaattatga

SEQ ID NO: 5315 - DNA, 23 bp, Artificial Sequence
  Description of Artificial Sequence: Synthetic oligonucleotide
  Epidermal growth factor receptor (EGFR), ERBB1 phosphotyrosine kinase siRNA
cctatgtgcagaggaattatgat

SEQ ID NO: 5316 - DNA, 23 bp, Artificial Sequence
  Description of Artificial Sequence: Synthetic oligonucleotide
  Epidermal growth factor receptor (EGFR), ERBB1 phosphotyrosine kinase siRNA
ctatgtgcagaggaattatgatc

SEQ ID NO: 5317 - DNA, 23 bp, Artificial Sequence
  Description of Artificial Sequence: Synthetic oligonucleotide
  Epidermal growth factor receptor (EGFR), ERBB1 phosphotyrosine kinase siRNA
tatgtgcagaggaattatgatct

SEQ ID NO: 5318 - DNA, 23 bp, Artificial Sequence
  Description of Artificial Sequence: Synthetic oligonucleotide
  Epidermal growth factor receptor (EGFR), ERBB1 phosphotyrosine kinase siRNA
atgtgcagaggaattatgatctt

SEQ ID NO: 5319 - DNA, 23 bp, Artificial Sequence
  Description of Artificial Sequence: Synthetic oligonucleotide
  Epidermal growth factor receptor (EGFR), ERBB1 phosphotyrosine kinase siRNA
tgtgcagaggaattatgatcttt

SEQ ID NO: 5320 - DNA, 23 bp, Artificial Sequence
  Description of Artificial Sequence: Synthetic oligonucleotide
  Epidermal growth factor receptor (EGFR), ERBB1 phosphotyrosine kinase siRNA
gtgcagaggaattatgatctttc

SEQ ID NO: 5321 - DNA, 23 bp, Artificial Sequence
  Description of Artificial Sequence: Synthetic oligonucleotide
  Epidermal growth factor receptor (EGFR), ERBB1 phosphotyrosine kinase siRNA
tgcagaggaattatgatctttcc

SEQ ID NO: 5322 - DNA, 23 bp, Artificial Sequence
  Description of Artificial Sequence: Synthetic oligonucleotide
  Epidermal growth factor receptor (EGFR), ERBB1 phosphotyrosine kinase siRNA
gcagaggaattatgatctttcct

SEQ ID NO: 5323 - DNA, 23 bp, Artificial Sequence
  Description of Artificial Sequence: Synthetic oligonucleotide
  Epidermal growth factor receptor (EGFR), ERBB1 phosphotyrosine kinase siRNA
cagaggaattatgatctttcctt

SEQ ID NO: 5324 - DNA, 23 bp, Artificial Sequence
  Description of Artificial Sequence: Synthetic oligonucleotide
  Epidermal growth factor receptor (EGFR), ERBB1 phosphotyrosine kinase siRNA
agaggaattatgatctttccttc

SEQ ID NO: 5325 - DNA, 23 bp, Artificial Sequence
  Description of Artificial Sequence: Synthetic oligonucleotide
  Epidermal growth factor receptor (EGFR), ERBB1 phosphotyrosine kinase siRNA
gaggaattatgatctttccttct

SEQ ID NO: 5326 - DNA, 23 bp, Artificial Sequence
  Description of Artificial Sequence: Synthetic oligonucleotide
  Epidermal growth factor receptor (EGFR), ERBB1 phosphotyrosine kinase siRNA
aggaattatgatctttccttctt

SEQ ID NO: 5327 - DNA, 23 bp, Artificial Sequence
  Description of Artificial Sequence: Synthetic oligonucleotide
  Epidermal growth factor receptor (EGFR), ERBB1 phosphotyrosine kinase siRNA
ggaattatgatctttccttctta

SEQ ID NO: 5328 - DNA, 23 bp, Artificial Sequence
  Description of Artificial Sequence: Synthetic oligonucleotide
  Epidermal growth factor receptor (EGFR), ERBB1 phosphotyrosine kinase siRNA
gaattatgatctttccttcttaa

SEQ ID NO: 5329 - DNA, 23 bp, Artificial Sequence
  Description of Artificial Sequence: Synthetic oligonucleotide
  Epidermal growth factor receptor (EGFR), ERBB1 phosphotyrosine kinase siRNA
aattatgatctttccttcttaaa

SEQ ID NO: 5330 - DNA, 23 bp, Artificial Sequence
  Description of Artificial Sequence: Synthetic oligonucleotide
  Epidermal growth factor receptor (EGFR), ERBB1 phosphotyrosine kinase siRNA
attatgatctttccttcttaaag

SEQ ID NO: 5331 - DNA, 23 bp, Artificial Sequence
  Description of Artificial Sequence: Synthetic oligonucleotide
  Epidermal growth factor receptor (EGFR), ERBB1 phosphotyrosine kinase siRNA
ttatgatctttccttcttaaaga

SEQ ID NO: 5332 - DNA, 23 bp, Artificial Sequence
  Description of Artificial Sequence: Synthetic oligonucleotide
  Epidermal growth factor receptor (EGFR), ERBB1 phosphotyrosine kinase siRNA
tatgatctttccttcttaaagac

SEQ ID NO: 5333 - DNA, 23 bp, Artificial Sequence
  Description of Artificial Sequence: Synthetic oligonucleotide
  Epidermal growth factor receptor (EGFR), ERBB1 phosphotyrosine kinase siRNA
atgatctttccttcttaaagacc

SEQ ID NO: 5334 - DNA, 23 bp, Artificial Sequence
  Description of Artificial Sequence: Synthetic oligonucleotide
  Epidermal growth factor receptor (EGFR), ERBB1 phosphotyrosine kinase siRNA
tgatctttccttcttaaagacca

SEQ ID NO: 5335 - DNA, 23 bp, Artificial Sequence
  Description of Artificial Sequence: Synthetic oligonucleotide
  Epidermal growth factor receptor (EGFR), ERBB1 phosphotyrosine kinase siRNA
gatctttccttcttaaagaccat

SEQ ID NO: 5336 - DNA, 23 bp, Artificial Sequence
  Description of Artificial Sequence: Synthetic oligonucleotide
  Epidermal growth factor receptor (EGFR), ERBB1 phosphotyrosine kinase siRNA
atctttccttcttaaagaccatc

SEQ ID NO: 5337 - DNA, 23 bp, Artificial Sequence
  Description of Artificial Sequence: Synthetic oligonucleotide
  Epidermal growth factor receptor (EGFR), ERBB1 phosphotyrosine kinase siRNA
tctttccttcttaaagaccatcc

SEQ ID NO: 5338 - DNA, 23 bp, Artificial Sequence
  Description of Artificial Sequence: Synthetic oligonucleotide
  Epidermal growth factor receptor (EGFR), ERBB1 phosphotyrosine kinase siRNA
ctttccttcttaaagaccatcca

SEQ ID NO: 5339 - DNA, 23 bp, Artificial Sequence
  Description of Artificial Sequence: Synthetic oligonucleotide
  Epidermal growth factor receptor (EGFR), ERBB1 phosphotyrosine kinase siRNA
tttccttcttaaagaccatccag

SEQ ID NO: 5340 - DNA, 23 bp, Artificial Sequence
  Description of Artificial Sequence: Synthetic oligonucleotide
  Epidermal growth factor receptor (EGFR), ERBB1 phosphotyrosine kinase siRNA
ttccttcttaaagaccatccagg

SEQ ID NO: 5341 - DNA, 23 bp, Artificial Sequence
  Description of Artificial Sequence: Synthetic oligonucleotide
  Epidermal growth factor receptor (EGFR), ERBB1 phosphotyrosine kinase siRNA
tccttcttaaagaccatccagga

SEQ ID NO: 5342 - DNA, 23 bp, Artificial Sequence
  Description of Artificial Sequence: Synthetic oligonucleotide
  Epidermal growth factor receptor (EGFR), ERBB1 phosphotyrosine kinase siRNA
ccttcttaaagaccatccaggag

SEQ ID NO: 5343 - DNA, 23 bp, Artificial Sequence
  Description of Artificial Sequence: Synthetic oligonucleotide
  Epidermal growth factor receptor (EGFR), ERBB1 phosphotyrosine kinase siRNA
cttcttaaagaccatccaggagg

SEQ ID NO: 5344 - DNA, 23 bp, Artificial Sequence
  Description of Artificial Sequence: Synthetic oligonucleotide
  Epidermal growth factor receptor (EGFR), ERBB1 phosphotyrosine kinase siRNA
ttcttaaagaccatccaggaggt

SEQ ID NO: 5345 - DNA, 23 bp, Artificial Sequence
  Description of Artificial Sequence: Synthetic oligonucleotide
  Epidermal growth factor receptor (EGFR), ERBB1 phosphotyrosine kinase siRNA
tcttaaagaccatccaggaggtg

SEQ ID NO: 5346 - DNA, 23 bp, Artificial Sequence
  Description of Artificial Sequence: Synthetic oligonucleotide
  Epidermal growth factor receptor (EGFR), ERBB1 phosphotyrosine kinase siRNA
cttaaagaccatccaggaggtgg

SEQ ID NO: 5347 - DNA, 23 bp, Artificial Sequence
  Description of Artificial Sequence: Synthetic oligonucleotide
  Epidermal growth factor receptor (EGFR), ERBB1 phosphotyrosine kinase siRNA
ttaaagaccatccaggaggtggc

SEQ ID NO: 5348 - DNA, 23 bp, Artificial Sequence
  Description of Artificial Sequence: Synthetic oligonucleotide
  Epidermal growth factor receptor (EGFR), ERBB1 phosphotyrosine kinase siRNA
taaagaccatccaggaggtggct

SEQ ID NO: 5349 - DNA, 23 bp, Artificial Sequence
  Description of Artificial Sequence: Synthetic oligonucleotide
  Epidermal growth factor receptor (EGFR), ERBB1 phosphotyrosine kinase siRNA
aaagaccatccaggaggtggctg

SEQ ID NO: 5350 - DNA, 23 bp, Artificial Sequence
  Description of Artificial Sequence: Synthetic oligonucleotide
  Epidermal growth factor receptor (EGFR), ERBB1 phosphotyrosine kinase siRNA
aagaccatccaggaggtggctgg

SEQ ID NO: 5351 - DNA, 23 bp, Artificial Sequence
  Description of Artificial Sequence: Synthetic oligonucleotide
  Epidermal growth factor receptor (EGFR), ERBB1 phosphotyrosine kinase siRNA
agaccatccaggaggtggctggt

SEQ ID NO: 5352 - DNA, 23 bp, Artificial Sequence
  Description of Artificial Sequence: Synthetic oligonucleotide
  Epidermal growth factor receptor (EGFR), ERBB1 phosphotyrosine kinase siRNA
gaccatccaggaggtggctggtt

SEQ ID NO: 5353 - DNA, 23 bp, Artificial Sequence
  Description of Artificial Sequence: Synthetic oligonucleotide
  Epidermal growth factor receptor (EGFR), ERBB1 phosphotyrosine kinase siRNA
accatccaggaggtggctggtta

SEQ ID NO: 5354 - DNA, 23 bp, Artificial Sequence
  Description of Artificial Sequence: Synthetic oligonucleotide
  Epidermal growth factor receptor (EGFR), ERBB1 phosphotyrosine kinase siRNA
ccatccaggaggtggctggttat

SEQ ID NO: 5355 - DNA, 23 bp, Artificial Sequence
  Description of Artificial Sequence: Synthetic oligonucleotide
  Epidermal growth factor receptor (EGFR), ERBB1 phosphotyrosine kinase siRNA
catccaggaggtggctggttatg

SEQ ID NO: 5356 - DNA, 23 bp, Artificial Sequence
  Description of Artificial Sequence: Synthetic oligonucleotide
  Epidermal growth factor receptor (EGFR), ERBB1 phosphotyrosine kinase siRNA
atccaggaggtggctggttatgt

SEQ ID NO: 5357 - DNA, 23 bp, Artificial Sequence
  Description of Artificial Sequence: Synthetic oligonucleotide
  Epidermal growth factor receptor (EGFR), ERBB1 phosphotyrosine kinase siRNA
tccaggaggtggctggttatgtc

SEQ ID NO: 5358 - DNA, 23 bp, Artificial Sequence
  Description of Artificial Sequence: Synthetic oligonucleotide
  Epidermal growth factor receptor (EGFR), ERBB1 phosphotyrosine kinase siRNA
ccaggaggtggctggttatgtcc

SEQ ID NO: 5359 - DNA, 23 bp, Artificial Sequence
  Description of Artificial Sequence: Synthetic oligonucleotide
  Epidermal growth factor receptor (EGFR), ERBB1 phosphotyrosine kinase siRNA
caggaggtggctggttatgtcct

SEQ ID NO: 5360 - DNA, 23 bp, Artificial Sequence
  Description of Artificial Sequence: Synthetic oligonucleotide
  Epidermal growth factor receptor (EGFR), ERBB1 phosphotyrosine kinase siRNA
aggaggtggctggttatgtcctc

SEQ ID NO: 5361 - DNA, 23 bp, Artificial Sequence
  Description of Artificial Sequence: Synthetic oligonucleotide
  Epidermal growth factor receptor (EGFR), ERBB1 phosphotyrosine kinase siRNA
ggaggtggctggttatgtcctca

SEQ ID NO: 5362 - DNA, 23 bp, Artificial Sequence
  Description of Artificial Sequence: Synthetic oligonucleotide
  Epidermal growth factor receptor (EGFR), ERBB1 phosphotyrosine kinase siRNA
gaggtggctggttatgtcctcat

SEQ ID NO: 5363 - DNA, 23 bp, Artificial Sequence
  Description of Artificial Sequence: Synthetic oligonucleotide
  Epidermal growth factor receptor (EGFR), ERBB1 phosphotyrosine kinase siRNA
aggtggctggttatgtcctcatt

SEQ ID NO: 5364 - DNA, 23 bp, Artificial Sequence
  Description of Artificial Sequence: Synthetic oligonucleotide
  Epidermal growth factor receptor (EGFR), ERBB1 phosphotyrosine kinase siRNA
ggtggctggttatgtcctcattg

SEQ ID NO: 5365 - DNA, 23 bp, Artificial Sequence
  Description of Artificial Sequence: Synthetic oligonucleotide
  Epidermal growth factor receptor (EGFR), ERBB1 phosphotyrosine kinase siRNA
gtggctggttatgtcctcattgc

SEQ ID NO: 5366 - DNA, 23 bp, Artificial Sequence
  Description of Artificial Sequence: Synthetic oligonucleotide
  Epidermal growth factor receptor (EGFR), ERBB1 phosphotyrosine kinase siRNA
tggctggttatgtcctcattgcc

SEQ ID NO: 5367 - DNA, 23 bp, Artificial Sequence
  Description of Artificial Sequence: Synthetic oligonucleotide
  Epidermal growth factor receptor (EGFR), ERBB1 phosphotyrosine kinase siRNA
ggctggttatgtcctcattgccc

SEQ ID NO: 5368 - DNA, 23 bp, Artificial Sequence
  Description of Artificial Sequence: Synthetic oligonucleotide
  Epidermal growth factor receptor (EGFR), ERBB1 phosphotyrosine kinase siRNA
gctggttatgtcctcattgccct

SEQ ID NO: 5369 - DNA, 23 bp, Artificial Sequence
  Description of Artificial Sequence: Synthetic oligonucleotide
  Epidermal growth factor receptor (EGFR), ERBB1 phosphotyrosine kinase siRNA
ctggttatgtcctcattgccctc

SEQ ID NO: 5370 - DNA, 23 bp, Artificial Sequence
  Description of Artificial Sequence: Synthetic oligonucleotide
  Epidermal growth factor receptor (EGFR), ERBB1 phosphotyrosine kinase siRNA
tggttatgtcctcattgccctca

SEQ ID NO: 5371 - DNA, 23 bp, Artificial Sequence
  Description of Artificial Sequence: Synthetic oligonucleotide
  Epidermal growth factor receptor (EGFR), ERBB1 phosphotyrosine kinase siRNA
ggttatgtcctcattgccctcaa

SEQ ID NO: 5372 - DNA, 23 bp, Artificial Sequence
  Description of Artificial Sequence: Synthetic oligonucleotide
  Epidermal growth factor receptor (EGFR), ERBB1 phosphotyrosine kinase siRNA
gttatgtcctcattgccctcaac

SEQ ID NO: 5373 - DNA, 23 bp, Artificial Sequence
  Description of Artificial Sequence: Synthetic oligonucleotide
  Epidermal growth factor receptor (EGFR), ERBB1 phosphotyrosine kinase siRNA
ttatgtcctcattgccctcaaca

SEQ ID NO: 5374 - DNA, 23 bp, Artificial Sequence
  Description of Artificial Sequence: Synthetic oligonucleotide
  Epidermal growth factor receptor (EGFR), ERBB1 phosphotyrosine kinase siRNA
tatgtcctcattgccctcaacac

SEQ ID NO: 5375 - DNA, 23 bp, Artificial Sequence
  Description of Artificial Sequence: Synthetic oligonucleotide
  Epidermal growth factor receptor (EGFR), ERBB1 phosphotyrosine kinase siRNA
atgtcctcattgccctcaacaca

SEQ ID NO: 5376 - DNA, 23 bp, Artificial Sequence
  Description of Artificial Sequence: Synthetic oligonucleotide
  Epidermal growth factor receptor (EGFR), ERBB1 phosphotyrosine kinase siRNA
tgtcctcattgccctcaacacag

SEQ ID NO: 5377 - DNA, 23 bp, Artificial Sequence
  Description of Artificial Sequence: Synthetic oligonucleotide
  Epidermal growth factor receptor (EGFR), ERBB1 phosphotyrosine kinase siRNA
gtcctcattgccctcaacacagt

SEQ ID NO: 5378 - DNA, 23 bp, Artificial Sequence
  Description of Artificial Sequence: Synthetic oligonucleotide
  Epidermal growth factor receptor (EGFR), ERBB1 phosphotyrosine kinase siRNA
tcctcattgccctcaacacagtg

SEQ ID NO: 5379 - DNA, 23 bp, Artificial Sequence
  Description of Artificial Sequence: Synthetic oligonucleotide
  Epidermal growth factor receptor (EGFR), ERBB1 phosphotyrosine kinase siRNA
cctcattgccctcaacacagtgg

SEQ ID NO: 5380 - DNA, 23 bp, Artificial Sequence
  Description of Artificial Sequence: Synthetic oligonucleotide
  Epidermal growth factor receptor (EGFR), ERBB1 phosphotyrosine kinase siRNA
ctcattgccctcaacacagtgga

SEQ ID NO: 5381 - DNA, 23 bp, Artificial Sequence
  Description of Artificial Sequence: Synthetic oligonucleotide
  Epidermal growth factor receptor (EGFR), ERBB1 phosphotyrosine kinase siRNA
tcattgccctcaacacagtggag

SEQ ID NO: 5382 - DNA, 23 bp, Artificial Sequence
  Description of Artificial Sequence: Synthetic oligonucleotide
  Epidermal growth factor receptor (EGFR), ERBB1 phosphotyrosine kinase siRNA
cattgccctcaacacagtggagc

SEQ ID NO: 5383 - DNA, 23 bp, Artificial Sequence
  Description of Artificial Sequence: Synthetic oligonucleotide
  Epidermal growth factor receptor (EGFR), ERBB1 phosphotyrosine kinase siRNA
attgccctcaacacagtggagcg

SEQ ID NO: 5384 - DNA, 23 bp, Artificial Sequence
  Description of Artificial Sequence: Synthetic oligonucleotide
  Epidermal growth factor receptor (EGFR), ERBB1 phosphotyrosine kinase siRNA
ttgccctcaacacagtggagcga

SEQ ID NO: 5385 - DNA, 23 bp, Artificial Sequence
  Description of Artificial Sequence: Synthetic oligonucleotide
  Epidermal growth factor receptor (EGFR), ERBB1 phosphotyrosine kinase siRNA
tgccctcaacacagtggagcgaa

SEQ ID NO: 5386 - DNA, 23 bp, Artificial Sequence
  Description of Artificial Sequence: Synthetic oligonucleotide
  Epidermal growth factor receptor (EGFR), ERBB1 phosphotyrosine kinase siRNA
gccctcaacacagtggagcgaat

SEQ ID NO: 5387 - DNA, 23 bp, Artificial Sequence
  Description of Artificial Sequence: Synthetic oligonucleotide
  Epidermal growth factor receptor (EGFR), ERBB1 phosphotyrosine kinase siRNA
ccctcaacacagtggagcgaatt

SEQ ID NO: 5388 - DNA, 23 bp, Artificial Sequence
  Description of Artificial Sequence: Synthetic oligonucleotide
  Epidermal growth factor receptor (EGFR), ERBB1 phosphotyrosine kinase siRNA
cctcaacacagtggagcgaattc

SEQ ID NO: 5389 - DNA, 23 bp, Artificial Sequence
  Description of Artificial Sequence: Synthetic oligonucleotide
  Epidermal growth factor receptor (EGFR), ERBB1 phosphotyrosine kinase siRNA
ctcaacacagtggagcgaattcc

SEQ ID NO: 5390 - DNA, 23 bp, Artificial Sequence
  Description of Artificial Sequence: Synthetic oligonucleotide
  Epidermal growth factor receptor (EGFR), ERBB1 phosphotyrosine kinase siRNA
tcaacacagtggagcgaattcct

SEQ ID NO: 5391 - DNA, 23 bp, Artificial Sequence
  Description of Artificial Sequence: Synthetic oligonucleotide
  Epidermal growth factor receptor (EGFR), ERBB1 phosphotyrosine kinase siRNA
caacacagtggagcgaattcctt

SEQ ID NO: 5392 - DNA, 23 bp, Artificial Sequence
  Description of Artificial Sequence: Synthetic oligonucleotide
  Epidermal growth factor receptor (EGFR), ERBB1 phosphotyrosine kinase siRNA
aacacagtggagcgaattccttt

SEQ ID NO: 5393 - DNA, 23 bp, Artificial Sequence
  Description of Artificial Sequence: Synthetic oligonucleotide
  Epidermal growth factor receptor (EGFR), ERBB1 phosphotyrosine kinase siRNA
acacagtggagcgaattcctttg

SEQ ID NO: 5394 - DNA, 23 bp, Artificial Sequence
  Description of Artificial Sequence: Synthetic oligonucleotide
  Epidermal growth factor receptor (EGFR), ERBB1 phosphotyrosine kinase siRNA
cacagtggagcgaattcctttgg

SEQ ID NO: 5395 - DNA, 23 bp, Artificial Sequence
  Description of Artificial Sequence: Synthetic oligonucleotide
  Epidermal growth factor receptor (EGFR), ERBB1 phosphotyrosine kinase siRNA
acagtggagcgaattcctttgga

SEQ ID NO: 5396 - DNA, 23 bp, Artificial Sequence
  Description of Artificial Sequence: Synthetic oligonucleotide
  Epidermal growth factor receptor (EGFR), ERBB1 phosphotyrosine kinase siRNA
cagtggagcgaattcctttggaa

SEQ ID NO: 5397 - DNA, 23 bp, Artificial Sequence
  Description of Artificial Sequence: Synthetic oligonucleotide
  Epidermal growth factor receptor (EGFR), ERBB1 phosphotyrosine kinase siRNA
agtggagcgaattcctttggaaa

SEQ ID NO: 5398 - DNA, 23 bp, Artificial Sequence
  Description of Artificial Sequence: Synthetic oligonucleotide
  Epidermal growth factor receptor (EGFR), ERBB1 phosphotyrosine kinase siRNA
gtggagcgaattcctttggaaaa

SEQ ID NO: 5399 - DNA, 23 bp, Artificial Sequence
  Description of Artificial Sequence: Synthetic oligonucleotide
  Epidermal growth factor receptor (EGFR), ERBB1 phosphotyrosine kinase siRNA
tggagcgaattcctttggaaaac

SEQ ID NO: 5400 - DNA, 23 bp, Artificial Sequence
  Description of Artificial Sequence: Synthetic oligonucleotide
  Epidermal growth factor receptor (EGFR), ERBB1 phosphotyrosine kinase siRNA
ggagcgaattcctttggaaaacc

SEQ ID NO: 5401 - DNA, 23 bp, Artificial Sequence
  Description of Artificial Sequence: Synthetic oligonucleotide
  Epidermal growth factor receptor (EGFR), ERBB1 phosphotyrosine kinase siRNA
gagcgaattcctttggaaaacct

SEQ ID NO: 5402 - DNA, 23 bp, Artificial Sequence
  Description of Artificial Sequence: Synthetic oligonucleotide
  Epidermal growth factor receptor (EGFR), ERBB1 phosphotyrosine kinase siRNA
agcgaattcctttggaaaacctg

SEQ ID NO: 5403 - DNA, 23 bp, Artificial Sequence
  Description of Artificial Sequence: Synthetic oligonucleotide
  Epidermal growth factor receptor (EGFR), ERBB1 phosphotyrosine kinase siRNA
gcgaattcctttggaaaacctgc

SEQ ID NO: 5404 - DNA, 23 bp, Artificial Sequence
  Description of Artificial Sequence: Synthetic oligonucleotide
  Epidermal growth factor receptor (EGFR), ERBB1 phosphotyrosine kinase siRNA
cgaattcctttggaaaacctgca

SEQ ID NO: 5405 - DNA, 23 bp, Artificial Sequence
  Description of Artificial Sequence: Synthetic oligonucleotide
  Epidermal growth factor receptor (EGFR), ERBB1 phosphotyrosine kinase siRNA
gaattcctttggaaaacctgcag

SEQ ID NO: 5406 - DNA, 23 bp, Artificial Sequence
  Description of Artificial Sequence: Synthetic oligonucleotide
  Epidermal growth factor receptor (EGFR), ERBB1 phosphotyrosine kinase siRNA
aattcctttggaaaacctgcaga

SEQ ID NO: 5407 - DNA, 23 bp, Artificial Sequence
  Description of Artificial Sequence: Synthetic oligonucleotide
  Epidermal growth factor receptor (EGFR), ERBB1 phosphotyrosine kinase siRNA
attcctttggaaaacctgcagat

SEQ ID NO: 5408 - DNA, 23 bp, Artificial Sequence
  Description of Artificial Sequence: Synthetic oligonucleotide
  Epidermal growth factor receptor (EGFR), ERBB1 phosphotyrosine kinase siRNA
ttcctttggaaaacctgcagatc

SEQ ID NO: 5409 - DNA, 23 bp, Artificial Sequence
  Description of Artificial Sequence: Synthetic oligonucleotide
  Epidermal growth factor receptor (EGFR), ERBB1 phosphotyrosine kinase siRNA
tcctttggaaaacctgcagatca

SEQ ID NO: 5410 - DNA, 23 bp, Artificial Sequence
  Description of Artificial Sequence: Synthetic oligonucleotide
  Epidermal growth factor receptor (EGFR), ERBB1 phosphotyrosine kinase siRNA
cctttggaaaacctgcagatcat

SEQ ID NO: 5411 - DNA, 23 bp, Artificial Sequence
  Description of Artificial Sequence: Synthetic oligonucleotide
  Epidermal growth factor receptor (EGFR), ERBB1 phosphotyrosine kinase siRNA
ctttggaaaacctgcagatcatc

SEQ ID NO: 5412 - DNA, 23 bp, Artificial Sequence
  Description of Artificial Sequence: Synthetic oligonucleotide
  Epidermal growth factor receptor (EGFR), ERBB1 phosphotyrosine kinase siRNA
tttggaaaacctgcagatcatca

SEQ ID NO: 5413 - DNA, 23 bp, Artificial Sequence
  Description of Artificial Sequence: Synthetic oligonucleotide
  Epidermal growth factor receptor (EGFR), ERBB1 phosphotyrosine kinase siRNA
ttggaaaacctgcagatcatcag

SEQ ID NO: 5414 - DNA, 23 bp, Artificial Sequence
  Description of Artificial Sequence: Synthetic oligonucleotide
  Epidermal growth factor receptor (EGFR), ERBB1 phosphotyrosine kinase siRNA
tggaaaacctgcagatcatcaga

SEQ ID NO: 5415 - DNA, 23 bp, Artificial Sequence
  Description of Artificial Sequence: Synthetic oligonucleotide
  Epidermal growth factor receptor (EGFR), ERBB1 phosphotyrosine kinase siRNA
ggaaaacctgcagatcatcagag

SEQ ID NO: 5416 - DNA, 23 bp, Artificial Sequence
  Description of Artificial Sequence: Synthetic oligonucleotide
  Epidermal growth factor receptor (EGFR), ERBB1 phosphotyrosine kinase siRNA
gaaaacctgcagatcatcagagg

SEQ ID NO: 5417 - DNA, 23 bp, Artificial Sequence
  Description of Artificial Sequence: Synthetic oligonucleotide
  Epidermal growth factor receptor (EGFR), ERBB1 phosphotyrosine kinase siRNA
aaaacctgcagatcatcagagga

SEQ ID NO: 5418 - DNA, 23 bp, Artificial Sequence
  Description of Artificial Sequence: Synthetic oligonucleotide
  Epidermal growth factor receptor (EGFR), ERBB1 phosphotyrosine kinase siRNA
aaacctgcagatcatcagaggaa

SEQ ID NO: 5419 - DNA, 23 bp, Artificial Sequence
  Description of Artificial Sequence: Synthetic oligonucleotide
  Epidermal growth factor receptor (EGFR), ERBB1 phosphotyrosine kinase siRNA
aacctgcagatcatcagaggaaa

SEQ ID NO: 5420 - DNA, 23 bp, Artificial Sequence
  Description of Artificial Sequence: Synthetic oligonucleotide
  Epidermal growth factor receptor (EGFR), ERBB1 phosphotyrosine kinase siRNA
acctgcagatcatcagaggaaat

SEQ ID NO: 5421 - DNA, 23 bp, Artificial Sequence
  Description of Artificial Sequence: Synthetic oligonucleotide
  Epidermal growth factor receptor (EGFR), ERBB1 phosphotyrosine kinase siRNA
cctgcagatcatcagaggaaata

SEQ ID NO: 5422 - DNA, 23 bp, Artificial Sequence
  Description of Artificial Sequence: Synthetic oligonucleotide
  Epidermal growth factor receptor (EGFR), ERBB1 phosphotyrosine kinase siRNA
ctgcagatcatcagaggaaatat

SEQ ID NO: 5423 - DNA, 23 bp, Artificial Sequence
  Description of Artificial Sequence: Synthetic oligonucleotide
  Epidermal growth factor receptor (EGFR), ERBB1 phosphotyrosine kinase siRNA
tgcagatcatcagaggaaatatg

SEQ ID NO: 5424 - DNA, 23 bp, Artificial Sequence
  Description of Artificial Sequence: Synthetic oligonucleotide
  Epidermal growth factor receptor (EGFR), ERBB1 phosphotyrosine kinase siRNA
gcagatcatcagaggaaatatgt

SEQ ID NO: 5425 - DNA, 23 bp, Artificial Sequence
  Description of Artificial Sequence: Synthetic oligonucleotide
  Epidermal growth factor receptor (EGFR), ERBB1 phosphotyrosine kinase siRNA
cagatcatcagaggaaatatgta

SEQ ID NO: 5426 - DNA, 23 bp, Artificial Sequence
  Description of Artificial Sequence: Synthetic oligonucleotide
  Epidermal growth factor receptor (EGFR), ERBB1 phosphotyrosine kinase siRNA
agatcatcagaggaaatatgtac

SEQ ID NO: 5427 - DNA, 23 bp, Artificial Sequence
  Description of Artificial Sequence: Synthetic oligonucleotide
  Epidermal growth factor receptor (EGFR), ERBB1 phosphotyrosine kinase siRNA
gatcatcagaggaaatatgtact

SEQ ID NO: 5428 - DNA, 23 bp, Artificial Sequence
  Description of Artificial Sequence: Synthetic oligonucleotide
  Epidermal growth factor receptor (EGFR), ERBB1 phosphotyrosine kinase siRNA
atcatcagaggaaatatgtacta

SEQ ID NO: 5429 - DNA, 23 bp, Artificial Sequence
  Description of Artificial Sequence: Synthetic oligonucleotide
  Epidermal growth factor receptor (EGFR), ERBB1 phosphotyrosine kinase siRNA
tcatcagaggaaatatgtactac

SEQ ID NO: 5430 - DNA, 23 bp, Artificial Sequence
  Description of Artificial Sequence: Synthetic oligonucleotide
  Epidermal growth factor receptor (EGFR), ERBB1 phosphotyrosine kinase siRNA
catcagaggaaatatgtactacg

SEQ ID NO: 5431 - DNA, 23 bp, Artificial Sequence
  Description of Artificial Sequence: Synthetic oligonucleotide
  Epidermal growth factor receptor (EGFR), ERBB1 phosphotyrosine kinase siRNA
atcagaggaaatatgtactacga

SEQ ID NO: 5432 - DNA, 23 bp, Artificial Sequence
  Description of Artificial Sequence: Synthetic oligonucleotide
  Epidermal growth factor receptor (EGFR), ERBB1 phosphotyrosine kinase siRNA
tcagaggaaatatgtactacgaa

SEQ ID NO: 5433 - DNA, 23 bp, Artificial Sequence
  Description of Artificial Sequence: Synthetic oligonucleotide
  Epidermal growth factor receptor (EGFR), ERBB1 phosphotyrosine kinase siRNA
cagaggaaatatgtactacgaaa

SEQ ID NO: 5434 - DNA, 23 bp, Artificial Sequence
  Description of Artificial Sequence: Synthetic oligonucleotide
  Epidermal growth factor receptor (EGFR), ERBB1 phosphotyrosine kinase siRNA
agaggaaatatgtactacgaaaa

SEQ ID NO: 5435 - DNA, 23 bp, Artificial Sequence
  Description of Artificial Sequence: Synthetic oligonucleotide
  Epidermal growth factor receptor (EGFR), ERBB1 phosphotyrosine kinase siRNA
gaggaaatatgtactacgaaaat

SEQ ID NO: 5436 - DNA, 23 bp, Artificial Sequence
  Description of Artificial Sequence: Synthetic oligonucleotide
  Epidermal growth factor receptor (EGFR), ERBB1 phosphotyrosine kinase siRNA
aggaaatatgtactacgaaaatt

SEQ ID NO: 5437 - DNA, 23 bp, Artificial Sequence
  Description of Artificial Sequence: Synthetic oligonucleotide
  Epidermal growth factor receptor (EGFR), ERBB1 phosphotyrosine kinase siRNA
ggaaatatgtactacgaaaattc

SEQ ID NO: 5438 - DNA, 23 bp, Artificial Sequence
  Description of Artificial Sequence: Synthetic oligonucleotide
  Epidermal growth factor receptor (EGFR), ERBB1 phosphotyrosine kinase siRNA
gaaatatgtactacgaaaattcc

SEQ ID NO: 5439 - DNA, 23 bp, Artificial Sequence
  Description of Artificial Sequence: Synthetic oligonucleotide
  Epidermal growth factor receptor (EGFR), ERBB1 phosphotyrosine kinase siRNA
aaatatgtactacgaaaattcct

SEQ ID NO: 5440 - DNA, 23 bp, Artificial Sequence
  Description of Artificial Sequence: Synthetic oligonucleotide
  Epidermal growth factor receptor (EGFR), ERBB1 phosphotyrosine kinase siRNA
aatatgtactacgaaaattccta

SEQ ID NO: 5441 - DNA, 23 bp, Artificial Sequence
  Description of Artificial Sequence: Synthetic oligonucleotide
  Epidermal growth factor receptor (EGFR), ERBB1 phosphotyrosine kinase siRNA
atatgtactacgaaaattcctat

SEQ ID NO: 5442 - DNA, 23 bp, Artificial Sequence
  Description of Artificial Sequence: Synthetic oligonucleotide
  Epidermal growth factor receptor (EGFR), ERBB1 phosphotyrosine kinase siRNA
tatgtactacgaaaattcctatg

SEQ ID NO: 5443 - DNA, 23 bp, Artificial Sequence
  Description of Artificial Sequence: Synthetic oligonucleotide
  Epidermal growth factor receptor (EGFR), ERBB1 phosphotyrosine kinase siRNA
atgtactacgaaaattcctatgc

SEQ ID NO: 5444 - DNA, 23 bp, Artificial Sequence
  Description of Artificial Sequence: Synthetic oligonucleotide
  Epidermal growth factor receptor (EGFR), ERBB1 phosphotyrosine kinase siRNA
tgtactacgaaaattcctatgcc

SEQ ID NO: 5445 - DNA, 23 bp, Artificial Sequence
  Description of Artificial Sequence: Synthetic oligonucleotide
  Epidermal growth factor receptor (EGFR), ERBB1 phosphotyrosine kinase siRNA
gtactacgaaaattcctatgcct

SEQ ID NO: 5446 - DNA, 23 bp, Artificial Sequence
  Description of Artificial Sequence: Synthetic oligonucleotide
  Epidermal growth factor receptor (EGFR), ERBB1 phosphotyrosine kinase siRNA
tactacgaaaattcctatgcctt

SEQ ID NO: 5447 - DNA, 23 bp, Artificial Sequence
  Description of Artificial Sequence: Synthetic oligonucleotide
  Epidermal growth factor receptor (EGFR), ERBB1 phosphotyrosine kinase siRNA
actacgaaaattcctatgcctta

SEQ ID NO: 5448 - DNA, 23 bp, Artificial Sequence
  Description of Artificial Sequence: Synthetic oligonucleotide
  Epidermal growth factor receptor (EGFR), ERBB1 phosphotyrosine kinase siRNA
ctacgaaaattcctatgccttag

SEQ ID NO: 5449 - DNA, 23 bp, Artificial Sequence
  Description of Artificial Sequence: Synthetic oligonucleotide
  Epidermal growth factor receptor (EGFR), ERBB1 phosphotyrosine kinase siRNA
tacgaaaattcctatgccttagc

SEQ ID NO: 5450 - DNA, 23 bp, Artificial Sequence
  Description of Artificial Sequence: Synthetic oligonucleotide
  Epidermal growth factor receptor (EGFR), ERBB1 phosphotyrosine kinase siRNA
acgaaaattcctatgccttagca

SEQ ID NO: 5451 - DNA, 23 bp, Artificial Sequence
  Description of Artificial Sequence: Synthetic oligonucleotide
  Epidermal growth factor receptor (EGFR), ERBB1 phosphotyrosine kinase siRNA
cgaaaattcctatgccttagcag

SEQ ID NO: 5452 - DNA, 23 bp, Artificial Sequence
  Description of Artificial Sequence: Synthetic oligonucleotide
  Epidermal growth factor receptor (EGFR), ERBB1 phosphotyrosine kinase siRNA
gaaaattcctatgccttagcagt

SEQ ID NO: 5453 - DNA, 23 bp, Artificial Sequence
  Description of Artificial Sequence: Synthetic oligonucleotide
  Epidermal growth factor receptor (EGFR), ERBB1 phosphotyrosine kinase siRNA
aaaattcctatgccttagcagtc

SEQ ID NO: 5454 - DNA, 23 bp, Artificial Sequence
  Description of Artificial Sequence: Synthetic oligonucleotide
  Epidermal growth factor receptor (EGFR), ERBB1 phosphotyrosine kinase siRNA
aaattcctatgccttagcagtct

SEQ ID NO: 5455 - DNA, 23 bp, Artificial Sequence
  Description of Artificial Sequence: Synthetic oligonucleotide
  Epidermal growth factor receptor (EGFR), ERBB1 phosphotyrosine kinase siRNA
aattcctatgccttagcagtctt

SEQ ID NO: 5456 - DNA, 23 bp, Artificial Sequence
  Description of Artificial Sequence: Synthetic oligonucleotide
  Epidermal growth factor receptor (EGFR), ERBB1 phosphotyrosine kinase siRNA
attcctatgccttagcagtctta

SEQ ID NO: 5457 - DNA, 23 bp, Artificial Sequence
  Description of Artificial Sequence: Synthetic oligonucleotide
  Epidermal growth factor receptor (EGFR), ERBB1 phosphotyrosine kinase siRNA
ttcctatgccttagcagtcttat

SEQ ID NO: 5458 - DNA, 23 bp, Artificial Sequence
  Description of Artificial Sequence: Synthetic oligonucleotide
  Epidermal growth factor receptor (EGFR), ERBB1 phosphotyrosine kinase siRNA
tcctatgccttagcagtcttatc

SEQ ID NO: 5459 - DNA, 23 bp, Artificial Sequence
  Description of Artificial Sequence: Synthetic oligonucleotide
  Epidermal growth factor receptor (EGFR), ERBB1 phosphotyrosine kinase siRNA
cctatgccttagcagtcttatct

SEQ ID NO: 5460 - DNA, 23 bp, Artificial Sequence
  Description of Artificial Sequence: Synthetic oligonucleotide
  Epidermal growth factor receptor (EGFR), ERBB1 phosphotyrosine kinase siRNA
ctatgccttagcagtcttatcta

SEQ ID NO: 5461 - DNA, 23 bp, Artificial Sequence
  Description of Artificial Sequence: Synthetic oligonucleotide
  Epidermal growth factor receptor (EGFR), ERBB1 phosphotyrosine kinase siRNA
tatgccttagcagtcttatctaa

SEQ ID NO: 5462 - DNA, 23 bp, Artificial Sequence
  Description of Artificial Sequence: Synthetic oligonucleotide
  Epidermal growth factor receptor (EGFR), ERBB1 phosphotyrosine kinase siRNA
atgccttagcagtcttatctaac

SEQ ID NO: 5463 - DNA, 23 bp, Artificial Sequence
  Description of Artificial Sequence: Synthetic oligonucleotide
  Epidermal growth factor receptor (EGFR), ERBB1 phosphotyrosine kinase siRNA
tgccttagcagtcttatctaact

SEQ ID NO: 5464 - DNA, 23 bp, Artificial Sequence
  Description of Artificial Sequence: Synthetic oligonucleotide
  Epidermal growth factor receptor (EGFR), ERBB1 phosphotyrosine kinase siRNA
gccttagcagtcttatctaacta

SEQ ID NO: 5465 - DNA, 23 bp, Artificial Sequence
  Description of Artificial Sequence: Synthetic oligonucleotide
  Epidermal growth factor receptor (EGFR), ERBB1 phosphotyrosine kinase siRNA
ccttagcagtcttatctaactat

SEQ ID NO: 5466 - DNA, 23 bp, Artificial Sequence
  Description of Artificial Sequence: Synthetic oligonucleotide
  Epidermal growth factor receptor (EGFR), ERBB1 phosphotyrosine kinase siRNA
cttagcagtcttatctaactatg

SEQ ID NO: 5467 - DNA, 23 bp, Artificial Sequence
  Description of Artificial Sequence: Synthetic oligonucleotide
  Epidermal growth factor receptor (EGFR), ERBB1 phosphotyrosine kinase siRNA
ttagcagtcttatctaactatga

SEQ ID NO: 5468 - DNA, 23 bp, Artificial Sequence
  Description of Artificial Sequence: Synthetic oligonucleotide
  Epidermal growth factor receptor (EGFR), ERBB1 phosphotyrosine kinase siRNA
tagcagtcttatctaactatgat

SEQ ID NO: 5469 - DNA, 23 bp, Artificial Sequence
  Description of Artificial Sequence: Synthetic oligonucleotide
  Epidermal growth factor receptor (EGFR), ERBB1 phosphotyrosine kinase siRNA
agcagtcttatctaactatgatg

SEQ ID NO: 5470 - DNA, 23 bp, Artificial Sequence
  Description of Artificial Sequence: Synthetic oligonucleotide
  Epidermal growth factor receptor (EGFR), ERBB1 phosphotyrosine kinase siRNA
gcagtcttatctaactatgatgc

SEQ ID NO: 5471 - DNA, 23 bp, Artificial Sequence
  Description of Artificial Sequence: Synthetic oligonucleotide
  Epidermal growth factor receptor (EGFR), ERBB1 phosphotyrosine kinase siRNA
cagtcttatctaactatgatgca

SEQ ID NO: 5472 - DNA, 23 bp, Artificial Sequence
  Description of Artificial Sequence: Synthetic oligonucleotide
  Epidermal growth factor receptor (EGFR), ERBB1 phosphotyrosine kinase siRNA
agtcttatctaactatgatgcaa

SEQ ID NO: 5473 - DNA, 23 bp, Artificial Sequence
  Description of Artificial Sequence: Synthetic oligonucleotide
  Epidermal growth factor receptor (EGFR), ERBB1 phosphotyrosine kinase siRNA
gtcttatctaactatgatgcaaa

SEQ ID NO: 5474 - DNA, 23 bp, Artificial Sequence
  Description of Artificial Sequence: Synthetic oligonucleotide
  Epidermal growth factor receptor (EGFR), ERBB1 phosphotyrosine kinase siRNA
tcttatctaactatgatgcaaat

SEQ ID NO: 5475 - DNA, 23 bp, Artificial Sequence
  Description of Artificial Sequence: Synthetic oligonucleotide
  Epidermal growth factor receptor (EGFR), ERBB1 phosphotyrosine kinase siRNA
cttatctaactatgatgcaaata

SEQ ID NO: 5476 - DNA, 23 bp, Artificial Sequence
  Description of Artificial Sequence: Synthetic oligonucleotide
  Epidermal growth factor receptor (EGFR), ERBB1 phosphotyrosine kinase siRNA
ttatctaactatgatgcaaataa

SEQ ID NO: 5477 - DNA, 23 bp, Artificial Sequence
  Description of Artificial Sequence: Synthetic oligonucleotide
  Epidermal growth factor receptor (EGFR), ERBB1 phosphotyrosine kinase siRNA
tatctaactatgatgcaaataaa

SEQ ID NO: 5478 - DNA, 23 bp, Artificial Sequence
  Description of Artificial Sequence: Synthetic oligonucleotide
  Epidermal growth factor receptor (EGFR), ERBB1 phosphotyrosine kinase siRNA
atctaactatgatgcaaataaaa

SEQ ID NO: 5479 - DNA, 23 bp, Artificial Sequence
  Description of Artificial Sequence: Synthetic oligonucleotide
  Epidermal growth factor receptor (EGFR), ERBB1 phosphotyrosine kinase siRNA
tctaactatgatgcaaataaaac

SEQ ID NO: 5480 - DNA, 23 bp, Artificial Sequence
  Description of Artificial Sequence: Synthetic oligonucleotide
  Epidermal growth factor receptor (EGFR), ERBB1 phosphotyrosine kinase siRNA
ctaactatgatgcaaataaaacc

SEQ ID NO: 5481 - DNA, 23 bp, Artificial Sequence
  Description of Artificial Sequence: Synthetic oligonucleotide
  Epidermal growth factor receptor (EGFR), ERBB1 phosphotyrosine kinase siRNA
taactatgatgcaaataaaaccg

SEQ ID NO: 5482 - DNA, 23 bp, Artificial Sequence
  Description of Artificial Sequence: Synthetic oligonucleotide
  Epidermal growth factor receptor (EGFR), ERBB1 phosphotyrosine kinase siRNA
aactatgatgcaaataaaaccgg

SEQ ID NO: 5483 - DNA, 23 bp, Artificial Sequence
  Description of Artificial Sequence: Synthetic oligonucleotide
  Epidermal growth factor receptor (EGFR), ERBB1 phosphotyrosine kinase siRNA
actatgatgcaaataaaaccgga

SEQ ID NO: 5484 - DNA, 23 bp, Artificial Sequence
  Description of Artificial Sequence: Synthetic oligonucleotide
  Epidermal growth factor receptor (EGFR), ERBB1 phosphotyrosine kinase siRNA
ctatgatgcaaataaaaccggac

SEQ ID NO: 5485 - DNA, 23 bp, Artificial Sequence
  Description of Artificial Sequence: Synthetic oligonucleotide
  Epidermal growth factor receptor (EGFR), ERBB1 phosphotyrosine kinase siRNA
tatgatgcaaataaaaccggact

SEQ ID NO: 5486 - DNA, 23 bp, Artificial Sequence
  Description of Artificial Sequence: Synthetic oligonucleotide
  Epidermal growth factor receptor (EGFR), ERBB1 phosphotyrosine kinase siRNA
atgatgcaaataaaaccggactg

SEQ ID NO: 5487 - DNA, 23 bp, Artificial Sequence
  Description of Artificial Sequence: Synthetic oligonucleotide
  Epidermal growth factor receptor (EGFR), ERBB1 phosphotyrosine kinase siRNA
tgatgcaaataaaaccggactga

SEQ ID NO: 5488 - DNA, 23 bp, Artificial Sequence
  Description of Artificial Sequence: Synthetic oligonucleotide
  Epidermal growth factor receptor (EGFR), ERBB1 phosphotyrosine kinase siRNA
gatgcaaataaaaccggactgaa

SEQ ID NO: 5489 - DNA, 23 bp, Artificial Sequence
  Description of Artificial Sequence: Synthetic oligonucleotide
  Epidermal growth factor receptor (EGFR), ERBB1 phosphotyrosine kinase siRNA
atgcaaataaaaccggactgaag

SEQ ID NO: 5490 - DNA, 23 bp, Artificial Sequence
  Description of Artificial Sequence: Synthetic oligonucleotide
  Epidermal growth factor receptor (EGFR), ERBB1 phosphotyrosine kinase siRNA
tgcaaataaaaccggactgaagg

SEQ ID NO: 5491 - DNA, 23 bp, Artificial Sequence
  Description of Artificial Sequence: Synthetic oligonucleotide
  Epidermal growth factor receptor (EGFR), ERBB1 phosphotyrosine kinase siRNA
gcaaataaaaccggactgaagga

SEQ ID NO: 5492 - DNA, 23 bp, Artificial Sequence
  Description of Artificial Sequence: Synthetic oligonucleotide
  Epidermal growth factor receptor (EGFR), ERBB1 phosphotyrosine kinase siRNA
caaataaaaccggactgaaggag

SEQ ID NO: 5493 - DNA, 23 bp, Artificial Sequence
  Description of Artificial Sequence: Synthetic oligonucleotide
  Epidermal growth factor receptor (EGFR), ERBB1 phosphotyrosine kinase siRNA
aaataaaaccggactgaaggagc

SEQ ID NO: 5494 - DNA, 23 bp, Artificial Sequence
  Description of Artificial Sequence: Synthetic oligonucleotide
  Epidermal growth factor receptor (EGFR), ERBB1 phosphotyrosine kinase siRNA
aataaaaccggactgaaggagct

SEQ ID NO: 5495 - DNA, 23 bp, Artificial Sequence
  Description of Artificial Sequence: Synthetic oligonucleotide
  Epidermal growth factor receptor (EGFR), ERBB1 phosphotyrosine kinase siRNA
ataaaaccggactgaaggagctg

SEQ ID NO: 5496 - DNA, 23 bp, Artificial Sequence
  Description of Artificial Sequence: Synthetic oligonucleotide
  Epidermal growth factor receptor (EGFR), ERBB1 phosphotyrosine kinase siRNA
taaaaccggactgaaggagctgc

SEQ ID NO: 5497 - DNA, 23 bp, Artificial Sequence
  Description of Artificial Sequence: Synthetic oligonucleotide
  Epidermal growth factor receptor (EGFR), ERBB1 phosphotyrosine kinase siRNA
aaaaccggactgaaggagctgcc

SEQ ID NO: 5498 - DNA, 23 bp, Artificial Sequence
  Description of Artificial Sequence: Synthetic oligonucleotide
  Epidermal growth factor receptor (EGFR), ERBB1 phosphotyrosine kinase siRNA
aaaccggactgaaggagctgccc

SEQ ID NO: 5499 - DNA, 23 bp, Artificial Sequence
  Description of Artificial Sequence: Synthetic oligonucleotide
  Epidermal growth factor receptor (EGFR), ERBB1 phosphotyrosine kinase siRNA
aaccggactgaaggagctgccca

SEQ ID NO: 5500 - DNA, 23 bp, Artificial Sequence
  Description of Artificial Sequence: Synthetic oligonucleotide
  Epidermal growth factor receptor (EGFR), ERBB1 phosphotyrosine kinase siRNA
accggactgaaggagctgcccat

SEQ ID NO: 5501 - DNA, 23 bp, Artificial Sequence
  Description of Artificial Sequence: Synthetic oligonucleotide
  Epidermal growth factor receptor (EGFR), ERBB1 phosphotyrosine kinase siRNA
ccggactgaaggagctgcccatg

SEQ ID NO: 5502 - DNA, 23 bp, Artificial Sequence
  Description of Artificial Sequence: Synthetic oligonucleotide
  Epidermal growth factor receptor (EGFR), ERBB1 phosphotyrosine kinase siRNA
cggactgaaggagctgcccatga

SEQ ID NO: 5503 - DNA, 23 bp, Artificial Sequence
  Description of Artificial Sequence: Synthetic oligonucleotide
  Epidermal growth factor receptor (EGFR), ERBB1 phosphotyrosine kinase siRNA
ggactgaaggagctgcccatgag

SEQ ID NO: 5504 - DNA, 23 bp, Artificial Sequence
  Description of Artificial Sequence: Synthetic oligonucleotide
  Epidermal growth factor receptor (EGFR), ERBB1 phosphotyrosine kinase siRNA
gactgaaggagctgcccatgaga

SEQ ID NO: 5505 - DNA, 23 bp, Artificial Sequence
  Description of Artificial Sequence: Synthetic oligonucleotide
  Epidermal growth factor receptor (EGFR), ERBB1 phosphotyrosine kinase siRNA
actgaaggagctgcccatgagaa

SEQ ID NO: 5506 - DNA, 23 bp, Artificial Sequence
  Description of Artificial Sequence: Synthetic oligonucleotide
  Epidermal growth factor receptor (EGFR), ERBB1 phosphotyrosine kinase siRNA
ctgaaggagctgcccatgagaaa

SEQ ID NO: 5507 - DNA, 23 bp, Artificial Sequence
  Description of Artificial Sequence: Synthetic oligonucleotide
  Epidermal growth factor receptor (EGFR), ERBB1 phosphotyrosine kinase siRNA
tgaaggagctgcccatgagaaat

SEQ ID NO: 5508 - DNA, 23 bp, Artificial Sequence
  Description of Artificial Sequence: Synthetic oligonucleotide
  Epidermal growth factor receptor (EGFR), ERBB1 phosphotyrosine kinase siRNA
gaaggagctgcccatgagaaatt

SEQ ID NO: 5509 - DNA, 23 bp, Artificial Sequence
  Description of Artificial Sequence: Synthetic oligonucleotide
  Epidermal growth factor receptor (EGFR), ERBB1 phosphotyrosine kinase siRNA
aaggagctgcccatgagaaattt

SEQ ID NO: 5510 - DNA, 23 bp, Artificial Sequence
  Description of Artificial Sequence: Synthetic oligonucleotide
  Epidermal growth factor receptor (EGFR), ERBB1 phosphotyrosine kinase siRNA
aggagctgcccatgagaaattta

SEQ ID NO: 5511 - DNA, 23 bp, Artificial Sequence
  Description of Artificial Sequence: Synthetic oligonucleotide
  Epidermal growth factor receptor (EGFR), ERBB1 phosphotyrosine kinase siRNA
ggagctgcccatgagaaatttac

SEQ ID NO: 5512 - DNA, 23 bp, Artificial Sequence
  Description of Artificial Sequence: Synthetic oligonucleotide
  Epidermal growth factor receptor (EGFR), ERBB1 phosphotyrosine kinase siRNA
gagctgcccatgagaaatttaca

SEQ ID NO: 5513 - DNA, 23 bp, Artificial Sequence
  Description of Artificial Sequence: Synthetic oligonucleotide
  Epidermal growth factor receptor (EGFR), ERBB1 phosphotyrosine kinase siRNA
agctgcccatgagaaatttacag

SEQ ID NO: 5514 - DNA, 23 bp, Artificial Sequence
  Description of Artificial Sequence: Synthetic oligonucleotide
  Epidermal growth factor receptor (EGFR), ERBB1 phosphotyrosine kinase siRNA
gctgcccatgagaaatttacagg

SEQ ID NO: 5515 - DNA, 23 bp, Artificial Sequence
  Description of Artificial Sequence: Synthetic oligonucleotide
  Epidermal growth factor receptor (EGFR), ERBB1 phosphotyrosine kinase siRNA
ctgcccatgagaaatttacagga

SEQ ID NO: 5516 - DNA, 23 bp, Artificial Sequence
  Description of Artificial Sequence: Synthetic oligonucleotide
  Epidermal growth factor receptor (EGFR), ERBB1 phosphotyrosine kinase siRNA
tgcccatgagaaatttacaggaa

SEQ ID NO: 5517 - DNA, 23 bp, Artificial Sequence
  Description of Artificial Sequence: Synthetic oligonucleotide
  Epidermal growth factor receptor (EGFR), ERBB1 phosphotyrosine kinase siRNA
gcccatgagaaatttacaggaaa

SEQ ID NO: 5518 - DNA, 23 bp, Artificial Sequence
  Description of Artificial Sequence: Synthetic oligonucleotide
  Epidermal growth factor receptor (EGFR), ERBB1 phosphotyrosine kinase siRNA
cccatgagaaatttacaggaaat

SEQ ID NO: 5519 - DNA, 23 bp, Artificial Sequence
  Description of Artificial Sequence: Synthetic oligonucleotide
  Epidermal growth factor receptor (EGFR), ERBB1 phosphotyrosine kinase siRNA
ccatgagaaatttacaggaaatc

SEQ ID NO: 5520 - DNA, 23 bp, Artificial Sequence
  Description of Artificial Sequence: Synthetic oligonucleotide
  Epidermal growth factor receptor (EGFR), ERBB1 phosphotyrosine kinase siRNA
catgagaaatttacaggaaatcc

SEQ ID NO: 5521 - DNA, 23 bp, Artificial Sequence
  Description of Artificial Sequence: Synthetic oligonucleotide
  Epidermal growth factor receptor (EGFR), ERBB1 phosphotyrosine kinase siRNA
atgagaaatttacaggaaatcct

SEQ ID NO: 5522 - DNA, 23 bp, Artificial Sequence
  Description of Artificial Sequence: Synthetic oligonucleotide
  Epidermal growth factor receptor (EGFR), ERBB1 phosphotyrosine kinase siRNA
tgagaaatttacaggaaatcctg

SEQ ID NO: 5523 - DNA, 23 bp, Artificial Sequence
  Description of Artificial Sequence: Synthetic oligonucleotide
  Epidermal growth factor receptor (EGFR), ERBB1 phosphotyrosine kinase siRNA
gagaaatttacaggaaatcctgc

SEQ ID NO: 5524 - DNA, 23 bp, Artificial Sequence
  Description of Artificial Sequence: Synthetic oligonucleotide
  Epidermal growth factor receptor (EGFR), ERBB1 phosphotyrosine kinase siRNA
agaaatttacaggaaatcctgca

SEQ ID NO: 5525 - DNA, 23 bp, Artificial Sequence
  Description of Artificial Sequence: Synthetic oligonucleotide
  Epidermal growth factor receptor (EGFR), ERBB1 phosphotyrosine kinase siRNA
gaaatttacaggaaatcctgcat

SEQ ID NO: 5526 - DNA, 23 bp, Artificial Sequence
  Description of Artificial Sequence: Synthetic oligonucleotide
  Epidermal growth factor receptor (EGFR), ERBB1 phosphotyrosine kinase siRNA
aaatttacaggaaatcctgcatg

SEQ ID NO: 5527 - DNA, 23 bp, Artificial Sequence
  Description of Artificial Sequence: Synthetic oligonucleotide
  Epidermal growth factor receptor (EGFR), ERBB1 phosphotyrosine kinase siRNA
aatttacaggaaatcctgcatgg

SEQ ID NO: 5528 - DNA, 23 bp, Artificial Sequence
  Description of Artificial Sequence: Synthetic oligonucleotide
  Epidermal growth factor receptor (EGFR), ERBB1 phosphotyrosine kinase siRNA
atttacaggaaatcctgcatggc

SEQ ID NO: 5529 - DNA, 23 bp, Artificial Sequence
  Description of Artificial Sequence: Synthetic oligonucleotide
  Epidermal growth factor receptor (EGFR), ERBB1 phosphotyrosine kinase siRNA
tttacaggaaatcctgcatggcg

SEQ ID NO: 5530 - DNA, 23 bp, Artificial Sequence
  Description of Artificial Sequence: Synthetic oligonucleotide
  Epidermal growth factor receptor (EGFR), ERBB1 phosphotyrosine kinase siRNA
ttacaggaaatcctgcatggcgc

SEQ ID NO: 5531 - DNA, 23 bp, Artificial Sequence
  Description of Artificial Sequence: Synthetic oligonucleotide
  Epidermal growth factor receptor (EGFR), ERBB1 phosphotyrosine kinase siRNA
tacaggaaatcctgcatggcgcc

SEQ ID NO: 5532 - DNA, 23 bp, Artificial Sequence
  Description of Artificial Sequence: Synthetic oligonucleotide
  Epidermal growth factor receptor (EGFR), ERBB1 phosphotyrosine kinase siRNA
acaggaaatcctgcatggcgccg

SEQ ID NO: 5533 - DNA, 23 bp, Artificial Sequence
  Description of Artificial Sequence: Synthetic oligonucleotide
  Epidermal growth factor receptor (EGFR), ERBB1 phosphotyrosine kinase siRNA
caggaaatcctgcatggcgccgt

SEQ ID NO: 5534 - DNA, 23 bp, Artificial Sequence
  Description of Artificial Sequence: Synthetic oligonucleotide
  Epidermal growth factor receptor (EGFR), ERBB1 phosphotyrosine kinase siRNA
aggaaatcctgcatggcgccgtg

SEQ ID NO: 5535 - DNA, 23 bp, Artificial Sequence
  Description of Artificial Sequence: Synthetic oligonucleotide
  Epidermal growth factor receptor (EGFR), ERBB1 phosphotyrosine kinase siRNA
ggaaatcctgcatggcgccgtgc

SEQ ID NO: 5536 - DNA, 23 bp, Artificial Sequence
  Description of Artificial Sequence: Synthetic oligonucleotide
  Epidermal growth factor receptor (EGFR), ERBB1 phosphotyrosine kinase siRNA
gaaatcctgcatggcgccgtgcg

SEQ ID NO: 5537 - DNA, 23 bp, Artificial Sequence
  Description of Artificial Sequence: Synthetic oligonucleotide
  Epidermal growth factor receptor (EGFR), ERBB1 phosphotyrosine kinase siRNA
aaatcctgcatggcgccgtgcgg

SEQ ID NO: 5538 - DNA, 23 bp, Artificial Sequence
  Description of Artificial Sequence: Synthetic oligonucleotide
  Epidermal growth factor receptor (EGFR), ERBB1 phosphotyrosine kinase siRNA
aatcctgcatggcgccgtgcggt

SEQ ID NO: 5539 - DNA, 23 bp, Artificial Sequence
  Description of Artificial Sequence: Synthetic oligonucleotide
  Epidermal growth factor receptor (EGFR), ERBB1 phosphotyrosine kinase siRNA
atcctgcatggcgccgtgcggtt

SEQ ID NO: 5540 - DNA, 23 bp, Artificial Sequence
  Description of Artificial Sequence: Synthetic oligonucleotide
  Epidermal growth factor receptor (EGFR), ERBB1 phosphotyrosine kinase siRNA
tcctgcatggcgccgtgcggttc

SEQ ID NO: 5541 - DNA, 23 bp, Artificial Sequence
  Description of Artificial Sequence: Synthetic oligonucleotide
  Epidermal growth factor receptor (EGFR), ERBB1 phosphotyrosine kinase siRNA
cctgcatggcgccgtgcggttca

SEQ ID NO: 5542 - DNA, 23 bp, Artificial Sequence
  Description of Artificial Sequence: Synthetic oligonucleotide
  Epidermal growth factor receptor (EGFR), ERBB1 phosphotyrosine kinase siRNA
ctgcatggcgccgtgcggttcag

SEQ ID NO: 5543 - DNA, 23 bp, Artificial Sequence
  Description of Artificial Sequence: Synthetic oligonucleotide
  Epidermal growth factor receptor (EGFR), ERBB1 phosphotyrosine kinase siRNA
tgcatggcgccgtgcggttcagc

SEQ ID NO: 5544 - DNA, 23 bp, Artificial Sequence
  Description of Artificial Sequence: Synthetic oligonucleotide
  Epidermal growth factor receptor (EGFR), ERBB1 phosphotyrosine kinase siRNA
gcatggcgccgtgcggttcagca

SEQ ID NO: 5545 - DNA, 23 bp, Artificial Sequence
  Description of Artificial Sequence: Synthetic oligonucleotide
  Epidermal growth factor receptor (EGFR), ERBB1 phosphotyrosine kinase siRNA
catggcgccgtgcggttcagcaa

SEQ ID NO: 5546 - DNA, 23 bp, Artificial Sequence
  Description of Artificial Sequence: Synthetic oligonucleotide
  Epidermal growth factor receptor (EGFR), ERBB1 phosphotyrosine kinase siRNA
atggcgccgtgcggttcagcaac

SEQ ID NO: 5547 - DNA, 23 bp, Artificial Sequence
  Description of Artificial Sequence: Synthetic oligonucleotide
  Epidermal growth factor receptor (EGFR), ERBB1 phosphotyrosine kinase siRNA
tggcgccgtgcggttcagcaaca

SEQ ID NO: 5548 - DNA, 23 bp, Artificial Sequence
  Description of Artificial Sequence: Synthetic oligonucleotide
  Epidermal growth factor receptor (EGFR), ERBB1 phosphotyrosine kinase siRNA
ggcgccgtgcggttcagcaacaa

SEQ ID NO: 5549 - DNA, 23 bp, Artificial Sequence
  Description of Artificial Sequence: Synthetic oligonucleotide
  Epidermal growth factor receptor (EGFR), ERBB1 phosphotyrosine kinase siRNA
gcgccgtgcggttcagcaacaac

SEQ ID NO: 5550 - DNA, 23 bp, Artificial Sequence
  Description of Artificial Sequence: Synthetic oligonucleotide
  Epidermal growth factor receptor (EGFR), ERBB1 phosphotyrosine kinase siRNA
cgccgtgcggttcagcaacaacc

SEQ ID NO: 5551 - DNA, 23 bp, Artificial Sequence
  Description of Artificial Sequence: Synthetic oligonucleotide
  Epidermal growth factor receptor (EGFR), ERBB1 phosphotyrosine kinase siRNA
gccgtgcggttcagcaacaaccc

SEQ ID NO: 5552 - DNA, 23 bp, Artificial Sequence
  Description of Artificial Sequence: Synthetic oligonucleotide
  Epidermal growth factor receptor (EGFR), ERBB1 phosphotyrosine kinase siRNA
ccgtgcggttcagcaacaaccct

SEQ ID NO: 5553 - DNA, 23 bp, Artificial Sequence
  Description of Artificial Sequence: Synthetic oligonucleotide
  Epidermal growth factor receptor (EGFR), ERBB1 phosphotyrosine kinase siRNA
cgtgcggttcagcaacaaccctg

SEQ ID NO: 5554 - DNA, 23 bp, Artificial Sequence
  Description of Artificial Sequence: Synthetic oligonucleotide
  Epidermal growth factor receptor (EGFR), ERBB1 phosphotyrosine kinase siRNA
gtgcggttcagcaacaaccctgc

SEQ ID NO: 5555 - DNA, 23 bp, Artificial Sequence
  Description of Artificial Sequence: Synthetic oligonucleotide
  Epidermal growth factor receptor (EGFR), ERBB1 phosphotyrosine kinase siRNA
tgcggttcagcaacaaccctgcc

SEQ ID NO: 5556 - DNA, 23 bp, Artificial Sequence
  Description of Artificial Sequence: Synthetic oligonucleotide
  Epidermal growth factor receptor (EGFR), ERBB1 phosphotyrosine kinase siRNA
gcggttcagcaacaaccctgccc

SEQ ID NO: 5557 - DNA, 23 bp, Artificial Sequence
  Description of Artificial Sequence: Synthetic oligonucleotide
  Epidermal growth factor receptor (EGFR), ERBB1 phosphotyrosine kinase siRNA
cggttcagcaacaaccctgccct

SEQ ID NO: 5558 - DNA, 23 bp, Artificial Sequence
  Description of Artificial Sequence: Synthetic oligonucleotide
  Epidermal growth factor receptor (EGFR), ERBB1 phosphotyrosine kinase siRNA
ggttcagcaacaaccctgccctg

SEQ ID NO: 5559 - DNA, 23 bp, Artificial Sequence
  Description of Artificial Sequence: Synthetic oligonucleotide
  Epidermal growth factor receptor (EGFR), ERBB1 phosphotyrosine kinase siRNA
gttcagcaacaaccctgccctgt

SEQ ID NO: 5560 - DNA, 23 bp, Artificial Sequence
  Description of Artificial Sequence: Synthetic oligonucleotide
  Epidermal growth factor receptor (EGFR), ERBB1 phosphotyrosine kinase siRNA
ttcagcaacaaccctgccctgtg

SEQ ID NO: 5561 - DNA, 23 bp, Artificial Sequence
  Description of Artificial Sequence: Synthetic oligonucleotide
  Epidermal growth factor receptor (EGFR), ERBB1 phosphotyrosine kinase siRNA
tcagcaacaaccctgccctgtgc

SEQ ID NO: 5562 - DNA, 23 bp, Artificial Sequence
  Description of Artificial Sequence: Synthetic oligonucleotide
  Epidermal growth factor receptor (EGFR), ERBB1 phosphotyrosine kinase siRNA
cagcaacaaccctgccctgtgca

SEQ ID NO: 5563 - DNA, 23 bp, Artificial Sequence
  Description of Artificial Sequence: Synthetic oligonucleotide
  Epidermal growth factor receptor (EGFR), ERBB1 phosphotyrosine kinase siRNA
agcaacaaccctgccctgtgcaa

SEQ ID NO: 5564 - DNA, 23 bp, Artificial Sequence
  Description of Artificial Sequence: Synthetic oligonucleotide
  Epidermal growth factor receptor (EGFR), ERBB1 phosphotyrosine kinase siRNA
gcaacaaccctgccctgtgcaac

SEQ ID NO: 5565 - DNA, 23 bp, Artificial Sequence
  Description of Artificial Sequence: Synthetic oligonucleotide
  Epidermal growth factor receptor (EGFR), ERBB1 phosphotyrosine kinase siRNA
caacaaccctgccctgtgcaacg

SEQ ID NO: 5566 - DNA, 23 bp, Artificial Sequence
  Description of Artificial Sequence: Synthetic oligonucleotide
  Epidermal growth factor receptor (EGFR), ERBB1 phosphotyrosine kinase siRNA
aacaaccctgccctgtgcaacgt

SEQ ID NO: 5567 - DNA, 23 bp, Artificial Sequence
  Description of Artificial Sequence: Synthetic oligonucleotide
  Epidermal growth factor receptor (EGFR), ERBB1 phosphotyrosine kinase siRNA
acaaccctgccctgtgcaacgtg

SEQ ID NO: 5568 - DNA, 23 bp, Artificial Sequence
  Description of Artificial Sequence: Synthetic oligonucleotide
  Epidermal growth factor receptor (EGFR), ERBB1 phosphotyrosine kinase siRNA
caaccctgccctgtgcaacgtgg

SEQ ID NO: 5569 - DNA, 23 bp, Artificial Sequence
  Description of Artificial Sequence: Synthetic oligonucleotide
  Epidermal growth factor receptor (EGFR), ERBB1 phosphotyrosine kinase siRNA
aaccctgccctgtgcaacgtgga

SEQ ID NO: 5570 - DNA, 23 bp, Artificial Sequence
  Description of Artificial Sequence: Synthetic oligonucleotide
  Epidermal growth factor receptor (EGFR), ERBB1 phosphotyrosine kinase siRNA
accctgccctgtgcaacgtggag

SEQ ID NO: 5571 - DNA, 23 bp, Artificial Sequence
  Description of Artificial Sequence: Synthetic oligonucleotide
  Epidermal growth factor receptor (EGFR), ERBB1 phosphotyrosine kinase siRNA
ccctgccctgtgcaacgtggaga

SEQ ID NO: 5572 - DNA, 23 bp, Artificial Sequence
  Description of Artificial Sequence: Synthetic oligonucleotide
  Epidermal growth factor receptor (EGFR), ERBB1 phosphotyrosine kinase siRNA
cctgccctgtgcaacgtggagag

SEQ ID NO: 5573 - DNA, 23 bp, Artificial Sequence
  Description of Artificial Sequence: Synthetic oligonucleotide
  Epidermal growth factor receptor (EGFR), ERBB1 phosphotyrosine kinase siRNA
ctgccctgtgcaacgtggagagc

SEQ ID NO: 5574 - DNA, 23 bp, Artificial Sequence
  Description of Artificial Sequence: Synthetic oligonucleotide
  Epidermal growth factor receptor (EGFR), ERBB1 phosphotyrosine kinase siRNA
tgccctgtgcaacgtggagagca

SEQ ID NO: 5575 - DNA, 23 bp, Artificial Sequence
  Description of Artificial Sequence: Synthetic oligonucleotide
  Epidermal growth factor receptor (EGFR), ERBB1 phosphotyrosine kinase siRNA
gccctgtgcaacgtggagagcat

SEQ ID NO: 5576 - DNA, 23 bp, Artificial Sequence
  Description of Artificial Sequence: Synthetic oligonucleotide
  Epidermal growth factor receptor (EGFR), ERBB1 phosphotyrosine kinase siRNA
ccctgtgcaacgtggagagcatc

SEQ ID NO: 5577 - DNA, 23 bp, Artificial Sequence
  Description of Artificial Sequence: Synthetic oligonucleotide
  Epidermal growth factor receptor (EGFR), ERBB1 phosphotyrosine kinase siRNA
cctgtgcaacgtggagagcatcc

SEQ ID NO: 5578 - DNA, 23 bp, Artificial Sequence
  Description of Artificial Sequence: Synthetic oligonucleotide
  Epidermal growth factor receptor (EGFR), ERBB1 phosphotyrosine kinase siRNA
ctgtgcaacgtggagagcatcca

SEQ ID NO: 5579 - DNA, 23 bp, Artificial Sequence
  Description of Artificial Sequence: Synthetic oligonucleotide
  Epidermal growth factor receptor (EGFR), ERBB1 phosphotyrosine kinase siRNA
tgtgcaacgtggagagcatccag

SEQ ID NO: 5580 - DNA, 23 bp, Artificial Sequence
  Description of Artificial Sequence: Synthetic oligonucleotide
  Epidermal growth factor receptor (EGFR), ERBB1 phosphotyrosine kinase siRNA
gtgcaacgtggagagcatccagt

SEQ ID NO: 5581 - DNA, 23 bp, Artificial Sequence
  Description of Artificial Sequence: Synthetic oligonucleotide
  Epidermal growth factor receptor (EGFR), ERBB1 phosphotyrosine kinase siRNA
tgcaacgtggagagcatccagtg

SEQ ID NO: 5582 - DNA, 23 bp, Artificial Sequence
  Description of Artificial Sequence: Synthetic oligonucleotide
  Epidermal growth factor receptor (EGFR), ERBB1 phosphotyrosine kinase siRNA
gcaacgtggagagcatccagtgg

SEQ ID NO: 5583 - DNA, 23 bp, Artificial Sequence
  Description of Artificial Sequence: Synthetic oligonucleotide
  Epidermal growth factor receptor (EGFR), ERBB1 phosphotyrosine kinase siRNA
caacgtggagagcatccagtggc

SEQ ID NO: 5584 - DNA, 23 bp, Artificial Sequence
  Description of Artificial Sequence: Synthetic oligonucleotide
  Epidermal growth factor receptor (EGFR), ERBB1 phosphotyrosine kinase siRNA
aacgtggagagcatccagtggcg

SEQ ID NO: 5585 - DNA, 23 bp, Artificial Sequence
  Description of Artificial Sequence: Synthetic oligonucleotide
  Epidermal growth factor receptor (EGFR), ERBB1 phosphotyrosine kinase siRNA
acgtggagagcatccagtggcgg

SEQ ID NO: 5586 - DNA, 23 bp, Artificial Sequence
  Description of Artificial Sequence: Synthetic oligonucleotide
  Epidermal growth factor receptor (EGFR), ERBB1 phosphotyrosine kinase siRNA
cgtggagagcatccagtggcggg

SEQ ID NO: 5587 - DNA, 23 bp, Artificial Sequence
  Description of Artificial Sequence: Synthetic oligonucleotide
  Epidermal growth factor receptor (EGFR), ERBB1 phosphotyrosine kinase siRNA
gtggagagcatccagtggcggga

SEQ ID NO: 5588 - DNA, 23 bp, Artificial Sequence
  Description of Artificial Sequence: Synthetic oligonucleotide
  Epidermal growth factor receptor (EGFR), ERBB1 phosphotyrosine kinase siRNA
tggagagcatccagtggcgggac

SEQ ID NO: 5589 - DNA, 23 bp, Artificial Sequence
  Description of Artificial Sequence: Synthetic oligonucleotide
  Epidermal growth factor receptor (EGFR), ERBB1 phosphotyrosine kinase siRNA
ggagagcatccagtggcgggaca

SEQ ID NO: 5590 - DNA, 23 bp, Artificial Sequence
  Description of Artificial Sequence: Synthetic oligonucleotide
  Epidermal growth factor receptor (EGFR), ERBB1 phosphotyrosine kinase siRNA
gagagcatccagtggcgggacat

SEQ ID NO: 5591 - DNA, 23 bp, Artificial Sequence
  Description of Artificial Sequence: Synthetic oligonucleotide
  Epidermal growth factor receptor (EGFR), ERBB1 phosphotyrosine kinase siRNA
agagcatccagtggcgggacata

SEQ ID NO: 5592 - DNA, 23 bp, Artificial Sequence
  Description of Artificial Sequence: Synthetic oligonucleotide
  Epidermal growth factor receptor (EGFR), ERBB1 phosphotyrosine kinase siRNA
gagcatccagtggcgggacatag

SEQ ID NO: 5593 - DNA, 23 bp, Artificial Sequence
  Description of Artificial Sequence: Synthetic oligonucleotide
  Epidermal growth factor receptor (EGFR), ERBB1 phosphotyrosine kinase siRNA
agcatccagtggcgggacatagt

SEQ ID NO: 5594 - DNA, 23 bp, Artificial Sequence
  Description of Artificial Sequence: Synthetic oligonucleotide
  Epidermal growth factor receptor (EGFR), ERBB1 phosphotyrosine kinase siRNA
gcatccagtggcgggacatagtc

SEQ ID NO: 5595 - DNA, 23 bp, Artificial Sequence
  Description of Artificial Sequence: Synthetic oligonucleotide
  Epidermal growth factor receptor (EGFR), ERBB1 phosphotyrosine kinase siRNA
catccagtggcgggacatagtca

SEQ ID NO: 5596 - DNA, 23 bp, Artificial Sequence
  Description of Artificial Sequence: Synthetic oligonucleotide
  Epidermal growth factor receptor (EGFR), ERBB1 phosphotyrosine kinase siRNA
atccagtggcgggacatagtcag

SEQ ID NO: 5597 - DNA, 23 bp, Artificial Sequence
  Description of Artificial Sequence: Synthetic oligonucleotide
  Epidermal growth factor receptor (EGFR), ERBB1 phosphotyrosine kinase siRNA
tccagtggcgggacatagtcagc

SEQ ID NO: 5598 - DNA, 23 bp, Artificial Sequence
  Description of Artificial Sequence: Synthetic oligonucleotide
  Epidermal growth factor receptor (EGFR), ERBB1 phosphotyrosine kinase siRNA
ccagtggcgggacatagtcagca

SEQ ID NO: 5599 - DNA, 23 bp, Artificial Sequence
  Description of Artificial Sequence: Synthetic oligonucleotide
  Epidermal growth factor receptor (EGFR), ERBB1 phosphotyrosine kinase siRNA
cagtggcgggacatagtcagcag

SEQ ID NO: 5600 - DNA, 23 bp, Artificial Sequence
  Description of Artificial Sequence: Synthetic oligonucleotide
  Epidermal growth factor receptor (EGFR), ERBB1 phosphotyrosine kinase siRNA
agtggcgggacatagtcagcagt

SEQ ID NO: 5601 - DNA, 23 bp, Artificial Sequence
  Description of Artificial Sequence: Synthetic oligonucleotide
  Epidermal growth factor receptor (EGFR), ERBB1 phosphotyrosine kinase siRNA
gtggcgggacatagtcagcagtg

SEQ ID NO: 5602 - DNA, 23 bp, Artificial Sequence
  Description of Artificial Sequence: Synthetic oligonucleotide
  Epidermal growth factor receptor (EGFR), ERBB1 phosphotyrosine kinase siRNA
tggcgggacatagtcagcagtga

SEQ ID NO: 5603 - DNA, 23 bp, Artificial Sequence
  Description of Artificial Sequence: Synthetic oligonucleotide
  Epidermal growth factor receptor (EGFR), ERBB1 phosphotyrosine kinase siRNA
ggcgggacatagtcagcagtgac

SEQ ID NO: 5604 - DNA, 23 bp, Artificial Sequence
  Description of Artificial Sequence: Synthetic oligonucleotide
  Epidermal growth factor receptor (EGFR), ERBB1 phosphotyrosine kinase siRNA
gcgggacatagtcagcagtgact

SEQ ID NO: 5605 - DNA, 23 bp, Artificial Sequence
  Description of Artificial Sequence: Synthetic oligonucleotide
  Epidermal growth factor receptor (EGFR), ERBB1 phosphotyrosine kinase siRNA
cgggacatagtcagcagtgactt

SEQ ID NO: 5606 - DNA, 23 bp, Artificial Sequence
  Description of Artificial Sequence: Synthetic oligonucleotide
  Epidermal growth factor receptor (EGFR), ERBB1 phosphotyrosine kinase siRNA
gggacatagtcagcagtgacttt

SEQ ID NO: 5607 - DNA, 23 bp, Artificial Sequence
  Description of Artificial Sequence: Synthetic oligonucleotide
  Epidermal growth factor receptor (EGFR), ERBB1 phosphotyrosine kinase siRNA
ggacatagtcagcagtgactttc

SEQ ID NO: 5608 - DNA, 23 bp, Artificial Sequence
  Description of Artificial Sequence: Synthetic oligonucleotide
  Epidermal growth factor receptor (EGFR), ERBB1 phosphotyrosine kinase siRNA
gacatagtcagcagtgactttct

SEQ ID NO: 5609 - DNA, 23 bp, Artificial Sequence
  Description of Artificial Sequence: Synthetic oligonucleotide
  Epidermal growth factor receptor (EGFR), ERBB1 phosphotyrosine kinase siRNA
acatagtcagcagtgactttctc

SEQ ID NO: 5610 - DNA, 23 bp, Artificial Sequence
  Description of Artificial Sequence: Synthetic oligonucleotide
  Epidermal growth factor receptor (EGFR), ERBB1 phosphotyrosine kinase siRNA
catagtcagcagtgactttctca

SEQ ID NO: 5611 - DNA, 23 bp, Artificial Sequence
  Description of Artificial Sequence: Synthetic oligonucleotide
  Epidermal growth factor receptor (EGFR), ERBB1 phosphotyrosine kinase siRNA
atagtcagcagtgactttctcag

SEQ ID NO: 5612 - DNA, 23 bp, Artificial Sequence
  Description of Artificial Sequence: Synthetic oligonucleotide
  Epidermal growth factor receptor (EGFR), ERBB1 phosphotyrosine kinase siRNA
tagtcagcagtgactttctcagc

SEQ ID NO: 5613 - DNA, 23 bp, Artificial Sequence
  Description of Artificial Sequence: Synthetic oligonucleotide
  Epidermal growth factor receptor (EGFR), ERBB1 phosphotyrosine kinase siRNA
agtcagcagtgactttctcagca

SEQ ID NO: 5614 - DNA, 23 bp, Artificial Sequence
  Description of Artificial Sequence: Synthetic oligonucleotide
  Epidermal growth factor receptor (EGFR), ERBB1 phosphotyrosine kinase siRNA
gtcagcagtgactttctcagcaa

SEQ ID NO: 5615 - DNA, 23 bp, Artificial Sequence
  Description of Artificial Sequence: Synthetic oligonucleotide
  Epidermal growth factor receptor (EGFR), ERBB1 phosphotyrosine kinase siRNA
tcagcagtgactttctcagcaac

SEQ ID NO: 5616 - DNA, 23 bp, Artificial Sequence
  Description of Artificial Sequence: Synthetic oligonucleotide
  Epidermal growth factor receptor (EGFR), ERBB1 phosphotyrosine kinase siRNA
cagcagtgactttctcagcaaca

SEQ ID NO: 5617 - DNA, 23 bp, Artificial Sequence
  Description of Artificial Sequence: Synthetic oligonucleotide
  Epidermal growth factor receptor (EGFR), ERBB1 phosphotyrosine kinase siRNA
agcagtgactttctcagcaacat

SEQ ID NO: 5618 - DNA, 23 bp, Artificial Sequence
  Description of Artificial Sequence: Synthetic oligonucleotide
  Epidermal growth factor receptor (EGFR), ERBB1 phosphotyrosine kinase siRNA
gcagtgactttctcagcaacatg

SEQ ID NO: 5619 - DNA, 23 bp, Artificial Sequence
  Description of Artificial Sequence: Synthetic oligonucleotide
  Epidermal growth factor receptor (EGFR), ERBB1 phosphotyrosine kinase siRNA
cagtgactttctcagcaacatgt

SEQ ID NO: 5620 - DNA, 23 bp, Artificial Sequence
  Description of Artificial Sequence: Synthetic oligonucleotide
  Epidermal growth factor receptor (EGFR), ERBB1 phosphotyrosine kinase siRNA
agtgactttctcagcaacatgtc

SEQ ID NO: 5621 - DNA, 23 bp, Artificial Sequence
  Description of Artificial Sequence: Synthetic oligonucleotide
  Epidermal growth factor receptor (EGFR), ERBB1 phosphotyrosine kinase siRNA
gtgactttctcagcaacatgtcg

SEQ ID NO: 5622 - DNA, 23 bp, Artificial Sequence
  Description of Artificial Sequence: Synthetic oligonucleotide
  Epidermal growth factor receptor (EGFR), ERBB1 phosphotyrosine kinase siRNA
tgactttctcagcaacatgtcga

SEQ ID NO: 5623 - DNA, 23 bp, Artificial Sequence
  Description of Artificial Sequence: Synthetic oligonucleotide
  Epidermal growth factor receptor (EGFR), ERBB1 phosphotyrosine kinase siRNA
gactttctcagcaacatgtcgat

SEQ ID NO: 5624 - DNA, 23 bp, Artificial Sequence
  Description of Artificial Sequence: Synthetic oligonucleotide
  Epidermal growth factor receptor (EGFR), ERBB1 phosphotyrosine kinase siRNA
actttctcagcaacatgtcgatg

SEQ ID NO: 5625 - DNA, 23 bp, Artificial Sequence
  Description of Artificial Sequence: Synthetic oligonucleotide
  Epidermal growth factor receptor (EGFR), ERBB1 phosphotyrosine kinase siRNA
ctttctcagcaacatgtcgatgg

SEQ ID NO: 5626 - DNA, 23 bp, Artificial Sequence
  Description of Artificial Sequence: Synthetic oligonucleotide
  Epidermal growth factor receptor (EGFR), ERBB1 phosphotyrosine kinase siRNA
tttctcagcaacatgtcgatgga

SEQ ID NO: 5627 - DNA, 23 bp, Artificial Sequence
  Description of Artificial Sequence: Synthetic oligonucleotide
  Epidermal growth factor receptor (EGFR), ERBB1 phosphotyrosine kinase siRNA
ttctcagcaacatgtcgatggac

SEQ ID NO: 5628 - DNA, 23 bp, Artificial Sequence
  Description of Artificial Sequence: Synthetic oligonucleotide
  Epidermal growth factor receptor (EGFR), ERBB1 phosphotyrosine kinase siRNA
tctcagcaacatgtcgatggact

SEQ ID NO: 5629 - DNA, 23 bp, Artificial Sequence
  Description of Artificial Sequence: Synthetic oligonucleotide
  Epidermal growth factor receptor (EGFR), ERBB1 phosphotyrosine kinase siRNA
ctcagcaacatgtcgatggactt

SEQ ID NO: 5630 - DNA, 23 bp, Artificial Sequence
  Description of Artificial Sequence: Synthetic oligonucleotide
  Epidermal growth factor receptor (EGFR), ERBB1 phosphotyrosine kinase siRNA
tcagcaacatgtcgatggacttc

SEQ ID NO: 5631 - DNA, 23 bp, Artificial Sequence
  Description of Artificial Sequence: Synthetic oligonucleotide
  Epidermal growth factor receptor (EGFR), ERBB1 phosphotyrosine kinase siRNA
cagcaacatgtcgatggacttcc

SEQ ID NO: 5632 - DNA, 23 bp, Artificial Sequence
  Description of Artificial Sequence: Synthetic oligonucleotide
  Epidermal growth factor receptor (EGFR), ERBB1 phosphotyrosine kinase siRNA
agcaacatgtcgatggacttcca

SEQ ID NO: 5633 - DNA, 23 bp, Artificial Sequence
  Description of Artificial Sequence: Synthetic oligonucleotide
  Epidermal growth factor receptor (EGFR), ERBB1 phosphotyrosine kinase siRNA
gcaacatgtcgatggacttccag

SEQ ID NO: 5634 - DNA, 23 bp, Artificial Sequence
  Description of Artificial Sequence: Synthetic oligonucleotide
  Epidermal growth factor receptor (EGFR), ERBB1 phosphotyrosine kinase siRNA
caacatgtcgatggacttccaga

SEQ ID NO: 5635 - DNA, 23 bp, Artificial Sequence
  Description of Artificial Sequence: Synthetic oligonucleotide
  Epidermal growth factor receptor (EGFR), ERBB1 phosphotyrosine kinase siRNA
aacatgtcgatggacttccagaa

SEQ ID NO: 5636 - DNA, 23 bp, Artificial Sequence
  Description of Artificial Sequence: Synthetic oligonucleotide
  Epidermal growth factor receptor (EGFR), ERBB1 phosphotyrosine kinase siRNA
acatgtcgatggacttccagaac

SEQ ID NO: 5637 - DNA, 23 bp, Artificial Sequence
  Description of Artificial Sequence: Synthetic oligonucleotide
  Epidermal growth factor receptor (EGFR), ERBB1 phosphotyrosine kinase siRNA
catgtcgatggacttccagaacc

SEQ ID NO: 5638 - DNA, 23 bp, Artificial Sequence
  Description of Artificial Sequence: Synthetic oligonucleotide
  Epidermal growth factor receptor (EGFR), ERBB1 phosphotyrosine kinase siRNA
atgtcgatggacttccagaacca

SEQ ID NO: 5639 - DNA, 23 bp, Artificial Sequence
  Description of Artificial Sequence: Synthetic oligonucleotide
  Epidermal growth factor receptor (EGFR), ERBB1 phosphotyrosine kinase siRNA
tgtcgatggacttccagaaccac

SEQ ID NO: 5640 - DNA, 23 bp, Artificial Sequence
  Description of Artificial Sequence: Synthetic oligonucleotide
  Epidermal growth factor receptor (EGFR), ERBB1 phosphotyrosine kinase siRNA
gtcgatggacttccagaaccacc

SEQ ID NO: 5641 - DNA, 23 bp, Artificial Sequence
  Description of Artificial Sequence: Synthetic oligonucleotide
  Epidermal growth factor receptor (EGFR), ERBB1 phosphotyrosine kinase siRNA
tcgatggacttccagaaccacct

SEQ ID NO: 5642 - DNA, 23 bp, Artificial Sequence
  Description of Artificial Sequence: Synthetic oligonucleotide
  Epidermal growth factor receptor (EGFR), ERBB1 phosphotyrosine kinase siRNA
cgatggacttccagaaccacctg

SEQ ID NO: 5643 - DNA, 23 bp, Artificial Sequence
  Description of Artificial Sequence: Synthetic oligonucleotide
  Epidermal growth factor receptor (EGFR), ERBB1 phosphotyrosine kinase siRNA
gatggacttccagaaccacctgg

SEQ ID NO: 5644 - DNA, 23 bp, Artificial Sequence
  Description of Artificial Sequence: Synthetic oligonucleotide
  Epidermal growth factor receptor (EGFR), ERBB1 phosphotyrosine kinase siRNA
atggacttccagaaccacctggg

SEQ ID NO: 5645 - DNA, 23 bp, Artificial Sequence
  Description of Artificial Sequence: Synthetic oligonucleotide
  Epidermal growth factor receptor (EGFR), ERBB1 phosphotyrosine kinase siRNA
tggacttccagaaccacctgggc

SEQ ID NO: 5646 - DNA, 23 bp, Artificial Sequence
  Description of Artificial Sequence: Synthetic oligonucleotide
  Epidermal growth factor receptor (EGFR), ERBB1 phosphotyrosine kinase siRNA
ggacttccagaaccacctgggca

SEQ ID NO: 5647 - DNA, 23 bp, Artificial Sequence
  Description of Artificial Sequence: Synthetic oligonucleotide
  Epidermal growth factor receptor (EGFR), ERBB1 phosphotyrosine kinase siRNA
gacttccagaaccacctgggcag

SEQ ID NO: 5648 - DNA, 23 bp, Artificial Sequence
  Description of Artificial Sequence: Synthetic oligonucleotide
  Epidermal growth factor receptor (EGFR), ERBB1 phosphotyrosine kinase siRNA
acttccagaaccacctgggcagc

SEQ ID NO: 5649 - DNA, 23 bp, Artificial Sequence
  Description of Artificial Sequence: Synthetic oligonucleotide
  Epidermal growth factor receptor (EGFR), ERBB1 phosphotyrosine kinase siRNA
cttccagaaccacctgggcagct

SEQ ID NO: 5650 - DNA, 23 bp, Artificial Sequence
  Description of Artificial Sequence: Synthetic oligonucleotide
  Epidermal growth factor receptor (EGFR), ERBB1 phosphotyrosine kinase siRNA
ttccagaaccacctgggcagctg

SEQ ID NO: 5651 - DNA, 23 bp, Artificial Sequence
  Description of Artificial Sequence: Synthetic oligonucleotide
  Epidermal growth factor receptor (EGFR), ERBB1 phosphotyrosine kinase siRNA
tccagaaccacctgggcagctgc

SEQ ID NO: 5652 - DNA, 23 bp, Artificial Sequence
  Description of Artificial Sequence: Synthetic oligonucleotide
  Epidermal growth factor receptor (EGFR), ERBB1 phosphotyrosine kinase siRNA
ccagaaccacctgggcagctgcc

SEQ ID NO: 5653 - DNA, 23 bp, Artificial Sequence
  Description of Artificial Sequence: Synthetic oligonucleotide
  Epidermal growth factor receptor (EGFR), ERBB1 phosphotyrosine kinase siRNA
cagaaccacctgggcagctgcca

SEQ ID NO: 5654 - DNA, 23 bp, Artificial Sequence
  Description of Artificial Sequence: Synthetic oligonucleotide
  Epidermal growth factor receptor (EGFR), ERBB1 phosphotyrosine kinase siRNA
agaaccacctgggcagctgccaa

SEQ ID NO: 5655 - DNA, 23 bp, Artificial Sequence
  Description of Artificial Sequence: Synthetic oligonucleotide
  Epidermal growth factor receptor (EGFR), ERBB1 phosphotyrosine kinase siRNA
gaaccacctgggcagctgccaaa

SEQ ID NO: 5656 - DNA, 23 bp, Artificial Sequence
  Description of Artificial Sequence: Synthetic oligonucleotide
  Epidermal growth factor receptor (EGFR), ERBB1 phosphotyrosine kinase siRNA
aaccacctgggcagctgccaaaa

SEQ ID NO: 5657 - DNA, 23 bp, Artificial Sequence
  Description of Artificial Sequence: Synthetic oligonucleotide
  Epidermal growth factor receptor (EGFR), ERBB1 phosphotyrosine kinase siRNA
accacctgggcagctgccaaaag

SEQ ID NO: 5658 - DNA, 23 bp, Artificial Sequence
  Description of Artificial Sequence: Synthetic oligonucleotide
  Epidermal growth factor receptor (EGFR), ERBB1 phosphotyrosine kinase siRNA
ccacctgggcagctgccaaaagt

SEQ ID NO: 5659 - DNA, 23 bp, Artificial Sequence
  Description of Artificial Sequence: Synthetic oligonucleotide
  Epidermal growth factor receptor (EGFR), ERBB1 phosphotyrosine kinase siRNA
cacctgggcagctgccaaaagtg

SEQ ID NO: 5660 - DNA, 23 bp, Artificial Sequence
  Description of Artificial Sequence: Synthetic oligonucleotide
  Epidermal growth factor receptor (EGFR), ERBB1 phosphotyrosine kinase siRNA
acctgggcagctgccaaaagtgt

SEQ ID NO: 5661 - DNA, 23 bp, Artificial Sequence
  Description of Artificial Sequence: Synthetic oligonucleotide
  Epidermal growth factor receptor (EGFR), ERBB1 phosphotyrosine kinase siRNA
cctgggcagctgccaaaagtgtg

SEQ ID NO: 5662 - DNA, 23 bp, Artificial Sequence
  Description of Artificial Sequence: Synthetic oligonucleotide
  Epidermal growth factor receptor (EGFR), ERBB1 phosphotyrosine kinase siRNA
ctgggcagctgccaaaagtgtga

SEQ ID NO: 5663 - DNA, 23 bp, Artificial Sequence
  Description of Artificial Sequence: Synthetic oligonucleotide
  Epidermal growth factor receptor (EGFR), ERBB1 phosphotyrosine kinase siRNA
tgggcagctgccaaaagtgtgat

SEQ ID NO: 5664 - DNA, 23 bp, Artificial Sequence
  Description of Artificial Sequence: Synthetic oligonucleotide
  Epidermal growth factor receptor (EGFR), ERBB1 phosphotyrosine kinase siRNA
gggcagctgccaaaagtgtgatc

SEQ ID NO: 5665 - DNA, 23 bp, Artificial Sequence
  Description of Artificial Sequence: Synthetic oligonucleotide
  Epidermal growth factor receptor (EGFR), ERBB1 phosphotyrosine kinase siRNA
ggcagctgccaaaagtgtgatcc

SEQ ID NO: 5666 - DNA, 23 bp, Artificial Sequence
  Description of Artificial Sequence: Synthetic oligonucleotide
  Epidermal growth factor receptor (EGFR), ERBB1 phosphotyrosine kinase siRNA
gcagctgccaaaagtgtgatcca

SEQ ID NO: 5667 - DNA, 23 bp, Artificial Sequence
  Description of Artificial Sequence: Synthetic oligonucleotide
  Epidermal growth factor receptor (EGFR), ERBB1 phosphotyrosine kinase siRNA
cagctgccaaaagtgtgatccaa

SEQ ID NO: 5668 - DNA, 23 bp, Artificial Sequence
  Description of Artificial Sequence: Synthetic oligonucleotide
  Epidermal growth factor receptor (EGFR), ERBB1 phosphotyrosine kinase siRNA
agctgccaaaagtgtgatccaag

SEQ ID NO: 5669 - DNA, 23 bp, Artificial Sequence
  Description of Artificial Sequence: Synthetic oligonucleotide
  Epidermal growth factor receptor (EGFR), ERBB1 phosphotyrosine kinase siRNA
gctgccaaaagtgtgatccaagc

SEQ ID NO: 5670 - DNA, 23 bp, Artificial Sequence
  Description of Artificial Sequence: Synthetic oligonucleotide
  Epidermal growth factor receptor (EGFR), ERBB1 phosphotyrosine kinase siRNA
ctgccaaaagtgtgatccaagct

SEQ ID NO: 5671 - DNA, 23 bp, Artificial Sequence
  Description of Artificial Sequence: Synthetic oligonucleotide
  Epidermal growth factor receptor (EGFR), ERBB1 phosphotyrosine kinase siRNA
tgccaaaagtgtgatccaagctg

SEQ ID NO: 5672 - DNA, 23 bp, Artificial Sequence
  Description of Artificial Sequence: Synthetic oligonucleotide
  Epidermal growth factor receptor (EGFR), ERBB1 phosphotyrosine kinase siRNA
gccaaaagtgtgatccaagctgt

SEQ ID NO: 5673 - DNA, 23 bp, Artificial Sequence
  Description of Artificial Sequence: Synthetic oligonucleotide
  Epidermal growth factor receptor (EGFR), ERBB1 phosphotyrosine kinase siRNA
ccaaaagtgtgatccaagctgtc

SEQ ID NO: 5674 - DNA, 23 bp, Artificial Sequence
  Description of Artificial Sequence: Synthetic oligonucleotide
  Epidermal growth factor receptor (EGFR), ERBB1 phosphotyrosine kinase siRNA
caaaagtgtgatccaagctgtcc

SEQ ID NO: 5675 - DNA, 23 bp, Artificial Sequence
  Description of Artificial Sequence: Synthetic oligonucleotide
  Epidermal growth factor receptor (EGFR), ERBB1 phosphotyrosine kinase siRNA
aaaagtgtgatccaagctgtccc

SEQ ID NO: 5676 - DNA, 23 bp, Artificial Sequence
  Description of Artificial Sequence: Synthetic oligonucleotide
  Epidermal growth factor receptor (EGFR), ERBB1 phosphotyrosine kinase siRNA
aaagtgtgatccaagctgtccca

SEQ ID NO: 5677 - DNA, 23 bp, Artificial Sequence
  Description of Artificial Sequence: Synthetic oligonucleotide
  Epidermal growth factor receptor (EGFR), ERBB1 phosphotyrosine kinase siRNA
aagtgtgatccaagctgtcccaa

SEQ ID NO: 5678 - DNA, 23 bp, Artificial Sequence
  Description of Artificial Sequence: Synthetic oligonucleotide
  Epidermal growth factor receptor (EGFR), ERBB1 phosphotyrosine kinase siRNA
agtgtgatccaagctgtcccaat

SEQ ID NO: 5679 - DNA, 23 bp, Artificial Sequence
  Description of Artificial Sequence: Synthetic oligonucleotide
  Epidermal growth factor receptor (EGFR), ERBB1 phosphotyrosine kinase siRNA
gtgtgatccaagctgtcccaatg

SEQ ID NO: 5680 - DNA, 23 bp, Artificial Sequence
  Description of Artificial Sequence: Synthetic oligonucleotide
  Epidermal growth factor receptor (EGFR), ERBB1 phosphotyrosine kinase siRNA
tgtgatccaagctgtcccaatgg

SEQ ID NO: 5681 - DNA, 23 bp, Artificial Sequence
  Description of Artificial Sequence: Synthetic oligonucleotide
  Epidermal growth factor receptor (EGFR), ERBB1 phosphotyrosine kinase siRNA
gtgatccaagctgtcccaatggg

SEQ ID NO: 5682 - DNA, 23 bp, Artificial Sequence
  Description of Artificial Sequence: Synthetic oligonucleotide
  Epidermal growth factor receptor (EGFR), ERBB1 phosphotyrosine kinase siRNA
tgatccaagctgtcccaatggga

SEQ ID NO: 5683 - DNA, 23 bp, Artificial Sequence
  Description of Artificial Sequence: Synthetic oligonucleotide
  Epidermal growth factor receptor (EGFR), ERBB1 phosphotyrosine kinase siRNA
gatccaagctgtcccaatgggag

SEQ ID NO: 5684 - DNA, 23 bp, Artificial Sequence
  Description of Artificial Sequence: Synthetic oligonucleotide
  Epidermal growth factor receptor (EGFR), ERBB1 phosphotyrosine kinase siRNA
atccaagctgtcccaatgggagc

SEQ ID NO: 5685 - DNA, 23 bp, Artificial Sequence
  Description of Artificial Sequence: Synthetic oligonucleotide
  Epidermal growth factor receptor (EGFR), ERBB1 phosphotyrosine kinase siRNA
tccaagctgtcccaatgggagct

SEQ ID NO: 5686 - DNA, 23 bp, Artificial Sequence
  Description of Artificial Sequence: Synthetic oligonucleotide
  Epidermal growth factor receptor (EGFR), ERBB1 phosphotyrosine kinase siRNA
ccaagctgtcccaatgggagctg

SEQ ID NO: 5687 - DNA, 23 bp, Artificial Sequence
  Description of Artificial Sequence: Synthetic oligonucleotide
  Epidermal growth factor receptor (EGFR), ERBB1 phosphotyrosine kinase siRNA
caagctgtcccaatgggagctgc

SEQ ID NO: 5688 - DNA, 23 bp, Artificial Sequence
  Description of Artificial Sequence: Synthetic oligonucleotide
  Epidermal growth factor receptor (EGFR), ERBB1 phosphotyrosine kinase siRNA
aagctgtcccaatgggagctgct

SEQ ID NO: 5689 - DNA, 23 bp, Artificial Sequence
  Description of Artificial Sequence: Synthetic oligonucleotide
  Epidermal growth factor receptor (EGFR), ERBB1 phosphotyrosine kinase siRNA
agctgtcccaatgggagctgctg

SEQ ID NO: 5690 - DNA, 23 bp, Artificial Sequence
  Description of Artificial Sequence: Synthetic oligonucleotide
  Epidermal growth factor receptor (EGFR), ERBB1 phosphotyrosine kinase siRNA
gctgtcccaatgggagctgctgg

SEQ ID NO: 5691 - DNA, 23 bp, Artificial Sequence
  Description of Artificial Sequence: Synthetic oligonucleotide
  Epidermal growth factor receptor (EGFR), ERBB1 phosphotyrosine kinase siRNA
ctgtcccaatgggagctgctggg

SEQ ID NO: 5692 - DNA, 23 bp, Artificial Sequence
  Description of Artificial Sequence: Synthetic oligonucleotide
  Epidermal growth factor receptor (EGFR), ERBB1 phosphotyrosine kinase siRNA
tgtcccaatgggagctgctgggg

SEQ ID NO: 5693 - DNA, 23 bp, Artificial Sequence
  Description of Artificial Sequence: Synthetic oligonucleotide
  Epidermal growth factor receptor (EGFR), ERBB1 phosphotyrosine kinase siRNA
gtcccaatgggagctgctggggt

SEQ ID NO: 5694 - DNA, 23 bp, Artificial Sequence
  Description of Artificial Sequence: Synthetic oligonucleotide
  Epidermal growth factor receptor (EGFR), ERBB1 phosphotyrosine kinase siRNA
tcccaatgggagctgctggggtg

SEQ ID NO: 5695 - DNA, 23 bp, Artificial Sequence
  Description of Artificial Sequence: Synthetic oligonucleotide
  Epidermal growth factor receptor (EGFR), ERBB1 phosphotyrosine kinase siRNA
cccaatgggagctgctggggtgc

SEQ ID NO: 5696 - DNA, 23 bp, Artificial Sequence
  Description of Artificial Sequence: Synthetic oligonucleotide
  Epidermal growth factor receptor (EGFR), ERBB1 phosphotyrosine kinase siRNA
ccaatgggagctgctggggtgca

SEQ ID NO: 5697 - DNA, 23 bp, Artificial Sequence
  Description of Artificial Sequence: Synthetic oligonucleotide
  Epidermal growth factor receptor (EGFR), ERBB1 phosphotyrosine kinase siRNA
caatgggagctgctggggtgcag

SEQ ID NO: 5698 - DNA, 23 bp, Artificial Sequence
  Description of Artificial Sequence: Synthetic oligonucleotide
  Epidermal growth factor receptor (EGFR), ERBB1 phosphotyrosine kinase siRNA
aatgggagctgctggggtgcagg

SEQ ID NO: 5699 - DNA, 23 bp, Artificial Sequence
  Description of Artificial Sequence: Synthetic oligonucleotide
  Epidermal growth factor receptor (EGFR), ERBB1 phosphotyrosine kinase siRNA
atgggagctgctggggtgcagga

SEQ ID NO: 5700 - DNA, 23 bp, Artificial Sequence
  Description of Artificial Sequence: Synthetic oligonucleotide
  Epidermal growth factor receptor (EGFR), ERBB1 phosphotyrosine kinase siRNA
tgggagctgctggggtgcaggag

SEQ ID NO: 5701 - DNA, 23 bp, Artificial Sequence
  Description of Artificial Sequence: Synthetic oligonucleotide
  Epidermal growth factor receptor (EGFR), ERBB1 phosphotyrosine kinase siRNA
gggagctgctggggtgcaggaga

SEQ ID NO: 5702 - DNA, 23 bp, Artificial Sequence
  Description of Artificial Sequence: Synthetic oligonucleotide
  Epidermal growth factor receptor (EGFR), ERBB1 phosphotyrosine kinase siRNA
ggagctgctggggtgcaggagag

SEQ ID NO: 5703 - DNA, 23 bp, Artificial Sequence
  Description of Artificial Sequence: Synthetic oligonucleotide
  Epidermal growth factor receptor (EGFR), ERBB1 phosphotyrosine kinase siRNA
gagctgctggggtgcaggagagg

SEQ ID NO: 5704 - DNA, 23 bp, Artificial Sequence
  Description of Artificial Sequence: Synthetic oligonucleotide
  Epidermal growth factor receptor (EGFR), ERBB1 phosphotyrosine kinase siRNA
agctgctggggtgcaggagagga

SEQ ID NO: 5705 - DNA, 23 bp, Artificial Sequence
  Description of Artificial Sequence: Synthetic oligonucleotide
  Epidermal growth factor receptor (EGFR), ERBB1 phosphotyrosine kinase siRNA
gctgctggggtgcaggagaggag

SEQ ID NO: 5706 - DNA, 23 bp, Artificial Sequence
  Description of Artificial Sequence: Synthetic oligonucleotide
  Epidermal growth factor receptor (EGFR), ERBB1 phosphotyrosine kinase siRNA
ctgctggggtgcaggagaggaga

SEQ ID NO: 5707 - DNA, 23 bp, Artificial Sequence
  Description of Artificial Sequence: Synthetic oligonucleotide
  Epidermal growth factor receptor (EGFR), ERBB1 phosphotyrosine kinase siRNA
tgctggggtgcaggagaggagaa

SEQ ID NO: 5708 - DNA, 23 bp, Artificial Sequence
  Description of Artificial Sequence: Synthetic oligonucleotide
  Epidermal growth factor receptor (EGFR), ERBB1 phosphotyrosine kinase siRNA
gctggggtgcaggagaggagaac

SEQ ID NO: 5709 - DNA, 23 bp, Artificial Sequence
  Description of Artificial Sequence: Synthetic oligonucleotide
  Epidermal growth factor receptor (EGFR), ERBB1 phosphotyrosine kinase siRNA
ctggggtgcaggagaggagaact

SEQ ID NO: 5710 - DNA, 23 bp, Artificial Sequence
  Description of Artificial Sequence: Synthetic oligonucleotide
  Epidermal growth factor receptor (EGFR), ERBB1 phosphotyrosine kinase siRNA
tggggtgcaggagaggagaactg

SEQ ID NO: 5711 - DNA, 23 bp, Artificial Sequence
  Description of Artificial Sequence: Synthetic oligonucleotide
  Epidermal growth factor receptor (EGFR), ERBB1 phosphotyrosine kinase siRNA
ggggtgcaggagaggagaactgc

SEQ ID NO: 5712 - DNA, 23 bp, Artificial Sequence
  Description of Artificial Sequence: Synthetic oligonucleotide
  Epidermal growth factor receptor (EGFR), ERBB1 phosphotyrosine kinase siRNA
gggtgcaggagaggagaactgcc

SEQ ID NO: 5713 - DNA, 23 bp, Artificial Sequence
  Description of Artificial Sequence: Synthetic oligonucleotide
  Epidermal growth factor receptor (EGFR), ERBB1 phosphotyrosine kinase siRNA
ggtgcaggagaggagaactgcca

SEQ ID NO: 5714 - DNA, 23 bp, Artificial Sequence
  Description of Artificial Sequence: Synthetic oligonucleotide
  Epidermal growth factor receptor (EGFR), ERBB1 phosphotyrosine kinase siRNA
gtgcaggagaggagaactgccag

SEQ ID NO: 5715 - DNA, 23 bp, Artificial Sequence
  Description of Artificial Sequence: Synthetic oligonucleotide
  Epidermal growth factor receptor (EGFR), ERBB1 phosphotyrosine kinase siRNA
tgcaggagaggagaactgccaga

SEQ ID NO: 5716 - DNA, 23 bp, Artificial Sequence
  Description of Artificial Sequence: Synthetic oligonucleotide
  Epidermal growth factor receptor (EGFR), ERBB1 phosphotyrosine kinase siRNA
gcaggagaggagaactgccagaa

SEQ ID NO: 5717 - DNA, 23 bp, Artificial Sequence
  Description of Artificial Sequence: Synthetic oligonucleotide
  Epidermal growth factor receptor (EGFR), ERBB1 phosphotyrosine kinase siRNA
caggagaggagaactgccagaaa

SEQ ID NO: 5718 - DNA, 23 bp, Artificial Sequence
  Description of Artificial Sequence: Synthetic oligonucleotide
  Epidermal growth factor receptor (EGFR), ERBB1 phosphotyrosine kinase siRNA
aggagaggagaactgccagaaac

SEQ ID NO: 5719 - DNA, 23 bp, Artificial Sequence
  Description of Artificial Sequence: Synthetic oligonucleotide
  Epidermal growth factor receptor (EGFR), ERBB1 phosphotyrosine kinase siRNA
ggagaggagaactgccagaaact

SEQ ID NO: 5720 - DNA, 23 bp, Artificial Sequence
  Description of Artificial Sequence: Synthetic oligonucleotide
  Epidermal growth factor receptor (EGFR), ERBB1 phosphotyrosine kinase siRNA
gagaggagaactgccagaaactg

SEQ ID NO: 5721 - DNA, 23 bp, Artificial Sequence
  Description of Artificial Sequence: Synthetic oligonucleotide
  Epidermal growth factor receptor (EGFR), ERBB1 phosphotyrosine kinase siRNA
agaggagaactgccagaaactga

SEQ ID NO: 5722 - DNA, 23 bp, Artificial Sequence
  Description of Artificial Sequence: Synthetic oligonucleotide
  Epidermal growth factor receptor (EGFR), ERBB1 phosphotyrosine kinase siRNA
gaggagaactgccagaaactgac

SEQ ID NO: 5723 - DNA, 23 bp, Artificial Sequence
  Description of Artificial Sequence: Synthetic oligonucleotide
  Epidermal growth factor receptor (EGFR), ERBB1 phosphotyrosine kinase siRNA
aggagaactgccagaaactgacc

SEQ ID NO: 5724 - DNA, 23 bp, Artificial Sequence
  Description of Artificial Sequence: Synthetic oligonucleotide
  Epidermal growth factor receptor (EGFR), ERBB1 phosphotyrosine kinase siRNA
ggagaactgccagaaactgacca

SEQ ID NO: 5725 - DNA, 23 bp, Artificial Sequence
  Description of Artificial Sequence: Synthetic oligonucleotide
  Epidermal growth factor receptor (EGFR), ERBB1 phosphotyrosine kinase siRNA
gagaactgccagaaactgaccaa

SEQ ID NO: 5726 - DNA, 23 bp, Artificial Sequence
  Description of Artificial Sequence: Synthetic oligonucleotide
  Epidermal growth factor receptor (EGFR), ERBB1 phosphotyrosine kinase siRNA
agaactgccagaaactgaccaaa

SEQ ID NO: 5727 - DNA, 23 bp, Artificial Sequence
  Description of Artificial Sequence: Synthetic oligonucleotide
  Epidermal growth factor receptor (EGFR), ERBB1 phosphotyrosine kinase siRNA
gaactgccagaaactgaccaaaa

SEQ ID NO: 5728 - DNA, 23 bp, Artificial Sequence
  Description of Artificial Sequence: Synthetic oligonucleotide
  Epidermal growth factor receptor (EGFR), ERBB1 phosphotyrosine kinase siRNA
aactgccagaaactgaccaaaat

SEQ ID NO: 5729 - DNA, 23 bp, Artificial Sequence
  Description of Artificial Sequence: Synthetic oligonucleotide
  Epidermal growth factor receptor (EGFR), ERBB1 phosphotyrosine kinase siRNA
actgccagaaactgaccaaaatc

SEQ ID NO: 5730 - DNA, 23 bp, Artificial Sequence
  Description of Artificial Sequence: Synthetic oligonucleotide
  Epidermal growth factor receptor (EGFR), ERBB1 phosphotyrosine kinase siRNA
ctgccagaaactgaccaaaatca

SEQ ID NO: 5731 - DNA, 23 bp, Artificial Sequence
  Description of Artificial Sequence: Synthetic oligonucleotide
  Epidermal growth factor receptor (EGFR), ERBB1 phosphotyrosine kinase siRNA
tgccagaaactgaccaaaatcat

SEQ ID NO: 5732 - DNA, 23 bp, Artificial Sequence
  Description of Artificial Sequence: Synthetic oligonucleotide
  Epidermal growth factor receptor (EGFR), ERBB1 phosphotyrosine kinase siRNA
gccagaaactgaccaaaatcatc

SEQ ID NO: 5733 - DNA, 23 bp, Artificial Sequence
  Description of Artificial Sequence: Synthetic oligonucleotide
  Epidermal growth factor receptor (EGFR), ERBB1 phosphotyrosine kinase siRNA
ccagaaactgaccaaaatcatct

SEQ ID NO: 5734 - DNA, 23 bp, Artificial Sequence
  Description of Artificial Sequence: Synthetic oligonucleotide
  Epidermal growth factor receptor (EGFR), ERBB1 phosphotyrosine kinase siRNA
cagaaactgaccaaaatcatctg

SEQ ID NO: 5735 - DNA, 23 bp, Artificial Sequence
  Description of Artificial Sequence: Synthetic oligonucleotide
  Epidermal growth factor receptor (EGFR), ERBB1 phosphotyrosine kinase siRNA
agaaactgaccaaaatcatctgt

SEQ ID NO: 5736 - DNA, 23 bp, Artificial Sequence
  Description of Artificial Sequence: Synthetic oligonucleotide
  Epidermal growth factor receptor (EGFR), ERBB1 phosphotyrosine kinase siRNA
gaaactgaccaaaatcatctgtg

SEQ ID NO: 5737 - DNA, 23 bp, Artificial Sequence
  Description of Artificial Sequence: Synthetic oligonucleotide
  Epidermal growth factor receptor (EGFR), ERBB1 phosphotyrosine kinase siRNA
aaactgaccaaaatcatctgtgc

SEQ ID NO: 5738 - DNA, 23 bp, Artificial Sequence
  Description of Artificial Sequence: Synthetic oligonucleotide
  Epidermal growth factor receptor (EGFR), ERBB1 phosphotyrosine kinase siRNA
aactgaccaaaatcatctgtgcc

SEQ ID NO: 5739 - DNA, 23 bp, Artificial Sequence
  Description of Artificial Sequence: Synthetic oligonucleotide
  Epidermal growth factor receptor (EGFR), ERBB1 phosphotyrosine kinase siRNA
actgaccaaaatcatctgtgccc

SEQ ID NO: 5740 - DNA, 23 bp, Artificial Sequence
  Description of Artificial Sequence: Synthetic oligonucleotide
  Epidermal growth factor receptor (EGFR), ERBB1 phosphotyrosine kinase siRNA
ctgaccaaaatcatctgtgccca

SEQ ID NO: 5741 - DNA, 23 bp, Artificial Sequence
  Description of Artificial Sequence: Synthetic oligonucleotide
  Epidermal growth factor receptor (EGFR), ERBB1 phosphotyrosine kinase siRNA
tgaccaaaatcatctgtgcccag

SEQ ID NO: 5742 - DNA, 23 bp, Artificial Sequence
  Description of Artificial Sequence: Synthetic oligonucleotide
  Epidermal growth factor receptor (EGFR), ERBB1 phosphotyrosine kinase siRNA
gaccaaaatcatctgtgcccagc

SEQ ID NO: 5743 - DNA, 23 bp, Artificial Sequence
  Description of Artificial Sequence: Synthetic oligonucleotide
  Epidermal growth factor receptor (EGFR), ERBB1 phosphotyrosine kinase siRNA
accaaaatcatctgtgcccagca

SEQ ID NO: 5744 - DNA, 23 bp, Artificial Sequence
  Description of Artificial Sequence: Synthetic oligonucleotide
  Epidermal growth factor receptor (EGFR), ERBB1 phosphotyrosine kinase siRNA
ccaaaatcatctgtgcccagcag

SEQ ID NO: 5745 - DNA, 23 bp, Artificial Sequence
  Description of Artificial Sequence: Synthetic oligonucleotide
  Epidermal growth factor receptor (EGFR), ERBB1 phosphotyrosine kinase siRNA
caaaatcatctgtgcccagcagt

SEQ ID NO: 5746 - DNA, 23 bp, Artificial Sequence
  Description of Artificial Sequence: Synthetic oligonucleotide
  Epidermal growth factor receptor (EGFR), ERBB1 phosphotyrosine kinase siRNA
aaaatcatctgtgcccagcagtg

SEQ ID NO: 5747 - DNA, 23 bp, Artificial Sequence
  Description of Artificial Sequence: Synthetic oligonucleotide
  Epidermal growth factor receptor (EGFR), ERBB1 phosphotyrosine kinase siRNA
aaatcatctgtgcccagcagtgc

SEQ ID NO: 5748 - DNA, 23 bp, Artificial Sequence
  Description of Artificial Sequence: Synthetic oligonucleotide
  Epidermal growth factor receptor (EGFR), ERBB1 phosphotyrosine kinase siRNA
aatcatctgtgcccagcagtgct

SEQ ID NO: 5749 - DNA, 23 bp, Artificial Sequence
  Description of Artificial Sequence: Synthetic oligonucleotide
  Epidermal growth factor receptor (EGFR), ERBB1 phosphotyrosine kinase siRNA
atcatctgtgcccagcagtgctc

SEQ ID NO: 5750 - DNA, 23 bp, Artificial Sequence
  Description of Artificial Sequence: Synthetic oligonucleotide
  Epidermal growth factor receptor (EGFR), ERBB1 phosphotyrosine kinase siRNA
tcatctgtgcccagcagtgctcc

SEQ ID NO: 5751 - DNA, 23 bp, Artificial Sequence
  Description of Artificial Sequence: Synthetic oligonucleotide
  Epidermal growth factor receptor (EGFR), ERBB1 phosphotyrosine kinase siRNA
catctgtgcccagcagtgctccg

SEQ ID NO: 5752 - DNA, 23 bp, Artificial Sequence
  Description of Artificial Sequence: Synthetic oligonucleotide
  Epidermal growth factor receptor (EGFR), ERBB1 phosphotyrosine kinase siRNA
atctgtgcccagcagtgctccgg

SEQ ID NO: 5753 - DNA, 23 bp, Artificial Sequence
  Description of Artificial Sequence: Synthetic oligonucleotide
  Epidermal growth factor receptor (EGFR), ERBB1 phosphotyrosine kinase siRNA
tctgtgcccagcagtgctccggg

SEQ ID NO: 5754 - DNA, 23 bp, Artificial Sequence
  Description of Artificial Sequence: Synthetic oligonucleotide
  Epidermal growth factor receptor (EGFR), ERBB1 phosphotyrosine kinase siRNA
ctgtgcccagcagtgctccgggc

SEQ ID NO: 5755 - DNA, 23 bp, Artificial Sequence
  Description of Artificial Sequence: Synthetic oligonucleotide
  Epidermal growth factor receptor (EGFR), ERBB1 phosphotyrosine kinase siRNA
tgtgcccagcagtgctccgggcg

SEQ ID NO: 5756 - DNA, 23 bp, Artificial Sequence
  Description of Artificial Sequence: Synthetic oligonucleotide
  Epidermal growth factor receptor (EGFR), ERBB1 phosphotyrosine kinase siRNA
gtgcccagcagtgctccgggcgc

SEQ ID NO: 5757 - DNA, 23 bp, Artificial Sequence
  Description of Artificial Sequence: Synthetic oligonucleotide
  Epidermal growth factor receptor (EGFR), ERBB1 phosphotyrosine kinase siRNA
tgcccagcagtgctccgggcgct

SEQ ID NO: 5758 - DNA, 23 bp, Artificial Sequence
  Description of Artificial Sequence: Synthetic oligonucleotide
  Epidermal growth factor receptor (EGFR), ERBB1 phosphotyrosine kinase siRNA
gcccagcagtgctccgggcgctg

SEQ ID NO: 5759 - DNA, 23 bp, Artificial Sequence
  Description of Artificial Sequence: Synthetic oligonucleotide
  Epidermal growth factor receptor (EGFR), ERBB1 phosphotyrosine kinase siRNA
cccagcagtgctccgggcgctgc

SEQ ID NO: 5760 - DNA, 23 bp, Artificial Sequence
  Description of Artificial Sequence: Synthetic oligonucleotide
  Epidermal growth factor receptor (EGFR), ERBB1 phosphotyrosine kinase siRNA
ccagcagtgctccgggcgctgcc

SEQ ID NO: 5761 - DNA, 23 bp, Artificial Sequence
  Description of Artificial Sequence: Synthetic oligonucleotide
  Epidermal growth factor receptor (EGFR), ERBB1 phosphotyrosine kinase siRNA
cagcagtgctccgggcgctgccg

SEQ ID NO: 5762 - DNA, 23 bp, Artificial Sequence
  Description of Artificial Sequence: Synthetic oligonucleotide
  Epidermal growth factor receptor (EGFR), ERBB1 phosphotyrosine kinase siRNA
agcagtgctccgggcgctgccgt

SEQ ID NO: 5763 - DNA, 23 bp, Artificial Sequence
  Description of Artificial Sequence: Synthetic oligonucleotide
  Epidermal growth factor receptor (EGFR), ERBB1 phosphotyrosine kinase siRNA
gcagtgctccgggcgctgccgtg

SEQ ID NO: 5764 - DNA, 23 bp, Artificial Sequence
  Description of Artificial Sequence: Synthetic oligonucleotide
  Epidermal growth factor receptor (EGFR), ERBB1 phosphotyrosine kinase siRNA
cagtgctccgggcgctgccgtgg

SEQ ID NO: 5765 - DNA, 23 bp, Artificial Sequence
  Description of Artificial Sequence: Synthetic oligonucleotide
  Epidermal growth factor receptor (EGFR), ERBB1 phosphotyrosine kinase siRNA
agtgctccgggcgctgccgtggc

SEQ ID NO: 5766 - DNA, 23 bp, Artificial Sequence
  Description of Artificial Sequence: Synthetic oligonucleotide
  Epidermal growth factor receptor (EGFR), ERBB1 phosphotyrosine kinase siRNA
gtgctccgggcgctgccgtggca

SEQ ID NO: 5767 - DNA, 23 bp, Artificial Sequence
  Description of Artificial Sequence: Synthetic oligonucleotide
  Epidermal growth factor receptor (EGFR), ERBB1 phosphotyrosine kinase siRNA
tgctccgggcgctgccgtggcaa

SEQ ID NO: 5768 - DNA, 23 bp, Artificial Sequence
  Description of Artificial Sequence: Synthetic oligonucleotide
  Epidermal growth factor receptor (EGFR), ERBB1 phosphotyrosine kinase siRNA
gctccgggcgctgccgtggcaag

SEQ ID NO: 5769 - DNA, 23 bp, Artificial Sequence
  Description of Artificial Sequence: Synthetic oligonucleotide
  Epidermal growth factor receptor (EGFR), ERBB1 phosphotyrosine kinase siRNA
ctccgggcgctgccgtggcaagt

SEQ ID NO: 5770 - DNA, 23 bp, Artificial Sequence
  Description of Artificial Sequence: Synthetic oligonucleotide
  Epidermal growth factor receptor (EGFR), ERBB1 phosphotyrosine kinase siRNA
tccgggcgctgccgtggcaagtc

SEQ ID NO: 5771 - DNA, 23 bp, Artificial Sequence
  Description of Artificial Sequence: Synthetic oligonucleotide
  Epidermal growth factor receptor (EGFR), ERBB1 phosphotyrosine kinase siRNA
ccgggcgctgccgtggcaagtcc

SEQ ID NO: 5772 - DNA, 23 bp, Artificial Sequence
  Description of Artificial Sequence: Synthetic oligonucleotide
  Epidermal growth factor receptor (EGFR), ERBB1 phosphotyrosine kinase siRNA
cgggcgctgccgtggcaagtccc

SEQ ID NO: 5773 - DNA, 23 bp, Artificial Sequence
  Description of Artificial Sequence: Synthetic oligonucleotide
  Epidermal growth factor receptor (EGFR), ERBB1 phosphotyrosine kinase siRNA
gggcgctgccgtggcaagtcccc

SEQ ID NO: 5774 - DNA, 23 bp, Artificial Sequence
  Description of Artificial Sequence: Synthetic oligonucleotide
  Epidermal growth factor receptor (EGFR), ERBB1 phosphotyrosine kinase siRNA
ggcgctgccgtggcaagtccccc

SEQ ID NO: 5775 - DNA, 23 bp, Artificial Sequence
  Description of Artificial Sequence: Synthetic oligonucleotide
  Epidermal growth factor receptor (EGFR), ERBB1 phosphotyrosine kinase siRNA
gcgctgccgtggcaagtccccca

SEQ ID NO: 5776 - DNA, 23 bp, Artificial Sequence
  Description of Artificial Sequence: Synthetic oligonucleotide
  Epidermal growth factor receptor (EGFR), ERBB1 phosphotyrosine kinase siRNA
cgctgccgtggcaagtcccccag

SEQ ID NO: 5777 - DNA, 23 bp, Artificial Sequence
  Description of Artificial Sequence: Synthetic oligonucleotide
  Epidermal growth factor receptor (EGFR), ERBB1 phosphotyrosine kinase siRNA
gctgccgtggcaagtcccccagt

SEQ ID NO: 5778 - DNA, 23 bp, Artificial Sequence
  Description of Artificial Sequence: Synthetic oligonucleotide
  Epidermal growth factor receptor (EGFR), ERBB1 phosphotyrosine kinase siRNA
ctgccgtggcaagtcccccagtg

SEQ ID NO: 5779 - DNA, 23 bp, Artificial Sequence
  Description of Artificial Sequence: Synthetic oligonucleotide
  Epidermal growth factor receptor (EGFR), ERBB1 phosphotyrosine kinase siRNA
tgccgtggcaagtcccccagtga

SEQ ID NO: 5780 - DNA, 23 bp, Artificial Sequence
  Description of Artificial Sequence: Synthetic oligonucleotide
  Epidermal growth factor receptor (EGFR), ERBB1 phosphotyrosine kinase siRNA
gccgtggcaagtcccccagtgac

SEQ ID NO: 5781 - DNA, 23 bp, Artificial Sequence
  Description of Artificial Sequence: Synthetic oligonucleotide
  Epidermal growth factor receptor (EGFR), ERBB1 phosphotyrosine kinase siRNA
ccgtggcaagtcccccagtgact

SEQ ID NO: 5782 - DNA, 23 bp, Artificial Sequence
  Description of Artificial Sequence: Synthetic oligonucleotide
  Epidermal growth factor receptor (EGFR), ERBB1 phosphotyrosine kinase siRNA
cgtggcaagtcccccagtgactg

SEQ ID NO: 5783 - DNA, 23 bp, Artificial Sequence
  Description of Artificial Sequence: Synthetic oligonucleotide
  Epidermal growth factor receptor (EGFR), ERBB1 phosphotyrosine kinase siRNA
gtggcaagtcccccagtgactgc

SEQ ID NO: 5784 - DNA, 23 bp, Artificial Sequence
  Description of Artificial Sequence: Synthetic oligonucleotide
  Epidermal growth factor receptor (EGFR), ERBB1 phosphotyrosine kinase siRNA
tggcaagtcccccagtgactgct

SEQ ID NO: 5785 - DNA, 23 bp, Artificial Sequence
  Description of Artificial Sequence: Synthetic oligonucleotide
  Epidermal growth factor receptor (EGFR), ERBB1 phosphotyrosine kinase siRNA
ggcaagtcccccagtgactgctg

SEQ ID NO: 5786 - DNA, 23 bp, Artificial Sequence
  Description of Artificial Sequence: Synthetic oligonucleotide
  Epidermal growth factor receptor (EGFR), ERBB1 phosphotyrosine kinase siRNA
gcaagtcccccagtgactgctgc

SEQ ID NO: 5787 - DNA, 23 bp, Artificial Sequence
  Description of Artificial Sequence: Synthetic oligonucleotide
  Epidermal growth factor receptor (EGFR), ERBB1 phosphotyrosine kinase siRNA
caagtcccccagtgactgctgcc

SEQ ID NO: 5788 - DNA, 23 bp, Artificial Sequence
  Description of Artificial Sequence: Synthetic oligonucleotide
  Epidermal growth factor receptor (EGFR), ERBB1 phosphotyrosine kinase siRNA
aagtcccccagtgactgctgcca

SEQ ID NO: 5789 - DNA, 23 bp, Artificial Sequence
  Description of Artificial Sequence: Synthetic oligonucleotide
  Epidermal growth factor receptor (EGFR), ERBB1 phosphotyrosine kinase siRNA
agtcccccagtgactgctgccac

SEQ ID NO: 5790 - DNA, 23 bp, Artificial Sequence
  Description of Artificial Sequence: Synthetic oligonucleotide
  Epidermal growth factor receptor (EGFR), ERBB1 phosphotyrosine kinase siRNA
gtcccccagtgactgctgccaca

SEQ ID NO: 5791 - DNA, 23 bp, Artificial Sequence
  Description of Artificial Sequence: Synthetic oligonucleotide
  Epidermal growth factor receptor (EGFR), ERBB1 phosphotyrosine kinase siRNA
tcccccagtgactgctgccacaa

SEQ ID NO: 5792 - DNA, 23 bp, Artificial Sequence
  Description of Artificial Sequence: Synthetic oligonucleotide
  Epidermal growth factor receptor (EGFR), ERBB1 phosphotyrosine kinase siRNA
cccccagtgactgctgccacaac

SEQ ID NO: 5793 - DNA, 23 bp, Artificial Sequence
  Description of Artificial Sequence: Synthetic oligonucleotide
  Epidermal growth factor receptor (EGFR), ERBB1 phosphotyrosine kinase siRNA
ccccagtgactgctgccacaacc

SEQ ID NO: 5794 - DNA, 23 bp, Artificial Sequence
  Description of Artificial Sequence: Synthetic oligonucleotide
  Epidermal growth factor receptor (EGFR), ERBB1 phosphotyrosine kinase siRNA
cccagtgactgctgccacaacca

SEQ ID NO: 5795 - DNA, 23 bp, Artificial Sequence
  Description of Artificial Sequence: Synthetic oligonucleotide
  Epidermal growth factor receptor (EGFR), ERBB1 phosphotyrosine kinase siRNA
ccagtgactgctgccacaaccag

SEQ ID NO: 5796 - DNA, 23 bp, Artificial Sequence
  Description of Artificial Sequence: Synthetic oligonucleotide
  Epidermal growth factor receptor (EGFR), ERBB1 phosphotyrosine kinase siRNA
cagtgactgctgccacaaccagt

SEQ ID NO: 5797 - DNA, 23 bp, Artificial Sequence
  Description of Artificial Sequence: Synthetic oligonucleotide
  Epidermal growth factor receptor (EGFR), ERBB1 phosphotyrosine kinase siRNA
agtgactgctgccacaaccagtg

SEQ ID NO: 5798 - DNA, 23 bp, Artificial Sequence
  Description of Artificial Sequence: Synthetic oligonucleotide
  Epidermal growth factor receptor (EGFR), ERBB1 phosphotyrosine kinase siRNA
gtgactgctgccacaaccagtgt

SEQ ID NO: 5799 - DNA, 23 bp, Artificial Sequence
  Description of Artificial Sequence: Synthetic oligonucleotide
  Epidermal growth factor receptor (EGFR), ERBB1 phosphotyrosine kinase siRNA
tgactgctgccacaaccagtgtg

SEQ ID NO: 5800 - DNA, 23 bp, Artificial Sequence
  Description of Artificial Sequence: Synthetic oligonucleotide
  Epidermal growth factor receptor (EGFR), ERBB1 phosphotyrosine kinase siRNA
gactgctgccacaaccagtgtgc

SEQ ID NO: 5801 - DNA, 23 bp, Artificial Sequence
  Description of Artificial Sequence: Synthetic oligonucleotide
  Epidermal growth factor receptor (EGFR), ERBB1 phosphotyrosine kinase siRNA
actgctgccacaaccagtgtgct

SEQ ID NO: 5802 - DNA, 23 bp, Artificial Sequence
  Description of Artificial Sequence: Synthetic oligonucleotide
  Epidermal growth factor receptor (EGFR), ERBB1 phosphotyrosine kinase siRNA
ctgctgccacaaccagtgtgctg

SEQ ID NO: 5803 - DNA, 23 bp, Artificial Sequence
  Description of Artificial Sequence: Synthetic oligonucleotide
  Epidermal growth factor receptor (EGFR), ERBB1 phosphotyrosine kinase siRNA
tgctgccacaaccagtgtgctgc

SEQ ID NO: 5804 - DNA, 23 bp, Artificial Sequence
  Description of Artificial Sequence: Synthetic oligonucleotide
  Epidermal growth factor receptor (EGFR), ERBB1 phosphotyrosine kinase siRNA
gctgccacaaccagtgtgctgca

SEQ ID NO: 5805 - DNA, 23 bp, Artificial Sequence
  Description of Artificial Sequence: Synthetic oligonucleotide
  Epidermal growth factor receptor (EGFR), ERBB1 phosphotyrosine kinase siRNA
ctgccacaaccagtgtgctgcag

SEQ ID NO: 5806 - DNA, 23 bp, Artificial Sequence
  Description of Artificial Sequence: Synthetic oligonucleotide
  Epidermal growth factor receptor (EGFR), ERBB1 phosphotyrosine kinase siRNA
tgccacaaccagtgtgctgcagg

SEQ ID NO: 5807 - DNA, 23 bp, Artificial Sequence
  Description of Artificial Sequence: Synthetic oligonucleotide
  Epidermal growth factor receptor (EGFR), ERBB1 phosphotyrosine kinase siRNA
gccacaaccagtgtgctgcaggc

SEQ ID NO: 5808 - DNA, 23 bp, Artificial Sequence
  Description of Artificial Sequence: Synthetic oligonucleotide
  Epidermal growth factor receptor (EGFR), ERBB1 phosphotyrosine kinase siRNA
ccacaaccagtgtgctgcaggct

SEQ ID NO: 5809 - DNA, 23 bp, Artificial Sequence
  Description of Artificial Sequence: Synthetic oligonucleotide
  Epidermal growth factor receptor (EGFR), ERBB1 phosphotyrosine kinase siRNA
cacaaccagtgtgctgcaggctg

SEQ ID NO: 5810 - DNA, 23 bp, Artificial Sequence
  Description of Artificial Sequence: Synthetic oligonucleotide
  Epidermal growth factor receptor (EGFR), ERBB1 phosphotyrosine kinase siRNA
acaaccagtgtgctgcaggctgc

SEQ ID NO: 5811 - DNA, 23 bp, Artificial Sequence
  Description of Artificial Sequence: Synthetic oligonucleotide
  Epidermal growth factor receptor (EGFR), ERBB1 phosphotyrosine kinase siRNA
caaccagtgtgctgcaggctgca

SEQ ID NO: 5812 - DNA, 23 bp, Artificial Sequence
  Description of Artificial Sequence: Synthetic oligonucleotide
  Epidermal growth factor receptor (EGFR), ERBB1 phosphotyrosine kinase siRNA
aaccagtgtgctgcaggctgcac

SEQ ID NO: 5813 - DNA, 23 bp, Artificial Sequence
  Description of Artificial Sequence: Synthetic oligonucleotide
  Epidermal growth factor receptor (EGFR), ERBB1 phosphotyrosine kinase siRNA
accagtgtgctgcaggctgcaca

SEQ ID NO: 5814 - DNA, 23 bp, Artificial Sequence
  Description of Artificial Sequence: Synthetic oligonucleotide
  Epidermal growth factor receptor (EGFR), ERBB1 phosphotyrosine kinase siRNA
ccagtgtgctgcaggctgcacag

SEQ ID NO: 5815 - DNA, 23 bp, Artificial Sequence
  Description of Artificial Sequence: Synthetic oligonucleotide
  Epidermal growth factor receptor (EGFR), ERBB1 phosphotyrosine kinase siRNA
cagtgtgctgcaggctgcacagg

SEQ ID NO: 5816 - DNA, 23 bp, Artificial Sequence
  Description of Artificial Sequence: Synthetic oligonucleotide
  Epidermal growth factor receptor (EGFR), ERBB1 phosphotyrosine kinase siRNA
agtgtgctgcaggctgcacaggc

SEQ ID NO: 5817 - DNA, 23 bp, Artificial Sequence
  Description of Artificial Sequence: Synthetic oligonucleotide
  Epidermal growth factor receptor (EGFR), ERBB1 phosphotyrosine kinase siRNA
gtgtgctgcaggctgcacaggcc

SEQ ID NO: 5818 - DNA, 23 bp, Artificial Sequence
  Description of Artificial Sequence: Synthetic oligonucleotide
  Epidermal growth factor receptor (EGFR), ERBB1 phosphotyrosine kinase siRNA
tgtgctgcaggctgcacaggccc

SEQ ID NO: 5819 - DNA, 23 bp, Artificial Sequence
  Description of Artificial Sequence: Synthetic oligonucleotide
  Epidermal growth factor receptor (EGFR), ERBB1 phosphotyrosine kinase siRNA
gtgctgcaggctgcacaggcccc

SEQ ID NO: 5820 - DNA, 23 bp, Artificial Sequence
  Description of Artificial Sequence: Synthetic oligonucleotide
  Epidermal growth factor receptor (EGFR), ERBB1 phosphotyrosine kinase siRNA
tgctgcaggctgcacaggccccc

SEQ ID NO: 5821 - DNA, 23 bp, Artificial Sequence
  Description of Artificial Sequence: Synthetic oligonucleotide
  Epidermal growth factor receptor (EGFR), ERBB1 phosphotyrosine kinase siRNA
gctgcaggctgcacaggcccccg

SEQ ID NO: 5822 - DNA, 23 bp, Artificial Sequence
  Description of Artificial Sequence: Synthetic oligonucleotide
  Epidermal growth factor receptor (EGFR), ERBB1 phosphotyrosine kinase siRNA
cccccgggagagcgactgcctgg

SEQ ID NO: 5823 - DNA, 23 bp, Artificial Sequence
  Description of Artificial Sequence: Synthetic oligonucleotide
  Epidermal growth factor receptor (EGFR), ERBB1 phosphotyrosine kinase siRNA
ccccgggagagcgactgcctggt

SEQ ID NO: 5824 - DNA, 23 bp, Artificial Sequence
  Description of Artificial Sequence: Synthetic oligonucleotide
  Epidermal growth factor receptor (EGFR), ERBB1 phosphotyrosine kinase siRNA
cccgggagagcgactgcctggtc

SEQ ID NO: 5825 - DNA, 23 bp, Artificial Sequence
  Description of Artificial Sequence: Synthetic oligonucleotide
  Epidermal growth factor receptor (EGFR), ERBB1 phosphotyrosine kinase siRNA
ccgggagagcgactgcctggtct

SEQ ID NO: 5826 - DNA, 23 bp, Artificial Sequence
  Description of Artificial Sequence: Synthetic oligonucleotide
  Epidermal growth factor receptor (EGFR), ERBB1 phosphotyrosine kinase siRNA
cgggagagcgactgcctggtctg

SEQ ID NO: 5827 - DNA, 23 bp, Artificial Sequence
  Description of Artificial Sequence: Synthetic oligonucleotide
  Epidermal growth factor receptor (EGFR), ERBB1 phosphotyrosine kinase siRNA
gggagagcgactgcctggtctgc

SEQ ID NO: 5828 - DNA, 23 bp, Artificial Sequence
  Description of Artificial Sequence: Synthetic oligonucleotide
  Epidermal growth factor receptor (EGFR), ERBB1 phosphotyrosine kinase siRNA
ggagagcgactgcctggtctgcc

SEQ ID NO: 5829 - DNA, 23 bp, Artificial Sequence
  Description of Artificial Sequence: Synthetic oligonucleotide
  Epidermal growth factor receptor (EGFR), ERBB1 phosphotyrosine kinase siRNA
gagagcgactgcctggtctgccg

SEQ ID NO: 5830 - DNA, 23 bp, Artificial Sequence
  Description of Artificial Sequence: Synthetic oligonucleotide
  Epidermal growth factor receptor (EGFR), ERBB1 phosphotyrosine kinase siRNA
agagcgactgcctggtctgccgc

SEQ ID NO: 5831 - DNA, 23 bp, Artificial Sequence
  Description of Artificial Sequence: Synthetic oligonucleotide
  Epidermal growth factor receptor (EGFR), ERBB1 phosphotyrosine kinase siRNA
gagcgactgcctggtctgccgca

SEQ ID NO: 5832 - DNA, 23 bp, Artificial Sequence
  Description of Artificial Sequence: Synthetic oligonucleotide
  Epidermal growth factor receptor (EGFR), ERBB1 phosphotyrosine kinase siRNA
agcgactgcctggtctgccgcaa

SEQ ID NO: 5833 - DNA, 23 bp, Artificial Sequence
  Description of Artificial Sequence: Synthetic oligonucleotide
  Epidermal growth factor receptor (EGFR), ERBB1 phosphotyrosine kinase siRNA
gcgactgcctggtctgccgcaaa

SEQ ID NO: 5834 - DNA, 23 bp, Artificial Sequence
  Description of Artificial Sequence: Synthetic oligonucleotide
  Epidermal growth factor receptor (EGFR), ERBB1 phosphotyrosine kinase siRNA
cgactgcctggtctgccgcaaat

SEQ ID NO: 5835 - DNA, 23 bp, Artificial Sequence
  Description of Artificial Sequence: Synthetic oligonucleotide
  Epidermal growth factor receptor (EGFR), ERBB1 phosphotyrosine kinase siRNA
gactgcctggtctgccgcaaatt

SEQ ID NO: 5836 - DNA, 23 bp, Artificial Sequence
  Description of Artificial Sequence: Synthetic oligonucleotide
  Epidermal growth factor receptor (EGFR), ERBB1 phosphotyrosine kinase siRNA
actgcctggtctgccgcaaattc

SEQ ID NO: 5837 - DNA, 23 bp, Artificial Sequence
  Description of Artificial Sequence: Synthetic oligonucleotide
  Epidermal growth factor receptor (EGFR), ERBB1 phosphotyrosine kinase siRNA
ctgcctggtctgccgcaaattcc

SEQ ID NO: 5838 - DNA, 23 bp, Artificial Sequence
  Description of Artificial Sequence: Synthetic oligonucleotide
  Epidermal growth factor receptor (EGFR), ERBB1 phosphotyrosine kinase siRNA
tgcctggtctgccgcaaattccg

SEQ ID NO: 5839 - DNA, 23 bp, Artificial Sequence
  Description of Artificial Sequence: Synthetic oligonucleotide
  Epidermal growth factor receptor (EGFR), ERBB1 phosphotyrosine kinase siRNA
gcctggtctgccgcaaattccga

SEQ ID NO: 5840 - DNA, 23 bp, Artificial Sequence
  Description of Artificial Sequence: Synthetic oligonucleotide
  Epidermal growth factor receptor (EGFR), ERBB1 phosphotyrosine kinase siRNA
cctggtctgccgcaaattccgag

SEQ ID NO: 5841 - DNA, 23 bp, Artificial Sequence
  Description of Artificial Sequence: Synthetic oligonucleotide
  Epidermal growth factor receptor (EGFR), ERBB1 phosphotyrosine kinase siRNA
ctggtctgccgcaaattccgaga

SEQ ID NO: 5842 - DNA, 23 bp, Artificial Sequence
  Description of Artificial Sequence: Synthetic oligonucleotide
  Epidermal growth factor receptor (EGFR), ERBB1 phosphotyrosine kinase siRNA
tggtctgccgcaaattccgagac

SEQ ID NO: 5843 - DNA, 23 bp, Artificial Sequence
  Description of Artificial Sequence: Synthetic oligonucleotide
  Epidermal growth factor receptor (EGFR), ERBB1 phosphotyrosine kinase siRNA
ggtctgccgcaaattccgagacg

SEQ ID NO: 5844 - DNA, 23 bp, Artificial Sequence
  Description of Artificial Sequence: Synthetic oligonucleotide
  Epidermal growth factor receptor (EGFR), ERBB1 phosphotyrosine kinase siRNA
gtctgccgcaaattccgagacga

SEQ ID NO: 5845 - DNA, 23 bp, Artificial Sequence
  Description of Artificial Sequence: Synthetic oligonucleotide
  Epidermal growth factor receptor (EGFR), ERBB1 phosphotyrosine kinase siRNA
tctgccgcaaattccgagacgaa

SEQ ID NO: 5846 - DNA, 23 bp, Artificial Sequence
  Description of Artificial Sequence: Synthetic oligonucleotide
  Epidermal growth factor receptor (EGFR), ERBB1 phosphotyrosine kinase siRNA
ctgccgcaaattccgagacgaag

SEQ ID NO: 5847 - DNA, 23 bp, Artificial Sequence
  Description of Artificial Sequence: Synthetic oligonucleotide
  Epidermal growth factor receptor (EGFR), ERBB1 phosphotyrosine kinase siRNA
tgccgcaaattccgagacgaagc

SEQ ID NO: 5848 - DNA, 23 bp, Artificial Sequence
  Description of Artificial Sequence: Synthetic oligonucleotide
  Epidermal growth factor receptor (EGFR), ERBB1 phosphotyrosine kinase siRNA
gccgcaaattccgagacgaagcc

SEQ ID NO: 5849 - DNA, 23 bp, Artificial Sequence
  Description of Artificial Sequence: Synthetic oligonucleotide
  Epidermal growth factor receptor (EGFR), ERBB1 phosphotyrosine kinase siRNA
ccgcaaattccgagacgaagcca

SEQ ID NO: 5850 - DNA, 23 bp, Artificial Sequence
  Description of Artificial Sequence: Synthetic oligonucleotide
  Epidermal growth factor receptor (EGFR), ERBB1 phosphotyrosine kinase siRNA
cgcaaattccgagacgaagccac

SEQ ID NO: 5851 - DNA, 23 bp, Artificial Sequence
  Description of Artificial Sequence: Synthetic oligonucleotide
  Epidermal growth factor receptor (EGFR), ERBB1 phosphotyrosine kinase siRNA
gcaaattccgagacgaagccacg

SEQ ID NO: 5852 - DNA, 23 bp, Artificial Sequence
  Description of Artificial Sequence: Synthetic oligonucleotide
  Epidermal growth factor receptor (EGFR), ERBB1 phosphotyrosine kinase siRNA
caaattccgagacgaagccacgt

SEQ ID NO: 5853 - DNA, 23 bp, Artificial Sequence
  Description of Artificial Sequence: Synthetic oligonucleotide
  Epidermal growth factor receptor (EGFR), ERBB1 phosphotyrosine kinase siRNA
aaattccgagacgaagccacgtg

SEQ ID NO: 5854 - DNA, 23 bp, Artificial Sequence
  Description of Artificial Sequence: Synthetic oligonucleotide
  Epidermal growth factor receptor (EGFR), ERBB1 phosphotyrosine kinase siRNA
aattccgagacgaagccacgtgc

SEQ ID NO: 5855 - DNA, 23 bp, Artificial Sequence
  Description of Artificial Sequence: Synthetic oligonucleotide
  Epidermal growth factor receptor (EGFR), ERBB1 phosphotyrosine kinase siRNA
attccgagacgaagccacgtgca

SEQ ID NO: 5856 - DNA, 23 bp, Artificial Sequence
  Description of Artificial Sequence: Synthetic oligonucleotide
  Epidermal growth factor receptor (EGFR), ERBB1 phosphotyrosine kinase siRNA
ttccgagacgaagccacgtgcaa

SEQ ID NO: 5857 - DNA, 23 bp, Artificial Sequence
  Description of Artificial Sequence: Synthetic oligonucleotide
  Epidermal growth factor receptor (EGFR), ERBB1 phosphotyrosine kinase siRNA
tccgagacgaagccacgtgcaag

SEQ ID NO: 5858 - DNA, 23 bp, Artificial Sequence
  Description of Artificial Sequence: Synthetic oligonucleotide
  Epidermal growth factor receptor (EGFR), ERBB1 phosphotyrosine kinase siRNA
ccgagacgaagccacgtgcaagg

SEQ ID NO: 5859 - DNA, 23 bp, Artificial Sequence
  Description of Artificial Sequence: Synthetic oligonucleotide
  Epidermal growth factor receptor (EGFR), ERBB1 phosphotyrosine kinase siRNA
cgagacgaagccacgtgcaagga

SEQ ID NO: 5860 - DNA, 23 bp, Artificial Sequence
  Description of Artificial Sequence: Synthetic oligonucleotide
  Epidermal growth factor receptor (EGFR), ERBB1 phosphotyrosine kinase siRNA
gagacgaagccacgtgcaaggac

SEQ ID NO: 5861 - DNA, 23 bp, Artificial Sequence
  Description of Artificial Sequence: Synthetic oligonucleotide
  Epidermal growth factor receptor (EGFR), ERBB1 phosphotyrosine kinase siRNA
agacgaagccacgtgcaaggaca

SEQ ID NO: 5862 - DNA, 23 bp, Artificial Sequence
  Description of Artificial Sequence: Synthetic oligonucleotide
  Epidermal growth factor receptor (EGFR), ERBB1 phosphotyrosine kinase siRNA
gacgaagccacgtgcaaggacac

SEQ ID NO: 5863 - DNA, 23 bp, Artificial Sequence
  Description of Artificial Sequence: Synthetic oligonucleotide
  Epidermal growth factor receptor (EGFR), ERBB1 phosphotyrosine kinase siRNA
acgaagccacgtgcaaggacacc

SEQ ID NO: 5864 - DNA, 23 bp, Artificial Sequence
  Description of Artificial Sequence: Synthetic oligonucleotide
  Epidermal growth factor receptor (EGFR), ERBB1 phosphotyrosine kinase siRNA
cgaagccacgtgcaaggacacct

SEQ ID NO: 5865 - DNA, 23 bp, Artificial Sequence
  Description of Artificial Sequence: Synthetic oligonucleotide
  Epidermal growth factor receptor (EGFR), ERBB1 phosphotyrosine kinase siRNA
gaagccacgtgcaaggacacctg

SEQ ID NO: 5866 - DNA, 23 bp, Artificial Sequence
  Description of Artificial Sequence: Synthetic oligonucleotide
  Epidermal growth factor receptor (EGFR), ERBB1 phosphotyrosine kinase siRNA
aagccacgtgcaaggacacctgc

SEQ ID NO: 5867 - DNA, 23 bp, Artificial Sequence
  Description of Artificial Sequence: Synthetic oligonucleotide
  Epidermal growth factor receptor (EGFR), ERBB1 phosphotyrosine kinase siRNA
agccacgtgcaaggacacctgcc

SEQ ID NO: 5868 - DNA, 23 bp, Artificial Sequence
  Description of Artificial Sequence: Synthetic oligonucleotide
  Epidermal growth factor receptor (EGFR), ERBB1 phosphotyrosine kinase siRNA
gccacgtgcaaggacacctgccc

SEQ ID NO: 5869 - DNA, 23 bp, Artificial Sequence
  Description of Artificial Sequence: Synthetic oligonucleotide
  Epidermal growth factor receptor (EGFR), ERBB1 phosphotyrosine kinase siRNA
ccacgtgcaaggacacctgcccc

SEQ ID NO: 5870 - DNA, 23 bp, Artificial Sequence
  Description of Artificial Sequence: Synthetic oligonucleotide
  Epidermal growth factor receptor (EGFR), ERBB1 phosphotyrosine kinase siRNA
cacgtgcaaggacacctgccccc

SEQ ID NO: 5871 - DNA, 23 bp, Artificial Sequence
  Description of Artificial Sequence: Synthetic oligonucleotide
  Epidermal growth factor receptor (EGFR), ERBB1 phosphotyrosine kinase siRNA
acgtgcaaggacacctgcccccc

SEQ ID NO: 5872 - DNA, 23 bp, Artificial Sequence
  Description of Artificial Sequence: Synthetic oligonucleotide
  Epidermal growth factor receptor (EGFR), ERBB1 phosphotyrosine kinase siRNA
cgtgcaaggacacctgcccccca

SEQ ID NO: 5873 - DNA, 23 bp, Artificial Sequence
  Description of Artificial Sequence: Synthetic oligonucleotide
  Epidermal growth factor receptor (EGFR), ERBB1 phosphotyrosine kinase siRNA
gtgcaaggacacctgccccccac

SEQ ID NO: 5874 - DNA, 23 bp, Artificial Sequence
  Description of Artificial Sequence: Synthetic oligonucleotide
  Epidermal growth factor receptor (EGFR), ERBB1 phosphotyrosine kinase siRNA
tgcaaggacacctgccccccact

SEQ ID NO: 5875 - DNA, 23 bp, Artificial Sequence
  Description of Artificial Sequence: Synthetic oligonucleotide
  Epidermal growth factor receptor (EGFR), ERBB1 phosphotyrosine kinase siRNA
gcaaggacacctgccccccactc

SEQ ID NO: 5876 - DNA, 23 bp, Artificial Sequence
  Description of Artificial Sequence: Synthetic oligonucleotide
  Epidermal growth factor receptor (EGFR), ERBB1 phosphotyrosine kinase siRNA
caaggacacctgccccccactca

SEQ ID NO: 5877 - DNA, 23 bp, Artificial Sequence
  Description of Artificial Sequence: Synthetic oligonucleotide
  Epidermal growth factor receptor (EGFR), ERBB1 phosphotyrosine kinase siRNA
aaggacacctgccccccactcat

SEQ ID NO: 5878 - DNA, 23 bp, Artificial Sequence
  Description of Artificial Sequence: Synthetic oligonucleotide
  Epidermal growth factor receptor (EGFR), ERBB1 phosphotyrosine kinase siRNA
aggacacctgccccccactcatg

SEQ ID NO: 5879 - DNA, 23 bp, Artificial Sequence
  Description of Artificial Sequence: Synthetic oligonucleotide
  Epidermal growth factor receptor (EGFR), ERBB1 phosphotyrosine kinase siRNA
ggacacctgccccccactcatgc

SEQ ID NO: 5880 - DNA, 23 bp, Artificial Sequence
  Description of Artificial Sequence: Synthetic oligonucleotide
  Epidermal growth factor receptor (EGFR), ERBB1 phosphotyrosine kinase siRNA
gacacctgccccccactcatgct

SEQ ID NO: 5881 - DNA, 23 bp, Artificial Sequence
  Description of Artificial Sequence: Synthetic oligonucleotide
  Epidermal growth factor receptor (EGFR), ERBB1 phosphotyrosine kinase siRNA
acacctgccccccactcatgctc

SEQ ID NO: 5882 - DNA, 23 bp, Artificial Sequence
  Description of Artificial Sequence: Synthetic oligonucleotide
  Epidermal growth factor receptor (EGFR), ERBB1 phosphotyrosine kinase siRNA
cacctgccccccactcatgctct

SEQ ID NO: 5883 - DNA, 23 bp, Artificial Sequence
  Description of Artificial Sequence: Synthetic oligonucleotide
  Epidermal growth factor receptor (EGFR), ERBB1 phosphotyrosine kinase siRNA
acctgccccccactcatgctcta

SEQ ID NO: 5884 - DNA, 23 bp, Artificial Sequence
  Description of Artificial Sequence: Synthetic oligonucleotide
  Epidermal growth factor receptor (EGFR), ERBB1 phosphotyrosine kinase siRNA
cctgccccccactcatgctctac

SEQ ID NO: 5885 - DNA, 23 bp, Artificial Sequence
  Description of Artificial Sequence: Synthetic oligonucleotide
  Epidermal growth factor receptor (EGFR), ERBB1 phosphotyrosine kinase siRNA
ctgccccccactcatgctctaca

SEQ ID NO: 5886 - DNA, 23 bp, Artificial Sequence
  Description of Artificial Sequence: Synthetic oligonucleotide
  Epidermal growth factor receptor (EGFR), ERBB1 phosphotyrosine kinase siRNA
tgccccccactcatgctctacaa

SEQ ID NO: 5887 - DNA, 23 bp, Artificial Sequence
  Description of Artificial Sequence: Synthetic oligonucleotide
  Epidermal growth factor receptor (EGFR), ERBB1 phosphotyrosine kinase siRNA
gccccccactcatgctctacaac

SEQ ID NO: 5888 - DNA, 23 bp, Artificial Sequence
  Description of Artificial Sequence: Synthetic oligonucleotide
  Epidermal growth factor receptor (EGFR), ERBB1 phosphotyrosine kinase siRNA
ccccccactcatgctctacaacc

SEQ ID NO: 5889 - DNA, 23 bp, Artificial Sequence
  Description of Artificial Sequence: Synthetic oligonucleotide
  Epidermal growth factor receptor (EGFR), ERBB1 phosphotyrosine kinase siRNA
cccccactcatgctctacaaccc

SEQ ID NO: 5890 - DNA, 23 bp, Artificial Sequence
  Description of Artificial Sequence: Synthetic oligonucleotide
  Epidermal growth factor receptor (EGFR), ERBB1 phosphotyrosine kinase siRNA
ccccactcatgctctacaacccc

SEQ ID NO: 5891 - DNA, 23 bp, Artificial Sequence
  Description of Artificial Sequence: Synthetic oligonucleotide
  Epidermal growth factor receptor (EGFR), ERBB1 phosphotyrosine kinase siRNA
cccactcatgctctacaacccca

SEQ ID NO: 5892 - DNA, 23 bp, Artificial Sequence
  Description of Artificial Sequence: Synthetic oligonucleotide
  Epidermal growth factor receptor (EGFR), ERBB1 phosphotyrosine kinase siRNA
ccactcatgctctacaaccccac

SEQ ID NO: 5893 - DNA, 23 bp, Artificial Sequence
  Description of Artificial Sequence: Synthetic oligonucleotide
  Epidermal growth factor receptor (EGFR), ERBB1 phosphotyrosine kinase siRNA
cactcatgctctacaaccccacc

SEQ ID NO: 5894 - DNA, 23 bp, Artificial Sequence
  Description of Artificial Sequence: Synthetic oligonucleotide
  Epidermal growth factor receptor (EGFR), ERBB1 phosphotyrosine kinase siRNA
actcatgctctacaaccccacca

SEQ ID NO: 5895 - DNA, 23 bp, Artificial Sequence
  Description of Artificial Sequence: Synthetic oligonucleotide
  Epidermal growth factor receptor (EGFR), ERBB1 phosphotyrosine kinase siRNA
ctcatgctctacaaccccaccac

SEQ ID NO: 5896 - DNA, 23 bp, Artificial Sequence
  Description of Artificial Sequence: Synthetic oligonucleotide
  Epidermal growth factor receptor (EGFR), ERBB1 phosphotyrosine kinase siRNA
tcatgctctacaaccccaccacg

SEQ ID NO: 5897 - DNA, 23 bp, Artificial Sequence
  Description of Artificial Sequence: Synthetic oligonucleotide
  Epidermal growth factor receptor (EGFR), ERBB1 phosphotyrosine kinase siRNA
catgctctacaaccccaccacgt

SEQ ID NO: 5898 - DNA, 23 bp, Artificial Sequence
  Description of Artificial Sequence: Synthetic oligonucleotide
  Epidermal growth factor receptor (EGFR), ERBB1 phosphotyrosine kinase siRNA
atgctctacaaccccaccacgta

SEQ ID NO: 5899 - DNA, 23 bp, Artificial Sequence
  Description of Artificial Sequence: Synthetic oligonucleotide
  Epidermal growth factor receptor (EGFR), ERBB1 phosphotyrosine kinase siRNA
tgctctacaaccccaccacgtac

SEQ ID NO: 5900 - DNA, 23 bp, Artificial Sequence
  Description of Artificial Sequence: Synthetic oligonucleotide
  Epidermal growth factor receptor (EGFR), ERBB1 phosphotyrosine kinase siRNA
gctctacaaccccaccacgtacc

SEQ ID NO: 5901 - DNA, 23 bp, Artificial Sequence
  Description of Artificial Sequence: Synthetic oligonucleotide
  Epidermal growth factor receptor (EGFR), ERBB1 phosphotyrosine kinase siRNA
ctctacaaccccaccacgtacca

SEQ ID NO: 5902 - DNA, 23 bp, Artificial Sequence
  Description of Artificial Sequence: Synthetic oligonucleotide
  Epidermal growth factor receptor (EGFR), ERBB1 phosphotyrosine kinase siRNA
tctacaaccccaccacgtaccag

SEQ ID NO: 5903 - DNA, 23 bp, Artificial Sequence
  Description of Artificial Sequence: Synthetic oligonucleotide
  Epidermal growth factor receptor (EGFR), ERBB1 phosphotyrosine kinase siRNA
ctacaaccccaccacgtaccaga

SEQ ID NO: 5904 - DNA, 23 bp, Artificial Sequence
  Description of Artificial Sequence: Synthetic oligonucleotide
  Epidermal growth factor receptor (EGFR), ERBB1 phosphotyrosine kinase siRNA
tacaaccccaccacgtaccagat

SEQ ID NO: 5905 - DNA, 23 bp, Artificial Sequence
  Description of Artificial Sequence: Synthetic oligonucleotide
  Epidermal growth factor receptor (EGFR), ERBB1 phosphotyrosine kinase siRNA
acaaccccaccacgtaccagatg

SEQ ID NO: 5906 - DNA, 23 bp, Artificial Sequence
  Description of Artificial Sequence: Synthetic oligonucleotide
  Epidermal growth factor receptor (EGFR), ERBB1 phosphotyrosine kinase siRNA
caaccccaccacgtaccagatgg

SEQ ID NO: 5907 - DNA, 23 bp, Artificial Sequence
  Description of Artificial Sequence: Synthetic oligonucleotide
  Epidermal growth factor receptor (EGFR), ERBB1 phosphotyrosine kinase siRNA
aaccccaccacgtaccagatgga

SEQ ID NO: 5908 - DNA, 23 bp, Artificial Sequence
  Description of Artificial Sequence: Synthetic oligonucleotide
  Epidermal growth factor receptor (EGFR), ERBB1 phosphotyrosine kinase siRNA
accccaccacgtaccagatggat

SEQ ID NO: 5909 - DNA, 23 bp, Artificial Sequence
  Description of Artificial Sequence: Synthetic oligonucleotide
  Epidermal growth factor receptor (EGFR), ERBB1 phosphotyrosine kinase siRNA
ccccaccacgtaccagatggatg

SEQ ID NO: 5910 - DNA, 23 bp, Artificial Sequence
  Description of Artificial Sequence: Synthetic oligonucleotide
  Epidermal growth factor receptor (EGFR), ERBB1 phosphotyrosine kinase siRNA
cccaccacgtaccagatggatgt

SEQ ID NO: 5911 - DNA, 23 bp, Artificial Sequence
  Description of Artificial Sequence: Synthetic oligonucleotide
  Epidermal growth factor receptor (EGFR), ERBB1 phosphotyrosine kinase siRNA
ccaccacgtaccagatggatgtg

SEQ ID NO: 5912 - DNA, 23 bp, Artificial Sequence
  Description of Artificial Sequence: Synthetic oligonucleotide
  Epidermal growth factor receptor (EGFR), ERBB1 phosphotyrosine kinase siRNA
caccacgtaccagatggatgtga

SEQ ID NO: 5913 - DNA, 23 bp, Artificial Sequence
  Description of Artificial Sequence: Synthetic oligonucleotide
  Epidermal growth factor receptor (EGFR), ERBB1 phosphotyrosine kinase siRNA
accacgtaccagatggatgtgaa

SEQ ID NO: 5914 - DNA, 23 bp, Artificial Sequence
  Description of Artificial Sequence: Synthetic oligonucleotide
  Epidermal growth factor receptor (EGFR), ERBB1 phosphotyrosine kinase siRNA
ccacgtaccagatggatgtgaac

SEQ ID NO: 5915 - DNA, 23 bp, Artificial Sequence
  Description of Artificial Sequence: Synthetic oligonucleotide
  Epidermal growth factor receptor (EGFR), ERBB1 phosphotyrosine kinase siRNA
cacgtaccagatggatgtgaacc

SEQ ID NO: 5916 - DNA, 23 bp, Artificial Sequence
  Description of Artificial Sequence: Synthetic oligonucleotide
  Epidermal growth factor receptor (EGFR), ERBB1 phosphotyrosine kinase siRNA
acgtaccagatggatgtgaaccc

SEQ ID NO: 5917 - DNA, 23 bp, Artificial Sequence
  Description of Artificial Sequence: Synthetic oligonucleotide
  Epidermal growth factor receptor (EGFR), ERBB1 phosphotyrosine kinase siRNA
cgtaccagatggatgtgaacccc

SEQ ID NO: 5918 - DNA, 23 bp, Artificial Sequence
  Description of Artificial Sequence: Synthetic oligonucleotide
  Epidermal growth factor receptor (EGFR), ERBB1 phosphotyrosine kinase siRNA
gtaccagatggatgtgaaccccg

SEQ ID NO: 5919 - DNA, 23 bp, Artificial Sequence
  Description of Artificial Sequence: Synthetic oligonucleotide
  Epidermal growth factor receptor (EGFR), ERBB1 phosphotyrosine kinase siRNA
taccagatggatgtgaaccccga

SEQ ID NO: 5920 - DNA, 23 bp, Artificial Sequence
  Description of Artificial Sequence: Synthetic oligonucleotide
  Epidermal growth factor receptor (EGFR), ERBB1 phosphotyrosine kinase siRNA
accagatggatgtgaaccccgag

SEQ ID NO: 5921 - DNA, 23 bp, Artificial Sequence
  Description of Artificial Sequence: Synthetic oligonucleotide
  Epidermal growth factor receptor (EGFR), ERBB1 phosphotyrosine kinase siRNA
ccagatggatgtgaaccccgagg

SEQ ID NO: 5922 - DNA, 23 bp, Artificial Sequence
  Description of Artificial Sequence: Synthetic oligonucleotide
  Epidermal growth factor receptor (EGFR), ERBB1 phosphotyrosine kinase siRNA
cagatggatgtgaaccccgaggg

SEQ ID NO: 5923 - DNA, 23 bp, Artificial Sequence
  Description of Artificial Sequence: Synthetic oligonucleotide
  Epidermal growth factor receptor (EGFR), ERBB1 phosphotyrosine kinase siRNA
agatggatgtgaaccccgagggc

SEQ ID NO: 5924 - DNA, 23 bp, Artificial Sequence
  Description of Artificial Sequence: Synthetic oligonucleotide
  Epidermal growth factor receptor (EGFR), ERBB1 phosphotyrosine kinase siRNA
gatggatgtgaaccccgagggca

SEQ ID NO: 5925 - DNA, 23 bp, Artificial Sequence
  Description of Artificial Sequence: Synthetic oligonucleotide
  Epidermal growth factor receptor (EGFR), ERBB1 phosphotyrosine kinase siRNA
atggatgtgaaccccgagggcaa

SEQ ID NO: 5926 - DNA, 23 bp, Artificial Sequence
  Description of Artificial Sequence: Synthetic oligonucleotide
  Epidermal growth factor receptor (EGFR), ERBB1 phosphotyrosine kinase siRNA
tggatgtgaaccccgagggcaaa

SEQ ID NO: 5927 - DNA, 23 bp, Artificial Sequence
  Description of Artificial Sequence: Synthetic oligonucleotide
  Epidermal growth factor receptor (EGFR), ERBB1 phosphotyrosine kinase siRNA
ggatgtgaaccccgagggcaaat

SEQ ID NO: 5928 - DNA, 23 bp, Artificial Sequence
  Description of Artificial Sequence: Synthetic oligonucleotide
  Epidermal growth factor receptor (EGFR), ERBB1 phosphotyrosine kinase siRNA
gatgtgaaccccgagggcaaata

SEQ ID NO: 5929 - DNA, 23 bp, Artificial Sequence
  Description of Artificial Sequence: Synthetic oligonucleotide
  Epidermal growth factor receptor (EGFR), ERBB1 phosphotyrosine kinase siRNA
atgtgaaccccgagggcaaatac

SEQ ID NO: 5930 - DNA, 23 bp, Artificial Sequence
  Description of Artificial Sequence: Synthetic oligonucleotide
  Epidermal growth factor receptor (EGFR), ERBB1 phosphotyrosine kinase siRNA
tgtgaaccccgagggcaaataca

SEQ ID NO: 5931 - DNA, 23 bp, Artificial Sequence
  Description of Artificial Sequence: Synthetic oligonucleotide
  Epidermal growth factor receptor (EGFR), ERBB1 phosphotyrosine kinase siRNA
gtgaaccccgagggcaaatacag

SEQ ID NO: 5932 - DNA, 23 bp, Artificial Sequence
  Description of Artificial Sequence: Synthetic oligonucleotide
  Epidermal growth factor receptor (EGFR), ERBB1 phosphotyrosine kinase siRNA
tgaaccccgagggcaaatacagc

SEQ ID NO: 5933 - DNA, 23 bp, Artificial Sequence
  Description of Artificial Sequence: Synthetic oligonucleotide
  Epidermal growth factor receptor (EGFR), ERBB1 phosphotyrosine kinase siRNA
gaaccccgagggcaaatacagct

SEQ ID NO: 5934 - DNA, 23 bp, Artificial Sequence
  Description of Artificial Sequence: Synthetic oligonucleotide
  Epidermal growth factor receptor (EGFR), ERBB1 phosphotyrosine kinase siRNA
aaccccgagggcaaatacagctt

SEQ ID NO: 5935 - DNA, 23 bp, Artificial Sequence
  Description of Artificial Sequence: Synthetic oligonucleotide
  Epidermal growth factor receptor (EGFR), ERBB1 phosphotyrosine kinase siRNA
accccgagggcaaatacagcttt

SEQ ID NO: 5936 - DNA, 23 bp, Artificial Sequence
  Description of Artificial Sequence: Synthetic oligonucleotide
  Epidermal growth factor receptor (EGFR), ERBB1 phosphotyrosine kinase siRNA
ccccgagggcaaatacagctttg

SEQ ID NO: 5937 - DNA, 23 bp, Artificial Sequence
  Description of Artificial Sequence: Synthetic oligonucleotide
  Epidermal growth factor receptor (EGFR), ERBB1 phosphotyrosine kinase siRNA
cccgagggcaaatacagctttgg

SEQ ID NO: 5938 - DNA, 23 bp, Artificial Sequence
  Description of Artificial Sequence: Synthetic oligonucleotide
  Epidermal growth factor receptor (EGFR), ERBB1 phosphotyrosine kinase siRNA
ccgagggcaaatacagctttggt

SEQ ID NO: 5939 - DNA, 23 bp, Artificial Sequence
  Description of Artificial Sequence: Synthetic oligonucleotide
  Epidermal growth factor receptor (EGFR), ERBB1 phosphotyrosine kinase siRNA
cgagggcaaatacagctttggtg

SEQ ID NO: 5940 - DNA, 23 bp, Artificial Sequence
  Description of Artificial Sequence: Synthetic oligonucleotide
  Epidermal growth factor receptor (EGFR), ERBB1 phosphotyrosine kinase siRNA
gagggcaaatacagctttggtgc

SEQ ID NO: 5941 - DNA, 23 bp, Artificial Sequence
  Description of Artificial Sequence: Synthetic oligonucleotide
  Epidermal growth factor receptor (EGFR), ERBB1 phosphotyrosine kinase siRNA
agggcaaatacagctttggtgcc

SEQ ID NO: 5942 - DNA, 23 bp, Artificial Sequence
  Description of Artificial Sequence: Synthetic oligonucleotide
  Epidermal growth factor receptor (EGFR), ERBB1 phosphotyrosine kinase siRNA
gggcaaatacagctttggtgcca

SEQ ID NO: 5943 - DNA, 23 bp, Artificial Sequence
  Description of Artificial Sequence: Synthetic oligonucleotide
  Epidermal growth factor receptor (EGFR), ERBB1 phosphotyrosine kinase siRNA
ggcaaatacagctttggtgccac

SEQ ID NO: 5944 - DNA, 23 bp, Artificial Sequence
  Description of Artificial Sequence: Synthetic oligonucleotide
  Epidermal growth factor receptor (EGFR), ERBB1 phosphotyrosine kinase siRNA
gcaaatacagctttggtgccacc

SEQ ID NO: 5945 - DNA, 23 bp, Artificial Sequence
  Description of Artificial Sequence: Synthetic oligonucleotide
  Epidermal growth factor receptor (EGFR), ERBB1 phosphotyrosine kinase siRNA
caaatacagctttggtgccacct

SEQ ID NO: 5946 - DNA, 23 bp, Artificial Sequence
  Description of Artificial Sequence: Synthetic oligonucleotide
  Epidermal growth factor receptor (EGFR), ERBB1 phosphotyrosine kinase siRNA
aaatacagctttggtgccacctg

SEQ ID NO: 5947 - DNA, 23 bp, Artificial Sequence
  Description of Artificial Sequence: Synthetic oligonucleotide
  Epidermal growth factor receptor (EGFR), ERBB1 phosphotyrosine kinase siRNA
aatacagctttggtgccacctgc

SEQ ID NO: 5948 - DNA, 23 bp, Artificial Sequence
  Description of Artificial Sequence: Synthetic oligonucleotide
  Epidermal growth factor receptor (EGFR), ERBB1 phosphotyrosine kinase siRNA
atacagctttggtgccacctgcg

SEQ ID NO: 5949 - DNA, 23 bp, Artificial Sequence
  Description of Artificial Sequence: Synthetic oligonucleotide
  Epidermal growth factor receptor (EGFR), ERBB1 phosphotyrosine kinase siRNA
tacagctttggtgccacctgcgt

SEQ ID NO: 5950 - DNA, 23 bp, Artificial Sequence
  Description of Artificial Sequence: Synthetic oligonucleotide
  Epidermal growth factor receptor (EGFR), ERBB1 phosphotyrosine kinase siRNA
acagctttggtgccacctgcgtg

SEQ ID NO: 5951 - DNA, 23 bp, Artificial Sequence
  Description of Artificial Sequence: Synthetic oligonucleotide
  Epidermal growth factor receptor (EGFR), ERBB1 phosphotyrosine kinase siRNA
cagctttggtgccacctgcgtga

SEQ ID NO: 5952 - DNA, 23 bp, Artificial Sequence
  Description of Artificial Sequence: Synthetic oligonucleotide
  Epidermal growth factor receptor (EGFR), ERBB1 phosphotyrosine kinase siRNA
agctttggtgccacctgcgtgaa

SEQ ID NO: 5953 - DNA, 23 bp, Artificial Sequence
  Description of Artificial Sequence: Synthetic oligonucleotide
  Epidermal growth factor receptor (EGFR), ERBB1 phosphotyrosine kinase siRNA
gctttggtgccacctgcgtgaag

SEQ ID NO: 5954 - DNA, 23 bp, Artificial Sequence
  Description of Artificial Sequence: Synthetic oligonucleotide
  Epidermal growth factor receptor (EGFR), ERBB1 phosphotyrosine kinase siRNA
ctttggtgccacctgcgtgaaga

SEQ ID NO: 5955 - DNA, 23 bp, Artificial Sequence
  Description of Artificial Sequence: Synthetic oligonucleotide
  Epidermal growth factor receptor (EGFR), ERBB1 phosphotyrosine kinase siRNA
tttggtgccacctgcgtgaagaa

SEQ ID NO: 5956 - DNA, 23 bp, Artificial Sequence
  Description of Artificial Sequence: Synthetic oligonucleotide
  Epidermal growth factor receptor (EGFR), ERBB1 phosphotyrosine kinase siRNA
ttggtgccacctgcgtgaagaag

SEQ ID NO: 5957 - DNA, 23 bp, Artificial Sequence
  Description of Artificial Sequence: Synthetic oligonucleotide
  Epidermal growth factor receptor (EGFR), ERBB1 phosphotyrosine kinase siRNA
tggtgccacctgcgtgaagaagt

SEQ ID NO: 5958 - DNA, 23 bp, Artificial Sequence
  Description of Artificial Sequence: Synthetic oligonucleotide
  Epidermal growth factor receptor (EGFR), ERBB1 phosphotyrosine kinase siRNA
ggtgccacctgcgtgaagaagtg

SEQ ID NO: 5959 - DNA, 23 bp, Artificial Sequence
  Description of Artificial Sequence: Synthetic oligonucleotide
  Epidermal growth factor receptor (EGFR), ERBB1 phosphotyrosine kinase siRNA
gtgccacctgcgtgaagaagtgt

SEQ ID NO: 5960 - DNA, 23 bp, Artificial Sequence
  Description of Artificial Sequence: Synthetic oligonucleotide
  Epidermal growth factor receptor (EGFR), ERBB1 phosphotyrosine kinase siRNA
tgccacctgcgtgaagaagtgtc

SEQ ID NO: 5961 - DNA, 23 bp, Artificial Sequence
  Description of Artificial Sequence: Synthetic oligonucleotide
  Epidermal growth factor receptor (EGFR), ERBB1 phosphotyrosine kinase siRNA
gccacctgcgtgaagaagtgtcc

SEQ ID NO: 5962 - DNA, 23 bp, Artificial Sequence
  Description of Artificial Sequence: Synthetic oligonucleotide
  Epidermal growth factor receptor (EGFR), ERBB1 phosphotyrosine kinase siRNA
ccacctgcgtgaagaagtgtccc

SEQ ID NO: 5963 - DNA, 23 bp, Artificial Sequence
  Description of Artificial Sequence: Synthetic oligonucleotide
  Epidermal growth factor receptor (EGFR), ERBB1 phosphotyrosine kinase siRNA
cacctgcgtgaagaagtgtcccc

SEQ ID NO: 5964 - DNA, 23 bp, Artificial Sequence
  Description of Artificial Sequence: Synthetic oligonucleotide
  Epidermal growth factor receptor (EGFR), ERBB1 phosphotyrosine kinase siRNA
acctgcgtgaagaagtgtccccg

SEQ ID NO: 5965 - DNA, 23 bp, Artificial Sequence
  Description of Artificial Sequence: Synthetic oligonucleotide
  Epidermal growth factor receptor (EGFR), ERBB1 phosphotyrosine kinase siRNA
cctgcgtgaagaagtgtccccgt

SEQ ID NO: 5966 - DNA, 23 bp, Artificial Sequence
  Description of Artificial Sequence: Synthetic oligonucleotide
  Epidermal growth factor receptor (EGFR), ERBB1 phosphotyrosine kinase siRNA
ctgcgtgaagaagtgtccccgta

SEQ ID NO: 5967 - DNA, 23 bp, Artificial Sequence
  Description of Artificial Sequence: Synthetic oligonucleotide
  Epidermal growth factor receptor (EGFR), ERBB1 phosphotyrosine kinase siRNA
tgcgtgaagaagtgtccccgtaa

SEQ ID NO: 5968 - DNA, 23 bp, Artificial Sequence
  Description of Artificial Sequence: Synthetic oligonucleotide
  Epidermal growth factor receptor (EGFR), ERBB1 phosphotyrosine kinase siRNA
gcgtgaagaagtgtccccgtaat

SEQ ID NO: 5969 - DNA, 23 bp, Artificial Sequence
  Description of Artificial Sequence: Synthetic oligonucleotide
  Epidermal growth factor receptor (EGFR), ERBB1 phosphotyrosine kinase siRNA
cgtgaagaagtgtccccgtaatt

SEQ ID NO: 5970 - DNA, 23 bp, Artificial Sequence
  Description of Artificial Sequence: Synthetic oligonucleotide
  Epidermal growth factor receptor (EGFR), ERBB1 phosphotyrosine kinase siRNA
gtgaagaagtgtccccgtaatta

SEQ ID NO: 5971 - DNA, 23 bp, Artificial Sequence
  Description of Artificial Sequence: Synthetic oligonucleotide
  Epidermal growth factor receptor (EGFR), ERBB1 phosphotyrosine kinase siRNA
tgaagaagtgtccccgtaattat

SEQ ID NO: 5972 - DNA, 23 bp, Artificial Sequence
  Description of Artificial Sequence: Synthetic oligonucleotide
  Epidermal growth factor receptor (EGFR), ERBB1 phosphotyrosine kinase siRNA
gaagaagtgtccccgtaattatg

SEQ ID NO: 5973 - DNA, 23 bp, Artificial Sequence
  Description of Artificial Sequence: Synthetic oligonucleotide
  Epidermal growth factor receptor (EGFR), ERBB1 phosphotyrosine kinase siRNA
aagaagtgtccccgtaattatgt

SEQ ID NO: 5974 - DNA, 23 bp, Artificial Sequence
  Description of Artificial Sequence: Synthetic oligonucleotide
  Epidermal growth factor receptor (EGFR), ERBB1 phosphotyrosine kinase siRNA
agaagtgtccccgtaattatgtg

SEQ ID NO: 5975 - DNA, 23 bp, Artificial Sequence
  Description of Artificial Sequence: Synthetic oligonucleotide
  Epidermal growth factor receptor (EGFR), ERBB1 phosphotyrosine kinase siRNA
gaagtgtccccgtaattatgtgg

SEQ ID NO: 5976 - DNA, 23 bp, Artificial Sequence
  Description of Artificial Sequence: Synthetic oligonucleotide
  Epidermal growth factor receptor (EGFR), ERBB1 phosphotyrosine kinase siRNA
aagtgtccccgtaattatgtggt

SEQ ID NO: 5977 - DNA, 23 bp, Artificial Sequence
  Description of Artificial Sequence: Synthetic oligonucleotide
  Epidermal growth factor receptor (EGFR), ERBB1 phosphotyrosine kinase siRNA
agtgtccccgtaattatgtggtg

SEQ ID NO: 5978 - DNA, 23 bp, Artificial Sequence
  Description of Artificial Sequence: Synthetic oligonucleotide
  Epidermal growth factor receptor (EGFR), ERBB1 phosphotyrosine kinase siRNA
gtgtccccgtaattatgtggtga

SEQ ID NO: 5979 - DNA, 23 bp, Artificial Sequence
  Description of Artificial Sequence: Synthetic oligonucleotide
  Epidermal growth factor receptor (EGFR), ERBB1 phosphotyrosine kinase siRNA
tgtccccgtaattatgtggtgac

SEQ ID NO: 5980 - DNA, 23 bp, Artificial Sequence
  Description of Artificial Sequence: Synthetic oligonucleotide
  Epidermal growth factor receptor (EGFR), ERBB1 phosphotyrosine kinase siRNA
gtccccgtaattatgtggtgaca

SEQ ID NO: 5981 - DNA, 23 bp, Artificial Sequence
  Description of Artificial Sequence: Synthetic oligonucleotide
  Epidermal growth factor receptor (EGFR), ERBB1 phosphotyrosine kinase siRNA
tccccgtaattatgtggtgacag

SEQ ID NO: 5982 - DNA, 23 bp, Artificial Sequence
  Description of Artificial Sequence: Synthetic oligonucleotide
  Epidermal growth factor receptor (EGFR), ERBB1 phosphotyrosine kinase siRNA
ccccgtaattatgtggtgacaga

SEQ ID NO: 5983 - DNA, 23 bp, Artificial Sequence
  Description of Artificial Sequence: Synthetic oligonucleotide
  Epidermal growth factor receptor (EGFR), ERBB1 phosphotyrosine kinase siRNA
cccgtaattatgtggtgacagat

SEQ ID NO: 5984 - DNA, 23 bp, Artificial Sequence
  Description of Artificial Sequence: Synthetic oligonucleotide
  Epidermal growth factor receptor (EGFR), ERBB1 phosphotyrosine kinase siRNA
ccgtaattatgtggtgacagatc

SEQ ID NO: 5985 - DNA, 23 bp, Artificial Sequence
  Description of Artificial Sequence: Synthetic oligonucleotide
  Epidermal growth factor receptor (EGFR), ERBB1 phosphotyrosine kinase siRNA
cgtaattatgtggtgacagatca

SEQ ID NO: 5986 - DNA, 23 bp, Artificial Sequence
  Description of Artificial Sequence: Synthetic oligonucleotide
  Epidermal growth factor receptor (EGFR), ERBB1 phosphotyrosine kinase siRNA
gtaattatgtggtgacagatcac

SEQ ID NO: 5987 - DNA, 23 bp, Artificial Sequence
  Description of Artificial Sequence: Synthetic oligonucleotide
  Epidermal growth factor receptor (EGFR), ERBB1 phosphotyrosine kinase siRNA
taattatgtggtgacagatcacg

SEQ ID NO: 5988 - DNA, 23 bp, Artificial Sequence
  Description of Artificial Sequence: Synthetic oligonucleotide
  Epidermal growth factor receptor (EGFR), ERBB1 phosphotyrosine kinase siRNA
aattatgtggtgacagatcacgg

SEQ ID NO: 5989 - DNA, 23 bp, Artificial Sequence
  Description of Artificial Sequence: Synthetic oligonucleotide
  Epidermal growth factor receptor (EGFR), ERBB1 phosphotyrosine kinase siRNA
attatgtggtgacagatcacggc

SEQ ID NO: 5990 - DNA, 23 bp, Artificial Sequence
  Description of Artificial Sequence: Synthetic oligonucleotide
  Epidermal growth factor receptor (EGFR), ERBB1 phosphotyrosine kinase siRNA
ttatgtggtgacagatcacggct

SEQ ID NO: 5991 - DNA, 23 bp, Artificial Sequence
  Description of Artificial Sequence: Synthetic oligonucleotide
  Epidermal growth factor receptor (EGFR), ERBB1 phosphotyrosine kinase siRNA
tatgtggtgacagatcacggctc

SEQ ID NO: 5992 - DNA, 23 bp, Artificial Sequence
  Description of Artificial Sequence: Synthetic oligonucleotide
  Epidermal growth factor receptor (EGFR), ERBB1 phosphotyrosine kinase siRNA
atgtggtgacagatcacggctcg

SEQ ID NO: 5993 - DNA, 23 bp, Artificial Sequence
  Description of Artificial Sequence: Synthetic oligonucleotide
  Epidermal growth factor receptor (EGFR), ERBB1 phosphotyrosine kinase siRNA
tgtggtgacagatcacggctcgt

SEQ ID NO: 5994 - DNA, 23 bp, Artificial Sequence
  Description of Artificial Sequence: Synthetic oligonucleotide
  Epidermal growth factor receptor (EGFR), ERBB1 phosphotyrosine kinase siRNA
gtggtgacagatcacggctcgtg

SEQ ID NO: 5995 - DNA, 23 bp, Artificial Sequence
  Description of Artificial Sequence: Synthetic oligonucleotide
  Epidermal growth factor receptor (EGFR), ERBB1 phosphotyrosine kinase siRNA
tggtgacagatcacggctcgtgc

SEQ ID NO: 5996 - DNA, 23 bp, Artificial Sequence
  Description of Artificial Sequence: Synthetic oligonucleotide
  Epidermal growth factor receptor (EGFR), ERBB1 phosphotyrosine kinase siRNA
ggtgacagatcacggctcgtgcg

SEQ ID NO: 5997 - DNA, 23 bp, Artificial Sequence
  Description of Artificial Sequence: Synthetic oligonucleotide
  Epidermal growth factor receptor (EGFR), ERBB1 phosphotyrosine kinase siRNA
gtgacagatcacggctcgtgcgt

SEQ ID NO: 5998 - DNA, 23 bp, Artificial Sequence
  Description of Artificial Sequence: Synthetic oligonucleotide
  Epidermal growth factor receptor (EGFR), ERBB1 phosphotyrosine kinase siRNA
tgacagatcacggctcgtgcgtc

SEQ ID NO: 5999 - DNA, 23 bp, Artificial Sequence
  Description of Artificial Sequence: Synthetic oligonucleotide
  Epidermal growth factor receptor (EGFR), ERBB1 phosphotyrosine kinase siRNA
gacagatcacggctcgtgcgtcc

SEQ ID NO: 6000 - DNA, 23 bp, Artificial Sequence
  Description of Artificial Sequence: Synthetic oligonucleotide
  Epidermal growth factor receptor (EGFR), ERBB1 phosphotyrosine kinase siRNA
acagatcacggctcgtgcgtccg

SEQ ID NO: 6001 - DNA, 23 bp, Artificial Sequence
  Description of Artificial Sequence: Synthetic oligonucleotide
  Epidermal growth factor receptor (EGFR), ERBB1 phosphotyrosine kinase siRNA
cagatcacggctcgtgcgtccga

SEQ ID NO: 6002 - DNA, 23 bp, Artificial Sequence
  Description of Artificial Sequence: Synthetic oligonucleotide
  Epidermal growth factor receptor (EGFR), ERBB1 phosphotyrosine kinase siRNA
agatcacggctcgtgcgtccgag

SEQ ID NO: 6003 - DNA, 23 bp, Artificial Sequence
  Description of Artificial Sequence: Synthetic oligonucleotide
  Epidermal growth factor receptor (EGFR), ERBB1 phosphotyrosine kinase siRNA
gatcacggctcgtgcgtccgagc

SEQ ID NO: 6004 - DNA, 23 bp, Artificial Sequence
  Description of Artificial Sequence: Synthetic oligonucleotide
  Epidermal growth factor receptor (EGFR), ERBB1 phosphotyrosine kinase siRNA
atcacggctcgtgcgtccgagcc

SEQ ID NO: 6005 - DNA, 23 bp, Artificial Sequence
  Description of Artificial Sequence: Synthetic oligonucleotide
  Epidermal growth factor receptor (EGFR), ERBB1 phosphotyrosine kinase siRNA
tcacggctcgtgcgtccgagcct

SEQ ID NO: 6006 - DNA, 23 bp, Artificial Sequence
  Description of Artificial Sequence: Synthetic oligonucleotide
  Epidermal growth factor receptor (EGFR), ERBB1 phosphotyrosine kinase siRNA
cacggctcgtgcgtccgagcctg

SEQ ID NO: 6007 - DNA, 23 bp, Artificial Sequence
  Description of Artificial Sequence: Synthetic oligonucleotide
  Epidermal growth factor receptor (EGFR), ERBB1 phosphotyrosine kinase siRNA
acggctcgtgcgtccgagcctgt

SEQ ID NO: 6008 - DNA, 23 bp, Artificial Sequence
  Description of Artificial Sequence: Synthetic oligonucleotide
  Epidermal growth factor receptor (EGFR), ERBB1 phosphotyrosine kinase siRNA
cggctcgtgcgtccgagcctgtg

SEQ ID NO: 6009 - DNA, 23 bp, Artificial Sequence
  Description of Artificial Sequence: Synthetic oligonucleotide
  Epidermal growth factor receptor (EGFR), ERBB1 phosphotyrosine kinase siRNA
ggctcgtgcgtccgagcctgtgg

SEQ ID NO: 6010 - DNA, 23 bp, Artificial Sequence
  Description of Artificial Sequence: Synthetic oligonucleotide
  Epidermal growth factor receptor (EGFR), ERBB1 phosphotyrosine kinase siRNA
gctcgtgcgtccgagcctgtggg

SEQ ID NO: 6011 - DNA, 23 bp, Artificial Sequence
  Description of Artificial Sequence: Synthetic oligonucleotide
  Epidermal growth factor receptor (EGFR), ERBB1 phosphotyrosine kinase siRNA
ctcgtgcgtccgagcctgtgggg

SEQ ID NO: 6012 - DNA, 23 bp, Artificial Sequence
  Description of Artificial Sequence: Synthetic oligonucleotide
  Epidermal growth factor receptor (EGFR), ERBB1 phosphotyrosine kinase siRNA
tcgtgcgtccgagcctgtggggc

SEQ ID NO: 6013 - DNA, 23 bp, Artificial Sequence
  Description of Artificial Sequence: Synthetic oligonucleotide
  Epidermal growth factor receptor (EGFR), ERBB1 phosphotyrosine kinase siRNA
cgtgcgtccgagcctgtggggcc

SEQ ID NO: 6014 - DNA, 23 bp, Artificial Sequence
  Description of Artificial Sequence: Synthetic oligonucleotide
  Epidermal growth factor receptor (EGFR), ERBB1 phosphotyrosine kinase siRNA
gtgcgtccgagcctgtggggccg

SEQ ID NO: 6015 - DNA, 23 bp, Artificial Sequence
  Description of Artificial Sequence: Synthetic oligonucleotide
  Epidermal growth factor receptor (EGFR), ERBB1 phosphotyrosine kinase siRNA
tgcgtccgagcctgtggggccga

SEQ ID NO: 6016 - DNA, 23 bp, Artificial Sequence
  Description of Artificial Sequence: Synthetic oligonucleotide
  Epidermal growth factor receptor (EGFR), ERBB1 phosphotyrosine kinase siRNA
gcgtccgagcctgtggggccgac

SEQ ID NO: 6017 - DNA, 23 bp, Artificial Sequence
  Description of Artificial Sequence: Synthetic oligonucleotide
  Epidermal growth factor receptor (EGFR), ERBB1 phosphotyrosine kinase siRNA
cgtccgagcctgtggggccgaca

SEQ ID NO: 6018 - DNA, 23 bp, Artificial Sequence
  Description of Artificial Sequence: Synthetic oligonucleotide
  Epidermal growth factor receptor (EGFR), ERBB1 phosphotyrosine kinase siRNA
gtccgagcctgtggggccgacag

SEQ ID NO: 6019 - DNA, 23 bp, Artificial Sequence
  Description of Artificial Sequence: Synthetic oligonucleotide
  Epidermal growth factor receptor (EGFR), ERBB1 phosphotyrosine kinase siRNA
tccgagcctgtggggccgacagc

SEQ ID NO: 6020 - DNA, 23 bp, Artificial Sequence
  Description of Artificial Sequence: Synthetic oligonucleotide
  Epidermal growth factor receptor (EGFR), ERBB1 phosphotyrosine kinase siRNA
ccgagcctgtggggccgacagct

SEQ ID NO: 6021 - DNA, 23 bp, Artificial Sequence
  Description of Artificial Sequence: Synthetic oligonucleotide
  Epidermal growth factor receptor (EGFR), ERBB1 phosphotyrosine kinase siRNA
cgagcctgtggggccgacagcta

SEQ ID NO: 6022 - DNA, 23 bp, Artificial Sequence
  Description of Artificial Sequence: Synthetic oligonucleotide
  Epidermal growth factor receptor (EGFR), ERBB1 phosphotyrosine kinase siRNA
gagcctgtggggccgacagctat

SEQ ID NO: 6023 - DNA, 23 bp, Artificial Sequence
  Description of Artificial Sequence: Synthetic oligonucleotide
  Epidermal growth factor receptor (EGFR), ERBB1 phosphotyrosine kinase siRNA
agcctgtggggccgacagctatg

SEQ ID NO: 6024 - DNA, 23 bp, Artificial Sequence
  Description of Artificial Sequence: Synthetic oligonucleotide
  Epidermal growth factor receptor (EGFR), ERBB1 phosphotyrosine kinase siRNA
gcctgtggggccgacagctatga

SEQ ID NO: 6025 - DNA, 23 bp, Artificial Sequence
  Description of Artificial Sequence: Synthetic oligonucleotide
  Epidermal growth factor receptor (EGFR), ERBB1 phosphotyrosine kinase siRNA
cctgtggggccgacagctatgag

SEQ ID NO: 6026 - DNA, 23 bp, Artificial Sequence
  Description of Artificial Sequence: Synthetic oligonucleotide
  Epidermal growth factor receptor (EGFR), ERBB1 phosphotyrosine kinase siRNA
ctgtggggccgacagctatgaga

SEQ ID NO: 6027 - DNA, 23 bp, Artificial Sequence
  Description of Artificial Sequence: Synthetic oligonucleotide
  Epidermal growth factor receptor (EGFR), ERBB1 phosphotyrosine kinase siRNA
tgtggggccgacagctatgagat

SEQ ID NO: 6028 - DNA, 23 bp, Artificial Sequence
  Description of Artificial Sequence: Synthetic oligonucleotide
  Epidermal growth factor receptor (EGFR), ERBB1 phosphotyrosine kinase siRNA
gtggggccgacagctatgagatg

SEQ ID NO: 6029 - DNA, 23 bp, Artificial Sequence
  Description of Artificial Sequence: Synthetic oligonucleotide
  Epidermal growth factor receptor (EGFR), ERBB1 phosphotyrosine kinase siRNA
tggggccgacagctatgagatgg

SEQ ID NO: 6030 - DNA, 23 bp, Artificial Sequence
  Description of Artificial Sequence: Synthetic oligonucleotide
  Epidermal growth factor receptor (EGFR), ERBB1 phosphotyrosine kinase siRNA
ggggccgacagctatgagatgga

SEQ ID NO: 6031 - DNA, 23 bp, Artificial Sequence
  Description of Artificial Sequence: Synthetic oligonucleotide
  Epidermal growth factor receptor (EGFR), ERBB1 phosphotyrosine kinase siRNA
gggccgacagctatgagatggag

SEQ ID NO: 6032 - DNA, 23 bp, Artificial Sequence
  Description of Artificial Sequence: Synthetic oligonucleotide
  Epidermal growth factor receptor (EGFR), ERBB1 phosphotyrosine kinase siRNA
ggccgacagctatgagatggagg

SEQ ID NO: 6033 - DNA, 23 bp, Artificial Sequence
  Description of Artificial Sequence: Synthetic oligonucleotide
  Epidermal growth factor receptor (EGFR), ERBB1 phosphotyrosine kinase siRNA
gccgacagctatgagatggagga

SEQ ID NO: 6034 - DNA, 23 bp, Artificial Sequence
  Description of Artificial Sequence: Synthetic oligonucleotide
  Epidermal growth factor receptor (EGFR), ERBB1 phosphotyrosine kinase siRNA
ccgacagctatgagatggaggaa

SEQ ID NO: 6035 - DNA, 23 bp, Artificial Sequence
  Description of Artificial Sequence: Synthetic oligonucleotide
  Epidermal growth factor receptor (EGFR), ERBB1 phosphotyrosine kinase siRNA
cgacagctatgagatggaggaag

SEQ ID NO: 6036 - DNA, 23 bp, Artificial Sequence
  Description of Artificial Sequence: Synthetic oligonucleotide
  Epidermal growth factor receptor (EGFR), ERBB1 phosphotyrosine kinase siRNA
gacagctatgagatggaggaaga

SEQ ID NO: 6037 - DNA, 23 bp, Artificial Sequence
  Description of Artificial Sequence: Synthetic oligonucleotide
  Epidermal growth factor receptor (EGFR), ERBB1 phosphotyrosine kinase siRNA
acagctatgagatggaggaagac

SEQ ID NO: 6038 - DNA, 23 bp, Artificial Sequence
  Description of Artificial Sequence: Synthetic oligonucleotide
  Epidermal growth factor receptor (EGFR), ERBB1 phosphotyrosine kinase siRNA
cagctatgagatggaggaagacg

SEQ ID NO: 6039 - DNA, 23 bp, Artificial Sequence
  Description of Artificial Sequence: Synthetic oligonucleotide
  Epidermal growth factor receptor (EGFR), ERBB1 phosphotyrosine kinase siRNA
agctatgagatggaggaagacgg

SEQ ID NO: 6040 - DNA, 23 bp, Artificial Sequence
  Description of Artificial Sequence: Synthetic oligonucleotide
  Epidermal growth factor receptor (EGFR), ERBB1 phosphotyrosine kinase siRNA
gctatgagatggaggaagacggc

SEQ ID NO: 6041 - DNA, 23 bp, Artificial Sequence
  Description of Artificial Sequence: Synthetic oligonucleotide
  Epidermal growth factor receptor (EGFR), ERBB1 phosphotyrosine kinase siRNA
ctatgagatggaggaagacggcg

SEQ ID NO: 6042 - DNA, 23 bp, Artificial Sequence
  Description of Artificial Sequence: Synthetic oligonucleotide
  Epidermal growth factor receptor (EGFR), ERBB1 phosphotyrosine kinase siRNA
tatgagatggaggaagacggcgt

SEQ ID NO: 6043 - DNA, 23 bp, Artificial Sequence
  Description of Artificial Sequence: Synthetic oligonucleotide
  Epidermal growth factor receptor (EGFR), ERBB1 phosphotyrosine kinase siRNA
atgagatggaggaagacggcgtc

SEQ ID NO: 6044 - DNA, 23 bp, Artificial Sequence
  Description of Artificial Sequence: Synthetic oligonucleotide
  Epidermal growth factor receptor (EGFR), ERBB1 phosphotyrosine kinase siRNA
tgagatggaggaagacggcgtcc

SEQ ID NO: 6045 - DNA, 23 bp, Artificial Sequence
  Description of Artificial Sequence: Synthetic oligonucleotide
  Epidermal growth factor receptor (EGFR), ERBB1 phosphotyrosine kinase siRNA
gagatggaggaagacggcgtccg

SEQ ID NO: 6046 - DNA, 23 bp, Artificial Sequence
  Description of Artificial Sequence: Synthetic oligonucleotide
  Epidermal growth factor receptor (EGFR), ERBB1 phosphotyrosine kinase siRNA
agatggaggaagacggcgtccgc

SEQ ID NO: 6047 - DNA, 23 bp, Artificial Sequence
  Description of Artificial Sequence: Synthetic oligonucleotide
  Epidermal growth factor receptor (EGFR), ERBB1 phosphotyrosine kinase siRNA
gatggaggaagacggcgtccgca

SEQ ID NO: 6048 - DNA, 23 bp, Artificial Sequence
  Description of Artificial Sequence: Synthetic oligonucleotide
  Epidermal growth factor receptor (EGFR), ERBB1 phosphotyrosine kinase siRNA
atggaggaagacggcgtccgcaa

SEQ ID NO: 6049 - DNA, 23 bp, Artificial Sequence
  Description of Artificial Sequence: Synthetic oligonucleotide
  Epidermal growth factor receptor (EGFR), ERBB1 phosphotyrosine kinase siRNA
tggaggaagacggcgtccgcaag

SEQ ID NO: 6050 - DNA, 23 bp, Artificial Sequence
  Description of Artificial Sequence: Synthetic oligonucleotide
  Epidermal growth factor receptor (EGFR), ERBB1 phosphotyrosine kinase siRNA
ggaggaagacggcgtccgcaagt

SEQ ID NO: 6051 - DNA, 23 bp, Artificial Sequence
  Description of Artificial Sequence: Synthetic oligonucleotide
  Epidermal growth factor receptor (EGFR), ERBB1 phosphotyrosine kinase siRNA
gaggaagacggcgtccgcaagtg

SEQ ID NO: 6052 - DNA, 23 bp, Artificial Sequence
  Description of Artificial Sequence: Synthetic oligonucleotide
  Epidermal growth factor receptor (EGFR), ERBB1 phosphotyrosine kinase siRNA
aggaagacggcgtccgcaagtgt

SEQ ID NO: 6053 - DNA, 23 bp, Artificial Sequence
  Description of Artificial Sequence: Synthetic oligonucleotide
  Epidermal growth factor receptor (EGFR), ERBB1 phosphotyrosine kinase siRNA
ggaagacggcgtccgcaagtgta

SEQ ID NO: 6054 - DNA, 23 bp, Artificial Sequence
  Description of Artificial Sequence: Synthetic oligonucleotide
  Epidermal growth factor receptor (EGFR), ERBB1 phosphotyrosine kinase siRNA
gaagacggcgtccgcaagtgtaa

SEQ ID NO: 6055 - DNA, 23 bp, Artificial Sequence
  Description of Artificial Sequence: Synthetic oligonucleotide
  Epidermal growth factor receptor (EGFR), ERBB1 phosphotyrosine kinase siRNA
aagacggcgtccgcaagtgtaag

SEQ ID NO: 6056 - DNA, 23 bp, Artificial Sequence
  Description of Artificial Sequence: Synthetic oligonucleotide
  Epidermal growth factor receptor (EGFR), ERBB1 phosphotyrosine kinase siRNA
agacggcgtccgcaagtgtaaga

SEQ ID NO: 6057 - DNA, 23 bp, Artificial Sequence
  Description of Artificial Sequence: Synthetic oligonucleotide
  Epidermal growth factor receptor (EGFR), ERBB1 phosphotyrosine kinase siRNA
gacggcgtccgcaagtgtaagaa

SEQ ID NO: 6058 - DNA, 23 bp, Artificial Sequence
  Description of Artificial Sequence: Synthetic oligonucleotide
  Epidermal growth factor receptor (EGFR), ERBB1 phosphotyrosine kinase siRNA
acggcgtccgcaagtgtaagaag

SEQ ID NO: 6059 - DNA, 23 bp, Artificial Sequence
  Description of Artificial Sequence: Synthetic oligonucleotide
  Epidermal growth factor receptor (EGFR), ERBB1 phosphotyrosine kinase siRNA
cggcgtccgcaagtgtaagaagt

SEQ ID NO: 6060 - DNA, 23 bp, Artificial Sequence
  Description of Artificial Sequence: Synthetic oligonucleotide
  Epidermal growth factor receptor (EGFR), ERBB1 phosphotyrosine kinase siRNA
ggcgtccgcaagtgtaagaagtg

SEQ ID NO: 6061 - DNA, 23 bp, Artificial Sequence
  Description of Artificial Sequence: Synthetic oligonucleotide
  Epidermal growth factor receptor (EGFR), ERBB1 phosphotyrosine kinase siRNA
gcgtccgcaagtgtaagaagtgc

SEQ ID NO: 6062 - DNA, 23 bp, Artificial Sequence
  Description of Artificial Sequence: Synthetic oligonucleotide
  Epidermal growth factor receptor (EGFR), ERBB1 phosphotyrosine kinase siRNA
cgtccgcaagtgtaagaagtgcg

SEQ ID NO: 6063 - DNA, 23 bp, Artificial Sequence
  Description of Artificial Sequence: Synthetic oligonucleotide
  Epidermal growth factor receptor (EGFR), ERBB1 phosphotyrosine kinase siRNA
gtccgcaagtgtaagaagtgcga

SEQ ID NO: 6064 - DNA, 23 bp, Artificial Sequence
  Description of Artificial Sequence: Synthetic oligonucleotide
  Epidermal growth factor receptor (EGFR), ERBB1 phosphotyrosine kinase siRNA
tccgcaagtgtaagaagtgcgaa

SEQ ID NO: 6065 - DNA, 23 bp, Artificial Sequence
  Description of Artificial Sequence: Synthetic oligonucleotide
  Epidermal growth factor receptor (EGFR), ERBB1 phosphotyrosine kinase siRNA
ccgcaagtgtaagaagtgcgaag

SEQ ID NO: 6066 - DNA, 23 bp, Artificial Sequence
  Description of Artificial Sequence: Synthetic oligonucleotide
  Epidermal growth factor receptor (EGFR), ERBB1 phosphotyrosine kinase siRNA
cgcaagtgtaagaagtgcgaagg

SEQ ID NO: 6067 - DNA, 23 bp, Artificial Sequence
  Description of Artificial Sequence: Synthetic oligonucleotide
  Epidermal growth factor receptor (EGFR), ERBB1 phosphotyrosine kinase siRNA
gcaagtgtaagaagtgcgaaggg

SEQ ID NO: 6068 - DNA, 23 bp, Artificial Sequence
  Description of Artificial Sequence: Synthetic oligonucleotide
  Epidermal growth factor receptor (EGFR), ERBB1 phosphotyrosine kinase siRNA
caagtgtaagaagtgcgaagggc

SEQ ID NO: 6069 - DNA, 23 bp, Artificial Sequence
  Description of Artificial Sequence: Synthetic oligonucleotide
  Epidermal growth factor receptor (EGFR), ERBB1 phosphotyrosine kinase siRNA
aagtgtaagaagtgcgaagggcc

SEQ ID NO: 6070 - DNA, 23 bp, Artificial Sequence
  Description of Artificial Sequence: Synthetic oligonucleotide
  Epidermal growth factor receptor (EGFR), ERBB1 phosphotyrosine kinase siRNA
agtgtaagaagtgcgaagggcct

SEQ ID NO: 6071 - DNA, 23 bp, Artificial Sequence
  Description of Artificial Sequence: Synthetic oligonucleotide
  Epidermal growth factor receptor (EGFR), ERBB1 phosphotyrosine kinase siRNA
gtgtaagaagtgcgaagggcctt

SEQ ID NO: 6072 - DNA, 23 bp, Artificial Sequence
  Description of Artificial Sequence: Synthetic oligonucleotide
  Epidermal growth factor receptor (EGFR), ERBB1 phosphotyrosine kinase siRNA
tgtaagaagtgcgaagggccttg

SEQ ID NO: 6073 - DNA, 23 bp, Artificial Sequence
  Description of Artificial Sequence: Synthetic oligonucleotide
  Epidermal growth factor receptor (EGFR), ERBB1 phosphotyrosine kinase siRNA
gtaagaagtgcgaagggccttgc

SEQ ID NO: 6074 - DNA, 23 bp, Artificial Sequence
  Description of Artificial Sequence: Synthetic oligonucleotide
  Epidermal growth factor receptor (EGFR), ERBB1 phosphotyrosine kinase siRNA
taagaagtgcgaagggccttgcc

SEQ ID NO: 6075 - DNA, 23 bp, Artificial Sequence
  Description of Artificial Sequence: Synthetic oligonucleotide
  Epidermal growth factor receptor (EGFR), ERBB1 phosphotyrosine kinase siRNA
aagaagtgcgaagggccttgccg

SEQ ID NO: 6076 - DNA, 23 bp, Artificial Sequence
  Description of Artificial Sequence: Synthetic oligonucleotide
  Epidermal growth factor receptor (EGFR), ERBB1 phosphotyrosine kinase siRNA
agaagtgcgaagggccttgccgc

SEQ ID NO: 6077 - DNA, 23 bp, Artificial Sequence
  Description of Artificial Sequence: Synthetic oligonucleotide
  Epidermal growth factor receptor (EGFR), ERBB1 phosphotyrosine kinase siRNA
gaagtgcgaagggccttgccgca

SEQ ID NO: 6078 - DNA, 23 bp, Artificial Sequence
  Description of Artificial Sequence: Synthetic oligonucleotide
  Epidermal growth factor receptor (EGFR), ERBB1 phosphotyrosine kinase siRNA
aagtgcgaagggccttgccgcaa

SEQ ID NO: 6079 - DNA, 23 bp, Artificial Sequence
  Description of Artificial Sequence: Synthetic oligonucleotide
  Epidermal growth factor receptor (EGFR), ERBB1 phosphotyrosine kinase siRNA
agtgcgaagggccttgccgcaaa

SEQ ID NO: 6080 - DNA, 23 bp, Artificial Sequence
  Description of Artificial Sequence: Synthetic oligonucleotide
  Epidermal growth factor receptor (EGFR), ERBB1 phosphotyrosine kinase siRNA
gtgcgaagggccttgccgcaaag

SEQ ID NO: 6081 - DNA, 23 bp, Artificial Sequence
  Description of Artificial Sequence: Synthetic oligonucleotide
  Epidermal growth factor receptor (EGFR), ERBB1 phosphotyrosine kinase siRNA
tgcgaagggccttgccgcaaagt

SEQ ID NO: 6082 - DNA, 23 bp, Artificial Sequence
  Description of Artificial Sequence: Synthetic oligonucleotide
  Epidermal growth factor receptor (EGFR), ERBB1 phosphotyrosine kinase siRNA
gcgaagggccttgccgcaaagtg

SEQ ID NO: 6083 - DNA, 23 bp, Artificial Sequence
  Description of Artificial Sequence: Synthetic oligonucleotide
  Epidermal growth factor receptor (EGFR), ERBB1 phosphotyrosine kinase siRNA
cgaagggccttgccgcaaagtgt

SEQ ID NO: 6084 - DNA, 23 bp, Artificial Sequence
  Description of Artificial Sequence: Synthetic oligonucleotide
  Epidermal growth factor receptor (EGFR), ERBB1 phosphotyrosine kinase siRNA
gaagggccttgccgcaaagtgtg

SEQ ID NO: 6085 - DNA, 23 bp, Artificial Sequence
  Description of Artificial Sequence: Synthetic oligonucleotide
  Epidermal growth factor receptor (EGFR), ERBB1 phosphotyrosine kinase siRNA
aagggccttgccgcaaagtgtgt

SEQ ID NO: 6086 - DNA, 23 bp, Artificial Sequence
  Description of Artificial Sequence: Synthetic oligonucleotide
  Epidermal growth factor receptor (EGFR), ERBB1 phosphotyrosine kinase siRNA
agggccttgccgcaaagtgtgta

SEQ ID NO: 6087 - DNA, 23 bp, Artificial Sequence
  Description of Artificial Sequence: Synthetic oligonucleotide
  Epidermal growth factor receptor (EGFR), ERBB1 phosphotyrosine kinase siRNA
gggccttgccgcaaagtgtgtaa

SEQ ID NO: 6088 - DNA, 23 bp, Artificial Sequence
  Description of Artificial Sequence: Synthetic oligonucleotide
  Epidermal growth factor receptor (EGFR), ERBB1 phosphotyrosine kinase siRNA
ggccttgccgcaaagtgtgtaac

SEQ ID NO: 6089 - DNA, 23 bp, Artificial Sequence
  Description of Artificial Sequence: Synthetic oligonucleotide
  Epidermal growth factor receptor (EGFR), ERBB1 phosphotyrosine kinase siRNA
gccttgccgcaaagtgtgtaacg

SEQ ID NO: 6090 - DNA, 23 bp, Artificial Sequence
  Description of Artificial Sequence: Synthetic oligonucleotide
  Epidermal growth factor receptor (EGFR), ERBB1 phosphotyrosine kinase siRNA
ccttgccgcaaagtgtgtaacgg

SEQ ID NO: 6091 - DNA, 23 bp, Artificial Sequence
  Description of Artificial Sequence: Synthetic oligonucleotide
  Epidermal growth factor receptor (EGFR), ERBB1 phosphotyrosine kinase siRNA
cttgccgcaaagtgtgtaacgga

SEQ ID NO: 6092 - DNA, 23 bp, Artificial Sequence
  Description of Artificial Sequence: Synthetic oligonucleotide
  Epidermal growth factor receptor (EGFR), ERBB1 phosphotyrosine kinase siRNA
ttgccgcaaagtgtgtaacggaa

SEQ ID NO: 6093 - DNA, 23 bp, Artificial Sequence
  Description of Artificial Sequence: Synthetic oligonucleotide
  Epidermal growth factor receptor (EGFR), ERBB1 phosphotyrosine kinase siRNA
tgccgcaaagtgtgtaacggaat

SEQ ID NO: 6094 - DNA, 23 bp, Artificial Sequence
  Description of Artificial Sequence: Synthetic oligonucleotide
  Epidermal growth factor receptor (EGFR), ERBB1 phosphotyrosine kinase siRNA
gccgcaaagtgtgtaacggaata

SEQ ID NO: 6095 - DNA, 23 bp, Artificial Sequence
  Description of Artificial Sequence: Synthetic oligonucleotide
  Epidermal growth factor receptor (EGFR), ERBB1 phosphotyrosine kinase siRNA
ccgcaaagtgtgtaacggaatag

SEQ ID NO: 6096 - DNA, 23 bp, Artificial Sequence
  Description of Artificial Sequence: Synthetic oligonucleotide
  Epidermal growth factor receptor (EGFR), ERBB1 phosphotyrosine kinase siRNA
cgcaaagtgtgtaacggaatagg

SEQ ID NO: 6097 - DNA, 23 bp, Artificial Sequence
  Description of Artificial Sequence: Synthetic oligonucleotide
  Epidermal growth factor receptor (EGFR), ERBB1 phosphotyrosine kinase siRNA
gcaaagtgtgtaacggaataggt

SEQ ID NO: 6098 - DNA, 23 bp, Artificial Sequence
  Description of Artificial Sequence: Synthetic oligonucleotide
  Epidermal growth factor receptor (EGFR), ERBB1 phosphotyrosine kinase siRNA
caaagtgtgtaacggaataggta

SEQ ID NO: 6099 - DNA, 23 bp, Artificial Sequence
  Description of Artificial Sequence: Synthetic oligonucleotide
  Epidermal growth factor receptor (EGFR), ERBB1 phosphotyrosine kinase siRNA
aaagtgtgtaacggaataggtat

SEQ ID NO: 6100 - DNA, 23 bp, Artificial Sequence
  Description of Artificial Sequence: Synthetic oligonucleotide
  Epidermal growth factor receptor (EGFR), ERBB1 phosphotyrosine kinase siRNA
aagtgtgtaacggaataggtatt

SEQ ID NO: 6101 - DNA, 23 bp, Artificial Sequence
  Description of Artificial Sequence: Synthetic oligonucleotide
  Epidermal growth factor receptor (EGFR), ERBB1 phosphotyrosine kinase siRNA
agtgtgtaacggaataggtattg

SEQ ID NO: 6102 - DNA, 23 bp, Artificial Sequence
  Description of Artificial Sequence: Synthetic oligonucleotide
  Epidermal growth factor receptor (EGFR), ERBB1 phosphotyrosine kinase siRNA
gtgtgtaacggaataggtattgg

SEQ ID NO: 6103 - DNA, 23 bp, Artificial Sequence
  Description of Artificial Sequence: Synthetic oligonucleotide
  Epidermal growth factor receptor (EGFR), ERBB1 phosphotyrosine kinase siRNA
tgtgtaacggaataggtattggt

SEQ ID NO: 6104 - DNA, 23 bp, Artificial Sequence
  Description of Artificial Sequence: Synthetic oligonucleotide
  Epidermal growth factor receptor (EGFR), ERBB1 phosphotyrosine kinase siRNA
gtgtaacggaataggtattggtg

SEQ ID NO: 6105 - DNA, 23 bp, Artificial Sequence
  Description of Artificial Sequence: Synthetic oligonucleotide
  Epidermal growth factor receptor (EGFR), ERBB1 phosphotyrosine kinase siRNA
tgtaacggaataggtattggtga

SEQ ID NO: 6106 - DNA, 23 bp, Artificial Sequence
  Description of Artificial Sequence: Synthetic oligonucleotide
  Epidermal growth factor receptor (EGFR), ERBB1 phosphotyrosine kinase siRNA
gtaacggaataggtattggtgaa

SEQ ID NO: 6107 - DNA, 23 bp, Artificial Sequence
  Description of Artificial Sequence: Synthetic oligonucleotide
  Epidermal growth factor receptor (EGFR), ERBB1 phosphotyrosine kinase siRNA
taacggaataggtattggtgaat

SEQ ID NO: 6108 - DNA, 23 bp, Artificial Sequence
  Description of Artificial Sequence: Synthetic oligonucleotide
  Epidermal growth factor receptor (EGFR), ERBB1 phosphotyrosine kinase siRNA
aacggaataggtattggtgaatt

SEQ ID NO: 6109 - DNA, 23 bp, Artificial Sequence
  Description of Artificial Sequence: Synthetic oligonucleotide
  Epidermal growth factor receptor (EGFR), ERBB1 phosphotyrosine kinase siRNA
acggaataggtattggtgaattt

SEQ ID NO: 6110 - DNA, 23 bp, Artificial Sequence
  Description of Artificial Sequence: Synthetic oligonucleotide
  Epidermal growth factor receptor (EGFR), ERBB1 phosphotyrosine kinase siRNA
cggaataggtattggtgaattta

SEQ ID NO: 6111 - DNA, 23 bp, Artificial Sequence
  Description of Artificial Sequence: Synthetic oligonucleotide
  Epidermal growth factor receptor (EGFR), ERBB1 phosphotyrosine kinase siRNA
ggaataggtattggtgaatttaa

SEQ ID NO: 6112 - DNA, 23 bp, Artificial Sequence
  Description of Artificial Sequence: Synthetic oligonucleotide
  Epidermal growth factor receptor (EGFR), ERBB1 phosphotyrosine kinase siRNA
gaataggtattggtgaatttaaa

SEQ ID NO: 6113 - DNA, 23 bp, Artificial Sequence
  Description of Artificial Sequence: Synthetic oligonucleotide
  Epidermal growth factor receptor (EGFR), ERBB1 phosphotyrosine kinase siRNA
aataggtattggtgaatttaaag

SEQ ID NO: 6114 - DNA, 23 bp, Artificial Sequence
  Description of Artificial Sequence: Synthetic oligonucleotide
  Epidermal growth factor receptor (EGFR), ERBB1 phosphotyrosine kinase siRNA
ataggtattggtgaatttaaaga

SEQ ID NO: 6115 - DNA, 23 bp, Artificial Sequence
  Description of Artificial Sequence: Synthetic oligonucleotide
  Epidermal growth factor receptor (EGFR), ERBB1 phosphotyrosine kinase siRNA
taggtattggtgaatttaaagac

SEQ ID NO: 6116 - DNA, 23 bp, Artificial Sequence
  Description of Artificial Sequence: Synthetic oligonucleotide
  Epidermal growth factor receptor (EGFR), ERBB1 phosphotyrosine kinase siRNA
aggtattggtgaatttaaagact

SEQ ID NO: 6117 - DNA, 23 bp, Artificial Sequence
  Description of Artificial Sequence: Synthetic oligonucleotide
  Epidermal growth factor receptor (EGFR), ERBB1 phosphotyrosine kinase siRNA
ggtattggtgaatttaaagactc

SEQ ID NO: 6118 - DNA, 23 bp, Artificial Sequence
  Description of Artificial Sequence: Synthetic oligonucleotide
  Epidermal growth factor receptor (EGFR), ERBB1 phosphotyrosine kinase siRNA
gtattggtgaatttaaagactca

SEQ ID NO: 6119 - DNA, 23 bp, Artificial Sequence
  Description of Artificial Sequence: Synthetic oligonucleotide
  Epidermal growth factor receptor (EGFR), ERBB1 phosphotyrosine kinase siRNA
tattggtgaatttaaagactcac

SEQ ID NO: 6120 - DNA, 23 bp, Artificial Sequence
  Description of Artificial Sequence: Synthetic oligonucleotide
  Epidermal growth factor receptor (EGFR), ERBB1 phosphotyrosine kinase siRNA
attggtgaatttaaagactcact

SEQ ID NO: 6121 - DNA, 23 bp, Artificial Sequence
  Description of Artificial Sequence: Synthetic oligonucleotide
  Epidermal growth factor receptor (EGFR), ERBB1 phosphotyrosine kinase siRNA
ttggtgaatttaaagactcactc

SEQ ID NO: 6122 - DNA, 23 bp, Artificial Sequence
  Description of Artificial Sequence: Synthetic oligonucleotide
  Epidermal growth factor receptor (EGFR), ERBB1 phosphotyrosine kinase siRNA
tggtgaatttaaagactcactct

SEQ ID NO: 6123 - DNA, 23 bp, Artificial Sequence
  Description of Artificial Sequence: Synthetic oligonucleotide
  Epidermal growth factor receptor (EGFR), ERBB1 phosphotyrosine kinase siRNA
ggtgaatttaaagactcactctc

SEQ ID NO: 6124 - DNA, 23 bp, Artificial Sequence
  Description of Artificial Sequence: Synthetic oligonucleotide
  Epidermal growth factor receptor (EGFR), ERBB1 phosphotyrosine kinase siRNA
gtgaatttaaagactcactctcc

SEQ ID NO: 6125 - DNA, 23 bp, Artificial Sequence
  Description of Artificial Sequence: Synthetic oligonucleotide
  Epidermal growth factor receptor (EGFR), ERBB1 phosphotyrosine kinase siRNA
tgaatttaaagactcactctcca

SEQ ID NO: 6126 - DNA, 23 bp, Artificial Sequence
  Description of Artificial Sequence: Synthetic oligonucleotide
  Epidermal growth factor receptor (EGFR), ERBB1 phosphotyrosine kinase siRNA
gaatttaaagactcactctccat

SEQ ID NO: 6127 - DNA, 23 bp, Artificial Sequence
  Description of Artificial Sequence: Synthetic oligonucleotide
  Epidermal growth factor receptor (EGFR), ERBB1 phosphotyrosine kinase siRNA
aatttaaagactcactctccata

SEQ ID NO: 6128 - DNA, 23 bp, Artificial Sequence
  Description of Artificial Sequence: Synthetic oligonucleotide
  Epidermal growth factor receptor (EGFR), ERBB1 phosphotyrosine kinase siRNA
atttaaagactcactctccataa

SEQ ID NO: 6129 - DNA, 23 bp, Artificial Sequence
  Description of Artificial Sequence: Synthetic oligonucleotide
  Epidermal growth factor receptor (EGFR), ERBB1 phosphotyrosine kinase siRNA
tttaaagactcactctccataaa

SEQ ID NO: 6130 - DNA, 23 bp, Artificial Sequence
  Description of Artificial Sequence: Synthetic oligonucleotide
  Epidermal growth factor receptor (EGFR), ERBB1 phosphotyrosine kinase siRNA
ttaaagactcactctccataaat

SEQ ID NO: 6131 - DNA, 23 bp, Artificial Sequence
  Description of Artificial Sequence: Synthetic oligonucleotide
  Epidermal growth factor receptor (EGFR), ERBB1 phosphotyrosine kinase siRNA
taaagactcactctccataaatg

SEQ ID NO: 6132 - DNA, 23 bp, Artificial Sequence
  Description of Artificial Sequence: Synthetic oligonucleotide
  Epidermal growth factor receptor (EGFR), ERBB1 phosphotyrosine kinase siRNA
aaagactcactctccataaatgc

SEQ ID NO: 6133 - DNA, 23 bp, Artificial Sequence
  Description of Artificial Sequence: Synthetic oligonucleotide
  Epidermal growth factor receptor (EGFR), ERBB1 phosphotyrosine kinase siRNA
aagactcactctccataaatgct

SEQ ID NO: 6134 - DNA, 23 bp, Artificial Sequence
  Description of Artificial Sequence: Synthetic oligonucleotide
  Epidermal growth factor receptor (EGFR), ERBB1 phosphotyrosine kinase siRNA
agactcactctccataaatgcta

SEQ ID NO: 6135 - DNA, 23 bp, Artificial Sequence
  Description of Artificial Sequence: Synthetic oligonucleotide
  Epidermal growth factor receptor (EGFR), ERBB1 phosphotyrosine kinase siRNA
gactcactctccataaatgctac

SEQ ID NO: 6136 - DNA, 23 bp, Artificial Sequence
  Description of Artificial Sequence: Synthetic oligonucleotide
  Epidermal growth factor receptor (EGFR), ERBB1 phosphotyrosine kinase siRNA
actcactctccataaatgctacg

SEQ ID NO: 6137 - DNA, 23 bp, Artificial Sequence
  Description of Artificial Sequence: Synthetic oligonucleotide
  Epidermal growth factor receptor (EGFR), ERBB1 phosphotyrosine kinase siRNA
ctcactctccataaatgctacga

SEQ ID NO: 6138 - DNA, 23 bp, Artificial Sequence
  Description of Artificial Sequence: Synthetic oligonucleotide
  Epidermal growth factor receptor (EGFR), ERBB1 phosphotyrosine kinase siRNA
tcactctccataaatgctacgaa

SEQ ID NO: 6139 - DNA, 23 bp, Artificial Sequence
  Description of Artificial Sequence: Synthetic oligonucleotide
  Epidermal growth factor receptor (EGFR), ERBB1 phosphotyrosine kinase siRNA
cactctccataaatgctacgaat

SEQ ID NO: 6140 - DNA, 23 bp, Artificial Sequence
  Description of Artificial Sequence: Synthetic oligonucleotide
  Epidermal growth factor receptor (EGFR), ERBB1 phosphotyrosine kinase siRNA
actctccataaatgctacgaata

SEQ ID NO: 6141 - DNA, 23 bp, Artificial Sequence
  Description of Artificial Sequence: Synthetic oligonucleotide
  Epidermal growth factor receptor (EGFR), ERBB1 phosphotyrosine kinase siRNA
ctctccataaatgctacgaatat

SEQ ID NO: 6142 - DNA, 23 bp, Artificial Sequence
  Description of Artificial Sequence: Synthetic oligonucleotide
  Epidermal growth factor receptor (EGFR), ERBB1 phosphotyrosine kinase siRNA
tctccataaatgctacgaatatt

SEQ ID NO: 6143 - DNA, 23 bp, Artificial Sequence
  Description of Artificial Sequence: Synthetic oligonucleotide
  Epidermal growth factor receptor (EGFR), ERBB1 phosphotyrosine kinase siRNA
ctccataaatgctacgaatatta

SEQ ID NO: 6144 - DNA, 23 bp, Artificial Sequence
  Description of Artificial Sequence: Synthetic oligonucleotide
  Epidermal growth factor receptor (EGFR), ERBB1 phosphotyrosine kinase siRNA
tccataaatgctacgaatattaa

SEQ ID NO: 6145 - DNA, 23 bp, Artificial Sequence
  Description of Artificial Sequence: Synthetic oligonucleotide
  Epidermal growth factor receptor (EGFR), ERBB1 phosphotyrosine kinase siRNA
ccataaatgctacgaatattaaa

SEQ ID NO: 6146 - DNA, 23 bp, Artificial Sequence
  Description of Artificial Sequence: Synthetic oligonucleotide
  Epidermal growth factor receptor (EGFR), ERBB1 phosphotyrosine kinase siRNA
cataaatgctacgaatattaaac

SEQ ID NO: 6147 - DNA, 23 bp, Artificial Sequence
  Description of Artificial Sequence: Synthetic oligonucleotide
  Epidermal growth factor receptor (EGFR), ERBB1 phosphotyrosine kinase siRNA
ataaatgctacgaatattaaaca

SEQ ID NO: 6148 - DNA, 23 bp, Artificial Sequence
  Description of Artificial Sequence: Synthetic oligonucleotide
  Epidermal growth factor receptor (EGFR), ERBB1 phosphotyrosine kinase siRNA
taaatgctacgaatattaaacac

SEQ ID NO: 6149 - DNA, 23 bp, Artificial Sequence
  Description of Artificial Sequence: Synthetic oligonucleotide
  Epidermal growth factor receptor (EGFR), ERBB1 phosphotyrosine kinase siRNA
aaatgctacgaatattaaacact

SEQ ID NO: 6150 - DNA, 23 bp, Artificial Sequence
  Description of Artificial Sequence: Synthetic oligonucleotide
  Epidermal growth factor receptor (EGFR), ERBB1 phosphotyrosine kinase siRNA
aatgctacgaatattaaacactt

SEQ ID NO: 6151 - DNA, 23 bp, Artificial Sequence
  Description of Artificial Sequence: Synthetic oligonucleotide
  Epidermal growth factor receptor (EGFR), ERBB1 phosphotyrosine kinase siRNA
atgctacgaatattaaacacttc

SEQ ID NO: 6152 - DNA, 23 bp, Artificial Sequence
  Description of Artificial Sequence: Synthetic oligonucleotide
  Epidermal growth factor receptor (EGFR), ERBB1 phosphotyrosine kinase siRNA
tgctacgaatattaaacacttca

SEQ ID NO: 6153 - DNA, 23 bp, Artificial Sequence
  Description of Artificial Sequence: Synthetic oligonucleotide
  Epidermal growth factor receptor (EGFR), ERBB1 phosphotyrosine kinase siRNA
gctacgaatattaaacacttcaa

SEQ ID NO: 6154 - DNA, 23 bp, Artificial Sequence
  Description of Artificial Sequence: Synthetic oligonucleotide
  Epidermal growth factor receptor (EGFR), ERBB1 phosphotyrosine kinase siRNA
ctacgaatattaaacacttcaaa

SEQ ID NO: 6155 - DNA, 23 bp, Artificial Sequence
  Description of Artificial Sequence: Synthetic oligonucleotide
  Epidermal growth factor receptor (EGFR), ERBB1 phosphotyrosine kinase siRNA
tacgaatattaaacacttcaaaa

SEQ ID NO: 6156 - DNA, 23 bp, Artificial Sequence
  Description of Artificial Sequence: Synthetic oligonucleotide
  Epidermal growth factor receptor (EGFR), ERBB1 phosphotyrosine kinase siRNA
acgaatattaaacacttcaaaaa

SEQ ID NO: 6157 - DNA, 23 bp, Artificial Sequence
  Description of Artificial Sequence: Synthetic oligonucleotide
  Epidermal growth factor receptor (EGFR), ERBB1 phosphotyrosine kinase siRNA
cgaatattaaacacttcaaaaac

SEQ ID NO: 6158 - DNA, 23 bp, Artificial Sequence
  Description of Artificial Sequence: Synthetic oligonucleotide
  Epidermal growth factor receptor (EGFR), ERBB1 phosphotyrosine kinase siRNA
gaatattaaacacttcaaaaact

SEQ ID NO: 6159 - DNA, 23 bp, Artificial Sequence
  Description of Artificial Sequence: Synthetic oligonucleotide
  Epidermal growth factor receptor (EGFR), ERBB1 phosphotyrosine kinase siRNA
aatattaaacacttcaaaaactg

SEQ ID NO: 6160 - DNA, 23 bp, Artificial Sequence
  Description of Artificial Sequence: Synthetic oligonucleotide
  Epidermal growth factor receptor (EGFR), ERBB1 phosphotyrosine kinase siRNA
atattaaacacttcaaaaactgc

SEQ ID NO: 6161 - DNA, 23 bp, Artificial Sequence
  Description of Artificial Sequence: Synthetic oligonucleotide
  Epidermal growth factor receptor (EGFR), ERBB1 phosphotyrosine kinase siRNA
tattaaacacttcaaaaactgca

SEQ ID NO: 6162 - DNA, 23 bp, Artificial Sequence
  Description of Artificial Sequence: Synthetic oligonucleotide
  Epidermal growth factor receptor (EGFR), ERBB1 phosphotyrosine kinase siRNA
attaaacacttcaaaaactgcac

SEQ ID NO: 6163 - DNA, 23 bp, Artificial Sequence
  Description of Artificial Sequence: Synthetic oligonucleotide
  Epidermal growth factor receptor (EGFR), ERBB1 phosphotyrosine kinase siRNA
ttaaacacttcaaaaactgcacc

SEQ ID NO: 6164 - DNA, 23 bp, Artificial Sequence
  Description of Artificial Sequence: Synthetic oligonucleotide
  Epidermal growth factor receptor (EGFR), ERBB1 phosphotyrosine kinase siRNA
taaacacttcaaaaactgcacct

SEQ ID NO: 6165 - DNA, 23 bp, Artificial Sequence
  Description of Artificial Sequence: Synthetic oligonucleotide
  Epidermal growth factor receptor (EGFR), ERBB1 phosphotyrosine kinase siRNA
aaacacttcaaaaactgcacctc

SEQ ID NO: 6166 - DNA, 23 bp, Artificial Sequence
  Description of Artificial Sequence: Synthetic oligonucleotide
  Epidermal growth factor receptor (EGFR), ERBB1 phosphotyrosine kinase siRNA
aacacttcaaaaactgcacctcc

SEQ ID NO: 6167 - DNA, 23 bp, Artificial Sequence
  Description of Artificial Sequence: Synthetic oligonucleotide
  Epidermal growth factor receptor (EGFR), ERBB1 phosphotyrosine kinase siRNA
acacttcaaaaactgcacctcca

SEQ ID NO: 6168 - DNA, 23 bp, Artificial Sequence
  Description of Artificial Sequence: Synthetic oligonucleotide
  Epidermal growth factor receptor (EGFR), ERBB1 phosphotyrosine kinase siRNA
cacttcaaaaactgcacctccat

SEQ ID NO: 6169 - DNA, 23 bp, Artificial Sequence
  Description of Artificial Sequence: Synthetic oligonucleotide
  Epidermal growth factor receptor (EGFR), ERBB1 phosphotyrosine kinase siRNA
acttcaaaaactgcacctccatc

SEQ ID NO: 6170 - DNA, 23 bp, Artificial Sequence
  Description of Artificial Sequence: Synthetic oligonucleotide
  Epidermal growth factor receptor (EGFR), ERBB1 phosphotyrosine kinase siRNA
cttcaaaaactgcacctccatca

SEQ ID NO: 6171 - DNA, 23 bp, Artificial Sequence
  Description of Artificial Sequence: Synthetic oligonucleotide
  Epidermal growth factor receptor (EGFR), ERBB1 phosphotyrosine kinase siRNA
ttcaaaaactgcacctccatcag

SEQ ID NO: 6172 - DNA, 23 bp, Artificial Sequence
  Description of Artificial Sequence: Synthetic oligonucleotide
  Epidermal growth factor receptor (EGFR), ERBB1 phosphotyrosine kinase siRNA
tcaaaaactgcacctccatcagt

SEQ ID NO: 6173 - DNA, 23 bp, Artificial Sequence
  Description of Artificial Sequence: Synthetic oligonucleotide
  Epidermal growth factor receptor (EGFR), ERBB1 phosphotyrosine kinase siRNA
caaaaactgcacctccatcagtg

SEQ ID NO: 6174 - DNA, 23 bp, Artificial Sequence
  Description of Artificial Sequence: Synthetic oligonucleotide
  Epidermal growth factor receptor (EGFR), ERBB1 phosphotyrosine kinase siRNA
aaaaactgcacctccatcagtgg

SEQ ID NO: 6175 - DNA, 23 bp, Artificial Sequence
  Description of Artificial Sequence: Synthetic oligonucleotide
  Epidermal growth factor receptor (EGFR), ERBB1 phosphotyrosine kinase siRNA
aaaactgcacctccatcagtggc

SEQ ID NO: 6176 - DNA, 23 bp, Artificial Sequence
  Description of Artificial Sequence: Synthetic oligonucleotide
  Epidermal growth factor receptor (EGFR), ERBB1 phosphotyrosine kinase siRNA
aaactgcacctccatcagtggcg

SEQ ID NO: 6177 - DNA, 23 bp, Artificial Sequence
  Description of Artificial Sequence: Synthetic oligonucleotide
  Epidermal growth factor receptor (EGFR), ERBB1 phosphotyrosine kinase siRNA
aactgcacctccatcagtggcga

SEQ ID NO: 6178 - DNA, 23 bp, Artificial Sequence
  Description of Artificial Sequence: Synthetic oligonucleotide
  Epidermal growth factor receptor (EGFR), ERBB1 phosphotyrosine kinase siRNA
actgcacctccatcagtggcgat

SEQ ID NO: 6179 - DNA, 23 bp, Artificial Sequence
  Description of Artificial Sequence: Synthetic oligonucleotide
  Epidermal growth factor receptor (EGFR), ERBB1 phosphotyrosine kinase siRNA
ctgcacctccatcagtggcgatc

SEQ ID NO: 6180 - DNA, 23 bp, Artificial Sequence
  Description of Artificial Sequence: Synthetic oligonucleotide
  Epidermal growth factor receptor (EGFR), ERBB1 phosphotyrosine kinase siRNA
tgcacctccatcagtggcgatct

SEQ ID NO: 6181 - DNA, 23 bp, Artificial Sequence
  Description of Artificial Sequence: Synthetic oligonucleotide
  Epidermal growth factor receptor (EGFR), ERBB1 phosphotyrosine kinase siRNA
gcacctccatcagtggcgatctc

SEQ ID NO: 6182 - DNA, 23 bp, Artificial Sequence
  Description of Artificial Sequence: Synthetic oligonucleotide
  Epidermal growth factor receptor (EGFR), ERBB1 phosphotyrosine kinase siRNA
cacctccatcagtggcgatctcc

SEQ ID NO: 6183 - DNA, 23 bp, Artificial Sequence
  Description of Artificial Sequence: Synthetic oligonucleotide
  Epidermal growth factor receptor (EGFR), ERBB1 phosphotyrosine kinase siRNA
acctccatcagtggcgatctcca

SEQ ID NO: 6184 - DNA, 23 bp, Artificial Sequence
  Description of Artificial Sequence: Synthetic oligonucleotide
  Epidermal growth factor receptor (EGFR), ERBB1 phosphotyrosine kinase siRNA
cctccatcagtggcgatctccac

SEQ ID NO: 6185 - DNA, 23 bp, Artificial Sequence
  Description of Artificial Sequence: Synthetic oligonucleotide
  Epidermal growth factor receptor (EGFR), ERBB1 phosphotyrosine kinase siRNA
ctccatcagtggcgatctccaca

SEQ ID NO: 6186 - DNA, 23 bp, Artificial Sequence
  Description of Artificial Sequence: Synthetic oligonucleotide
  Epidermal growth factor receptor (EGFR), ERBB1 phosphotyrosine kinase siRNA
tccatcagtggcgatctccacat

SEQ ID NO: 6187 - DNA, 23 bp, Artificial Sequence
  Description of Artificial Sequence: Synthetic oligonucleotide
  Epidermal growth factor receptor (EGFR), ERBB1 phosphotyrosine kinase siRNA
ccatcagtggcgatctccacatc

SEQ ID NO: 6188 - DNA, 23 bp, Artificial Sequence
  Description of Artificial Sequence: Synthetic oligonucleotide
  Epidermal growth factor receptor (EGFR), ERBB1 phosphotyrosine kinase siRNA
catcagtggcgatctccacatcc

SEQ ID NO: 6189 - DNA, 23 bp, Artificial Sequence
  Description of Artificial Sequence: Synthetic oligonucleotide
  Epidermal growth factor receptor (EGFR), ERBB1 phosphotyrosine kinase siRNA
atcagtggcgatctccacatcct

SEQ ID NO: 6190 - DNA, 23 bp, Artificial Sequence
  Description of Artificial Sequence: Synthetic oligonucleotide
  Epidermal growth factor receptor (EGFR), ERBB1 phosphotyrosine kinase siRNA
tcagtggcgatctccacatcctg

SEQ ID NO: 6191 - DNA, 23 bp, Artificial Sequence
  Description of Artificial Sequence: Synthetic oligonucleotide
  Epidermal growth factor receptor (EGFR), ERBB1 phosphotyrosine kinase siRNA
cagtggcgatctccacatcctgc

SEQ ID NO: 6192 - DNA, 23 bp, Artificial Sequence
  Description of Artificial Sequence: Synthetic oligonucleotide
  Epidermal growth factor receptor (EGFR), ERBB1 phosphotyrosine kinase siRNA
agtggcgatctccacatcctgcc

SEQ ID NO: 6193 - DNA, 23 bp, Artificial Sequence
  Description of Artificial Sequence: Synthetic oligonucleotide
  Epidermal growth factor receptor (EGFR), ERBB1 phosphotyrosine kinase siRNA
gtggcgatctccacatcctgccg

SEQ ID NO: 6194 - DNA, 23 bp, Artificial Sequence
  Description of Artificial Sequence: Synthetic oligonucleotide
  Epidermal growth factor receptor (EGFR), ERBB1 phosphotyrosine kinase siRNA
tggcgatctccacatcctgccgg

SEQ ID NO: 6195 - DNA, 23 bp, Artificial Sequence
  Description of Artificial Sequence: Synthetic oligonucleotide
  Epidermal growth factor receptor (EGFR), ERBB1 phosphotyrosine kinase siRNA
ggcgatctccacatcctgccggt

SEQ ID NO: 6196 - DNA, 23 bp, Artificial Sequence
  Description of Artificial Sequence: Synthetic oligonucleotide
  Epidermal growth factor receptor (EGFR), ERBB1 phosphotyrosine kinase siRNA
gcgatctccacatcctgccggtg

SEQ ID NO: 6197 - DNA, 23 bp, Artificial Sequence
  Description of Artificial Sequence: Synthetic oligonucleotide
  Epidermal growth factor receptor (EGFR), ERBB1 phosphotyrosine kinase siRNA
cgatctccacatcctgccggtgg

SEQ ID NO: 6198 - DNA, 23 bp, Artificial Sequence
  Description of Artificial Sequence: Synthetic oligonucleotide
  Epidermal growth factor receptor (EGFR), ERBB1 phosphotyrosine kinase siRNA
gatctccacatcctgccggtggc

SEQ ID NO: 6199 - DNA, 23 bp, Artificial Sequence
  Description of Artificial Sequence: Synthetic oligonucleotide
  Epidermal growth factor receptor (EGFR), ERBB1 phosphotyrosine kinase siRNA
atctccacatcctgccggtggca

SEQ ID NO: 6200 - DNA, 23 bp, Artificial Sequence
  Description of Artificial Sequence: Synthetic oligonucleotide
  Epidermal growth factor receptor (EGFR), ERBB1 phosphotyrosine kinase siRNA
tctccacatcctgccggtggcat

SEQ ID NO: 6201 - DNA, 23 bp, Artificial Sequence
  Description of Artificial Sequence: Synthetic oligonucleotide
  Epidermal growth factor receptor (EGFR), ERBB1 phosphotyrosine kinase siRNA
ctccacatcctgccggtggcatt

SEQ ID NO: 6202 - DNA, 23 bp, Artificial Sequence
  Description of Artificial Sequence: Synthetic oligonucleotide
  Epidermal growth factor receptor (EGFR), ERBB1 phosphotyrosine kinase siRNA
tccacatcctgccggtggcattt

SEQ ID NO: 6203 - DNA, 23 bp, Artificial Sequence
  Description of Artificial Sequence: Synthetic oligonucleotide
  Epidermal growth factor receptor (EGFR), ERBB1 phosphotyrosine kinase siRNA
ccacatcctgccggtggcattta

SEQ ID NO: 6204 - DNA, 23 bp, Artificial Sequence
  Description of Artificial Sequence: Synthetic oligonucleotide
  Epidermal growth factor receptor (EGFR), ERBB1 phosphotyrosine kinase siRNA
cacatcctgccggtggcatttag

SEQ ID NO: 6205 - DNA, 23 bp, Artificial Sequence
  Description of Artificial Sequence: Synthetic oligonucleotide
  Epidermal growth factor receptor (EGFR), ERBB1 phosphotyrosine kinase siRNA
acatcctgccggtggcatttagg

SEQ ID NO: 6206 - DNA, 23 bp, Artificial Sequence
  Description of Artificial Sequence: Synthetic oligonucleotide
  Epidermal growth factor receptor (EGFR), ERBB1 phosphotyrosine kinase siRNA
catcctgccggtggcatttaggg

SEQ ID NO: 6207 - DNA, 23 bp, Artificial Sequence
  Description of Artificial Sequence: Synthetic oligonucleotide
  Epidermal growth factor receptor (EGFR), ERBB1 phosphotyrosine kinase siRNA
atcctgccggtggcatttagggg

SEQ ID NO: 6208 - DNA, 23 bp, Artificial Sequence
  Description of Artificial Sequence: Synthetic oligonucleotide
  Epidermal growth factor receptor (EGFR), ERBB1 phosphotyrosine kinase siRNA
tcctgccggtggcatttaggggt

SEQ ID NO: 6209 - DNA, 23 bp, Artificial Sequence
  Description of Artificial Sequence: Synthetic oligonucleotide
  Epidermal growth factor receptor (EGFR), ERBB1 phosphotyrosine kinase siRNA
cctgccggtggcatttaggggtg

SEQ ID NO: 6210 - DNA, 23 bp, Artificial Sequence
  Description of Artificial Sequence: Synthetic oligonucleotide
  Epidermal growth factor receptor (EGFR), ERBB1 phosphotyrosine kinase siRNA
ctgccggtggcatttaggggtga

SEQ ID NO: 6211 - DNA, 23 bp, Artificial Sequence
  Description of Artificial Sequence: Synthetic oligonucleotide
  Epidermal growth factor receptor (EGFR), ERBB1 phosphotyrosine kinase siRNA
tgccggtggcatttaggggtgac

SEQ ID NO: 6212 - DNA, 23 bp, Artificial Sequence
  Description of Artificial Sequence: Synthetic oligonucleotide
  Epidermal growth factor receptor (EGFR), ERBB1 phosphotyrosine kinase siRNA
gccggtggcatttaggggtgact

SEQ ID NO: 6213 - DNA, 23 bp, Artificial Sequence
  Description of Artificial Sequence: Synthetic oligonucleotide
  Epidermal growth factor receptor (EGFR), ERBB1 phosphotyrosine kinase siRNA
ccggtggcatttaggggtgactc

SEQ ID NO: 6214 - DNA, 23 bp, Artificial Sequence
  Description of Artificial Sequence: Synthetic oligonucleotide
  Epidermal growth factor receptor (EGFR), ERBB1 phosphotyrosine kinase siRNA
cggtggcatttaggggtgactcc

SEQ ID NO: 6215 - DNA, 23 bp, Artificial Sequence
  Description of Artificial Sequence: Synthetic oligonucleotide
  Epidermal growth factor receptor (EGFR), ERBB1 phosphotyrosine kinase siRNA
ggtggcatttaggggtgactcct

SEQ ID NO: 6216 - DNA, 23 bp, Artificial Sequence
  Description of Artificial Sequence: Synthetic oligonucleotide
  Epidermal growth factor receptor (EGFR), ERBB1 phosphotyrosine kinase siRNA
gtggcatttaggggtgactcctt

SEQ ID NO: 6217 - DNA, 23 bp, Artificial Sequence
  Description of Artificial Sequence: Synthetic oligonucleotide
  Epidermal growth factor receptor (EGFR), ERBB1 phosphotyrosine kinase siRNA
tggcatttaggggtgactccttc

SEQ ID NO: 6218 - DNA, 23 bp, Artificial Sequence
  Description of Artificial Sequence: Synthetic oligonucleotide
  Epidermal growth factor receptor (EGFR), ERBB1 phosphotyrosine kinase siRNA
ggcatttaggggtgactccttca

SEQ ID NO: 6219 - DNA, 23 bp, Artificial Sequence
  Description of Artificial Sequence: Synthetic oligonucleotide
  Epidermal growth factor receptor (EGFR), ERBB1 phosphotyrosine kinase siRNA
gcatttaggggtgactccttcac

SEQ ID NO: 6220 - DNA, 23 bp, Artificial Sequence
  Description of Artificial Sequence: Synthetic oligonucleotide
  Epidermal growth factor receptor (EGFR), ERBB1 phosphotyrosine kinase siRNA
catttaggggtgactccttcaca

SEQ ID NO: 6221 - DNA, 23 bp, Artificial Sequence
  Description of Artificial Sequence: Synthetic oligonucleotide
  Epidermal growth factor receptor (EGFR), ERBB1 phosphotyrosine kinase siRNA
atttaggggtgactccttcacac

SEQ ID NO: 6222 - DNA, 23 bp, Artificial Sequence
  Description of Artificial Sequence: Synthetic oligonucleotide
  Epidermal growth factor receptor (EGFR), ERBB1 phosphotyrosine kinase siRNA
tttaggggtgactccttcacaca

SEQ ID NO: 6223 - DNA, 23 bp, Artificial Sequence
  Description of Artificial Sequence: Synthetic oligonucleotide
  Epidermal growth factor receptor (EGFR), ERBB1 phosphotyrosine kinase siRNA
ttaggggtgactccttcacacat

SEQ ID NO: 6224 - DNA, 23 bp, Artificial Sequence
  Description of Artificial Sequence: Synthetic oligonucleotide
  Epidermal growth factor receptor (EGFR), ERBB1 phosphotyrosine kinase siRNA
taggggtgactccttcacacata

SEQ ID NO: 6225 - DNA, 23 bp, Artificial Sequence
  Description of Artificial Sequence: Synthetic oligonucleotide
  Epidermal growth factor receptor (EGFR), ERBB1 phosphotyrosine kinase siRNA
aggggtgactccttcacacatac

SEQ ID NO: 6226 - DNA, 23 bp, Artificial Sequence
  Description of Artificial Sequence: Synthetic oligonucleotide
  Epidermal growth factor receptor (EGFR), ERBB1 phosphotyrosine kinase siRNA
ggggtgactccttcacacatact

SEQ ID NO: 6227 - DNA, 23 bp, Artificial Sequence
  Description of Artificial Sequence: Synthetic oligonucleotide
  Epidermal growth factor receptor (EGFR), ERBB1 phosphotyrosine kinase siRNA
gggtgactccttcacacatactc

SEQ ID NO: 6228 - DNA, 23 bp, Artificial Sequence
  Description of Artificial Sequence: Synthetic oligonucleotide
  Epidermal growth factor receptor (EGFR), ERBB1 phosphotyrosine kinase siRNA
ggtgactccttcacacatactcc

SEQ ID NO: 6229 - DNA, 23 bp, Artificial Sequence
  Description of Artificial Sequence: Synthetic oligonucleotide
  Epidermal growth factor receptor (EGFR), ERBB1 phosphotyrosine kinase siRNA
gtgactccttcacacatactcct

SEQ ID NO: 6230 - DNA, 23 bp, Artificial Sequence
  Description of Artificial Sequence: Synthetic oligonucleotide
  Epidermal growth factor receptor (EGFR), ERBB1 phosphotyrosine kinase siRNA
tgactccttcacacatactcctc

SEQ ID NO: 6231 - DNA, 23 bp, Artificial Sequence
  Description of Artificial Sequence: Synthetic oligonucleotide
  Epidermal growth factor receptor (EGFR), ERBB1 phosphotyrosine kinase siRNA
gactccttcacacatactcctcc

SEQ ID NO: 6232 - DNA, 23 bp, Artificial Sequence
  Description of Artificial Sequence: Synthetic oligonucleotide
  Epidermal growth factor receptor (EGFR), ERBB1 phosphotyrosine kinase siRNA
actccttcacacatactcctcct

SEQ ID NO: 6233 - DNA, 23 bp, Artificial Sequence
  Description of Artificial Sequence: Synthetic oligonucleotide
  Epidermal growth factor receptor (EGFR), ERBB1 phosphotyrosine kinase siRNA
ctccttcacacatactcctcctc

SEQ ID NO: 6234 - DNA, 23 bp, Artificial Sequence
  Description of Artificial Sequence: Synthetic oligonucleotide
  Epidermal growth factor receptor (EGFR), ERBB1 phosphotyrosine kinase siRNA
tccttcacacatactcctcctct

SEQ ID NO: 6235 - DNA, 23 bp, Artificial Sequence
  Description of Artificial Sequence: Synthetic oligonucleotide
  Epidermal growth factor receptor (EGFR), ERBB1 phosphotyrosine kinase siRNA
ccttcacacatactcctcctctg

SEQ ID NO: 6236 - DNA, 23 bp, Artificial Sequence
  Description of Artificial Sequence: Synthetic oligonucleotide
  Epidermal growth factor receptor (EGFR), ERBB1 phosphotyrosine kinase siRNA
cttcacacatactcctcctctgg

SEQ ID NO: 6237 - DNA, 23 bp, Artificial Sequence
  Description of Artificial Sequence: Synthetic oligonucleotide
  Epidermal growth factor receptor (EGFR), ERBB1 phosphotyrosine kinase siRNA
ttcacacatactcctcctctgga

SEQ ID NO: 6238 - DNA, 23 bp, Artificial Sequence
  Description of Artificial Sequence: Synthetic oligonucleotide
  Epidermal growth factor receptor (EGFR), ERBB1 phosphotyrosine kinase siRNA
tcacacatactcctcctctggat

SEQ ID NO: 6239 - DNA, 23 bp, Artificial Sequence
  Description of Artificial Sequence: Synthetic oligonucleotide
  Epidermal growth factor receptor (EGFR), ERBB1 phosphotyrosine kinase siRNA
cacacatactcctcctctggatc

SEQ ID NO: 6240 - DNA, 23 bp, Artificial Sequence
  Description of Artificial Sequence: Synthetic oligonucleotide
  Epidermal growth factor receptor (EGFR), ERBB1 phosphotyrosine kinase siRNA
acacatactcctcctctggatcc

SEQ ID NO: 6241 - DNA, 23 bp, Artificial Sequence
  Description of Artificial Sequence: Synthetic oligonucleotide
  Epidermal growth factor receptor (EGFR), ERBB1 phosphotyrosine kinase siRNA
cacatactcctcctctggatcca

SEQ ID NO: 6242 - DNA, 23 bp, Artificial Sequence
  Description of Artificial Sequence: Synthetic oligonucleotide
  Epidermal growth factor receptor (EGFR), ERBB1 phosphotyrosine kinase siRNA
acatactcctcctctggatccac

SEQ ID NO: 6243 - DNA, 23 bp, Artificial Sequence
  Description of Artificial Sequence: Synthetic oligonucleotide
  Epidermal growth factor receptor (EGFR), ERBB1 phosphotyrosine kinase siRNA
catactcctcctctggatccaca

SEQ ID NO: 6244 - DNA, 23 bp, Artificial Sequence
  Description of Artificial Sequence: Synthetic oligonucleotide
  Epidermal growth factor receptor (EGFR), ERBB1 phosphotyrosine kinase siRNA
atactcctcctctggatccacag

SEQ ID NO: 6245 - DNA, 23 bp, Artificial Sequence
  Description of Artificial Sequence: Synthetic oligonucleotide
  Epidermal growth factor receptor (EGFR), ERBB1 phosphotyrosine kinase siRNA
tactcctcctctggatccacagg

SEQ ID NO: 6246 - DNA, 23 bp, Artificial Sequence
  Description of Artificial Sequence: Synthetic oligonucleotide
  Epidermal growth factor receptor (EGFR), ERBB1 phosphotyrosine kinase siRNA
actcctcctctggatccacagga

SEQ ID NO: 6247 - DNA, 23 bp, Artificial Sequence
  Description of Artificial Sequence: Synthetic oligonucleotide
  Epidermal growth factor receptor (EGFR), ERBB1 phosphotyrosine kinase siRNA
ctcctcctctggatccacaggaa

SEQ ID NO: 6248 - DNA, 23 bp, Artificial Sequence
  Description of Artificial Sequence: Synthetic oligonucleotide
  Epidermal growth factor receptor (EGFR), ERBB1 phosphotyrosine kinase siRNA
tcctcctctggatccacaggaac

SEQ ID NO: 6249 - DNA, 23 bp, Artificial Sequence
  Description of Artificial Sequence: Synthetic oligonucleotide
  Epidermal growth factor receptor (EGFR), ERBB1 phosphotyrosine kinase siRNA
cctcctctggatccacaggaact

SEQ ID NO: 6250 - DNA, 23 bp, Artificial Sequence
  Description of Artificial Sequence: Synthetic oligonucleotide
  Epidermal growth factor receptor (EGFR), ERBB1 phosphotyrosine kinase siRNA
ctcctctggatccacaggaactg

SEQ ID NO: 6251 - DNA, 23 bp, Artificial Sequence
  Description of Artificial Sequence: Synthetic oligonucleotide
  Epidermal growth factor receptor (EGFR), ERBB1 phosphotyrosine kinase siRNA
tcctctggatccacaggaactgg

SEQ ID NO: 6252 - DNA, 23 bp, Artificial Sequence
  Description of Artificial Sequence: Synthetic oligonucleotide
  Epidermal growth factor receptor (EGFR), ERBB1 phosphotyrosine kinase siRNA
cctctggatccacaggaactgga

SEQ ID NO: 6253 - DNA, 23 bp, Artificial Sequence
  Description of Artificial Sequence: Synthetic oligonucleotide
  Epidermal growth factor receptor (EGFR), ERBB1 phosphotyrosine kinase siRNA
ctctggatccacaggaactggat

SEQ ID NO: 6254 - DNA, 23 bp, Artificial Sequence
  Description of Artificial Sequence: Synthetic oligonucleotide
  Epidermal growth factor receptor (EGFR), ERBB1 phosphotyrosine kinase siRNA
tctggatccacaggaactggata

SEQ ID NO: 6255 - DNA, 23 bp, Artificial Sequence
  Description of Artificial Sequence: Synthetic oligonucleotide
  Epidermal growth factor receptor (EGFR), ERBB1 phosphotyrosine kinase siRNA
ctggatccacaggaactggatat

SEQ ID NO: 6256 - DNA, 23 bp, Artificial Sequence
  Description of Artificial Sequence: Synthetic oligonucleotide
  Epidermal growth factor receptor (EGFR), ERBB1 phosphotyrosine kinase siRNA
tggatccacaggaactggatatt

SEQ ID NO: 6257 - DNA, 23 bp, Artificial Sequence
  Description of Artificial Sequence: Synthetic oligonucleotide
  Epidermal growth factor receptor (EGFR), ERBB1 phosphotyrosine kinase siRNA
ggatccacaggaactggatattc

SEQ ID NO: 6258 - DNA, 23 bp, Artificial Sequence
  Description of Artificial Sequence: Synthetic oligonucleotide
  Epidermal growth factor receptor (EGFR), ERBB1 phosphotyrosine kinase siRNA
gatccacaggaactggatattct

SEQ ID NO: 6259 - DNA, 23 bp, Artificial Sequence
  Description of Artificial Sequence: Synthetic oligonucleotide
  Epidermal growth factor receptor (EGFR), ERBB1 phosphotyrosine kinase siRNA
atccacaggaactggatattctg

SEQ ID NO: 6260 - DNA, 23 bp, Artificial Sequence
  Description of Artificial Sequence: Synthetic oligonucleotide
  Epidermal growth factor receptor (EGFR), ERBB1 phosphotyrosine kinase siRNA
tccacaggaactggatattctga

SEQ ID NO: 6261 - DNA, 23 bp, Artificial Sequence
  Description of Artificial Sequence: Synthetic oligonucleotide
  Epidermal growth factor receptor (EGFR), ERBB1 phosphotyrosine kinase siRNA
ccacaggaactggatattctgaa

SEQ ID NO: 6262 - DNA, 23 bp, Artificial Sequence
  Description of Artificial Sequence: Synthetic oligonucleotide
  Epidermal growth factor receptor (EGFR), ERBB1 phosphotyrosine kinase siRNA
cacaggaactggatattctgaaa

SEQ ID NO: 6263 - DNA, 23 bp, Artificial Sequence
  Description of Artificial Sequence: Synthetic oligonucleotide
  Epidermal growth factor receptor (EGFR), ERBB1 phosphotyrosine kinase siRNA
acaggaactggatattctgaaaa

SEQ ID NO: 6264 - DNA, 23 bp, Artificial Sequence
  Description of Artificial Sequence: Synthetic oligonucleotide
  Epidermal growth factor receptor (EGFR), ERBB1 phosphotyrosine kinase siRNA
caggaactggatattctgaaaac

SEQ ID NO: 6265 - DNA, 23 bp, Artificial Sequence
  Description of Artificial Sequence: Synthetic oligonucleotide
  Epidermal growth factor receptor (EGFR), ERBB1 phosphotyrosine kinase siRNA
aggaactggatattctgaaaacc

SEQ ID NO: 6266 - DNA, 23 bp, Artificial Sequence
  Description of Artificial Sequence: Synthetic oligonucleotide
  Epidermal growth factor receptor (EGFR), ERBB1 phosphotyrosine kinase siRNA
ggaactggatattctgaaaaccg

SEQ ID NO: 6267 - DNA, 23 bp, Artificial Sequence
  Description of Artificial Sequence: Synthetic oligonucleotide
  Epidermal growth factor receptor (EGFR), ERBB1 phosphotyrosine kinase siRNA
gaactggatattctgaaaaccgt

SEQ ID NO: 6268 - DNA, 23 bp, Artificial Sequence
  Description of Artificial Sequence: Synthetic oligonucleotide
  Epidermal growth factor receptor (EGFR), ERBB1 phosphotyrosine kinase siRNA
aactggatattctgaaaaccgta

SEQ ID NO: 6269 - DNA, 23 bp, Artificial Sequence
  Description of Artificial Sequence: Synthetic oligonucleotide
  Epidermal growth factor receptor (EGFR), ERBB1 phosphotyrosine kinase siRNA
actggatattctgaaaaccgtaa

SEQ ID NO: 6270 - DNA, 23 bp, Artificial Sequence
  Description of Artificial Sequence: Synthetic oligonucleotide
  Epidermal growth factor receptor (EGFR), ERBB1 phosphotyrosine kinase siRNA
ctggatattctgaaaaccgtaaa

SEQ ID NO: 6271 - DNA, 23 bp, Artificial Sequence
  Description of Artificial Sequence: Synthetic oligonucleotide
  Epidermal growth factor receptor (EGFR), ERBB1 phosphotyrosine kinase siRNA
tggatattctgaaaaccgtaaag

SEQ ID NO: 6272 - DNA, 23 bp, Artificial Sequence
  Description of Artificial Sequence: Synthetic oligonucleotide
  Epidermal growth factor receptor (EGFR), ERBB1 phosphotyrosine kinase siRNA
ggatattctgaaaaccgtaaagg

SEQ ID NO: 6273 - DNA, 23 bp, Artificial Sequence
  Description of Artificial Sequence: Synthetic oligonucleotide
  Epidermal growth factor receptor (EGFR), ERBB1 phosphotyrosine kinase siRNA
gatattctgaaaaccgtaaagga

SEQ ID NO: 6274 - DNA, 23 bp, Artificial Sequence
  Description of Artificial Sequence: Synthetic oligonucleotide
  Epidermal growth factor receptor (EGFR), ERBB1 phosphotyrosine kinase siRNA
atattctgaaaaccgtaaaggaa

SEQ ID NO: 6275 - DNA, 23 bp, Artificial Sequence
  Description of Artificial Sequence: Synthetic oligonucleotide
  Epidermal growth factor receptor (EGFR), ERBB1 phosphotyrosine kinase siRNA
tattctgaaaaccgtaaaggaaa

SEQ ID NO: 6276 - DNA, 23 bp, Artificial Sequence
  Description of Artificial Sequence: Synthetic oligonucleotide
  Epidermal growth factor receptor (EGFR), ERBB1 phosphotyrosine kinase siRNA
attctgaaaaccgtaaaggaaat

SEQ ID NO: 6277 - DNA, 23 bp, Artificial Sequence
  Description of Artificial Sequence: Synthetic oligonucleotide
  Epidermal growth factor receptor (EGFR), ERBB1 phosphotyrosine kinase siRNA
ttctgaaaaccgtaaaggaaatc

SEQ ID NO: 6278 - DNA, 23 bp, Artificial Sequence
  Description of Artificial Sequence: Synthetic oligonucleotide
  Epidermal growth factor receptor (EGFR), ERBB1 phosphotyrosine kinase siRNA
tctgaaaaccgtaaaggaaatca

SEQ ID NO: 6279 - DNA, 23 bp, Artificial Sequence
  Description of Artificial Sequence: Synthetic oligonucleotide
  Epidermal growth factor receptor (EGFR), ERBB1 phosphotyrosine kinase siRNA
ctgaaaaccgtaaaggaaatcac

SEQ ID NO: 6280 - DNA, 23 bp, Artificial Sequence
  Description of Artificial Sequence: Synthetic oligonucleotide
  Epidermal growth factor receptor (EGFR), ERBB1 phosphotyrosine kinase siRNA
tgaaaaccgtaaaggaaatcaca

SEQ ID NO: 6281 - DNA, 23 bp, Artificial Sequence
  Description of Artificial Sequence: Synthetic oligonucleotide
  Epidermal growth factor receptor (EGFR), ERBB1 phosphotyrosine kinase siRNA
gaaaaccgtaaaggaaatcacag

SEQ ID NO: 6282 - DNA, 23 bp, Artificial Sequence
  Description of Artificial Sequence: Synthetic oligonucleotide
  Epidermal growth factor receptor (EGFR), ERBB1 phosphotyrosine kinase siRNA
aaaaccgtaaaggaaatcacagg

SEQ ID NO: 6283 - DNA, 23 bp, Artificial Sequence
  Description of Artificial Sequence: Synthetic oligonucleotide
  Epidermal growth factor receptor (EGFR), ERBB1 phosphotyrosine kinase siRNA
aaaccgtaaaggaaatcacaggg

SEQ ID NO: 6284 - DNA, 23 bp, Artificial Sequence
  Description of Artificial Sequence: Synthetic oligonucleotide
  Epidermal growth factor receptor (EGFR), ERBB1 phosphotyrosine kinase siRNA
aaccgtaaaggaaatcacagggt

SEQ ID NO: 6285 - DNA, 23 bp, Artificial Sequence
  Description of Artificial Sequence: Synthetic oligonucleotide
  Epidermal growth factor receptor (EGFR), ERBB1 phosphotyrosine kinase siRNA
accgtaaaggaaatcacagggtt

SEQ ID NO: 6286 - DNA, 23 bp, Artificial Sequence
  Description of Artificial Sequence: Synthetic oligonucleotide
  Epidermal growth factor receptor (EGFR), ERBB1 phosphotyrosine kinase siRNA
ccgtaaaggaaatcacagggttt

SEQ ID NO: 6287 - DNA, 23 bp, Artificial Sequence
  Description of Artificial Sequence: Synthetic oligonucleotide
  Epidermal growth factor receptor (EGFR), ERBB1 phosphotyrosine kinase siRNA
cgtaaaggaaatcacagggtttt

SEQ ID NO: 6288 - DNA, 23 bp, Artificial Sequence
  Description of Artificial Sequence: Synthetic oligonucleotide
  Epidermal growth factor receptor (EGFR), ERBB1 phosphotyrosine kinase siRNA
gtaaaggaaatcacagggttttt

SEQ ID NO: 6289 - DNA, 23 bp, Artificial Sequence
  Description of Artificial Sequence: Synthetic oligonucleotide
  Epidermal growth factor receptor (EGFR), ERBB1 phosphotyrosine kinase siRNA
taaaggaaatcacagggtttttg

SEQ ID NO: 6290 - DNA, 23 bp, Artificial Sequence
  Description of Artificial Sequence: Synthetic oligonucleotide
  Epidermal growth factor receptor (EGFR), ERBB1 phosphotyrosine kinase siRNA
aaaggaaatcacagggtttttgc

SEQ ID NO: 6291 - DNA, 23 bp, Artificial Sequence
  Description of Artificial Sequence: Synthetic oligonucleotide
  Epidermal growth factor receptor (EGFR), ERBB1 phosphotyrosine kinase siRNA
aaggaaatcacagggtttttgct

SEQ ID NO: 6292 - DNA, 23 bp, Artificial Sequence
  Description of Artificial Sequence: Synthetic oligonucleotide
  Epidermal growth factor receptor (EGFR), ERBB1 phosphotyrosine kinase siRNA
aggaaatcacagggtttttgctg

SEQ ID NO: 6293 - DNA, 23 bp, Artificial Sequence
  Description of Artificial Sequence: Synthetic oligonucleotide
  Epidermal growth factor receptor (EGFR), ERBB1 phosphotyrosine kinase siRNA
ggaaatcacagggtttttgctga

SEQ ID NO: 6294 - DNA, 23 bp, Artificial Sequence
  Description of Artificial Sequence: Synthetic oligonucleotide
  Epidermal growth factor receptor (EGFR), ERBB1 phosphotyrosine kinase siRNA
gaaatcacagggtttttgctgat

SEQ ID NO: 6295 - DNA, 23 bp, Artificial Sequence
  Description of Artificial Sequence: Synthetic oligonucleotide
  Epidermal growth factor receptor (EGFR), ERBB1 phosphotyrosine kinase siRNA
aaatcacagggtttttgctgatt

SEQ ID NO: 6296 - DNA, 23 bp, Artificial Sequence
  Description of Artificial Sequence: Synthetic oligonucleotide
  Epidermal growth factor receptor (EGFR), ERBB1 phosphotyrosine kinase siRNA
aatcacagggtttttgctgattc

SEQ ID NO: 6297 - DNA, 23 bp, Artificial Sequence
  Description of Artificial Sequence: Synthetic oligonucleotide
  Epidermal growth factor receptor (EGFR), ERBB1 phosphotyrosine kinase siRNA
atcacagggtttttgctgattca

SEQ ID NO: 6298 - DNA, 23 bp, Artificial Sequence
  Description of Artificial Sequence: Synthetic oligonucleotide
  Epidermal growth factor receptor (EGFR), ERBB1 phosphotyrosine kinase siRNA
tcacagggtttttgctgattcag

SEQ ID NO: 6299 - DNA, 23 bp, Artificial Sequence
  Description of Artificial Sequence: Synthetic oligonucleotide
  Epidermal growth factor receptor (EGFR), ERBB1 phosphotyrosine kinase siRNA
cacagggtttttgctgattcagg

SEQ ID NO: 6300 - DNA, 23 bp, Artificial Sequence
  Description of Artificial Sequence: Synthetic oligonucleotide
  Epidermal growth factor receptor (EGFR), ERBB1 phosphotyrosine kinase siRNA
acagggtttttgctgattcaggc

SEQ ID NO: 6301 - DNA, 23 bp, Artificial Sequence
  Description of Artificial Sequence: Synthetic oligonucleotide
  Epidermal growth factor receptor (EGFR), ERBB1 phosphotyrosine kinase siRNA
cagggtttttgctgattcaggct

SEQ ID NO: 6302 - DNA, 23 bp, Artificial Sequence
  Description of Artificial Sequence: Synthetic oligonucleotide
  Epidermal growth factor receptor (EGFR), ERBB1 phosphotyrosine kinase siRNA
agggtttttgctgattcaggctt

SEQ ID NO: 6303 - DNA, 23 bp, Artificial Sequence
  Description of Artificial Sequence: Synthetic oligonucleotide
  Epidermal growth factor receptor (EGFR), ERBB1 phosphotyrosine kinase siRNA
gggtttttgctgattcaggcttg

SEQ ID NO: 6304 - DNA, 23 bp, Artificial Sequence
  Description of Artificial Sequence: Synthetic oligonucleotide
  Epidermal growth factor receptor (EGFR), ERBB1 phosphotyrosine kinase siRNA
ggtttttgctgattcaggcttgg

SEQ ID NO: 6305 - DNA, 23 bp, Artificial Sequence
  Description of Artificial Sequence: Synthetic oligonucleotide
  Epidermal growth factor receptor (EGFR), ERBB1 phosphotyrosine kinase siRNA
gtttttgctgattcaggcttggc

SEQ ID NO: 6306 - DNA, 23 bp, Artificial Sequence
  Description of Artificial Sequence: Synthetic oligonucleotide
  Epidermal growth factor receptor (EGFR), ERBB1 phosphotyrosine kinase siRNA
tttttgctgattcaggcttggcc

SEQ ID NO: 6307 - DNA, 23 bp, Artificial Sequence
  Description of Artificial Sequence: Synthetic oligonucleotide
  Epidermal growth factor receptor (EGFR), ERBB1 phosphotyrosine kinase siRNA
ttttgctgattcaggcttggcct

SEQ ID NO: 6308 - DNA, 23 bp, Artificial Sequence
  Description of Artificial Sequence: Synthetic oligonucleotide
  Epidermal growth factor receptor (EGFR), ERBB1 phosphotyrosine kinase siRNA
tttgctgattcaggcttggcctg

SEQ ID NO: 6309 - DNA, 23 bp, Artificial Sequence
  Description of Artificial Sequence: Synthetic oligonucleotide
  Epidermal growth factor receptor (EGFR), ERBB1 phosphotyrosine kinase siRNA
ttgctgattcaggcttggcctga

SEQ ID NO: 6310 - DNA, 23 bp, Artificial Sequence
  Description of Artificial Sequence: Synthetic oligonucleotide
  Epidermal growth factor receptor (EGFR), ERBB1 phosphotyrosine kinase siRNA
tgctgattcaggcttggcctgaa

SEQ ID NO: 6311 - DNA, 23 bp, Artificial Sequence
  Description of Artificial Sequence: Synthetic oligonucleotide
  Epidermal growth factor receptor (EGFR), ERBB1 phosphotyrosine kinase siRNA
gctgattcaggcttggcctgaaa

SEQ ID NO: 6312 - DNA, 23 bp, Artificial Sequence
  Description of Artificial Sequence: Synthetic oligonucleotide
  Epidermal growth factor receptor (EGFR), ERBB1 phosphotyrosine kinase siRNA
ctgattcaggcttggcctgaaaa

SEQ ID NO: 6313 - DNA, 23 bp, Artificial Sequence
  Description of Artificial Sequence: Synthetic oligonucleotide
  Epidermal growth factor receptor (EGFR), ERBB1 phosphotyrosine kinase siRNA
tgattcaggcttggcctgaaaac

SEQ ID NO: 6314 - DNA, 23 bp, Artificial Sequence
  Description of Artificial Sequence: Synthetic oligonucleotide
  Epidermal growth factor receptor (EGFR), ERBB1 phosphotyrosine kinase siRNA
gattcaggcttggcctgaaaaca

SEQ ID NO: 6315 - DNA, 23 bp, Artificial Sequence
  Description of Artificial Sequence: Synthetic oligonucleotide
  Epidermal growth factor receptor (EGFR), ERBB1 phosphotyrosine kinase siRNA
attcaggcttggcctgaaaacag

SEQ ID NO: 6316 - DNA, 23 bp, Artificial Sequence
  Description of Artificial Sequence: Synthetic oligonucleotide
  Epidermal growth factor receptor (EGFR), ERBB1 phosphotyrosine kinase siRNA
ttcaggcttggcctgaaaacagg

SEQ ID NO: 6317 - DNA, 23 bp, Artificial Sequence
  Description of Artificial Sequence: Synthetic oligonucleotide
  Epidermal growth factor receptor (EGFR), ERBB1 phosphotyrosine kinase siRNA
tcaggcttggcctgaaaacagga

SEQ ID NO: 6318 - DNA, 23 bp, Artificial Sequence
  Description of Artificial Sequence: Synthetic oligonucleotide
  Epidermal growth factor receptor (EGFR), ERBB1 phosphotyrosine kinase siRNA
caggcttggcctgaaaacaggac

SEQ ID NO: 6319 - DNA, 23 bp, Artificial Sequence
  Description of Artificial Sequence: Synthetic oligonucleotide
  Epidermal growth factor receptor (EGFR), ERBB1 phosphotyrosine kinase siRNA
aggcttggcctgaaaacaggacg

SEQ ID NO: 6320 - DNA, 23 bp, Artificial Sequence
  Description of Artificial Sequence: Synthetic oligonucleotide
  Epidermal growth factor receptor (EGFR), ERBB1 phosphotyrosine kinase siRNA
ggcttggcctgaaaacaggacgg

SEQ ID NO: 6321 - DNA, 23 bp, Artificial Sequence
  Description of Artificial Sequence: Synthetic oligonucleotide
  Epidermal growth factor receptor (EGFR), ERBB1 phosphotyrosine kinase siRNA
gcttggcctgaaaacaggacgga

SEQ ID NO: 6322 - DNA, 23 bp, Artificial Sequence
  Description of Artificial Sequence: Synthetic oligonucleotide
  Epidermal growth factor receptor (EGFR), ERBB1 phosphotyrosine kinase siRNA
cttggcctgaaaacaggacggac

SEQ ID NO: 6323 - DNA, 23 bp, Artificial Sequence
  Description of Artificial Sequence: Synthetic oligonucleotide
  Epidermal growth factor receptor (EGFR), ERBB1 phosphotyrosine kinase siRNA
ttggcctgaaaacaggacggacc

SEQ ID NO: 6324 - DNA, 23 bp, Artificial Sequence
  Description of Artificial Sequence: Synthetic oligonucleotide
  Epidermal growth factor receptor (EGFR), ERBB1 phosphotyrosine kinase siRNA
tggcctgaaaacaggacggacct

SEQ ID NO: 6325 - DNA, 23 bp, Artificial Sequence
  Description of Artificial Sequence: Synthetic oligonucleotide
  Epidermal growth factor receptor (EGFR), ERBB1 phosphotyrosine kinase siRNA
ggcctgaaaacaggacggacctc

SEQ ID NO: 6326 - DNA, 23 bp, Artificial Sequence
  Description of Artificial Sequence: Synthetic oligonucleotide
  Epidermal growth factor receptor (EGFR), ERBB1 phosphotyrosine kinase siRNA
gcctgaaaacaggacggacctcc

SEQ ID NO: 6327 - DNA, 23 bp, Artificial Sequence
  Description of Artificial Sequence: Synthetic oligonucleotide
  Epidermal growth factor receptor (EGFR), ERBB1 phosphotyrosine kinase siRNA
cctgaaaacaggacggacctcca

SEQ ID NO: 6328 - DNA, 23 bp, Artificial Sequence
  Description of Artificial Sequence: Synthetic oligonucleotide
  Epidermal growth factor receptor (EGFR), ERBB1 phosphotyrosine kinase siRNA
ctgaaaacaggacggacctccat

SEQ ID NO: 6329 - DNA, 23 bp, Artificial Sequence
  Description of Artificial Sequence: Synthetic oligonucleotide
  Epidermal growth factor receptor (EGFR), ERBB1 phosphotyrosine kinase siRNA
tgaaaacaggacggacctccatg

SEQ ID NO: 6330 - DNA, 23 bp, Artificial Sequence
  Description of Artificial Sequence: Synthetic oligonucleotide
  Epidermal growth factor receptor (EGFR), ERBB1 phosphotyrosine kinase siRNA
gaaaacaggacggacctccatgc

SEQ ID NO: 6331 - DNA, 23 bp, Artificial Sequence
  Description of Artificial Sequence: Synthetic oligonucleotide
  Epidermal growth factor receptor (EGFR), ERBB1 phosphotyrosine kinase siRNA
aaaacaggacggacctccatgcc

SEQ ID NO: 6332 - DNA, 23 bp, Artificial Sequence
  Description of Artificial Sequence: Synthetic oligonucleotide
  Epidermal growth factor receptor (EGFR), ERBB1 phosphotyrosine kinase siRNA
aaacaggacggacctccatgcct

SEQ ID NO: 6333 - DNA, 23 bp, Artificial Sequence
  Description of Artificial Sequence: Synthetic oligonucleotide
  Epidermal growth factor receptor (EGFR), ERBB1 phosphotyrosine kinase siRNA
aacaggacggacctccatgcctt

SEQ ID NO: 6334 - DNA, 23 bp, Artificial Sequence
  Description of Artificial Sequence: Synthetic oligonucleotide
  Epidermal growth factor receptor (EGFR), ERBB1 phosphotyrosine kinase siRNA
acaggacggacctccatgccttt

SEQ ID NO: 6335 - DNA, 23 bp, Artificial Sequence
  Description of Artificial Sequence: Synthetic oligonucleotide
  Epidermal growth factor receptor (EGFR), ERBB1 phosphotyrosine kinase siRNA
caggacggacctccatgcctttg

SEQ ID NO: 6336 - DNA, 23 bp, Artificial Sequence
  Description of Artificial Sequence: Synthetic oligonucleotide
  Epidermal growth factor receptor (EGFR), ERBB1 phosphotyrosine kinase siRNA
aggacggacctccatgcctttga

SEQ ID NO: 6337 - DNA, 23 bp, Artificial Sequence
  Description of Artificial Sequence: Synthetic oligonucleotide
  Epidermal growth factor receptor (EGFR), ERBB1 phosphotyrosine kinase siRNA
ggacggacctccatgcctttgag

SEQ ID NO: 6338 - DNA, 23 bp, Artificial Sequence
  Description of Artificial Sequence: Synthetic oligonucleotide
  Epidermal growth factor receptor (EGFR), ERBB1 phosphotyrosine kinase siRNA
gacggacctccatgcctttgaga

SEQ ID NO: 6339 - DNA, 23 bp, Artificial Sequence
  Description of Artificial Sequence: Synthetic oligonucleotide
  Epidermal growth factor receptor (EGFR), ERBB1 phosphotyrosine kinase siRNA
acggacctccatgcctttgagaa

SEQ ID NO: 6340 - DNA, 23 bp, Artificial Sequence
  Description of Artificial Sequence: Synthetic oligonucleotide
  Epidermal growth factor receptor (EGFR), ERBB1 phosphotyrosine kinase siRNA
cggacctccatgcctttgagaac

SEQ ID NO: 6341 - DNA, 23 bp, Artificial Sequence
  Description of Artificial Sequence: Synthetic oligonucleotide
  Epidermal growth factor receptor (EGFR), ERBB1 phosphotyrosine kinase siRNA
ggacctccatgcctttgagaacc

SEQ ID NO: 6342 - DNA, 23 bp, Artificial Sequence
  Description of Artificial Sequence: Synthetic oligonucleotide
  Epidermal growth factor receptor (EGFR), ERBB1 phosphotyrosine kinase siRNA
gacctccatgcctttgagaacct

SEQ ID NO: 6343 - DNA, 23 bp, Artificial Sequence
  Description of Artificial Sequence: Synthetic oligonucleotide
  Epidermal growth factor receptor (EGFR), ERBB1 phosphotyrosine kinase siRNA
acctccatgcctttgagaaccta

SEQ ID NO: 6344 - DNA, 23 bp, Artificial Sequence
  Description of Artificial Sequence: Synthetic oligonucleotide
  Epidermal growth factor receptor (EGFR), ERBB1 phosphotyrosine kinase siRNA
cctccatgcctttgagaacctag

SEQ ID NO: 6345 - DNA, 23 bp, Artificial Sequence
  Description of Artificial Sequence: Synthetic oligonucleotide
  Epidermal growth factor receptor (EGFR), ERBB1 phosphotyrosine kinase siRNA
ctccatgcctttgagaacctaga

SEQ ID NO: 6346 - DNA, 23 bp, Artificial Sequence
  Description of Artificial Sequence: Synthetic oligonucleotide
  Epidermal growth factor receptor (EGFR), ERBB1 phosphotyrosine kinase siRNA
tccatgcctttgagaacctagaa

SEQ ID NO: 6347 - DNA, 23 bp, Artificial Sequence
  Description of Artificial Sequence: Synthetic oligonucleotide
  Epidermal growth factor receptor (EGFR), ERBB1 phosphotyrosine kinase siRNA
ccatgcctttgagaacctagaaa

SEQ ID NO: 6348 - DNA, 23 bp, Artificial Sequence
  Description of Artificial Sequence: Synthetic oligonucleotide
  Epidermal growth factor receptor (EGFR), ERBB1 phosphotyrosine kinase siRNA
catgcctttgagaacctagaaat

SEQ ID NO: 6349 - DNA, 23 bp, Artificial Sequence
  Description of Artificial Sequence: Synthetic oligonucleotide
  Epidermal growth factor receptor (EGFR), ERBB1 phosphotyrosine kinase siRNA
atgcctttgagaacctagaaatc

SEQ ID NO: 6350 - DNA, 23 bp, Artificial Sequence
  Description of Artificial Sequence: Synthetic oligonucleotide
  Epidermal growth factor receptor (EGFR), ERBB1 phosphotyrosine kinase siRNA
tgcctttgagaacctagaaatca

SEQ ID NO: 6351 - DNA, 23 bp, Artificial Sequence
  Description of Artificial Sequence: Synthetic oligonucleotide
  Epidermal growth factor receptor (EGFR), ERBB1 phosphotyrosine kinase siRNA
gcctttgagaacctagaaatcat

SEQ ID NO: 6352 - DNA, 23 bp, Artificial Sequence
  Description of Artificial Sequence: Synthetic oligonucleotide
  Epidermal growth factor receptor (EGFR), ERBB1 phosphotyrosine kinase siRNA
cctttgagaacctagaaatcata

SEQ ID NO: 6353 - DNA, 23 bp, Artificial Sequence
  Description of Artificial Sequence: Synthetic oligonucleotide
  Epidermal growth factor receptor (EGFR), ERBB1 phosphotyrosine kinase siRNA
ctttgagaacctagaaatcatac

SEQ ID NO: 6354 - DNA, 23 bp, Artificial Sequence
  Description of Artificial Sequence: Synthetic oligonucleotide
  Epidermal growth factor receptor (EGFR), ERBB1 phosphotyrosine kinase siRNA
tttgagaacctagaaatcatacg

SEQ ID NO: 6355 - DNA, 23 bp, Artificial Sequence
  Description of Artificial Sequence: Synthetic oligonucleotide
  Epidermal growth factor receptor (EGFR), ERBB1 phosphotyrosine kinase siRNA
ttgagaacctagaaatcatacgc

SEQ ID NO: 6356 - DNA, 23 bp, Artificial Sequence
  Description of Artificial Sequence: Synthetic oligonucleotide
  Epidermal growth factor receptor (EGFR), ERBB1 phosphotyrosine kinase siRNA
tgagaacctagaaatcatacgcg

SEQ ID NO: 6357 - DNA, 23 bp, Artificial Sequence
  Description of Artificial Sequence: Synthetic oligonucleotide
  Epidermal growth factor receptor (EGFR), ERBB1 phosphotyrosine kinase siRNA
gagaacctagaaatcatacgcgg

SEQ ID NO: 6358 - DNA, 23 bp, Artificial Sequence
  Description of Artificial Sequence: Synthetic oligonucleotide
  Epidermal growth factor receptor (EGFR), ERBB1 phosphotyrosine kinase siRNA
agaacctagaaatcatacgcggc

SEQ ID NO: 6359 - DNA, 23 bp, Artificial Sequence
  Description of Artificial Sequence: Synthetic oligonucleotide
  Epidermal growth factor receptor (EGFR), ERBB1 phosphotyrosine kinase siRNA
gaacctagaaatcatacgcggca

SEQ ID NO: 6360 - DNA, 23 bp, Artificial Sequence
  Description of Artificial Sequence: Synthetic oligonucleotide
  Epidermal growth factor receptor (EGFR), ERBB1 phosphotyrosine kinase siRNA
aacctagaaatcatacgcggcag

SEQ ID NO: 6361 - DNA, 23 bp, Artificial Sequence
  Description of Artificial Sequence: Synthetic oligonucleotide
  Epidermal growth factor receptor (EGFR), ERBB1 phosphotyrosine kinase siRNA
acctagaaatcatacgcggcagg

SEQ ID NO: 6362 - DNA, 23 bp, Artificial Sequence
  Description of Artificial Sequence: Synthetic oligonucleotide
  Epidermal growth factor receptor (EGFR), ERBB1 phosphotyrosine kinase siRNA
cctagaaatcatacgcggcagga

SEQ ID NO: 6363 - DNA, 23 bp, Artificial Sequence
  Description of Artificial Sequence: Synthetic oligonucleotide
  Epidermal growth factor receptor (EGFR), ERBB1 phosphotyrosine kinase siRNA
ctagaaatcatacgcggcaggac

SEQ ID NO: 6364 - DNA, 23 bp, Artificial Sequence
  Description of Artificial Sequence: Synthetic oligonucleotide
  Epidermal growth factor receptor (EGFR), ERBB1 phosphotyrosine kinase siRNA
tagaaatcatacgcggcaggacc

SEQ ID NO: 6365 - DNA, 23 bp, Artificial Sequence
  Description of Artificial Sequence: Synthetic oligonucleotide
  Epidermal growth factor receptor (EGFR), ERBB1 phosphotyrosine kinase siRNA
agaaatcatacgcggcaggacca

SEQ ID NO: 6366 - DNA, 23 bp, Artificial Sequence
  Description of Artificial Sequence: Synthetic oligonucleotide
  Epidermal growth factor receptor (EGFR), ERBB1 phosphotyrosine kinase siRNA
gaaatcatacgcggcaggaccaa

SEQ ID NO: 6367 - DNA, 23 bp, Artificial Sequence
  Description of Artificial Sequence: Synthetic oligonucleotide
  Epidermal growth factor receptor (EGFR), ERBB1 phosphotyrosine kinase siRNA
aaatcatacgcggcaggaccaag

SEQ ID NO: 6368 - DNA, 23 bp, Artificial Sequence
  Description of Artificial Sequence: Synthetic oligonucleotide
  Epidermal growth factor receptor (EGFR), ERBB1 phosphotyrosine kinase siRNA
aatcatacgcggcaggaccaagc

SEQ ID NO: 6369 - DNA, 23 bp, Artificial Sequence
  Description of Artificial Sequence: Synthetic oligonucleotide
  Epidermal growth factor receptor (EGFR), ERBB1 phosphotyrosine kinase siRNA
atcatacgcggcaggaccaagca

SEQ ID NO: 6370 - DNA, 23 bp, Artificial Sequence
  Description of Artificial Sequence: Synthetic oligonucleotide
  Epidermal growth factor receptor (EGFR), ERBB1 phosphotyrosine kinase siRNA
tcatacgcggcaggaccaagcaa

SEQ ID NO: 6371 - DNA, 23 bp, Artificial Sequence
  Description of Artificial Sequence: Synthetic oligonucleotide
  Epidermal growth factor receptor (EGFR), ERBB1 phosphotyrosine kinase siRNA
catacgcggcaggaccaagcaac

SEQ ID NO: 6372 - DNA, 23 bp, Artificial Sequence
  Description of Artificial Sequence: Synthetic oligonucleotide
  Epidermal growth factor receptor (EGFR), ERBB1 phosphotyrosine kinase siRNA
atacgcggcaggaccaagcaaca

SEQ ID NO: 6373 - DNA, 23 bp, Artificial Sequence
  Description of Artificial Sequence: Synthetic oligonucleotide
  Epidermal growth factor receptor (EGFR), ERBB1 phosphotyrosine kinase siRNA
tacgcggcaggaccaagcaacat

SEQ ID NO: 6374 - DNA, 23 bp, Artificial Sequence
  Description of Artificial Sequence: Synthetic oligonucleotide
  Epidermal growth factor receptor (EGFR), ERBB1 phosphotyrosine kinase siRNA
acgcggcaggaccaagcaacatg

SEQ ID NO: 6375 - DNA, 23 bp, Artificial Sequence
  Description of Artificial Sequence: Synthetic oligonucleotide
  Epidermal growth factor receptor (EGFR), ERBB1 phosphotyrosine kinase siRNA
cgcggcaggaccaagcaacatgg

SEQ ID NO: 6376 - DNA, 23 bp, Artificial Sequence
  Description of Artificial Sequence: Synthetic oligonucleotide
  Epidermal growth factor receptor (EGFR), ERBB1 phosphotyrosine kinase siRNA
gcggcaggaccaagcaacatggt

SEQ ID NO: 6377 - DNA, 23 bp, Artificial Sequence
  Description of Artificial Sequence: Synthetic oligonucleotide
  Epidermal growth factor receptor (EGFR), ERBB1 phosphotyrosine kinase siRNA
cggcaggaccaagcaacatggtc

SEQ ID NO: 6378 - DNA, 23 bp, Artificial Sequence
  Description of Artificial Sequence: Synthetic oligonucleotide
  Epidermal growth factor receptor (EGFR), ERBB1 phosphotyrosine kinase siRNA
ggcaggaccaagcaacatggtca

SEQ ID NO: 6379 - DNA, 23 bp, Artificial Sequence
  Description of Artificial Sequence: Synthetic oligonucleotide
  Epidermal growth factor receptor (EGFR), ERBB1 phosphotyrosine kinase siRNA
gcaggaccaagcaacatggtcag

SEQ ID NO: 6380 - DNA, 23 bp, Artificial Sequence
  Description of Artificial Sequence: Synthetic oligonucleotide
  Epidermal growth factor receptor (EGFR), ERBB1 phosphotyrosine kinase siRNA
caggaccaagcaacatggtcagt

SEQ ID NO: 6381 - DNA, 23 bp, Artificial Sequence
  Description of Artificial Sequence: Synthetic oligonucleotide
  Epidermal growth factor receptor (EGFR), ERBB1 phosphotyrosine kinase siRNA
aggaccaagcaacatggtcagtt

SEQ ID NO: 6382 - DNA, 23 bp, Artificial Sequence
  Description of Artificial Sequence: Synthetic oligonucleotide
  Epidermal growth factor receptor (EGFR), ERBB1 phosphotyrosine kinase siRNA
ggaccaagcaacatggtcagttt

SEQ ID NO: 6383 - DNA, 23 bp, Artificial Sequence
  Description of Artificial Sequence: Synthetic oligonucleotide
  Epidermal growth factor receptor (EGFR), ERBB1 phosphotyrosine kinase siRNA
gaccaagcaacatggtcagtttt

SEQ ID NO: 6384 - DNA, 23 bp, Artificial Sequence
  Description of Artificial Sequence: Synthetic oligonucleotide
  Epidermal growth factor receptor (EGFR), ERBB1 phosphotyrosine kinase siRNA
accaagcaacatggtcagttttc

SEQ ID NO: 6385 - DNA, 23 bp, Artificial Sequence
  Description of Artificial Sequence: Synthetic oligonucleotide
  Epidermal growth factor receptor (EGFR), ERBB1 phosphotyrosine kinase siRNA
ccaagcaacatggtcagttttct

SEQ ID NO: 6386 - DNA, 23 bp, Artificial Sequence
  Description of Artificial Sequence: Synthetic oligonucleotide
  Epidermal growth factor receptor (EGFR), ERBB1 phosphotyrosine kinase siRNA
caagcaacatggtcagttttctc

SEQ ID NO: 6387 - DNA, 23 bp, Artificial Sequence
  Description of Artificial Sequence: Synthetic oligonucleotide
  Epidermal growth factor receptor (EGFR), ERBB1 phosphotyrosine kinase siRNA
aagcaacatggtcagttttctct

SEQ ID NO: 6388 - DNA, 23 bp, Artificial Sequence
  Description of Artificial Sequence: Synthetic oligonucleotide
  Epidermal growth factor receptor (EGFR), ERBB1 phosphotyrosine kinase siRNA
agcaacatggtcagttttctctt

SEQ ID NO: 6389 - DNA, 23 bp, Artificial Sequence
  Description of Artificial Sequence: Synthetic oligonucleotide
  Epidermal growth factor receptor (EGFR), ERBB1 phosphotyrosine kinase siRNA
gcaacatggtcagttttctcttg

SEQ ID NO: 6390 - DNA, 23 bp, Artificial Sequence
  Description of Artificial Sequence: Synthetic oligonucleotide
  Epidermal growth factor receptor (EGFR), ERBB1 phosphotyrosine kinase siRNA
caacatggtcagttttctcttgc

SEQ ID NO: 6391 - DNA, 23 bp, Artificial Sequence
  Description of Artificial Sequence: Synthetic oligonucleotide
  Epidermal growth factor receptor (EGFR), ERBB1 phosphotyrosine kinase siRNA
aacatggtcagttttctcttgca

SEQ ID NO: 6392 - DNA, 23 bp, Artificial Sequence
  Description of Artificial Sequence: Synthetic oligonucleotide
  Epidermal growth factor receptor (EGFR), ERBB1 phosphotyrosine kinase siRNA
acatggtcagttttctcttgcag

SEQ ID NO: 6393 - DNA, 23 bp, Artificial Sequence
  Description of Artificial Sequence: Synthetic oligonucleotide
  Epidermal growth factor receptor (EGFR), ERBB1 phosphotyrosine kinase siRNA
catggtcagttttctcttgcagt

SEQ ID NO: 6394 - DNA, 23 bp, Artificial Sequence
  Description of Artificial Sequence: Synthetic oligonucleotide
  Epidermal growth factor receptor (EGFR), ERBB1 phosphotyrosine kinase siRNA
atggtcagttttctcttgcagtc

SEQ ID NO: 6395 - DNA, 23 bp, Artificial Sequence
  Description of Artificial Sequence: Synthetic oligonucleotide
  Epidermal growth factor receptor (EGFR), ERBB1 phosphotyrosine kinase siRNA
tggtcagttttctcttgcagtcg

SEQ ID NO: 6396 - DNA, 23 bp, Artificial Sequence
  Description of Artificial Sequence: Synthetic oligonucleotide
  Epidermal growth factor receptor (EGFR), ERBB1 phosphotyrosine kinase siRNA
ggtcagttttctcttgcagtcgt

SEQ ID NO: 6397 - DNA, 23 bp, Artificial Sequence
  Description of Artificial Sequence: Synthetic oligonucleotide
  Epidermal growth factor receptor (EGFR), ERBB1 phosphotyrosine kinase siRNA
gtcagttttctcttgcagtcgtc

SEQ ID NO: 6398 - DNA, 23 bp, Artificial Sequence
  Description of Artificial Sequence: Synthetic oligonucleotide
  Epidermal growth factor receptor (EGFR), ERBB1 phosphotyrosine kinase siRNA
tcagttttctcttgcagtcgtca

SEQ ID NO: 6399 - DNA, 23 bp, Artificial Sequence
  Description of Artificial Sequence: Synthetic oligonucleotide
  Epidermal growth factor receptor (EGFR), ERBB1 phosphotyrosine kinase siRNA
cagttttctcttgcagtcgtcag

SEQ ID NO: 6400 - DNA, 23 bp, Artificial Sequence
  Description of Artificial Sequence: Synthetic oligonucleotide
  Epidermal growth factor receptor (EGFR), ERBB1 phosphotyrosine kinase siRNA
agttttctcttgcagtcgtcagc

SEQ ID NO: 6401 - DNA, 23 bp, Artificial Sequence
  Description of Artificial Sequence: Synthetic oligonucleotide
  Epidermal growth factor receptor (EGFR), ERBB1 phosphotyrosine kinase siRNA
gttttctcttgcagtcgtcagcc

SEQ ID NO: 6402 - DNA, 23 bp, Artificial Sequence
  Description of Artificial Sequence: Synthetic oligonucleotide
  Epidermal growth factor receptor (EGFR), ERBB1 phosphotyrosine kinase siRNA
ttttctcttgcagtcgtcagcct

SEQ ID NO: 6403 - DNA, 23 bp, Artificial Sequence
  Description of Artificial Sequence: Synthetic oligonucleotide
  Epidermal growth factor receptor (EGFR), ERBB1 phosphotyrosine kinase siRNA
tttctcttgcagtcgtcagcctg

SEQ ID NO: 6404 - DNA, 23 bp, Artificial Sequence
  Description of Artificial Sequence: Synthetic oligonucleotide
  Epidermal growth factor receptor (EGFR), ERBB1 phosphotyrosine kinase siRNA
ttctcttgcagtcgtcagcctga

SEQ ID NO: 6405 - DNA, 23 bp, Artificial Sequence
  Description of Artificial Sequence: Synthetic oligonucleotide
  Epidermal growth factor receptor (EGFR), ERBB1 phosphotyrosine kinase siRNA
tctcttgcagtcgtcagcctgaa

SEQ ID NO: 6406 - DNA, 23 bp, Artificial Sequence
  Description of Artificial Sequence: Synthetic oligonucleotide
  Epidermal growth factor receptor (EGFR), ERBB1 phosphotyrosine kinase siRNA
ctcttgcagtcgtcagcctgaac

SEQ ID NO: 6407 - DNA, 23 bp, Artificial Sequence
  Description of Artificial Sequence: Synthetic oligonucleotide
  Epidermal growth factor receptor (EGFR), ERBB1 phosphotyrosine kinase siRNA
tcttgcagtcgtcagcctgaaca

SEQ ID NO: 6408 - DNA, 23 bp, Artificial Sequence
  Description of Artificial Sequence: Synthetic oligonucleotide
  Epidermal growth factor receptor (EGFR), ERBB1 phosphotyrosine kinase siRNA
cttgcagtcgtcagcctgaacat

SEQ ID NO: 6409 - DNA, 23 bp, Artificial Sequence
  Description of Artificial Sequence: Synthetic oligonucleotide
  Epidermal growth factor receptor (EGFR), ERBB1 phosphotyrosine kinase siRNA
ttgcagtcgtcagcctgaacata

SEQ ID NO: 6410 - DNA, 23 bp, Artificial Sequence
  Description of Artificial Sequence: Synthetic oligonucleotide
  Epidermal growth factor receptor (EGFR), ERBB1 phosphotyrosine kinase siRNA
tgcagtcgtcagcctgaacataa

SEQ ID NO: 6411 - DNA, 23 bp, Artificial Sequence
  Description of Artificial Sequence: Synthetic oligonucleotide
  Epidermal growth factor receptor (EGFR), ERBB1 phosphotyrosine kinase siRNA
gcagtcgtcagcctgaacataac

SEQ ID NO: 6412 - DNA, 23 bp, Artificial Sequence
  Description of Artificial Sequence: Synthetic oligonucleotide
  Epidermal growth factor receptor (EGFR), ERBB1 phosphotyrosine kinase siRNA
cagtcgtcagcctgaacataaca

SEQ ID NO: 6413 - DNA, 23 bp, Artificial Sequence
  Description of Artificial Sequence: Synthetic oligonucleotide
  Epidermal growth factor receptor (EGFR), ERBB1 phosphotyrosine kinase siRNA
agtcgtcagcctgaacataacat

SEQ ID NO: 6414 - DNA, 23 bp, Artificial Sequence
  Description of Artificial Sequence: Synthetic oligonucleotide
  Epidermal growth factor receptor (EGFR), ERBB1 phosphotyrosine kinase siRNA
gtcgtcagcctgaacataacatc

SEQ ID NO: 6415 - DNA, 23 bp, Artificial Sequence
  Description of Artificial Sequence: Synthetic oligonucleotide
  Epidermal growth factor receptor (EGFR), ERBB1 phosphotyrosine kinase siRNA
tcgtcagcctgaacataacatcc

SEQ ID NO: 6416 - DNA, 23 bp, Artificial Sequence
  Description of Artificial Sequence: Synthetic oligonucleotide
  Epidermal growth factor receptor (EGFR), ERBB1 phosphotyrosine kinase siRNA
cgtcagcctgaacataacatcct

SEQ ID NO: 6417 - DNA, 23 bp, Artificial Sequence
  Description of Artificial Sequence: Synthetic oligonucleotide
  Epidermal growth factor receptor (EGFR), ERBB1 phosphotyrosine kinase siRNA
gtcagcctgaacataacatcctt

SEQ ID NO: 6418 - DNA, 23 bp, Artificial Sequence
  Description of Artificial Sequence: Synthetic oligonucleotide
  Epidermal growth factor receptor (EGFR), ERBB1 phosphotyrosine kinase siRNA
tcagcctgaacataacatccttg

SEQ ID NO: 6419 - DNA, 23 bp, Artificial Sequence
  Description of Artificial Sequence: Synthetic oligonucleotide
  Epidermal growth factor receptor (EGFR), ERBB1 phosphotyrosine kinase siRNA
cagcctgaacataacatccttgg

SEQ ID NO: 6420 - DNA, 23 bp, Artificial Sequence
  Description of Artificial Sequence: Synthetic oligonucleotide
  Epidermal growth factor receptor (EGFR), ERBB1 phosphotyrosine kinase siRNA
agcctgaacataacatccttggg

SEQ ID NO: 6421 - DNA, 23 bp, Artificial Sequence
  Description of Artificial Sequence: Synthetic oligonucleotide
  Epidermal growth factor receptor (EGFR), ERBB1 phosphotyrosine kinase siRNA
gcctgaacataacatccttggga

SEQ ID NO: 6422 - DNA, 23 bp, Artificial Sequence
  Description of Artificial Sequence: Synthetic oligonucleotide
  Epidermal growth factor receptor (EGFR), ERBB1 phosphotyrosine kinase siRNA
cctgaacataacatccttgggat

SEQ ID NO: 6423 - DNA, 23 bp, Artificial Sequence
  Description of Artificial Sequence: Synthetic oligonucleotide
  Epidermal growth factor receptor (EGFR), ERBB1 phosphotyrosine kinase siRNA
ctgaacataacatccttgggatt

SEQ ID NO: 6424 - DNA, 23 bp, Artificial Sequence
  Description of Artificial Sequence: Synthetic oligonucleotide
  Epidermal growth factor receptor (EGFR), ERBB1 phosphotyrosine kinase siRNA
tgaacataacatccttgggatta

SEQ ID NO: 6425 - DNA, 23 bp, Artificial Sequence
  Description of Artificial Sequence: Synthetic oligonucleotide
  Epidermal growth factor receptor (EGFR), ERBB1 phosphotyrosine kinase siRNA
gaacataacatccttgggattac

SEQ ID NO: 6426 - DNA, 23 bp, Artificial Sequence
  Description of Artificial Sequence: Synthetic oligonucleotide
  Epidermal growth factor receptor (EGFR), ERBB1 phosphotyrosine kinase siRNA
aacataacatccttgggattacg

SEQ ID NO: 6427 - DNA, 23 bp, Artificial Sequence
  Description of Artificial Sequence: Synthetic oligonucleotide
  Epidermal growth factor receptor (EGFR), ERBB1 phosphotyrosine kinase siRNA
acataacatccttgggattacgc

SEQ ID NO: 6428 - DNA, 23 bp, Artificial Sequence
  Description of Artificial Sequence: Synthetic oligonucleotide
  Epidermal growth factor receptor (EGFR), ERBB1 phosphotyrosine kinase siRNA
cataacatccttgggattacgct

SEQ ID NO: 6429 - DNA, 23 bp, Artificial Sequence
  Description of Artificial Sequence: Synthetic oligonucleotide
  Epidermal growth factor receptor (EGFR), ERBB1 phosphotyrosine kinase siRNA
ataacatccttgggattacgctc

SEQ ID NO: 6430 - DNA, 23 bp, Artificial Sequence
  Description of Artificial Sequence: Synthetic oligonucleotide
  Epidermal growth factor receptor (EGFR), ERBB1 phosphotyrosine kinase siRNA
taacatccttgggattacgctcc

SEQ ID NO: 6431 - DNA, 23 bp, Artificial Sequence
  Description of Artificial Sequence: Synthetic oligonucleotide
  Epidermal growth factor receptor (EGFR), ERBB1 phosphotyrosine kinase siRNA
aacatccttgggattacgctccc

SEQ ID NO: 6432 - DNA, 23 bp, Artificial Sequence
  Description of Artificial Sequence: Synthetic oligonucleotide
  Epidermal growth factor receptor (EGFR), ERBB1 phosphotyrosine kinase siRNA
acatccttgggattacgctccct

SEQ ID NO: 6433 - DNA, 23 bp, Artificial Sequence
  Description of Artificial Sequence: Synthetic oligonucleotide
  Epidermal growth factor receptor (EGFR), ERBB1 phosphotyrosine kinase siRNA
catccttgggattacgctccctc

SEQ ID NO: 6434 - DNA, 23 bp, Artificial Sequence
  Description of Artificial Sequence: Synthetic oligonucleotide
  Epidermal growth factor receptor (EGFR), ERBB1 phosphotyrosine kinase siRNA
atccttgggattacgctccctca

SEQ ID NO: 6435 - DNA, 23 bp, Artificial Sequence
  Description of Artificial Sequence: Synthetic oligonucleotide
  Epidermal growth factor receptor (EGFR), ERBB1 phosphotyrosine kinase siRNA
tccttgggattacgctccctcaa

SEQ ID NO: 6436 - DNA, 23 bp, Artificial Sequence
  Description of Artificial Sequence: Synthetic oligonucleotide
  Epidermal growth factor receptor (EGFR), ERBB1 phosphotyrosine kinase siRNA
ccttgggattacgctccctcaag

SEQ ID NO: 6437 - DNA, 23 bp, Artificial Sequence
  Description of Artificial Sequence: Synthetic oligonucleotide
  Epidermal growth factor receptor (EGFR), ERBB1 phosphotyrosine kinase siRNA
cttgggattacgctccctcaagg

SEQ ID NO: 6438 - DNA, 23 bp, Artificial Sequence
  Description of Artificial Sequence: Synthetic oligonucleotide
  Epidermal growth factor receptor (EGFR), ERBB1 phosphotyrosine kinase siRNA
ttgggattacgctccctcaagga

SEQ ID NO: 6439 - DNA, 23 bp, Artificial Sequence
  Description of Artificial Sequence: Synthetic oligonucleotide
  Epidermal growth factor receptor (EGFR), ERBB1 phosphotyrosine kinase siRNA
tgggattacgctccctcaaggag

SEQ ID NO: 6440 - DNA, 23 bp, Artificial Sequence
  Description of Artificial Sequence: Synthetic oligonucleotide
  Epidermal growth factor receptor (EGFR), ERBB1 phosphotyrosine kinase siRNA
gggattacgctccctcaaggaga

SEQ ID NO: 6441 - DNA, 23 bp, Artificial Sequence
  Description of Artificial Sequence: Synthetic oligonucleotide
  Epidermal growth factor receptor (EGFR), ERBB1 phosphotyrosine kinase siRNA
ggattacgctccctcaaggagat

SEQ ID NO: 6442 - DNA, 23 bp, Artificial Sequence
  Description of Artificial Sequence: Synthetic oligonucleotide
  Epidermal growth factor receptor (EGFR), ERBB1 phosphotyrosine kinase siRNA
gattacgctccctcaaggagata

SEQ ID NO: 6443 - DNA, 23 bp, Artificial Sequence
  Description of Artificial Sequence: Synthetic oligonucleotide
  Epidermal growth factor receptor (EGFR), ERBB1 phosphotyrosine kinase siRNA
attacgctccctcaaggagataa

SEQ ID NO: 6444 - DNA, 23 bp, Artificial Sequence
  Description of Artificial Sequence: Synthetic oligonucleotide
  Epidermal growth factor receptor (EGFR), ERBB1 phosphotyrosine kinase siRNA
ttacgctccctcaaggagataag

SEQ ID NO: 6445 - DNA, 23 bp, Artificial Sequence
  Description of Artificial Sequence: Synthetic oligonucleotide
  Epidermal growth factor receptor (EGFR), ERBB1 phosphotyrosine kinase siRNA
tacgctccctcaaggagataagt

SEQ ID NO: 6446 - DNA, 23 bp, Artificial Sequence
  Description of Artificial Sequence: Synthetic oligonucleotide
  Epidermal growth factor receptor (EGFR), ERBB1 phosphotyrosine kinase siRNA
acgctccctcaaggagataagtg

SEQ ID NO: 6447 - DNA, 23 bp, Artificial Sequence
  Description of Artificial Sequence: Synthetic oligonucleotide
  Epidermal growth factor receptor (EGFR), ERBB1 phosphotyrosine kinase siRNA
cgctccctcaaggagataagtga

SEQ ID NO: 6448 - DNA, 23 bp, Artificial Sequence
  Description of Artificial Sequence: Synthetic oligonucleotide
  Epidermal growth factor receptor (EGFR), ERBB1 phosphotyrosine kinase siRNA
gctccctcaaggagataagtgat

SEQ ID NO: 6449 - DNA, 23 bp, Artificial Sequence
  Description of Artificial Sequence: Synthetic oligonucleotide
  Epidermal growth factor receptor (EGFR), ERBB1 phosphotyrosine kinase siRNA
ctccctcaaggagataagtgatg

SEQ ID NO: 6450 - DNA, 23 bp, Artificial Sequence
  Description of Artificial Sequence: Synthetic oligonucleotide
  Epidermal growth factor receptor (EGFR), ERBB1 phosphotyrosine kinase siRNA
tccctcaaggagataagtgatgg

SEQ ID NO: 6451 - DNA, 23 bp, Artificial Sequence
  Description of Artificial Sequence: Synthetic oligonucleotide
  Epidermal growth factor receptor (EGFR), ERBB1 phosphotyrosine kinase siRNA
ccctcaaggagataagtgatgga

SEQ ID NO: 6452 - DNA, 23 bp, Artificial Sequence
  Description of Artificial Sequence: Synthetic oligonucleotide
  Epidermal growth factor receptor (EGFR), ERBB1 phosphotyrosine kinase siRNA
cctcaaggagataagtgatggag

SEQ ID NO: 6453 - DNA, 23 bp, Artificial Sequence
  Description of Artificial Sequence: Synthetic oligonucleotide
  Epidermal growth factor receptor (EGFR), ERBB1 phosphotyrosine kinase siRNA
ctcaaggagataagtgatggaga

SEQ ID NO: 6454 - DNA, 23 bp, Artificial Sequence
  Description of Artificial Sequence: Synthetic oligonucleotide
  Epidermal growth factor receptor (EGFR), ERBB1 phosphotyrosine kinase siRNA
tcaaggagataagtgatggagat

SEQ ID NO: 6455 - DNA, 23 bp, Artificial Sequence
  Description of Artificial Sequence: Synthetic oligonucleotide
  Epidermal growth factor receptor (EGFR), ERBB1 phosphotyrosine kinase siRNA
caaggagataagtgatggagatg

SEQ ID NO: 6456 - DNA, 23 bp, Artificial Sequence
  Description of Artificial Sequence: Synthetic oligonucleotide
  Epidermal growth factor receptor (EGFR), ERBB1 phosphotyrosine kinase siRNA
aaggagataagtgatggagatgt

SEQ ID NO: 6457 - DNA, 23 bp, Artificial Sequence
  Description of Artificial Sequence: Synthetic oligonucleotide
  Epidermal growth factor receptor (EGFR), ERBB1 phosphotyrosine kinase siRNA
aggagataagtgatggagatgtg

SEQ ID NO: 6458 - DNA, 23 bp, Artificial Sequence
  Description of Artificial Sequence: Synthetic oligonucleotide
  Epidermal growth factor receptor (EGFR), ERBB1 phosphotyrosine kinase siRNA
ggagataagtgatggagatgtga

SEQ ID NO: 6459 - DNA, 23 bp, Artificial Sequence
  Description of Artificial Sequence: Synthetic oligonucleotide
  Epidermal growth factor receptor (EGFR), ERBB1 phosphotyrosine kinase siRNA
gagataagtgatggagatgtgat

SEQ ID NO: 6460 - DNA, 23 bp, Artificial Sequence
  Description of Artificial Sequence: Synthetic oligonucleotide
  Epidermal growth factor receptor (EGFR), ERBB1 phosphotyrosine kinase siRNA
agataagtgatggagatgtgata

SEQ ID NO: 6461 - DNA, 23 bp, Artificial Sequence
  Description of Artificial Sequence: Synthetic oligonucleotide
  Epidermal growth factor receptor (EGFR), ERBB1 phosphotyrosine kinase siRNA
gataagtgatggagatgtgataa

SEQ ID NO: 6462 - DNA, 23 bp, Artificial Sequence
  Description of Artificial Sequence: Synthetic oligonucleotide
  Epidermal growth factor receptor (EGFR), ERBB1 phosphotyrosine kinase siRNA
ataagtgatggagatgtgataat

SEQ ID NO: 6463 - DNA, 23 bp, Artificial Sequence
  Description of Artificial Sequence: Synthetic oligonucleotide
  Epidermal growth factor receptor (EGFR), ERBB1 phosphotyrosine kinase siRNA
taagtgatggagatgtgataatt

SEQ ID NO: 6464 - DNA, 23 bp, Artificial Sequence
  Description of Artificial Sequence: Synthetic oligonucleotide
  Epidermal growth factor receptor (EGFR), ERBB1 phosphotyrosine kinase siRNA
aagtgatggagatgtgataattt

SEQ ID NO: 6465 - DNA, 23 bp, Artificial Sequence
  Description of Artificial Sequence: Synthetic oligonucleotide
  Epidermal growth factor receptor (EGFR), ERBB1 phosphotyrosine kinase siRNA
agtgatggagatgtgataatttc

SEQ ID NO: 6466 - DNA, 23 bp, Artificial Sequence
  Description of Artificial Sequence: Synthetic oligonucleotide
  Epidermal growth factor receptor (EGFR), ERBB1 phosphotyrosine kinase siRNA
gtgatggagatgtgataatttca

SEQ ID NO: 6467 - DNA, 23 bp, Artificial Sequence
  Description of Artificial Sequence: Synthetic oligonucleotide
  Epidermal growth factor receptor (EGFR), ERBB1 phosphotyrosine kinase siRNA
tgatggagatgtgataatttcag

SEQ ID NO: 6468 - DNA, 23 bp, Artificial Sequence
  Description of Artificial Sequence: Synthetic oligonucleotide
  Epidermal growth factor receptor (EGFR), ERBB1 phosphotyrosine kinase siRNA
gatggagatgtgataatttcagg

SEQ ID NO: 6469 - DNA, 23 bp, Artificial Sequence
  Description of Artificial Sequence: Synthetic oligonucleotide
  Epidermal growth factor receptor (EGFR), ERBB1 phosphotyrosine kinase siRNA
atggagatgtgataatttcagga

SEQ ID NO: 6470 - DNA, 23 bp, Artificial Sequence
  Description of Artificial Sequence: Synthetic oligonucleotide
  Epidermal growth factor receptor (EGFR), ERBB1 phosphotyrosine kinase siRNA
tggagatgtgataatttcaggaa

SEQ ID NO: 6471 - DNA, 23 bp, Artificial Sequence
  Description of Artificial Sequence: Synthetic oligonucleotide
  Epidermal growth factor receptor (EGFR), ERBB1 phosphotyrosine kinase siRNA
ggagatgtgataatttcaggaaa

SEQ ID NO: 6472 - DNA, 23 bp, Artificial Sequence
  Description of Artificial Sequence: Synthetic oligonucleotide
  Epidermal growth factor receptor (EGFR), ERBB1 phosphotyrosine kinase siRNA
gagatgtgataatttcaggaaac

SEQ ID NO: 6473 - DNA, 23 bp, Artificial Sequence
  Description of Artificial Sequence: Synthetic oligonucleotide
  Epidermal growth factor receptor (EGFR), ERBB1 phosphotyrosine kinase siRNA
agatgtgataatttcaggaaaca

SEQ ID NO: 6474 - DNA, 23 bp, Artificial Sequence
  Description of Artificial Sequence: Synthetic oligonucleotide
  Epidermal growth factor receptor (EGFR), ERBB1 phosphotyrosine kinase siRNA
gatgtgataatttcaggaaacaa

SEQ ID NO: 6475 - DNA, 23 bp, Artificial Sequence
  Description of Artificial Sequence: Synthetic oligonucleotide
  Epidermal growth factor receptor (EGFR), ERBB1 phosphotyrosine kinase siRNA
atgtgataatttcaggaaacaaa

SEQ ID NO: 6476 - DNA, 23 bp, Artificial Sequence
  Description of Artificial Sequence: Synthetic oligonucleotide
  Epidermal growth factor receptor (EGFR), ERBB1 phosphotyrosine kinase siRNA
tgtgataatttcaggaaacaaaa

SEQ ID NO: 6477 - DNA, 23 bp, Artificial Sequence
  Description of Artificial Sequence: Synthetic oligonucleotide
  Epidermal growth factor receptor (EGFR), ERBB1 phosphotyrosine kinase siRNA
gtgataatttcaggaaacaaaaa

SEQ ID NO: 6478 - DNA, 23 bp, Artificial Sequence
  Description of Artificial Sequence: Synthetic oligonucleotide
  Epidermal growth factor receptor (EGFR), ERBB1 phosphotyrosine kinase siRNA
tgataatttcaggaaacaaaaat

SEQ ID NO: 6479 - DNA, 23 bp, Artificial Sequence
  Description of Artificial Sequence: Synthetic oligonucleotide
  Epidermal growth factor receptor (EGFR), ERBB1 phosphotyrosine kinase siRNA
gataatttcaggaaacaaaaatt

SEQ ID NO: 6480 - DNA, 23 bp, Artificial Sequence
  Description of Artificial Sequence: Synthetic oligonucleotide
  Epidermal growth factor receptor (EGFR), ERBB1 phosphotyrosine kinase siRNA
ataatttcaggaaacaaaaattt

SEQ ID NO: 6481 - DNA, 23 bp, Artificial Sequence
  Description of Artificial Sequence: Synthetic oligonucleotide
  Epidermal growth factor receptor (EGFR), ERBB1 phosphotyrosine kinase siRNA
taatttcaggaaacaaaaatttg

SEQ ID NO: 6482 - DNA, 23 bp, Artificial Sequence
  Description of Artificial Sequence: Synthetic oligonucleotide
  Epidermal growth factor receptor (EGFR), ERBB1 phosphotyrosine kinase siRNA
aatttcaggaaacaaaaatttgt

SEQ ID NO: 6483 - DNA, 23 bp, Artificial Sequence
  Description of Artificial Sequence: Synthetic oligonucleotide
  Epidermal growth factor receptor (EGFR), ERBB1 phosphotyrosine kinase siRNA
atttcaggaaacaaaaatttgtg

SEQ ID NO: 6484 - DNA, 23 bp, Artificial Sequence
  Description of Artificial Sequence: Synthetic oligonucleotide
  Epidermal growth factor receptor (EGFR), ERBB1 phosphotyrosine kinase siRNA
tttcaggaaacaaaaatttgtgc

SEQ ID NO: 6485 - DNA, 23 bp, Artificial Sequence
  Description of Artificial Sequence: Synthetic oligonucleotide
  Epidermal growth factor receptor (EGFR), ERBB1 phosphotyrosine kinase siRNA
ttcaggaaacaaaaatttgtgct

SEQ ID NO: 6486 - DNA, 23 bp, Artificial Sequence
  Description of Artificial Sequence: Synthetic oligonucleotide
  Epidermal growth factor receptor (EGFR), ERBB1 phosphotyrosine kinase siRNA
tcaggaaacaaaaatttgtgcta

SEQ ID NO: 6487 - DNA, 23 bp, Artificial Sequence
  Description of Artificial Sequence: Synthetic oligonucleotide
  Epidermal growth factor receptor (EGFR), ERBB1 phosphotyrosine kinase siRNA
caggaaacaaaaatttgtgctat

SEQ ID NO: 6488 - DNA, 23 bp, Artificial Sequence
  Description of Artificial Sequence: Synthetic oligonucleotide
  Epidermal growth factor receptor (EGFR), ERBB1 phosphotyrosine kinase siRNA
aggaaacaaaaatttgtgctatg

SEQ ID NO: 6489 - DNA, 23 bp, Artificial Sequence
  Description of Artificial Sequence: Synthetic oligonucleotide
  Epidermal growth factor receptor (EGFR), ERBB1 phosphotyrosine kinase siRNA
ggaaacaaaaatttgtgctatgc

SEQ ID NO: 6490 - DNA, 23 bp, Artificial Sequence
  Description of Artificial Sequence: Synthetic oligonucleotide
  Epidermal growth factor receptor (EGFR), ERBB1 phosphotyrosine kinase siRNA
gaaacaaaaatttgtgctatgca

SEQ ID NO: 6491 - DNA, 23 bp, Artificial Sequence
  Description of Artificial Sequence: Synthetic oligonucleotide
  Epidermal growth factor receptor (EGFR), ERBB1 phosphotyrosine kinase siRNA
aaacaaaaatttgtgctatgcaa

SEQ ID NO: 6492 - DNA, 23 bp, Artificial Sequence
  Description of Artificial Sequence: Synthetic oligonucleotide
  Epidermal growth factor receptor (EGFR), ERBB1 phosphotyrosine kinase siRNA
aacaaaaatttgtgctatgcaaa

SEQ ID NO: 6493 - DNA, 23 bp, Artificial Sequence
  Description of Artificial Sequence: Synthetic oligonucleotide
  Epidermal growth factor receptor (EGFR), ERBB1 phosphotyrosine kinase siRNA
acaaaaatttgtgctatgcaaat

SEQ ID NO: 6494 - DNA, 23 bp, Artificial Sequence
  Description of Artificial Sequence: Synthetic oligonucleotide
  Epidermal growth factor receptor (EGFR), ERBB1 phosphotyrosine kinase siRNA
caaaaatttgtgctatgcaaata

SEQ ID NO: 6495 - DNA, 23 bp, Artificial Sequence
  Description of Artificial Sequence: Synthetic oligonucleotide
  Epidermal growth factor receptor (EGFR), ERBB1 phosphotyrosine kinase siRNA
aaaaatttgtgctatgcaaatac

SEQ ID NO: 6496 - DNA, 23 bp, Artificial Sequence
  Description of Artificial Sequence: Synthetic oligonucleotide
  Epidermal growth factor receptor (EGFR), ERBB1 phosphotyrosine kinase siRNA
aaaatttgtgctatgcaaataca

SEQ ID NO: 6497 - DNA, 23 bp, Artificial Sequence
  Description of Artificial Sequence: Synthetic oligonucleotide
  Epidermal growth factor receptor (EGFR), ERBB1 phosphotyrosine kinase siRNA
aaatttgtgctatgcaaatacaa

SEQ ID NO: 6498 - DNA, 23 bp, Artificial Sequence
  Description of Artificial Sequence: Synthetic oligonucleotide
  Epidermal growth factor receptor (EGFR), ERBB1 phosphotyrosine kinase siRNA
aatttgtgctatgcaaatacaat

SEQ ID NO: 6499 - DNA, 23 bp, Artificial Sequence
  Description of Artificial Sequence: Synthetic oligonucleotide
  Epidermal growth factor receptor (EGFR), ERBB1 phosphotyrosine kinase siRNA
atttgtgctatgcaaatacaata

SEQ ID NO: 6500 - DNA, 23 bp, Artificial Sequence
  Description of Artificial Sequence: Synthetic oligonucleotide
  Epidermal growth factor receptor (EGFR), ERBB1 phosphotyrosine kinase siRNA
tttgtgctatgcaaatacaataa

SEQ ID NO: 6501 - DNA, 23 bp, Artificial Sequence
  Description of Artificial Sequence: Synthetic oligonucleotide
  Epidermal growth factor receptor (EGFR), ERBB1 phosphotyrosine kinase siRNA
ttgtgctatgcaaatacaataaa

SEQ ID NO: 6502 - DNA, 23 bp, Artificial Sequence
  Description of Artificial Sequence: Synthetic oligonucleotide
  Epidermal growth factor receptor (EGFR), ERBB1 phosphotyrosine kinase siRNA
tgtgctatgcaaatacaataaac

SEQ ID NO: 6503 - DNA, 23 bp, Artificial Sequence
  Description of Artificial Sequence: Synthetic oligonucleotide
  Epidermal growth factor receptor (EGFR), ERBB1 phosphotyrosine kinase siRNA
gtgctatgcaaatacaataaact

SEQ ID NO: 6504 - DNA, 23 bp, Artificial Sequence
  Description of Artificial Sequence: Synthetic oligonucleotide
  Epidermal growth factor receptor (EGFR), ERBB1 phosphotyrosine kinase siRNA
tgctatgcaaatacaataaactg

SEQ ID NO: 6505 - DNA, 23 bp, Artificial Sequence
  Description of Artificial Sequence: Synthetic oligonucleotide
  Epidermal growth factor receptor (EGFR), ERBB1 phosphotyrosine kinase siRNA
gctatgcaaatacaataaactgg

SEQ ID NO: 6506 - DNA, 23 bp, Artificial Sequence
  Description of Artificial Sequence: Synthetic oligonucleotide
  Epidermal growth factor receptor (EGFR), ERBB1 phosphotyrosine kinase siRNA
ctatgcaaatacaataaactgga

SEQ ID NO: 6507 - DNA, 23 bp, Artificial Sequence
  Description of Artificial Sequence: Synthetic oligonucleotide
  Epidermal growth factor receptor (EGFR), ERBB1 phosphotyrosine kinase siRNA
tatgcaaatacaataaactggaa

SEQ ID NO: 6508 - DNA, 23 bp, Artificial Sequence
  Description of Artificial Sequence: Synthetic oligonucleotide
  Epidermal growth factor receptor (EGFR), ERBB1 phosphotyrosine kinase siRNA
atgcaaatacaataaactggaaa

SEQ ID NO: 6509 - DNA, 23 bp, Artificial Sequence
  Description of Artificial Sequence: Synthetic oligonucleotide
  Epidermal growth factor receptor (EGFR), ERBB1 phosphotyrosine kinase siRNA
tgcaaatacaataaactggaaaa

SEQ ID NO: 6510 - DNA, 23 bp, Artificial Sequence
  Description of Artificial Sequence: Synthetic oligonucleotide
  Epidermal growth factor receptor (EGFR), ERBB1 phosphotyrosine kinase siRNA
gcaaatacaataaactggaaaaa

SEQ ID NO: 6511 - DNA, 23 bp, Artificial Sequence
  Description of Artificial Sequence: Synthetic oligonucleotide
  Epidermal growth factor receptor (EGFR), ERBB1 phosphotyrosine kinase siRNA
caaatacaataaactggaaaaaa

SEQ ID NO: 6512 - DNA, 23 bp, Artificial Sequence
  Description of Artificial Sequence: Synthetic oligonucleotide
  Epidermal growth factor receptor (EGFR), ERBB1 phosphotyrosine kinase siRNA
aaatacaataaactggaaaaaac

SEQ ID NO: 6513 - DNA, 23 bp, Artificial Sequence
  Description of Artificial Sequence: Synthetic oligonucleotide
  Epidermal growth factor receptor (EGFR), ERBB1 phosphotyrosine kinase siRNA
aatacaataaactggaaaaaact

SEQ ID NO: 6514 - DNA, 23 bp, Artificial Sequence
  Description of Artificial Sequence: Synthetic oligonucleotide
  Epidermal growth factor receptor (EGFR), ERBB1 phosphotyrosine kinase siRNA
atacaataaactggaaaaaactg

SEQ ID NO: 6515 - DNA, 23 bp, Artificial Sequence
  Description of Artificial Sequence: Synthetic oligonucleotide
  Epidermal growth factor receptor (EGFR), ERBB1 phosphotyrosine kinase siRNA
tacaataaactggaaaaaactgt

SEQ ID NO: 6516 - DNA, 23 bp, Artificial Sequence
  Description of Artificial Sequence: Synthetic oligonucleotide
  Epidermal growth factor receptor (EGFR), ERBB1 phosphotyrosine kinase siRNA
acaataaactggaaaaaactgtt

SEQ ID NO: 6517 - DNA, 23 bp, Artificial Sequence
  Description of Artificial Sequence: Synthetic oligonucleotide
  Epidermal growth factor receptor (EGFR), ERBB1 phosphotyrosine kinase siRNA
caataaactggaaaaaactgttt

SEQ ID NO: 6518 - DNA, 23 bp, Artificial Sequence
  Description of Artificial Sequence: Synthetic oligonucleotide
  Epidermal growth factor receptor (EGFR), ERBB1 phosphotyrosine kinase siRNA
aataaactggaaaaaactgtttg

SEQ ID NO: 6519 - DNA, 23 bp, Artificial Sequence
  Description of Artificial Sequence: Synthetic oligonucleotide
  Epidermal growth factor receptor (EGFR), ERBB1 phosphotyrosine kinase siRNA
ataaactggaaaaaactgtttgg

SEQ ID NO: 6520 - DNA, 23 bp, Artificial Sequence
  Description of Artificial Sequence: Synthetic oligonucleotide
  Epidermal growth factor receptor (EGFR), ERBB1 phosphotyrosine kinase siRNA
taaactggaaaaaactgtttggg

SEQ ID NO: 6521 - DNA, 23 bp, Artificial Sequence
  Description of Artificial Sequence: Synthetic oligonucleotide
  Epidermal growth factor receptor (EGFR), ERBB1 phosphotyrosine kinase siRNA
aaactggaaaaaactgtttggga

SEQ ID NO: 6522 - DNA, 23 bp, Artificial Sequence
  Description of Artificial Sequence: Synthetic oligonucleotide
  Epidermal growth factor receptor (EGFR), ERBB1 phosphotyrosine kinase siRNA
aactggaaaaaactgtttgggac

SEQ ID NO: 6523 - DNA, 23 bp, Artificial Sequence
  Description of Artificial Sequence: Synthetic oligonucleotide
  Epidermal growth factor receptor (EGFR), ERBB1 phosphotyrosine kinase siRNA
actggaaaaaactgtttgggacc

SEQ ID NO: 6524 - DNA, 23 bp, Artificial Sequence
  Description of Artificial Sequence: Synthetic oligonucleotide
  Epidermal growth factor receptor (EGFR), ERBB1 phosphotyrosine kinase siRNA
ctggaaaaaactgtttgggacct

SEQ ID NO: 6525 - DNA, 23 bp, Artificial Sequence
  Description of Artificial Sequence: Synthetic oligonucleotide
  Epidermal growth factor receptor (EGFR), ERBB1 phosphotyrosine kinase siRNA
tggaaaaaactgtttgggacctc

SEQ ID NO: 6526 - DNA, 23 bp, Artificial Sequence
  Description of Artificial Sequence: Synthetic oligonucleotide
  Epidermal growth factor receptor (EGFR), ERBB1 phosphotyrosine kinase siRNA
ggaaaaaactgtttgggacctcc

SEQ ID NO: 6527 - DNA, 23 bp, Artificial Sequence
  Description of Artificial Sequence: Synthetic oligonucleotide
  Epidermal growth factor receptor (EGFR), ERBB1 phosphotyrosine kinase siRNA
gaaaaaactgtttgggacctccg

SEQ ID NO: 6528 - DNA, 23 bp, Artificial Sequence
  Description of Artificial Sequence: Synthetic oligonucleotide
  Epidermal growth factor receptor (EGFR), ERBB1 phosphotyrosine kinase siRNA
aaaaaactgtttgggacctccgg

SEQ ID NO: 6529 - DNA, 23 bp, Artificial Sequence
  Description of Artificial Sequence: Synthetic oligonucleotide
  Epidermal growth factor receptor (EGFR), ERBB1 phosphotyrosine kinase siRNA
aaaaactgtttgggacctccggt

SEQ ID NO: 6530 - DNA, 23 bp, Artificial Sequence
  Description of Artificial Sequence: Synthetic oligonucleotide
  Epidermal growth factor receptor (EGFR), ERBB1 phosphotyrosine kinase siRNA
aaaactgtttgggacctccggtc

SEQ ID NO: 6531 - DNA, 23 bp, Artificial Sequence
  Description of Artificial Sequence: Synthetic oligonucleotide
  Epidermal growth factor receptor (EGFR), ERBB1 phosphotyrosine kinase siRNA
aaactgtttgggacctccggtca

SEQ ID NO: 6532 - DNA, 23 bp, Artificial Sequence
  Description of Artificial Sequence: Synthetic oligonucleotide
  Epidermal growth factor receptor (EGFR), ERBB1 phosphotyrosine kinase siRNA
aactgtttgggacctccggtcag

SEQ ID NO: 6533 - DNA, 23 bp, Artificial Sequence
  Description of Artificial Sequence: Synthetic oligonucleotide
  Epidermal growth factor receptor (EGFR), ERBB1 phosphotyrosine kinase siRNA
actgtttgggacctccggtcaga

SEQ ID NO: 6534 - DNA, 23 bp, Artificial Sequence
  Description of Artificial Sequence: Synthetic oligonucleotide
  Epidermal growth factor receptor (EGFR), ERBB1 phosphotyrosine kinase siRNA
ctgtttgggacctccggtcagaa

SEQ ID NO: 6535 - DNA, 23 bp, Artificial Sequence
  Description of Artificial Sequence: Synthetic oligonucleotide
  Epidermal growth factor receptor (EGFR), ERBB1 phosphotyrosine kinase siRNA
tgtttgggacctccggtcagaaa

SEQ ID NO: 6536 - DNA, 23 bp, Artificial Sequence
  Description of Artificial Sequence: Synthetic oligonucleotide
  Epidermal growth factor receptor (EGFR), ERBB1 phosphotyrosine kinase siRNA
gtttgggacctccggtcagaaaa

SEQ ID NO: 6537 - DNA, 23 bp, Artificial Sequence
  Description of Artificial Sequence: Synthetic oligonucleotide
  Epidermal growth factor receptor (EGFR), ERBB1 phosphotyrosine kinase siRNA
tttgggacctccggtcagaaaac

SEQ ID NO: 6538 - DNA, 23 bp, Artificial Sequence
  Description of Artificial Sequence: Synthetic oligonucleotide
  Epidermal growth factor receptor (EGFR), ERBB1 phosphotyrosine kinase siRNA
ttgggacctccggtcagaaaacc

SEQ ID NO: 6539 - DNA, 23 bp, Artificial Sequence
  Description of Artificial Sequence: Synthetic oligonucleotide
  Epidermal growth factor receptor (EGFR), ERBB1 phosphotyrosine kinase siRNA
tgggacctccggtcagaaaacca

SEQ ID NO: 6540 - DNA, 23 bp, Artificial Sequence
  Description of Artificial Sequence: Synthetic oligonucleotide
  Epidermal growth factor receptor (EGFR), ERBB1 phosphotyrosine kinase siRNA
gggacctccggtcagaaaaccaa

SEQ ID NO: 6541 - DNA, 23 bp, Artificial Sequence
  Description of Artificial Sequence: Synthetic oligonucleotide
  Epidermal growth factor receptor (EGFR), ERBB1 phosphotyrosine kinase siRNA
ggacctccggtcagaaaaccaaa

SEQ ID NO: 6542 - DNA, 23 bp, Artificial Sequence
  Description of Artificial Sequence: Synthetic oligonucleotide
  Epidermal growth factor receptor (EGFR), ERBB1 phosphotyrosine kinase siRNA
gacctccggtcagaaaaccaaaa

SEQ ID NO: 6543 - DNA, 23 bp, Artificial Sequence
  Description of Artificial Sequence: Synthetic oligonucleotide
  Epidermal growth factor receptor (EGFR), ERBB1 phosphotyrosine kinase siRNA
acctccggtcagaaaaccaaaat

SEQ ID NO: 6544 - DNA, 23 bp, Artificial Sequence
  Description of Artificial Sequence: Synthetic oligonucleotide
  Epidermal growth factor receptor (EGFR), ERBB1 phosphotyrosine kinase siRNA
cctccggtcagaaaaccaaaatt

SEQ ID NO: 6545 - DNA, 23 bp, Artificial Sequence
  Description of Artificial Sequence: Synthetic oligonucleotide
  Epidermal growth factor receptor (EGFR), ERBB1 phosphotyrosine kinase siRNA
ctccggtcagaaaaccaaaatta

SEQ ID NO: 6546 - DNA, 23 bp, Artificial Sequence
  Description of Artificial Sequence: Synthetic oligonucleotide
  Epidermal growth factor receptor (EGFR), ERBB1 phosphotyrosine kinase siRNA
tccggtcagaaaaccaaaattat

SEQ ID NO: 6547 - DNA, 23 bp, Artificial Sequence
  Description of Artificial Sequence: Synthetic oligonucleotide
  Epidermal growth factor receptor (EGFR), ERBB1 phosphotyrosine kinase siRNA
ccggtcagaaaaccaaaattata

SEQ ID NO: 6548 - DNA, 23 bp, Artificial Sequence
  Description of Artificial Sequence: Synthetic oligonucleotide
  Epidermal growth factor receptor (EGFR), ERBB1 phosphotyrosine kinase siRNA
cggtcagaaaaccaaaattataa

SEQ ID NO: 6549 - DNA, 23 bp, Artificial Sequence
  Description of Artificial Sequence: Synthetic oligonucleotide
  Epidermal growth factor receptor (EGFR), ERBB1 phosphotyrosine kinase siRNA
ggtcagaaaaccaaaattataag

SEQ ID NO: 6550 - DNA, 23 bp, Artificial Sequence
  Description of Artificial Sequence: Synthetic oligonucleotide
  Epidermal growth factor receptor (EGFR), ERBB1 phosphotyrosine kinase siRNA
gtcagaaaaccaaaattataagc

SEQ ID NO: 6551 - DNA, 23 bp, Artificial Sequence
  Description of Artificial Sequence: Synthetic oligonucleotide
  Epidermal growth factor receptor (EGFR), ERBB1 phosphotyrosine kinase siRNA
tcagaaaaccaaaattataagca

SEQ ID NO: 6552 - DNA, 23 bp, Artificial Sequence
  Description of Artificial Sequence: Synthetic oligonucleotide
  Epidermal growth factor receptor (EGFR), ERBB1 phosphotyrosine kinase siRNA
cagaaaaccaaaattataagcaa

SEQ ID NO: 6553 - DNA, 23 bp, Artificial Sequence
  Description of Artificial Sequence: Synthetic oligonucleotide
  Epidermal growth factor receptor (EGFR), ERBB1 phosphotyrosine kinase siRNA
agaaaaccaaaattataagcaac

SEQ ID NO: 6554 - DNA, 23 bp, Artificial Sequence
  Description of Artificial Sequence: Synthetic oligonucleotide
  Epidermal growth factor receptor (EGFR), ERBB1 phosphotyrosine kinase siRNA
gaaaaccaaaattataagcaaca

SEQ ID NO: 6555 - DNA, 23 bp, Artificial Sequence
  Description of Artificial Sequence: Synthetic oligonucleotide
  Epidermal growth factor receptor (EGFR), ERBB1 phosphotyrosine kinase siRNA
aaaaccaaaattataagcaacag

SEQ ID NO: 6556 - DNA, 23 bp, Artificial Sequence
  Description of Artificial Sequence: Synthetic oligonucleotide
  Epidermal growth factor receptor (EGFR), ERBB1 phosphotyrosine kinase siRNA
aaaccaaaattataagcaacaga

SEQ ID NO: 6557 - DNA, 23 bp, Artificial Sequence
  Description of Artificial Sequence: Synthetic oligonucleotide
  Epidermal growth factor receptor (EGFR), ERBB1 phosphotyrosine kinase siRNA
aaccaaaattataagcaacagag

SEQ ID NO: 6558 - DNA, 23 bp, Artificial Sequence
  Description of Artificial Sequence: Synthetic oligonucleotide
  Epidermal growth factor receptor (EGFR), ERBB1 phosphotyrosine kinase siRNA
accaaaattataagcaacagagg

SEQ ID NO: 6559 - DNA, 23 bp, Artificial Sequence
  Description of Artificial Sequence: Synthetic oligonucleotide
  Epidermal growth factor receptor (EGFR), ERBB1 phosphotyrosine kinase siRNA
ccaaaattataagcaacagaggt

SEQ ID NO: 6560 - DNA, 23 bp, Artificial Sequence
  Description of Artificial Sequence: Synthetic oligonucleotide
  Epidermal growth factor receptor (EGFR), ERBB1 phosphotyrosine kinase siRNA
caaaattataagcaacagaggtg

SEQ ID NO: 6561 - DNA, 23 bp, Artificial Sequence
  Description of Artificial Sequence: Synthetic oligonucleotide
  Epidermal growth factor receptor (EGFR), ERBB1 phosphotyrosine kinase siRNA
aaaattataagcaacagaggtga

SEQ ID NO: 6562 - DNA, 23 bp, Artificial Sequence
  Description of Artificial Sequence: Synthetic oligonucleotide
  Epidermal growth factor receptor (EGFR), ERBB1 phosphotyrosine kinase siRNA
aaattataagcaacagaggtgaa

SEQ ID NO: 6563 - DNA, 23 bp, Artificial Sequence
  Description of Artificial Sequence: Synthetic oligonucleotide
  Epidermal growth factor receptor (EGFR), ERBB1 phosphotyrosine kinase siRNA
aattataagcaacagaggtgaaa

SEQ ID NO: 6564 - DNA, 23 bp, Artificial Sequence
  Description of Artificial Sequence: Synthetic oligonucleotide
  Epidermal growth factor receptor (EGFR), ERBB1 phosphotyrosine kinase siRNA
attataagcaacagaggtgaaaa

SEQ ID NO: 6565 - DNA, 23 bp, Artificial Sequence
  Description of Artificial Sequence: Synthetic oligonucleotide
  Epidermal growth factor receptor (EGFR), ERBB1 phosphotyrosine kinase siRNA
ttataagcaacagaggtgaaaac

SEQ ID NO: 6566 - DNA, 23 bp, Artificial Sequence
  Description of Artificial Sequence: Synthetic oligonucleotide
  Epidermal growth factor receptor (EGFR), ERBB1 phosphotyrosine kinase siRNA
tataagcaacagaggtgaaaaca

SEQ ID NO: 6567 - DNA, 23 bp, Artificial Sequence
  Description of Artificial Sequence: Synthetic oligonucleotide
  Epidermal growth factor receptor (EGFR), ERBB1 phosphotyrosine kinase siRNA
ataagcaacagaggtgaaaacag

SEQ ID NO: 6568 - DNA, 23 bp, Artificial Sequence
  Description of Artificial Sequence: Synthetic oligonucleotide
  Epidermal growth factor receptor (EGFR), ERBB1 phosphotyrosine kinase siRNA
taagcaacagaggtgaaaacagc

SEQ ID NO: 6569 - DNA, 23 bp, Artificial Sequence
  Description of Artificial Sequence: Synthetic oligonucleotide
  Epidermal growth factor receptor (EGFR), ERBB1 phosphotyrosine kinase siRNA
aagcaacagaggtgaaaacagct

SEQ ID NO: 6570 - DNA, 23 bp, Artificial Sequence
  Description of Artificial Sequence: Synthetic oligonucleotide
  Epidermal growth factor receptor (EGFR), ERBB1 phosphotyrosine kinase siRNA
agcaacagaggtgaaaacagctg

SEQ ID NO: 6571 - DNA, 23 bp, Artificial Sequence
  Description of Artificial Sequence: Synthetic oligonucleotide
  Epidermal growth factor receptor (EGFR), ERBB1 phosphotyrosine kinase siRNA
gcaacagaggtgaaaacagctgc

SEQ ID NO: 6572 - DNA, 23 bp, Artificial Sequence
  Description of Artificial Sequence: Synthetic oligonucleotide
  Epidermal growth factor receptor (EGFR), ERBB1 phosphotyrosine kinase siRNA
caacagaggtgaaaacagctgca

SEQ ID NO: 6573 - DNA, 23 bp, Artificial Sequence
  Description of Artificial Sequence: Synthetic oligonucleotide
  Epidermal growth factor receptor (EGFR), ERBB1 phosphotyrosine kinase siRNA
aacagaggtgaaaacagctgcaa

SEQ ID NO: 6574 - DNA, 23 bp, Artificial Sequence
  Description of Artificial Sequence: Synthetic oligonucleotide
  Epidermal growth factor receptor (EGFR), ERBB1 phosphotyrosine kinase siRNA
acagaggtgaaaacagctgcaag

SEQ ID NO: 6575 - DNA, 23 bp, Artificial Sequence
  Description of Artificial Sequence: Synthetic oligonucleotide
  Epidermal growth factor receptor (EGFR), ERBB1 phosphotyrosine kinase siRNA
cagaggtgaaaacagctgcaagg

SEQ ID NO: 6576 - DNA, 23 bp, Artificial Sequence
  Description of Artificial Sequence: Synthetic oligonucleotide
  Epidermal growth factor receptor (EGFR), ERBB1 phosphotyrosine kinase siRNA
agaggtgaaaacagctgcaaggc

SEQ ID NO: 6577 - DNA, 23 bp, Artificial Sequence
  Description of Artificial Sequence: Synthetic oligonucleotide
  Epidermal growth factor receptor (EGFR), ERBB1 phosphotyrosine kinase siRNA
gaggtgaaaacagctgcaaggcc

SEQ ID NO: 6578 - DNA, 23 bp, Artificial Sequence
  Description of Artificial Sequence: Synthetic oligonucleotide
  Epidermal growth factor receptor (EGFR), ERBB1 phosphotyrosine kinase siRNA
aggtgaaaacagctgcaaggcca

SEQ ID NO: 6579 - DNA, 23 bp, Artificial Sequence
  Description of Artificial Sequence: Synthetic oligonucleotide
  Epidermal growth factor receptor (EGFR), ERBB1 phosphotyrosine kinase siRNA
ggtgaaaacagctgcaaggccac

SEQ ID NO: 6580 - DNA, 23 bp, Artificial Sequence
  Description of Artificial Sequence: Synthetic oligonucleotide
  Epidermal growth factor receptor (EGFR), ERBB1 phosphotyrosine kinase siRNA
gtgaaaacagctgcaaggccaca

SEQ ID NO: 6581 - DNA, 23 bp, Artificial Sequence
  Description of Artificial Sequence: Synthetic oligonucleotide
  Epidermal growth factor receptor (EGFR), ERBB1 phosphotyrosine kinase siRNA
tgaaaacagctgcaaggccacag

SEQ ID NO: 6582 - DNA, 23 bp, Artificial Sequence
  Description of Artificial Sequence: Synthetic oligonucleotide
  Epidermal growth factor receptor (EGFR), ERBB1 phosphotyrosine kinase siRNA
gaaaacagctgcaaggccacagg

SEQ ID NO: 6583 - DNA, 23 bp, Artificial Sequence
  Description of Artificial Sequence: Synthetic oligonucleotide
  Epidermal growth factor receptor (EGFR), ERBB1 phosphotyrosine kinase siRNA
aaaacagctgcaaggccacaggc

SEQ ID NO: 6584 - DNA, 23 bp, Artificial Sequence
  Description of Artificial Sequence: Synthetic oligonucleotide
  Epidermal growth factor receptor (EGFR), ERBB1 phosphotyrosine kinase siRNA
aaacagctgcaaggccacaggcc

SEQ ID NO: 6585 - DNA, 23 bp, Artificial Sequence
  Description of Artificial Sequence: Synthetic oligonucleotide
  Epidermal growth factor receptor (EGFR), ERBB1 phosphotyrosine kinase siRNA
aacagctgcaaggccacaggcca

SEQ ID NO: 6586 - DNA, 23 bp, Artificial Sequence
  Description of Artificial Sequence: Synthetic oligonucleotide
  Epidermal growth factor receptor (EGFR), ERBB1 phosphotyrosine kinase siRNA
acagctgcaaggccacaggccag

SEQ ID NO: 6587 - DNA, 23 bp, Artificial Sequence
  Description of Artificial Sequence: Synthetic oligonucleotide
  Epidermal growth factor receptor (EGFR), ERBB1 phosphotyrosine kinase siRNA
cagctgcaaggccacaggccagg

SEQ ID NO: 6588 - DNA, 23 bp, Artificial Sequence
  Description of Artificial Sequence: Synthetic oligonucleotide
  Epidermal growth factor receptor (EGFR), ERBB1 phosphotyrosine kinase siRNA
agctgcaaggccacaggccaggt

SEQ ID NO: 6589 - DNA, 23 bp, Artificial Sequence
  Description of Artificial Sequence: Synthetic oligonucleotide
  Epidermal growth factor receptor (EGFR), ERBB1 phosphotyrosine kinase siRNA
gctgcaaggccacaggccaggtc

SEQ ID NO: 6590 - DNA, 23 bp, Artificial Sequence
  Description of Artificial Sequence: Synthetic oligonucleotide
  Epidermal growth factor receptor (EGFR), ERBB1 phosphotyrosine kinase siRNA
ctgcaaggccacaggccaggtct

SEQ ID NO: 6591 - DNA, 23 bp, Artificial Sequence
  Description of Artificial Sequence: Synthetic oligonucleotide
  Epidermal growth factor receptor (EGFR), ERBB1 phosphotyrosine kinase siRNA
tgcaaggccacaggccaggtctg

SEQ ID NO: 6592 - DNA, 23 bp, Artificial Sequence
  Description of Artificial Sequence: Synthetic oligonucleotide
  Epidermal growth factor receptor (EGFR), ERBB1 phosphotyrosine kinase siRNA
gcaaggccacaggccaggtctgc

SEQ ID NO: 6593 - DNA, 23 bp, Artificial Sequence
  Description of Artificial Sequence: Synthetic oligonucleotide
  Epidermal growth factor receptor (EGFR), ERBB1 phosphotyrosine kinase siRNA
caaggccacaggccaggtctgcc

SEQ ID NO: 6594 - DNA, 23 bp, Artificial Sequence
  Description of Artificial Sequence: Synthetic oligonucleotide
  Epidermal growth factor receptor (EGFR), ERBB1 phosphotyrosine kinase siRNA
aaggccacaggccaggtctgcca

SEQ ID NO: 6595 - DNA, 23 bp, Artificial Sequence
  Description of Artificial Sequence: Synthetic oligonucleotide
  Epidermal growth factor receptor (EGFR), ERBB1 phosphotyrosine kinase siRNA
aggccacaggccaggtctgccat

SEQ ID NO: 6596 - DNA, 23 bp, Artificial Sequence
  Description of Artificial Sequence: Synthetic oligonucleotide
  Epidermal growth factor receptor (EGFR), ERBB1 phosphotyrosine kinase siRNA
ggccacaggccaggtctgccatg

SEQ ID NO: 6597 - DNA, 23 bp, Artificial Sequence
  Description of Artificial Sequence: Synthetic oligonucleotide
  Epidermal growth factor receptor (EGFR), ERBB1 phosphotyrosine kinase siRNA
gccacaggccaggtctgccatgc

SEQ ID NO: 6598 - DNA, 23 bp, Artificial Sequence
  Description of Artificial Sequence: Synthetic oligonucleotide
  Epidermal growth factor receptor (EGFR), ERBB1 phosphotyrosine kinase siRNA
ccacaggccaggtctgccatgcc

SEQ ID NO: 6599 - DNA, 23 bp, Artificial Sequence
  Description of Artificial Sequence: Synthetic oligonucleotide
  Epidermal growth factor receptor (EGFR), ERBB1 phosphotyrosine kinase siRNA
cacaggccaggtctgccatgcct

SEQ ID NO: 6600 - DNA, 23 bp, Artificial Sequence
  Description of Artificial Sequence: Synthetic oligonucleotide
  Epidermal growth factor receptor (EGFR), ERBB1 phosphotyrosine kinase siRNA
acaggccaggtctgccatgcctt

SEQ ID NO: 6601 - DNA, 23 bp, Artificial Sequence
  Description of Artificial Sequence: Synthetic oligonucleotide
  Epidermal growth factor receptor (EGFR), ERBB1 phosphotyrosine kinase siRNA
caggccaggtctgccatgccttg

SEQ ID NO: 6602 - DNA, 23 bp, Artificial Sequence
  Description of Artificial Sequence: Synthetic oligonucleotide
  Epidermal growth factor receptor (EGFR), ERBB1 phosphotyrosine kinase siRNA
aggccaggtctgccatgccttgt

SEQ ID NO: 6603 - DNA, 23 bp, Artificial Sequence
  Description of Artificial Sequence: Synthetic oligonucleotide
  Epidermal growth factor receptor (EGFR), ERBB1 phosphotyrosine kinase siRNA
ggccaggtctgccatgccttgtg

SEQ ID NO: 6604 - DNA, 23 bp, Artificial Sequence
  Description of Artificial Sequence: Synthetic oligonucleotide
  Epidermal growth factor receptor (EGFR), ERBB1 phosphotyrosine kinase siRNA
gccaggtctgccatgccttgtgc

SEQ ID NO: 6605 - DNA, 23 bp, Artificial Sequence
  Description of Artificial Sequence: Synthetic oligonucleotide
  Epidermal growth factor receptor (EGFR), ERBB1 phosphotyrosine kinase siRNA
ccaggtctgccatgccttgtgct

SEQ ID NO: 6606 - DNA, 23 bp, Artificial Sequence
  Description of Artificial Sequence: Synthetic oligonucleotide
  Epidermal growth factor receptor (EGFR), ERBB1 phosphotyrosine kinase siRNA
caggtctgccatgccttgtgctc

SEQ ID NO: 6607 - DNA, 23 bp, Artificial Sequence
  Description of Artificial Sequence: Synthetic oligonucleotide
  Epidermal growth factor receptor (EGFR), ERBB1 phosphotyrosine kinase siRNA
aggtctgccatgccttgtgctcc

SEQ ID NO: 6608 - DNA, 23 bp, Artificial Sequence
  Description of Artificial Sequence: Synthetic oligonucleotide
  Epidermal growth factor receptor (EGFR), ERBB1 phosphotyrosine kinase siRNA
ggtctgccatgccttgtgctccc

SEQ ID NO: 6609 - DNA, 23 bp, Artificial Sequence
  Description of Artificial Sequence: Synthetic oligonucleotide
  Epidermal growth factor receptor (EGFR), ERBB1 phosphotyrosine kinase siRNA
gtctgccatgccttgtgctcccc

SEQ ID NO: 6610 - DNA, 23 bp, Artificial Sequence
  Description of Artificial Sequence: Synthetic oligonucleotide
  Epidermal growth factor receptor (EGFR), ERBB1 phosphotyrosine kinase siRNA
tctgccatgccttgtgctccccc

SEQ ID NO: 6611 - DNA, 23 bp, Artificial Sequence
  Description of Artificial Sequence: Synthetic oligonucleotide
  Epidermal growth factor receptor (EGFR), ERBB1 phosphotyrosine kinase siRNA
ctgccatgccttgtgctcccccg

SEQ ID NO: 6612 - DNA, 23 bp, Artificial Sequence
  Description of Artificial Sequence: Synthetic oligonucleotide
  Epidermal growth factor receptor (EGFR), ERBB1 phosphotyrosine kinase siRNA
tgccatgccttgtgctcccccga

SEQ ID NO: 6613 - DNA, 23 bp, Artificial Sequence
  Description of Artificial Sequence: Synthetic oligonucleotide
  Epidermal growth factor receptor (EGFR), ERBB1 phosphotyrosine kinase siRNA
gccatgccttgtgctcccccgag

SEQ ID NO: 6614 - DNA, 23 bp, Artificial Sequence
  Description of Artificial Sequence: Synthetic oligonucleotide
  Epidermal growth factor receptor (EGFR), ERBB1 phosphotyrosine kinase siRNA
ccatgccttgtgctcccccgagg

SEQ ID NO: 6615 - DNA, 23 bp, Artificial Sequence
  Description of Artificial Sequence: Synthetic oligonucleotide
  Epidermal growth factor receptor (EGFR), ERBB1 phosphotyrosine kinase siRNA
catgccttgtgctcccccgaggg

SEQ ID NO: 6616 - DNA, 23 bp, Artificial Sequence
  Description of Artificial Sequence: Synthetic oligonucleotide
  Epidermal growth factor receptor (EGFR), ERBB1 phosphotyrosine kinase siRNA
atgccttgtgctcccccgagggc

SEQ ID NO: 6617 - DNA, 23 bp, Artificial Sequence
  Description of Artificial Sequence: Synthetic oligonucleotide
  Epidermal growth factor receptor (EGFR), ERBB1 phosphotyrosine kinase siRNA
tgccttgtgctcccccgagggct

SEQ ID NO: 6618 - DNA, 23 bp, Artificial Sequence
  Description of Artificial Sequence: Synthetic oligonucleotide
  Epidermal growth factor receptor (EGFR), ERBB1 phosphotyrosine kinase siRNA
gccttgtgctcccccgagggctg

SEQ ID NO: 6619 - DNA, 23 bp, Artificial Sequence
  Description of Artificial Sequence: Synthetic oligonucleotide
  Epidermal growth factor receptor (EGFR), ERBB1 phosphotyrosine kinase siRNA
ccttgtgctcccccgagggctgc

SEQ ID NO: 6620 - DNA, 23 bp, Artificial Sequence
  Description of Artificial Sequence: Synthetic oligonucleotide
  Epidermal growth factor receptor (EGFR), ERBB1 phosphotyrosine kinase siRNA
cttgtgctcccccgagggctgct

SEQ ID NO: 6621 - DNA, 23 bp, Artificial Sequence
  Description of Artificial Sequence: Synthetic oligonucleotide
  Epidermal growth factor receptor (EGFR), ERBB1 phosphotyrosine kinase siRNA
ttgtgctcccccgagggctgctg

SEQ ID NO: 6622 - DNA, 23 bp, Artificial Sequence
  Description of Artificial Sequence: Synthetic oligonucleotide
  Epidermal growth factor receptor (EGFR), ERBB1 phosphotyrosine kinase siRNA
tgtgctcccccgagggctgctgg

SEQ ID NO: 6623 - DNA, 23 bp, Artificial Sequence
  Description of Artificial Sequence: Synthetic oligonucleotide
  Epidermal growth factor receptor (EGFR), ERBB1 phosphotyrosine kinase siRNA
gtgctcccccgagggctgctggg

SEQ ID NO: 6624 - DNA, 23 bp, Artificial Sequence
  Description of Artificial Sequence: Synthetic oligonucleotide
  Epidermal growth factor receptor (EGFR), ERBB1 phosphotyrosine kinase siRNA
tgctcccccgagggctgctgggg

SEQ ID NO: 6625 - DNA, 23 bp, Artificial Sequence
  Description of Artificial Sequence: Synthetic oligonucleotide
  Epidermal growth factor receptor (EGFR), ERBB1 phosphotyrosine kinase siRNA
gctcccccgagggctgctggggc

SEQ ID NO: 6626 - DNA, 23 bp, Artificial Sequence
  Description of Artificial Sequence: Synthetic oligonucleotide
  Epidermal growth factor receptor (EGFR), ERBB1 phosphotyrosine kinase siRNA
ctcccccgagggctgctggggcc

SEQ ID NO: 6627 - DNA, 23 bp, Artificial Sequence
  Description of Artificial Sequence: Synthetic oligonucleotide
  Epidermal growth factor receptor (EGFR), ERBB1 phosphotyrosine kinase siRNA
tcccccgagggctgctggggccc

SEQ ID NO: 6628 - DNA, 23 bp, Artificial Sequence
  Description of Artificial Sequence: Synthetic oligonucleotide
  Epidermal growth factor receptor (EGFR), ERBB1 phosphotyrosine kinase siRNA
cccccgagggctgctggggcccg

SEQ ID NO: 6629 - DNA, 23 bp, Artificial Sequence
  Description of Artificial Sequence: Synthetic oligonucleotide
  Epidermal growth factor receptor (EGFR), ERBB1 phosphotyrosine kinase siRNA
gggcccggagcccagggactgcg

SEQ ID NO: 6630 - DNA, 23 bp, Artificial Sequence
  Description of Artificial Sequence: Synthetic oligonucleotide
  Epidermal growth factor receptor (EGFR), ERBB1 phosphotyrosine kinase siRNA
ggcccggagcccagggactgcgt

SEQ ID NO: 6631 - DNA, 23 bp, Artificial Sequence
  Description of Artificial Sequence: Synthetic oligonucleotide
  Epidermal growth factor receptor (EGFR), ERBB1 phosphotyrosine kinase siRNA
gcccggagcccagggactgcgtc

SEQ ID NO: 6632 - DNA, 23 bp, Artificial Sequence
  Description of Artificial Sequence: Synthetic oligonucleotide
  Epidermal growth factor receptor (EGFR), ERBB1 phosphotyrosine kinase siRNA
cccggagcccagggactgcgtct

SEQ ID NO: 6633 - DNA, 23 bp, Artificial Sequence
  Description of Artificial Sequence: Synthetic oligonucleotide
  Epidermal growth factor receptor (EGFR), ERBB1 phosphotyrosine kinase siRNA
ccggagcccagggactgcgtctc

SEQ ID NO: 6634 - DNA, 23 bp, Artificial Sequence
  Description of Artificial Sequence: Synthetic oligonucleotide
  Epidermal growth factor receptor (EGFR), ERBB1 phosphotyrosine kinase siRNA
cggagcccagggactgcgtctct

SEQ ID NO: 6635 - DNA, 23 bp, Artificial Sequence
  Description of Artificial Sequence: Synthetic oligonucleotide
  Epidermal growth factor receptor (EGFR), ERBB1 phosphotyrosine kinase siRNA
ggagcccagggactgcgtctctt

SEQ ID NO: 6636 - DNA, 23 bp, Artificial Sequence
  Description of Artificial Sequence: Synthetic oligonucleotide
  Epidermal growth factor receptor (EGFR), ERBB1 phosphotyrosine kinase siRNA
gagcccagggactgcgtctcttg

SEQ ID NO: 6637 - DNA, 23 bp, Artificial Sequence
  Description of Artificial Sequence: Synthetic oligonucleotide
  Epidermal growth factor receptor (EGFR), ERBB1 phosphotyrosine kinase siRNA
agcccagggactgcgtctcttgc

SEQ ID NO: 6638 - DNA, 23 bp, Artificial Sequence
  Description of Artificial Sequence: Synthetic oligonucleotide
  Epidermal growth factor receptor (EGFR), ERBB1 phosphotyrosine kinase siRNA
gcccagggactgcgtctcttgcc

SEQ ID NO: 6639 - DNA, 23 bp, Artificial Sequence
  Description of Artificial Sequence: Synthetic oligonucleotide
  Epidermal growth factor receptor (EGFR), ERBB1 phosphotyrosine kinase siRNA
cccagggactgcgtctcttgccg

SEQ ID NO: 6640 - DNA, 23 bp, Artificial Sequence
  Description of Artificial Sequence: Synthetic oligonucleotide
  Epidermal growth factor receptor (EGFR), ERBB1 phosphotyrosine kinase siRNA
ccagggactgcgtctcttgccgg

SEQ ID NO: 6641 - DNA, 23 bp, Artificial Sequence
  Description of Artificial Sequence: Synthetic oligonucleotide
  Epidermal growth factor receptor (EGFR), ERBB1 phosphotyrosine kinase siRNA
cagggactgcgtctcttgccgga

SEQ ID NO: 6642 - DNA, 23 bp, Artificial Sequence
  Description of Artificial Sequence: Synthetic oligonucleotide
  Epidermal growth factor receptor (EGFR), ERBB1 phosphotyrosine kinase siRNA
agggactgcgtctcttgccggaa

SEQ ID NO: 6643 - DNA, 23 bp, Artificial Sequence
  Description of Artificial Sequence: Synthetic oligonucleotide
  Epidermal growth factor receptor (EGFR), ERBB1 phosphotyrosine kinase siRNA
gggactgcgtctcttgccggaat

SEQ ID NO: 6644 - DNA, 23 bp, Artificial Sequence
  Description of Artificial Sequence: Synthetic oligonucleotide
  Epidermal growth factor receptor (EGFR), ERBB1 phosphotyrosine kinase siRNA
ggactgcgtctcttgccggaatg

SEQ ID NO: 6645 - DNA, 23 bp, Artificial Sequence
  Description of Artificial Sequence: Synthetic oligonucleotide
  Epidermal growth factor receptor (EGFR), ERBB1 phosphotyrosine kinase siRNA
gactgcgtctcttgccggaatgt

SEQ ID NO: 6646 - DNA, 23 bp, Artificial Sequence
  Description of Artificial Sequence: Synthetic oligonucleotide
  Epidermal growth factor receptor (EGFR), ERBB1 phosphotyrosine kinase siRNA
actgcgtctcttgccggaatgtc

SEQ ID NO: 6647 - DNA, 23 bp, Artificial Sequence
  Description of Artificial Sequence: Synthetic oligonucleotide
  Epidermal growth factor receptor (EGFR), ERBB1 phosphotyrosine kinase siRNA
ctgcgtctcttgccggaatgtca

SEQ ID NO: 6648 - DNA, 23 bp, Artificial Sequence
  Description of Artificial Sequence: Synthetic oligonucleotide
  Epidermal growth factor receptor (EGFR), ERBB1 phosphotyrosine kinase siRNA
tgcgtctcttgccggaatgtcag

SEQ ID NO: 6649 - DNA, 23 bp, Artificial Sequence
  Description of Artificial Sequence: Synthetic oligonucleotide
  Epidermal growth factor receptor (EGFR), ERBB1 phosphotyrosine kinase siRNA
gcgtctcttgccggaatgtcagc

SEQ ID NO: 6650 - DNA, 23 bp, Artificial Sequence
  Description of Artificial Sequence: Synthetic oligonucleotide
  Epidermal growth factor receptor (EGFR), ERBB1 phosphotyrosine kinase siRNA
cgtctcttgccggaatgtcagcc

SEQ ID NO: 6651 - DNA, 23 bp, Artificial Sequence
  Description of Artificial Sequence: Synthetic oligonucleotide
  Epidermal growth factor receptor (EGFR), ERBB1 phosphotyrosine kinase siRNA
gtctcttgccggaatgtcagccg

SEQ ID NO: 6652 - DNA, 23 bp, Artificial Sequence
  Description of Artificial Sequence: Synthetic oligonucleotide
  Epidermal growth factor receptor (EGFR), ERBB1 phosphotyrosine kinase siRNA
tctcttgccggaatgtcagccga

SEQ ID NO: 6653 - DNA, 23 bp, Artificial Sequence
  Description of Artificial Sequence: Synthetic oligonucleotide
  Epidermal growth factor receptor (EGFR), ERBB1 phosphotyrosine kinase siRNA
ctcttgccggaatgtcagccgag

SEQ ID NO: 6654 - DNA, 23 bp, Artificial Sequence
  Description of Artificial Sequence: Synthetic oligonucleotide
  Epidermal growth factor receptor (EGFR), ERBB1 phosphotyrosine kinase siRNA
tcttgccggaatgtcagccgagg

SEQ ID NO: 6655 - DNA, 23 bp, Artificial Sequence
  Description of Artificial Sequence: Synthetic oligonucleotide
  Epidermal growth factor receptor (EGFR), ERBB1 phosphotyrosine kinase siRNA
cttgccggaatgtcagccgaggc

SEQ ID NO: 6656 - DNA, 23 bp, Artificial Sequence
  Description of Artificial Sequence: Synthetic oligonucleotide
  Epidermal growth factor receptor (EGFR), ERBB1 phosphotyrosine kinase siRNA
ttgccggaatgtcagccgaggca

SEQ ID NO: 6657 - DNA, 23 bp, Artificial Sequence
  Description of Artificial Sequence: Synthetic oligonucleotide
  Epidermal growth factor receptor (EGFR), ERBB1 phosphotyrosine kinase siRNA
tgccggaatgtcagccgaggcag

SEQ ID NO: 6658 - DNA, 23 bp, Artificial Sequence
  Description of Artificial Sequence: Synthetic oligonucleotide
  Epidermal growth factor receptor (EGFR), ERBB1 phosphotyrosine kinase siRNA
gccggaatgtcagccgaggcagg

SEQ ID NO: 6659 - DNA, 23 bp, Artificial Sequence
  Description of Artificial Sequence: Synthetic oligonucleotide
  Epidermal growth factor receptor (EGFR), ERBB1 phosphotyrosine kinase siRNA
ccggaatgtcagccgaggcaggg

SEQ ID NO: 6660 - DNA, 23 bp, Artificial Sequence
  Description of Artificial Sequence: Synthetic oligonucleotide
  Epidermal growth factor receptor (EGFR), ERBB1 phosphotyrosine kinase siRNA
cggaatgtcagccgaggcaggga

SEQ ID NO: 6661 - DNA, 23 bp, Artificial Sequence
  Description of Artificial Sequence: Synthetic oligonucleotide
  Epidermal growth factor receptor (EGFR), ERBB1 phosphotyrosine kinase siRNA
ggaatgtcagccgaggcagggaa

SEQ ID NO: 6662 - DNA, 23 bp, Artificial Sequence
  Description of Artificial Sequence: Synthetic oligonucleotide
  Epidermal growth factor receptor (EGFR), ERBB1 phosphotyrosine kinase siRNA
gaatgtcagccgaggcagggaat

SEQ ID NO: 6663 - DNA, 23 bp, Artificial Sequence
  Description of Artificial Sequence: Synthetic oligonucleotide
  Epidermal growth factor receptor (EGFR), ERBB1 phosphotyrosine kinase siRNA
aatgtcagccgaggcagggaatg

SEQ ID NO: 6664 - DNA, 23 bp, Artificial Sequence
  Description of Artificial Sequence: Synthetic oligonucleotide
  Epidermal growth factor receptor (EGFR), ERBB1 phosphotyrosine kinase siRNA
atgtcagccgaggcagggaatgc

SEQ ID NO: 6665 - DNA, 23 bp, Artificial Sequence
  Description of Artificial Sequence: Synthetic oligonucleotide
  Epidermal growth factor receptor (EGFR), ERBB1 phosphotyrosine kinase siRNA
tgtcagccgaggcagggaatgcg

SEQ ID NO: 6666 - DNA, 23 bp, Artificial Sequence
  Description of Artificial Sequence: Synthetic oligonucleotide
  Epidermal growth factor receptor (EGFR), ERBB1 phosphotyrosine kinase siRNA
gtcagccgaggcagggaatgcgt

SEQ ID NO: 6667 - DNA, 23 bp, Artificial Sequence
  Description of Artificial Sequence: Synthetic oligonucleotide
  Epidermal growth factor receptor (EGFR), ERBB1 phosphotyrosine kinase siRNA
tcagccgaggcagggaatgcgtg

SEQ ID NO: 6668 - DNA, 23 bp, Artificial Sequence
  Description of Artificial Sequence: Synthetic oligonucleotide
  Epidermal growth factor receptor (EGFR), ERBB1 phosphotyrosine kinase siRNA
cagccgaggcagggaatgcgtgg

SEQ ID NO: 6669 - DNA, 23 bp, Artificial Sequence
  Description of Artificial Sequence: Synthetic oligonucleotide
  Epidermal growth factor receptor (EGFR), ERBB1 phosphotyrosine kinase siRNA
agccgaggcagggaatgcgtgga

SEQ ID NO: 6670 - DNA, 23 bp, Artificial Sequence
  Description of Artificial Sequence: Synthetic oligonucleotide
  Epidermal growth factor receptor (EGFR), ERBB1 phosphotyrosine kinase siRNA
gccgaggcagggaatgcgtggac

SEQ ID NO: 6671 - DNA, 23 bp, Artificial Sequence
  Description of Artificial Sequence: Synthetic oligonucleotide
  Epidermal growth factor receptor (EGFR), ERBB1 phosphotyrosine kinase siRNA
ccgaggcagggaatgcgtggaca

SEQ ID NO: 6672 - DNA, 23 bp, Artificial Sequence
  Description of Artificial Sequence: Synthetic oligonucleotide
  Epidermal growth factor receptor (EGFR), ERBB1 phosphotyrosine kinase siRNA
cgaggcagggaatgcgtggacaa

SEQ ID NO: 6673 - DNA, 23 bp, Artificial Sequence
  Description of Artificial Sequence: Synthetic oligonucleotide
  Epidermal growth factor receptor (EGFR), ERBB1 phosphotyrosine kinase siRNA
gaggcagggaatgcgtggacaag

SEQ ID NO: 6674 - DNA, 23 bp, Artificial Sequence
  Description of Artificial Sequence: Synthetic oligonucleotide
  Epidermal growth factor receptor (EGFR), ERBB1 phosphotyrosine kinase siRNA
aggcagggaatgcgtggacaagt

SEQ ID NO: 6675 - DNA, 23 bp, Artificial Sequence
  Description of Artificial Sequence: Synthetic oligonucleotide
  Epidermal growth factor receptor (EGFR), ERBB1 phosphotyrosine kinase siRNA
ggcagggaatgcgtggacaagtg

SEQ ID NO: 6676 - DNA, 23 bp, Artificial Sequence
  Description of Artificial Sequence: Synthetic oligonucleotide
  Epidermal growth factor receptor (EGFR), ERBB1 phosphotyrosine kinase siRNA
gcagggaatgcgtggacaagtgc

SEQ ID NO: 6677 - DNA, 23 bp, Artificial Sequence
  Description of Artificial Sequence: Synthetic oligonucleotide
  Epidermal growth factor receptor (EGFR), ERBB1 phosphotyrosine kinase siRNA
cagggaatgcgtggacaagtgca

SEQ ID NO: 6678 - DNA, 23 bp, Artificial Sequence
  Description of Artificial Sequence: Synthetic oligonucleotide
  Epidermal growth factor receptor (EGFR), ERBB1 phosphotyrosine kinase siRNA
agggaatgcgtggacaagtgcaa

SEQ ID NO: 6679 - DNA, 23 bp, Artificial Sequence
  Description of Artificial Sequence: Synthetic oligonucleotide
  Epidermal growth factor receptor (EGFR), ERBB1 phosphotyrosine kinase siRNA
gggaatgcgtggacaagtgcaac

SEQ ID NO: 6680 - DNA, 23 bp, Artificial Sequence
  Description of Artificial Sequence: Synthetic oligonucleotide
  Epidermal growth factor receptor (EGFR), ERBB1 phosphotyrosine kinase siRNA
ggaatgcgtggacaagtgcaacc

SEQ ID NO: 6681 - DNA, 23 bp, Artificial Sequence
  Description of Artificial Sequence: Synthetic oligonucleotide
  Epidermal growth factor receptor (EGFR), ERBB1 phosphotyrosine kinase siRNA
gaatgcgtggacaagtgcaacct

SEQ ID NO: 6682 - DNA, 23 bp, Artificial Sequence
  Description of Artificial Sequence: Synthetic oligonucleotide
  Epidermal growth factor receptor (EGFR), ERBB1 phosphotyrosine kinase siRNA
aatgcgtggacaagtgcaacctt

SEQ ID NO: 6683 - DNA, 23 bp, Artificial Sequence
  Description of Artificial Sequence: Synthetic oligonucleotide
  Epidermal growth factor receptor (EGFR), ERBB1 phosphotyrosine kinase siRNA
atgcgtggacaagtgcaaccttc

SEQ ID NO: 6684 - DNA, 23 bp, Artificial Sequence
  Description of Artificial Sequence: Synthetic oligonucleotide
  Epidermal growth factor receptor (EGFR), ERBB1 phosphotyrosine kinase siRNA
tgcgtggacaagtgcaaccttct

SEQ ID NO: 6685 - DNA, 23 bp, Artificial Sequence
  Description of Artificial Sequence: Synthetic oligonucleotide
  Epidermal growth factor receptor (EGFR), ERBB1 phosphotyrosine kinase siRNA
gcgtggacaagtgcaaccttctg

SEQ ID NO: 6686 - DNA, 23 bp, Artificial Sequence
  Description of Artificial Sequence: Synthetic oligonucleotide
  Epidermal growth factor receptor (EGFR), ERBB1 phosphotyrosine kinase siRNA
cgtggacaagtgcaaccttctgg

SEQ ID NO: 6687 - DNA, 23 bp, Artificial Sequence
  Description of Artificial Sequence: Synthetic oligonucleotide
  Epidermal growth factor receptor (EGFR), ERBB1 phosphotyrosine kinase siRNA
gtggacaagtgcaaccttctgga

SEQ ID NO: 6688 - DNA, 23 bp, Artificial Sequence
  Description of Artificial Sequence: Synthetic oligonucleotide
  Epidermal growth factor receptor (EGFR), ERBB1 phosphotyrosine kinase siRNA
tggacaagtgcaaccttctggag

SEQ ID NO: 6689 - DNA, 23 bp, Artificial Sequence
  Description of Artificial Sequence: Synthetic oligonucleotide
  Epidermal growth factor receptor (EGFR), ERBB1 phosphotyrosine kinase siRNA
ggacaagtgcaaccttctggagg

SEQ ID NO: 6690 - DNA, 23 bp, Artificial Sequence
  Description of Artificial Sequence: Synthetic oligonucleotide
  Epidermal growth factor receptor (EGFR), ERBB1 phosphotyrosine kinase siRNA
gacaagtgcaaccttctggaggg

SEQ ID NO: 6691 - DNA, 23 bp, Artificial Sequence
  Description of Artificial Sequence: Synthetic oligonucleotide
  Epidermal growth factor receptor (EGFR), ERBB1 phosphotyrosine kinase siRNA
acaagtgcaaccttctggagggt

SEQ ID NO: 6692 - DNA, 23 bp, Artificial Sequence
  Description of Artificial Sequence: Synthetic oligonucleotide
  Epidermal growth factor receptor (EGFR), ERBB1 phosphotyrosine kinase siRNA
caagtgcaaccttctggagggtg

SEQ ID NO: 6693 - DNA, 23 bp, Artificial Sequence
  Description of Artificial Sequence: Synthetic oligonucleotide
  Epidermal growth factor receptor (EGFR), ERBB1 phosphotyrosine kinase siRNA
aagtgcaaccttctggagggtga

SEQ ID NO: 6694 - DNA, 23 bp, Artificial Sequence
  Description of Artificial Sequence: Synthetic oligonucleotide
  Epidermal growth factor receptor (EGFR), ERBB1 phosphotyrosine kinase siRNA
agtgcaaccttctggagggtgag

SEQ ID NO: 6695 - DNA, 23 bp, Artificial Sequence
  Description of Artificial Sequence: Synthetic oligonucleotide
  Epidermal growth factor receptor (EGFR), ERBB1 phosphotyrosine kinase siRNA
gtgcaaccttctggagggtgagc

SEQ ID NO: 6696 - DNA, 23 bp, Artificial Sequence
  Description of Artificial Sequence: Synthetic oligonucleotide
  Epidermal growth factor receptor (EGFR), ERBB1 phosphotyrosine kinase siRNA
tgcaaccttctggagggtgagcc

SEQ ID NO: 6697 - DNA, 23 bp, Artificial Sequence
  Description of Artificial Sequence: Synthetic oligonucleotide
  Epidermal growth factor receptor (EGFR), ERBB1 phosphotyrosine kinase siRNA
gcaaccttctggagggtgagcca

SEQ ID NO: 6698 - DNA, 23 bp, Artificial Sequence
  Description of Artificial Sequence: Synthetic oligonucleotide
  Epidermal growth factor receptor (EGFR), ERBB1 phosphotyrosine kinase siRNA
caaccttctggagggtgagccaa

SEQ ID NO: 6699 - DNA, 23 bp, Artificial Sequence
  Description of Artificial Sequence: Synthetic oligonucleotide
  Epidermal growth factor receptor (EGFR), ERBB1 phosphotyrosine kinase siRNA
aaccttctggagggtgagccaag

SEQ ID NO: 6700 - DNA, 23 bp, Artificial Sequence
  Description of Artificial Sequence: Synthetic oligonucleotide
  Epidermal growth factor receptor (EGFR), ERBB1 phosphotyrosine kinase siRNA
accttctggagggtgagccaagg

SEQ ID NO: 6701 - DNA, 23 bp, Artificial Sequence
  Description of Artificial Sequence: Synthetic oligonucleotide
  Epidermal growth factor receptor (EGFR), ERBB1 phosphotyrosine kinase siRNA
ccttctggagggtgagccaaggg

SEQ ID NO: 6702 - DNA, 23 bp, Artificial Sequence
  Description of Artificial Sequence: Synthetic oligonucleotide
  Epidermal growth factor receptor (EGFR), ERBB1 phosphotyrosine kinase siRNA
cttctggagggtgagccaaggga

SEQ ID NO: 6703 - DNA, 23 bp, Artificial Sequence
  Description of Artificial Sequence: Synthetic oligonucleotide
  Epidermal growth factor receptor (EGFR), ERBB1 phosphotyrosine kinase siRNA
ttctggagggtgagccaagggag

SEQ ID NO: 6704 - DNA, 23 bp, Artificial Sequence
  Description of Artificial Sequence: Synthetic oligonucleotide
  Epidermal growth factor receptor (EGFR), ERBB1 phosphotyrosine kinase siRNA
tctggagggtgagccaagggagt

SEQ ID NO: 6705 - DNA, 23 bp, Artificial Sequence
  Description of Artificial Sequence: Synthetic oligonucleotide
  Epidermal growth factor receptor (EGFR), ERBB1 phosphotyrosine kinase siRNA
ctggagggtgagccaagggagtt

SEQ ID NO: 6706 - DNA, 23 bp, Artificial Sequence
  Description of Artificial Sequence: Synthetic oligonucleotide
  Epidermal growth factor receptor (EGFR), ERBB1 phosphotyrosine kinase siRNA
tggagggtgagccaagggagttt

SEQ ID NO: 6707 - DNA, 23 bp, Artificial Sequence
  Description of Artificial Sequence: Synthetic oligonucleotide
  Epidermal growth factor receptor (EGFR), ERBB1 phosphotyrosine kinase siRNA
ggagggtgagccaagggagtttg

SEQ ID NO: 6708 - DNA, 23 bp, Artificial Sequence
  Description of Artificial Sequence: Synthetic oligonucleotide
  Epidermal growth factor receptor (EGFR), ERBB1 phosphotyrosine kinase siRNA
gagggtgagccaagggagtttgt

SEQ ID NO: 6709 - DNA, 23 bp, Artificial Sequence
  Description of Artificial Sequence: Synthetic oligonucleotide
  Epidermal growth factor receptor (EGFR), ERBB1 phosphotyrosine kinase siRNA
agggtgagccaagggagtttgtg

SEQ ID NO: 6710 - DNA, 23 bp, Artificial Sequence
  Description of Artificial Sequence: Synthetic oligonucleotide
  Epidermal growth factor receptor (EGFR), ERBB1 phosphotyrosine kinase siRNA
gggtgagccaagggagtttgtgg

SEQ ID NO: 6711 - DNA, 23 bp, Artificial Sequence
  Description of Artificial Sequence: Synthetic oligonucleotide
  Epidermal growth factor receptor (EGFR), ERBB1 phosphotyrosine kinase siRNA
ggtgagccaagggagtttgtgga

SEQ ID NO: 6712 - DNA, 23 bp, Artificial Sequence
  Description of Artificial Sequence: Synthetic oligonucleotide
  Epidermal growth factor receptor (EGFR), ERBB1 phosphotyrosine kinase siRNA
gtgagccaagggagtttgtggag

SEQ ID NO: 6713 - DNA, 23 bp, Artificial Sequence
  Description of Artificial Sequence: Synthetic oligonucleotide
  Epidermal growth factor receptor (EGFR), ERBB1 phosphotyrosine kinase siRNA
tgagccaagggagtttgtggaga

SEQ ID NO: 6714 - DNA, 23 bp, Artificial Sequence
  Description of Artificial Sequence: Synthetic oligonucleotide
  Epidermal growth factor receptor (EGFR), ERBB1 phosphotyrosine kinase siRNA
gagccaagggagtttgtggagaa

SEQ ID NO: 6715 - DNA, 23 bp, Artificial Sequence
  Description of Artificial Sequence: Synthetic oligonucleotide
  Epidermal growth factor receptor (EGFR), ERBB1 phosphotyrosine kinase siRNA
agccaagggagtttgtggagaac

SEQ ID NO: 6716 - DNA, 23 bp, Artificial Sequence
  Description of Artificial Sequence: Synthetic oligonucleotide
  Epidermal growth factor receptor (EGFR), ERBB1 phosphotyrosine kinase siRNA
gccaagggagtttgtggagaact

SEQ ID NO: 6717 - DNA, 23 bp, Artificial Sequence
  Description of Artificial Sequence: Synthetic oligonucleotide
  Epidermal growth factor receptor (EGFR), ERBB1 phosphotyrosine kinase siRNA
ccaagggagtttgtggagaactc

SEQ ID NO: 6718 - DNA, 23 bp, Artificial Sequence
  Description of Artificial Sequence: Synthetic oligonucleotide
  Epidermal growth factor receptor (EGFR), ERBB1 phosphotyrosine kinase siRNA
caagggagtttgtggagaactct

SEQ ID NO: 6719 - DNA, 23 bp, Artificial Sequence
  Description of Artificial Sequence: Synthetic oligonucleotide
  Epidermal growth factor receptor (EGFR), ERBB1 phosphotyrosine kinase siRNA
aagggagtttgtggagaactctg

SEQ ID NO: 6720 - DNA, 23 bp, Artificial Sequence
  Description of Artificial Sequence: Synthetic oligonucleotide
  Epidermal growth factor receptor (EGFR), ERBB1 phosphotyrosine kinase siRNA
agggagtttgtggagaactctga

SEQ ID NO: 6721 - DNA, 23 bp, Artificial Sequence
  Description of Artificial Sequence: Synthetic oligonucleotide
  Epidermal growth factor receptor (EGFR), ERBB1 phosphotyrosine kinase siRNA
gggagtttgtggagaactctgag

SEQ ID NO: 6722 - DNA, 23 bp, Artificial Sequence
  Description of Artificial Sequence: Synthetic oligonucleotide
  Epidermal growth factor receptor (EGFR), ERBB1 phosphotyrosine kinase siRNA
ggagtttgtggagaactctgagt

SEQ ID NO: 6723 - DNA, 23 bp, Artificial Sequence
  Description of Artificial Sequence: Synthetic oligonucleotide
  Epidermal growth factor receptor (EGFR), ERBB1 phosphotyrosine kinase siRNA
gagtttgtggagaactctgagtg

SEQ ID NO: 6724 - DNA, 23 bp, Artificial Sequence
  Description of Artificial Sequence: Synthetic oligonucleotide
  Epidermal growth factor receptor (EGFR), ERBB1 phosphotyrosine kinase siRNA
agtttgtggagaactctgagtgc

SEQ ID NO: 6725 - DNA, 23 bp, Artificial Sequence
  Description of Artificial Sequence: Synthetic oligonucleotide
  Epidermal growth factor receptor (EGFR), ERBB1 phosphotyrosine kinase siRNA
gtttgtggagaactctgagtgca

SEQ ID NO: 6726 - DNA, 23 bp, Artificial Sequence
  Description of Artificial Sequence: Synthetic oligonucleotide
  Epidermal growth factor receptor (EGFR), ERBB1 phosphotyrosine kinase siRNA
tttgtggagaactctgagtgcat

SEQ ID NO: 6727 - DNA, 23 bp, Artificial Sequence
  Description of Artificial Sequence: Synthetic oligonucleotide
  Epidermal growth factor receptor (EGFR), ERBB1 phosphotyrosine kinase siRNA
ttgtggagaactctgagtgcata

SEQ ID NO: 6728 - DNA, 23 bp, Artificial Sequence
  Description of Artificial Sequence: Synthetic oligonucleotide
  Epidermal growth factor receptor (EGFR), ERBB1 phosphotyrosine kinase siRNA
tgtggagaactctgagtgcatac

SEQ ID NO: 6729 - DNA, 23 bp, Artificial Sequence
  Description of Artificial Sequence: Synthetic oligonucleotide
  Epidermal growth factor receptor (EGFR), ERBB1 phosphotyrosine kinase siRNA
gtggagaactctgagtgcataca

SEQ ID NO: 6730 - DNA, 23 bp, Artificial Sequence
  Description of Artificial Sequence: Synthetic oligonucleotide
  Epidermal growth factor receptor (EGFR), ERBB1 phosphotyrosine kinase siRNA
tggagaactctgagtgcatacag

SEQ ID NO: 6731 - DNA, 23 bp, Artificial Sequence
  Description of Artificial Sequence: Synthetic oligonucleotide
  Epidermal growth factor receptor (EGFR), ERBB1 phosphotyrosine kinase siRNA
ggagaactctgagtgcatacagt

SEQ ID NO: 6732 - DNA, 23 bp, Artificial Sequence
  Description of Artificial Sequence: Synthetic oligonucleotide
  Epidermal growth factor receptor (EGFR), ERBB1 phosphotyrosine kinase siRNA
gagaactctgagtgcatacagtg

SEQ ID NO: 6733 - DNA, 23 bp, Artificial Sequence
  Description of Artificial Sequence: Synthetic oligonucleotide
  Epidermal growth factor receptor (EGFR), ERBB1 phosphotyrosine kinase siRNA
agaactctgagtgcatacagtgc

SEQ ID NO: 6734 - DNA, 23 bp, Artificial Sequence
  Description of Artificial Sequence: Synthetic oligonucleotide
  Epidermal growth factor receptor (EGFR), ERBB1 phosphotyrosine kinase siRNA
gaactctgagtgcatacagtgcc

SEQ ID NO: 6735 - DNA, 23 bp, Artificial Sequence
  Description of Artificial Sequence: Synthetic oligonucleotide
  Epidermal growth factor receptor (EGFR), ERBB1 phosphotyrosine kinase siRNA
aactctgagtgcatacagtgcca

SEQ ID NO: 6736 - DNA, 23 bp, Artificial Sequence
  Description of Artificial Sequence: Synthetic oligonucleotide
  Epidermal growth factor receptor (EGFR), ERBB1 phosphotyrosine kinase siRNA
actctgagtgcatacagtgccac

SEQ ID NO: 6737 - DNA, 23 bp, Artificial Sequence
  Description of Artificial Sequence: Synthetic oligonucleotide
  Epidermal growth factor receptor (EGFR), ERBB1 phosphotyrosine kinase siRNA
ctctgagtgcatacagtgccacc

SEQ ID NO: 6738 - DNA, 23 bp, Artificial Sequence
  Description of Artificial Sequence: Synthetic oligonucleotide
  Epidermal growth factor receptor (EGFR), ERBB1 phosphotyrosine kinase siRNA
tctgagtgcatacagtgccaccc

SEQ ID NO: 6739 - DNA, 23 bp, Artificial Sequence
  Description of Artificial Sequence: Synthetic oligonucleotide
  Epidermal growth factor receptor (EGFR), ERBB1 phosphotyrosine kinase siRNA
ctgagtgcatacagtgccaccca

SEQ ID NO: 6740 - DNA, 23 bp, Artificial Sequence
  Description of Artificial Sequence: Synthetic oligonucleotide
  Epidermal growth factor receptor (EGFR), ERBB1 phosphotyrosine kinase siRNA
tgagtgcatacagtgccacccag

SEQ ID NO: 6741 - DNA, 23 bp, Artificial Sequence
  Description of Artificial Sequence: Synthetic oligonucleotide
  Epidermal growth factor receptor (EGFR), ERBB1 phosphotyrosine kinase siRNA
gagtgcatacagtgccacccaga

SEQ ID NO: 6742 - DNA, 23 bp, Artificial Sequence
  Description of Artificial Sequence: Synthetic oligonucleotide
  Epidermal growth factor receptor (EGFR), ERBB1 phosphotyrosine kinase siRNA
agtgcatacagtgccacccagag

SEQ ID NO: 6743 - DNA, 23 bp, Artificial Sequence
  Description of Artificial Sequence: Synthetic oligonucleotide
  Epidermal growth factor receptor (EGFR), ERBB1 phosphotyrosine kinase siRNA
gtgcatacagtgccacccagagt

SEQ ID NO: 6744 - DNA, 23 bp, Artificial Sequence
  Description of Artificial Sequence: Synthetic oligonucleotide
  Epidermal growth factor receptor (EGFR), ERBB1 phosphotyrosine kinase siRNA
tgcatacagtgccacccagagtg

SEQ ID NO: 6745 - DNA, 23 bp, Artificial Sequence
  Description of Artificial Sequence: Synthetic oligonucleotide
  Epidermal growth factor receptor (EGFR), ERBB1 phosphotyrosine kinase siRNA
gcatacagtgccacccagagtgc

SEQ ID NO: 6746 - DNA, 23 bp, Artificial Sequence
  Description of Artificial Sequence: Synthetic oligonucleotide
  Epidermal growth factor receptor (EGFR), ERBB1 phosphotyrosine kinase siRNA
catacagtgccacccagagtgcc

SEQ ID NO: 6747 - DNA, 23 bp, Artificial Sequence
  Description of Artificial Sequence: Synthetic oligonucleotide
  Epidermal growth factor receptor (EGFR), ERBB1 phosphotyrosine kinase siRNA
atacagtgccacccagagtgcct

SEQ ID NO: 6748 - DNA, 23 bp, Artificial Sequence
  Description of Artificial Sequence: Synthetic oligonucleotide
  Epidermal growth factor receptor (EGFR), ERBB1 phosphotyrosine kinase siRNA
tacagtgccacccagagtgcctg

SEQ ID NO: 6749 - DNA, 23 bp, Artificial Sequence
  Description of Artificial Sequence: Synthetic oligonucleotide
  Epidermal growth factor receptor (EGFR), ERBB1 phosphotyrosine kinase siRNA
acagtgccacccagagtgcctgc

SEQ ID NO: 6750 - DNA, 23 bp, Artificial Sequence
  Description of Artificial Sequence: Synthetic oligonucleotide
  Epidermal growth factor receptor (EGFR), ERBB1 phosphotyrosine kinase siRNA
cagtgccacccagagtgcctgcc

SEQ ID NO: 6751 - DNA, 23 bp, Artificial Sequence
  Description of Artificial Sequence: Synthetic oligonucleotide
  Epidermal growth factor receptor (EGFR), ERBB1 phosphotyrosine kinase siRNA
agtgccacccagagtgcctgcct

SEQ ID NO: 6752 - DNA, 23 bp, Artificial Sequence
  Description of Artificial Sequence: Synthetic oligonucleotide
  Epidermal growth factor receptor (EGFR), ERBB1 phosphotyrosine kinase siRNA
gtgccacccagagtgcctgcctc

SEQ ID NO: 6753 - DNA, 23 bp, Artificial Sequence
  Description of Artificial Sequence: Synthetic oligonucleotide
  Epidermal growth factor receptor (EGFR), ERBB1 phosphotyrosine kinase siRNA
tgccacccagagtgcctgcctca

SEQ ID NO: 6754 - DNA, 23 bp, Artificial Sequence
  Description of Artificial Sequence: Synthetic oligonucleotide
  Epidermal growth factor receptor (EGFR), ERBB1 phosphotyrosine kinase siRNA
gccacccagagtgcctgcctcag

SEQ ID NO: 6755 - DNA, 23 bp, Artificial Sequence
  Description of Artificial Sequence: Synthetic oligonucleotide
  Epidermal growth factor receptor (EGFR), ERBB1 phosphotyrosine kinase siRNA
ccacccagagtgcctgcctcagg

SEQ ID NO: 6756 - DNA, 23 bp, Artificial Sequence
  Description of Artificial Sequence: Synthetic oligonucleotide
  Epidermal growth factor receptor (EGFR), ERBB1 phosphotyrosine kinase siRNA
cacccagagtgcctgcctcaggc

SEQ ID NO: 6757 - DNA, 23 bp, Artificial Sequence
  Description of Artificial Sequence: Synthetic oligonucleotide
  Epidermal growth factor receptor (EGFR), ERBB1 phosphotyrosine kinase siRNA
acccagagtgcctgcctcaggcc

SEQ ID NO: 6758 - DNA, 23 bp, Artificial Sequence
  Description of Artificial Sequence: Synthetic oligonucleotide
  Epidermal growth factor receptor (EGFR), ERBB1 phosphotyrosine kinase siRNA
cccagagtgcctgcctcaggcca

SEQ ID NO: 6759 - DNA, 23 bp, Artificial Sequence
  Description of Artificial Sequence: Synthetic oligonucleotide
  Epidermal growth factor receptor (EGFR), ERBB1 phosphotyrosine kinase siRNA
ccagagtgcctgcctcaggccat

SEQ ID NO: 6760 - DNA, 23 bp, Artificial Sequence
  Description of Artificial Sequence: Synthetic oligonucleotide
  Epidermal growth factor receptor (EGFR), ERBB1 phosphotyrosine kinase siRNA
cagagtgcctgcctcaggccatg

SEQ ID NO: 6761 - DNA, 23 bp, Artificial Sequence
  Description of Artificial Sequence: Synthetic oligonucleotide
  Epidermal growth factor receptor (EGFR), ERBB1 phosphotyrosine kinase siRNA
agagtgcctgcctcaggccatga

SEQ ID NO: 6762 - DNA, 23 bp, Artificial Sequence
  Description of Artificial Sequence: Synthetic oligonucleotide
  Epidermal growth factor receptor (EGFR), ERBB1 phosphotyrosine kinase siRNA
gagtgcctgcctcaggccatgaa

SEQ ID NO: 6763 - DNA, 23 bp, Artificial Sequence
  Description of Artificial Sequence: Synthetic oligonucleotide
  Epidermal growth factor receptor (EGFR), ERBB1 phosphotyrosine kinase siRNA
agtgcctgcctcaggccatgaac

SEQ ID NO: 6764 - DNA, 23 bp, Artificial Sequence
  Description of Artificial Sequence: Synthetic oligonucleotide
  Epidermal growth factor receptor (EGFR), ERBB1 phosphotyrosine kinase siRNA
gtgcctgcctcaggccatgaaca

SEQ ID NO: 6765 - DNA, 23 bp, Artificial Sequence
  Description of Artificial Sequence: Synthetic oligonucleotide
  Epidermal growth factor receptor (EGFR), ERBB1 phosphotyrosine kinase siRNA
tgcctgcctcaggccatgaacat

SEQ ID NO: 6766 - DNA, 23 bp, Artificial Sequence
  Description of Artificial Sequence: Synthetic oligonucleotide
  Epidermal growth factor receptor (EGFR), ERBB1 phosphotyrosine kinase siRNA
gcctgcctcaggccatgaacatc

SEQ ID NO: 6767 - DNA, 23 bp, Artificial Sequence
  Description of Artificial Sequence: Synthetic oligonucleotide
  Epidermal growth factor receptor (EGFR), ERBB1 phosphotyrosine kinase siRNA
cctgcctcaggccatgaacatca

SEQ ID NO: 6768 - DNA, 23 bp, Artificial Sequence
  Description of Artificial Sequence: Synthetic oligonucleotide
  Epidermal growth factor receptor (EGFR), ERBB1 phosphotyrosine kinase siRNA
ctgcctcaggccatgaacatcac

SEQ ID NO: 6769 - DNA, 23 bp, Artificial Sequence
  Description of Artificial Sequence: Synthetic oligonucleotide
  Epidermal growth factor receptor (EGFR), ERBB1 phosphotyrosine kinase siRNA
tgcctcaggccatgaacatcacc

SEQ ID NO: 6770 - DNA, 23 bp, Artificial Sequence
  Description of Artificial Sequence: Synthetic oligonucleotide
  Epidermal growth factor receptor (EGFR), ERBB1 phosphotyrosine kinase siRNA
gcctcaggccatgaacatcacct

SEQ ID NO: 6771 - DNA, 23 bp, Artificial Sequence
  Description of Artificial Sequence: Synthetic oligonucleotide
  Epidermal growth factor receptor (EGFR), ERBB1 phosphotyrosine kinase siRNA
cctcaggccatgaacatcacctg

SEQ ID NO: 6772 - DNA, 23 bp, Artificial Sequence
  Description of Artificial Sequence: Synthetic oligonucleotide
  Epidermal growth factor receptor (EGFR), ERBB1 phosphotyrosine kinase siRNA
ctcaggccatgaacatcacctgc

SEQ ID NO: 6773 - DNA, 23 bp, Artificial Sequence
  Description of Artificial Sequence: Synthetic oligonucleotide
  Epidermal growth factor receptor (EGFR), ERBB1 phosphotyrosine kinase siRNA
tcaggccatgaacatcacctgca

SEQ ID NO: 6774 - DNA, 23 bp, Artificial Sequence
  Description of Artificial Sequence: Synthetic oligonucleotide
  Epidermal growth factor receptor (EGFR), ERBB1 phosphotyrosine kinase siRNA
caggccatgaacatcacctgcac

SEQ ID NO: 6775 - DNA, 23 bp, Artificial Sequence
  Description of Artificial Sequence: Synthetic oligonucleotide
  Epidermal growth factor receptor (EGFR), ERBB1 phosphotyrosine kinase siRNA
aggccatgaacatcacctgcaca

SEQ ID NO: 6776 - DNA, 23 bp, Artificial Sequence
  Description of Artificial Sequence: Synthetic oligonucleotide
  Epidermal growth factor receptor (EGFR), ERBB1 phosphotyrosine kinase siRNA
ggccatgaacatcacctgcacag

SEQ ID NO: 6777 - DNA, 23 bp, Artificial Sequence
  Description of Artificial Sequence: Synthetic oligonucleotide
  Epidermal growth factor receptor (EGFR), ERBB1 phosphotyrosine kinase siRNA
gccatgaacatcacctgcacagg

SEQ ID NO: 6778 - DNA, 23 bp, Artificial Sequence
  Description of Artificial Sequence: Synthetic oligonucleotide
  Epidermal growth factor receptor (EGFR), ERBB1 phosphotyrosine kinase siRNA
ccatgaacatcacctgcacagga

SEQ ID NO: 6779 - DNA, 23 bp, Artificial Sequence
  Description of Artificial Sequence: Synthetic oligonucleotide
  Epidermal growth factor receptor (EGFR), ERBB1 phosphotyrosine kinase siRNA
catgaacatcacctgcacaggac

SEQ ID NO: 6780 - DNA, 23 bp, Artificial Sequence
  Description of Artificial Sequence: Synthetic oligonucleotide
  Epidermal growth factor receptor (EGFR), ERBB1 phosphotyrosine kinase siRNA
atgaacatcacctgcacaggacg

SEQ ID NO: 6781 - DNA, 23 bp, Artificial Sequence
  Description of Artificial Sequence: Synthetic oligonucleotide
  Epidermal growth factor receptor (EGFR), ERBB1 phosphotyrosine kinase siRNA
tgaacatcacctgcacaggacgg

SEQ ID NO: 6782 - DNA, 23 bp, Artificial Sequence
  Description of Artificial Sequence: Synthetic oligonucleotide
  Epidermal growth factor receptor (EGFR), ERBB1 phosphotyrosine kinase siRNA
gaacatcacctgcacaggacggg

SEQ ID NO: 6783 - DNA, 23 bp, Artificial Sequence
  Description of Artificial Sequence: Synthetic oligonucleotide
  Epidermal growth factor receptor (EGFR), ERBB1 phosphotyrosine kinase siRNA
aacatcacctgcacaggacgggg

SEQ ID NO: 6784 - DNA, 23 bp, Artificial Sequence
  Description of Artificial Sequence: Synthetic oligonucleotide
  Epidermal growth factor receptor (EGFR), ERBB1 phosphotyrosine kinase siRNA
acatcacctgcacaggacgggga

SEQ ID NO: 6785 - DNA, 23 bp, Artificial Sequence
  Description of Artificial Sequence: Synthetic oligonucleotide
  Epidermal growth factor receptor (EGFR), ERBB1 phosphotyrosine kinase siRNA
catcacctgcacaggacggggac

SEQ ID NO: 6786 - DNA, 23 bp, Artificial Sequence
  Description of Artificial Sequence: Synthetic oligonucleotide
  Epidermal growth factor receptor (EGFR), ERBB1 phosphotyrosine kinase siRNA
atcacctgcacaggacggggacc

SEQ ID NO: 6787 - DNA, 23 bp, Artificial Sequence
  Description of Artificial Sequence: Synthetic oligonucleotide
  Epidermal growth factor receptor (EGFR), ERBB1 phosphotyrosine kinase siRNA
tcacctgcacaggacggggacca

SEQ ID NO: 6788 - DNA, 23 bp, Artificial Sequence
  Description of Artificial Sequence: Synthetic oligonucleotide
  Epidermal growth factor receptor (EGFR), ERBB1 phosphotyrosine kinase siRNA
cacctgcacaggacggggaccag

SEQ ID NO: 6789 - DNA, 23 bp, Artificial Sequence
  Description of Artificial Sequence: Synthetic oligonucleotide
  Epidermal growth factor receptor (EGFR), ERBB1 phosphotyrosine kinase siRNA
acctgcacaggacggggaccaga

SEQ ID NO: 6790 - DNA, 23 bp, Artificial Sequence
  Description of Artificial Sequence: Synthetic oligonucleotide
  Epidermal growth factor receptor (EGFR), ERBB1 phosphotyrosine kinase siRNA
cctgcacaggacggggaccagac

SEQ ID NO: 6791 - DNA, 23 bp, Artificial Sequence
  Description of Artificial Sequence: Synthetic oligonucleotide
  Epidermal growth factor receptor (EGFR), ERBB1 phosphotyrosine kinase siRNA
ctgcacaggacggggaccagaca

SEQ ID NO: 6792 - DNA, 23 bp, Artificial Sequence
  Description of Artificial Sequence: Synthetic oligonucleotide
  Epidermal growth factor receptor (EGFR), ERBB1 phosphotyrosine kinase siRNA
tgcacaggacggggaccagacaa

SEQ ID NO: 6793 - DNA, 23 bp, Artificial Sequence
  Description of Artificial Sequence: Synthetic oligonucleotide
  Epidermal growth factor receptor (EGFR), ERBB1 phosphotyrosine kinase siRNA
gcacaggacggggaccagacaac

SEQ ID NO: 6794 - DNA, 23 bp, Artificial Sequence
  Description of Artificial Sequence: Synthetic oligonucleotide
  Epidermal growth factor receptor (EGFR), ERBB1 phosphotyrosine kinase siRNA
cacaggacggggaccagacaact

SEQ ID NO: 6795 - DNA, 23 bp, Artificial Sequence
  Description of Artificial Sequence: Synthetic oligonucleotide
  Epidermal growth factor receptor (EGFR), ERBB1 phosphotyrosine kinase siRNA
acaggacggggaccagacaactg

SEQ ID NO: 6796 - DNA, 23 bp, Artificial Sequence
  Description of Artificial Sequence: Synthetic oligonucleotide
  Epidermal growth factor receptor (EGFR), ERBB1 phosphotyrosine kinase siRNA
caggacggggaccagacaactgt

SEQ ID NO: 6797 - DNA, 23 bp, Artificial Sequence
  Description of Artificial Sequence: Synthetic oligonucleotide
  Epidermal growth factor receptor (EGFR), ERBB1 phosphotyrosine kinase siRNA
aggacggggaccagacaactgta

SEQ ID NO: 6798 - DNA, 23 bp, Artificial Sequence
  Description of Artificial Sequence: Synthetic oligonucleotide
  Epidermal growth factor receptor (EGFR), ERBB1 phosphotyrosine kinase siRNA
ggacggggaccagacaactgtat

SEQ ID NO: 6799 - DNA, 23 bp, Artificial Sequence
  Description of Artificial Sequence: Synthetic oligonucleotide
  Epidermal growth factor receptor (EGFR), ERBB1 phosphotyrosine kinase siRNA
gacggggaccagacaactgtatc

SEQ ID NO: 6800 - DNA, 23 bp, Artificial Sequence
  Description of Artificial Sequence: Synthetic oligonucleotide
  Epidermal growth factor receptor (EGFR), ERBB1 phosphotyrosine kinase siRNA
acggggaccagacaactgtatcc

SEQ ID NO: 6801 - DNA, 23 bp, Artificial Sequence
  Description of Artificial Sequence: Synthetic oligonucleotide
  Epidermal growth factor receptor (EGFR), ERBB1 phosphotyrosine kinase siRNA
cggggaccagacaactgtatcca

SEQ ID NO: 6802 - DNA, 23 bp, Artificial Sequence
  Description of Artificial Sequence: Synthetic oligonucleotide
  Epidermal growth factor receptor (EGFR), ERBB1 phosphotyrosine kinase siRNA
ggggaccagacaactgtatccag

SEQ ID NO: 6803 - DNA, 23 bp, Artificial Sequence
  Description of Artificial Sequence: Synthetic oligonucleotide
  Epidermal growth factor receptor (EGFR), ERBB1 phosphotyrosine kinase siRNA
gggaccagacaactgtatccagt

SEQ ID NO: 6804 - DNA, 23 bp, Artificial Sequence
  Description of Artificial Sequence: Synthetic oligonucleotide
  Epidermal growth factor receptor (EGFR), ERBB1 phosphotyrosine kinase siRNA
ggaccagacaactgtatccagtg

SEQ ID NO: 6805 - DNA, 23 bp, Artificial Sequence
  Description of Artificial Sequence: Synthetic oligonucleotide
  Epidermal growth factor receptor (EGFR), ERBB1 phosphotyrosine kinase siRNA
gaccagacaactgtatccagtgt

SEQ ID NO: 6806 - DNA, 23 bp, Artificial Sequence
  Description of Artificial Sequence: Synthetic oligonucleotide
  Epidermal growth factor receptor (EGFR), ERBB1 phosphotyrosine kinase siRNA
accagacaactgtatccagtgtg

SEQ ID NO: 6807 - DNA, 23 bp, Artificial Sequence
  Description of Artificial Sequence: Synthetic oligonucleotide
  Epidermal growth factor receptor (EGFR), ERBB1 phosphotyrosine kinase siRNA
ccagacaactgtatccagtgtgc

SEQ ID NO: 6808 - DNA, 23 bp, Artificial Sequence
  Description of Artificial Sequence: Synthetic oligonucleotide
  Epidermal growth factor receptor (EGFR), ERBB1 phosphotyrosine kinase siRNA
cagacaactgtatccagtgtgcc

SEQ ID NO: 6809 - DNA, 23 bp, Artificial Sequence
  Description of Artificial Sequence: Synthetic oligonucleotide
  Epidermal growth factor receptor (EGFR), ERBB1 phosphotyrosine kinase siRNA
agacaactgtatccagtgtgccc

SEQ ID NO: 6810 - DNA, 23 bp, Artificial Sequence
  Description of Artificial Sequence: Synthetic oligonucleotide
  Epidermal growth factor receptor (EGFR), ERBB1 phosphotyrosine kinase siRNA
gacaactgtatccagtgtgccca

SEQ ID NO: 6811 - DNA, 23 bp, Artificial Sequence
  Description of Artificial Sequence: Synthetic oligonucleotide
  Epidermal growth factor receptor (EGFR), ERBB1 phosphotyrosine kinase siRNA
acaactgtatccagtgtgcccac

SEQ ID NO: 6812 - DNA, 23 bp, Artificial Sequence
  Description of Artificial Sequence: Synthetic oligonucleotide
  Epidermal growth factor receptor (EGFR), ERBB1 phosphotyrosine kinase siRNA
caactgtatccagtgtgcccact

SEQ ID NO: 6813 - DNA, 23 bp, Artificial Sequence
  Description of Artificial Sequence: Synthetic oligonucleotide
  Epidermal growth factor receptor (EGFR), ERBB1 phosphotyrosine kinase siRNA
aactgtatccagtgtgcccacta

SEQ ID NO: 6814 - DNA, 23 bp, Artificial Sequence
  Description of Artificial Sequence: Synthetic oligonucleotide
  Epidermal growth factor receptor (EGFR), ERBB1 phosphotyrosine kinase siRNA
actgtatccagtgtgcccactac

SEQ ID NO: 6815 - DNA, 23 bp, Artificial Sequence
  Description of Artificial Sequence: Synthetic oligonucleotide
  Epidermal growth factor receptor (EGFR), ERBB1 phosphotyrosine kinase siRNA
ctgtatccagtgtgcccactaca

SEQ ID NO: 6816 - DNA, 23 bp, Artificial Sequence
  Description of Artificial Sequence: Synthetic oligonucleotide
  Epidermal growth factor receptor (EGFR), ERBB1 phosphotyrosine kinase siRNA
tgtatccagtgtgcccactacat

SEQ ID NO: 6817 - DNA, 23 bp, Artificial Sequence
  Description of Artificial Sequence: Synthetic oligonucleotide
  Epidermal growth factor receptor (EGFR), ERBB1 phosphotyrosine kinase siRNA
gtatccagtgtgcccactacatt

SEQ ID NO: 6818 - DNA, 23 bp, Artificial Sequence
  Description of Artificial Sequence: Synthetic oligonucleotide
  Epidermal growth factor receptor (EGFR), ERBB1 phosphotyrosine kinase siRNA
tatccagtgtgcccactacattg

SEQ ID NO: 6819 - DNA, 23 bp, Artificial Sequence
  Description of Artificial Sequence: Synthetic oligonucleotide
  Epidermal growth factor receptor (EGFR), ERBB1 phosphotyrosine kinase siRNA
atccagtgtgcccactacattga

SEQ ID NO: 6820 - DNA, 23 bp, Artificial Sequence
  Description of Artificial Sequence: Synthetic oligonucleotide
  Epidermal growth factor receptor (EGFR), ERBB1 phosphotyrosine kinase siRNA
tccagtgtgcccactacattgac

SEQ ID NO: 6821 - DNA, 23 bp, Artificial Sequence
  Description of Artificial Sequence: Synthetic oligonucleotide
  Epidermal growth factor receptor (EGFR), ERBB1 phosphotyrosine kinase siRNA
ccagtgtgcccactacattgacg

SEQ ID NO: 6822 - DNA, 23 bp, Artificial Sequence
  Description of Artificial Sequence: Synthetic oligonucleotide
  Epidermal growth factor receptor (EGFR), ERBB1 phosphotyrosine kinase siRNA
cagtgtgcccactacattgacgg

SEQ ID NO: 6823 - DNA, 23 bp, Artificial Sequence
  Description of Artificial Sequence: Synthetic oligonucleotide
  Epidermal growth factor receptor (EGFR), ERBB1 phosphotyrosine kinase siRNA
agtgtgcccactacattgacggc

SEQ ID NO: 6824 - DNA, 23 bp, Artificial Sequence
  Description of Artificial Sequence: Synthetic oligonucleotide
  Epidermal growth factor receptor (EGFR), ERBB1 phosphotyrosine kinase siRNA
gtgtgcccactacattgacggcc

SEQ ID NO: 6825 - DNA, 23 bp, Artificial Sequence
  Description of Artificial Sequence: Synthetic oligonucleotide
  Epidermal growth factor receptor (EGFR), ERBB1 phosphotyrosine kinase siRNA
tgtgcccactacattgacggccc

SEQ ID NO: 6826 - DNA, 23 bp, Artificial Sequence
  Description of Artificial Sequence: Synthetic oligonucleotide
  Epidermal growth factor receptor (EGFR), ERBB1 phosphotyrosine kinase siRNA
gtgcccactacattgacggcccc

SEQ ID NO: 6827 - DNA, 23 bp, Artificial Sequence
  Description of Artificial Sequence: Synthetic oligonucleotide
  Epidermal growth factor receptor (EGFR), ERBB1 phosphotyrosine kinase siRNA
tgcccactacattgacggccccc

SEQ ID NO: 6828 - DNA, 23 bp, Artificial Sequence
  Description of Artificial Sequence: Synthetic oligonucleotide
  Epidermal growth factor receptor (EGFR), ERBB1 phosphotyrosine kinase siRNA
gcccactacattgacggccccca

SEQ ID NO: 6829 - DNA, 23 bp, Artificial Sequence
  Description of Artificial Sequence: Synthetic oligonucleotide
  Epidermal growth factor receptor (EGFR), ERBB1 phosphotyrosine kinase siRNA
cccactacattgacggcccccac

SEQ ID NO: 6830 - DNA, 23 bp, Artificial Sequence
  Description of Artificial Sequence: Synthetic oligonucleotide
  Epidermal growth factor receptor (EGFR), ERBB1 phosphotyrosine kinase siRNA
ccactacattgacggcccccact

SEQ ID NO: 6831 - DNA, 23 bp, Artificial Sequence
  Description of Artificial Sequence: Synthetic oligonucleotide
  Epidermal growth factor receptor (EGFR), ERBB1 phosphotyrosine kinase siRNA
cactacattgacggcccccactg

SEQ ID NO: 6832 - DNA, 23 bp, Artificial Sequence
  Description of Artificial Sequence: Synthetic oligonucleotide
  Epidermal growth factor receptor (EGFR), ERBB1 phosphotyrosine kinase siRNA
actacattgacggcccccactgc

SEQ ID NO: 6833 - DNA, 23 bp, Artificial Sequence
  Description of Artificial Sequence: Synthetic oligonucleotide
  Epidermal growth factor receptor (EGFR), ERBB1 phosphotyrosine kinase siRNA
ctacattgacggcccccactgcg

SEQ ID NO: 6834 - DNA, 23 bp, Artificial Sequence
  Description of Artificial Sequence: Synthetic oligonucleotide
  Epidermal growth factor receptor (EGFR), ERBB1 phosphotyrosine kinase siRNA
tacattgacggcccccactgcgt

SEQ ID NO: 6835 - DNA, 23 bp, Artificial Sequence
  Description of Artificial Sequence: Synthetic oligonucleotide
  Epidermal growth factor receptor (EGFR), ERBB1 phosphotyrosine kinase siRNA
acattgacggcccccactgcgtc

SEQ ID NO: 6836 - DNA, 23 bp, Artificial Sequence
  Description of Artificial Sequence: Synthetic oligonucleotide
  Epidermal growth factor receptor (EGFR), ERBB1 phosphotyrosine kinase siRNA
cattgacggcccccactgcgtca

SEQ ID NO: 6837 - DNA, 23 bp, Artificial Sequence
  Description of Artificial Sequence: Synthetic oligonucleotide
  Epidermal growth factor receptor (EGFR), ERBB1 phosphotyrosine kinase siRNA
attgacggcccccactgcgtcaa

SEQ ID NO: 6838 - DNA, 23 bp, Artificial Sequence
  Description of Artificial Sequence: Synthetic oligonucleotide
  Epidermal growth factor receptor (EGFR), ERBB1 phosphotyrosine kinase siRNA
ttgacggcccccactgcgtcaag

SEQ ID NO: 6839 - DNA, 23 bp, Artificial Sequence
  Description of Artificial Sequence: Synthetic oligonucleotide
  Epidermal growth factor receptor (EGFR), ERBB1 phosphotyrosine kinase siRNA
tgacggcccccactgcgtcaaga

SEQ ID NO: 6840 - DNA, 23 bp, Artificial Sequence
  Description of Artificial Sequence: Synthetic oligonucleotide
  Epidermal growth factor receptor (EGFR), ERBB1 phosphotyrosine kinase siRNA
gacggcccccactgcgtcaagac

SEQ ID NO: 6841 - DNA, 23 bp, Artificial Sequence
  Description of Artificial Sequence: Synthetic oligonucleotide
  Epidermal growth factor receptor (EGFR), ERBB1 phosphotyrosine kinase siRNA
acggcccccactgcgtcaagacc

SEQ ID NO: 6842 - DNA, 23 bp, Artificial Sequence
  Description of Artificial Sequence: Synthetic oligonucleotide
  Epidermal growth factor receptor (EGFR), ERBB1 phosphotyrosine kinase siRNA
cggcccccactgcgtcaagacct

SEQ ID NO: 6843 - DNA, 23 bp, Artificial Sequence
  Description of Artificial Sequence: Synthetic oligonucleotide
  Epidermal growth factor receptor (EGFR), ERBB1 phosphotyrosine kinase siRNA
ggcccccactgcgtcaagacctg

SEQ ID NO: 6844 - DNA, 23 bp, Artificial Sequence
  Description of Artificial Sequence: Synthetic oligonucleotide
  Epidermal growth factor receptor (EGFR), ERBB1 phosphotyrosine kinase siRNA
gcccccactgcgtcaagacctgc

SEQ ID NO: 6845 - DNA, 23 bp, Artificial Sequence
  Description of Artificial Sequence: Synthetic oligonucleotide
  Epidermal growth factor receptor (EGFR), ERBB1 phosphotyrosine kinase siRNA
cccccactgcgtcaagacctgcc

SEQ ID NO: 6846 - DNA, 23 bp, Artificial Sequence
  Description of Artificial Sequence: Synthetic oligonucleotide
  Epidermal growth factor receptor (EGFR), ERBB1 phosphotyrosine kinase siRNA
ccccactgcgtcaagacctgccc

SEQ ID NO: 6847 - DNA, 23 bp, Artificial Sequence
  Description of Artificial Sequence: Synthetic oligonucleotide
  Epidermal growth factor receptor (EGFR), ERBB1 phosphotyrosine kinase siRNA
cccactgcgtcaagacctgcccg

SEQ ID NO: 6848 - DNA, 23 bp, Artificial Sequence
  Description of Artificial Sequence: Synthetic oligonucleotide
  Epidermal growth factor receptor (EGFR), ERBB1 phosphotyrosine kinase siRNA
ccactgcgtcaagacctgcccgg

SEQ ID NO: 6849 - DNA, 23 bp, Artificial Sequence
  Description of Artificial Sequence: Synthetic oligonucleotide
  Epidermal growth factor receptor (EGFR), ERBB1 phosphotyrosine kinase siRNA
cactgcgtcaagacctgcccggc

SEQ ID NO: 6850 - DNA, 23 bp, Artificial Sequence
  Description of Artificial Sequence: Synthetic oligonucleotide
  Epidermal growth factor receptor (EGFR), ERBB1 phosphotyrosine kinase siRNA
actgcgtcaagacctgcccggca

SEQ ID NO: 6851 - DNA, 23 bp, Artificial Sequence
  Description of Artificial Sequence: Synthetic oligonucleotide
  Epidermal growth factor receptor (EGFR), ERBB1 phosphotyrosine kinase siRNA
ctgcgtcaagacctgcccggcag

SEQ ID NO: 6852 - DNA, 23 bp, Artificial Sequence
  Description of Artificial Sequence: Synthetic oligonucleotide
  Epidermal growth factor receptor (EGFR), ERBB1 phosphotyrosine kinase siRNA
tgcgtcaagacctgcccggcagg

SEQ ID NO: 6853 - DNA, 23 bp, Artificial Sequence
  Description of Artificial Sequence: Synthetic oligonucleotide
  Epidermal growth factor receptor (EGFR), ERBB1 phosphotyrosine kinase siRNA
gcgtcaagacctgcccggcagga

SEQ ID NO: 6854 - DNA, 23 bp, Artificial Sequence
  Description of Artificial Sequence: Synthetic oligonucleotide
  Epidermal growth factor receptor (EGFR), ERBB1 phosphotyrosine kinase siRNA
cgtcaagacctgcccggcaggag

SEQ ID NO: 6855 - DNA, 23 bp, Artificial Sequence
  Description of Artificial Sequence: Synthetic oligonucleotide
  Epidermal growth factor receptor (EGFR), ERBB1 phosphotyrosine kinase siRNA
gtcaagacctgcccggcaggagt

SEQ ID NO: 6856 - DNA, 23 bp, Artificial Sequence
  Description of Artificial Sequence: Synthetic oligonucleotide
  Epidermal growth factor receptor (EGFR), ERBB1 phosphotyrosine kinase siRNA
tcaagacctgcccggcaggagtc

SEQ ID NO: 6857 - DNA, 23 bp, Artificial Sequence
  Description of Artificial Sequence: Synthetic oligonucleotide
  Epidermal growth factor receptor (EGFR), ERBB1 phosphotyrosine kinase siRNA
caagacctgcccggcaggagtca

SEQ ID NO: 6858 - DNA, 23 bp, Artificial Sequence
  Description of Artificial Sequence: Synthetic oligonucleotide
  Epidermal growth factor receptor (EGFR), ERBB1 phosphotyrosine kinase siRNA
aagacctgcccggcaggagtcat

SEQ ID NO: 6859 - DNA, 23 bp, Artificial Sequence
  Description of Artificial Sequence: Synthetic oligonucleotide
  Epidermal growth factor receptor (EGFR), ERBB1 phosphotyrosine kinase siRNA
agacctgcccggcaggagtcatg

SEQ ID NO: 6860 - DNA, 23 bp, Artificial Sequence
  Description of Artificial Sequence: Synthetic oligonucleotide
  Epidermal growth factor receptor (EGFR), ERBB1 phosphotyrosine kinase siRNA
gacctgcccggcaggagtcatgg

SEQ ID NO: 6861 - DNA, 23 bp, Artificial Sequence
  Description of Artificial Sequence: Synthetic oligonucleotide
  Epidermal growth factor receptor (EGFR), ERBB1 phosphotyrosine kinase siRNA
acctgcccggcaggagtcatggg

SEQ ID NO: 6862 - DNA, 23 bp, Artificial Sequence
  Description of Artificial Sequence: Synthetic oligonucleotide
  Epidermal growth factor receptor (EGFR), ERBB1 phosphotyrosine kinase siRNA
cctgcccggcaggagtcatggga

SEQ ID NO: 6863 - DNA, 23 bp, Artificial Sequence
  Description of Artificial Sequence: Synthetic oligonucleotide
  Epidermal growth factor receptor (EGFR), ERBB1 phosphotyrosine kinase siRNA
ctgcccggcaggagtcatgggag

SEQ ID NO: 6864 - DNA, 23 bp, Artificial Sequence
  Description of Artificial Sequence: Synthetic oligonucleotide
  Epidermal growth factor receptor (EGFR), ERBB1 phosphotyrosine kinase siRNA
tgcccggcaggagtcatgggaga

SEQ ID NO: 6865 - DNA, 23 bp, Artificial Sequence
  Description of Artificial Sequence: Synthetic oligonucleotide
  Epidermal growth factor receptor (EGFR), ERBB1 phosphotyrosine kinase siRNA
gcccggcaggagtcatgggagaa

SEQ ID NO: 6866 - DNA, 23 bp, Artificial Sequence
  Description of Artificial Sequence: Synthetic oligonucleotide
  Epidermal growth factor receptor (EGFR), ERBB1 phosphotyrosine kinase siRNA
cccggcaggagtcatgggagaaa

SEQ ID NO: 6867 - DNA, 23 bp, Artificial Sequence
  Description of Artificial Sequence: Synthetic oligonucleotide
  Epidermal growth factor receptor (EGFR), ERBB1 phosphotyrosine kinase siRNA
ccggcaggagtcatgggagaaaa

SEQ ID NO: 6868 - DNA, 23 bp, Artificial Sequence
  Description of Artificial Sequence: Synthetic oligonucleotide
  Epidermal growth factor receptor (EGFR), ERBB1 phosphotyrosine kinase siRNA
cggcaggagtcatgggagaaaac

SEQ ID NO: 6869 - DNA, 23 bp, Artificial Sequence
  Description of Artificial Sequence: Synthetic oligonucleotide
  Epidermal growth factor receptor (EGFR), ERBB1 phosphotyrosine kinase siRNA
ggcaggagtcatgggagaaaaca

SEQ ID NO: 6870 - DNA, 23 bp, Artificial Sequence
  Description of Artificial Sequence: Synthetic oligonucleotide
  Epidermal growth factor receptor (EGFR), ERBB1 phosphotyrosine kinase siRNA
gcaggagtcatgggagaaaacaa

SEQ ID NO: 6871 - DNA, 23 bp, Artificial Sequence
  Description of Artificial Sequence: Synthetic oligonucleotide
  Epidermal growth factor receptor (EGFR), ERBB1 phosphotyrosine kinase siRNA
caggagtcatgggagaaaacaac

SEQ ID NO: 6872 - DNA, 23 bp, Artificial Sequence
  Description of Artificial Sequence: Synthetic oligonucleotide
  Epidermal growth factor receptor (EGFR), ERBB1 phosphotyrosine kinase siRNA
aggagtcatgggagaaaacaaca

SEQ ID NO: 6873 - DNA, 23 bp, Artificial Sequence
  Description of Artificial Sequence: Synthetic oligonucleotide
  Epidermal growth factor receptor (EGFR), ERBB1 phosphotyrosine kinase siRNA
ggagtcatgggagaaaacaacac

SEQ ID NO: 6874 - DNA, 23 bp, Artificial Sequence
  Description of Artificial Sequence: Synthetic oligonucleotide
  Epidermal growth factor receptor (EGFR), ERBB1 phosphotyrosine kinase siRNA
gagtcatgggagaaaacaacacc

SEQ ID NO: 6875 - DNA, 23 bp, Artificial Sequence
  Description of Artificial Sequence: Synthetic oligonucleotide
  Epidermal growth factor receptor (EGFR), ERBB1 phosphotyrosine kinase siRNA
agtcatgggagaaaacaacaccc

SEQ ID NO: 6876 - DNA, 23 bp, Artificial Sequence
  Description of Artificial Sequence: Synthetic oligonucleotide
  Epidermal growth factor receptor (EGFR), ERBB1 phosphotyrosine kinase siRNA
gtcatgggagaaaacaacaccct

SEQ ID NO: 6877 - DNA, 23 bp, Artificial Sequence
  Description of Artificial Sequence: Synthetic oligonucleotide
  Epidermal growth factor receptor (EGFR), ERBB1 phosphotyrosine kinase siRNA
tcatgggagaaaacaacaccctg

SEQ ID NO: 6878 - DNA, 23 bp, Artificial Sequence
  Description of Artificial Sequence: Synthetic oligonucleotide
  Epidermal growth factor receptor (EGFR), ERBB1 phosphotyrosine kinase siRNA
catgggagaaaacaacaccctgg

SEQ ID NO: 6879 - DNA, 23 bp, Artificial Sequence
  Description of Artificial Sequence: Synthetic oligonucleotide
  Epidermal growth factor receptor (EGFR), ERBB1 phosphotyrosine kinase siRNA
atgggagaaaacaacaccctggt

SEQ ID NO: 6880 - DNA, 23 bp, Artificial Sequence
  Description of Artificial Sequence: Synthetic oligonucleotide
  Epidermal growth factor receptor (EGFR), ERBB1 phosphotyrosine kinase siRNA
tgggagaaaacaacaccctggtc

SEQ ID NO: 6881 - DNA, 23 bp, Artificial Sequence
  Description of Artificial Sequence: Synthetic oligonucleotide
  Epidermal growth factor receptor (EGFR), ERBB1 phosphotyrosine kinase siRNA
gggagaaaacaacaccctggtct

SEQ ID NO: 6882 - DNA, 23 bp, Artificial Sequence
  Description of Artificial Sequence: Synthetic oligonucleotide
  Epidermal growth factor receptor (EGFR), ERBB1 phosphotyrosine kinase siRNA
ggagaaaacaacaccctggtctg

SEQ ID NO: 6883 - DNA, 23 bp, Artificial Sequence
  Description of Artificial Sequence: Synthetic oligonucleotide
  Epidermal growth factor receptor (EGFR), ERBB1 phosphotyrosine kinase siRNA
gagaaaacaacaccctggtctgg

SEQ ID NO: 6884 - DNA, 23 bp, Artificial Sequence
  Description of Artificial Sequence: Synthetic oligonucleotide
  Epidermal growth factor receptor (EGFR), ERBB1 phosphotyrosine kinase siRNA
agaaaacaacaccctggtctgga

SEQ ID NO: 6885 - DNA, 23 bp, Artificial Sequence
  Description of Artificial Sequence: Synthetic oligonucleotide
  Epidermal growth factor receptor (EGFR), ERBB1 phosphotyrosine kinase siRNA
gaaaacaacaccctggtctggaa

SEQ ID NO: 6886 - DNA, 23 bp, Artificial Sequence
  Description of Artificial Sequence: Synthetic oligonucleotide
  Epidermal growth factor receptor (EGFR), ERBB1 phosphotyrosine kinase siRNA
aaaacaacaccctggtctggaag

SEQ ID NO: 6887 - DNA, 23 bp, Artificial Sequence
  Description of Artificial Sequence: Synthetic oligonucleotide
  Epidermal growth factor receptor (EGFR), ERBB1 phosphotyrosine kinase siRNA
aaacaacaccctggtctggaagt

SEQ ID NO: 6888 - DNA, 23 bp, Artificial Sequence
  Description of Artificial Sequence: Synthetic oligonucleotide
  Epidermal growth factor receptor (EGFR), ERBB1 phosphotyrosine kinase siRNA
aacaacaccctggtctggaagta

SEQ ID NO: 6889 - DNA, 23 bp, Artificial Sequence
  Description of Artificial Sequence: Synthetic oligonucleotide
  Epidermal growth factor receptor (EGFR), ERBB1 phosphotyrosine kinase siRNA
acaacaccctggtctggaagtac

SEQ ID NO: 6890 - DNA, 23 bp, Artificial Sequence
  Description of Artificial Sequence: Synthetic oligonucleotide
  Epidermal growth factor receptor (EGFR), ERBB1 phosphotyrosine kinase siRNA
caacaccctggtctggaagtacg

SEQ ID NO: 6891 - DNA, 23 bp, Artificial Sequence
  Description of Artificial Sequence: Synthetic oligonucleotide
  Epidermal growth factor receptor (EGFR), ERBB1 phosphotyrosine kinase siRNA
aacaccctggtctggaagtacgc

SEQ ID NO: 6892 - DNA, 23 bp, Artificial Sequence
  Description of Artificial Sequence: Synthetic oligonucleotide
  Epidermal growth factor receptor (EGFR), ERBB1 phosphotyrosine kinase siRNA
acaccctggtctggaagtacgca

SEQ ID NO: 6893 - DNA, 23 bp, Artificial Sequence
  Description of Artificial Sequence: Synthetic oligonucleotide
  Epidermal growth factor receptor (EGFR), ERBB1 phosphotyrosine kinase siRNA
caccctggtctggaagtacgcag

SEQ ID NO: 6894 - DNA, 23 bp, Artificial Sequence
  Description of Artificial Sequence: Synthetic oligonucleotide
  Epidermal growth factor receptor (EGFR), ERBB1 phosphotyrosine kinase siRNA
accctggtctggaagtacgcaga

SEQ ID NO: 6895 - DNA, 23 bp, Artificial Sequence
  Description of Artificial Sequence: Synthetic oligonucleotide
  Epidermal growth factor receptor (EGFR), ERBB1 phosphotyrosine kinase siRNA
ccctggtctggaagtacgcagac

SEQ ID NO: 6896 - DNA, 23 bp, Artificial Sequence
  Description of Artificial Sequence: Synthetic oligonucleotide
  Epidermal growth factor receptor (EGFR), ERBB1 phosphotyrosine kinase siRNA
cctggtctggaagtacgcagacg

SEQ ID NO: 6897 - DNA, 23 bp, Artificial Sequence
  Description of Artificial Sequence: Synthetic oligonucleotide
  Epidermal growth factor receptor (EGFR), ERBB1 phosphotyrosine kinase siRNA
ctggtctggaagtacgcagacgc

SEQ ID NO: 6898 - DNA, 23 bp, Artificial Sequence
  Description of Artificial Sequence: Synthetic oligonucleotide
  Epidermal growth factor receptor (EGFR), ERBB1 phosphotyrosine kinase siRNA
tggtctggaagtacgcagacgcc

SEQ ID NO: 6899 - DNA, 23 bp, Artificial Sequence
  Description of Artificial Sequence: Synthetic oligonucleotide
  Epidermal growth factor receptor (EGFR), ERBB1 phosphotyrosine kinase siRNA
ggtctggaagtacgcagacgccg

SEQ ID NO: 6900 - DNA, 23 bp, Artificial Sequence
  Description of Artificial Sequence: Synthetic oligonucleotide
  Epidermal growth factor receptor (EGFR), ERBB1 phosphotyrosine kinase siRNA
gtctggaagtacgcagacgccgg

SEQ ID NO: 6901 - DNA, 23 bp, Artificial Sequence
  Description of Artificial Sequence: Synthetic oligonucleotide
  Epidermal growth factor receptor (EGFR), ERBB1 phosphotyrosine kinase siRNA
tctggaagtacgcagacgccggc

SEQ ID NO: 6902 - DNA, 23 bp, Artificial Sequence
  Description of Artificial Sequence: Synthetic oligonucleotide
  Epidermal growth factor receptor (EGFR), ERBB1 phosphotyrosine kinase siRNA
ctggaagtacgcagacgccggcc

SEQ ID NO: 6903 - DNA, 23 bp, Artificial Sequence
  Description of Artificial Sequence: Synthetic oligonucleotide
  Epidermal growth factor receptor (EGFR), ERBB1 phosphotyrosine kinase siRNA
tggaagtacgcagacgccggcca

SEQ ID NO: 6904 - DNA, 23 bp, Artificial Sequence
  Description of Artificial Sequence: Synthetic oligonucleotide
  Epidermal growth factor receptor (EGFR), ERBB1 phosphotyrosine kinase siRNA
ggaagtacgcagacgccggccat

SEQ ID NO: 6905 - DNA, 23 bp, Artificial Sequence
  Description of Artificial Sequence: Synthetic oligonucleotide
  Epidermal growth factor receptor (EGFR), ERBB1 phosphotyrosine kinase siRNA
gaagtacgcagacgccggccatg

SEQ ID NO: 6906 - DNA, 23 bp, Artificial Sequence
  Description of Artificial Sequence: Synthetic oligonucleotide
  Epidermal growth factor receptor (EGFR), ERBB1 phosphotyrosine kinase siRNA
aagtacgcagacgccggccatgt

SEQ ID NO: 6907 - DNA, 23 bp, Artificial Sequence
  Description of Artificial Sequence: Synthetic oligonucleotide
  Epidermal growth factor receptor (EGFR), ERBB1 phosphotyrosine kinase siRNA
agtacgcagacgccggccatgtg

SEQ ID NO: 6908 - DNA, 23 bp, Artificial Sequence
  Description of Artificial Sequence: Synthetic oligonucleotide
  Epidermal growth factor receptor (EGFR), ERBB1 phosphotyrosine kinase siRNA
gtacgcagacgccggccatgtgt

SEQ ID NO: 6909 - DNA, 23 bp, Artificial Sequence
  Description of Artificial Sequence: Synthetic oligonucleotide
  Epidermal growth factor receptor (EGFR), ERBB1 phosphotyrosine kinase siRNA
tacgcagacgccggccatgtgtg

SEQ ID NO: 6910 - DNA, 23 bp, Artificial Sequence
  Description of Artificial Sequence: Synthetic oligonucleotide
  Epidermal growth factor receptor (EGFR), ERBB1 phosphotyrosine kinase siRNA
acgcagacgccggccatgtgtgc

SEQ ID NO: 6911 - DNA, 23 bp, Artificial Sequence
  Description of Artificial Sequence: Synthetic oligonucleotide
  Epidermal growth factor receptor (EGFR), ERBB1 phosphotyrosine kinase siRNA
cgcagacgccggccatgtgtgcc

SEQ ID NO: 6912 - DNA, 23 bp, Artificial Sequence
  Description of Artificial Sequence: Synthetic oligonucleotide
  Epidermal growth factor receptor (EGFR), ERBB1 phosphotyrosine kinase siRNA
gcagacgccggccatgtgtgcca

SEQ ID NO: 6913 - DNA, 23 bp, Artificial Sequence
  Description of Artificial Sequence: Synthetic oligonucleotide
  Epidermal growth factor receptor (EGFR), ERBB1 phosphotyrosine kinase siRNA
cagacgccggccatgtgtgccac

SEQ ID NO: 6914 - DNA, 23 bp, Artificial Sequence
  Description of Artificial Sequence: Synthetic oligonucleotide
  Epidermal growth factor receptor (EGFR), ERBB1 phosphotyrosine kinase siRNA
agacgccggccatgtgtgccacc

SEQ ID NO: 6915 - DNA, 23 bp, Artificial Sequence
  Description of Artificial Sequence: Synthetic oligonucleotide
  Epidermal growth factor receptor (EGFR), ERBB1 phosphotyrosine kinase siRNA
gacgccggccatgtgtgccacct

SEQ ID NO: 6916 - DNA, 23 bp, Artificial Sequence
  Description of Artificial Sequence: Synthetic oligonucleotide
  Epidermal growth factor receptor (EGFR), ERBB1 phosphotyrosine kinase siRNA
acgccggccatgtgtgccacctg

SEQ ID NO: 6917 - DNA, 23 bp, Artificial Sequence
  Description of Artificial Sequence: Synthetic oligonucleotide
  Epidermal growth factor receptor (EGFR), ERBB1 phosphotyrosine kinase siRNA
cgccggccatgtgtgccacctgt

SEQ ID NO: 6918 - DNA, 23 bp, Artificial Sequence
  Description of Artificial Sequence: Synthetic oligonucleotide
  Epidermal growth factor receptor (EGFR), ERBB1 phosphotyrosine kinase siRNA
gccggccatgtgtgccacctgtg

SEQ ID NO: 6919 - DNA, 23 bp, Artificial Sequence
  Description of Artificial Sequence: Synthetic oligonucleotide
  Epidermal growth factor receptor (EGFR), ERBB1 phosphotyrosine kinase siRNA
ccggccatgtgtgccacctgtgc

SEQ ID NO: 6920 - DNA, 23 bp, Artificial Sequence
  Description of Artificial Sequence: Synthetic oligonucleotide
  Epidermal growth factor receptor (EGFR), ERBB1 phosphotyrosine kinase siRNA
cggccatgtgtgccacctgtgcc

SEQ ID NO: 6921 - DNA, 23 bp, Artificial Sequence
  Description of Artificial Sequence: Synthetic oligonucleotide
  Epidermal growth factor receptor (EGFR), ERBB1 phosphotyrosine kinase siRNA
ggccatgtgtgccacctgtgcca

SEQ ID NO: 6922 - DNA, 23 bp, Artificial Sequence
  Description of Artificial Sequence: Synthetic oligonucleotide
  Epidermal growth factor receptor (EGFR), ERBB1 phosphotyrosine kinase siRNA
gccatgtgtgccacctgtgccat

SEQ ID NO: 6923 - DNA, 23 bp, Artificial Sequence
  Description of Artificial Sequence: Synthetic oligonucleotide
  Epidermal growth factor receptor (EGFR), ERBB1 phosphotyrosine kinase siRNA
ccatgtgtgccacctgtgccatc

SEQ ID NO: 6924 - DNA, 23 bp, Artificial Sequence
  Description of Artificial Sequence: Synthetic oligonucleotide
  Epidermal growth factor receptor (EGFR), ERBB1 phosphotyrosine kinase siRNA
catgtgtgccacctgtgccatcc

SEQ ID NO: 6925 - DNA, 23 bp, Artificial Sequence
  Description of Artificial Sequence: Synthetic oligonucleotide
  Epidermal growth factor receptor (EGFR), ERBB1 phosphotyrosine kinase siRNA
atgtgtgccacctgtgccatcca

SEQ ID NO: 6926 - DNA, 23 bp, Artificial Sequence
  Description of Artificial Sequence: Synthetic oligonucleotide
  Epidermal growth factor receptor (EGFR), ERBB1 phosphotyrosine kinase siRNA
tgtgtgccacctgtgccatccaa

SEQ ID NO: 6927 - DNA, 23 bp, Artificial Sequence
  Description of Artificial Sequence: Synthetic oligonucleotide
  Epidermal growth factor receptor (EGFR), ERBB1 phosphotyrosine kinase siRNA
gtgtgccacctgtgccatccaaa

SEQ ID NO: 6928 - DNA, 23 bp, Artificial Sequence
  Description of Artificial Sequence: Synthetic oligonucleotide
  Epidermal growth factor receptor (EGFR), ERBB1 phosphotyrosine kinase siRNA
tgtgccacctgtgccatccaaac

SEQ ID NO: 6929 - DNA, 23 bp, Artificial Sequence
  Description of Artificial Sequence: Synthetic oligonucleotide
  Epidermal growth factor receptor (EGFR), ERBB1 phosphotyrosine kinase siRNA
gtgccacctgtgccatccaaact

SEQ ID NO: 6930 - DNA, 23 bp, Artificial Sequence
  Description of Artificial Sequence: Synthetic oligonucleotide
  Epidermal growth factor receptor (EGFR), ERBB1 phosphotyrosine kinase siRNA
tgccacctgtgccatccaaactg

SEQ ID NO: 6931 - DNA, 23 bp, Artificial Sequence
  Description of Artificial Sequence: Synthetic oligonucleotide
  Epidermal growth factor receptor (EGFR), ERBB1 phosphotyrosine kinase siRNA
gccacctgtgccatccaaactgc

SEQ ID NO: 6932 - DNA, 23 bp, Artificial Sequence
  Description of Artificial Sequence: Synthetic oligonucleotide
  Epidermal growth factor receptor (EGFR), ERBB1 phosphotyrosine kinase siRNA
ccacctgtgccatccaaactgca

SEQ ID NO: 6933 - DNA, 23 bp, Artificial Sequence
  Description of Artificial Sequence: Synthetic oligonucleotide
  Epidermal growth factor receptor (EGFR), ERBB1 phosphotyrosine kinase siRNA
cacctgtgccatccaaactgcac

SEQ ID NO: 6934 - DNA, 23 bp, Artificial Sequence
  Description of Artificial Sequence: Synthetic oligonucleotide
  Epidermal growth factor receptor (EGFR), ERBB1 phosphotyrosine kinase siRNA
acctgtgccatccaaactgcacc

SEQ ID NO: 6935 - DNA, 23 bp, Artificial Sequence
  Description of Artificial Sequence: Synthetic oligonucleotide
  Epidermal growth factor receptor (EGFR), ERBB1 phosphotyrosine kinase siRNA
cctgtgccatccaaactgcacct

SEQ ID NO: 6936 - DNA, 23 bp, Artificial Sequence
  Description of Artificial Sequence: Synthetic oligonucleotide
  Epidermal growth factor receptor (EGFR), ERBB1 phosphotyrosine kinase siRNA
ctgtgccatccaaactgcaccta

SEQ ID NO: 6937 - DNA, 23 bp, Artificial Sequence
  Description of Artificial Sequence: Synthetic oligonucleotide
  Epidermal growth factor receptor (EGFR), ERBB1 phosphotyrosine kinase siRNA
tgtgccatccaaactgcacctac

SEQ ID NO: 6938 - DNA, 23 bp, Artificial Sequence
  Description of Artificial Sequence: Synthetic oligonucleotide
  Epidermal growth factor receptor (EGFR), ERBB1 phosphotyrosine kinase siRNA
gtgccatccaaactgcacctacg

SEQ ID NO: 6939 - DNA, 23 bp, Artificial Sequence
  Description of Artificial Sequence: Synthetic oligonucleotide
  Epidermal growth factor receptor (EGFR), ERBB1 phosphotyrosine kinase siRNA
tgccatccaaactgcacctacgg

SEQ ID NO: 6940 - DNA, 23 bp, Artificial Sequence
  Description of Artificial Sequence: Synthetic oligonucleotide
  Epidermal growth factor receptor (EGFR), ERBB1 phosphotyrosine kinase siRNA
gccatccaaactgcacctacgga

SEQ ID NO: 6941 - DNA, 23 bp, Artificial Sequence
  Description of Artificial Sequence: Synthetic oligonucleotide
  Epidermal growth factor receptor (EGFR), ERBB1 phosphotyrosine kinase siRNA
ccatccaaactgcacctacggat

SEQ ID NO: 6942 - DNA, 23 bp, Artificial Sequence
  Description of Artificial Sequence: Synthetic oligonucleotide
  Epidermal growth factor receptor (EGFR), ERBB1 phosphotyrosine kinase siRNA
catccaaactgcacctacggatg

SEQ ID NO: 6943 - DNA, 23 bp, Artificial Sequence
  Description of Artificial Sequence: Synthetic oligonucleotide
  Epidermal growth factor receptor (EGFR), ERBB1 phosphotyrosine kinase siRNA
atccaaactgcacctacggatgc

SEQ ID NO: 6944 - DNA, 23 bp, Artificial Sequence
  Description of Artificial Sequence: Synthetic oligonucleotide
  Epidermal growth factor receptor (EGFR), ERBB1 phosphotyrosine kinase siRNA
tccaaactgcacctacggatgca

SEQ ID NO: 6945 - DNA, 23 bp, Artificial Sequence
  Description of Artificial Sequence: Synthetic oligonucleotide
  Epidermal growth factor receptor (EGFR), ERBB1 phosphotyrosine kinase siRNA
ccaaactgcacctacggatgcac

SEQ ID NO: 6946 - DNA, 23 bp, Artificial Sequence
  Description of Artificial Sequence: Synthetic oligonucleotide
  Epidermal growth factor receptor (EGFR), ERBB1 phosphotyrosine kinase siRNA
caaactgcacctacggatgcact

SEQ ID NO: 6947 - DNA, 23 bp, Artificial Sequence
  Description of Artificial Sequence: Synthetic oligonucleotide
  Epidermal growth factor receptor (EGFR), ERBB1 phosphotyrosine kinase siRNA
aaactgcacctacggatgcactg

SEQ ID NO: 6948 - DNA, 23 bp, Artificial Sequence
  Description of Artificial Sequence: Synthetic oligonucleotide
  Epidermal growth factor receptor (EGFR), ERBB1 phosphotyrosine kinase siRNA
aactgcacctacggatgcactgg

SEQ ID NO: 6949 - DNA, 23 bp, Artificial Sequence
  Description of Artificial Sequence: Synthetic oligonucleotide
  Epidermal growth factor receptor (EGFR), ERBB1 phosphotyrosine kinase siRNA
actgcacctacggatgcactggg

SEQ ID NO: 6950 - DNA, 23 bp, Artificial Sequence
  Description of Artificial Sequence: Synthetic oligonucleotide
  Epidermal growth factor receptor (EGFR), ERBB1 phosphotyrosine kinase siRNA
ctgcacctacggatgcactgggc

SEQ ID NO: 6951 - DNA, 23 bp, Artificial Sequence
  Description of Artificial Sequence: Synthetic oligonucleotide
  Epidermal growth factor receptor (EGFR), ERBB1 phosphotyrosine kinase siRNA
tgcacctacggatgcactgggcc

SEQ ID NO: 6952 - DNA, 23 bp, Artificial Sequence
  Description of Artificial Sequence: Synthetic oligonucleotide
  Epidermal growth factor receptor (EGFR), ERBB1 phosphotyrosine kinase siRNA
gcacctacggatgcactgggcca

SEQ ID NO: 6953 - DNA, 23 bp, Artificial Sequence
  Description of Artificial Sequence: Synthetic oligonucleotide
  Epidermal growth factor receptor (EGFR), ERBB1 phosphotyrosine kinase siRNA
cacctacggatgcactgggccag

SEQ ID NO: 6954 - DNA, 23 bp, Artificial Sequence
  Description of Artificial Sequence: Synthetic oligonucleotide
  Epidermal growth factor receptor (EGFR), ERBB1 phosphotyrosine kinase siRNA
acctacggatgcactgggccagg

SEQ ID NO: 6955 - DNA, 23 bp, Artificial Sequence
  Description of Artificial Sequence: Synthetic oligonucleotide
  Epidermal growth factor receptor (EGFR), ERBB1 phosphotyrosine kinase siRNA
cctacggatgcactgggccaggt

SEQ ID NO: 6956 - DNA, 23 bp, Artificial Sequence
  Description of Artificial Sequence: Synthetic oligonucleotide
  Epidermal growth factor receptor (EGFR), ERBB1 phosphotyrosine kinase siRNA
ctacggatgcactgggccaggtc

SEQ ID NO: 6957 - DNA, 23 bp, Artificial Sequence
  Description of Artificial Sequence: Synthetic oligonucleotide
  Epidermal growth factor receptor (EGFR), ERBB1 phosphotyrosine kinase siRNA
tacggatgcactgggccaggtct

SEQ ID NO: 6958 - DNA, 23 bp, Artificial Sequence
  Description of Artificial Sequence: Synthetic oligonucleotide
  Epidermal growth factor receptor (EGFR), ERBB1 phosphotyrosine kinase siRNA
acggatgcactgggccaggtctt

SEQ ID NO: 6959 - DNA, 23 bp, Artificial Sequence
  Description of Artificial Sequence: Synthetic oligonucleotide
  Epidermal growth factor receptor (EGFR), ERBB1 phosphotyrosine kinase siRNA
cggatgcactgggccaggtcttg

SEQ ID NO: 6960 - DNA, 23 bp, Artificial Sequence
  Description of Artificial Sequence: Synthetic oligonucleotide
  Epidermal growth factor receptor (EGFR), ERBB1 phosphotyrosine kinase siRNA
ggatgcactgggccaggtcttga

SEQ ID NO: 6961 - DNA, 23 bp, Artificial Sequence
  Description of Artificial Sequence: Synthetic oligonucleotide
  Epidermal growth factor receptor (EGFR), ERBB1 phosphotyrosine kinase siRNA
gatgcactgggccaggtcttgaa

SEQ ID NO: 6962 - DNA, 23 bp, Artificial Sequence
  Description of Artificial Sequence: Synthetic oligonucleotide
  Epidermal growth factor receptor (EGFR), ERBB1 phosphotyrosine kinase siRNA
atgcactgggccaggtcttgaag

SEQ ID NO: 6963 - DNA, 23 bp, Artificial Sequence
  Description of Artificial Sequence: Synthetic oligonucleotide
  Epidermal growth factor receptor (EGFR), ERBB1 phosphotyrosine kinase siRNA
tgcactgggccaggtcttgaagg

SEQ ID NO: 6964 - DNA, 23 bp, Artificial Sequence
  Description of Artificial Sequence: Synthetic oligonucleotide
  Epidermal growth factor receptor (EGFR), ERBB1 phosphotyrosine kinase siRNA
gcactgggccaggtcttgaaggc

SEQ ID NO: 6965 - DNA, 23 bp, Artificial Sequence
  Description of Artificial Sequence: Synthetic oligonucleotide
  Epidermal growth factor receptor (EGFR), ERBB1 phosphotyrosine kinase siRNA
cactgggccaggtcttgaaggct

SEQ ID NO: 6966 - DNA, 23 bp, Artificial Sequence
  Description of Artificial Sequence: Synthetic oligonucleotide
  Epidermal growth factor receptor (EGFR), ERBB1 phosphotyrosine kinase siRNA
actgggccaggtcttgaaggctg

SEQ ID NO: 6967 - DNA, 23 bp, Artificial Sequence
  Description of Artificial Sequence: Synthetic oligonucleotide
  Epidermal growth factor receptor (EGFR), ERBB1 phosphotyrosine kinase siRNA
ctgggccaggtcttgaaggctgt

SEQ ID NO: 6968 - DNA, 23 bp, Artificial Sequence
  Description of Artificial Sequence: Synthetic oligonucleotide
  Epidermal growth factor receptor (EGFR), ERBB1 phosphotyrosine kinase siRNA
tgggccaggtcttgaaggctgtc

SEQ ID NO: 6969 - DNA, 23 bp, Artificial Sequence
  Description of Artificial Sequence: Synthetic oligonucleotide
  Epidermal growth factor receptor (EGFR), ERBB1 phosphotyrosine kinase siRNA
gggccaggtcttgaaggctgtcc

SEQ ID NO: 6970 - DNA, 23 bp, Artificial Sequence
  Description of Artificial Sequence: Synthetic oligonucleotide
  Epidermal growth factor receptor (EGFR), ERBB1 phosphotyrosine kinase siRNA
ggccaggtcttgaaggctgtcca

SEQ ID NO: 6971 - DNA, 23 bp, Artificial Sequence
  Description of Artificial Sequence: Synthetic oligonucleotide
  Epidermal growth factor receptor (EGFR), ERBB1 phosphotyrosine kinase siRNA
gccaggtcttgaaggctgtccaa

SEQ ID NO: 6972 - DNA, 23 bp, Artificial Sequence
  Description of Artificial Sequence: Synthetic oligonucleotide
  Epidermal growth factor receptor (EGFR), ERBB1 phosphotyrosine kinase siRNA
ccaggtcttgaaggctgtccaac

SEQ ID NO: 6973 - DNA, 23 bp, Artificial Sequence
  Description of Artificial Sequence: Synthetic oligonucleotide
  Epidermal growth factor receptor (EGFR), ERBB1 phosphotyrosine kinase siRNA
caggtcttgaaggctgtccaacg

SEQ ID NO: 6974 - DNA, 23 bp, Artificial Sequence
  Description of Artificial Sequence: Synthetic oligonucleotide
  Epidermal growth factor receptor (EGFR), ERBB1 phosphotyrosine kinase siRNA
aggtcttgaaggctgtccaacga

SEQ ID NO: 6975 - DNA, 23 bp, Artificial Sequence
  Description of Artificial Sequence: Synthetic oligonucleotide
  Epidermal growth factor receptor (EGFR), ERBB1 phosphotyrosine kinase siRNA
ggtcttgaaggctgtccaacgaa

SEQ ID NO: 6976 - DNA, 23 bp, Artificial Sequence
  Description of Artificial Sequence: Synthetic oligonucleotide
  Epidermal growth factor receptor (EGFR), ERBB1 phosphotyrosine kinase siRNA
gtcttgaaggctgtccaacgaat

SEQ ID NO: 6977 - DNA, 23 bp, Artificial Sequence
  Description of Artificial Sequence: Synthetic oligonucleotide
  Epidermal growth factor receptor (EGFR), ERBB1 phosphotyrosine kinase siRNA
tcttgaaggctgtccaacgaatg

SEQ ID NO: 6978 - DNA, 23 bp, Artificial Sequence
  Description of Artificial Sequence: Synthetic oligonucleotide
  Epidermal growth factor receptor (EGFR), ERBB1 phosphotyrosine kinase siRNA
cttgaaggctgtccaacgaatgg

SEQ ID NO: 6979 - DNA, 23 bp, Artificial Sequence
  Description of Artificial Sequence: Synthetic oligonucleotide
  Epidermal growth factor receptor (EGFR), ERBB1 phosphotyrosine kinase siRNA
ttgaaggctgtccaacgaatggg

SEQ ID NO: 6980 - DNA, 23 bp, Artificial Sequence
  Description of Artificial Sequence: Synthetic oligonucleotide
  Epidermal growth factor receptor (EGFR), ERBB1 phosphotyrosine kinase siRNA
tgaaggctgtccaacgaatgggc

SEQ ID NO: 6981 - DNA, 23 bp, Artificial Sequence
  Description of Artificial Sequence: Synthetic oligonucleotide
  Epidermal growth factor receptor (EGFR), ERBB1 phosphotyrosine kinase siRNA
gaaggctgtccaacgaatgggcc

SEQ ID NO: 6982 - DNA, 23 bp, Artificial Sequence
  Description of Artificial Sequence: Synthetic oligonucleotide
  Epidermal growth factor receptor (EGFR), ERBB1 phosphotyrosine kinase siRNA
aaggctgtccaacgaatgggcct

SEQ ID NO: 6983 - DNA, 23 bp, Artificial Sequence
  Description of Artificial Sequence: Synthetic oligonucleotide
  Epidermal growth factor receptor (EGFR), ERBB1 phosphotyrosine kinase siRNA
aggctgtccaacgaatgggccta

SEQ ID NO: 6984 - DNA, 23 bp, Artificial Sequence
  Description of Artificial Sequence: Synthetic oligonucleotide
  Epidermal growth factor receptor (EGFR), ERBB1 phosphotyrosine kinase siRNA
ggctgtccaacgaatgggcctaa

SEQ ID NO: 6985 - DNA, 23 bp, Artificial Sequence
  Description of Artificial Sequence: Synthetic oligonucleotide
  Epidermal growth factor receptor (EGFR), ERBB1 phosphotyrosine kinase siRNA
gctgtccaacgaatgggcctaag

SEQ ID NO: 6986 - DNA, 23 bp, Artificial Sequence
  Description of Artificial Sequence: Synthetic oligonucleotide
  Epidermal growth factor receptor (EGFR), ERBB1 phosphotyrosine kinase siRNA
ctgtccaacgaatgggcctaaga

SEQ ID NO: 6987 - DNA, 23 bp, Artificial Sequence
  Description of Artificial Sequence: Synthetic oligonucleotide
  Epidermal growth factor receptor (EGFR), ERBB1 phosphotyrosine kinase siRNA
tgtccaacgaatgggcctaagat

SEQ ID NO: 6988 - DNA, 23 bp, Artificial Sequence
  Description of Artificial Sequence: Synthetic oligonucleotide
  Epidermal growth factor receptor (EGFR), ERBB1 phosphotyrosine kinase siRNA
gtccaacgaatgggcctaagatc

SEQ ID NO: 6989 - DNA, 23 bp, Artificial Sequence
  Description of Artificial Sequence: Synthetic oligonucleotide
  Epidermal growth factor receptor (EGFR), ERBB1 phosphotyrosine kinase siRNA
tccaacgaatgggcctaagatcc

SEQ ID NO: 6990 - DNA, 23 bp, Artificial Sequence
  Description of Artificial Sequence: Synthetic oligonucleotide
  Epidermal growth factor receptor (EGFR), ERBB1 phosphotyrosine kinase siRNA
ccaacgaatgggcctaagatccc

SEQ ID NO: 6991 - DNA, 23 bp, Artificial Sequence
  Description of Artificial Sequence: Synthetic oligonucleotide
  Epidermal growth factor receptor (EGFR), ERBB1 phosphotyrosine kinase siRNA
caacgaatgggcctaagatcccg

SEQ ID NO: 6992 - DNA, 23 bp, Artificial Sequence
  Description of Artificial Sequence: Synthetic oligonucleotide
  Epidermal growth factor receptor (EGFR), ERBB1 phosphotyrosine kinase siRNA
aacgaatgggcctaagatcccgt

SEQ ID NO: 6993 - DNA, 23 bp, Artificial Sequence
  Description of Artificial Sequence: Synthetic oligonucleotide
  Epidermal growth factor receptor (EGFR), ERBB1 phosphotyrosine kinase siRNA
acgaatgggcctaagatcccgtc

SEQ ID NO: 6994 - DNA, 23 bp, Artificial Sequence
  Description of Artificial Sequence: Synthetic oligonucleotide
  Epidermal growth factor receptor (EGFR), ERBB1 phosphotyrosine kinase siRNA
cgaatgggcctaagatcccgtcc

SEQ ID NO: 6995 - DNA, 23 bp, Artificial Sequence
  Description of Artificial Sequence: Synthetic oligonucleotide
  Epidermal growth factor receptor (EGFR), ERBB1 phosphotyrosine kinase siRNA
gaatgggcctaagatcccgtcca

SEQ ID NO: 6996 - DNA, 23 bp, Artificial Sequence
  Description of Artificial Sequence: Synthetic oligonucleotide
  Epidermal growth factor receptor (EGFR), ERBB1 phosphotyrosine kinase siRNA
aatgggcctaagatcccgtccat

SEQ ID NO: 6997 - DNA, 23 bp, Artificial Sequence
  Description of Artificial Sequence: Synthetic oligonucleotide
  Epidermal growth factor receptor (EGFR), ERBB1 phosphotyrosine kinase siRNA
atgggcctaagatcccgtccatc

SEQ ID NO: 6998 - DNA, 23 bp, Artificial Sequence
  Description of Artificial Sequence: Synthetic oligonucleotide
  Epidermal growth factor receptor (EGFR), ERBB1 phosphotyrosine kinase siRNA
tgggcctaagatcccgtccatcg

SEQ ID NO: 6999 - DNA, 23 bp, Artificial Sequence
  Description of Artificial Sequence: Synthetic oligonucleotide
  Epidermal growth factor receptor (EGFR), ERBB1 phosphotyrosine kinase siRNA
gggcctaagatcccgtccatcgc

SEQ ID NO: 7000 - DNA, 23 bp, Artificial Sequence
  Description of Artificial Sequence: Synthetic oligonucleotide
  Epidermal growth factor receptor (EGFR), ERBB1 phosphotyrosine kinase siRNA
ggcctaagatcccgtccatcgcc

SEQ ID NO: 7001 - DNA, 23 bp, Artificial Sequence
  Description of Artificial Sequence: Synthetic oligonucleotide
  Epidermal growth factor receptor (EGFR), ERBB1 phosphotyrosine kinase siRNA
gcctaagatcccgtccatcgcca

SEQ ID NO: 7002 - DNA, 23 bp, Artificial Sequence
  Description of Artificial Sequence: Synthetic oligonucleotide
  Epidermal growth factor receptor (EGFR), ERBB1 phosphotyrosine kinase siRNA
cctaagatcccgtccatcgccac

SEQ ID NO: 7003 - DNA, 23 bp, Artificial Sequence
  Description of Artificial Sequence: Synthetic oligonucleotide
  Epidermal growth factor receptor (EGFR), ERBB1 phosphotyrosine kinase siRNA
ctaagatcccgtccatcgccact

SEQ ID NO: 7004 - DNA, 23 bp, Artificial Sequence
  Description of Artificial Sequence: Synthetic oligonucleotide
  Epidermal growth factor receptor (EGFR), ERBB1 phosphotyrosine kinase siRNA
taagatcccgtccatcgccactg

SEQ ID NO: 7005 - DNA, 23 bp, Artificial Sequence
  Description of Artificial Sequence: Synthetic oligonucleotide
  Epidermal growth factor receptor (EGFR), ERBB1 phosphotyrosine kinase siRNA
aagatcccgtccatcgccactgg

SEQ ID NO: 7006 - DNA, 23 bp, Artificial Sequence
  Description of Artificial Sequence: Synthetic oligonucleotide
  Epidermal growth factor receptor (EGFR), ERBB1 phosphotyrosine kinase siRNA
agatcccgtccatcgccactggg

SEQ ID NO: 7007 - DNA, 23 bp, Artificial Sequence
  Description of Artificial Sequence: Synthetic oligonucleotide
  Epidermal growth factor receptor (EGFR), ERBB1 phosphotyrosine kinase siRNA
gatcccgtccatcgccactggga

SEQ ID NO: 7008 - DNA, 23 bp, Artificial Sequence
  Description of Artificial Sequence: Synthetic oligonucleotide
  Epidermal growth factor receptor (EGFR), ERBB1 phosphotyrosine kinase siRNA
atcccgtccatcgccactgggat

SEQ ID NO: 7009 - DNA, 23 bp, Artificial Sequence
  Description of Artificial Sequence: Synthetic oligonucleotide
  Epidermal growth factor receptor (EGFR), ERBB1 phosphotyrosine kinase siRNA
tcccgtccatcgccactgggatg

SEQ ID NO: 7010 - DNA, 23 bp, Artificial Sequence
  Description of Artificial Sequence: Synthetic oligonucleotide
  Epidermal growth factor receptor (EGFR), ERBB1 phosphotyrosine kinase siRNA
cccgtccatcgccactgggatgg

SEQ ID NO: 7011 - DNA, 23 bp, Artificial Sequence
  Description of Artificial Sequence: Synthetic oligonucleotide
  Epidermal growth factor receptor (EGFR), ERBB1 phosphotyrosine kinase siRNA
ccgtccatcgccactgggatggt

SEQ ID NO: 7012 - DNA, 23 bp, Artificial Sequence
  Description of Artificial Sequence: Synthetic oligonucleotide
  Epidermal growth factor receptor (EGFR), ERBB1 phosphotyrosine kinase siRNA
cgtccatcgccactgggatggtg

SEQ ID NO: 7013 - DNA, 23 bp, Artificial Sequence
  Description of Artificial Sequence: Synthetic oligonucleotide
  Epidermal growth factor receptor (EGFR), ERBB1 phosphotyrosine kinase siRNA
gtccatcgccactgggatggtgg

SEQ ID NO: 7014 - DNA, 23 bp, Artificial Sequence
  Description of Artificial Sequence: Synthetic oligonucleotide
  Epidermal growth factor receptor (EGFR), ERBB1 phosphotyrosine kinase siRNA
tccatcgccactgggatggtggg

SEQ ID NO: 7015 - DNA, 23 bp, Artificial Sequence
  Description of Artificial Sequence: Synthetic oligonucleotide
  Epidermal growth factor receptor (EGFR), ERBB1 phosphotyrosine kinase siRNA
ccatcgccactgggatggtgggg

SEQ ID NO: 7016 - DNA, 23 bp, Artificial Sequence
  Description of Artificial Sequence: Synthetic oligonucleotide
  Epidermal growth factor receptor (EGFR), ERBB1 phosphotyrosine kinase siRNA
catcgccactgggatggtggggg

SEQ ID NO: 7017 - DNA, 23 bp, Artificial Sequence
  Description of Artificial Sequence: Synthetic oligonucleotide
  Epidermal growth factor receptor (EGFR), ERBB1 phosphotyrosine kinase siRNA
atcgccactgggatggtgggggc

SEQ ID NO: 7018 - DNA, 23 bp, Artificial Sequence
  Description of Artificial Sequence: Synthetic oligonucleotide
  Epidermal growth factor receptor (EGFR), ERBB1 phosphotyrosine kinase siRNA
tcgccactgggatggtgggggcc

SEQ ID NO: 7019 - DNA, 23 bp, Artificial Sequence
  Description of Artificial Sequence: Synthetic oligonucleotide
  Epidermal growth factor receptor (EGFR), ERBB1 phosphotyrosine kinase siRNA
cgccactgggatggtgggggccc

SEQ ID NO: 7020 - DNA, 23 bp, Artificial Sequence
  Description of Artificial Sequence: Synthetic oligonucleotide
  Epidermal growth factor receptor (EGFR), ERBB1 phosphotyrosine kinase siRNA
gccactgggatggtgggggccct

SEQ ID NO: 7021 - DNA, 23 bp, Artificial Sequence
  Description of Artificial Sequence: Synthetic oligonucleotide
  Epidermal growth factor receptor (EGFR), ERBB1 phosphotyrosine kinase siRNA
ccactgggatggtgggggccctc

SEQ ID NO: 7022 - DNA, 23 bp, Artificial Sequence
  Description of Artificial Sequence: Synthetic oligonucleotide
  Epidermal growth factor receptor (EGFR), ERBB1 phosphotyrosine kinase siRNA
cactgggatggtgggggccctcc

SEQ ID NO: 7023 - DNA, 23 bp, Artificial Sequence
  Description of Artificial Sequence: Synthetic oligonucleotide
  Epidermal growth factor receptor (EGFR), ERBB1 phosphotyrosine kinase siRNA
actgggatggtgggggccctcct

SEQ ID NO: 7024 - DNA, 23 bp, Artificial Sequence
  Description of Artificial Sequence: Synthetic oligonucleotide
  Epidermal growth factor receptor (EGFR), ERBB1 phosphotyrosine kinase siRNA
ctgggatggtgggggccctcctc

SEQ ID NO: 7025 - DNA, 23 bp, Artificial Sequence
  Description of Artificial Sequence: Synthetic oligonucleotide
  Epidermal growth factor receptor (EGFR), ERBB1 phosphotyrosine kinase siRNA
tgggatggtgggggccctcctct

SEQ ID NO: 7026 - DNA, 23 bp, Artificial Sequence
  Description of Artificial Sequence: Synthetic oligonucleotide
  Epidermal growth factor receptor (EGFR), ERBB1 phosphotyrosine kinase siRNA
gggatggtgggggccctcctctt

SEQ ID NO: 7027 - DNA, 23 bp, Artificial Sequence
  Description of Artificial Sequence: Synthetic oligonucleotide
  Epidermal growth factor receptor (EGFR), ERBB1 phosphotyrosine kinase siRNA
ggatggtgggggccctcctcttg

SEQ ID NO: 7028 - DNA, 23 bp, Artificial Sequence
  Description of Artificial Sequence: Synthetic oligonucleotide
  Epidermal growth factor receptor (EGFR), ERBB1 phosphotyrosine kinase siRNA
gatggtgggggccctcctcttgc

SEQ ID NO: 7029 - DNA, 23 bp, Artificial Sequence
  Description of Artificial Sequence: Synthetic oligonucleotide
  Epidermal growth factor receptor (EGFR), ERBB1 phosphotyrosine kinase siRNA
atggtgggggccctcctcttgct

SEQ ID NO: 7030 - DNA, 23 bp, Artificial Sequence
  Description of Artificial Sequence: Synthetic oligonucleotide
  Epidermal growth factor receptor (EGFR), ERBB1 phosphotyrosine kinase siRNA
tggtgggggccctcctcttgctg

SEQ ID NO: 7031 - DNA, 23 bp, Artificial Sequence
  Description of Artificial Sequence: Synthetic oligonucleotide
  Epidermal growth factor receptor (EGFR), ERBB1 phosphotyrosine kinase siRNA
ggtgggggccctcctcttgctgc

SEQ ID NO: 7032 - DNA, 23 bp, Artificial Sequence
  Description of Artificial Sequence: Synthetic oligonucleotide
  Epidermal growth factor receptor (EGFR), ERBB1 phosphotyrosine kinase siRNA
gtgggggccctcctcttgctgct

SEQ ID NO: 7033 - DNA, 23 bp, Artificial Sequence
  Description of Artificial Sequence: Synthetic oligonucleotide
  Epidermal growth factor receptor (EGFR), ERBB1 phosphotyrosine kinase siRNA
tgggggccctcctcttgctgctg

SEQ ID NO: 7034 - DNA, 23 bp, Artificial Sequence
  Description of Artificial Sequence: Synthetic oligonucleotide
  Epidermal growth factor receptor (EGFR), ERBB1 phosphotyrosine kinase siRNA
gggggccctcctcttgctgctgg

SEQ ID NO: 7035 - DNA, 23 bp, Artificial Sequence
  Description of Artificial Sequence: Synthetic oligonucleotide
  Epidermal growth factor receptor (EGFR), ERBB1 phosphotyrosine kinase siRNA
ggggccctcctcttgctgctggt

SEQ ID NO: 7036 - DNA, 23 bp, Artificial Sequence
  Description of Artificial Sequence: Synthetic oligonucleotide
  Epidermal growth factor receptor (EGFR), ERBB1 phosphotyrosine kinase siRNA
gggccctcctcttgctgctggtg

SEQ ID NO: 7037 - DNA, 23 bp, Artificial Sequence
  Description of Artificial Sequence: Synthetic oligonucleotide
  Epidermal growth factor receptor (EGFR), ERBB1 phosphotyrosine kinase siRNA
ggccctcctcttgctgctggtgg

SEQ ID NO: 7038 - DNA, 23 bp, Artificial Sequence
  Description of Artificial Sequence: Synthetic oligonucleotide
  Epidermal growth factor receptor (EGFR), ERBB1 phosphotyrosine kinase siRNA
gccctcctcttgctgctggtggt

SEQ ID NO: 7039 - DNA, 23 bp, Artificial Sequence
  Description of Artificial Sequence: Synthetic oligonucleotide
  Epidermal growth factor receptor (EGFR), ERBB1 phosphotyrosine kinase siRNA
ccctcctcttgctgctggtggtg

SEQ ID NO: 7040 - DNA, 23 bp, Artificial Sequence
  Description of Artificial Sequence: Synthetic oligonucleotide
  Epidermal growth factor receptor (EGFR), ERBB1 phosphotyrosine kinase siRNA
cctcctcttgctgctggtggtgg

SEQ ID NO: 7041 - DNA, 23 bp, Artificial Sequence
  Description of Artificial Sequence: Synthetic oligonucleotide
  Epidermal growth factor receptor (EGFR), ERBB1 phosphotyrosine kinase siRNA
ctcctcttgctgctggtggtggc

SEQ ID NO: 7042 - DNA, 23 bp, Artificial Sequence
  Description of Artificial Sequence: Synthetic oligonucleotide
  Epidermal growth factor receptor (EGFR), ERBB1 phosphotyrosine kinase siRNA
tcctcttgctgctggtggtggcc

SEQ ID NO: 7043 - DNA, 23 bp, Artificial Sequence
  Description of Artificial Sequence: Synthetic oligonucleotide
  Epidermal growth factor receptor (EGFR), ERBB1 phosphotyrosine kinase siRNA
cctcttgctgctggtggtggccc

SEQ ID NO: 7044 - DNA, 23 bp, Artificial Sequence
  Description of Artificial Sequence: Synthetic oligonucleotide
  Epidermal growth factor receptor (EGFR), ERBB1 phosphotyrosine kinase siRNA
ctcttgctgctggtggtggccct

SEQ ID NO: 7045 - DNA, 23 bp, Artificial Sequence
  Description of Artificial Sequence: Synthetic oligonucleotide
  Epidermal growth factor receptor (EGFR), ERBB1 phosphotyrosine kinase siRNA
tcttgctgctggtggtggccctg

SEQ ID NO: 7046 - DNA, 23 bp, Artificial Sequence
  Description of Artificial Sequence: Synthetic oligonucleotide
  Epidermal growth factor receptor (EGFR), ERBB1 phosphotyrosine kinase siRNA
cttgctgctggtggtggccctgg

SEQ ID NO: 7047 - DNA, 23 bp, Artificial Sequence
  Description of Artificial Sequence: Synthetic oligonucleotide
  Epidermal growth factor receptor (EGFR), ERBB1 phosphotyrosine kinase siRNA
ttgctgctggtggtggccctggg

SEQ ID NO: 7048 - DNA, 23 bp, Artificial Sequence
  Description of Artificial Sequence: Synthetic oligonucleotide
  Epidermal growth factor receptor (EGFR), ERBB1 phosphotyrosine kinase siRNA
tgctgctggtggtggccctgggg

SEQ ID NO: 7049 - DNA, 23 bp, Artificial Sequence
  Description of Artificial Sequence: Synthetic oligonucleotide
  Epidermal growth factor receptor (EGFR), ERBB1 phosphotyrosine kinase siRNA
gctgctggtggtggccctgggga

SEQ ID NO: 7050 - DNA, 23 bp, Artificial Sequence
  Description of Artificial Sequence: Synthetic oligonucleotide
  Epidermal growth factor receptor (EGFR), ERBB1 phosphotyrosine kinase siRNA
ctgctggtggtggccctggggat

SEQ ID NO: 7051 - DNA, 23 bp, Artificial Sequence
  Description of Artificial Sequence: Synthetic oligonucleotide
  Epidermal growth factor receptor (EGFR), ERBB1 phosphotyrosine kinase siRNA
tgctggtggtggccctggggatc

SEQ ID NO: 7052 - DNA, 23 bp, Artificial Sequence
  Description of Artificial Sequence: Synthetic oligonucleotide
  Epidermal growth factor receptor (EGFR), ERBB1 phosphotyrosine kinase siRNA
gctggtggtggccctggggatcg

SEQ ID NO: 7053 - DNA, 23 bp, Artificial Sequence
  Description of Artificial Sequence: Synthetic oligonucleotide
  Epidermal growth factor receptor (EGFR), ERBB1 phosphotyrosine kinase siRNA
ctggtggtggccctggggatcgg

SEQ ID NO: 7054 - DNA, 23 bp, Artificial Sequence
  Description of Artificial Sequence: Synthetic oligonucleotide
  Epidermal growth factor receptor (EGFR), ERBB1 phosphotyrosine kinase siRNA
tggtggtggccctggggatcggc

SEQ ID NO: 7055 - DNA, 23 bp, Artificial Sequence
  Description of Artificial Sequence: Synthetic oligonucleotide
  Epidermal growth factor receptor (EGFR), ERBB1 phosphotyrosine kinase siRNA
ggtggtggccctggggatcggcc

SEQ ID NO: 7056 - DNA, 23 bp, Artificial Sequence
  Description of Artificial Sequence: Synthetic oligonucleotide
  Epidermal growth factor receptor (EGFR), ERBB1 phosphotyrosine kinase siRNA
gtggtggccctggggatcggcct

SEQ ID NO: 7057 - DNA, 23 bp, Artificial Sequence
  Description of Artificial Sequence: Synthetic oligonucleotide
  Epidermal growth factor receptor (EGFR), ERBB1 phosphotyrosine kinase siRNA
tggtggccctggggatcggcctc

SEQ ID NO: 7058 - DNA, 23 bp, Artificial Sequence
  Description of Artificial Sequence: Synthetic oligonucleotide
  Epidermal growth factor receptor (EGFR), ERBB1 phosphotyrosine kinase siRNA
ggtggccctggggatcggcctct

SEQ ID NO: 7059 - DNA, 23 bp, Artificial Sequence
  Description of Artificial Sequence: Synthetic oligonucleotide
  Epidermal growth factor receptor (EGFR), ERBB1 phosphotyrosine kinase siRNA
gtggccctggggatcggcctctt

SEQ ID NO: 7060 - DNA, 23 bp, Artificial Sequence
  Description of Artificial Sequence: Synthetic oligonucleotide
  Epidermal growth factor receptor (EGFR), ERBB1 phosphotyrosine kinase siRNA
tggccctggggatcggcctcttc

SEQ ID NO: 7061 - DNA, 23 bp, Artificial Sequence
  Description of Artificial Sequence: Synthetic oligonucleotide
  Epidermal growth factor receptor (EGFR), ERBB1 phosphotyrosine kinase siRNA
ggccctggggatcggcctcttca

SEQ ID NO: 7062 - DNA, 23 bp, Artificial Sequence
  Description of Artificial Sequence: Synthetic oligonucleotide
  Epidermal growth factor receptor (EGFR), ERBB1 phosphotyrosine kinase siRNA
gccctggggatcggcctcttcat

SEQ ID NO: 7063 - DNA, 23 bp, Artificial Sequence
  Description of Artificial Sequence: Synthetic oligonucleotide
  Epidermal growth factor receptor (EGFR), ERBB1 phosphotyrosine kinase siRNA
ccctggggatcggcctcttcatg

SEQ ID NO: 7064 - DNA, 23 bp, Artificial Sequence
  Description of Artificial Sequence: Synthetic oligonucleotide
  Epidermal growth factor receptor (EGFR), ERBB1 phosphotyrosine kinase siRNA
cctggggatcggcctcttcatgc

SEQ ID NO: 7065 - DNA, 23 bp, Artificial Sequence
  Description of Artificial Sequence: Synthetic oligonucleotide
  Epidermal growth factor receptor (EGFR), ERBB1 phosphotyrosine kinase siRNA
ctggggatcggcctcttcatgcg

SEQ ID NO: 7066 - DNA, 23 bp, Artificial Sequence
  Description of Artificial Sequence: Synthetic oligonucleotide
  Epidermal growth factor receptor (EGFR), ERBB1 phosphotyrosine kinase siRNA
tggggatcggcctcttcatgcga

SEQ ID NO: 7067 - DNA, 23 bp, Artificial Sequence
  Description of Artificial Sequence: Synthetic oligonucleotide
  Epidermal growth factor receptor (EGFR), ERBB1 phosphotyrosine kinase siRNA
ggggatcggcctcttcatgcgaa

SEQ ID NO: 7068 - DNA, 23 bp, Artificial Sequence
  Description of Artificial Sequence: Synthetic oligonucleotide
  Epidermal growth factor receptor (EGFR), ERBB1 phosphotyrosine kinase siRNA
gggatcggcctcttcatgcgaag

SEQ ID NO: 7069 - DNA, 23 bp, Artificial Sequence
  Description of Artificial Sequence: Synthetic oligonucleotide
  Epidermal growth factor receptor (EGFR), ERBB1 phosphotyrosine kinase siRNA
ggatcggcctcttcatgcgaagg

SEQ ID NO: 7070 - DNA, 23 bp, Artificial Sequence
  Description of Artificial Sequence: Synthetic oligonucleotide
  Epidermal growth factor receptor (EGFR), ERBB1 phosphotyrosine kinase siRNA
gatcggcctcttcatgcgaaggc

SEQ ID NO: 7071 - DNA, 23 bp, Artificial Sequence
  Description of Artificial Sequence: Synthetic oligonucleotide
  Epidermal growth factor receptor (EGFR), ERBB1 phosphotyrosine kinase siRNA
atcggcctcttcatgcgaaggcg

SEQ ID NO: 7072 - DNA, 23 bp, Artificial Sequence
  Description of Artificial Sequence: Synthetic oligonucleotide
  Epidermal growth factor receptor (EGFR), ERBB1 phosphotyrosine kinase siRNA
tcggcctcttcatgcgaaggcgc

SEQ ID NO: 7073 - DNA, 23 bp, Artificial Sequence
  Description of Artificial Sequence: Synthetic oligonucleotide
  Epidermal growth factor receptor (EGFR), ERBB1 phosphotyrosine kinase siRNA
cggcctcttcatgcgaaggcgcc

SEQ ID NO: 7074 - DNA, 23 bp, Artificial Sequence
  Description of Artificial Sequence: Synthetic oligonucleotide
  Epidermal growth factor receptor (EGFR), ERBB1 phosphotyrosine kinase siRNA
ggcctcttcatgcgaaggcgcca

SEQ ID NO: 7075 - DNA, 23 bp, Artificial Sequence
  Description of Artificial Sequence: Synthetic oligonucleotide
  Epidermal growth factor receptor (EGFR), ERBB1 phosphotyrosine kinase siRNA
gcctcttcatgcgaaggcgccac

SEQ ID NO: 7076 - DNA, 23 bp, Artificial Sequence
  Description of Artificial Sequence: Synthetic oligonucleotide
  Epidermal growth factor receptor (EGFR), ERBB1 phosphotyrosine kinase siRNA
cctcttcatgcgaaggcgccaca

SEQ ID NO: 7077 - DNA, 23 bp, Artificial Sequence
  Description of Artificial Sequence: Synthetic oligonucleotide
  Epidermal growth factor receptor (EGFR), ERBB1 phosphotyrosine kinase siRNA
ctcttcatgcgaaggcgccacat

SEQ ID NO: 7078 - DNA, 23 bp, Artificial Sequence
  Description of Artificial Sequence: Synthetic oligonucleotide
  Epidermal growth factor receptor (EGFR), ERBB1 phosphotyrosine kinase siRNA
tcttcatgcgaaggcgccacatc

SEQ ID NO: 7079 - DNA, 23 bp, Artificial Sequence
  Description of Artificial Sequence: Synthetic oligonucleotide
  Epidermal growth factor receptor (EGFR), ERBB1 phosphotyrosine kinase siRNA
cttcatgcgaaggcgccacatcg

SEQ ID NO: 7080 - DNA, 23 bp, Artificial Sequence
  Description of Artificial Sequence: Synthetic oligonucleotide
  Epidermal growth factor receptor (EGFR), ERBB1 phosphotyrosine kinase siRNA
ttcatgcgaaggcgccacatcgt

SEQ ID NO: 7081 - DNA, 23 bp, Artificial Sequence
  Description of Artificial Sequence: Synthetic oligonucleotide
  Epidermal growth factor receptor (EGFR), ERBB1 phosphotyrosine kinase siRNA
tcatgcgaaggcgccacatcgtt

SEQ ID NO: 7082 - DNA, 23 bp, Artificial Sequence
  Description of Artificial Sequence: Synthetic oligonucleotide
  Epidermal growth factor receptor (EGFR), ERBB1 phosphotyrosine kinase siRNA
catgcgaaggcgccacatcgttc

SEQ ID NO: 7083 - DNA, 23 bp, Artificial Sequence
  Description of Artificial Sequence: Synthetic oligonucleotide
  Epidermal growth factor receptor (EGFR), ERBB1 phosphotyrosine kinase siRNA
atgcgaaggcgccacatcgttcg

SEQ ID NO: 7084 - DNA, 23 bp, Artificial Sequence
  Description of Artificial Sequence: Synthetic oligonucleotide
  Epidermal growth factor receptor (EGFR), ERBB1 phosphotyrosine kinase siRNA
tgcgaaggcgccacatcgttcgg

SEQ ID NO: 7085 - DNA, 23 bp, Artificial Sequence
  Description of Artificial Sequence: Synthetic oligonucleotide
  Epidermal growth factor receptor (EGFR), ERBB1 phosphotyrosine kinase siRNA
gcgaaggcgccacatcgttcgga

SEQ ID NO: 7086 - DNA, 23 bp, Artificial Sequence
  Description of Artificial Sequence: Synthetic oligonucleotide
  Epidermal growth factor receptor (EGFR), ERBB1 phosphotyrosine kinase siRNA
cgaaggcgccacatcgttcggaa

SEQ ID NO: 7087 - DNA, 23 bp, Artificial Sequence
  Description of Artificial Sequence: Synthetic oligonucleotide
  Epidermal growth factor receptor (EGFR), ERBB1 phosphotyrosine kinase siRNA
gaaggcgccacatcgttcggaag

SEQ ID NO: 7088 - DNA, 23 bp, Artificial Sequence
  Description of Artificial Sequence: Synthetic oligonucleotide
  Epidermal growth factor receptor (EGFR), ERBB1 phosphotyrosine kinase siRNA
aaggcgccacatcgttcggaagc

SEQ ID NO: 7089 - DNA, 23 bp, Artificial Sequence
  Description of Artificial Sequence: Synthetic oligonucleotide
  Epidermal growth factor receptor (EGFR), ERBB1 phosphotyrosine kinase siRNA
aggcgccacatcgttcggaagcg

SEQ ID NO: 7090 - DNA, 23 bp, Artificial Sequence
  Description of Artificial Sequence: Synthetic oligonucleotide
  Epidermal growth factor receptor (EGFR), ERBB1 phosphotyrosine kinase siRNA
ggcgccacatcgttcggaagcgc

SEQ ID NO: 7091 - DNA, 23 bp, Artificial Sequence
  Description of Artificial Sequence: Synthetic oligonucleotide
  Epidermal growth factor receptor (EGFR), ERBB1 phosphotyrosine kinase siRNA
gcgccacatcgttcggaagcgca

SEQ ID NO: 7092 - DNA, 23 bp, Artificial Sequence
  Description of Artificial Sequence: Synthetic oligonucleotide
  Epidermal growth factor receptor (EGFR), ERBB1 phosphotyrosine kinase siRNA
cgccacatcgttcggaagcgcac

SEQ ID NO: 7093 - DNA, 23 bp, Artificial Sequence
  Description of Artificial Sequence: Synthetic oligonucleotide
  Epidermal growth factor receptor (EGFR), ERBB1 phosphotyrosine kinase siRNA
gccacatcgttcggaagcgcacg

SEQ ID NO: 7094 - DNA, 23 bp, Artificial Sequence
  Description of Artificial Sequence: Synthetic oligonucleotide
  Epidermal growth factor receptor (EGFR), ERBB1 phosphotyrosine kinase siRNA
ccacatcgttcggaagcgcacgc

SEQ ID NO: 7095 - DNA, 23 bp, Artificial Sequence
  Description of Artificial Sequence: Synthetic oligonucleotide
  Epidermal growth factor receptor (EGFR), ERBB1 phosphotyrosine kinase siRNA
cacatcgttcggaagcgcacgct

SEQ ID NO: 7096 - DNA, 23 bp, Artificial Sequence
  Description of Artificial Sequence: Synthetic oligonucleotide
  Epidermal growth factor receptor (EGFR), ERBB1 phosphotyrosine kinase siRNA
acatcgttcggaagcgcacgctg

SEQ ID NO: 7097 - DNA, 23 bp, Artificial Sequence
  Description of Artificial Sequence: Synthetic oligonucleotide
  Epidermal growth factor receptor (EGFR), ERBB1 phosphotyrosine kinase siRNA
catcgttcggaagcgcacgctgc

SEQ ID NO: 7098 - DNA, 23 bp, Artificial Sequence
  Description of Artificial Sequence: Synthetic oligonucleotide
  Epidermal growth factor receptor (EGFR), ERBB1 phosphotyrosine kinase siRNA
atcgttcggaagcgcacgctgcg

SEQ ID NO: 7099 - DNA, 23 bp, Artificial Sequence
  Description of Artificial Sequence: Synthetic oligonucleotide
  Epidermal growth factor receptor (EGFR), ERBB1 phosphotyrosine kinase siRNA
tcgttcggaagcgcacgctgcgg

SEQ ID NO: 7100 - DNA, 23 bp, Artificial Sequence
  Description of Artificial Sequence: Synthetic oligonucleotide
  Epidermal growth factor receptor (EGFR), ERBB1 phosphotyrosine kinase siRNA
cgttcggaagcgcacgctgcgga

SEQ ID NO: 7101 - DNA, 23 bp, Artificial Sequence
  Description of Artificial Sequence: Synthetic oligonucleotide
  Epidermal growth factor receptor (EGFR), ERBB1 phosphotyrosine kinase siRNA
gttcggaagcgcacgctgcggag

SEQ ID NO: 7102 - DNA, 23 bp, Artificial Sequence
  Description of Artificial Sequence: Synthetic oligonucleotide
  Epidermal growth factor receptor (EGFR), ERBB1 phosphotyrosine kinase siRNA
ttcggaagcgcacgctgcggagg

SEQ ID NO: 7103 - DNA, 23 bp, Artificial Sequence
  Description of Artificial Sequence: Synthetic oligonucleotide
  Epidermal growth factor receptor (EGFR), ERBB1 phosphotyrosine kinase siRNA
tcggaagcgcacgctgcggaggc

SEQ ID NO: 7104 - DNA, 23 bp, Artificial Sequence
  Description of Artificial Sequence: Synthetic oligonucleotide
  Epidermal growth factor receptor (EGFR), ERBB1 phosphotyrosine kinase siRNA
cggaagcgcacgctgcggaggct

SEQ ID NO: 7105 - DNA, 23 bp, Artificial Sequence
  Description of Artificial Sequence: Synthetic oligonucleotide
  Epidermal growth factor receptor (EGFR), ERBB1 phosphotyrosine kinase siRNA
ggaagcgcacgctgcggaggctg

SEQ ID NO: 7106 - DNA, 23 bp, Artificial Sequence
  Description of Artificial Sequence: Synthetic oligonucleotide
  Epidermal growth factor receptor (EGFR), ERBB1 phosphotyrosine kinase siRNA
gaagcgcacgctgcggaggctgc

SEQ ID NO: 7107 - DNA, 23 bp, Artificial Sequence
  Description of Artificial Sequence: Synthetic oligonucleotide
  Epidermal growth factor receptor (EGFR), ERBB1 phosphotyrosine kinase siRNA
aagcgcacgctgcggaggctgct

SEQ ID NO: 7108 - DNA, 23 bp, Artificial Sequence
  Description of Artificial Sequence: Synthetic oligonucleotide
  Epidermal growth factor receptor (EGFR), ERBB1 phosphotyrosine kinase siRNA
agcgcacgctgcggaggctgctg

SEQ ID NO: 7109 - DNA, 23 bp, Artificial Sequence
  Description of Artificial Sequence: Synthetic oligonucleotide
  Epidermal growth factor receptor (EGFR), ERBB1 phosphotyrosine kinase siRNA
gcgcacgctgcggaggctgctgc

SEQ ID NO: 7110 - DNA, 23 bp, Artificial Sequence
  Description of Artificial Sequence: Synthetic oligonucleotide
  Epidermal growth factor receptor (EGFR), ERBB1 phosphotyrosine kinase siRNA
cgcacgctgcggaggctgctgca

SEQ ID NO: 7111 - DNA, 23 bp, Artificial Sequence
  Description of Artificial Sequence: Synthetic oligonucleotide
  Epidermal growth factor receptor (EGFR), ERBB1 phosphotyrosine kinase siRNA
gcacgctgcggaggctgctgcag

SEQ ID NO: 7112 - DNA, 23 bp, Artificial Sequence
  Description of Artificial Sequence: Synthetic oligonucleotide
  Epidermal growth factor receptor (EGFR), ERBB1 phosphotyrosine kinase siRNA
cacgctgcggaggctgctgcagg

SEQ ID NO: 7113 - DNA, 23 bp, Artificial Sequence
  Description of Artificial Sequence: Synthetic oligonucleotide
  Epidermal growth factor receptor (EGFR), ERBB1 phosphotyrosine kinase siRNA
acgctgcggaggctgctgcagga

SEQ ID NO: 7114 - DNA, 23 bp, Artificial Sequence
  Description of Artificial Sequence: Synthetic oligonucleotide
  Epidermal growth factor receptor (EGFR), ERBB1 phosphotyrosine kinase siRNA
cgctgcggaggctgctgcaggag

SEQ ID NO: 7115 - DNA, 23 bp, Artificial Sequence
  Description of Artificial Sequence: Synthetic oligonucleotide
  Epidermal growth factor receptor (EGFR), ERBB1 phosphotyrosine kinase siRNA
gctgcggaggctgctgcaggaga

SEQ ID NO: 7116 - DNA, 23 bp, Artificial Sequence
  Description of Artificial Sequence: Synthetic oligonucleotide
  Epidermal growth factor receptor (EGFR), ERBB1 phosphotyrosine kinase siRNA
ctgcggaggctgctgcaggagag

SEQ ID NO: 7117 - DNA, 23 bp, Artificial Sequence
  Description of Artificial Sequence: Synthetic oligonucleotide
  Epidermal growth factor receptor (EGFR), ERBB1 phosphotyrosine kinase siRNA
tgcggaggctgctgcaggagagg

SEQ ID NO: 7118 - DNA, 23 bp, Artificial Sequence
  Description of Artificial Sequence: Synthetic oligonucleotide
  Epidermal growth factor receptor (EGFR), ERBB1 phosphotyrosine kinase siRNA
gcggaggctgctgcaggagaggg

SEQ ID NO: 7119 - DNA, 23 bp, Artificial Sequence
  Description of Artificial Sequence: Synthetic oligonucleotide
  Epidermal growth factor receptor (EGFR), ERBB1 phosphotyrosine kinase siRNA
cggaggctgctgcaggagaggga

SEQ ID NO: 7120 - DNA, 23 bp, Artificial Sequence
  Description of Artificial Sequence: Synthetic oligonucleotide
  Epidermal growth factor receptor (EGFR), ERBB1 phosphotyrosine kinase siRNA
ggaggctgctgcaggagagggag

SEQ ID NO: 7121 - DNA, 23 bp, Artificial Sequence
  Description of Artificial Sequence: Synthetic oligonucleotide
  Epidermal growth factor receptor (EGFR), ERBB1 phosphotyrosine kinase siRNA
gaggctgctgcaggagagggagc

SEQ ID NO: 7122 - DNA, 23 bp, Artificial Sequence
  Description of Artificial Sequence: Synthetic oligonucleotide
  Epidermal growth factor receptor (EGFR), ERBB1 phosphotyrosine kinase siRNA
aggctgctgcaggagagggagct

SEQ ID NO: 7123 - DNA, 23 bp, Artificial Sequence
  Description of Artificial Sequence: Synthetic oligonucleotide
  Epidermal growth factor receptor (EGFR), ERBB1 phosphotyrosine kinase siRNA
ggctgctgcaggagagggagctt

SEQ ID NO: 7124 - DNA, 23 bp, Artificial Sequence
  Description of Artificial Sequence: Synthetic oligonucleotide
  Epidermal growth factor receptor (EGFR), ERBB1 phosphotyrosine kinase siRNA
gctgctgcaggagagggagcttg

SEQ ID NO: 7125 - DNA, 23 bp, Artificial Sequence
  Description of Artificial Sequence: Synthetic oligonucleotide
  Epidermal growth factor receptor (EGFR), ERBB1 phosphotyrosine kinase siRNA
ctgctgcaggagagggagcttgt

SEQ ID NO: 7126 - DNA, 23 bp, Artificial Sequence
  Description of Artificial Sequence: Synthetic oligonucleotide
  Epidermal growth factor receptor (EGFR), ERBB1 phosphotyrosine kinase siRNA
tgctgcaggagagggagcttgtg

SEQ ID NO: 7127 - DNA, 23 bp, Artificial Sequence
  Description of Artificial Sequence: Synthetic oligonucleotide
  Epidermal growth factor receptor (EGFR), ERBB1 phosphotyrosine kinase siRNA
gctgcaggagagggagcttgtgg

SEQ ID NO: 7128 - DNA, 23 bp, Artificial Sequence
  Description of Artificial Sequence: Synthetic oligonucleotide
  Epidermal growth factor receptor (EGFR), ERBB1 phosphotyrosine kinase siRNA
ctgcaggagagggagcttgtgga

SEQ ID NO: 7129 - DNA, 23 bp, Artificial Sequence
  Description of Artificial Sequence: Synthetic oligonucleotide
  Epidermal growth factor receptor (EGFR), ERBB1 phosphotyrosine kinase siRNA
tgcaggagagggagcttgtggag

SEQ ID NO: 7130 - DNA, 23 bp, Artificial Sequence
  Description of Artificial Sequence: Synthetic oligonucleotide
  Epidermal growth factor receptor (EGFR), ERBB1 phosphotyrosine kinase siRNA
gcaggagagggagcttgtggagc

SEQ ID NO: 7131 - DNA, 23 bp, Artificial Sequence
  Description of Artificial Sequence: Synthetic oligonucleotide
  Epidermal growth factor receptor (EGFR), ERBB1 phosphotyrosine kinase siRNA
caggagagggagcttgtggagcc

SEQ ID NO: 7132 - DNA, 23 bp, Artificial Sequence
  Description of Artificial Sequence: Synthetic oligonucleotide
  Epidermal growth factor receptor (EGFR), ERBB1 phosphotyrosine kinase siRNA
aggagagggagcttgtggagcct

SEQ ID NO: 7133 - DNA, 23 bp, Artificial Sequence
  Description of Artificial Sequence: Synthetic oligonucleotide
  Epidermal growth factor receptor (EGFR), ERBB1 phosphotyrosine kinase siRNA
ggagagggagcttgtggagcctc

SEQ ID NO: 7134 - DNA, 23 bp, Artificial Sequence
  Description of Artificial Sequence: Synthetic oligonucleotide
  Epidermal growth factor receptor (EGFR), ERBB1 phosphotyrosine kinase siRNA
gagagggagcttgtggagcctct

SEQ ID NO: 7135 - DNA, 23 bp, Artificial Sequence
  Description of Artificial Sequence: Synthetic oligonucleotide
  Epidermal growth factor receptor (EGFR), ERBB1 phosphotyrosine kinase siRNA
agagggagcttgtggagcctctt

SEQ ID NO: 7136 - DNA, 23 bp, Artificial Sequence
  Description of Artificial Sequence: Synthetic oligonucleotide
  Epidermal growth factor receptor (EGFR), ERBB1 phosphotyrosine kinase siRNA
gagggagcttgtggagcctctta

SEQ ID NO: 7137 - DNA, 23 bp, Artificial Sequence
  Description of Artificial Sequence: Synthetic oligonucleotide
  Epidermal growth factor receptor (EGFR), ERBB1 phosphotyrosine kinase siRNA
agggagcttgtggagcctcttac

SEQ ID NO: 7138 - DNA, 23 bp, Artificial Sequence
  Description of Artificial Sequence: Synthetic oligonucleotide
  Epidermal growth factor receptor (EGFR), ERBB1 phosphotyrosine kinase siRNA
gggagcttgtggagcctcttaca

SEQ ID NO: 7139 - DNA, 23 bp, Artificial Sequence
  Description of Artificial Sequence: Synthetic oligonucleotide
  Epidermal growth factor receptor (EGFR), ERBB1 phosphotyrosine kinase siRNA
ggagcttgtggagcctcttacac

SEQ ID NO: 7140 - DNA, 23 bp, Artificial Sequence
  Description of Artificial Sequence: Synthetic oligonucleotide
  Epidermal growth factor receptor (EGFR), ERBB1 phosphotyrosine kinase siRNA
gagcttgtggagcctcttacacc

SEQ ID NO: 7141 - DNA, 23 bp, Artificial Sequence
  Description of Artificial Sequence: Synthetic oligonucleotide
  Epidermal growth factor receptor (EGFR), ERBB1 phosphotyrosine kinase siRNA
agcttgtggagcctcttacaccc

SEQ ID NO: 7142 - DNA, 23 bp, Artificial Sequence
  Description of Artificial Sequence: Synthetic oligonucleotide
  Epidermal growth factor receptor (EGFR), ERBB1 phosphotyrosine kinase siRNA
gcttgtggagcctcttacaccca

SEQ ID NO: 7143 - DNA, 23 bp, Artificial Sequence
  Description of Artificial Sequence: Synthetic oligonucleotide
  Epidermal growth factor receptor (EGFR), ERBB1 phosphotyrosine kinase siRNA
cttgtggagcctcttacacccag

SEQ ID NO: 7144 - DNA, 23 bp, Artificial Sequence
  Description of Artificial Sequence: Synthetic oligonucleotide
  Epidermal growth factor receptor (EGFR), ERBB1 phosphotyrosine kinase siRNA
ttgtggagcctcttacacccagt

SEQ ID NO: 7145 - DNA, 23 bp, Artificial Sequence
  Description of Artificial Sequence: Synthetic oligonucleotide
  Epidermal growth factor receptor (EGFR), ERBB1 phosphotyrosine kinase siRNA
tgtggagcctcttacacccagtg

SEQ ID NO: 7146 - DNA, 23 bp, Artificial Sequence
  Description of Artificial Sequence: Synthetic oligonucleotide
  Epidermal growth factor receptor (EGFR), ERBB1 phosphotyrosine kinase siRNA
gtggagcctcttacacccagtgg

SEQ ID NO: 7147 - DNA, 23 bp, Artificial Sequence
  Description of Artificial Sequence: Synthetic oligonucleotide
  Epidermal growth factor receptor (EGFR), ERBB1 phosphotyrosine kinase siRNA
tggagcctcttacacccagtgga

SEQ ID NO: 7148 - DNA, 23 bp, Artificial Sequence
  Description of Artificial Sequence: Synthetic oligonucleotide
  Epidermal growth factor receptor (EGFR), ERBB1 phosphotyrosine kinase siRNA
ggagcctcttacacccagtggag

SEQ ID NO: 7149 - DNA, 23 bp, Artificial Sequence
  Description of Artificial Sequence: Synthetic oligonucleotide
  Epidermal growth factor receptor (EGFR), ERBB1 phosphotyrosine kinase siRNA
gagcctcttacacccagtggaga

SEQ ID NO: 7150 - DNA, 23 bp, Artificial Sequence
  Description of Artificial Sequence: Synthetic oligonucleotide
  Epidermal growth factor receptor (EGFR), ERBB1 phosphotyrosine kinase siRNA
agcctcttacacccagtggagaa

SEQ ID NO: 7151 - DNA, 23 bp, Artificial Sequence
  Description of Artificial Sequence: Synthetic oligonucleotide
  Epidermal growth factor receptor (EGFR), ERBB1 phosphotyrosine kinase siRNA
gcctcttacacccagtggagaag

SEQ ID NO: 7152 - DNA, 23 bp, Artificial Sequence
  Description of Artificial Sequence: Synthetic oligonucleotide
  Epidermal growth factor receptor (EGFR), ERBB1 phosphotyrosine kinase siRNA
cctcttacacccagtggagaagc

SEQ ID NO: 7153 - DNA, 23 bp, Artificial Sequence
  Description of Artificial Sequence: Synthetic oligonucleotide
  Epidermal growth factor receptor (EGFR), ERBB1 phosphotyrosine kinase siRNA
ctcttacacccagtggagaagct

SEQ ID NO: 7154 - DNA, 23 bp, Artificial Sequence
  Description of Artificial Sequence: Synthetic oligonucleotide
  Epidermal growth factor receptor (EGFR), ERBB1 phosphotyrosine kinase siRNA
tcttacacccagtggagaagctc

SEQ ID NO: 7155 - DNA, 23 bp, Artificial Sequence
  Description of Artificial Sequence: Synthetic oligonucleotide
  Epidermal growth factor receptor (EGFR), ERBB1 phosphotyrosine kinase siRNA
cttacacccagtggagaagctcc

SEQ ID NO: 7156 - DNA, 23 bp, Artificial Sequence
  Description of Artificial Sequence: Synthetic oligonucleotide
  Epidermal growth factor receptor (EGFR), ERBB1 phosphotyrosine kinase siRNA
ttacacccagtggagaagctccc

SEQ ID NO: 7157 - DNA, 23 bp, Artificial Sequence
  Description of Artificial Sequence: Synthetic oligonucleotide
  Epidermal growth factor receptor (EGFR), ERBB1 phosphotyrosine kinase siRNA
tacacccagtggagaagctccca

SEQ ID NO: 7158 - DNA, 23 bp, Artificial Sequence
  Description of Artificial Sequence: Synthetic oligonucleotide
  Epidermal growth factor receptor (EGFR), ERBB1 phosphotyrosine kinase siRNA
acacccagtggagaagctcccaa

SEQ ID NO: 7159 - DNA, 23 bp, Artificial Sequence
  Description of Artificial Sequence: Synthetic oligonucleotide
  Epidermal growth factor receptor (EGFR), ERBB1 phosphotyrosine kinase siRNA
cacccagtggagaagctcccaac

SEQ ID NO: 7160 - DNA, 23 bp, Artificial Sequence
  Description of Artificial Sequence: Synthetic oligonucleotide
  Epidermal growth factor receptor (EGFR), ERBB1 phosphotyrosine kinase siRNA
acccagtggagaagctcccaacc

SEQ ID NO: 7161 - DNA, 23 bp, Artificial Sequence
  Description of Artificial Sequence: Synthetic oligonucleotide
  Epidermal growth factor receptor (EGFR), ERBB1 phosphotyrosine kinase siRNA
cccagtggagaagctcccaacca

SEQ ID NO: 7162 - DNA, 23 bp, Artificial Sequence
  Description of Artificial Sequence: Synthetic oligonucleotide
  Epidermal growth factor receptor (EGFR), ERBB1 phosphotyrosine kinase siRNA
ccagtggagaagctcccaaccaa

SEQ ID NO: 7163 - DNA, 23 bp, Artificial Sequence
  Description of Artificial Sequence: Synthetic oligonucleotide
  Epidermal growth factor receptor (EGFR), ERBB1 phosphotyrosine kinase siRNA
cagtggagaagctcccaaccaag

SEQ ID NO: 7164 - DNA, 23 bp, Artificial Sequence
  Description of Artificial Sequence: Synthetic oligonucleotide
  Epidermal growth factor receptor (EGFR), ERBB1 phosphotyrosine kinase siRNA
agtggagaagctcccaaccaagc

SEQ ID NO: 7165 - DNA, 23 bp, Artificial Sequence
  Description of Artificial Sequence: Synthetic oligonucleotide
  Epidermal growth factor receptor (EGFR), ERBB1 phosphotyrosine kinase siRNA
gtggagaagctcccaaccaagct

SEQ ID NO: 7166 - DNA, 23 bp, Artificial Sequence
  Description of Artificial Sequence: Synthetic oligonucleotide
  Epidermal growth factor receptor (EGFR), ERBB1 phosphotyrosine kinase siRNA
tggagaagctcccaaccaagctc

SEQ ID NO: 7167 - DNA, 23 bp, Artificial Sequence
  Description of Artificial Sequence: Synthetic oligonucleotide
  Epidermal growth factor receptor (EGFR), ERBB1 phosphotyrosine kinase siRNA
ggagaagctcccaaccaagctct

SEQ ID NO: 7168 - DNA, 23 bp, Artificial Sequence
  Description of Artificial Sequence: Synthetic oligonucleotide
  Epidermal growth factor receptor (EGFR), ERBB1 phosphotyrosine kinase siRNA
gagaagctcccaaccaagctctc

SEQ ID NO: 7169 - DNA, 23 bp, Artificial Sequence
  Description of Artificial Sequence: Synthetic oligonucleotide
  Epidermal growth factor receptor (EGFR), ERBB1 phosphotyrosine kinase siRNA
agaagctcccaaccaagctctct

SEQ ID NO: 7170 - DNA, 23 bp, Artificial Sequence
  Description of Artificial Sequence: Synthetic oligonucleotide
  Epidermal growth factor receptor (EGFR), ERBB1 phosphotyrosine kinase siRNA
gaagctcccaaccaagctctctt

SEQ ID NO: 7171 - DNA, 23 bp, Artificial Sequence
  Description of Artificial Sequence: Synthetic oligonucleotide
  Epidermal growth factor receptor (EGFR), ERBB1 phosphotyrosine kinase siRNA
aagctcccaaccaagctctcttg

SEQ ID NO: 7172 - DNA, 23 bp, Artificial Sequence
  Description of Artificial Sequence: Synthetic oligonucleotide
  Epidermal growth factor receptor (EGFR), ERBB1 phosphotyrosine kinase siRNA
agctcccaaccaagctctcttga

SEQ ID NO: 7173 - DNA, 23 bp, Artificial Sequence
  Description of Artificial Sequence: Synthetic oligonucleotide
  Epidermal growth factor receptor (EGFR), ERBB1 phosphotyrosine kinase siRNA
gctcccaaccaagctctcttgag

SEQ ID NO: 7174 - DNA, 23 bp, Artificial Sequence
  Description of Artificial Sequence: Synthetic oligonucleotide
  Epidermal growth factor receptor (EGFR), ERBB1 phosphotyrosine kinase siRNA
ctcccaaccaagctctcttgagg

SEQ ID NO: 7175 - DNA, 23 bp, Artificial Sequence
  Description of Artificial Sequence: Synthetic oligonucleotide
  Epidermal growth factor receptor (EGFR), ERBB1 phosphotyrosine kinase siRNA
tcccaaccaagctctcttgagga

SEQ ID NO: 7176 - DNA, 23 bp, Artificial Sequence
  Description of Artificial Sequence: Synthetic oligonucleotide
  Epidermal growth factor receptor (EGFR), ERBB1 phosphotyrosine kinase siRNA
cccaaccaagctctcttgaggat

SEQ ID NO: 7177 - DNA, 23 bp, Artificial Sequence
  Description of Artificial Sequence: Synthetic oligonucleotide
  Epidermal growth factor receptor (EGFR), ERBB1 phosphotyrosine kinase siRNA
ccaaccaagctctcttgaggatc

SEQ ID NO: 7178 - DNA, 23 bp, Artificial Sequence
  Description of Artificial Sequence: Synthetic oligonucleotide
  Epidermal growth factor receptor (EGFR), ERBB1 phosphotyrosine kinase siRNA
caaccaagctctcttgaggatct

SEQ ID NO: 7179 - DNA, 23 bp, Artificial Sequence
  Description of Artificial Sequence: Synthetic oligonucleotide
  Epidermal growth factor receptor (EGFR), ERBB1 phosphotyrosine kinase siRNA
aaccaagctctcttgaggatctt

SEQ ID NO: 7180 - DNA, 23 bp, Artificial Sequence
  Description of Artificial Sequence: Synthetic oligonucleotide
  Epidermal growth factor receptor (EGFR), ERBB1 phosphotyrosine kinase siRNA
accaagctctcttgaggatcttg

SEQ ID NO: 7181 - DNA, 23 bp, Artificial Sequence
  Description of Artificial Sequence: Synthetic oligonucleotide
  Epidermal growth factor receptor (EGFR), ERBB1 phosphotyrosine kinase siRNA
ccaagctctcttgaggatcttga

SEQ ID NO: 7182 - DNA, 23 bp, Artificial Sequence
  Description of Artificial Sequence: Synthetic oligonucleotide
  Epidermal growth factor receptor (EGFR), ERBB1 phosphotyrosine kinase siRNA
caagctctcttgaggatcttgaa

SEQ ID NO: 7183 - DNA, 23 bp, Artificial Sequence
  Description of Artificial Sequence: Synthetic oligonucleotide
  Epidermal growth factor receptor (EGFR), ERBB1 phosphotyrosine kinase siRNA
aagctctcttgaggatcttgaag

SEQ ID NO: 7184 - DNA, 23 bp, Artificial Sequence
  Description of Artificial Sequence: Synthetic oligonucleotide
  Epidermal growth factor receptor (EGFR), ERBB1 phosphotyrosine kinase siRNA
agctctcttgaggatcttgaagg

SEQ ID NO: 7185 - DNA, 23 bp, Artificial Sequence
  Description of Artificial Sequence: Synthetic oligonucleotide
  Epidermal growth factor receptor (EGFR), ERBB1 phosphotyrosine kinase siRNA
gctctcttgaggatcttgaagga

SEQ ID NO: 7186 - DNA, 23 bp, Artificial Sequence
  Description of Artificial Sequence: Synthetic oligonucleotide
  Epidermal growth factor receptor (EGFR), ERBB1 phosphotyrosine kinase siRNA
ctctcttgaggatcttgaaggaa

SEQ ID NO: 7187 - DNA, 23 bp, Artificial Sequence
  Description of Artificial Sequence: Synthetic oligonucleotide
  Epidermal growth factor receptor (EGFR), ERBB1 phosphotyrosine kinase siRNA
tctcttgaggatcttgaaggaaa

SEQ ID NO: 7188 - DNA, 23 bp, Artificial Sequence
  Description of Artificial Sequence: Synthetic oligonucleotide
  Epidermal growth factor receptor (EGFR), ERBB1 phosphotyrosine kinase siRNA
ctcttgaggatcttgaaggaaac

SEQ ID NO: 7189 - DNA, 23 bp, Artificial Sequence
  Description of Artificial Sequence: Synthetic oligonucleotide
  Epidermal growth factor receptor (EGFR), ERBB1 phosphotyrosine kinase siRNA
tcttgaggatcttgaaggaaact

SEQ ID NO: 7190 - DNA, 23 bp, Artificial Sequence
  Description of Artificial Sequence: Synthetic oligonucleotide
  Epidermal growth factor receptor (EGFR), ERBB1 phosphotyrosine kinase siRNA
cttgaggatcttgaaggaaactg

SEQ ID NO: 7191 - DNA, 23 bp, Artificial Sequence
  Description of Artificial Sequence: Synthetic oligonucleotide
  Epidermal growth factor receptor (EGFR), ERBB1 phosphotyrosine kinase siRNA
ttgaggatcttgaaggaaactga

SEQ ID NO: 7192 - DNA, 23 bp, Artificial Sequence
  Description of Artificial Sequence: Synthetic oligonucleotide
  Epidermal growth factor receptor (EGFR), ERBB1 phosphotyrosine kinase siRNA
tgaggatcttgaaggaaactgaa

SEQ ID NO: 7193 - DNA, 23 bp, Artificial Sequence
  Description of Artificial Sequence: Synthetic oligonucleotide
  Epidermal growth factor receptor (EGFR), ERBB1 phosphotyrosine kinase siRNA
gaggatcttgaaggaaactgaat

SEQ ID NO: 7194 - DNA, 23 bp, Artificial Sequence
  Description of Artificial Sequence: Synthetic oligonucleotide
  Epidermal growth factor receptor (EGFR), ERBB1 phosphotyrosine kinase siRNA
aggatcttgaaggaaactgaatt

SEQ ID NO: 7195 - DNA, 23 bp, Artificial Sequence
  Description of Artificial Sequence: Synthetic oligonucleotide
  Epidermal growth factor receptor (EGFR), ERBB1 phosphotyrosine kinase siRNA
ggatcttgaaggaaactgaattc

SEQ ID NO: 7196 - DNA, 23 bp, Artificial Sequence
  Description of Artificial Sequence: Synthetic oligonucleotide
  Epidermal growth factor receptor (EGFR), ERBB1 phosphotyrosine kinase siRNA
gatcttgaaggaaactgaattca

SEQ ID NO: 7197 - DNA, 23 bp, Artificial Sequence
  Description of Artificial Sequence: Synthetic oligonucleotide
  Epidermal growth factor receptor (EGFR), ERBB1 phosphotyrosine kinase siRNA
atcttgaaggaaactgaattcaa

SEQ ID NO: 7198 - DNA, 23 bp, Artificial Sequence
  Description of Artificial Sequence: Synthetic oligonucleotide
  Epidermal growth factor receptor (EGFR), ERBB1 phosphotyrosine kinase siRNA
tcttgaaggaaactgaattcaaa

SEQ ID NO: 7199 - DNA, 23 bp, Artificial Sequence
  Description of Artificial Sequence: Synthetic oligonucleotide
  Epidermal growth factor receptor (EGFR), ERBB1 phosphotyrosine kinase siRNA
cttgaaggaaactgaattcaaaa

SEQ ID NO: 7200 - DNA, 23 bp, Artificial Sequence
  Description of Artificial Sequence: Synthetic oligonucleotide
  Epidermal growth factor receptor (EGFR), ERBB1 phosphotyrosine kinase siRNA
ttgaaggaaactgaattcaaaaa

SEQ ID NO: 7201 - DNA, 23 bp, Artificial Sequence
  Description of Artificial Sequence: Synthetic oligonucleotide
  Epidermal growth factor receptor (EGFR), ERBB1 phosphotyrosine kinase siRNA
tgaaggaaactgaattcaaaaag

SEQ ID NO: 7202 - DNA, 23 bp, Artificial Sequence
  Description of Artificial Sequence: Synthetic oligonucleotide
  Epidermal growth factor receptor (EGFR), ERBB1 phosphotyrosine kinase siRNA
gaaggaaactgaattcaaaaaga

SEQ ID NO: 7203 - DNA, 23 bp, Artificial Sequence
  Description of Artificial Sequence: Synthetic oligonucleotide
  Epidermal growth factor receptor (EGFR), ERBB1 phosphotyrosine kinase siRNA
aaggaaactgaattcaaaaagat

SEQ ID NO: 7204 - DNA, 23 bp, Artificial Sequence
  Description of Artificial Sequence: Synthetic oligonucleotide
  Epidermal growth factor receptor (EGFR), ERBB1 phosphotyrosine kinase siRNA
aggaaactgaattcaaaaagatc

SEQ ID NO: 7205 - DNA, 23 bp, Artificial Sequence
  Description of Artificial Sequence: Synthetic oligonucleotide
  Epidermal growth factor receptor (EGFR), ERBB1 phosphotyrosine kinase siRNA
ggaaactgaattcaaaaagatca

SEQ ID NO: 7206 - DNA, 23 bp, Artificial Sequence
  Description of Artificial Sequence: Synthetic oligonucleotide
  Epidermal growth factor receptor (EGFR), ERBB1 phosphotyrosine kinase siRNA
gaaactgaattcaaaaagatcaa

SEQ ID NO: 7207 - DNA, 23 bp, Artificial Sequence
  Description of Artificial Sequence: Synthetic oligonucleotide
  Epidermal growth factor receptor (EGFR), ERBB1 phosphotyrosine kinase siRNA
aaactgaattcaaaaagatcaaa

SEQ ID NO: 7208 - DNA, 23 bp, Artificial Sequence
  Description of Artificial Sequence: Synthetic oligonucleotide
  Epidermal growth factor receptor (EGFR), ERBB1 phosphotyrosine kinase siRNA
aactgaattcaaaaagatcaaag

SEQ ID NO: 7209 - DNA, 23 bp, Artificial Sequence
  Description of Artificial Sequence: Synthetic oligonucleotide
  Epidermal growth factor receptor (EGFR), ERBB1 phosphotyrosine kinase siRNA
actgaattcaaaaagatcaaagt

SEQ ID NO: 7210 - DNA, 23 bp, Artificial Sequence
  Description of Artificial Sequence: Synthetic oligonucleotide
  Epidermal growth factor receptor (EGFR), ERBB1 phosphotyrosine kinase siRNA
ctgaattcaaaaagatcaaagtg

SEQ ID NO: 7211 - DNA, 23 bp, Artificial Sequence
  Description of Artificial Sequence: Synthetic oligonucleotide
  Epidermal growth factor receptor (EGFR), ERBB1 phosphotyrosine kinase siRNA
tgaattcaaaaagatcaaagtgc

SEQ ID NO: 7212 - DNA, 23 bp, Artificial Sequence
  Description of Artificial Sequence: Synthetic oligonucleotide
  Epidermal growth factor receptor (EGFR), ERBB1 phosphotyrosine kinase siRNA
gaattcaaaaagatcaaagtgct

SEQ ID NO: 7213 - DNA, 23 bp, Artificial Sequence
  Description of Artificial Sequence: Synthetic oligonucleotide
  Epidermal growth factor receptor (EGFR), ERBB1 phosphotyrosine kinase siRNA
aattcaaaaagatcaaagtgctg

SEQ ID NO: 7214 - DNA, 23 bp, Artificial Sequence
  Description of Artificial Sequence: Synthetic oligonucleotide
  Epidermal growth factor receptor (EGFR), ERBB1 phosphotyrosine kinase siRNA
attcaaaaagatcaaagtgctgg

SEQ ID NO: 7215 - DNA, 23 bp, Artificial Sequence
  Description of Artificial Sequence: Synthetic oligonucleotide
  Epidermal growth factor receptor (EGFR), ERBB1 phosphotyrosine kinase siRNA
ttcaaaaagatcaaagtgctggg

SEQ ID NO: 7216 - DNA, 23 bp, Artificial Sequence
  Description of Artificial Sequence: Synthetic oligonucleotide
  Epidermal growth factor receptor (EGFR), ERBB1 phosphotyrosine kinase siRNA
tcaaaaagatcaaagtgctgggc

SEQ ID NO: 7217 - DNA, 23 bp, Artificial Sequence
  Description of Artificial Sequence: Synthetic oligonucleotide
  Epidermal growth factor receptor (EGFR), ERBB1 phosphotyrosine kinase siRNA
caaaaagatcaaagtgctgggct

SEQ ID NO: 7218 - DNA, 23 bp, Artificial Sequence
  Description of Artificial Sequence: Synthetic oligonucleotide
  Epidermal growth factor receptor (EGFR), ERBB1 phosphotyrosine kinase siRNA
aaaaagatcaaagtgctgggctc

SEQ ID NO: 7219 - DNA, 23 bp, Artificial Sequence
  Description of Artificial Sequence: Synthetic oligonucleotide
  Epidermal growth factor receptor (EGFR), ERBB1 phosphotyrosine kinase siRNA
aaaagatcaaagtgctgggctcc

SEQ ID NO: 7220 - DNA, 23 bp, Artificial Sequence
  Description of Artificial Sequence: Synthetic oligonucleotide
  Epidermal growth factor receptor (EGFR), ERBB1 phosphotyrosine kinase siRNA
aaagatcaaagtgctgggctccg

SEQ ID NO: 7221 - DNA, 23 bp, Artificial Sequence
  Description of Artificial Sequence: Synthetic oligonucleotide
  Epidermal growth factor receptor (EGFR), ERBB1 phosphotyrosine kinase siRNA
aagatcaaagtgctgggctccgg

SEQ ID NO: 7222 - DNA, 23 bp, Artificial Sequence
  Description of Artificial Sequence: Synthetic oligonucleotide
  Epidermal growth factor receptor (EGFR), ERBB1 phosphotyrosine kinase siRNA
agatcaaagtgctgggctccggt

SEQ ID NO: 7223 - DNA, 23 bp, Artificial Sequence
  Description of Artificial Sequence: Synthetic oligonucleotide
  Epidermal growth factor receptor (EGFR), ERBB1 phosphotyrosine kinase siRNA
gatcaaagtgctgggctccggtg

SEQ ID NO: 7224 - DNA, 23 bp, Artificial Sequence
  Description of Artificial Sequence: Synthetic oligonucleotide
  Epidermal growth factor receptor (EGFR), ERBB1 phosphotyrosine kinase siRNA
atcaaagtgctgggctccggtgc

SEQ ID NO: 7225 - DNA, 23 bp, Artificial Sequence
  Description of Artificial Sequence: Synthetic oligonucleotide
  Epidermal growth factor receptor (EGFR), ERBB1 phosphotyrosine kinase siRNA
tcaaagtgctgggctccggtgcg

SEQ ID NO: 7226 - DNA, 23 bp, Artificial Sequence
  Description of Artificial Sequence: Synthetic oligonucleotide
  Epidermal growth factor receptor (EGFR), ERBB1 phosphotyrosine kinase siRNA
caaagtgctgggctccggtgcgt

SEQ ID NO: 7227 - DNA, 23 bp, Artificial Sequence
  Description of Artificial Sequence: Synthetic oligonucleotide
  Epidermal growth factor receptor (EGFR), ERBB1 phosphotyrosine kinase siRNA
aaagtgctgggctccggtgcgtt

SEQ ID NO: 7228 - DNA, 23 bp, Artificial Sequence
  Description of Artificial Sequence: Synthetic oligonucleotide
  Epidermal growth factor receptor (EGFR), ERBB1 phosphotyrosine kinase siRNA
aagtgctgggctccggtgcgttc

SEQ ID NO: 7229 - DNA, 23 bp, Artificial Sequence
  Description of Artificial Sequence: Synthetic oligonucleotide
  Epidermal growth factor receptor (EGFR), ERBB1 phosphotyrosine kinase siRNA
agtgctgggctccggtgcgttcg

SEQ ID NO: 7230 - DNA, 23 bp, Artificial Sequence
  Description of Artificial Sequence: Synthetic oligonucleotide
  Epidermal growth factor receptor (EGFR), ERBB1 phosphotyrosine kinase siRNA
gtgctgggctccggtgcgttcgg

SEQ ID NO: 7231 - DNA, 23 bp, Artificial Sequence
  Description of Artificial Sequence: Synthetic oligonucleotide
  Epidermal growth factor receptor (EGFR), ERBB1 phosphotyrosine kinase siRNA
tgctgggctccggtgcgttcggc

SEQ ID NO: 7232 - DNA, 23 bp, Artificial Sequence
  Description of Artificial Sequence: Synthetic oligonucleotide
  Epidermal growth factor receptor (EGFR), ERBB1 phosphotyrosine kinase siRNA
gctgggctccggtgcgttcggca

SEQ ID NO: 7233 - DNA, 23 bp, Artificial Sequence
  Description of Artificial Sequence: Synthetic oligonucleotide
  Epidermal growth factor receptor (EGFR), ERBB1 phosphotyrosine kinase siRNA
ctgggctccggtgcgttcggcac

SEQ ID NO: 7234 - DNA, 23 bp, Artificial Sequence
  Description of Artificial Sequence: Synthetic oligonucleotide
  Epidermal growth factor receptor (EGFR), ERBB1 phosphotyrosine kinase siRNA
tgggctccggtgcgttcggcacg

SEQ ID NO: 7235 - DNA, 23 bp, Artificial Sequence
  Description of Artificial Sequence: Synthetic oligonucleotide
  Epidermal growth factor receptor (EGFR), ERBB1 phosphotyrosine kinase siRNA
gggctccggtgcgttcggcacgg

SEQ ID NO: 7236 - DNA, 23 bp, Artificial Sequence
  Description of Artificial Sequence: Synthetic oligonucleotide
  Epidermal growth factor receptor (EGFR), ERBB1 phosphotyrosine kinase siRNA
ggctccggtgcgttcggcacggt

SEQ ID NO: 7237 - DNA, 23 bp, Artificial Sequence
  Description of Artificial Sequence: Synthetic oligonucleotide
  Epidermal growth factor receptor (EGFR), ERBB1 phosphotyrosine kinase siRNA
gctccggtgcgttcggcacggtg

SEQ ID NO: 7238 - DNA, 23 bp, Artificial Sequence
  Description of Artificial Sequence: Synthetic oligonucleotide
  Epidermal growth factor receptor (EGFR), ERBB1 phosphotyrosine kinase siRNA
ctccggtgcgttcggcacggtgt

SEQ ID NO: 7239 - DNA, 23 bp, Artificial Sequence
  Description of Artificial Sequence: Synthetic oligonucleotide
  Epidermal growth factor receptor (EGFR), ERBB1 phosphotyrosine kinase siRNA
tccggtgcgttcggcacggtgta

SEQ ID NO: 7240 - DNA, 23 bp, Artificial Sequence
  Description of Artificial Sequence: Synthetic oligonucleotide
  Epidermal growth factor receptor (EGFR), ERBB1 phosphotyrosine kinase siRNA
ccggtgcgttcggcacggtgtat

SEQ ID NO: 7241 - DNA, 23 bp, Artificial Sequence
  Description of Artificial Sequence: Synthetic oligonucleotide
  Epidermal growth factor receptor (EGFR), ERBB1 phosphotyrosine kinase siRNA
cggtgcgttcggcacggtgtata

SEQ ID NO: 7242 - DNA, 23 bp, Artificial Sequence
  Description of Artificial Sequence: Synthetic oligonucleotide
  Epidermal growth factor receptor (EGFR), ERBB1 phosphotyrosine kinase siRNA
ggtgcgttcggcacggtgtataa

SEQ ID NO: 7243 - DNA, 23 bp, Artificial Sequence
  Description of Artificial Sequence: Synthetic oligonucleotide
  Epidermal growth factor receptor (EGFR), ERBB1 phosphotyrosine kinase siRNA
gtgcgttcggcacggtgtataag

SEQ ID NO: 7244 - DNA, 23 bp, Artificial Sequence
  Description of Artificial Sequence: Synthetic oligonucleotide
  Epidermal growth factor receptor (EGFR), ERBB1 phosphotyrosine kinase siRNA
tgcgttcggcacggtgtataagg

SEQ ID NO: 7245 - DNA, 23 bp, Artificial Sequence
  Description of Artificial Sequence: Synthetic oligonucleotide
  Epidermal growth factor receptor (EGFR), ERBB1 phosphotyrosine kinase siRNA
gcgttcggcacggtgtataaggg

SEQ ID NO: 7246 - DNA, 23 bp, Artificial Sequence
  Description of Artificial Sequence: Synthetic oligonucleotide
  Epidermal growth factor receptor (EGFR), ERBB1 phosphotyrosine kinase siRNA
cgttcggcacggtgtataaggga

SEQ ID NO: 7247 - DNA, 23 bp, Artificial Sequence
  Description of Artificial Sequence: Synthetic oligonucleotide
  Epidermal growth factor receptor (EGFR), ERBB1 phosphotyrosine kinase siRNA
gttcggcacggtgtataagggac

SEQ ID NO: 7248 - DNA, 23 bp, Artificial Sequence
  Description of Artificial Sequence: Synthetic oligonucleotide
  Epidermal growth factor receptor (EGFR), ERBB1 phosphotyrosine kinase siRNA
ttcggcacggtgtataagggact

SEQ ID NO: 7249 - DNA, 23 bp, Artificial Sequence
  Description of Artificial Sequence: Synthetic oligonucleotide
  Epidermal growth factor receptor (EGFR), ERBB1 phosphotyrosine kinase siRNA
tcggcacggtgtataagggactc

SEQ ID NO: 7250 - DNA, 23 bp, Artificial Sequence
  Description of Artificial Sequence: Synthetic oligonucleotide
  Epidermal growth factor receptor (EGFR), ERBB1 phosphotyrosine kinase siRNA
cggcacggtgtataagggactct

SEQ ID NO: 7251 - DNA, 23 bp, Artificial Sequence
  Description of Artificial Sequence: Synthetic oligonucleotide
  Epidermal growth factor receptor (EGFR), ERBB1 phosphotyrosine kinase siRNA
ggcacggtgtataagggactctg

SEQ ID NO: 7252 - DNA, 23 bp, Artificial Sequence
  Description of Artificial Sequence: Synthetic oligonucleotide
  Epidermal growth factor receptor (EGFR), ERBB1 phosphotyrosine kinase siRNA
gcacggtgtataagggactctgg

SEQ ID NO: 7253 - DNA, 23 bp, Artificial Sequence
  Description of Artificial Sequence: Synthetic oligonucleotide
  Epidermal growth factor receptor (EGFR), ERBB1 phosphotyrosine kinase siRNA
cacggtgtataagggactctgga

SEQ ID NO: 7254 - DNA, 23 bp, Artificial Sequence
  Description of Artificial Sequence: Synthetic oligonucleotide
  Epidermal growth factor receptor (EGFR), ERBB1 phosphotyrosine kinase siRNA
acggtgtataagggactctggat

SEQ ID NO: 7255 - DNA, 23 bp, Artificial Sequence
  Description of Artificial Sequence: Synthetic oligonucleotide
  Epidermal growth factor receptor (EGFR), ERBB1 phosphotyrosine kinase siRNA
cggtgtataagggactctggatc

SEQ ID NO: 7256 - DNA, 23 bp, Artificial Sequence
  Description of Artificial Sequence: Synthetic oligonucleotide
  Epidermal growth factor receptor (EGFR), ERBB1 phosphotyrosine kinase siRNA
ggtgtataagggactctggatcc

SEQ ID NO: 7257 - DNA, 23 bp, Artificial Sequence
  Description of Artificial Sequence: Synthetic oligonucleotide
  Epidermal growth factor receptor (EGFR), ERBB1 phosphotyrosine kinase siRNA
gtgtataagggactctggatccc

SEQ ID NO: 7258 - DNA, 23 bp, Artificial Sequence
  Description of Artificial Sequence: Synthetic oligonucleotide
  Epidermal growth factor receptor (EGFR), ERBB1 phosphotyrosine kinase siRNA
tgtataagggactctggatccca

SEQ ID NO: 7259 - DNA, 23 bp, Artificial Sequence
  Description of Artificial Sequence: Synthetic oligonucleotide
  Epidermal growth factor receptor (EGFR), ERBB1 phosphotyrosine kinase siRNA
gtataagggactctggatcccag

SEQ ID NO: 7260 - DNA, 23 bp, Artificial Sequence
  Description of Artificial Sequence: Synthetic oligonucleotide
  Epidermal growth factor receptor (EGFR), ERBB1 phosphotyrosine kinase siRNA
tataagggactctggatcccaga

SEQ ID NO: 7261 - DNA, 23 bp, Artificial Sequence
  Description of Artificial Sequence: Synthetic oligonucleotide
  Epidermal growth factor receptor (EGFR), ERBB1 phosphotyrosine kinase siRNA
ataagggactctggatcccagaa

SEQ ID NO: 7262 - DNA, 23 bp, Artificial Sequence
  Description of Artificial Sequence: Synthetic oligonucleotide
  Epidermal growth factor receptor (EGFR), ERBB1 phosphotyrosine kinase siRNA
taagggactctggatcccagaag

SEQ ID NO: 7263 - DNA, 23 bp, Artificial Sequence
  Description of Artificial Sequence: Synthetic oligonucleotide
  Epidermal growth factor receptor (EGFR), ERBB1 phosphotyrosine kinase siRNA
aagggactctggatcccagaagg

SEQ ID NO: 7264 - DNA, 23 bp, Artificial Sequence
  Description of Artificial Sequence: Synthetic oligonucleotide
  Epidermal growth factor receptor (EGFR), ERBB1 phosphotyrosine kinase siRNA
agggactctggatcccagaaggt

SEQ ID NO: 7265 - DNA, 23 bp, Artificial Sequence
  Description of Artificial Sequence: Synthetic oligonucleotide
  Epidermal growth factor receptor (EGFR), ERBB1 phosphotyrosine kinase siRNA
gggactctggatcccagaaggtg

SEQ ID NO: 7266 - DNA, 23 bp, Artificial Sequence
  Description of Artificial Sequence: Synthetic oligonucleotide
  Epidermal growth factor receptor (EGFR), ERBB1 phosphotyrosine kinase siRNA
ggactctggatcccagaaggtga

SEQ ID NO: 7267 - DNA, 23 bp, Artificial Sequence
  Description of Artificial Sequence: Synthetic oligonucleotide
  Epidermal growth factor receptor (EGFR), ERBB1 phosphotyrosine kinase siRNA
gactctggatcccagaaggtgag

SEQ ID NO: 7268 - DNA, 23 bp, Artificial Sequence
  Description of Artificial Sequence: Synthetic oligonucleotide
  Epidermal growth factor receptor (EGFR), ERBB1 phosphotyrosine kinase siRNA
actctggatcccagaaggtgaga

SEQ ID NO: 7269 - DNA, 23 bp, Artificial Sequence
  Description of Artificial Sequence: Synthetic oligonucleotide
  Epidermal growth factor receptor (EGFR), ERBB1 phosphotyrosine kinase siRNA
ctctggatcccagaaggtgagaa

SEQ ID NO: 7270 - DNA, 23 bp, Artificial Sequence
  Description of Artificial Sequence: Synthetic oligonucleotide
  Epidermal growth factor receptor (EGFR), ERBB1 phosphotyrosine kinase siRNA
tctggatcccagaaggtgagaaa

SEQ ID NO: 7271 - DNA, 23 bp, Artificial Sequence
  Description of Artificial Sequence: Synthetic oligonucleotide
  Epidermal growth factor receptor (EGFR), ERBB1 phosphotyrosine kinase siRNA
ctggatcccagaaggtgagaaag

SEQ ID NO: 7272 - DNA, 23 bp, Artificial Sequence
  Description of Artificial Sequence: Synthetic oligonucleotide
  Epidermal growth factor receptor (EGFR), ERBB1 phosphotyrosine kinase siRNA
tggatcccagaaggtgagaaagt

SEQ ID NO: 7273 - DNA, 23 bp, Artificial Sequence
  Description of Artificial Sequence: Synthetic oligonucleotide
  Epidermal growth factor receptor (EGFR), ERBB1 phosphotyrosine kinase siRNA
ggatcccagaaggtgagaaagtt

SEQ ID NO: 7274 - DNA, 23 bp, Artificial Sequence
  Description of Artificial Sequence: Synthetic oligonucleotide
  Epidermal growth factor receptor (EGFR), ERBB1 phosphotyrosine kinase siRNA
gatcccagaaggtgagaaagtta

SEQ ID NO: 7275 - DNA, 23 bp, Artificial Sequence
  Description of Artificial Sequence: Synthetic oligonucleotide
  Epidermal growth factor receptor (EGFR), ERBB1 phosphotyrosine kinase siRNA
atcccagaaggtgagaaagttaa

SEQ ID NO: 7276 - DNA, 23 bp, Artificial Sequence
  Description of Artificial Sequence: Synthetic oligonucleotide
  Epidermal growth factor receptor (EGFR), ERBB1 phosphotyrosine kinase siRNA
tcccagaaggtgagaaagttaaa

SEQ ID NO: 7277 - DNA, 23 bp, Artificial Sequence
  Description of Artificial Sequence: Synthetic oligonucleotide
  Epidermal growth factor receptor (EGFR), ERBB1 phosphotyrosine kinase siRNA
cccagaaggtgagaaagttaaaa

SEQ ID NO: 7278 - DNA, 23 bp, Artificial Sequence
  Description of Artificial Sequence: Synthetic oligonucleotide
  Epidermal growth factor receptor (EGFR), ERBB1 phosphotyrosine kinase siRNA
ccagaaggtgagaaagttaaaat

SEQ ID NO: 7279 - DNA, 23 bp, Artificial Sequence
  Description of Artificial Sequence: Synthetic oligonucleotide
  Epidermal growth factor receptor (EGFR), ERBB1 phosphotyrosine kinase siRNA
cagaaggtgagaaagttaaaatt

SEQ ID NO: 7280 - DNA, 23 bp, Artificial Sequence
  Description of Artificial Sequence: Synthetic oligonucleotide
  Epidermal growth factor receptor (EGFR), ERBB1 phosphotyrosine kinase siRNA
agaaggtgagaaagttaaaattc

SEQ ID NO: 7281 - DNA, 23 bp, Artificial Sequence
  Description of Artificial Sequence: Synthetic oligonucleotide
  Epidermal growth factor receptor (EGFR), ERBB1 phosphotyrosine kinase siRNA
gaaggtgagaaagttaaaattcc

SEQ ID NO: 7282 - DNA, 23 bp, Artificial Sequence
  Description of Artificial Sequence: Synthetic oligonucleotide
  Epidermal growth factor receptor (EGFR), ERBB1 phosphotyrosine kinase siRNA
aaggtgagaaagttaaaattccc

SEQ ID NO: 7283 - DNA, 23 bp, Artificial Sequence
  Description of Artificial Sequence: Synthetic oligonucleotide
  Epidermal growth factor receptor (EGFR), ERBB1 phosphotyrosine kinase siRNA
aggtgagaaagttaaaattcccg

SEQ ID NO: 7284 - DNA, 23 bp, Artificial Sequence
  Description of Artificial Sequence: Synthetic oligonucleotide
  Epidermal growth factor receptor (EGFR), ERBB1 phosphotyrosine kinase siRNA
ggtgagaaagttaaaattcccgt

SEQ ID NO: 7285 - DNA, 23 bp, Artificial Sequence
  Description of Artificial Sequence: Synthetic oligonucleotide
  Epidermal growth factor receptor (EGFR), ERBB1 phosphotyrosine kinase siRNA
gtgagaaagttaaaattcccgtc

SEQ ID NO: 7286 - DNA, 23 bp, Artificial Sequence
  Description of Artificial Sequence: Synthetic oligonucleotide
  Epidermal growth factor receptor (EGFR), ERBB1 phosphotyrosine kinase siRNA
tgagaaagttaaaattcccgtcg

SEQ ID NO: 7287 - DNA, 23 bp, Artificial Sequence
  Description of Artificial Sequence: Synthetic oligonucleotide
  Epidermal growth factor receptor (EGFR), ERBB1 phosphotyrosine kinase siRNA
gagaaagttaaaattcccgtcgc

SEQ ID NO: 7288 - DNA, 23 bp, Artificial Sequence
  Description of Artificial Sequence: Synthetic oligonucleotide
  Epidermal growth factor receptor (EGFR), ERBB1 phosphotyrosine kinase siRNA
agaaagttaaaattcccgtcgct

SEQ ID NO: 7289 - DNA, 23 bp, Artificial Sequence
  Description of Artificial Sequence: Synthetic oligonucleotide
  Epidermal growth factor receptor (EGFR), ERBB1 phosphotyrosine kinase siRNA
gaaagttaaaattcccgtcgcta

SEQ ID NO: 7290 - DNA, 23 bp, Artificial Sequence
  Description of Artificial Sequence: Synthetic oligonucleotide
  Epidermal growth factor receptor (EGFR), ERBB1 phosphotyrosine kinase siRNA
aaagttaaaattcccgtcgctat

SEQ ID NO: 7291 - DNA, 23 bp, Artificial Sequence
  Description of Artificial Sequence: Synthetic oligonucleotide
  Epidermal growth factor receptor (EGFR), ERBB1 phosphotyrosine kinase siRNA
aagttaaaattcccgtcgctatc

SEQ ID NO: 7292 - DNA, 23 bp, Artificial Sequence
  Description of Artificial Sequence: Synthetic oligonucleotide
  Epidermal growth factor receptor (EGFR), ERBB1 phosphotyrosine kinase siRNA
agttaaaattcccgtcgctatca

SEQ ID NO: 7293 - DNA, 23 bp, Artificial Sequence
  Description of Artificial Sequence: Synthetic oligonucleotide
  Epidermal growth factor receptor (EGFR), ERBB1 phosphotyrosine kinase siRNA
gttaaaattcccgtcgctatcaa

SEQ ID NO: 7294 - DNA, 23 bp, Artificial Sequence
  Description of Artificial Sequence: Synthetic oligonucleotide
  Epidermal growth factor receptor (EGFR), ERBB1 phosphotyrosine kinase siRNA
ttaaaattcccgtcgctatcaag

SEQ ID NO: 7295 - DNA, 23 bp, Artificial Sequence
  Description of Artificial Sequence: Synthetic oligonucleotide
  Epidermal growth factor receptor (EGFR), ERBB1 phosphotyrosine kinase siRNA
taaaattcccgtcgctatcaagg

SEQ ID NO: 7296 - DNA, 23 bp, Artificial Sequence
  Description of Artificial Sequence: Synthetic oligonucleotide
  Epidermal growth factor receptor (EGFR), ERBB1 phosphotyrosine kinase siRNA
aaaattcccgtcgctatcaagga

SEQ ID NO: 7297 - DNA, 23 bp, Artificial Sequence
  Description of Artificial Sequence: Synthetic oligonucleotide
  Epidermal growth factor receptor (EGFR), ERBB1 phosphotyrosine kinase siRNA
aaattcccgtcgctatcaaggaa

SEQ ID NO: 7298 - DNA, 23 bp, Artificial Sequence
  Description of Artificial Sequence: Synthetic oligonucleotide
  Epidermal growth factor receptor (EGFR), ERBB1 phosphotyrosine kinase siRNA
aattcccgtcgctatcaaggaat

SEQ ID NO: 7299 - DNA, 23 bp, Artificial Sequence
  Description of Artificial Sequence: Synthetic oligonucleotide
  Epidermal growth factor receptor (EGFR), ERBB1 phosphotyrosine kinase siRNA
attcccgtcgctatcaaggaatt

SEQ ID NO: 7300 - DNA, 23 bp, Artificial Sequence
  Description of Artificial Sequence: Synthetic oligonucleotide
  Epidermal growth factor receptor (EGFR), ERBB1 phosphotyrosine kinase siRNA
ttcccgtcgctatcaaggaatta

SEQ ID NO: 7301 - DNA, 23 bp, Artificial Sequence
  Description of Artificial Sequence: Synthetic oligonucleotide
  Epidermal growth factor receptor (EGFR), ERBB1 phosphotyrosine kinase siRNA
tcccgtcgctatcaaggaattaa

SEQ ID NO: 7302 - DNA, 23 bp, Artificial Sequence
  Description of Artificial Sequence: Synthetic oligonucleotide
  Epidermal growth factor receptor (EGFR), ERBB1 phosphotyrosine kinase siRNA
cccgtcgctatcaaggaattaag

SEQ ID NO: 7303 - DNA, 23 bp, Artificial Sequence
  Description of Artificial Sequence: Synthetic oligonucleotide
  Epidermal growth factor receptor (EGFR), ERBB1 phosphotyrosine kinase siRNA
ccgtcgctatcaaggaattaaga

SEQ ID NO: 7304 - DNA, 23 bp, Artificial Sequence
  Description of Artificial Sequence: Synthetic oligonucleotide
  Epidermal growth factor receptor (EGFR), ERBB1 phosphotyrosine kinase siRNA
cgtcgctatcaaggaattaagag

SEQ ID NO: 7305 - DNA, 23 bp, Artificial Sequence
  Description of Artificial Sequence: Synthetic oligonucleotide
  Epidermal growth factor receptor (EGFR), ERBB1 phosphotyrosine kinase siRNA
gtcgctatcaaggaattaagaga

SEQ ID NO: 7306 - DNA, 23 bp, Artificial Sequence
  Description of Artificial Sequence: Synthetic oligonucleotide
  Epidermal growth factor receptor (EGFR), ERBB1 phosphotyrosine kinase siRNA
tcgctatcaaggaattaagagaa

SEQ ID NO: 7307 - DNA, 23 bp, Artificial Sequence
  Description of Artificial Sequence: Synthetic oligonucleotide
  Epidermal growth factor receptor (EGFR), ERBB1 phosphotyrosine kinase siRNA
cgctatcaaggaattaagagaag

SEQ ID NO: 7308 - DNA, 23 bp, Artificial Sequence
  Description of Artificial Sequence: Synthetic oligonucleotide
  Epidermal growth factor receptor (EGFR), ERBB1 phosphotyrosine kinase siRNA
gctatcaaggaattaagagaagc

SEQ ID NO: 7309 - DNA, 23 bp, Artificial Sequence
  Description of Artificial Sequence: Synthetic oligonucleotide
  Epidermal growth factor receptor (EGFR), ERBB1 phosphotyrosine kinase siRNA
ctatcaaggaattaagagaagca

SEQ ID NO: 7310 - DNA, 23 bp, Artificial Sequence
  Description of Artificial Sequence: Synthetic oligonucleotide
  Epidermal growth factor receptor (EGFR), ERBB1 phosphotyrosine kinase siRNA
tatcaaggaattaagagaagcaa

SEQ ID NO: 7311 - DNA, 23 bp, Artificial Sequence
  Description of Artificial Sequence: Synthetic oligonucleotide
  Epidermal growth factor receptor (EGFR), ERBB1 phosphotyrosine kinase siRNA
atcaaggaattaagagaagcaac

SEQ ID NO: 7312 - DNA, 23 bp, Artificial Sequence
  Description of Artificial Sequence: Synthetic oligonucleotide
  Epidermal growth factor receptor (EGFR), ERBB1 phosphotyrosine kinase siRNA
tcaaggaattaagagaagcaaca

SEQ ID NO: 7313 - DNA, 23 bp, Artificial Sequence
  Description of Artificial Sequence: Synthetic oligonucleotide
  Epidermal growth factor receptor (EGFR), ERBB1 phosphotyrosine kinase siRNA
caaggaattaagagaagcaacat

SEQ ID NO: 7314 - DNA, 23 bp, Artificial Sequence
  Description of Artificial Sequence: Synthetic oligonucleotide
  Epidermal growth factor receptor (EGFR), ERBB1 phosphotyrosine kinase siRNA
aaggaattaagagaagcaacatc

SEQ ID NO: 7315 - DNA, 23 bp, Artificial Sequence
  Description of Artificial Sequence: Synthetic oligonucleotide
  Epidermal growth factor receptor (EGFR), ERBB1 phosphotyrosine kinase siRNA
aggaattaagagaagcaacatct

SEQ ID NO: 7316 - DNA, 23 bp, Artificial Sequence
  Description of Artificial Sequence: Synthetic oligonucleotide
  Epidermal growth factor receptor (EGFR), ERBB1 phosphotyrosine kinase siRNA
ggaattaagagaagcaacatctc

SEQ ID NO: 7317 - DNA, 23 bp, Artificial Sequence
  Description of Artificial Sequence: Synthetic oligonucleotide
  Epidermal growth factor receptor (EGFR), ERBB1 phosphotyrosine kinase siRNA
gaattaagagaagcaacatctcc

SEQ ID NO: 7318 - DNA, 23 bp, Artificial Sequence
  Description of Artificial Sequence: Synthetic oligonucleotide
  Epidermal growth factor receptor (EGFR), ERBB1 phosphotyrosine kinase siRNA
aattaagagaagcaacatctccg

SEQ ID NO: 7319 - DNA, 23 bp, Artificial Sequence
  Description of Artificial Sequence: Synthetic oligonucleotide
  Epidermal growth factor receptor (EGFR), ERBB1 phosphotyrosine kinase siRNA
attaagagaagcaacatctccga

SEQ ID NO: 7320 - DNA, 23 bp, Artificial Sequence
  Description of Artificial Sequence: Synthetic oligonucleotide
  Epidermal growth factor receptor (EGFR), ERBB1 phosphotyrosine kinase siRNA
ttaagagaagcaacatctccgaa

SEQ ID NO: 7321 - DNA, 23 bp, Artificial Sequence
  Description of Artificial Sequence: Synthetic oligonucleotide
  Epidermal growth factor receptor (EGFR), ERBB1 phosphotyrosine kinase siRNA
taagagaagcaacatctccgaaa

SEQ ID NO: 7322 - DNA, 23 bp, Artificial Sequence
  Description of Artificial Sequence: Synthetic oligonucleotide
  Epidermal growth factor receptor (EGFR), ERBB1 phosphotyrosine kinase siRNA
aagagaagcaacatctccgaaag

SEQ ID NO: 7323 - DNA, 23 bp, Artificial Sequence
  Description of Artificial Sequence: Synthetic oligonucleotide
  Epidermal growth factor receptor (EGFR), ERBB1 phosphotyrosine kinase siRNA
agagaagcaacatctccgaaagc

SEQ ID NO: 7324 - DNA, 23 bp, Artificial Sequence
  Description of Artificial Sequence: Synthetic oligonucleotide
  Epidermal growth factor receptor (EGFR), ERBB1 phosphotyrosine kinase siRNA
gagaagcaacatctccgaaagcc

SEQ ID NO: 7325 - DNA, 23 bp, Artificial Sequence
  Description of Artificial Sequence: Synthetic oligonucleotide
  Epidermal growth factor receptor (EGFR), ERBB1 phosphotyrosine kinase siRNA
agaagcaacatctccgaaagcca

SEQ ID NO: 7326 - DNA, 23 bp, Artificial Sequence
  Description of Artificial Sequence: Synthetic oligonucleotide
  Epidermal growth factor receptor (EGFR), ERBB1 phosphotyrosine kinase siRNA
gaagcaacatctccgaaagccaa

SEQ ID NO: 7327 - DNA, 23 bp, Artificial Sequence
  Description of Artificial Sequence: Synthetic oligonucleotide
  Epidermal growth factor receptor (EGFR), ERBB1 phosphotyrosine kinase siRNA
aagcaacatctccgaaagccaac

SEQ ID NO: 7328 - DNA, 23 bp, Artificial Sequence
  Description of Artificial Sequence: Synthetic oligonucleotide
  Epidermal growth factor receptor (EGFR), ERBB1 phosphotyrosine kinase siRNA
agcaacatctccgaaagccaaca

SEQ ID NO: 7329 - DNA, 23 bp, Artificial Sequence
  Description of Artificial Sequence: Synthetic oligonucleotide
  Epidermal growth factor receptor (EGFR), ERBB1 phosphotyrosine kinase siRNA
gcaacatctccgaaagccaacaa

SEQ ID NO: 7330 - DNA, 23 bp, Artificial Sequence
  Description of Artificial Sequence: Synthetic oligonucleotide
  Epidermal growth factor receptor (EGFR), ERBB1 phosphotyrosine kinase siRNA
caacatctccgaaagccaacaag

SEQ ID NO: 7331 - DNA, 23 bp, Artificial Sequence
  Description of Artificial Sequence: Synthetic oligonucleotide
  Epidermal growth factor receptor (EGFR), ERBB1 phosphotyrosine kinase siRNA
aacatctccgaaagccaacaagg

SEQ ID NO: 7332 - DNA, 23 bp, Artificial Sequence
  Description of Artificial Sequence: Synthetic oligonucleotide
  Epidermal growth factor receptor (EGFR), ERBB1 phosphotyrosine kinase siRNA
acatctccgaaagccaacaagga

SEQ ID NO: 7333 - DNA, 23 bp, Artificial Sequence
  Description of Artificial Sequence: Synthetic oligonucleotide
  Epidermal growth factor receptor (EGFR), ERBB1 phosphotyrosine kinase siRNA
catctccgaaagccaacaaggaa

SEQ ID NO: 7334 - DNA, 23 bp, Artificial Sequence
  Description of Artificial Sequence: Synthetic oligonucleotide
  Epidermal growth factor receptor (EGFR), ERBB1 phosphotyrosine kinase siRNA
atctccgaaagccaacaaggaaa

SEQ ID NO: 7335 - DNA, 23 bp, Artificial Sequence
  Description of Artificial Sequence: Synthetic oligonucleotide
  Epidermal growth factor receptor (EGFR), ERBB1 phosphotyrosine kinase siRNA
tctccgaaagccaacaaggaaat

SEQ ID NO: 7336 - DNA, 23 bp, Artificial Sequence
  Description of Artificial Sequence: Synthetic oligonucleotide
  Epidermal growth factor receptor (EGFR), ERBB1 phosphotyrosine kinase siRNA
ctccgaaagccaacaaggaaatc

SEQ ID NO: 7337 - DNA, 23 bp, Artificial Sequence
  Description of Artificial Sequence: Synthetic oligonucleotide
  Epidermal growth factor receptor (EGFR), ERBB1 phosphotyrosine kinase siRNA
tccgaaagccaacaaggaaatcc

SEQ ID NO: 7338 - DNA, 23 bp, Artificial Sequence
  Description of Artificial Sequence: Synthetic oligonucleotide
  Epidermal growth factor receptor (EGFR), ERBB1 phosphotyrosine kinase siRNA
ccgaaagccaacaaggaaatcct

SEQ ID NO: 7339 - DNA, 23 bp, Artificial Sequence
  Description of Artificial Sequence: Synthetic oligonucleotide
  Epidermal growth factor receptor (EGFR), ERBB1 phosphotyrosine kinase siRNA
cgaaagccaacaaggaaatcctc

SEQ ID NO: 7340 - DNA, 23 bp, Artificial Sequence
  Description of Artificial Sequence: Synthetic oligonucleotide
  Epidermal growth factor receptor (EGFR), ERBB1 phosphotyrosine kinase siRNA
gaaagccaacaaggaaatcctcg

SEQ ID NO: 7341 - DNA, 23 bp, Artificial Sequence
  Description of Artificial Sequence: Synthetic oligonucleotide
  Epidermal growth factor receptor (EGFR), ERBB1 phosphotyrosine kinase siRNA
aaagccaacaaggaaatcctcga

SEQ ID NO: 7342 - DNA, 23 bp, Artificial Sequence
  Description of Artificial Sequence: Synthetic oligonucleotide
  Epidermal growth factor receptor (EGFR), ERBB1 phosphotyrosine kinase siRNA
aagccaacaaggaaatcctcgat

SEQ ID NO: 7343 - DNA, 23 bp, Artificial Sequence
  Description of Artificial Sequence: Synthetic oligonucleotide
  Epidermal growth factor receptor (EGFR), ERBB1 phosphotyrosine kinase siRNA
agccaacaaggaaatcctcgatg

SEQ ID NO: 7344 - DNA, 23 bp, Artificial Sequence
  Description of Artificial Sequence: Synthetic oligonucleotide
  Epidermal growth factor receptor (EGFR), ERBB1 phosphotyrosine kinase siRNA
gccaacaaggaaatcctcgatga

SEQ ID NO: 7345 - DNA, 23 bp, Artificial Sequence
  Description of Artificial Sequence: Synthetic oligonucleotide
  Epidermal growth factor receptor (EGFR), ERBB1 phosphotyrosine kinase siRNA
ccaacaaggaaatcctcgatgaa

SEQ ID NO: 7346 - DNA, 23 bp, Artificial Sequence
  Description of Artificial Sequence: Synthetic oligonucleotide
  Epidermal growth factor receptor (EGFR), ERBB1 phosphotyrosine kinase siRNA
caacaaggaaatcctcgatgaag

SEQ ID NO: 7347 - DNA, 23 bp, Artificial Sequence
  Description of Artificial Sequence: Synthetic oligonucleotide
  Epidermal growth factor receptor (EGFR), ERBB1 phosphotyrosine kinase siRNA
aacaaggaaatcctcgatgaagc

SEQ ID NO: 7348 - DNA, 23 bp, Artificial Sequence
  Description of Artificial Sequence: Synthetic oligonucleotide
  Epidermal growth factor receptor (EGFR), ERBB1 phosphotyrosine kinase siRNA
acaaggaaatcctcgatgaagcc

SEQ ID NO: 7349 - DNA, 23 bp, Artificial Sequence
  Description of Artificial Sequence: Synthetic oligonucleotide
  Epidermal growth factor receptor (EGFR), ERBB1 phosphotyrosine kinase siRNA
caaggaaatcctcgatgaagcct

SEQ ID NO: 7350 - DNA, 23 bp, Artificial Sequence
  Description of Artificial Sequence: Synthetic oligonucleotide
  Epidermal growth factor receptor (EGFR), ERBB1 phosphotyrosine kinase siRNA
aaggaaatcctcgatgaagccta

SEQ ID NO: 7351 - DNA, 23 bp, Artificial Sequence
  Description of Artificial Sequence: Synthetic oligonucleotide
  Epidermal growth factor receptor (EGFR), ERBB1 phosphotyrosine kinase siRNA
aggaaatcctcgatgaagcctac

SEQ ID NO: 7352 - DNA, 23 bp, Artificial Sequence
  Description of Artificial Sequence: Synthetic oligonucleotide
  Epidermal growth factor receptor (EGFR), ERBB1 phosphotyrosine kinase siRNA
ggaaatcctcgatgaagcctacg

SEQ ID NO: 7353 - DNA, 23 bp, Artificial Sequence
  Description of Artificial Sequence: Synthetic oligonucleotide
  Epidermal growth factor receptor (EGFR), ERBB1 phosphotyrosine kinase siRNA
gaaatcctcgatgaagcctacgt

SEQ ID NO: 7354 - DNA, 23 bp, Artificial Sequence
  Description of Artificial Sequence: Synthetic oligonucleotide
  Epidermal growth factor receptor (EGFR), ERBB1 phosphotyrosine kinase siRNA
aaatcctcgatgaagcctacgtg

SEQ ID NO: 7355 - DNA, 23 bp, Artificial Sequence
  Description of Artificial Sequence: Synthetic oligonucleotide
  Epidermal growth factor receptor (EGFR), ERBB1 phosphotyrosine kinase siRNA
aatcctcgatgaagcctacgtga

SEQ ID NO: 7356 - DNA, 23 bp, Artificial Sequence
  Description of Artificial Sequence: Synthetic oligonucleotide
  Epidermal growth factor receptor (EGFR), ERBB1 phosphotyrosine kinase siRNA
atcctcgatgaagcctacgtgat

SEQ ID NO: 7357 - DNA, 23 bp, Artificial Sequence
  Description of Artificial Sequence: Synthetic oligonucleotide
  Epidermal growth factor receptor (EGFR), ERBB1 phosphotyrosine kinase siRNA
tcctcgatgaagcctacgtgatg

SEQ ID NO: 7358 - DNA, 23 bp, Artificial Sequence
  Description of Artificial Sequence: Synthetic oligonucleotide
  Epidermal growth factor receptor (EGFR), ERBB1 phosphotyrosine kinase siRNA
cctcgatgaagcctacgtgatgg

SEQ ID NO: 7359 - DNA, 23 bp, Artificial Sequence
  Description of Artificial Sequence: Synthetic oligonucleotide
  Epidermal growth factor receptor (EGFR), ERBB1 phosphotyrosine kinase siRNA
ctcgatgaagcctacgtgatggc

SEQ ID NO: 7360 - DNA, 23 bp, Artificial Sequence
  Description of Artificial Sequence: Synthetic oligonucleotide
  Epidermal growth factor receptor (EGFR), ERBB1 phosphotyrosine kinase siRNA
tcgatgaagcctacgtgatggcc

SEQ ID NO: 7361 - DNA, 23 bp, Artificial Sequence
  Description of Artificial Sequence: Synthetic oligonucleotide
  Epidermal growth factor receptor (EGFR), ERBB1 phosphotyrosine kinase siRNA
cgatgaagcctacgtgatggcca

SEQ ID NO: 7362 - DNA, 23 bp, Artificial Sequence
  Description of Artificial Sequence: Synthetic oligonucleotide
  Epidermal growth factor receptor (EGFR), ERBB1 phosphotyrosine kinase siRNA
gatgaagcctacgtgatggccag

SEQ ID NO: 7363 - DNA, 23 bp, Artificial Sequence
  Description of Artificial Sequence: Synthetic oligonucleotide
  Epidermal growth factor receptor (EGFR), ERBB1 phosphotyrosine kinase siRNA
atgaagcctacgtgatggccagc

SEQ ID NO: 7364 - DNA, 23 bp, Artificial Sequence
  Description of Artificial Sequence: Synthetic oligonucleotide
  Epidermal growth factor receptor (EGFR), ERBB1 phosphotyrosine kinase siRNA
tgaagcctacgtgatggccagcg

SEQ ID NO: 7365 - DNA, 23 bp, Artificial Sequence
  Description of Artificial Sequence: Synthetic oligonucleotide
  Epidermal growth factor receptor (EGFR), ERBB1 phosphotyrosine kinase siRNA
gaagcctacgtgatggccagcgt

SEQ ID NO: 7366 - DNA, 23 bp, Artificial Sequence
  Description of Artificial Sequence: Synthetic oligonucleotide
  Epidermal growth factor receptor (EGFR), ERBB1 phosphotyrosine kinase siRNA
aagcctacgtgatggccagcgtg

SEQ ID NO: 7367 - DNA, 23 bp, Artificial Sequence
  Description of Artificial Sequence: Synthetic oligonucleotide
  Epidermal growth factor receptor (EGFR), ERBB1 phosphotyrosine kinase siRNA
agcctacgtgatggccagcgtgg

SEQ ID NO: 7368 - DNA, 23 bp, Artificial Sequence
  Description of Artificial Sequence: Synthetic oligonucleotide
  Epidermal growth factor receptor (EGFR), ERBB1 phosphotyrosine kinase siRNA
gcctacgtgatggccagcgtgga

SEQ ID NO: 7369 - DNA, 23 bp, Artificial Sequence
  Description of Artificial Sequence: Synthetic oligonucleotide
  Epidermal growth factor receptor (EGFR), ERBB1 phosphotyrosine kinase siRNA
cctacgtgatggccagcgtggac

SEQ ID NO: 7370 - DNA, 23 bp, Artificial Sequence
  Description of Artificial Sequence: Synthetic oligonucleotide
  Epidermal growth factor receptor (EGFR), ERBB1 phosphotyrosine kinase siRNA
ctacgtgatggccagcgtggaca

SEQ ID NO: 7371 - DNA, 23 bp, Artificial Sequence
  Description of Artificial Sequence: Synthetic oligonucleotide
  Epidermal growth factor receptor (EGFR), ERBB1 phosphotyrosine kinase siRNA
tacgtgatggccagcgtggacaa

SEQ ID NO: 7372 - DNA, 23 bp, Artificial Sequence
  Description of Artificial Sequence: Synthetic oligonucleotide
  Epidermal growth factor receptor (EGFR), ERBB1 phosphotyrosine kinase siRNA
acgtgatggccagcgtggacaac

SEQ ID NO: 7373 - DNA, 23 bp, Artificial Sequence
  Description of Artificial Sequence: Synthetic oligonucleotide
  Epidermal growth factor receptor (EGFR), ERBB1 phosphotyrosine kinase siRNA
cgtgatggccagcgtggacaacc

SEQ ID NO: 7374 - DNA, 23 bp, Artificial Sequence
  Description of Artificial Sequence: Synthetic oligonucleotide
  Epidermal growth factor receptor (EGFR), ERBB1 phosphotyrosine kinase siRNA
gtgatggccagcgtggacaaccc

SEQ ID NO: 7375 - DNA, 23 bp, Artificial Sequence
  Description of Artificial Sequence: Synthetic oligonucleotide
  Epidermal growth factor receptor (EGFR), ERBB1 phosphotyrosine kinase siRNA
tgatggccagcgtggacaacccc

SEQ ID NO: 7376 - DNA, 23 bp, Artificial Sequence
  Description of Artificial Sequence: Synthetic oligonucleotide
  Epidermal growth factor receptor (EGFR), ERBB1 phosphotyrosine kinase siRNA
gatggccagcgtggacaaccccc

SEQ ID NO: 7377 - DNA, 23 bp, Artificial Sequence
  Description of Artificial Sequence: Synthetic oligonucleotide
  Epidermal growth factor receptor (EGFR), ERBB1 phosphotyrosine kinase siRNA
atggccagcgtggacaaccccca

SEQ ID NO: 7378 - DNA, 23 bp, Artificial Sequence
  Description of Artificial Sequence: Synthetic oligonucleotide
  Epidermal growth factor receptor (EGFR), ERBB1 phosphotyrosine kinase siRNA
tggccagcgtggacaacccccac

SEQ ID NO: 7379 - DNA, 23 bp, Artificial Sequence
  Description of Artificial Sequence: Synthetic oligonucleotide
  Epidermal growth factor receptor (EGFR), ERBB1 phosphotyrosine kinase siRNA
ggccagcgtggacaacccccacg

SEQ ID NO: 7380 - DNA, 23 bp, Artificial Sequence
  Description of Artificial Sequence: Synthetic oligonucleotide
  Epidermal growth factor receptor (EGFR), ERBB1 phosphotyrosine kinase siRNA
gccagcgtggacaacccccacgt

SEQ ID NO: 7381 - DNA, 23 bp, Artificial Sequence
  Description of Artificial Sequence: Synthetic oligonucleotide
  Epidermal growth factor receptor (EGFR), ERBB1 phosphotyrosine kinase siRNA
ccagcgtggacaacccccacgtg

SEQ ID NO: 7382 - DNA, 23 bp, Artificial Sequence
  Description of Artificial Sequence: Synthetic oligonucleotide
  Epidermal growth factor receptor (EGFR), ERBB1 phosphotyrosine kinase siRNA
cagcgtggacaacccccacgtgt

SEQ ID NO: 7383 - DNA, 23 bp, Artificial Sequence
  Description of Artificial Sequence: Synthetic oligonucleotide
  Epidermal growth factor receptor (EGFR), ERBB1 phosphotyrosine kinase siRNA
agcgtggacaacccccacgtgtg

SEQ ID NO: 7384 - DNA, 23 bp, Artificial Sequence
  Description of Artificial Sequence: Synthetic oligonucleotide
  Epidermal growth factor receptor (EGFR), ERBB1 phosphotyrosine kinase siRNA
gcgtggacaacccccacgtgtgc

SEQ ID NO: 7385 - DNA, 23 bp, Artificial Sequence
  Description of Artificial Sequence: Synthetic oligonucleotide
  Epidermal growth factor receptor (EGFR), ERBB1 phosphotyrosine kinase siRNA
cgtggacaacccccacgtgtgcc

SEQ ID NO: 7386 - DNA, 23 bp, Artificial Sequence
  Description of Artificial Sequence: Synthetic oligonucleotide
  Epidermal growth factor receptor (EGFR), ERBB1 phosphotyrosine kinase siRNA
gtggacaacccccacgtgtgccg

SEQ ID NO: 7387 - DNA, 23 bp, Artificial Sequence
  Description of Artificial Sequence: Synthetic oligonucleotide
  Epidermal growth factor receptor (EGFR), ERBB1 phosphotyrosine kinase siRNA
tggacaacccccacgtgtgccgc

SEQ ID NO: 7388 - DNA, 23 bp, Artificial Sequence
  Description of Artificial Sequence: Synthetic oligonucleotide
  Epidermal growth factor receptor (EGFR), ERBB1 phosphotyrosine kinase siRNA
ggacaacccccacgtgtgccgcc

SEQ ID NO: 7389 - DNA, 23 bp, Artificial Sequence
  Description of Artificial Sequence: Synthetic oligonucleotide
  Epidermal growth factor receptor (EGFR), ERBB1 phosphotyrosine kinase siRNA
gacaacccccacgtgtgccgcct

SEQ ID NO: 7390 - DNA, 23 bp, Artificial Sequence
  Description of Artificial Sequence: Synthetic oligonucleotide
  Epidermal growth factor receptor (EGFR), ERBB1 phosphotyrosine kinase siRNA
acaacccccacgtgtgccgcctg

SEQ ID NO: 7391 - DNA, 23 bp, Artificial Sequence
  Description of Artificial Sequence: Synthetic oligonucleotide
  Epidermal growth factor receptor (EGFR), ERBB1 phosphotyrosine kinase siRNA
caacccccacgtgtgccgcctgc

SEQ ID NO: 7392 - DNA, 23 bp, Artificial Sequence
  Description of Artificial Sequence: Synthetic oligonucleotide
  Epidermal growth factor receptor (EGFR), ERBB1 phosphotyrosine kinase siRNA
aacccccacgtgtgccgcctgct

SEQ ID NO: 7393 - DNA, 23 bp, Artificial Sequence
  Description of Artificial Sequence: Synthetic oligonucleotide
  Epidermal growth factor receptor (EGFR), ERBB1 phosphotyrosine kinase siRNA
acccccacgtgtgccgcctgctg

SEQ ID NO: 7394 - DNA, 23 bp, Artificial Sequence
  Description of Artificial Sequence: Synthetic oligonucleotide
  Epidermal growth factor receptor (EGFR), ERBB1 phosphotyrosine kinase siRNA
cccccacgtgtgccgcctgctgg

SEQ ID NO: 7395 - DNA, 23 bp, Artificial Sequence
  Description of Artificial Sequence: Synthetic oligonucleotide
  Epidermal growth factor receptor (EGFR), ERBB1 phosphotyrosine kinase siRNA
ccccacgtgtgccgcctgctggg

SEQ ID NO: 7396 - DNA, 23 bp, Artificial Sequence
  Description of Artificial Sequence: Synthetic oligonucleotide
  Epidermal growth factor receptor (EGFR), ERBB1 phosphotyrosine kinase siRNA
cccacgtgtgccgcctgctgggc

SEQ ID NO: 7397 - DNA, 23 bp, Artificial Sequence
  Description of Artificial Sequence: Synthetic oligonucleotide
  Epidermal growth factor receptor (EGFR), ERBB1 phosphotyrosine kinase siRNA
ccacgtgtgccgcctgctgggca

SEQ ID NO: 7398 - DNA, 23 bp, Artificial Sequence
  Description of Artificial Sequence: Synthetic oligonucleotide
  Epidermal growth factor receptor (EGFR), ERBB1 phosphotyrosine kinase siRNA
cacgtgtgccgcctgctgggcat

SEQ ID NO: 7399 - DNA, 23 bp, Artificial Sequence
  Description of Artificial Sequence: Synthetic oligonucleotide
  Epidermal growth factor receptor (EGFR), ERBB1 phosphotyrosine kinase siRNA
acgtgtgccgcctgctgggcatc

SEQ ID NO: 7400 - DNA, 23 bp, Artificial Sequence
  Description of Artificial Sequence: Synthetic oligonucleotide
  Epidermal growth factor receptor (EGFR), ERBB1 phosphotyrosine kinase siRNA
cgtgtgccgcctgctgggcatct

SEQ ID NO: 7401 - DNA, 23 bp, Artificial Sequence
  Description of Artificial Sequence: Synthetic oligonucleotide
  Epidermal growth factor receptor (EGFR), ERBB1 phosphotyrosine kinase siRNA
gtgtgccgcctgctgggcatctg

SEQ ID NO: 7402 - DNA, 23 bp, Artificial Sequence
  Description of Artificial Sequence: Synthetic oligonucleotide
  Epidermal growth factor receptor (EGFR), ERBB1 phosphotyrosine kinase siRNA
tgtgccgcctgctgggcatctgc

SEQ ID NO: 7403 - DNA, 23 bp, Artificial Sequence
  Description of Artificial Sequence: Synthetic oligonucleotide
  Epidermal growth factor receptor (EGFR), ERBB1 phosphotyrosine kinase siRNA
gtgccgcctgctgggcatctgcc

SEQ ID NO: 7404 - DNA, 23 bp, Artificial Sequence
  Description of Artificial Sequence: Synthetic oligonucleotide
  Epidermal growth factor receptor (EGFR), ERBB1 phosphotyrosine kinase siRNA
tgccgcctgctgggcatctgcct

SEQ ID NO: 7405 - DNA, 23 bp, Artificial Sequence
  Description of Artificial Sequence: Synthetic oligonucleotide
  Epidermal growth factor receptor (EGFR), ERBB1 phosphotyrosine kinase siRNA
gccgcctgctgggcatctgcctc

SEQ ID NO: 7406 - DNA, 23 bp, Artificial Sequence
  Description of Artificial Sequence: Synthetic oligonucleotide
  Epidermal growth factor receptor (EGFR), ERBB1 phosphotyrosine kinase siRNA
ccgcctgctgggcatctgcctca

SEQ ID NO: 7407 - DNA, 23 bp, Artificial Sequence
  Description of Artificial Sequence: Synthetic oligonucleotide
  Epidermal growth factor receptor (EGFR), ERBB1 phosphotyrosine kinase siRNA
cgcctgctgggcatctgcctcac

SEQ ID NO: 7408 - DNA, 23 bp, Artificial Sequence
  Description of Artificial Sequence: Synthetic oligonucleotide
  Epidermal growth factor receptor (EGFR), ERBB1 phosphotyrosine kinase siRNA
gcctgctgggcatctgcctcacc

SEQ ID NO: 7409 - DNA, 23 bp, Artificial Sequence
  Description of Artificial Sequence: Synthetic oligonucleotide
  Epidermal growth factor receptor (EGFR), ERBB1 phosphotyrosine kinase siRNA
cctgctgggcatctgcctcacct

SEQ ID NO: 7410 - DNA, 23 bp, Artificial Sequence
  Description of Artificial Sequence: Synthetic oligonucleotide
  Epidermal growth factor receptor (EGFR), ERBB1 phosphotyrosine kinase siRNA
ctgctgggcatctgcctcacctc

SEQ ID NO: 7411 - DNA, 23 bp, Artificial Sequence
  Description of Artificial Sequence: Synthetic oligonucleotide
  Epidermal growth factor receptor (EGFR), ERBB1 phosphotyrosine kinase siRNA
tgctgggcatctgcctcacctcc

SEQ ID NO: 7412 - DNA, 23 bp, Artificial Sequence
  Description of Artificial Sequence: Synthetic oligonucleotide
  Epidermal growth factor receptor (EGFR), ERBB1 phosphotyrosine kinase siRNA
gctgggcatctgcctcacctcca

SEQ ID NO: 7413 - DNA, 23 bp, Artificial Sequence
  Description of Artificial Sequence: Synthetic oligonucleotide
  Epidermal growth factor receptor (EGFR), ERBB1 phosphotyrosine kinase siRNA
ctgggcatctgcctcacctccac

SEQ ID NO: 7414 - DNA, 23 bp, Artificial Sequence
  Description of Artificial Sequence: Synthetic oligonucleotide
  Epidermal growth factor receptor (EGFR), ERBB1 phosphotyrosine kinase siRNA
tgggcatctgcctcacctccacc

SEQ ID NO: 7415 - DNA, 23 bp, Artificial Sequence
  Description of Artificial Sequence: Synthetic oligonucleotide
  Epidermal growth factor receptor (EGFR), ERBB1 phosphotyrosine kinase siRNA
gggcatctgcctcacctccaccg

SEQ ID NO: 7416 - DNA, 23 bp, Artificial Sequence
  Description of Artificial Sequence: Synthetic oligonucleotide
  Epidermal growth factor receptor (EGFR), ERBB1 phosphotyrosine kinase siRNA
ggcatctgcctcacctccaccgt

SEQ ID NO: 7417 - DNA, 23 bp, Artificial Sequence
  Description of Artificial Sequence: Synthetic oligonucleotide
  Epidermal growth factor receptor (EGFR), ERBB1 phosphotyrosine kinase siRNA
gcatctgcctcacctccaccgtg

SEQ ID NO: 7418 - DNA, 23 bp, Artificial Sequence
  Description of Artificial Sequence: Synthetic oligonucleotide
  Epidermal growth factor receptor (EGFR), ERBB1 phosphotyrosine kinase siRNA
catctgcctcacctccaccgtgc

SEQ ID NO: 7419 - DNA, 23 bp, Artificial Sequence
  Description of Artificial Sequence: Synthetic oligonucleotide
  Epidermal growth factor receptor (EGFR), ERBB1 phosphotyrosine kinase siRNA
atctgcctcacctccaccgtgca

SEQ ID NO: 7420 - DNA, 23 bp, Artificial Sequence
  Description of Artificial Sequence: Synthetic oligonucleotide
  Epidermal growth factor receptor (EGFR), ERBB1 phosphotyrosine kinase siRNA
tctgcctcacctccaccgtgcag

SEQ ID NO: 7421 - DNA, 23 bp, Artificial Sequence
  Description of Artificial Sequence: Synthetic oligonucleotide
  Epidermal growth factor receptor (EGFR), ERBB1 phosphotyrosine kinase siRNA
ctgcctcacctccaccgtgcagc

SEQ ID NO: 7422 - DNA, 23 bp, Artificial Sequence
  Description of Artificial Sequence: Synthetic oligonucleotide
  Epidermal growth factor receptor (EGFR), ERBB1 phosphotyrosine kinase siRNA
tgcctcacctccaccgtgcagct

SEQ ID NO: 7423 - DNA, 23 bp, Artificial Sequence
  Description of Artificial Sequence: Synthetic oligonucleotide
  Epidermal growth factor receptor (EGFR), ERBB1 phosphotyrosine kinase siRNA
gcctcacctccaccgtgcagctc

SEQ ID NO: 7424 - DNA, 23 bp, Artificial Sequence
  Description of Artificial Sequence: Synthetic oligonucleotide
  Epidermal growth factor receptor (EGFR), ERBB1 phosphotyrosine kinase siRNA
cctcacctccaccgtgcagctca

SEQ ID NO: 7425 - DNA, 23 bp, Artificial Sequence
  Description of Artificial Sequence: Synthetic oligonucleotide
  Epidermal growth factor receptor (EGFR), ERBB1 phosphotyrosine kinase siRNA
ctcacctccaccgtgcagctcat

SEQ ID NO: 7426 - DNA, 23 bp, Artificial Sequence
  Description of Artificial Sequence: Synthetic oligonucleotide
  Epidermal growth factor receptor (EGFR), ERBB1 phosphotyrosine kinase siRNA
tcacctccaccgtgcagctcatc

SEQ ID NO: 7427 - DNA, 23 bp, Artificial Sequence
  Description of Artificial Sequence: Synthetic oligonucleotide
  Epidermal growth factor receptor (EGFR), ERBB1 phosphotyrosine kinase siRNA
cacctccaccgtgcagctcatca

SEQ ID NO: 7428 - DNA, 23 bp, Artificial Sequence
  Description of Artificial Sequence: Synthetic oligonucleotide
  Epidermal growth factor receptor (EGFR), ERBB1 phosphotyrosine kinase siRNA
acctccaccgtgcagctcatcac

SEQ ID NO: 7429 - DNA, 23 bp, Artificial Sequence
  Description of Artificial Sequence: Synthetic oligonucleotide
  Epidermal growth factor receptor (EGFR), ERBB1 phosphotyrosine kinase siRNA
cctccaccgtgcagctcatcacg

SEQ ID NO: 7430 - DNA, 23 bp, Artificial Sequence
  Description of Artificial Sequence: Synthetic oligonucleotide
  Epidermal growth factor receptor (EGFR), ERBB1 phosphotyrosine kinase siRNA
ctccaccgtgcagctcatcacgc

SEQ ID NO: 7431 - DNA, 23 bp, Artificial Sequence
  Description of Artificial Sequence: Synthetic oligonucleotide
  Epidermal growth factor receptor (EGFR), ERBB1 phosphotyrosine kinase siRNA
tccaccgtgcagctcatcacgca

SEQ ID NO: 7432 - DNA, 23 bp, Artificial Sequence
  Description of Artificial Sequence: Synthetic oligonucleotide
  Epidermal growth factor receptor (EGFR), ERBB1 phosphotyrosine kinase siRNA
ccaccgtgcagctcatcacgcag

SEQ ID NO: 7433 - DNA, 23 bp, Artificial Sequence
  Description of Artificial Sequence: Synthetic oligonucleotide
  Epidermal growth factor receptor (EGFR), ERBB1 phosphotyrosine kinase siRNA
caccgtgcagctcatcacgcagc

SEQ ID NO: 7434 - DNA, 23 bp, Artificial Sequence
  Description of Artificial Sequence: Synthetic oligonucleotide
  Epidermal growth factor receptor (EGFR), ERBB1 phosphotyrosine kinase siRNA
accgtgcagctcatcacgcagct

SEQ ID NO: 7435 - DNA, 23 bp, Artificial Sequence
  Description of Artificial Sequence: Synthetic oligonucleotide
  Epidermal growth factor receptor (EGFR), ERBB1 phosphotyrosine kinase siRNA
ccgtgcagctcatcacgcagctc

SEQ ID NO: 7436 - DNA, 23 bp, Artificial Sequence
  Description of Artificial Sequence: Synthetic oligonucleotide
  Epidermal growth factor receptor (EGFR), ERBB1 phosphotyrosine kinase siRNA
cgtgcagctcatcacgcagctca

SEQ ID NO: 7437 - DNA, 23 bp, Artificial Sequence
  Description of Artificial Sequence: Synthetic oligonucleotide
  Epidermal growth factor receptor (EGFR), ERBB1 phosphotyrosine kinase siRNA
gtgcagctcatcacgcagctcat

SEQ ID NO: 7438 - DNA, 23 bp, Artificial Sequence
  Description of Artificial Sequence: Synthetic oligonucleotide
  Epidermal growth factor receptor (EGFR), ERBB1 phosphotyrosine kinase siRNA
tgcagctcatcacgcagctcatg

SEQ ID NO: 7439 - DNA, 23 bp, Artificial Sequence
  Description of Artificial Sequence: Synthetic oligonucleotide
  Epidermal growth factor receptor (EGFR), ERBB1 phosphotyrosine kinase siRNA
gcagctcatcacgcagctcatgc

SEQ ID NO: 7440 - DNA, 23 bp, Artificial Sequence
  Description of Artificial Sequence: Synthetic oligonucleotide
  Epidermal growth factor receptor (EGFR), ERBB1 phosphotyrosine kinase siRNA
cagctcatcacgcagctcatgcc

SEQ ID NO: 7441 - DNA, 23 bp, Artificial Sequence
  Description of Artificial Sequence: Synthetic oligonucleotide
  Epidermal growth factor receptor (EGFR), ERBB1 phosphotyrosine kinase siRNA
agctcatcacgcagctcatgccc

SEQ ID NO: 7442 - DNA, 23 bp, Artificial Sequence
  Description of Artificial Sequence: Synthetic oligonucleotide
  Epidermal growth factor receptor (EGFR), ERBB1 phosphotyrosine kinase siRNA
gctcatcacgcagctcatgccct

SEQ ID NO: 7443 - DNA, 23 bp, Artificial Sequence
  Description of Artificial Sequence: Synthetic oligonucleotide
  Epidermal growth factor receptor (EGFR), ERBB1 phosphotyrosine kinase siRNA
ctcatcacgcagctcatgccctt

SEQ ID NO: 7444 - DNA, 23 bp, Artificial Sequence
  Description of Artificial Sequence: Synthetic oligonucleotide
  Epidermal growth factor receptor (EGFR), ERBB1 phosphotyrosine kinase siRNA
tcatcacgcagctcatgcccttc

SEQ ID NO: 7445 - DNA, 23 bp, Artificial Sequence
  Description of Artificial Sequence: Synthetic oligonucleotide
  Epidermal growth factor receptor (EGFR), ERBB1 phosphotyrosine kinase siRNA
catcacgcagctcatgcccttcg

SEQ ID NO: 7446 - DNA, 23 bp, Artificial Sequence
  Description of Artificial Sequence: Synthetic oligonucleotide
  Epidermal growth factor receptor (EGFR), ERBB1 phosphotyrosine kinase siRNA
atcacgcagctcatgcccttcgg

SEQ ID NO: 7447 - DNA, 23 bp, Artificial Sequence
  Description of Artificial Sequence: Synthetic oligonucleotide
  Epidermal growth factor receptor (EGFR), ERBB1 phosphotyrosine kinase siRNA
tcacgcagctcatgcccttcggc

SEQ ID NO: 7448 - DNA, 23 bp, Artificial Sequence
  Description of Artificial Sequence: Synthetic oligonucleotide
  Epidermal growth factor receptor (EGFR), ERBB1 phosphotyrosine kinase siRNA
cacgcagctcatgcccttcggct

SEQ ID NO: 7449 - DNA, 23 bp, Artificial Sequence
  Description of Artificial Sequence: Synthetic oligonucleotide
  Epidermal growth factor receptor (EGFR), ERBB1 phosphotyrosine kinase siRNA
acgcagctcatgcccttcggctg

SEQ ID NO: 7450 - DNA, 23 bp, Artificial Sequence
  Description of Artificial Sequence: Synthetic oligonucleotide
  Epidermal growth factor receptor (EGFR), ERBB1 phosphotyrosine kinase siRNA
cgcagctcatgcccttcggctgc

SEQ ID NO: 7451 - DNA, 23 bp, Artificial Sequence
  Description of Artificial Sequence: Synthetic oligonucleotide
  Epidermal growth factor receptor (EGFR), ERBB1 phosphotyrosine kinase siRNA
gcagctcatgcccttcggctgcc

SEQ ID NO: 7452 - DNA, 23 bp, Artificial Sequence
  Description of Artificial Sequence: Synthetic oligonucleotide
  Epidermal growth factor receptor (EGFR), ERBB1 phosphotyrosine kinase siRNA
cagctcatgcccttcggctgcct

SEQ ID NO: 7453 - DNA, 23 bp, Artificial Sequence
  Description of Artificial Sequence: Synthetic oligonucleotide
  Epidermal growth factor receptor (EGFR), ERBB1 phosphotyrosine kinase siRNA
agctcatgcccttcggctgcctc

SEQ ID NO: 7454 - DNA, 23 bp, Artificial Sequence
  Description of Artificial Sequence: Synthetic oligonucleotide
  Epidermal growth factor receptor (EGFR), ERBB1 phosphotyrosine kinase siRNA
gctcatgcccttcggctgcctcc

SEQ ID NO: 7455 - DNA, 23 bp, Artificial Sequence
  Description of Artificial Sequence: Synthetic oligonucleotide
  Epidermal growth factor receptor (EGFR), ERBB1 phosphotyrosine kinase siRNA
ctcatgcccttcggctgcctcct

SEQ ID NO: 7456 - DNA, 23 bp, Artificial Sequence
  Description of Artificial Sequence: Synthetic oligonucleotide
  Epidermal growth factor receptor (EGFR), ERBB1 phosphotyrosine kinase siRNA
tcatgcccttcggctgcctcctg

SEQ ID NO: 7457 - DNA, 23 bp, Artificial Sequence
  Description of Artificial Sequence: Synthetic oligonucleotide
  Epidermal growth factor receptor (EGFR), ERBB1 phosphotyrosine kinase siRNA
catgcccttcggctgcctcctgg

SEQ ID NO: 7458 - DNA, 23 bp, Artificial Sequence
  Description of Artificial Sequence: Synthetic oligonucleotide
  Epidermal growth factor receptor (EGFR), ERBB1 phosphotyrosine kinase siRNA
atgcccttcggctgcctcctgga

SEQ ID NO: 7459 - DNA, 23 bp, Artificial Sequence
  Description of Artificial Sequence: Synthetic oligonucleotide
  Epidermal growth factor receptor (EGFR), ERBB1 phosphotyrosine kinase siRNA
tgcccttcggctgcctcctggac

SEQ ID NO: 7460 - DNA, 23 bp, Artificial Sequence
  Description of Artificial Sequence: Synthetic oligonucleotide
  Epidermal growth factor receptor (EGFR), ERBB1 phosphotyrosine kinase siRNA
gcccttcggctgcctcctggact

SEQ ID NO: 7461 - DNA, 23 bp, Artificial Sequence
  Description of Artificial Sequence: Synthetic oligonucleotide
  Epidermal growth factor receptor (EGFR), ERBB1 phosphotyrosine kinase siRNA
cccttcggctgcctcctggacta

SEQ ID NO: 7462 - DNA, 23 bp, Artificial Sequence
  Description of Artificial Sequence: Synthetic oligonucleotide
  Epidermal growth factor receptor (EGFR), ERBB1 phosphotyrosine kinase siRNA
ccttcggctgcctcctggactat

SEQ ID NO: 7463 - DNA, 23 bp, Artificial Sequence
  Description of Artificial Sequence: Synthetic oligonucleotide
  Epidermal growth factor receptor (EGFR), ERBB1 phosphotyrosine kinase siRNA
cttcggctgcctcctggactatg

SEQ ID NO: 7464 - DNA, 23 bp, Artificial Sequence
  Description of Artificial Sequence: Synthetic oligonucleotide
  Epidermal growth factor receptor (EGFR), ERBB1 phosphotyrosine kinase siRNA
ttcggctgcctcctggactatgt

SEQ ID NO: 7465 - DNA, 23 bp, Artificial Sequence
  Description of Artificial Sequence: Synthetic oligonucleotide
  Epidermal growth factor receptor (EGFR), ERBB1 phosphotyrosine kinase siRNA
tcggctgcctcctggactatgtc

SEQ ID NO: 7466 - DNA, 23 bp, Artificial Sequence
  Description of Artificial Sequence: Synthetic oligonucleotide
  Epidermal growth factor receptor (EGFR), ERBB1 phosphotyrosine kinase siRNA
cggctgcctcctggactatgtcc

SEQ ID NO: 7467 - DNA, 23 bp, Artificial Sequence
  Description of Artificial Sequence: Synthetic oligonucleotide
  Epidermal growth factor receptor (EGFR), ERBB1 phosphotyrosine kinase siRNA
ggctgcctcctggactatgtccg

SEQ ID NO: 7468 - DNA, 23 bp, Artificial Sequence
  Description of Artificial Sequence: Synthetic oligonucleotide
  Epidermal growth factor receptor (EGFR), ERBB1 phosphotyrosine kinase siRNA
gctgcctcctggactatgtccgg

SEQ ID NO: 7469 - DNA, 23 bp, Artificial Sequence
  Description of Artificial Sequence: Synthetic oligonucleotide
  Epidermal growth factor receptor (EGFR), ERBB1 phosphotyrosine kinase siRNA
ctgcctcctggactatgtccggg

SEQ ID NO: 7470 - DNA, 23 bp, Artificial Sequence
  Description of Artificial Sequence: Synthetic oligonucleotide
  Epidermal growth factor receptor (EGFR), ERBB1 phosphotyrosine kinase siRNA
tgcctcctggactatgtccggga

SEQ ID NO: 7471 - DNA, 23 bp, Artificial Sequence
  Description of Artificial Sequence: Synthetic oligonucleotide
  Epidermal growth factor receptor (EGFR), ERBB1 phosphotyrosine kinase siRNA
gcctcctggactatgtccgggaa

SEQ ID NO: 7472 - DNA, 23 bp, Artificial Sequence
  Description of Artificial Sequence: Synthetic oligonucleotide
  Epidermal growth factor receptor (EGFR), ERBB1 phosphotyrosine kinase siRNA
cctcctggactatgtccgggaac

SEQ ID NO: 7473 - DNA, 23 bp, Artificial Sequence
  Description of Artificial Sequence: Synthetic oligonucleotide
  Epidermal growth factor receptor (EGFR), ERBB1 phosphotyrosine kinase siRNA
ctcctggactatgtccgggaaca

SEQ ID NO: 7474 - DNA, 23 bp, Artificial Sequence
  Description of Artificial Sequence: Synthetic oligonucleotide
  Epidermal growth factor receptor (EGFR), ERBB1 phosphotyrosine kinase siRNA
tcctggactatgtccgggaacac

SEQ ID NO: 7475 - DNA, 23 bp, Artificial Sequence
  Description of Artificial Sequence: Synthetic oligonucleotide
  Epidermal growth factor receptor (EGFR), ERBB1 phosphotyrosine kinase siRNA
cctggactatgtccgggaacaca

SEQ ID NO: 7476 - DNA, 23 bp, Artificial Sequence
  Description of Artificial Sequence: Synthetic oligonucleotide
  Epidermal growth factor receptor (EGFR), ERBB1 phosphotyrosine kinase siRNA
ctggactatgtccgggaacacaa

SEQ ID NO: 7477 - DNA, 23 bp, Artificial Sequence
  Description of Artificial Sequence: Synthetic oligonucleotide
  Epidermal growth factor receptor (EGFR), ERBB1 phosphotyrosine kinase siRNA
tggactatgtccgggaacacaaa

SEQ ID NO: 7478 - DNA, 23 bp, Artificial Sequence
  Description of Artificial Sequence: Synthetic oligonucleotide
  Epidermal growth factor receptor (EGFR), ERBB1 phosphotyrosine kinase siRNA
ggactatgtccgggaacacaaag

SEQ ID NO: 7479 - DNA, 23 bp, Artificial Sequence
  Description of Artificial Sequence: Synthetic oligonucleotide
  Epidermal growth factor receptor (EGFR), ERBB1 phosphotyrosine kinase siRNA
gactatgtccgggaacacaaaga

SEQ ID NO: 7480 - DNA, 23 bp, Artificial Sequence
  Description of Artificial Sequence: Synthetic oligonucleotide
  Epidermal growth factor receptor (EGFR), ERBB1 phosphotyrosine kinase siRNA
actatgtccgggaacacaaagac

SEQ ID NO: 7481 - DNA, 23 bp, Artificial Sequence
  Description of Artificial Sequence: Synthetic oligonucleotide
  Epidermal growth factor receptor (EGFR), ERBB1 phosphotyrosine kinase siRNA
ctatgtccgggaacacaaagaca

SEQ ID NO: 7482 - DNA, 23 bp, Artificial Sequence
  Description of Artificial Sequence: Synthetic oligonucleotide
  Epidermal growth factor receptor (EGFR), ERBB1 phosphotyrosine kinase siRNA
tatgtccgggaacacaaagacaa

SEQ ID NO: 7483 - DNA, 23 bp, Artificial Sequence
  Description of Artificial Sequence: Synthetic oligonucleotide
  Epidermal growth factor receptor (EGFR), ERBB1 phosphotyrosine kinase siRNA
atgtccgggaacacaaagacaat

SEQ ID NO: 7484 - DNA, 23 bp, Artificial Sequence
  Description of Artificial Sequence: Synthetic oligonucleotide
  Epidermal growth factor receptor (EGFR), ERBB1 phosphotyrosine kinase siRNA
tgtccgggaacacaaagacaata

SEQ ID NO: 7485 - DNA, 23 bp, Artificial Sequence
  Description of Artificial Sequence: Synthetic oligonucleotide
  Epidermal growth factor receptor (EGFR), ERBB1 phosphotyrosine kinase siRNA
gtccgggaacacaaagacaatat

SEQ ID NO: 7486 - DNA, 23 bp, Artificial Sequence
  Description of Artificial Sequence: Synthetic oligonucleotide
  Epidermal growth factor receptor (EGFR), ERBB1 phosphotyrosine kinase siRNA
tccgggaacacaaagacaatatt

SEQ ID NO: 7487 - DNA, 23 bp, Artificial Sequence
  Description of Artificial Sequence: Synthetic oligonucleotide
  Epidermal growth factor receptor (EGFR), ERBB1 phosphotyrosine kinase siRNA
ccgggaacacaaagacaatattg

SEQ ID NO: 7488 - DNA, 23 bp, Artificial Sequence
  Description of Artificial Sequence: Synthetic oligonucleotide
  Epidermal growth factor receptor (EGFR), ERBB1 phosphotyrosine kinase siRNA
cgggaacacaaagacaatattgg

SEQ ID NO: 7489 - DNA, 23 bp, Artificial Sequence
  Description of Artificial Sequence: Synthetic oligonucleotide
  Epidermal growth factor receptor (EGFR), ERBB1 phosphotyrosine kinase siRNA
gggaacacaaagacaatattggc

SEQ ID NO: 7490 - DNA, 23 bp, Artificial Sequence
  Description of Artificial Sequence: Synthetic oligonucleotide
  Epidermal growth factor receptor (EGFR), ERBB1 phosphotyrosine kinase siRNA
ggaacacaaagacaatattggct

SEQ ID NO: 7491 - DNA, 23 bp, Artificial Sequence
  Description of Artificial Sequence: Synthetic oligonucleotide
  Epidermal growth factor receptor (EGFR), ERBB1 phosphotyrosine kinase siRNA
gaacacaaagacaatattggctc

SEQ ID NO: 7492 - DNA, 23 bp, Artificial Sequence
  Description of Artificial Sequence: Synthetic oligonucleotide
  Epidermal growth factor receptor (EGFR), ERBB1 phosphotyrosine kinase siRNA
aacacaaagacaatattggctcc

SEQ ID NO: 7493 - DNA, 23 bp, Artificial Sequence
  Description of Artificial Sequence: Synthetic oligonucleotide
  Epidermal growth factor receptor (EGFR), ERBB1 phosphotyrosine kinase siRNA
acacaaagacaatattggctccc

SEQ ID NO: 7494 - DNA, 23 bp, Artificial Sequence
  Description of Artificial Sequence: Synthetic oligonucleotide
  Epidermal growth factor receptor (EGFR), ERBB1 phosphotyrosine kinase siRNA
cacaaagacaatattggctccca

SEQ ID NO: 7495 - DNA, 23 bp, Artificial Sequence
  Description of Artificial Sequence: Synthetic oligonucleotide
  Epidermal growth factor receptor (EGFR), ERBB1 phosphotyrosine kinase siRNA
acaaagacaatattggctcccag

SEQ ID NO: 7496 - DNA, 23 bp, Artificial Sequence
  Description of Artificial Sequence: Synthetic oligonucleotide
  Epidermal growth factor receptor (EGFR), ERBB1 phosphotyrosine kinase siRNA
caaagacaatattggctcccagt

SEQ ID NO: 7497 - DNA, 23 bp, Artificial Sequence
  Description of Artificial Sequence: Synthetic oligonucleotide
  Epidermal growth factor receptor (EGFR), ERBB1 phosphotyrosine kinase siRNA
aaagacaatattggctcccagta

SEQ ID NO: 7498 - DNA, 23 bp, Artificial Sequence
  Description of Artificial Sequence: Synthetic oligonucleotide
  Epidermal growth factor receptor (EGFR), ERBB1 phosphotyrosine kinase siRNA
aagacaatattggctcccagtac

SEQ ID NO: 7499 - DNA, 23 bp, Artificial Sequence
  Description of Artificial Sequence: Synthetic oligonucleotide
  Epidermal growth factor receptor (EGFR), ERBB1 phosphotyrosine kinase siRNA
agacaatattggctcccagtacc

SEQ ID NO: 7500 - DNA, 23 bp, Artificial Sequence
  Description of Artificial Sequence: Synthetic oligonucleotide
  Epidermal growth factor receptor (EGFR), ERBB1 phosphotyrosine kinase siRNA
gacaatattggctcccagtacct

SEQ ID NO: 7501 - DNA, 23 bp, Artificial Sequence
  Description of Artificial Sequence: Synthetic oligonucleotide
  Epidermal growth factor receptor (EGFR), ERBB1 phosphotyrosine kinase siRNA
acaatattggctcccagtacctg

SEQ ID NO: 7502 - DNA, 23 bp, Artificial Sequence
  Description of Artificial Sequence: Synthetic oligonucleotide
  Epidermal growth factor receptor (EGFR), ERBB1 phosphotyrosine kinase siRNA
caatattggctcccagtacctgc

SEQ ID NO: 7503 - DNA, 23 bp, Artificial Sequence
  Description of Artificial Sequence: Synthetic oligonucleotide
  Epidermal growth factor receptor (EGFR), ERBB1 phosphotyrosine kinase siRNA
aatattggctcccagtacctgct

SEQ ID NO: 7504 - DNA, 23 bp, Artificial Sequence
  Description of Artificial Sequence: Synthetic oligonucleotide
  Epidermal growth factor receptor (EGFR), ERBB1 phosphotyrosine kinase siRNA
atattggctcccagtacctgctc

SEQ ID NO: 7505 - DNA, 23 bp, Artificial Sequence
  Description of Artificial Sequence: Synthetic oligonucleotide
  Epidermal growth factor receptor (EGFR), ERBB1 phosphotyrosine kinase siRNA
tattggctcccagtacctgctca

SEQ ID NO: 7506 - DNA, 23 bp, Artificial Sequence
  Description of Artificial Sequence: Synthetic oligonucleotide
  Epidermal growth factor receptor (EGFR), ERBB1 phosphotyrosine kinase siRNA
attggctcccagtacctgctcaa

SEQ ID NO: 7507 - DNA, 23 bp, Artificial Sequence
  Description of Artificial Sequence: Synthetic oligonucleotide
  Epidermal growth factor receptor (EGFR), ERBB1 phosphotyrosine kinase siRNA
ttggctcccagtacctgctcaac

SEQ ID NO: 7508 - DNA, 23 bp, Artificial Sequence
  Description of Artificial Sequence: Synthetic oligonucleotide
  Epidermal growth factor receptor (EGFR), ERBB1 phosphotyrosine kinase siRNA
tggctcccagtacctgctcaact

SEQ ID NO: 7509 - DNA, 23 bp, Artificial Sequence
  Description of Artificial Sequence: Synthetic oligonucleotide
  Epidermal growth factor receptor (EGFR), ERBB1 phosphotyrosine kinase siRNA
ggctcccagtacctgctcaactg

SEQ ID NO: 7510 - DNA, 23 bp, Artificial Sequence
  Description of Artificial Sequence: Synthetic oligonucleotide
  Epidermal growth factor receptor (EGFR), ERBB1 phosphotyrosine kinase siRNA
gctcccagtacctgctcaactgg

SEQ ID NO: 7511 - DNA, 23 bp, Artificial Sequence
  Description of Artificial Sequence: Synthetic oligonucleotide
  Epidermal growth factor receptor (EGFR), ERBB1 phosphotyrosine kinase siRNA
ctcccagtacctgctcaactggt

SEQ ID NO: 7512 - DNA, 23 bp, Artificial Sequence
  Description of Artificial Sequence: Synthetic oligonucleotide
  Epidermal growth factor receptor (EGFR), ERBB1 phosphotyrosine kinase siRNA
tcccagtacctgctcaactggtg

SEQ ID NO: 7513 - DNA, 23 bp, Artificial Sequence
  Description of Artificial Sequence: Synthetic oligonucleotide
  Epidermal growth factor receptor (EGFR), ERBB1 phosphotyrosine kinase siRNA
cccagtacctgctcaactggtgt

SEQ ID NO: 7514 - DNA, 23 bp, Artificial Sequence
  Description of Artificial Sequence: Synthetic oligonucleotide
  Epidermal growth factor receptor (EGFR), ERBB1 phosphotyrosine kinase siRNA
ccagtacctgctcaactggtgtg

SEQ ID NO: 7515 - DNA, 23 bp, Artificial Sequence
  Description of Artificial Sequence: Synthetic oligonucleotide
  Epidermal growth factor receptor (EGFR), ERBB1 phosphotyrosine kinase siRNA
cagtacctgctcaactggtgtgt

SEQ ID NO: 7516 - DNA, 23 bp, Artificial Sequence
  Description of Artificial Sequence: Synthetic oligonucleotide
  Epidermal growth factor receptor (EGFR), ERBB1 phosphotyrosine kinase siRNA
agtacctgctcaactggtgtgtg

SEQ ID NO: 7517 - DNA, 23 bp, Artificial Sequence
  Description of Artificial Sequence: Synthetic oligonucleotide
  Epidermal growth factor receptor (EGFR), ERBB1 phosphotyrosine kinase siRNA
gtacctgctcaactggtgtgtgc

SEQ ID NO: 7518 - DNA, 23 bp, Artificial Sequence
  Description of Artificial Sequence: Synthetic oligonucleotide
  Epidermal growth factor receptor (EGFR), ERBB1 phosphotyrosine kinase siRNA
tacctgctcaactggtgtgtgca

SEQ ID NO: 7519 - DNA, 23 bp, Artificial Sequence
  Description of Artificial Sequence: Synthetic oligonucleotide
  Epidermal growth factor receptor (EGFR), ERBB1 phosphotyrosine kinase siRNA
acctgctcaactggtgtgtgcag

SEQ ID NO: 7520 - DNA, 23 bp, Artificial Sequence
  Description of Artificial Sequence: Synthetic oligonucleotide
  Epidermal growth factor receptor (EGFR), ERBB1 phosphotyrosine kinase siRNA
cctgctcaactggtgtgtgcaga

SEQ ID NO: 7521 - DNA, 23 bp, Artificial Sequence
  Description of Artificial Sequence: Synthetic oligonucleotide
  Epidermal growth factor receptor (EGFR), ERBB1 phosphotyrosine kinase siRNA
ctgctcaactggtgtgtgcagat

SEQ ID NO: 7522 - DNA, 23 bp, Artificial Sequence
  Description of Artificial Sequence: Synthetic oligonucleotide
  Epidermal growth factor receptor (EGFR), ERBB1 phosphotyrosine kinase siRNA
tgctcaactggtgtgtgcagatc

SEQ ID NO: 7523 - DNA, 23 bp, Artificial Sequence
  Description of Artificial Sequence: Synthetic oligonucleotide
  Epidermal growth factor receptor (EGFR), ERBB1 phosphotyrosine kinase siRNA
gctcaactggtgtgtgcagatcg

SEQ ID NO: 7524 - DNA, 23 bp, Artificial Sequence
  Description of Artificial Sequence: Synthetic oligonucleotide
  Epidermal growth factor receptor (EGFR), ERBB1 phosphotyrosine kinase siRNA
ctcaactggtgtgtgcagatcgc

SEQ ID NO: 7525 - DNA, 23 bp, Artificial Sequence
  Description of Artificial Sequence: Synthetic oligonucleotide
  Epidermal growth factor receptor (EGFR), ERBB1 phosphotyrosine kinase siRNA
tcaactggtgtgtgcagatcgca

SEQ ID NO: 7526 - DNA, 23 bp, Artificial Sequence
  Description of Artificial Sequence: Synthetic oligonucleotide
  Epidermal growth factor receptor (EGFR), ERBB1 phosphotyrosine kinase siRNA
caactggtgtgtgcagatcgcaa

SEQ ID NO: 7527 - DNA, 23 bp, Artificial Sequence
  Description of Artificial Sequence: Synthetic oligonucleotide
  Epidermal growth factor receptor (EGFR), ERBB1 phosphotyrosine kinase siRNA
aactggtgtgtgcagatcgcaaa

SEQ ID NO: 7528 - DNA, 23 bp, Artificial Sequence
  Description of Artificial Sequence: Synthetic oligonucleotide
  Epidermal growth factor receptor (EGFR), ERBB1 phosphotyrosine kinase siRNA
actggtgtgtgcagatcgcaaag

SEQ ID NO: 7529 - DNA, 23 bp, Artificial Sequence
  Description of Artificial Sequence: Synthetic oligonucleotide
  Epidermal growth factor receptor (EGFR), ERBB1 phosphotyrosine kinase siRNA
ctggtgtgtgcagatcgcaaagg

SEQ ID NO: 7530 - DNA, 23 bp, Artificial Sequence
  Description of Artificial Sequence: Synthetic oligonucleotide
  Epidermal growth factor receptor (EGFR), ERBB1 phosphotyrosine kinase siRNA
tggtgtgtgcagatcgcaaaggg

SEQ ID NO: 7531 - DNA, 23 bp, Artificial Sequence
  Description of Artificial Sequence: Synthetic oligonucleotide
  Epidermal growth factor receptor (EGFR), ERBB1 phosphotyrosine kinase siRNA
ggtgtgtgcagatcgcaaagggc

SEQ ID NO: 7532 - DNA, 23 bp, Artificial Sequence
  Description of Artificial Sequence: Synthetic oligonucleotide
  Epidermal growth factor receptor (EGFR), ERBB1 phosphotyrosine kinase siRNA
gtgtgtgcagatcgcaaagggca

SEQ ID NO: 7533 - DNA, 23 bp, Artificial Sequence
  Description of Artificial Sequence: Synthetic oligonucleotide
  Epidermal growth factor receptor (EGFR), ERBB1 phosphotyrosine kinase siRNA
tgtgtgcagatcgcaaagggcat

SEQ ID NO: 7534 - DNA, 23 bp, Artificial Sequence
  Description of Artificial Sequence: Synthetic oligonucleotide
  Epidermal growth factor receptor (EGFR), ERBB1 phosphotyrosine kinase siRNA
gtgtgcagatcgcaaagggcatg

SEQ ID NO: 7535 - DNA, 23 bp, Artificial Sequence
  Description of Artificial Sequence: Synthetic oligonucleotide
  Epidermal growth factor receptor (EGFR), ERBB1 phosphotyrosine kinase siRNA
tgtgcagatcgcaaagggcatga

SEQ ID NO: 7536 - DNA, 23 bp, Artificial Sequence
  Description of Artificial Sequence: Synthetic oligonucleotide
  Epidermal growth factor receptor (EGFR), ERBB1 phosphotyrosine kinase siRNA
gtgcagatcgcaaagggcatgaa

SEQ ID NO: 7537 - DNA, 23 bp, Artificial Sequence
  Description of Artificial Sequence: Synthetic oligonucleotide
  Epidermal growth factor receptor (EGFR), ERBB1 phosphotyrosine kinase siRNA
tgcagatcgcaaagggcatgaac

SEQ ID NO: 7538 - DNA, 23 bp, Artificial Sequence
  Description of Artificial Sequence: Synthetic oligonucleotide
  Epidermal growth factor receptor (EGFR), ERBB1 phosphotyrosine kinase siRNA
gcagatcgcaaagggcatgaact

SEQ ID NO: 7539 - DNA, 23 bp, Artificial Sequence
  Description of Artificial Sequence: Synthetic oligonucleotide
  Epidermal growth factor receptor (EGFR), ERBB1 phosphotyrosine kinase siRNA
cagatcgcaaagggcatgaacta

SEQ ID NO: 7540 - DNA, 23 bp, Artificial Sequence
  Description of Artificial Sequence: Synthetic oligonucleotide
  Epidermal growth factor receptor (EGFR), ERBB1 phosphotyrosine kinase siRNA
agatcgcaaagggcatgaactac

SEQ ID NO: 7541 - DNA, 23 bp, Artificial Sequence
  Description of Artificial Sequence: Synthetic oligonucleotide
  Epidermal growth factor receptor (EGFR), ERBB1 phosphotyrosine kinase siRNA
gatcgcaaagggcatgaactact

SEQ ID NO: 7542 - DNA, 23 bp, Artificial Sequence
  Description of Artificial Sequence: Synthetic oligonucleotide
  Epidermal growth factor receptor (EGFR), ERBB1 phosphotyrosine kinase siRNA
atcgcaaagggcatgaactactt

SEQ ID NO: 7543 - DNA, 23 bp, Artificial Sequence
  Description of Artificial Sequence: Synthetic oligonucleotide
  Epidermal growth factor receptor (EGFR), ERBB1 phosphotyrosine kinase siRNA
tcgcaaagggcatgaactacttg

SEQ ID NO: 7544 - DNA, 23 bp, Artificial Sequence
  Description of Artificial Sequence: Synthetic oligonucleotide
  Epidermal growth factor receptor (EGFR), ERBB1 phosphotyrosine kinase siRNA
cgcaaagggcatgaactacttgg

SEQ ID NO: 7545 - DNA, 23 bp, Artificial Sequence
  Description of Artificial Sequence: Synthetic oligonucleotide
  Epidermal growth factor receptor (EGFR), ERBB1 phosphotyrosine kinase siRNA
gcaaagggcatgaactacttgga

SEQ ID NO: 7546 - DNA, 23 bp, Artificial Sequence
  Description of Artificial Sequence: Synthetic oligonucleotide
  Epidermal growth factor receptor (EGFR), ERBB1 phosphotyrosine kinase siRNA
caaagggcatgaactacttggag

SEQ ID NO: 7547 - DNA, 23 bp, Artificial Sequence
  Description of Artificial Sequence: Synthetic oligonucleotide
  Epidermal growth factor receptor (EGFR), ERBB1 phosphotyrosine kinase siRNA
aaagggcatgaactacttggagg

SEQ ID NO: 7548 - DNA, 23 bp, Artificial Sequence
  Description of Artificial Sequence: Synthetic oligonucleotide
  Epidermal growth factor receptor (EGFR), ERBB1 phosphotyrosine kinase siRNA
aagggcatgaactacttggagga

SEQ ID NO: 7549 - DNA, 23 bp, Artificial Sequence
  Description of Artificial Sequence: Synthetic oligonucleotide
  Epidermal growth factor receptor (EGFR), ERBB1 phosphotyrosine kinase siRNA
agggcatgaactacttggaggac

SEQ ID NO: 7550 - DNA, 23 bp, Artificial Sequence
  Description of Artificial Sequence: Synthetic oligonucleotide
  Epidermal growth factor receptor (EGFR), ERBB1 phosphotyrosine kinase siRNA
gggcatgaactacttggaggacc

SEQ ID NO: 7551 - DNA, 23 bp, Artificial Sequence
  Description of Artificial Sequence: Synthetic oligonucleotide
  Epidermal growth factor receptor (EGFR), ERBB1 phosphotyrosine kinase siRNA
ggcatgaactacttggaggaccg

SEQ ID NO: 7552 - DNA, 23 bp, Artificial Sequence
  Description of Artificial Sequence: Synthetic oligonucleotide
  Epidermal growth factor receptor (EGFR), ERBB1 phosphotyrosine kinase siRNA
gcatgaactacttggaggaccgt

SEQ ID NO: 7553 - DNA, 23 bp, Artificial Sequence
  Description of Artificial Sequence: Synthetic oligonucleotide
  Epidermal growth factor receptor (EGFR), ERBB1 phosphotyrosine kinase siRNA
catgaactacttggaggaccgtc

SEQ ID NO: 7554 - DNA, 23 bp, Artificial Sequence
  Description of Artificial Sequence: Synthetic oligonucleotide
  Epidermal growth factor receptor (EGFR), ERBB1 phosphotyrosine kinase siRNA
atgaactacttggaggaccgtcg

SEQ ID NO: 7555 - DNA, 23 bp, Artificial Sequence
  Description of Artificial Sequence: Synthetic oligonucleotide
  Epidermal growth factor receptor (EGFR), ERBB1 phosphotyrosine kinase siRNA
tgaactacttggaggaccgtcgc

SEQ ID NO: 7556 - DNA, 23 bp, Artificial Sequence
  Description of Artificial Sequence: Synthetic oligonucleotide
  Epidermal growth factor receptor (EGFR), ERBB1 phosphotyrosine kinase siRNA
gaactacttggaggaccgtcgct

SEQ ID NO: 7557 - DNA, 23 bp, Artificial Sequence
  Description of Artificial Sequence: Synthetic oligonucleotide
  Epidermal growth factor receptor (EGFR), ERBB1 phosphotyrosine kinase siRNA
aactacttggaggaccgtcgctt

SEQ ID NO: 7558 - DNA, 23 bp, Artificial Sequence
  Description of Artificial Sequence: Synthetic oligonucleotide
  Epidermal growth factor receptor (EGFR), ERBB1 phosphotyrosine kinase siRNA
actacttggaggaccgtcgcttg

SEQ ID NO: 7559 - DNA, 23 bp, Artificial Sequence
  Description of Artificial Sequence: Synthetic oligonucleotide
  Epidermal growth factor receptor (EGFR), ERBB1 phosphotyrosine kinase siRNA
ctacttggaggaccgtcgcttgg

SEQ ID NO: 7560 - DNA, 23 bp, Artificial Sequence
  Description of Artificial Sequence: Synthetic oligonucleotide
  Epidermal growth factor receptor (EGFR), ERBB1 phosphotyrosine kinase siRNA
tacttggaggaccgtcgcttggt

SEQ ID NO: 7561 - DNA, 23 bp, Artificial Sequence
  Description of Artificial Sequence: Synthetic oligonucleotide
  Epidermal growth factor receptor (EGFR), ERBB1 phosphotyrosine kinase siRNA
acttggaggaccgtcgcttggtg

SEQ ID NO: 7562 - DNA, 23 bp, Artificial Sequence
  Description of Artificial Sequence: Synthetic oligonucleotide
  Epidermal growth factor receptor (EGFR), ERBB1 phosphotyrosine kinase siRNA
cttggaggaccgtcgcttggtgc

SEQ ID NO: 7563 - DNA, 23 bp, Artificial Sequence
  Description of Artificial Sequence: Synthetic oligonucleotide
  Epidermal growth factor receptor (EGFR), ERBB1 phosphotyrosine kinase siRNA
ttggaggaccgtcgcttggtgca

SEQ ID NO: 7564 - DNA, 23 bp, Artificial Sequence
  Description of Artificial Sequence: Synthetic oligonucleotide
  Epidermal growth factor receptor (EGFR), ERBB1 phosphotyrosine kinase siRNA
tggaggaccgtcgcttggtgcac

SEQ ID NO: 7565 - DNA, 23 bp, Artificial Sequence
  Description of Artificial Sequence: Synthetic oligonucleotide
  Epidermal growth factor receptor (EGFR), ERBB1 phosphotyrosine kinase siRNA
ggaggaccgtcgcttggtgcacc

SEQ ID NO: 7566 - DNA, 23 bp, Artificial Sequence
  Description of Artificial Sequence: Synthetic oligonucleotide
  Epidermal growth factor receptor (EGFR), ERBB1 phosphotyrosine kinase siRNA
gaggaccgtcgcttggtgcaccg

SEQ ID NO: 7567 - DNA, 23 bp, Artificial Sequence
  Description of Artificial Sequence: Synthetic oligonucleotide
  Epidermal growth factor receptor (EGFR), ERBB1 phosphotyrosine kinase siRNA
aggaccgtcgcttggtgcaccgc

SEQ ID NO: 7568 - DNA, 23 bp, Artificial Sequence
  Description of Artificial Sequence: Synthetic oligonucleotide
  Epidermal growth factor receptor (EGFR), ERBB1 phosphotyrosine kinase siRNA
ggaccgtcgcttggtgcaccgcg

SEQ ID NO: 7569 - DNA, 23 bp, Artificial Sequence
  Description of Artificial Sequence: Synthetic oligonucleotide
  Epidermal growth factor receptor (EGFR), ERBB1 phosphotyrosine kinase siRNA
gaccgtcgcttggtgcaccgcga

SEQ ID NO: 7570 - DNA, 23 bp, Artificial Sequence
  Description of Artificial Sequence: Synthetic oligonucleotide
  Epidermal growth factor receptor (EGFR), ERBB1 phosphotyrosine kinase siRNA
accgtcgcttggtgcaccgcgac

SEQ ID NO: 7571 - DNA, 23 bp, Artificial Sequence
  Description of Artificial Sequence: Synthetic oligonucleotide
  Epidermal growth factor receptor (EGFR), ERBB1 phosphotyrosine kinase siRNA
ccgtcgcttggtgcaccgcgacc

SEQ ID NO: 7572 - DNA, 23 bp, Artificial Sequence
  Description of Artificial Sequence: Synthetic oligonucleotide
  Epidermal growth factor receptor (EGFR), ERBB1 phosphotyrosine kinase siRNA
cgtcgcttggtgcaccgcgacct

SEQ ID NO: 7573 - DNA, 23 bp, Artificial Sequence
  Description of Artificial Sequence: Synthetic oligonucleotide
  Epidermal growth factor receptor (EGFR), ERBB1 phosphotyrosine kinase siRNA
gtcgcttggtgcaccgcgacctg

SEQ ID NO: 7574 - DNA, 23 bp, Artificial Sequence
  Description of Artificial Sequence: Synthetic oligonucleotide
  Epidermal growth factor receptor (EGFR), ERBB1 phosphotyrosine kinase siRNA
tcgcttggtgcaccgcgacctgg

SEQ ID NO: 7575 - DNA, 23 bp, Artificial Sequence
  Description of Artificial Sequence: Synthetic oligonucleotide
  Epidermal growth factor receptor (EGFR), ERBB1 phosphotyrosine kinase siRNA
cgcttggtgcaccgcgacctggc

SEQ ID NO: 7576 - DNA, 23 bp, Artificial Sequence
  Description of Artificial Sequence: Synthetic oligonucleotide
  Epidermal growth factor receptor (EGFR), ERBB1 phosphotyrosine kinase siRNA
gcttggtgcaccgcgacctggca

SEQ ID NO: 7577 - DNA, 23 bp, Artificial Sequence
  Description of Artificial Sequence: Synthetic oligonucleotide
  Epidermal growth factor receptor (EGFR), ERBB1 phosphotyrosine kinase siRNA
cttggtgcaccgcgacctggcag

SEQ ID NO: 7578 - DNA, 23 bp, Artificial Sequence
  Description of Artificial Sequence: Synthetic oligonucleotide
  Epidermal growth factor receptor (EGFR), ERBB1 phosphotyrosine kinase siRNA
ttggtgcaccgcgacctggcagc

SEQ ID NO: 7579 - DNA, 23 bp, Artificial Sequence
  Description of Artificial Sequence: Synthetic oligonucleotide
  Epidermal growth factor receptor (EGFR), ERBB1 phosphotyrosine kinase siRNA
tggtgcaccgcgacctggcagcc

SEQ ID NO: 7580 - DNA, 23 bp, Artificial Sequence
  Description of Artificial Sequence: Synthetic oligonucleotide
  Epidermal growth factor receptor (EGFR), ERBB1 phosphotyrosine kinase siRNA
ggtgcaccgcgacctggcagcca

SEQ ID NO: 7581 - DNA, 23 bp, Artificial Sequence
  Description of Artificial Sequence: Synthetic oligonucleotide
  Epidermal growth factor receptor (EGFR), ERBB1 phosphotyrosine kinase siRNA
gtgcaccgcgacctggcagccag

SEQ ID NO: 7582 - DNA, 23 bp, Artificial Sequence
  Description of Artificial Sequence: Synthetic oligonucleotide
  Epidermal growth factor receptor (EGFR), ERBB1 phosphotyrosine kinase siRNA
tgcaccgcgacctggcagccagg

SEQ ID NO: 7583 - DNA, 23 bp, Artificial Sequence
  Description of Artificial Sequence: Synthetic oligonucleotide
  Epidermal growth factor receptor (EGFR), ERBB1 phosphotyrosine kinase siRNA
gcaccgcgacctggcagccagga

SEQ ID NO: 7584 - DNA, 23 bp, Artificial Sequence
  Description of Artificial Sequence: Synthetic oligonucleotide
  Epidermal growth factor receptor (EGFR), ERBB1 phosphotyrosine kinase siRNA
caccgcgacctggcagccaggaa

SEQ ID NO: 7585 - DNA, 23 bp, Artificial Sequence
  Description of Artificial Sequence: Synthetic oligonucleotide
  Epidermal growth factor receptor (EGFR), ERBB1 phosphotyrosine kinase siRNA
accgcgacctggcagccaggaac

SEQ ID NO: 7586 - DNA, 23 bp, Artificial Sequence
  Description of Artificial Sequence: Synthetic oligonucleotide
  Epidermal growth factor receptor (EGFR), ERBB1 phosphotyrosine kinase siRNA
ccgcgacctggcagccaggaacg

SEQ ID NO: 7587 - DNA, 23 bp, Artificial Sequence
  Description of Artificial Sequence: Synthetic oligonucleotide
  Epidermal growth factor receptor (EGFR), ERBB1 phosphotyrosine kinase siRNA
cgcgacctggcagccaggaacgt

SEQ ID NO: 7588 - DNA, 23 bp, Artificial Sequence
  Description of Artificial Sequence: Synthetic oligonucleotide
  Epidermal growth factor receptor (EGFR), ERBB1 phosphotyrosine kinase siRNA
gcgacctggcagccaggaacgta

SEQ ID NO: 7589 - DNA, 23 bp, Artificial Sequence
  Description of Artificial Sequence: Synthetic oligonucleotide
  Epidermal growth factor receptor (EGFR), ERBB1 phosphotyrosine kinase siRNA
cgacctggcagccaggaacgtac

SEQ ID NO: 7590 - DNA, 23 bp, Artificial Sequence
  Description of Artificial Sequence: Synthetic oligonucleotide
  Epidermal growth factor receptor (EGFR), ERBB1 phosphotyrosine kinase siRNA
gacctggcagccaggaacgtact

SEQ ID NO: 7591 - DNA, 23 bp, Artificial Sequence
  Description of Artificial Sequence: Synthetic oligonucleotide
  Epidermal growth factor receptor (EGFR), ERBB1 phosphotyrosine kinase siRNA
acctggcagccaggaacgtactg

SEQ ID NO: 7592 - DNA, 23 bp, Artificial Sequence
  Description of Artificial Sequence: Synthetic oligonucleotide
  Epidermal growth factor receptor (EGFR), ERBB1 phosphotyrosine kinase siRNA
cctggcagccaggaacgtactgg

SEQ ID NO: 7593 - DNA, 23 bp, Artificial Sequence
  Description of Artificial Sequence: Synthetic oligonucleotide
  Epidermal growth factor receptor (EGFR), ERBB1 phosphotyrosine kinase siRNA
ctggcagccaggaacgtactggt

SEQ ID NO: 7594 - DNA, 23 bp, Artificial Sequence
  Description of Artificial Sequence: Synthetic oligonucleotide
  Epidermal growth factor receptor (EGFR), ERBB1 phosphotyrosine kinase siRNA
tggcagccaggaacgtactggtg

SEQ ID NO: 7595 - DNA, 23 bp, Artificial Sequence
  Description of Artificial Sequence: Synthetic oligonucleotide
  Epidermal growth factor receptor (EGFR), ERBB1 phosphotyrosine kinase siRNA
ggcagccaggaacgtactggtga

SEQ ID NO: 7596 - DNA, 23 bp, Artificial Sequence
  Description of Artificial Sequence: Synthetic oligonucleotide
  Epidermal growth factor receptor (EGFR), ERBB1 phosphotyrosine kinase siRNA
gcagccaggaacgtactggtgaa

SEQ ID NO: 7597 - DNA, 23 bp, Artificial Sequence
  Description of Artificial Sequence: Synthetic oligonucleotide
  Epidermal growth factor receptor (EGFR), ERBB1 phosphotyrosine kinase siRNA
cagccaggaacgtactggtgaaa

SEQ ID NO: 7598 - DNA, 23 bp, Artificial Sequence
  Description of Artificial Sequence: Synthetic oligonucleotide
  Epidermal growth factor receptor (EGFR), ERBB1 phosphotyrosine kinase siRNA
agccaggaacgtactggtgaaaa

SEQ ID NO: 7599 - DNA, 23 bp, Artificial Sequence
  Description of Artificial Sequence: Synthetic oligonucleotide
  Epidermal growth factor receptor (EGFR), ERBB1 phosphotyrosine kinase siRNA
gccaggaacgtactggtgaaaac

SEQ ID NO: 7600 - DNA, 23 bp, Artificial Sequence
  Description of Artificial Sequence: Synthetic oligonucleotide
  Epidermal growth factor receptor (EGFR), ERBB1 phosphotyrosine kinase siRNA
ccaggaacgtactggtgaaaaca

SEQ ID NO: 7601 - DNA, 23 bp, Artificial Sequence
  Description of Artificial Sequence: Synthetic oligonucleotide
  Epidermal growth factor receptor (EGFR), ERBB1 phosphotyrosine kinase siRNA
caggaacgtactggtgaaaacac

SEQ ID NO: 7602 - DNA, 23 bp, Artificial Sequence
  Description of Artificial Sequence: Synthetic oligonucleotide
  Epidermal growth factor receptor (EGFR), ERBB1 phosphotyrosine kinase siRNA
aggaacgtactggtgaaaacacc

SEQ ID NO: 7603 - DNA, 23 bp, Artificial Sequence
  Description of Artificial Sequence: Synthetic oligonucleotide
  Epidermal growth factor receptor (EGFR), ERBB1 phosphotyrosine kinase siRNA
ggaacgtactggtgaaaacaccg

SEQ ID NO: 7604 - DNA, 23 bp, Artificial Sequence
  Description of Artificial Sequence: Synthetic oligonucleotide
  Epidermal growth factor receptor (EGFR), ERBB1 phosphotyrosine kinase siRNA
gaacgtactggtgaaaacaccgc

SEQ ID NO: 7605 - DNA, 23 bp, Artificial Sequence
  Description of Artificial Sequence: Synthetic oligonucleotide
  Epidermal growth factor receptor (EGFR), ERBB1 phosphotyrosine kinase siRNA
aacgtactggtgaaaacaccgca

SEQ ID NO: 7606 - DNA, 23 bp, Artificial Sequence
  Description of Artificial Sequence: Synthetic oligonucleotide
  Epidermal growth factor receptor (EGFR), ERBB1 phosphotyrosine kinase siRNA
acgtactggtgaaaacaccgcag

SEQ ID NO: 7607 - DNA, 23 bp, Artificial Sequence
  Description of Artificial Sequence: Synthetic oligonucleotide
  Epidermal growth factor receptor (EGFR), ERBB1 phosphotyrosine kinase siRNA
cgtactggtgaaaacaccgcagc

SEQ ID NO: 7608 - DNA, 23 bp, Artificial Sequence
  Description of Artificial Sequence: Synthetic oligonucleotide
  Epidermal growth factor receptor (EGFR), ERBB1 phosphotyrosine kinase siRNA
gtactggtgaaaacaccgcagca

SEQ ID NO: 7609 - DNA, 23 bp, Artificial Sequence
  Description of Artificial Sequence: Synthetic oligonucleotide
  Epidermal growth factor receptor (EGFR), ERBB1 phosphotyrosine kinase siRNA
tactggtgaaaacaccgcagcat

SEQ ID NO: 7610 - DNA, 23 bp, Artificial Sequence
  Description of Artificial Sequence: Synthetic oligonucleotide
  Epidermal growth factor receptor (EGFR), ERBB1 phosphotyrosine kinase siRNA
actggtgaaaacaccgcagcatg

SEQ ID NO: 7611 - DNA, 23 bp, Artificial Sequence
  Description of Artificial Sequence: Synthetic oligonucleotide
  Epidermal growth factor receptor (EGFR), ERBB1 phosphotyrosine kinase siRNA
ctggtgaaaacaccgcagcatgt

SEQ ID NO: 7612 - DNA, 23 bp, Artificial Sequence
  Description of Artificial Sequence: Synthetic oligonucleotide
  Epidermal growth factor receptor (EGFR), ERBB1 phosphotyrosine kinase siRNA
tggtgaaaacaccgcagcatgtc

SEQ ID NO: 7613 - DNA, 23 bp, Artificial Sequence
  Description of Artificial Sequence: Synthetic oligonucleotide
  Epidermal growth factor receptor (EGFR), ERBB1 phosphotyrosine kinase siRNA
ggtgaaaacaccgcagcatgtca

SEQ ID NO: 7614 - DNA, 23 bp, Artificial Sequence
  Description of Artificial Sequence: Synthetic oligonucleotide
  Epidermal growth factor receptor (EGFR), ERBB1 phosphotyrosine kinase siRNA
gtgaaaacaccgcagcatgtcaa

SEQ ID NO: 7615 - DNA, 23 bp, Artificial Sequence
  Description of Artificial Sequence: Synthetic oligonucleotide
  Epidermal growth factor receptor (EGFR), ERBB1 phosphotyrosine kinase siRNA
tgaaaacaccgcagcatgtcaag

SEQ ID NO: 7616 - DNA, 23 bp, Artificial Sequence
  Description of Artificial Sequence: Synthetic oligonucleotide
  Epidermal growth factor receptor (EGFR), ERBB1 phosphotyrosine kinase siRNA
gaaaacaccgcagcatgtcaaga

SEQ ID NO: 7617 - DNA, 23 bp, Artificial Sequence
  Description of Artificial Sequence: Synthetic oligonucleotide
  Epidermal growth factor receptor (EGFR), ERBB1 phosphotyrosine kinase siRNA
aaaacaccgcagcatgtcaagat

SEQ ID NO: 7618 - DNA, 23 bp, Artificial Sequence
  Description of Artificial Sequence: Synthetic oligonucleotide
  Epidermal growth factor receptor (EGFR), ERBB1 phosphotyrosine kinase siRNA
aaacaccgcagcatgtcaagatc

SEQ ID NO: 7619 - DNA, 23 bp, Artificial Sequence
  Description of Artificial Sequence: Synthetic oligonucleotide
  Epidermal growth factor receptor (EGFR), ERBB1 phosphotyrosine kinase siRNA
aacaccgcagcatgtcaagatca

SEQ ID NO: 7620 - DNA, 23 bp, Artificial Sequence
  Description of Artificial Sequence: Synthetic oligonucleotide
  Epidermal growth factor receptor (EGFR), ERBB1 phosphotyrosine kinase siRNA
acaccgcagcatgtcaagatcac

SEQ ID NO: 7621 - DNA, 23 bp, Artificial Sequence
  Description of Artificial Sequence: Synthetic oligonucleotide
  Epidermal growth factor receptor (EGFR), ERBB1 phosphotyrosine kinase siRNA
caccgcagcatgtcaagatcaca

SEQ ID NO: 7622 - DNA, 23 bp, Artificial Sequence
  Description of Artificial Sequence: Synthetic oligonucleotide
  Epidermal growth factor receptor (EGFR), ERBB1 phosphotyrosine kinase siRNA
accgcagcatgtcaagatcacag

SEQ ID NO: 7623 - DNA, 23 bp, Artificial Sequence
  Description of Artificial Sequence: Synthetic oligonucleotide
  Epidermal growth factor receptor (EGFR), ERBB1 phosphotyrosine kinase siRNA
ccgcagcatgtcaagatcacaga

SEQ ID NO: 7624 - DNA, 23 bp, Artificial Sequence
  Description of Artificial Sequence: Synthetic oligonucleotide
  Epidermal growth factor receptor (EGFR), ERBB1 phosphotyrosine kinase siRNA
cgcagcatgtcaagatcacagat

SEQ ID NO: 7625 - DNA, 23 bp, Artificial Sequence
  Description of Artificial Sequence: Synthetic oligonucleotide
  Epidermal growth factor receptor (EGFR), ERBB1 phosphotyrosine kinase siRNA
gcagcatgtcaagatcacagatt

SEQ ID NO: 7626 - DNA, 23 bp, Artificial Sequence
  Description of Artificial Sequence: Synthetic oligonucleotide
  Epidermal growth factor receptor (EGFR), ERBB1 phosphotyrosine kinase siRNA
cagcatgtcaagatcacagattt

SEQ ID NO: 7627 - DNA, 23 bp, Artificial Sequence
  Description of Artificial Sequence: Synthetic oligonucleotide
  Epidermal growth factor receptor (EGFR), ERBB1 phosphotyrosine kinase siRNA
agcatgtcaagatcacagatttt

SEQ ID NO: 7628 - DNA, 23 bp, Artificial Sequence
  Description of Artificial Sequence: Synthetic oligonucleotide
  Epidermal growth factor receptor (EGFR), ERBB1 phosphotyrosine kinase siRNA
gcatgtcaagatcacagattttg

SEQ ID NO: 7629 - DNA, 23 bp, Artificial Sequence
  Description of Artificial Sequence: Synthetic oligonucleotide
  Epidermal growth factor receptor (EGFR), ERBB1 phosphotyrosine kinase siRNA
catgtcaagatcacagattttgg

SEQ ID NO: 7630 - DNA, 23 bp, Artificial Sequence
  Description of Artificial Sequence: Synthetic oligonucleotide
  Epidermal growth factor receptor (EGFR), ERBB1 phosphotyrosine kinase siRNA
atgtcaagatcacagattttggg

SEQ ID NO: 7631 - DNA, 23 bp, Artificial Sequence
  Description of Artificial Sequence: Synthetic oligonucleotide
  Epidermal growth factor receptor (EGFR), ERBB1 phosphotyrosine kinase siRNA
tgtcaagatcacagattttgggc

SEQ ID NO: 7632 - DNA, 23 bp, Artificial Sequence
  Description of Artificial Sequence: Synthetic oligonucleotide
  Epidermal growth factor receptor (EGFR), ERBB1 phosphotyrosine kinase siRNA
gtcaagatcacagattttgggct

SEQ ID NO: 7633 - DNA, 23 bp, Artificial Sequence
  Description of Artificial Sequence: Synthetic oligonucleotide
  Epidermal growth factor receptor (EGFR), ERBB1 phosphotyrosine kinase siRNA
tcaagatcacagattttgggctg

SEQ ID NO: 7634 - DNA, 23 bp, Artificial Sequence
  Description of Artificial Sequence: Synthetic oligonucleotide
  Epidermal growth factor receptor (EGFR), ERBB1 phosphotyrosine kinase siRNA
caagatcacagattttgggctgg

SEQ ID NO: 7635 - DNA, 23 bp, Artificial Sequence
  Description of Artificial Sequence: Synthetic oligonucleotide
  Epidermal growth factor receptor (EGFR), ERBB1 phosphotyrosine kinase siRNA
aagatcacagattttgggctggc

SEQ ID NO: 7636 - DNA, 23 bp, Artificial Sequence
  Description of Artificial Sequence: Synthetic oligonucleotide
  Epidermal growth factor receptor (EGFR), ERBB1 phosphotyrosine kinase siRNA
agatcacagattttgggctggcc

SEQ ID NO: 7637 - DNA, 23 bp, Artificial Sequence
  Description of Artificial Sequence: Synthetic oligonucleotide
  Epidermal growth factor receptor (EGFR), ERBB1 phosphotyrosine kinase siRNA
gatcacagattttgggctggcca

SEQ ID NO: 7638 - DNA, 23 bp, Artificial Sequence
  Description of Artificial Sequence: Synthetic oligonucleotide
  Epidermal growth factor receptor (EGFR), ERBB1 phosphotyrosine kinase siRNA
atcacagattttgggctggccaa

SEQ ID NO: 7639 - DNA, 23 bp, Artificial Sequence
  Description of Artificial Sequence: Synthetic oligonucleotide
  Epidermal growth factor receptor (EGFR), ERBB1 phosphotyrosine kinase siRNA
tcacagattttgggctggccaaa

SEQ ID NO: 7640 - DNA, 23 bp, Artificial Sequence
  Description of Artificial Sequence: Synthetic oligonucleotide
  Epidermal growth factor receptor (EGFR), ERBB1 phosphotyrosine kinase siRNA
cacagattttgggctggccaaac

SEQ ID NO: 7641 - DNA, 23 bp, Artificial Sequence
  Description of Artificial Sequence: Synthetic oligonucleotide
  Epidermal growth factor receptor (EGFR), ERBB1 phosphotyrosine kinase siRNA
acagattttgggctggccaaact

SEQ ID NO: 7642 - DNA, 23 bp, Artificial Sequence
  Description of Artificial Sequence: Synthetic oligonucleotide
  Epidermal growth factor receptor (EGFR), ERBB1 phosphotyrosine kinase siRNA
cagattttgggctggccaaactg

SEQ ID NO: 7643 - DNA, 23 bp, Artificial Sequence
  Description of Artificial Sequence: Synthetic oligonucleotide
  Epidermal growth factor receptor (EGFR), ERBB1 phosphotyrosine kinase siRNA
agattttgggctggccaaactgc

SEQ ID NO: 7644 - DNA, 23 bp, Artificial Sequence
  Description of Artificial Sequence: Synthetic oligonucleotide
  Epidermal growth factor receptor (EGFR), ERBB1 phosphotyrosine kinase siRNA
gattttgggctggccaaactgct

SEQ ID NO: 7645 - DNA, 23 bp, Artificial Sequence
  Description of Artificial Sequence: Synthetic oligonucleotide
  Epidermal growth factor receptor (EGFR), ERBB1 phosphotyrosine kinase siRNA
attttgggctggccaaactgctg

SEQ ID NO: 7646 - DNA, 23 bp, Artificial Sequence
  Description of Artificial Sequence: Synthetic oligonucleotide
  Epidermal growth factor receptor (EGFR), ERBB1 phosphotyrosine kinase siRNA
ttttgggctggccaaactgctgg

SEQ ID NO: 7647 - DNA, 23 bp, Artificial Sequence
  Description of Artificial Sequence: Synthetic oligonucleotide
  Epidermal growth factor receptor (EGFR), ERBB1 phosphotyrosine kinase siRNA
tttgggctggccaaactgctggg

SEQ ID NO: 7648 - DNA, 23 bp, Artificial Sequence
  Description of Artificial Sequence: Synthetic oligonucleotide
  Epidermal growth factor receptor (EGFR), ERBB1 phosphotyrosine kinase siRNA
ttgggctggccaaactgctgggt

SEQ ID NO: 7649 - DNA, 23 bp, Artificial Sequence
  Description of Artificial Sequence: Synthetic oligonucleotide
  Epidermal growth factor receptor (EGFR), ERBB1 phosphotyrosine kinase siRNA
tgggctggccaaactgctgggtg

SEQ ID NO: 7650 - DNA, 23 bp, Artificial Sequence
  Description of Artificial Sequence: Synthetic oligonucleotide
  Epidermal growth factor receptor (EGFR), ERBB1 phosphotyrosine kinase siRNA
gggctggccaaactgctgggtgc

SEQ ID NO: 7651 - DNA, 23 bp, Artificial Sequence
  Description of Artificial Sequence: Synthetic oligonucleotide
  Epidermal growth factor receptor (EGFR), ERBB1 phosphotyrosine kinase siRNA
ggctggccaaactgctgggtgcg

SEQ ID NO: 7652 - DNA, 23 bp, Artificial Sequence
  Description of Artificial Sequence: Synthetic oligonucleotide
  Epidermal growth factor receptor (EGFR), ERBB1 phosphotyrosine kinase siRNA
gctggccaaactgctgggtgcgg

SEQ ID NO: 7653 - DNA, 23 bp, Artificial Sequence
  Description of Artificial Sequence: Synthetic oligonucleotide
  Epidermal growth factor receptor (EGFR), ERBB1 phosphotyrosine kinase siRNA
ctggccaaactgctgggtgcgga

SEQ ID NO: 7654 - DNA, 23 bp, Artificial Sequence
  Description of Artificial Sequence: Synthetic oligonucleotide
  Epidermal growth factor receptor (EGFR), ERBB1 phosphotyrosine kinase siRNA
tggccaaactgctgggtgcggaa

SEQ ID NO: 7655 - DNA, 23 bp, Artificial Sequence
  Description of Artificial Sequence: Synthetic oligonucleotide
  Epidermal growth factor receptor (EGFR), ERBB1 phosphotyrosine kinase siRNA
ggccaaactgctgggtgcggaag

SEQ ID NO: 7656 - DNA, 23 bp, Artificial Sequence
  Description of Artificial Sequence: Synthetic oligonucleotide
  Epidermal growth factor receptor (EGFR), ERBB1 phosphotyrosine kinase siRNA
gccaaactgctgggtgcggaaga

SEQ ID NO: 7657 - DNA, 23 bp, Artificial Sequence
  Description of Artificial Sequence: Synthetic oligonucleotide
  Epidermal growth factor receptor (EGFR), ERBB1 phosphotyrosine kinase siRNA
ccaaactgctgggtgcggaagag

SEQ ID NO: 7658 - DNA, 23 bp, Artificial Sequence
  Description of Artificial Sequence: Synthetic oligonucleotide
  Epidermal growth factor receptor (EGFR), ERBB1 phosphotyrosine kinase siRNA
caaactgctgggtgcggaagaga

SEQ ID NO: 7659 - DNA, 23 bp, Artificial Sequence
  Description of Artificial Sequence: Synthetic oligonucleotide
  Epidermal growth factor receptor (EGFR), ERBB1 phosphotyrosine kinase siRNA
aaactgctgggtgcggaagagaa

SEQ ID NO: 7660 - DNA, 23 bp, Artificial Sequence
  Description of Artificial Sequence: Synthetic oligonucleotide
  Epidermal growth factor receptor (EGFR), ERBB1 phosphotyrosine kinase siRNA
aactgctgggtgcggaagagaaa

SEQ ID NO: 7661 - DNA, 23 bp, Artificial Sequence
  Description of Artificial Sequence: Synthetic oligonucleotide
  Epidermal growth factor receptor (EGFR), ERBB1 phosphotyrosine kinase siRNA
actgctgggtgcggaagagaaag

SEQ ID NO: 7662 - DNA, 23 bp, Artificial Sequence
  Description of Artificial Sequence: Synthetic oligonucleotide
  Epidermal growth factor receptor (EGFR), ERBB1 phosphotyrosine kinase siRNA
ctgctgggtgcggaagagaaaga

SEQ ID NO: 7663 - DNA, 23 bp, Artificial Sequence
  Description of Artificial Sequence: Synthetic oligonucleotide
  Epidermal growth factor receptor (EGFR), ERBB1 phosphotyrosine kinase siRNA
tgctgggtgcggaagagaaagaa

SEQ ID NO: 7664 - DNA, 23 bp, Artificial Sequence
  Description of Artificial Sequence: Synthetic oligonucleotide
  Epidermal growth factor receptor (EGFR), ERBB1 phosphotyrosine kinase siRNA
gctgggtgcggaagagaaagaat

SEQ ID NO: 7665 - DNA, 23 bp, Artificial Sequence
  Description of Artificial Sequence: Synthetic oligonucleotide
  Epidermal growth factor receptor (EGFR), ERBB1 phosphotyrosine kinase siRNA
ctgggtgcggaagagaaagaata

SEQ ID NO: 7666 - DNA, 23 bp, Artificial Sequence
  Description of Artificial Sequence: Synthetic oligonucleotide
  Epidermal growth factor receptor (EGFR), ERBB1 phosphotyrosine kinase siRNA
tgggtgcggaagagaaagaatac

SEQ ID NO: 7667 - DNA, 23 bp, Artificial Sequence
  Description of Artificial Sequence: Synthetic oligonucleotide
  Epidermal growth factor receptor (EGFR), ERBB1 phosphotyrosine kinase siRNA
gggtgcggaagagaaagaatacc

SEQ ID NO: 7668 - DNA, 23 bp, Artificial Sequence
  Description of Artificial Sequence: Synthetic oligonucleotide
  Epidermal growth factor receptor (EGFR), ERBB1 phosphotyrosine kinase siRNA
ggtgcggaagagaaagaatacca

SEQ ID NO: 7669 - DNA, 23 bp, Artificial Sequence
  Description of Artificial Sequence: Synthetic oligonucleotide
  Epidermal growth factor receptor (EGFR), ERBB1 phosphotyrosine kinase siRNA
gtgcggaagagaaagaataccat

SEQ ID NO: 7670 - DNA, 23 bp, Artificial Sequence
  Description of Artificial Sequence: Synthetic oligonucleotide
  Epidermal growth factor receptor (EGFR), ERBB1 phosphotyrosine kinase siRNA
tgcggaagagaaagaataccatg

SEQ ID NO: 7671 - DNA, 23 bp, Artificial Sequence
  Description of Artificial Sequence: Synthetic oligonucleotide
  Epidermal growth factor receptor (EGFR), ERBB1 phosphotyrosine kinase siRNA
gcggaagagaaagaataccatgc

SEQ ID NO: 7672 - DNA, 23 bp, Artificial Sequence
  Description of Artificial Sequence: Synthetic oligonucleotide
  Epidermal growth factor receptor (EGFR), ERBB1 phosphotyrosine kinase siRNA
cggaagagaaagaataccatgca

SEQ ID NO: 7673 - DNA, 23 bp, Artificial Sequence
  Description of Artificial Sequence: Synthetic oligonucleotide
  Epidermal growth factor receptor (EGFR), ERBB1 phosphotyrosine kinase siRNA
ggaagagaaagaataccatgcag

SEQ ID NO: 7674 - DNA, 23 bp, Artificial Sequence
  Description of Artificial Sequence: Synthetic oligonucleotide
  Epidermal growth factor receptor (EGFR), ERBB1 phosphotyrosine kinase siRNA
gaagagaaagaataccatgcaga

SEQ ID NO: 7675 - DNA, 23 bp, Artificial Sequence
  Description of Artificial Sequence: Synthetic oligonucleotide
  Epidermal growth factor receptor (EGFR), ERBB1 phosphotyrosine kinase siRNA
aagagaaagaataccatgcagaa

SEQ ID NO: 7676 - DNA, 23 bp, Artificial Sequence
  Description of Artificial Sequence: Synthetic oligonucleotide
  Epidermal growth factor receptor (EGFR), ERBB1 phosphotyrosine kinase siRNA
agagaaagaataccatgcagaag

SEQ ID NO: 7677 - DNA, 23 bp, Artificial Sequence
  Description of Artificial Sequence: Synthetic oligonucleotide
  Epidermal growth factor receptor (EGFR), ERBB1 phosphotyrosine kinase siRNA
gagaaagaataccatgcagaagg

SEQ ID NO: 7678 - DNA, 23 bp, Artificial Sequence
  Description of Artificial Sequence: Synthetic oligonucleotide
  Epidermal growth factor receptor (EGFR), ERBB1 phosphotyrosine kinase siRNA
agaaagaataccatgcagaagga

SEQ ID NO: 7679 - DNA, 23 bp, Artificial Sequence
  Description of Artificial Sequence: Synthetic oligonucleotide
  Epidermal growth factor receptor (EGFR), ERBB1 phosphotyrosine kinase siRNA
gaaagaataccatgcagaaggag

SEQ ID NO: 7680 - DNA, 23 bp, Artificial Sequence
  Description of Artificial Sequence: Synthetic oligonucleotide
  Epidermal growth factor receptor (EGFR), ERBB1 phosphotyrosine kinase siRNA
aaagaataccatgcagaaggagg

SEQ ID NO: 7681 - DNA, 23 bp, Artificial Sequence
  Description of Artificial Sequence: Synthetic oligonucleotide
  Epidermal growth factor receptor (EGFR), ERBB1 phosphotyrosine kinase siRNA
aagaataccatgcagaaggaggc

SEQ ID NO: 7682 - DNA, 23 bp, Artificial Sequence
  Description of Artificial Sequence: Synthetic oligonucleotide
  Epidermal growth factor receptor (EGFR), ERBB1 phosphotyrosine kinase siRNA
agaataccatgcagaaggaggca

SEQ ID NO: 7683 - DNA, 23 bp, Artificial Sequence
  Description of Artificial Sequence: Synthetic oligonucleotide
  Epidermal growth factor receptor (EGFR), ERBB1 phosphotyrosine kinase siRNA
gaataccatgcagaaggaggcaa

SEQ ID NO: 7684 - DNA, 23 bp, Artificial Sequence
  Description of Artificial Sequence: Synthetic oligonucleotide
  Epidermal growth factor receptor (EGFR), ERBB1 phosphotyrosine kinase siRNA
aataccatgcagaaggaggcaaa

SEQ ID NO: 7685 - DNA, 23 bp, Artificial Sequence
  Description of Artificial Sequence: Synthetic oligonucleotide
  Epidermal growth factor receptor (EGFR), ERBB1 phosphotyrosine kinase siRNA
ataccatgcagaaggaggcaaag

SEQ ID NO: 7686 - DNA, 23 bp, Artificial Sequence
  Description of Artificial Sequence: Synthetic oligonucleotide
  Epidermal growth factor receptor (EGFR), ERBB1 phosphotyrosine kinase siRNA
taccatgcagaaggaggcaaagt

SEQ ID NO: 7687 - DNA, 23 bp, Artificial Sequence
  Description of Artificial Sequence: Synthetic oligonucleotide
  Epidermal growth factor receptor (EGFR), ERBB1 phosphotyrosine kinase siRNA
accatgcagaaggaggcaaagtg

SEQ ID NO: 7688 - DNA, 23 bp, Artificial Sequence
  Description of Artificial Sequence: Synthetic oligonucleotide
  Epidermal growth factor receptor (EGFR), ERBB1 phosphotyrosine kinase siRNA
ccatgcagaaggaggcaaagtgc

SEQ ID NO: 7689 - DNA, 23 bp, Artificial Sequence
  Description of Artificial Sequence: Synthetic oligonucleotide
  Epidermal growth factor receptor (EGFR), ERBB1 phosphotyrosine kinase siRNA
catgcagaaggaggcaaagtgcc

SEQ ID NO: 7690 - DNA, 23 bp, Artificial Sequence
  Description of Artificial Sequence: Synthetic oligonucleotide
  Epidermal growth factor receptor (EGFR), ERBB1 phosphotyrosine kinase siRNA
atgcagaaggaggcaaagtgcct

SEQ ID NO: 7691 - DNA, 23 bp, Artificial Sequence
  Description of Artificial Sequence: Synthetic oligonucleotide
  Epidermal growth factor receptor (EGFR), ERBB1 phosphotyrosine kinase siRNA
tgcagaaggaggcaaagtgccta

SEQ ID NO: 7692 - DNA, 23 bp, Artificial Sequence
  Description of Artificial Sequence: Synthetic oligonucleotide
  Epidermal growth factor receptor (EGFR), ERBB1 phosphotyrosine kinase siRNA
gcagaaggaggcaaagtgcctat

SEQ ID NO: 7693 - DNA, 23 bp, Artificial Sequence
  Description of Artificial Sequence: Synthetic oligonucleotide
  Epidermal growth factor receptor (EGFR), ERBB1 phosphotyrosine kinase siRNA
cagaaggaggcaaagtgcctatc

SEQ ID NO: 7694 - DNA, 23 bp, Artificial Sequence
  Description of Artificial Sequence: Synthetic oligonucleotide
  Epidermal growth factor receptor (EGFR), ERBB1 phosphotyrosine kinase siRNA
agaaggaggcaaagtgcctatca

SEQ ID NO: 7695 - DNA, 23 bp, Artificial Sequence
  Description of Artificial Sequence: Synthetic oligonucleotide
  Epidermal growth factor receptor (EGFR), ERBB1 phosphotyrosine kinase siRNA
gaaggaggcaaagtgcctatcaa

SEQ ID NO: 7696 - DNA, 23 bp, Artificial Sequence
  Description of Artificial Sequence: Synthetic oligonucleotide
  Epidermal growth factor receptor (EGFR), ERBB1 phosphotyrosine kinase siRNA
aaggaggcaaagtgcctatcaag

SEQ ID NO: 7697 - DNA, 23 bp, Artificial Sequence
  Description of Artificial Sequence: Synthetic oligonucleotide
  Epidermal growth factor receptor (EGFR), ERBB1 phosphotyrosine kinase siRNA
aggaggcaaagtgcctatcaagt

SEQ ID NO: 7698 - DNA, 23 bp, Artificial Sequence
  Description of Artificial Sequence: Synthetic oligonucleotide
  Epidermal growth factor receptor (EGFR), ERBB1 phosphotyrosine kinase siRNA
ggaggcaaagtgcctatcaagtg

SEQ ID NO: 7699 - DNA, 23 bp, Artificial Sequence
  Description of Artificial Sequence: Synthetic oligonucleotide
  Epidermal growth factor receptor (EGFR), ERBB1 phosphotyrosine kinase siRNA
gaggcaaagtgcctatcaagtgg

SEQ ID NO: 7700 - DNA, 23 bp, Artificial Sequence
  Description of Artificial Sequence: Synthetic oligonucleotide
  Epidermal growth factor receptor (EGFR), ERBB1 phosphotyrosine kinase siRNA
aggcaaagtgcctatcaagtgga

SEQ ID NO: 7701 - DNA, 23 bp, Artificial Sequence
  Description of Artificial Sequence: Synthetic oligonucleotide
  Epidermal growth factor receptor (EGFR), ERBB1 phosphotyrosine kinase siRNA
ggcaaagtgcctatcaagtggat

SEQ ID NO: 7702 - DNA, 23 bp, Artificial Sequence
  Description of Artificial Sequence: Synthetic oligonucleotide
  Epidermal growth factor receptor (EGFR), ERBB1 phosphotyrosine kinase siRNA
gcaaagtgcctatcaagtggatg

SEQ ID NO: 7703 - DNA, 23 bp, Artificial Sequence
  Description of Artificial Sequence: Synthetic oligonucleotide
  Epidermal growth factor receptor (EGFR), ERBB1 phosphotyrosine kinase siRNA
caaagtgcctatcaagtggatgg

SEQ ID NO: 7704 - DNA, 23 bp, Artificial Sequence
  Description of Artificial Sequence: Synthetic oligonucleotide
  Epidermal growth factor receptor (EGFR), ERBB1 phosphotyrosine kinase siRNA
aaagtgcctatcaagtggatggc

SEQ ID NO: 7705 - DNA, 23 bp, Artificial Sequence
  Description of Artificial Sequence: Synthetic oligonucleotide
  Epidermal growth factor receptor (EGFR), ERBB1 phosphotyrosine kinase siRNA
aagtgcctatcaagtggatggca

SEQ ID NO: 7706 - DNA, 23 bp, Artificial Sequence
  Description of Artificial Sequence: Synthetic oligonucleotide
  Epidermal growth factor receptor (EGFR), ERBB1 phosphotyrosine kinase siRNA
agtgcctatcaagtggatggcat

SEQ ID NO: 7707 - DNA, 23 bp, Artificial Sequence
  Description of Artificial Sequence: Synthetic oligonucleotide
  Epidermal growth factor receptor (EGFR), ERBB1 phosphotyrosine kinase siRNA
gtgcctatcaagtggatggcatt

SEQ ID NO: 7708 - DNA, 23 bp, Artificial Sequence
  Description of Artificial Sequence: Synthetic oligonucleotide
  Epidermal growth factor receptor (EGFR), ERBB1 phosphotyrosine kinase siRNA
tgcctatcaagtggatggcattg

SEQ ID NO: 7709 - DNA, 23 bp, Artificial Sequence
  Description of Artificial Sequence: Synthetic oligonucleotide
  Epidermal growth factor receptor (EGFR), ERBB1 phosphotyrosine kinase siRNA
gcctatcaagtggatggcattgg

SEQ ID NO: 7710 - DNA, 23 bp, Artificial Sequence
  Description of Artificial Sequence: Synthetic oligonucleotide
  Epidermal growth factor receptor (EGFR), ERBB1 phosphotyrosine kinase siRNA
cctatcaagtggatggcattgga

SEQ ID NO: 7711 - DNA, 23 bp, Artificial Sequence
  Description of Artificial Sequence: Synthetic oligonucleotide
  Epidermal growth factor receptor (EGFR), ERBB1 phosphotyrosine kinase siRNA
ctatcaagtggatggcattggaa

SEQ ID NO: 7712 - DNA, 23 bp, Artificial Sequence
  Description of Artificial Sequence: Synthetic oligonucleotide
  Epidermal growth factor receptor (EGFR), ERBB1 phosphotyrosine kinase siRNA
tatcaagtggatggcattggaat

SEQ ID NO: 7713 - DNA, 23 bp, Artificial Sequence
  Description of Artificial Sequence: Synthetic oligonucleotide
  Epidermal growth factor receptor (EGFR), ERBB1 phosphotyrosine kinase siRNA
atcaagtggatggcattggaatc

SEQ ID NO: 7714 - DNA, 23 bp, Artificial Sequence
  Description of Artificial Sequence: Synthetic oligonucleotide
  Epidermal growth factor receptor (EGFR), ERBB1 phosphotyrosine kinase siRNA
tcaagtggatggcattggaatca

SEQ ID NO: 7715 - DNA, 23 bp, Artificial Sequence
  Description of Artificial Sequence: Synthetic oligonucleotide
  Epidermal growth factor receptor (EGFR), ERBB1 phosphotyrosine kinase siRNA
caagtggatggcattggaatcaa

SEQ ID NO: 7716 - DNA, 23 bp, Artificial Sequence
  Description of Artificial Sequence: Synthetic oligonucleotide
  Epidermal growth factor receptor (EGFR), ERBB1 phosphotyrosine kinase siRNA
aagtggatggcattggaatcaat

SEQ ID NO: 7717 - DNA, 23 bp, Artificial Sequence
  Description of Artificial Sequence: Synthetic oligonucleotide
  Epidermal growth factor receptor (EGFR), ERBB1 phosphotyrosine kinase siRNA
agtggatggcattggaatcaatt

SEQ ID NO: 7718 - DNA, 23 bp, Artificial Sequence
  Description of Artificial Sequence: Synthetic oligonucleotide
  Epidermal growth factor receptor (EGFR), ERBB1 phosphotyrosine kinase siRNA
gtggatggcattggaatcaattt

SEQ ID NO: 7719 - DNA, 23 bp, Artificial Sequence
  Description of Artificial Sequence: Synthetic oligonucleotide
  Epidermal growth factor receptor (EGFR), ERBB1 phosphotyrosine kinase siRNA
tggatggcattggaatcaatttt

SEQ ID NO: 7720 - DNA, 23 bp, Artificial Sequence
  Description of Artificial Sequence: Synthetic oligonucleotide
  Epidermal growth factor receptor (EGFR), ERBB1 phosphotyrosine kinase siRNA
ggatggcattggaatcaatttta

SEQ ID NO: 7721 - DNA, 23 bp, Artificial Sequence
  Description of Artificial Sequence: Synthetic oligonucleotide
  Epidermal growth factor receptor (EGFR), ERBB1 phosphotyrosine kinase siRNA
gatggcattggaatcaattttac

SEQ ID NO: 7722 - DNA, 23 bp, Artificial Sequence
  Description of Artificial Sequence: Synthetic oligonucleotide
  Epidermal growth factor receptor (EGFR), ERBB1 phosphotyrosine kinase siRNA
atggcattggaatcaattttaca

SEQ ID NO: 7723 - DNA, 23 bp, Artificial Sequence
  Description of Artificial Sequence: Synthetic oligonucleotide
  Epidermal growth factor receptor (EGFR), ERBB1 phosphotyrosine kinase siRNA
tggcattggaatcaattttacac

SEQ ID NO: 7724 - DNA, 23 bp, Artificial Sequence
  Description of Artificial Sequence: Synthetic oligonucleotide
  Epidermal growth factor receptor (EGFR), ERBB1 phosphotyrosine kinase siRNA
ggcattggaatcaattttacaca

SEQ ID NO: 7725 - DNA, 23 bp, Artificial Sequence
  Description of Artificial Sequence: Synthetic oligonucleotide
  Epidermal growth factor receptor (EGFR), ERBB1 phosphotyrosine kinase siRNA
gcattggaatcaattttacacag

SEQ ID NO: 7726 - DNA, 23 bp, Artificial Sequence
  Description of Artificial Sequence: Synthetic oligonucleotide
  Epidermal growth factor receptor (EGFR), ERBB1 phosphotyrosine kinase siRNA
cattggaatcaattttacacaga

SEQ ID NO: 7727 - DNA, 23 bp, Artificial Sequence
  Description of Artificial Sequence: Synthetic oligonucleotide
  Epidermal growth factor receptor (EGFR), ERBB1 phosphotyrosine kinase siRNA
attggaatcaattttacacagaa

SEQ ID NO: 7728 - DNA, 23 bp, Artificial Sequence
  Description of Artificial Sequence: Synthetic oligonucleotide
  Epidermal growth factor receptor (EGFR), ERBB1 phosphotyrosine kinase siRNA
ttggaatcaattttacacagaat

SEQ ID NO: 7729 - DNA, 23 bp, Artificial Sequence
  Description of Artificial Sequence: Synthetic oligonucleotide
  Epidermal growth factor receptor (EGFR), ERBB1 phosphotyrosine kinase siRNA
tggaatcaattttacacagaatc

SEQ ID NO: 7730 - DNA, 23 bp, Artificial Sequence
  Description of Artificial Sequence: Synthetic oligonucleotide
  Epidermal growth factor receptor (EGFR), ERBB1 phosphotyrosine kinase siRNA
ggaatcaattttacacagaatct

SEQ ID NO: 7731 - DNA, 23 bp, Artificial Sequence
  Description of Artificial Sequence: Synthetic oligonucleotide
  Epidermal growth factor receptor (EGFR), ERBB1 phosphotyrosine kinase siRNA
gaatcaattttacacagaatcta

SEQ ID NO: 7732 - DNA, 23 bp, Artificial Sequence
  Description of Artificial Sequence: Synthetic oligonucleotide
  Epidermal growth factor receptor (EGFR), ERBB1 phosphotyrosine kinase siRNA
aatcaattttacacagaatctat

SEQ ID NO: 7733 - DNA, 23 bp, Artificial Sequence
  Description of Artificial Sequence: Synthetic oligonucleotide
  Epidermal growth factor receptor (EGFR), ERBB1 phosphotyrosine kinase siRNA
atcaattttacacagaatctata

SEQ ID NO: 7734 - DNA, 23 bp, Artificial Sequence
  Description of Artificial Sequence: Synthetic oligonucleotide
  Epidermal growth factor receptor (EGFR), ERBB1 phosphotyrosine kinase siRNA
tcaattttacacagaatctatac

SEQ ID NO: 7735 - DNA, 23 bp, Artificial Sequence
  Description of Artificial Sequence: Synthetic oligonucleotide
  Epidermal growth factor receptor (EGFR), ERBB1 phosphotyrosine kinase siRNA
caattttacacagaatctatacc

SEQ ID NO: 7736 - DNA, 23 bp, Artificial Sequence
  Description of Artificial Sequence: Synthetic oligonucleotide
  Epidermal growth factor receptor (EGFR), ERBB1 phosphotyrosine kinase siRNA
aattttacacagaatctataccc

SEQ ID NO: 7737 - DNA, 23 bp, Artificial Sequence
  Description of Artificial Sequence: Synthetic oligonucleotide
  Epidermal growth factor receptor (EGFR), ERBB1 phosphotyrosine kinase siRNA
attttacacagaatctataccca

SEQ ID NO: 7738 - DNA, 23 bp, Artificial Sequence
  Description of Artificial Sequence: Synthetic oligonucleotide
  Epidermal growth factor receptor (EGFR), ERBB1 phosphotyrosine kinase siRNA
ttttacacagaatctatacccac

SEQ ID NO: 7739 - DNA, 23 bp, Artificial Sequence
  Description of Artificial Sequence: Synthetic oligonucleotide
  Epidermal growth factor receptor (EGFR), ERBB1 phosphotyrosine kinase siRNA
tttacacagaatctatacccacc

SEQ ID NO: 7740 - DNA, 23 bp, Artificial Sequence
  Description of Artificial Sequence: Synthetic oligonucleotide
  Epidermal growth factor receptor (EGFR), ERBB1 phosphotyrosine kinase siRNA
ttacacagaatctatacccacca

SEQ ID NO: 7741 - DNA, 23 bp, Artificial Sequence
  Description of Artificial Sequence: Synthetic oligonucleotide
  Epidermal growth factor receptor (EGFR), ERBB1 phosphotyrosine kinase siRNA
tacacagaatctatacccaccag

SEQ ID NO: 7742 - DNA, 23 bp, Artificial Sequence
  Description of Artificial Sequence: Synthetic oligonucleotide
  Epidermal growth factor receptor (EGFR), ERBB1 phosphotyrosine kinase siRNA
acacagaatctatacccaccaga

SEQ ID NO: 7743 - DNA, 23 bp, Artificial Sequence
  Description of Artificial Sequence: Synthetic oligonucleotide
  Epidermal growth factor receptor (EGFR), ERBB1 phosphotyrosine kinase siRNA
cacagaatctatacccaccagag

SEQ ID NO: 7744 - DNA, 23 bp, Artificial Sequence
  Description of Artificial Sequence: Synthetic oligonucleotide
  Epidermal growth factor receptor (EGFR), ERBB1 phosphotyrosine kinase siRNA
acagaatctatacccaccagagt

SEQ ID NO: 7745 - DNA, 23 bp, Artificial Sequence
  Description of Artificial Sequence: Synthetic oligonucleotide
  Epidermal growth factor receptor (EGFR), ERBB1 phosphotyrosine kinase siRNA
cagaatctatacccaccagagtg

SEQ ID NO: 7746 - DNA, 23 bp, Artificial Sequence
  Description of Artificial Sequence: Synthetic oligonucleotide
  Epidermal growth factor receptor (EGFR), ERBB1 phosphotyrosine kinase siRNA
agaatctatacccaccagagtga

SEQ ID NO: 7747 - DNA, 23 bp, Artificial Sequence
  Description of Artificial Sequence: Synthetic oligonucleotide
  Epidermal growth factor receptor (EGFR), ERBB1 phosphotyrosine kinase siRNA
gaatctatacccaccagagtgat

SEQ ID NO: 7748 - DNA, 23 bp, Artificial Sequence
  Description of Artificial Sequence: Synthetic oligonucleotide
  Epidermal growth factor receptor (EGFR), ERBB1 phosphotyrosine kinase siRNA
aatctatacccaccagagtgatg

SEQ ID NO: 7749 - DNA, 23 bp, Artificial Sequence
  Description of Artificial Sequence: Synthetic oligonucleotide
  Epidermal growth factor receptor (EGFR), ERBB1 phosphotyrosine kinase siRNA
atctatacccaccagagtgatgt

SEQ ID NO: 7750 - DNA, 23 bp, Artificial Sequence
  Description of Artificial Sequence: Synthetic oligonucleotide
  Epidermal growth factor receptor (EGFR), ERBB1 phosphotyrosine kinase siRNA
tctatacccaccagagtgatgtc

SEQ ID NO: 7751 - DNA, 23 bp, Artificial Sequence
  Description of Artificial Sequence: Synthetic oligonucleotide
  Epidermal growth factor receptor (EGFR), ERBB1 phosphotyrosine kinase siRNA
ctatacccaccagagtgatgtct

SEQ ID NO: 7752 - DNA, 23 bp, Artificial Sequence
  Description of Artificial Sequence: Synthetic oligonucleotide
  Epidermal growth factor receptor (EGFR), ERBB1 phosphotyrosine kinase siRNA
tatacccaccagagtgatgtctg

SEQ ID NO: 7753 - DNA, 23 bp, Artificial Sequence
  Description of Artificial Sequence: Synthetic oligonucleotide
  Epidermal growth factor receptor (EGFR), ERBB1 phosphotyrosine kinase siRNA
atacccaccagagtgatgtctgg

SEQ ID NO: 7754 - DNA, 23 bp, Artificial Sequence
  Description of Artificial Sequence: Synthetic oligonucleotide
  Epidermal growth factor receptor (EGFR), ERBB1 phosphotyrosine kinase siRNA
tacccaccagagtgatgtctgga

SEQ ID NO: 7755 - DNA, 23 bp, Artificial Sequence
  Description of Artificial Sequence: Synthetic oligonucleotide
  Epidermal growth factor receptor (EGFR), ERBB1 phosphotyrosine kinase siRNA
acccaccagagtgatgtctggag

SEQ ID NO: 7756 - DNA, 23 bp, Artificial Sequence
  Description of Artificial Sequence: Synthetic oligonucleotide
  Epidermal growth factor receptor (EGFR), ERBB1 phosphotyrosine kinase siRNA
cccaccagagtgatgtctggagc

SEQ ID NO: 7757 - DNA, 23 bp, Artificial Sequence
  Description of Artificial Sequence: Synthetic oligonucleotide
  Epidermal growth factor receptor (EGFR), ERBB1 phosphotyrosine kinase siRNA
ccaccagagtgatgtctggagct

SEQ ID NO: 7758 - DNA, 23 bp, Artificial Sequence
  Description of Artificial Sequence: Synthetic oligonucleotide
  Epidermal growth factor receptor (EGFR), ERBB1 phosphotyrosine kinase siRNA
caccagagtgatgtctggagcta

SEQ ID NO: 7759 - DNA, 23 bp, Artificial Sequence
  Description of Artificial Sequence: Synthetic oligonucleotide
  Epidermal growth factor receptor (EGFR), ERBB1 phosphotyrosine kinase siRNA
accagagtgatgtctggagctac

SEQ ID NO: 7760 - DNA, 23 bp, Artificial Sequence
  Description of Artificial Sequence: Synthetic oligonucleotide
  Epidermal growth factor receptor (EGFR), ERBB1 phosphotyrosine kinase siRNA
ccagagtgatgtctggagctacg

SEQ ID NO: 7761 - DNA, 23 bp, Artificial Sequence
  Description of Artificial Sequence: Synthetic oligonucleotide
  Epidermal growth factor receptor (EGFR), ERBB1 phosphotyrosine kinase siRNA
cagagtgatgtctggagctacgg

SEQ ID NO: 7762 - DNA, 23 bp, Artificial Sequence
  Description of Artificial Sequence: Synthetic oligonucleotide
  Epidermal growth factor receptor (EGFR), ERBB1 phosphotyrosine kinase siRNA
agagtgatgtctggagctacggg

SEQ ID NO: 7763 - DNA, 23 bp, Artificial Sequence
  Description of Artificial Sequence: Synthetic oligonucleotide
  Epidermal growth factor receptor (EGFR), ERBB1 phosphotyrosine kinase siRNA
gagtgatgtctggagctacgggg

SEQ ID NO: 7764 - DNA, 23 bp, Artificial Sequence
  Description of Artificial Sequence: Synthetic oligonucleotide
  Epidermal growth factor receptor (EGFR), ERBB1 phosphotyrosine kinase siRNA
agtgatgtctggagctacggggt

SEQ ID NO: 7765 - DNA, 23 bp, Artificial Sequence
  Description of Artificial Sequence: Synthetic oligonucleotide
  Epidermal growth factor receptor (EGFR), ERBB1 phosphotyrosine kinase siRNA
gtgatgtctggagctacggggtg

SEQ ID NO: 7766 - DNA, 23 bp, Artificial Sequence
  Description of Artificial Sequence: Synthetic oligonucleotide
  Epidermal growth factor receptor (EGFR), ERBB1 phosphotyrosine kinase siRNA
tgatgtctggagctacggggtga

SEQ ID NO: 7767 - DNA, 23 bp, Artificial Sequence
  Description of Artificial Sequence: Synthetic oligonucleotide
  Epidermal growth factor receptor (EGFR), ERBB1 phosphotyrosine kinase siRNA
gatgtctggagctacggggtgac

SEQ ID NO: 7768 - DNA, 23 bp, Artificial Sequence
  Description of Artificial Sequence: Synthetic oligonucleotide
  Epidermal growth factor receptor (EGFR), ERBB1 phosphotyrosine kinase siRNA
atgtctggagctacggggtgacc

SEQ ID NO: 7769 - DNA, 23 bp, Artificial Sequence
  Description of Artificial Sequence: Synthetic oligonucleotide
  Epidermal growth factor receptor (EGFR), ERBB1 phosphotyrosine kinase siRNA
tgtctggagctacggggtgaccg

SEQ ID NO: 7770 - DNA, 23 bp, Artificial Sequence
  Description of Artificial Sequence: Synthetic oligonucleotide
  Epidermal growth factor receptor (EGFR), ERBB1 phosphotyrosine kinase siRNA
gtctggagctacggggtgaccgt

SEQ ID NO: 7771 - DNA, 23 bp, Artificial Sequence
  Description of Artificial Sequence: Synthetic oligonucleotide
  Epidermal growth factor receptor (EGFR), ERBB1 phosphotyrosine kinase siRNA
tctggagctacggggtgaccgtt

SEQ ID NO: 7772 - DNA, 23 bp, Artificial Sequence
  Description of Artificial Sequence: Synthetic oligonucleotide
  Epidermal growth factor receptor (EGFR), ERBB1 phosphotyrosine kinase siRNA
ctggagctacggggtgaccgttt

SEQ ID NO: 7773 - DNA, 23 bp, Artificial Sequence
  Description of Artificial Sequence: Synthetic oligonucleotide
  Epidermal growth factor receptor (EGFR), ERBB1 phosphotyrosine kinase siRNA
tggagctacggggtgaccgtttg

SEQ ID NO: 7774 - DNA, 23 bp, Artificial Sequence
  Description of Artificial Sequence: Synthetic oligonucleotide
  Epidermal growth factor receptor (EGFR), ERBB1 phosphotyrosine kinase siRNA
ggagctacggggtgaccgtttgg

SEQ ID NO: 7775 - DNA, 23 bp, Artificial Sequence
  Description of Artificial Sequence: Synthetic oligonucleotide
  Epidermal growth factor receptor (EGFR), ERBB1 phosphotyrosine kinase siRNA
gagctacggggtgaccgtttggg

SEQ ID NO: 7776 - DNA, 23 bp, Artificial Sequence
  Description of Artificial Sequence: Synthetic oligonucleotide
  Epidermal growth factor receptor (EGFR), ERBB1 phosphotyrosine kinase siRNA
agctacggggtgaccgtttggga

SEQ ID NO: 7777 - DNA, 23 bp, Artificial Sequence
  Description of Artificial Sequence: Synthetic oligonucleotide
  Epidermal growth factor receptor (EGFR), ERBB1 phosphotyrosine kinase siRNA
gctacggggtgaccgtttgggag

SEQ ID NO: 7778 - DNA, 23 bp, Artificial Sequence
  Description of Artificial Sequence: Synthetic oligonucleotide
  Epidermal growth factor receptor (EGFR), ERBB1 phosphotyrosine kinase siRNA
ctacggggtgaccgtttgggagt

SEQ ID NO: 7779 - DNA, 23 bp, Artificial Sequence
  Description of Artificial Sequence: Synthetic oligonucleotide
  Epidermal growth factor receptor (EGFR), ERBB1 phosphotyrosine kinase siRNA
tacggggtgaccgtttgggagtt

SEQ ID NO: 7780 - DNA, 23 bp, Artificial Sequence
  Description of Artificial Sequence: Synthetic oligonucleotide
  Epidermal growth factor receptor (EGFR), ERBB1 phosphotyrosine kinase siRNA
acggggtgaccgtttgggagttg

SEQ ID NO: 7781 - DNA, 23 bp, Artificial Sequence
  Description of Artificial Sequence: Synthetic oligonucleotide
  Epidermal growth factor receptor (EGFR), ERBB1 phosphotyrosine kinase siRNA
cggggtgaccgtttgggagttga

SEQ ID NO: 7782 - DNA, 23 bp, Artificial Sequence
  Description of Artificial Sequence: Synthetic oligonucleotide
  Epidermal growth factor receptor (EGFR), ERBB1 phosphotyrosine kinase siRNA
ggggtgaccgtttgggagttgat

SEQ ID NO: 7783 - DNA, 23 bp, Artificial Sequence
  Description of Artificial Sequence: Synthetic oligonucleotide
  Epidermal growth factor receptor (EGFR), ERBB1 phosphotyrosine kinase siRNA
gggtgaccgtttgggagttgatg

SEQ ID NO: 7784 - DNA, 23 bp, Artificial Sequence
  Description of Artificial Sequence: Synthetic oligonucleotide
  Epidermal growth factor receptor (EGFR), ERBB1 phosphotyrosine kinase siRNA
ggtgaccgtttgggagttgatga

SEQ ID NO: 7785 - DNA, 23 bp, Artificial Sequence
  Description of Artificial Sequence: Synthetic oligonucleotide
  Epidermal growth factor receptor (EGFR), ERBB1 phosphotyrosine kinase siRNA
gtgaccgtttgggagttgatgac

SEQ ID NO: 7786 - DNA, 23 bp, Artificial Sequence
  Description of Artificial Sequence: Synthetic oligonucleotide
  Epidermal growth factor receptor (EGFR), ERBB1 phosphotyrosine kinase siRNA
tgaccgtttgggagttgatgacc

SEQ ID NO: 7787 - DNA, 23 bp, Artificial Sequence
  Description of Artificial Sequence: Synthetic oligonucleotide
  Epidermal growth factor receptor (EGFR), ERBB1 phosphotyrosine kinase siRNA
gaccgtttgggagttgatgacct

SEQ ID NO: 7788 - DNA, 23 bp, Artificial Sequence
  Description of Artificial Sequence: Synthetic oligonucleotide
  Epidermal growth factor receptor (EGFR), ERBB1 phosphotyrosine kinase siRNA
accgtttgggagttgatgacctt

SEQ ID NO: 7789 - DNA, 23 bp, Artificial Sequence
  Description of Artificial Sequence: Synthetic oligonucleotide
  Epidermal growth factor receptor (EGFR), ERBB1 phosphotyrosine kinase siRNA
ccgtttgggagttgatgaccttt

SEQ ID NO: 7790 - DNA, 23 bp, Artificial Sequence
  Description of Artificial Sequence: Synthetic oligonucleotide
  Epidermal growth factor receptor (EGFR), ERBB1 phosphotyrosine kinase siRNA
cgtttgggagttgatgacctttg

SEQ ID NO: 7791 - DNA, 23 bp, Artificial Sequence
  Description of Artificial Sequence: Synthetic oligonucleotide
  Epidermal growth factor receptor (EGFR), ERBB1 phosphotyrosine kinase siRNA
gtttgggagttgatgacctttgg

SEQ ID NO: 7792 - DNA, 23 bp, Artificial Sequence
  Description of Artificial Sequence: Synthetic oligonucleotide
  Epidermal growth factor receptor (EGFR), ERBB1 phosphotyrosine kinase siRNA
tttgggagttgatgacctttgga

SEQ ID NO: 7793 - DNA, 23 bp, Artificial Sequence
  Description of Artificial Sequence: Synthetic oligonucleotide
  Epidermal growth factor receptor (EGFR), ERBB1 phosphotyrosine kinase siRNA
ttgggagttgatgacctttggat

SEQ ID NO: 7794 - DNA, 23 bp, Artificial Sequence
  Description of Artificial Sequence: Synthetic oligonucleotide
  Epidermal growth factor receptor (EGFR), ERBB1 phosphotyrosine kinase siRNA
tgggagttgatgacctttggatc

SEQ ID NO: 7795 - DNA, 23 bp, Artificial Sequence
  Description of Artificial Sequence: Synthetic oligonucleotide
  Epidermal growth factor receptor (EGFR), ERBB1 phosphotyrosine kinase siRNA
gggagttgatgacctttggatcc

SEQ ID NO: 7796 - DNA, 23 bp, Artificial Sequence
  Description of Artificial Sequence: Synthetic oligonucleotide
  Epidermal growth factor receptor (EGFR), ERBB1 phosphotyrosine kinase siRNA
ggagttgatgacctttggatcca

SEQ ID NO: 7797 - DNA, 23 bp, Artificial Sequence
  Description of Artificial Sequence: Synthetic oligonucleotide
  Epidermal growth factor receptor (EGFR), ERBB1 phosphotyrosine kinase siRNA
gagttgatgacctttggatccaa

SEQ ID NO: 7798 - DNA, 23 bp, Artificial Sequence
  Description of Artificial Sequence: Synthetic oligonucleotide
  Epidermal growth factor receptor (EGFR), ERBB1 phosphotyrosine kinase siRNA
agttgatgacctttggatccaag

SEQ ID NO: 7799 - DNA, 23 bp, Artificial Sequence
  Description of Artificial Sequence: Synthetic oligonucleotide
  Epidermal growth factor receptor (EGFR), ERBB1 phosphotyrosine kinase siRNA
gttgatgacctttggatccaagc

SEQ ID NO: 7800 - DNA, 23 bp, Artificial Sequence
  Description of Artificial Sequence: Synthetic oligonucleotide
  Epidermal growth factor receptor (EGFR), ERBB1 phosphotyrosine kinase siRNA
ttgatgacctttggatccaagcc

SEQ ID NO: 7801 - DNA, 23 bp, Artificial Sequence
  Description of Artificial Sequence: Synthetic oligonucleotide
  Epidermal growth factor receptor (EGFR), ERBB1 phosphotyrosine kinase siRNA
tgatgacctttggatccaagcca

SEQ ID NO: 7802 - DNA, 23 bp, Artificial Sequence
  Description of Artificial Sequence: Synthetic oligonucleotide
  Epidermal growth factor receptor (EGFR), ERBB1 phosphotyrosine kinase siRNA
gatgacctttggatccaagccat

SEQ ID NO: 7803 - DNA, 23 bp, Artificial Sequence
  Description of Artificial Sequence: Synthetic oligonucleotide
  Epidermal growth factor receptor (EGFR), ERBB1 phosphotyrosine kinase siRNA
atgacctttggatccaagccata

SEQ ID NO: 7804 - DNA, 23 bp, Artificial Sequence
  Description of Artificial Sequence: Synthetic oligonucleotide
  Epidermal growth factor receptor (EGFR), ERBB1 phosphotyrosine kinase siRNA
tgacctttggatccaagccatat

SEQ ID NO: 7805 - DNA, 23 bp, Artificial Sequence
  Description of Artificial Sequence: Synthetic oligonucleotide
  Epidermal growth factor receptor (EGFR), ERBB1 phosphotyrosine kinase siRNA
gacctttggatccaagccatatg

SEQ ID NO: 7806 - DNA, 23 bp, Artificial Sequence
  Description of Artificial Sequence: Synthetic oligonucleotide
  Epidermal growth factor receptor (EGFR), ERBB1 phosphotyrosine kinase siRNA
acctttggatccaagccatatga

SEQ ID NO: 7807 - DNA, 23 bp, Artificial Sequence
  Description of Artificial Sequence: Synthetic oligonucleotide
  Epidermal growth factor receptor (EGFR), ERBB1 phosphotyrosine kinase siRNA
cctttggatccaagccatatgac

SEQ ID NO: 7808 - DNA, 23 bp, Artificial Sequence
  Description of Artificial Sequence: Synthetic oligonucleotide
  Epidermal growth factor receptor (EGFR), ERBB1 phosphotyrosine kinase siRNA
ctttggatccaagccatatgacg

SEQ ID NO: 7809 - DNA, 23 bp, Artificial Sequence
  Description of Artificial Sequence: Synthetic oligonucleotide
  Epidermal growth factor receptor (EGFR), ERBB1 phosphotyrosine kinase siRNA
tttggatccaagccatatgacgg

SEQ ID NO: 7810 - DNA, 23 bp, Artificial Sequence
  Description of Artificial Sequence: Synthetic oligonucleotide
  Epidermal growth factor receptor (EGFR), ERBB1 phosphotyrosine kinase siRNA
ttggatccaagccatatgacgga

SEQ ID NO: 7811 - DNA, 23 bp, Artificial Sequence
  Description of Artificial Sequence: Synthetic oligonucleotide
  Epidermal growth factor receptor (EGFR), ERBB1 phosphotyrosine kinase siRNA
tggatccaagccatatgacggaa

SEQ ID NO: 7812 - DNA, 23 bp, Artificial Sequence
  Description of Artificial Sequence: Synthetic oligonucleotide
  Epidermal growth factor receptor (EGFR), ERBB1 phosphotyrosine kinase siRNA
ggatccaagccatatgacggaat

SEQ ID NO: 7813 - DNA, 23 bp, Artificial Sequence
  Description of Artificial Sequence: Synthetic oligonucleotide
  Epidermal growth factor receptor (EGFR), ERBB1 phosphotyrosine kinase siRNA
gatccaagccatatgacggaatc

SEQ ID NO: 7814 - DNA, 23 bp, Artificial Sequence
  Description of Artificial Sequence: Synthetic oligonucleotide
  Epidermal growth factor receptor (EGFR), ERBB1 phosphotyrosine kinase siRNA
atccaagccatatgacggaatcc

SEQ ID NO: 7815 - DNA, 23 bp, Artificial Sequence
  Description of Artificial Sequence: Synthetic oligonucleotide
  Epidermal growth factor receptor (EGFR), ERBB1 phosphotyrosine kinase siRNA
tccaagccatatgacggaatccc

SEQ ID NO: 7816 - DNA, 23 bp, Artificial Sequence
  Description of Artificial Sequence: Synthetic oligonucleotide
  Epidermal growth factor receptor (EGFR), ERBB1 phosphotyrosine kinase siRNA
ccaagccatatgacggaatccct

SEQ ID NO: 7817 - DNA, 23 bp, Artificial Sequence
  Description of Artificial Sequence: Synthetic oligonucleotide
  Epidermal growth factor receptor (EGFR), ERBB1 phosphotyrosine kinase siRNA
caagccatatgacggaatccctg

SEQ ID NO: 7818 - DNA, 23 bp, Artificial Sequence
  Description of Artificial Sequence: Synthetic oligonucleotide
  Epidermal growth factor receptor (EGFR), ERBB1 phosphotyrosine kinase siRNA
aagccatatgacggaatccctgc

SEQ ID NO: 7819 - DNA, 23 bp, Artificial Sequence
  Description of Artificial Sequence: Synthetic oligonucleotide
  Epidermal growth factor receptor (EGFR), ERBB1 phosphotyrosine kinase siRNA
agccatatgacggaatccctgcc

SEQ ID NO: 7820 - DNA, 23 bp, Artificial Sequence
  Description of Artificial Sequence: Synthetic oligonucleotide
  Epidermal growth factor receptor (EGFR), ERBB1 phosphotyrosine kinase siRNA
gccatatgacggaatccctgcca

SEQ ID NO: 7821 - DNA, 23 bp, Artificial Sequence
  Description of Artificial Sequence: Synthetic oligonucleotide
  Epidermal growth factor receptor (EGFR), ERBB1 phosphotyrosine kinase siRNA
ccatatgacggaatccctgccag

SEQ ID NO: 7822 - DNA, 23 bp, Artificial Sequence
  Description of Artificial Sequence: Synthetic oligonucleotide
  Epidermal growth factor receptor (EGFR), ERBB1 phosphotyrosine kinase siRNA
catatgacggaatccctgccagc

SEQ ID NO: 7823 - DNA, 23 bp, Artificial Sequence
  Description of Artificial Sequence: Synthetic oligonucleotide
  Epidermal growth factor receptor (EGFR), ERBB1 phosphotyrosine kinase siRNA
atatgacggaatccctgccagcg

SEQ ID NO: 7824 - DNA, 23 bp, Artificial Sequence
  Description of Artificial Sequence: Synthetic oligonucleotide
  Epidermal growth factor receptor (EGFR), ERBB1 phosphotyrosine kinase siRNA
tatgacggaatccctgccagcga

SEQ ID NO: 7825 - DNA, 23 bp, Artificial Sequence
  Description of Artificial Sequence: Synthetic oligonucleotide
  Epidermal growth factor receptor (EGFR), ERBB1 phosphotyrosine kinase siRNA
atgacggaatccctgccagcgag

SEQ ID NO: 7826 - DNA, 23 bp, Artificial Sequence
  Description of Artificial Sequence: Synthetic oligonucleotide
  Epidermal growth factor receptor (EGFR), ERBB1 phosphotyrosine kinase siRNA
tgacggaatccctgccagcgaga

SEQ ID NO: 7827 - DNA, 23 bp, Artificial Sequence
  Description of Artificial Sequence: Synthetic oligonucleotide
  Epidermal growth factor receptor (EGFR), ERBB1 phosphotyrosine kinase siRNA
gacggaatccctgccagcgagat

SEQ ID NO: 7828 - DNA, 23 bp, Artificial Sequence
  Description of Artificial Sequence: Synthetic oligonucleotide
  Epidermal growth factor receptor (EGFR), ERBB1 phosphotyrosine kinase siRNA
acggaatccctgccagcgagatc

SEQ ID NO: 7829 - DNA, 23 bp, Artificial Sequence
  Description of Artificial Sequence: Synthetic oligonucleotide
  Epidermal growth factor receptor (EGFR), ERBB1 phosphotyrosine kinase siRNA
cggaatccctgccagcgagatct

SEQ ID NO: 7830 - DNA, 23 bp, Artificial Sequence
  Description of Artificial Sequence: Synthetic oligonucleotide
  Epidermal growth factor receptor (EGFR), ERBB1 phosphotyrosine kinase siRNA
ggaatccctgccagcgagatctc

SEQ ID NO: 7831 - DNA, 23 bp, Artificial Sequence
  Description of Artificial Sequence: Synthetic oligonucleotide
  Epidermal growth factor receptor (EGFR), ERBB1 phosphotyrosine kinase siRNA
gaatccctgccagcgagatctcc

SEQ ID NO: 7832 - DNA, 23 bp, Artificial Sequence
  Description of Artificial Sequence: Synthetic oligonucleotide
  Epidermal growth factor receptor (EGFR), ERBB1 phosphotyrosine kinase siRNA
aatccctgccagcgagatctcct

SEQ ID NO: 7833 - DNA, 23 bp, Artificial Sequence
  Description of Artificial Sequence: Synthetic oligonucleotide
  Epidermal growth factor receptor (EGFR), ERBB1 phosphotyrosine kinase siRNA
atccctgccagcgagatctcctc

SEQ ID NO: 7834 - DNA, 23 bp, Artificial Sequence
  Description of Artificial Sequence: Synthetic oligonucleotide
  Epidermal growth factor receptor (EGFR), ERBB1 phosphotyrosine kinase siRNA
tccctgccagcgagatctcctcc

SEQ ID NO: 7835 - DNA, 23 bp, Artificial Sequence
  Description of Artificial Sequence: Synthetic oligonucleotide
  Epidermal growth factor receptor (EGFR), ERBB1 phosphotyrosine kinase siRNA
ccctgccagcgagatctcctcca

SEQ ID NO: 7836 - DNA, 23 bp, Artificial Sequence
  Description of Artificial Sequence: Synthetic oligonucleotide
  Epidermal growth factor receptor (EGFR), ERBB1 phosphotyrosine kinase siRNA
cctgccagcgagatctcctccat

SEQ ID NO: 7837 - DNA, 23 bp, Artificial Sequence
  Description of Artificial Sequence: Synthetic oligonucleotide
  Epidermal growth factor receptor (EGFR), ERBB1 phosphotyrosine kinase siRNA
ctgccagcgagatctcctccatc

SEQ ID NO: 7838 - DNA, 23 bp, Artificial Sequence
  Description of Artificial Sequence: Synthetic oligonucleotide
  Epidermal growth factor receptor (EGFR), ERBB1 phosphotyrosine kinase siRNA
tgccagcgagatctcctccatcc

SEQ ID NO: 7839 - DNA, 23 bp, Artificial Sequence
  Description of Artificial Sequence: Synthetic oligonucleotide
  Epidermal growth factor receptor (EGFR), ERBB1 phosphotyrosine kinase siRNA
gccagcgagatctcctccatcct

SEQ ID NO: 7840 - DNA, 23 bp, Artificial Sequence
  Description of Artificial Sequence: Synthetic oligonucleotide
  Epidermal growth factor receptor (EGFR), ERBB1 phosphotyrosine kinase siRNA
ccagcgagatctcctccatcctg

SEQ ID NO: 7841 - DNA, 23 bp, Artificial Sequence
  Description of Artificial Sequence: Synthetic oligonucleotide
  Epidermal growth factor receptor (EGFR), ERBB1 phosphotyrosine kinase siRNA
cagcgagatctcctccatcctgg

SEQ ID NO: 7842 - DNA, 23 bp, Artificial Sequence
  Description of Artificial Sequence: Synthetic oligonucleotide
  Epidermal growth factor receptor (EGFR), ERBB1 phosphotyrosine kinase siRNA
agcgagatctcctccatcctgga

SEQ ID NO: 7843 - DNA, 23 bp, Artificial Sequence
  Description of Artificial Sequence: Synthetic oligonucleotide
  Epidermal growth factor receptor (EGFR), ERBB1 phosphotyrosine kinase siRNA
gcgagatctcctccatcctggag

SEQ ID NO: 7844 - DNA, 23 bp, Artificial Sequence
  Description of Artificial Sequence: Synthetic oligonucleotide
  Epidermal growth factor receptor (EGFR), ERBB1 phosphotyrosine kinase siRNA
cgagatctcctccatcctggaga

SEQ ID NO: 7845 - DNA, 23 bp, Artificial Sequence
  Description of Artificial Sequence: Synthetic oligonucleotide
  Epidermal growth factor receptor (EGFR), ERBB1 phosphotyrosine kinase siRNA
gagatctcctccatcctggagaa

SEQ ID NO: 7846 - DNA, 23 bp, Artificial Sequence
  Description of Artificial Sequence: Synthetic oligonucleotide
  Epidermal growth factor receptor (EGFR), ERBB1 phosphotyrosine kinase siRNA
agatctcctccatcctggagaaa

SEQ ID NO: 7847 - DNA, 23 bp, Artificial Sequence
  Description of Artificial Sequence: Synthetic oligonucleotide
  Epidermal growth factor receptor (EGFR), ERBB1 phosphotyrosine kinase siRNA
gatctcctccatcctggagaaag

SEQ ID NO: 7848 - DNA, 23 bp, Artificial Sequence
  Description of Artificial Sequence: Synthetic oligonucleotide
  Epidermal growth factor receptor (EGFR), ERBB1 phosphotyrosine kinase siRNA
atctcctccatcctggagaaagg

SEQ ID NO: 7849 - DNA, 23 bp, Artificial Sequence
  Description of Artificial Sequence: Synthetic oligonucleotide
  Epidermal growth factor receptor (EGFR), ERBB1 phosphotyrosine kinase siRNA
tctcctccatcctggagaaagga

SEQ ID NO: 7850 - DNA, 23 bp, Artificial Sequence
  Description of Artificial Sequence: Synthetic oligonucleotide
  Epidermal growth factor receptor (EGFR), ERBB1 phosphotyrosine kinase siRNA
ctcctccatcctggagaaaggag

SEQ ID NO: 7851 - DNA, 23 bp, Artificial Sequence
  Description of Artificial Sequence: Synthetic oligonucleotide
  Epidermal growth factor receptor (EGFR), ERBB1 phosphotyrosine kinase siRNA
tcctccatcctggagaaaggaga

SEQ ID NO: 7852 - DNA, 23 bp, Artificial Sequence
  Description of Artificial Sequence: Synthetic oligonucleotide
  Epidermal growth factor receptor (EGFR), ERBB1 phosphotyrosine kinase siRNA
cctccatcctggagaaaggagaa

SEQ ID NO: 7853 - DNA, 23 bp, Artificial Sequence
  Description of Artificial Sequence: Synthetic oligonucleotide
  Epidermal growth factor receptor (EGFR), ERBB1 phosphotyrosine kinase siRNA
ctccatcctggagaaaggagaac

SEQ ID NO: 7854 - DNA, 23 bp, Artificial Sequence
  Description of Artificial Sequence: Synthetic oligonucleotide
  Epidermal growth factor receptor (EGFR), ERBB1 phosphotyrosine kinase siRNA
tccatcctggagaaaggagaacg

SEQ ID NO: 7855 - DNA, 23 bp, Artificial Sequence
  Description of Artificial Sequence: Synthetic oligonucleotide
  Epidermal growth factor receptor (EGFR), ERBB1 phosphotyrosine kinase siRNA
ccatcctggagaaaggagaacgc

SEQ ID NO: 7856 - DNA, 23 bp, Artificial Sequence
  Description of Artificial Sequence: Synthetic oligonucleotide
  Epidermal growth factor receptor (EGFR), ERBB1 phosphotyrosine kinase siRNA
catcctggagaaaggagaacgcc

SEQ ID NO: 7857 - DNA, 23 bp, Artificial Sequence
  Description of Artificial Sequence: Synthetic oligonucleotide
  Epidermal growth factor receptor (EGFR), ERBB1 phosphotyrosine kinase siRNA
atcctggagaaaggagaacgcct

SEQ ID NO: 7858 - DNA, 23 bp, Artificial Sequence
  Description of Artificial Sequence: Synthetic oligonucleotide
  Epidermal growth factor receptor (EGFR), ERBB1 phosphotyrosine kinase siRNA
tcctggagaaaggagaacgcctc

SEQ ID NO: 7859 - DNA, 23 bp, Artificial Sequence
  Description of Artificial Sequence: Synthetic oligonucleotide
  Epidermal growth factor receptor (EGFR), ERBB1 phosphotyrosine kinase siRNA
cctggagaaaggagaacgcctcc

SEQ ID NO: 7860 - DNA, 23 bp, Artificial Sequence
  Description of Artificial Sequence: Synthetic oligonucleotide
  Epidermal growth factor receptor (EGFR), ERBB1 phosphotyrosine kinase siRNA
ctggagaaaggagaacgcctccc

SEQ ID NO: 7861 - DNA, 23 bp, Artificial Sequence
  Description of Artificial Sequence: Synthetic oligonucleotide
  Epidermal growth factor receptor (EGFR), ERBB1 phosphotyrosine kinase siRNA
tggagaaaggagaacgcctccct

SEQ ID NO: 7862 - DNA, 23 bp, Artificial Sequence
  Description of Artificial Sequence: Synthetic oligonucleotide
  Epidermal growth factor receptor (EGFR), ERBB1 phosphotyrosine kinase siRNA
ggagaaaggagaacgcctccctc

SEQ ID NO: 7863 - DNA, 23 bp, Artificial Sequence
  Description of Artificial Sequence: Synthetic oligonucleotide
  Epidermal growth factor receptor (EGFR), ERBB1 phosphotyrosine kinase siRNA
gagaaaggagaacgcctccctca

SEQ ID NO: 7864 - DNA, 23 bp, Artificial Sequence
  Description of Artificial Sequence: Synthetic oligonucleotide
  Epidermal growth factor receptor (EGFR), ERBB1 phosphotyrosine kinase siRNA
agaaaggagaacgcctccctcag

SEQ ID NO: 7865 - DNA, 23 bp, Artificial Sequence
  Description of Artificial Sequence: Synthetic oligonucleotide
  Epidermal growth factor receptor (EGFR), ERBB1 phosphotyrosine kinase siRNA
gaaaggagaacgcctccctcagc

SEQ ID NO: 7866 - DNA, 23 bp, Artificial Sequence
  Description of Artificial Sequence: Synthetic oligonucleotide
  Epidermal growth factor receptor (EGFR), ERBB1 phosphotyrosine kinase siRNA
aaaggagaacgcctccctcagcc

SEQ ID NO: 7867 - DNA, 23 bp, Artificial Sequence
  Description of Artificial Sequence: Synthetic oligonucleotide
  Epidermal growth factor receptor (EGFR), ERBB1 phosphotyrosine kinase siRNA
aaggagaacgcctccctcagcca

SEQ ID NO: 7868 - DNA, 23 bp, Artificial Sequence
  Description of Artificial Sequence: Synthetic oligonucleotide
  Epidermal growth factor receptor (EGFR), ERBB1 phosphotyrosine kinase siRNA
aggagaacgcctccctcagccac

SEQ ID NO: 7869 - DNA, 23 bp, Artificial Sequence
  Description of Artificial Sequence: Synthetic oligonucleotide
  Epidermal growth factor receptor (EGFR), ERBB1 phosphotyrosine kinase siRNA
ggagaacgcctccctcagccacc

SEQ ID NO: 7870 - DNA, 23 bp, Artificial Sequence
  Description of Artificial Sequence: Synthetic oligonucleotide
  Epidermal growth factor receptor (EGFR), ERBB1 phosphotyrosine kinase siRNA
gagaacgcctccctcagccaccc

SEQ ID NO: 7871 - DNA, 23 bp, Artificial Sequence
  Description of Artificial Sequence: Synthetic oligonucleotide
  Epidermal growth factor receptor (EGFR), ERBB1 phosphotyrosine kinase siRNA
agaacgcctccctcagccaccca

SEQ ID NO: 7872 - DNA, 23 bp, Artificial Sequence
  Description of Artificial Sequence: Synthetic oligonucleotide
  Epidermal growth factor receptor (EGFR), ERBB1 phosphotyrosine kinase siRNA
gaacgcctccctcagccacccat

SEQ ID NO: 7873 - DNA, 23 bp, Artificial Sequence
  Description of Artificial Sequence: Synthetic oligonucleotide
  Epidermal growth factor receptor (EGFR), ERBB1 phosphotyrosine kinase siRNA
aacgcctccctcagccacccata

SEQ ID NO: 7874 - DNA, 23 bp, Artificial Sequence
  Description of Artificial Sequence: Synthetic oligonucleotide
  Epidermal growth factor receptor (EGFR), ERBB1 phosphotyrosine kinase siRNA
acgcctccctcagccacccatat

SEQ ID NO: 7875 - DNA, 23 bp, Artificial Sequence
  Description of Artificial Sequence: Synthetic oligonucleotide
  Epidermal growth factor receptor (EGFR), ERBB1 phosphotyrosine kinase siRNA
cgcctccctcagccacccatatg

SEQ ID NO: 7876 - DNA, 23 bp, Artificial Sequence
  Description of Artificial Sequence: Synthetic oligonucleotide
  Epidermal growth factor receptor (EGFR), ERBB1 phosphotyrosine kinase siRNA
gcctccctcagccacccatatgt

SEQ ID NO: 7877 - DNA, 23 bp, Artificial Sequence
  Description of Artificial Sequence: Synthetic oligonucleotide
  Epidermal growth factor receptor (EGFR), ERBB1 phosphotyrosine kinase siRNA
cctccctcagccacccatatgta

SEQ ID NO: 7878 - DNA, 23 bp, Artificial Sequence
  Description of Artificial Sequence: Synthetic oligonucleotide
  Epidermal growth factor receptor (EGFR), ERBB1 phosphotyrosine kinase siRNA
ctccctcagccacccatatgtac

SEQ ID NO: 7879 - DNA, 23 bp, Artificial Sequence
  Description of Artificial Sequence: Synthetic oligonucleotide
  Epidermal growth factor receptor (EGFR), ERBB1 phosphotyrosine kinase siRNA
tccctcagccacccatatgtacc

SEQ ID NO: 7880 - DNA, 23 bp, Artificial Sequence
  Description of Artificial Sequence: Synthetic oligonucleotide
  Epidermal growth factor receptor (EGFR), ERBB1 phosphotyrosine kinase siRNA
ccctcagccacccatatgtacca

SEQ ID NO: 7881 - DNA, 23 bp, Artificial Sequence
  Description of Artificial Sequence: Synthetic oligonucleotide
  Epidermal growth factor receptor (EGFR), ERBB1 phosphotyrosine kinase siRNA
cctcagccacccatatgtaccat

SEQ ID NO: 7882 - DNA, 23 bp, Artificial Sequence
  Description of Artificial Sequence: Synthetic oligonucleotide
  Epidermal growth factor receptor (EGFR), ERBB1 phosphotyrosine kinase siRNA
ctcagccacccatatgtaccatc

SEQ ID NO: 7883 - DNA, 23 bp, Artificial Sequence
  Description of Artificial Sequence: Synthetic oligonucleotide
  Epidermal growth factor receptor (EGFR), ERBB1 phosphotyrosine kinase siRNA
tcagccacccatatgtaccatcg

SEQ ID NO: 7884 - DNA, 23 bp, Artificial Sequence
  Description of Artificial Sequence: Synthetic oligonucleotide
  Epidermal growth factor receptor (EGFR), ERBB1 phosphotyrosine kinase siRNA
cagccacccatatgtaccatcga

SEQ ID NO: 7885 - DNA, 23 bp, Artificial Sequence
  Description of Artificial Sequence: Synthetic oligonucleotide
  Epidermal growth factor receptor (EGFR), ERBB1 phosphotyrosine kinase siRNA
agccacccatatgtaccatcgat

SEQ ID NO: 7886 - DNA, 23 bp, Artificial Sequence
  Description of Artificial Sequence: Synthetic oligonucleotide
  Epidermal growth factor receptor (EGFR), ERBB1 phosphotyrosine kinase siRNA
gccacccatatgtaccatcgatg

SEQ ID NO: 7887 - DNA, 23 bp, Artificial Sequence
  Description of Artificial Sequence: Synthetic oligonucleotide
  Epidermal growth factor receptor (EGFR), ERBB1 phosphotyrosine kinase siRNA
ccacccatatgtaccatcgatgt

SEQ ID NO: 7888 - DNA, 23 bp, Artificial Sequence
  Description of Artificial Sequence: Synthetic oligonucleotide
  Epidermal growth factor receptor (EGFR), ERBB1 phosphotyrosine kinase siRNA
cacccatatgtaccatcgatgtc

SEQ ID NO: 7889 - DNA, 23 bp, Artificial Sequence
  Description of Artificial Sequence: Synthetic oligonucleotide
  Epidermal growth factor receptor (EGFR), ERBB1 phosphotyrosine kinase siRNA
acccatatgtaccatcgatgtct

SEQ ID NO: 7890 - DNA, 23 bp, Artificial Sequence
  Description of Artificial Sequence: Synthetic oligonucleotide
  Epidermal growth factor receptor (EGFR), ERBB1 phosphotyrosine kinase siRNA
cccatatgtaccatcgatgtcta

SEQ ID NO: 7891 - DNA, 23 bp, Artificial Sequence
  Description of Artificial Sequence: Synthetic oligonucleotide
  Epidermal growth factor receptor (EGFR), ERBB1 phosphotyrosine kinase siRNA
ccatatgtaccatcgatgtctac

SEQ ID NO: 7892 - DNA, 23 bp, Artificial Sequence
  Description of Artificial Sequence: Synthetic oligonucleotide
  Epidermal growth factor receptor (EGFR), ERBB1 phosphotyrosine kinase siRNA
catatgtaccatcgatgtctaca

SEQ ID NO: 7893 - DNA, 23 bp, Artificial Sequence
  Description of Artificial Sequence: Synthetic oligonucleotide
  Epidermal growth factor receptor (EGFR), ERBB1 phosphotyrosine kinase siRNA
atatgtaccatcgatgtctacat

SEQ ID NO: 7894 - DNA, 23 bp, Artificial Sequence
  Description of Artificial Sequence: Synthetic oligonucleotide
  Epidermal growth factor receptor (EGFR), ERBB1 phosphotyrosine kinase siRNA
tatgtaccatcgatgtctacatg

SEQ ID NO: 7895 - DNA, 23 bp, Artificial Sequence
  Description of Artificial Sequence: Synthetic oligonucleotide
  Epidermal growth factor receptor (EGFR), ERBB1 phosphotyrosine kinase siRNA
atgtaccatcgatgtctacatga

SEQ ID NO: 7896 - DNA, 23 bp, Artificial Sequence
  Description of Artificial Sequence: Synthetic oligonucleotide
  Epidermal growth factor receptor (EGFR), ERBB1 phosphotyrosine kinase siRNA
tgtaccatcgatgtctacatgat

SEQ ID NO: 7897 - DNA, 23 bp, Artificial Sequence
  Description of Artificial Sequence: Synthetic oligonucleotide
  Epidermal growth factor receptor (EGFR), ERBB1 phosphotyrosine kinase siRNA
gtaccatcgatgtctacatgatc

SEQ ID NO: 7898 - DNA, 23 bp, Artificial Sequence
  Description of Artificial Sequence: Synthetic oligonucleotide
  Epidermal growth factor receptor (EGFR), ERBB1 phosphotyrosine kinase siRNA
taccatcgatgtctacatgatca

SEQ ID NO: 7899 - DNA, 23 bp, Artificial Sequence
  Description of Artificial Sequence: Synthetic oligonucleotide
  Epidermal growth factor receptor (EGFR), ERBB1 phosphotyrosine kinase siRNA
accatcgatgtctacatgatcat

SEQ ID NO: 7900 - DNA, 23 bp, Artificial Sequence
  Description of Artificial Sequence: Synthetic oligonucleotide
  Epidermal growth factor receptor (EGFR), ERBB1 phosphotyrosine kinase siRNA
ccatcgatgtctacatgatcatg

SEQ ID NO: 7901 - DNA, 23 bp, Artificial Sequence
  Description of Artificial Sequence: Synthetic oligonucleotide
  Epidermal growth factor receptor (EGFR), ERBB1 phosphotyrosine kinase siRNA
catcgatgtctacatgatcatgg

SEQ ID NO: 7902 - DNA, 23 bp, Artificial Sequence
  Description of Artificial Sequence: Synthetic oligonucleotide
  Epidermal growth factor receptor (EGFR), ERBB1 phosphotyrosine kinase siRNA
atcgatgtctacatgatcatggt

SEQ ID NO: 7903 - DNA, 23 bp, Artificial Sequence
  Description of Artificial Sequence: Synthetic oligonucleotide
  Epidermal growth factor receptor (EGFR), ERBB1 phosphotyrosine kinase siRNA
tcgatgtctacatgatcatggtc

SEQ ID NO: 7904 - DNA, 23 bp, Artificial Sequence
  Description of Artificial Sequence: Synthetic oligonucleotide
  Epidermal growth factor receptor (EGFR), ERBB1 phosphotyrosine kinase siRNA
cgatgtctacatgatcatggtca

SEQ ID NO: 7905 - DNA, 23 bp, Artificial Sequence
  Description of Artificial Sequence: Synthetic oligonucleotide
  Epidermal growth factor receptor (EGFR), ERBB1 phosphotyrosine kinase siRNA
gatgtctacatgatcatggtcaa

SEQ ID NO: 7906 - DNA, 23 bp, Artificial Sequence
  Description of Artificial Sequence: Synthetic oligonucleotide
  Epidermal growth factor receptor (EGFR), ERBB1 phosphotyrosine kinase siRNA
atgtctacatgatcatggtcaag

SEQ ID NO: 7907 - DNA, 23 bp, Artificial Sequence
  Description of Artificial Sequence: Synthetic oligonucleotide
  Epidermal growth factor receptor (EGFR), ERBB1 phosphotyrosine kinase siRNA
tgtctacatgatcatggtcaagt

SEQ ID NO: 7908 - DNA, 23 bp, Artificial Sequence
  Description of Artificial Sequence: Synthetic oligonucleotide
  Epidermal growth factor receptor (EGFR), ERBB1 phosphotyrosine kinase siRNA
gtctacatgatcatggtcaagtg

SEQ ID NO: 7909 - DNA, 23 bp, Artificial Sequence
  Description of Artificial Sequence: Synthetic oligonucleotide
  Epidermal growth factor receptor (EGFR), ERBB1 phosphotyrosine kinase siRNA
tctacatgatcatggtcaagtgc

SEQ ID NO: 7910 - DNA, 23 bp, Artificial Sequence
  Description of Artificial Sequence: Synthetic oligonucleotide
  Epidermal growth factor receptor (EGFR), ERBB1 phosphotyrosine kinase siRNA
ctacatgatcatggtcaagtgct

SEQ ID NO: 7911 - DNA, 23 bp, Artificial Sequence
  Description of Artificial Sequence: Synthetic oligonucleotide
  Epidermal growth factor receptor (EGFR), ERBB1 phosphotyrosine kinase siRNA
tacatgatcatggtcaagtgctg

SEQ ID NO: 7912 - DNA, 23 bp, Artificial Sequence
  Description of Artificial Sequence: Synthetic oligonucleotide
  Epidermal growth factor receptor (EGFR), ERBB1 phosphotyrosine kinase siRNA
acatgatcatggtcaagtgctgg

SEQ ID NO: 7913 - DNA, 23 bp, Artificial Sequence
  Description of Artificial Sequence: Synthetic oligonucleotide
  Epidermal growth factor receptor (EGFR), ERBB1 phosphotyrosine kinase siRNA
catgatcatggtcaagtgctgga

SEQ ID NO: 7914 - DNA, 23 bp, Artificial Sequence
  Description of Artificial Sequence: Synthetic oligonucleotide
  Epidermal growth factor receptor (EGFR), ERBB1 phosphotyrosine kinase siRNA
atgatcatggtcaagtgctggat

SEQ ID NO: 7915 - DNA, 23 bp, Artificial Sequence
  Description of Artificial Sequence: Synthetic oligonucleotide
  Epidermal growth factor receptor (EGFR), ERBB1 phosphotyrosine kinase siRNA
tgatcatggtcaagtgctggatg

SEQ ID NO: 7916 - DNA, 23 bp, Artificial Sequence
  Description of Artificial Sequence: Synthetic oligonucleotide
  Epidermal growth factor receptor (EGFR), ERBB1 phosphotyrosine kinase siRNA
gatcatggtcaagtgctggatga

SEQ ID NO: 7917 - DNA, 23 bp, Artificial Sequence
  Description of Artificial Sequence: Synthetic oligonucleotide
  Epidermal growth factor receptor (EGFR), ERBB1 phosphotyrosine kinase siRNA
atcatggtcaagtgctggatgat

SEQ ID NO: 7918 - DNA, 23 bp, Artificial Sequence
  Description of Artificial Sequence: Synthetic oligonucleotide
  Epidermal growth factor receptor (EGFR), ERBB1 phosphotyrosine kinase siRNA
tcatggtcaagtgctggatgata

SEQ ID NO: 7919 - DNA, 23 bp, Artificial Sequence
  Description of Artificial Sequence: Synthetic oligonucleotide
  Epidermal growth factor receptor (EGFR), ERBB1 phosphotyrosine kinase siRNA
catggtcaagtgctggatgatag

SEQ ID NO: 7920 - DNA, 23 bp, Artificial Sequence
  Description of Artificial Sequence: Synthetic oligonucleotide
  Epidermal growth factor receptor (EGFR), ERBB1 phosphotyrosine kinase siRNA
atggtcaagtgctggatgataga

SEQ ID NO: 7921 - DNA, 23 bp, Artificial Sequence
  Description of Artificial Sequence: Synthetic oligonucleotide
  Epidermal growth factor receptor (EGFR), ERBB1 phosphotyrosine kinase siRNA
tggtcaagtgctggatgatagac

SEQ ID NO: 7922 - DNA, 23 bp, Artificial Sequence
  Description of Artificial Sequence: Synthetic oligonucleotide
  Epidermal growth factor receptor (EGFR), ERBB1 phosphotyrosine kinase siRNA
ggtcaagtgctggatgatagacg

SEQ ID NO: 7923 - DNA, 23 bp, Artificial Sequence
  Description of Artificial Sequence: Synthetic oligonucleotide
  Epidermal growth factor receptor (EGFR), ERBB1 phosphotyrosine kinase siRNA
gtcaagtgctggatgatagacgc

SEQ ID NO: 7924 - DNA, 23 bp, Artificial Sequence
  Description of Artificial Sequence: Synthetic oligonucleotide
  Epidermal growth factor receptor (EGFR), ERBB1 phosphotyrosine kinase siRNA
tcaagtgctggatgatagacgca

SEQ ID NO: 7925 - DNA, 23 bp, Artificial Sequence
  Description of Artificial Sequence: Synthetic oligonucleotide
  Epidermal growth factor receptor (EGFR), ERBB1 phosphotyrosine kinase siRNA
caagtgctggatgatagacgcag

SEQ ID NO: 7926 - DNA, 23 bp, Artificial Sequence
  Description of Artificial Sequence: Synthetic oligonucleotide
  Epidermal growth factor receptor (EGFR), ERBB1 phosphotyrosine kinase siRNA
aagtgctggatgatagacgcaga

SEQ ID NO: 7927 - DNA, 23 bp, Artificial Sequence
  Description of Artificial Sequence: Synthetic oligonucleotide
  Epidermal growth factor receptor (EGFR), ERBB1 phosphotyrosine kinase siRNA
agtgctggatgatagacgcagat

SEQ ID NO: 7928 - DNA, 23 bp, Artificial Sequence
  Description of Artificial Sequence: Synthetic oligonucleotide
  Epidermal growth factor receptor (EGFR), ERBB1 phosphotyrosine kinase siRNA
gtgctggatgatagacgcagata

SEQ ID NO: 7929 - DNA, 23 bp, Artificial Sequence
  Description of Artificial Sequence: Synthetic oligonucleotide
  Epidermal growth factor receptor (EGFR), ERBB1 phosphotyrosine kinase siRNA
tgctggatgatagacgcagatag

SEQ ID NO: 7930 - DNA, 23 bp, Artificial Sequence
  Description of Artificial Sequence: Synthetic oligonucleotide
  Epidermal growth factor receptor (EGFR), ERBB1 phosphotyrosine kinase siRNA
gctggatgatagacgcagatagt

SEQ ID NO: 7931 - DNA, 23 bp, Artificial Sequence
  Description of Artificial Sequence: Synthetic oligonucleotide
  Epidermal growth factor receptor (EGFR), ERBB1 phosphotyrosine kinase siRNA
ctggatgatagacgcagatagtc

SEQ ID NO: 7932 - DNA, 23 bp, Artificial Sequence
  Description of Artificial Sequence: Synthetic oligonucleotide
  Epidermal growth factor receptor (EGFR), ERBB1 phosphotyrosine kinase siRNA
tggatgatagacgcagatagtcg

SEQ ID NO: 7933 - DNA, 23 bp, Artificial Sequence
  Description of Artificial Sequence: Synthetic oligonucleotide
  Epidermal growth factor receptor (EGFR), ERBB1 phosphotyrosine kinase siRNA
ggatgatagacgcagatagtcgc

SEQ ID NO: 7934 - DNA, 23 bp, Artificial Sequence
  Description of Artificial Sequence: Synthetic oligonucleotide
  Epidermal growth factor receptor (EGFR), ERBB1 phosphotyrosine kinase siRNA
gatgatagacgcagatagtcgcc

SEQ ID NO: 7935 - DNA, 23 bp, Artificial Sequence
  Description of Artificial Sequence: Synthetic oligonucleotide
  Epidermal growth factor receptor (EGFR), ERBB1 phosphotyrosine kinase siRNA
atgatagacgcagatagtcgccc

SEQ ID NO: 7936 - DNA, 23 bp, Artificial Sequence
  Description of Artificial Sequence: Synthetic oligonucleotide
  Epidermal growth factor receptor (EGFR), ERBB1 phosphotyrosine kinase siRNA
tgatagacgcagatagtcgccca

SEQ ID NO: 7937 - DNA, 23 bp, Artificial Sequence
  Description of Artificial Sequence: Synthetic oligonucleotide
  Epidermal growth factor receptor (EGFR), ERBB1 phosphotyrosine kinase siRNA
gatagacgcagatagtcgcccaa

SEQ ID NO: 7938 - DNA, 23 bp, Artificial Sequence
  Description of Artificial Sequence: Synthetic oligonucleotide
  Epidermal growth factor receptor (EGFR), ERBB1 phosphotyrosine kinase siRNA
atagacgcagatagtcgcccaaa

SEQ ID NO: 7939 - DNA, 23 bp, Artificial Sequence
  Description of Artificial Sequence: Synthetic oligonucleotide
  Epidermal growth factor receptor (EGFR), ERBB1 phosphotyrosine kinase siRNA
tagacgcagatagtcgcccaaag

SEQ ID NO: 7940 - DNA, 23 bp, Artificial Sequence
  Description of Artificial Sequence: Synthetic oligonucleotide
  Epidermal growth factor receptor (EGFR), ERBB1 phosphotyrosine kinase siRNA
agacgcagatagtcgcccaaagt

SEQ ID NO: 7941 - DNA, 23 bp, Artificial Sequence
  Description of Artificial Sequence: Synthetic oligonucleotide
  Epidermal growth factor receptor (EGFR), ERBB1 phosphotyrosine kinase siRNA
gacgcagatagtcgcccaaagtt

SEQ ID NO: 7942 - DNA, 23 bp, Artificial Sequence
  Description of Artificial Sequence: Synthetic oligonucleotide
  Epidermal growth factor receptor (EGFR), ERBB1 phosphotyrosine kinase siRNA
acgcagatagtcgcccaaagttc

SEQ ID NO: 7943 - DNA, 23 bp, Artificial Sequence
  Description of Artificial Sequence: Synthetic oligonucleotide
  Epidermal growth factor receptor (EGFR), ERBB1 phosphotyrosine kinase siRNA
cgcagatagtcgcccaaagttcc

SEQ ID NO: 7944 - DNA, 23 bp, Artificial Sequence
  Description of Artificial Sequence: Synthetic oligonucleotide
  Epidermal growth factor receptor (EGFR), ERBB1 phosphotyrosine kinase siRNA
gcagatagtcgcccaaagttccg

SEQ ID NO: 7945 - DNA, 23 bp, Artificial Sequence
  Description of Artificial Sequence: Synthetic oligonucleotide
  Epidermal growth factor receptor (EGFR), ERBB1 phosphotyrosine kinase siRNA
cagatagtcgcccaaagttccgt

SEQ ID NO: 7946 - DNA, 23 bp, Artificial Sequence
  Description of Artificial Sequence: Synthetic oligonucleotide
  Epidermal growth factor receptor (EGFR), ERBB1 phosphotyrosine kinase siRNA
agatagtcgcccaaagttccgtg

SEQ ID NO: 7947 - DNA, 23 bp, Artificial Sequence
  Description of Artificial Sequence: Synthetic oligonucleotide
  Epidermal growth factor receptor (EGFR), ERBB1 phosphotyrosine kinase siRNA
gatagtcgcccaaagttccgtga

SEQ ID NO: 7948 - DNA, 23 bp, Artificial Sequence
  Description of Artificial Sequence: Synthetic oligonucleotide
  Epidermal growth factor receptor (EGFR), ERBB1 phosphotyrosine kinase siRNA
atagtcgcccaaagttccgtgag

SEQ ID NO: 7949 - DNA, 23 bp, Artificial Sequence
  Description of Artificial Sequence: Synthetic oligonucleotide
  Epidermal growth factor receptor (EGFR), ERBB1 phosphotyrosine kinase siRNA
tagtcgcccaaagttccgtgagt

SEQ ID NO: 7950 - DNA, 23 bp, Artificial Sequence
  Description of Artificial Sequence: Synthetic oligonucleotide
  Epidermal growth factor receptor (EGFR), ERBB1 phosphotyrosine kinase siRNA
agtcgcccaaagttccgtgagtt

SEQ ID NO: 7951 - DNA, 23 bp, Artificial Sequence
  Description of Artificial Sequence: Synthetic oligonucleotide
  Epidermal growth factor receptor (EGFR), ERBB1 phosphotyrosine kinase siRNA
gtcgcccaaagttccgtgagttg

SEQ ID NO: 7952 - DNA, 23 bp, Artificial Sequence
  Description of Artificial Sequence: Synthetic oligonucleotide
  Epidermal growth factor receptor (EGFR), ERBB1 phosphotyrosine kinase siRNA
tcgcccaaagttccgtgagttga

SEQ ID NO: 7953 - DNA, 23 bp, Artificial Sequence
  Description of Artificial Sequence: Synthetic oligonucleotide
  Epidermal growth factor receptor (EGFR), ERBB1 phosphotyrosine kinase siRNA
cgcccaaagttccgtgagttgat

SEQ ID NO: 7954 - DNA, 23 bp, Artificial Sequence
  Description of Artificial Sequence: Synthetic oligonucleotide
  Epidermal growth factor receptor (EGFR), ERBB1 phosphotyrosine kinase siRNA
gcccaaagttccgtgagttgatc

SEQ ID NO: 7955 - DNA, 23 bp, Artificial Sequence
  Description of Artificial Sequence: Synthetic oligonucleotide
  Epidermal growth factor receptor (EGFR), ERBB1 phosphotyrosine kinase siRNA
cccaaagttccgtgagttgatca

SEQ ID NO: 7956 - DNA, 23 bp, Artificial Sequence
  Description of Artificial Sequence: Synthetic oligonucleotide
  Epidermal growth factor receptor (EGFR), ERBB1 phosphotyrosine kinase siRNA
ccaaagttccgtgagttgatcat

SEQ ID NO: 7957 - DNA, 23 bp, Artificial Sequence
  Description of Artificial Sequence: Synthetic oligonucleotide
  Epidermal growth factor receptor (EGFR), ERBB1 phosphotyrosine kinase siRNA
caaagttccgtgagttgatcatc

SEQ ID NO: 7958 - DNA, 23 bp, Artificial Sequence
  Description of Artificial Sequence: Synthetic oligonucleotide
  Epidermal growth factor receptor (EGFR), ERBB1 phosphotyrosine kinase siRNA
aaagttccgtgagttgatcatcg

SEQ ID NO: 7959 - DNA, 23 bp, Artificial Sequence
  Description of Artificial Sequence: Synthetic oligonucleotide
  Epidermal growth factor receptor (EGFR), ERBB1 phosphotyrosine kinase siRNA
aagttccgtgagttgatcatcga

SEQ ID NO: 7960 - DNA, 23 bp, Artificial Sequence
  Description of Artificial Sequence: Synthetic oligonucleotide
  Epidermal growth factor receptor (EGFR), ERBB1 phosphotyrosine kinase siRNA
agttccgtgagttgatcatcgaa

SEQ ID NO: 7961 - DNA, 23 bp, Artificial Sequence
  Description of Artificial Sequence: Synthetic oligonucleotide
  Epidermal growth factor receptor (EGFR), ERBB1 phosphotyrosine kinase siRNA
gttccgtgagttgatcatcgaat

SEQ ID NO: 7962 - DNA, 23 bp, Artificial Sequence
  Description of Artificial Sequence: Synthetic oligonucleotide
  Epidermal growth factor receptor (EGFR), ERBB1 phosphotyrosine kinase siRNA
ttccgtgagttgatcatcgaatt

SEQ ID NO: 7963 - DNA, 23 bp, Artificial Sequence
  Description of Artificial Sequence: Synthetic oligonucleotide
  Epidermal growth factor receptor (EGFR), ERBB1 phosphotyrosine kinase siRNA
tccgtgagttgatcatcgaattc

SEQ ID NO: 7964 - DNA, 23 bp, Artificial Sequence
  Description of Artificial Sequence: Synthetic oligonucleotide
  Epidermal growth factor receptor (EGFR), ERBB1 phosphotyrosine kinase siRNA
ccgtgagttgatcatcgaattct

SEQ ID NO: 7965 - DNA, 23 bp, Artificial Sequence
  Description of Artificial Sequence: Synthetic oligonucleotide
  Epidermal growth factor receptor (EGFR), ERBB1 phosphotyrosine kinase siRNA
cgtgagttgatcatcgaattctc

SEQ ID NO: 7966 - DNA, 23 bp, Artificial Sequence
  Description of Artificial Sequence: Synthetic oligonucleotide
  Epidermal growth factor receptor (EGFR), ERBB1 phosphotyrosine kinase siRNA
gtgagttgatcatcgaattctcc

SEQ ID NO: 7967 - DNA, 23 bp, Artificial Sequence
  Description of Artificial Sequence: Synthetic oligonucleotide
  Epidermal growth factor receptor (EGFR), ERBB1 phosphotyrosine kinase siRNA
tgagttgatcatcgaattctcca

SEQ ID NO: 7968 - DNA, 23 bp, Artificial Sequence
  Description of Artificial Sequence: Synthetic oligonucleotide
  Epidermal growth factor receptor (EGFR), ERBB1 phosphotyrosine kinase siRNA
gagttgatcatcgaattctccaa

SEQ ID NO: 7969 - DNA, 23 bp, Artificial Sequence
  Description of Artificial Sequence: Synthetic oligonucleotide
  Epidermal growth factor receptor (EGFR), ERBB1 phosphotyrosine kinase siRNA
agttgatcatcgaattctccaaa

SEQ ID NO: 7970 - DNA, 23 bp, Artificial Sequence
  Description of Artificial Sequence: Synthetic oligonucleotide
  Epidermal growth factor receptor (EGFR), ERBB1 phosphotyrosine kinase siRNA
gttgatcatcgaattctccaaaa

SEQ ID NO: 7971 - DNA, 23 bp, Artificial Sequence
  Description of Artificial Sequence: Synthetic oligonucleotide
  Epidermal growth factor receptor (EGFR), ERBB1 phosphotyrosine kinase siRNA
ttgatcatcgaattctccaaaat

SEQ ID NO: 7972 - DNA, 23 bp, Artificial Sequence
  Description of Artificial Sequence: Synthetic oligonucleotide
  Epidermal growth factor receptor (EGFR), ERBB1 phosphotyrosine kinase siRNA
tgatcatcgaattctccaaaatg

SEQ ID NO: 7973 - DNA, 23 bp, Artificial Sequence
  Description of Artificial Sequence: Synthetic oligonucleotide
  Epidermal growth factor receptor (EGFR), ERBB1 phosphotyrosine kinase siRNA
gatcatcgaattctccaaaatgg

SEQ ID NO: 7974 - DNA, 23 bp, Artificial Sequence
  Description of Artificial Sequence: Synthetic oligonucleotide
  Epidermal growth factor receptor (EGFR), ERBB1 phosphotyrosine kinase siRNA
atcatcgaattctccaaaatggc

SEQ ID NO: 7975 - DNA, 23 bp, Artificial Sequence
  Description of Artificial Sequence: Synthetic oligonucleotide
  Epidermal growth factor receptor (EGFR), ERBB1 phosphotyrosine kinase siRNA
tcatcgaattctccaaaatggcc

SEQ ID NO: 7976 - DNA, 23 bp, Artificial Sequence
  Description of Artificial Sequence: Synthetic oligonucleotide
  Epidermal growth factor receptor (EGFR), ERBB1 phosphotyrosine kinase siRNA
catcgaattctccaaaatggccc

SEQ ID NO: 7977 - DNA, 23 bp, Artificial Sequence
  Description of Artificial Sequence: Synthetic oligonucleotide
  Epidermal growth factor receptor (EGFR), ERBB1 phosphotyrosine kinase siRNA
atcgaattctccaaaatggcccg

SEQ ID NO: 7978 - DNA, 23 bp, Artificial Sequence
  Description of Artificial Sequence: Synthetic oligonucleotide
  Epidermal growth factor receptor (EGFR), ERBB1 phosphotyrosine kinase siRNA
tcgaattctccaaaatggcccga

SEQ ID NO: 7979 - DNA, 23 bp, Artificial Sequence
  Description of Artificial Sequence: Synthetic oligonucleotide
  Epidermal growth factor receptor (EGFR), ERBB1 phosphotyrosine kinase siRNA
cgaattctccaaaatggcccgag

SEQ ID NO: 7980 - DNA, 23 bp, Artificial Sequence
  Description of Artificial Sequence: Synthetic oligonucleotide
  Epidermal growth factor receptor (EGFR), ERBB1 phosphotyrosine kinase siRNA
gaattctccaaaatggcccgaga

SEQ ID NO: 7981 - DNA, 23 bp, Artificial Sequence
  Description of Artificial Sequence: Synthetic oligonucleotide
  Epidermal growth factor receptor (EGFR), ERBB1 phosphotyrosine kinase siRNA
aattctccaaaatggcccgagac

SEQ ID NO: 7982 - DNA, 23 bp, Artificial Sequence
  Description of Artificial Sequence: Synthetic oligonucleotide
  Epidermal growth factor receptor (EGFR), ERBB1 phosphotyrosine kinase siRNA
attctccaaaatggcccgagacc

SEQ ID NO: 7983 - DNA, 23 bp, Artificial Sequence
  Description of Artificial Sequence: Synthetic oligonucleotide
  Epidermal growth factor receptor (EGFR), ERBB1 phosphotyrosine kinase siRNA
ttctccaaaatggcccgagaccc

SEQ ID NO: 7984 - DNA, 23 bp, Artificial Sequence
  Description of Artificial Sequence: Synthetic oligonucleotide
  Epidermal growth factor receptor (EGFR), ERBB1 phosphotyrosine kinase siRNA
tctccaaaatggcccgagacccc

SEQ ID NO: 7985 - DNA, 23 bp, Artificial Sequence
  Description of Artificial Sequence: Synthetic oligonucleotide
  Epidermal growth factor receptor (EGFR), ERBB1 phosphotyrosine kinase siRNA
ctccaaaatggcccgagaccccc

SEQ ID NO: 7986 - DNA, 23 bp, Artificial Sequence
  Description of Artificial Sequence: Synthetic oligonucleotide
  Epidermal growth factor receptor (EGFR), ERBB1 phosphotyrosine kinase siRNA
tccaaaatggcccgagaccccca

SEQ ID NO: 7987 - DNA, 23 bp, Artificial Sequence
  Description of Artificial Sequence: Synthetic oligonucleotide
  Epidermal growth factor receptor (EGFR), ERBB1 phosphotyrosine kinase siRNA
ccaaaatggcccgagacccccag

SEQ ID NO: 7988 - DNA, 23 bp, Artificial Sequence
  Description of Artificial Sequence: Synthetic oligonucleotide
  Epidermal growth factor receptor (EGFR), ERBB1 phosphotyrosine kinase siRNA
caaaatggcccgagacccccagc

SEQ ID NO: 7989 - DNA, 23 bp, Artificial Sequence
  Description of Artificial Sequence: Synthetic oligonucleotide
  Epidermal growth factor receptor (EGFR), ERBB1 phosphotyrosine kinase siRNA
aaaatggcccgagacccccagcg

SEQ ID NO: 7990 - DNA, 23 bp, Artificial Sequence
  Description of Artificial Sequence: Synthetic oligonucleotide
  Epidermal growth factor receptor (EGFR), ERBB1 phosphotyrosine kinase siRNA
aaatggcccgagacccccagcgc

SEQ ID NO: 7991 - DNA, 23 bp, Artificial Sequence
  Description of Artificial Sequence: Synthetic oligonucleotide
  Epidermal growth factor receptor (EGFR), ERBB1 phosphotyrosine kinase siRNA
aatggcccgagacccccagcgct

SEQ ID NO: 7992 - DNA, 23 bp, Artificial Sequence
  Description of Artificial Sequence: Synthetic oligonucleotide
  Epidermal growth factor receptor (EGFR), ERBB1 phosphotyrosine kinase siRNA
atggcccgagacccccagcgcta

SEQ ID NO: 7993 - DNA, 23 bp, Artificial Sequence
  Description of Artificial Sequence: Synthetic oligonucleotide
  Epidermal growth factor receptor (EGFR), ERBB1 phosphotyrosine kinase siRNA
tggcccgagacccccagcgctac

SEQ ID NO: 7994 - DNA, 23 bp, Artificial Sequence
  Description of Artificial Sequence: Synthetic oligonucleotide
  Epidermal growth factor receptor (EGFR), ERBB1 phosphotyrosine kinase siRNA
ggcccgagacccccagcgctacc

SEQ ID NO: 7995 - DNA, 23 bp, Artificial Sequence
  Description of Artificial Sequence: Synthetic oligonucleotide
  Epidermal growth factor receptor (EGFR), ERBB1 phosphotyrosine kinase siRNA
gcccgagacccccagcgctacct

SEQ ID NO: 7996 - DNA, 23 bp, Artificial Sequence
  Description of Artificial Sequence: Synthetic oligonucleotide
  Epidermal growth factor receptor (EGFR), ERBB1 phosphotyrosine kinase siRNA
cccgagacccccagcgctacctt

SEQ ID NO: 7997 - DNA, 23 bp, Artificial Sequence
  Description of Artificial Sequence: Synthetic oligonucleotide
  Epidermal growth factor receptor (EGFR), ERBB1 phosphotyrosine kinase siRNA
ccgagacccccagcgctaccttg

SEQ ID NO: 7998 - DNA, 23 bp, Artificial Sequence
  Description of Artificial Sequence: Synthetic oligonucleotide
  Epidermal growth factor receptor (EGFR), ERBB1 phosphotyrosine kinase siRNA
cgagacccccagcgctaccttgt

SEQ ID NO: 7999 - DNA, 23 bp, Artificial Sequence
  Description of Artificial Sequence: Synthetic oligonucleotide
  Epidermal growth factor receptor (EGFR), ERBB1 phosphotyrosine kinase siRNA
gagacccccagcgctaccttgtc

SEQ ID NO: 8000 - DNA, 23 bp, Artificial Sequence
  Description of Artificial Sequence: Synthetic oligonucleotide
  Epidermal growth factor receptor (EGFR), ERBB1 phosphotyrosine kinase siRNA
agacccccagcgctaccttgtca

SEQ ID NO: 8001 - DNA, 23 bp, Artificial Sequence
  Description of Artificial Sequence: Synthetic oligonucleotide
  Epidermal growth factor receptor (EGFR), ERBB1 phosphotyrosine kinase siRNA
gacccccagcgctaccttgtcat

SEQ ID NO: 8002 - DNA, 23 bp, Artificial Sequence
  Description of Artificial Sequence: Synthetic oligonucleotide
  Epidermal growth factor receptor (EGFR), ERBB1 phosphotyrosine kinase siRNA
acccccagcgctaccttgtcatt

SEQ ID NO: 8003 - DNA, 23 bp, Artificial Sequence
  Description of Artificial Sequence: Synthetic oligonucleotide
  Epidermal growth factor receptor (EGFR), ERBB1 phosphotyrosine kinase siRNA
cccccagcgctaccttgtcattc

SEQ ID NO: 8004 - DNA, 23 bp, Artificial Sequence
  Description of Artificial Sequence: Synthetic oligonucleotide
  Epidermal growth factor receptor (EGFR), ERBB1 phosphotyrosine kinase siRNA
ccccagcgctaccttgtcattca

SEQ ID NO: 8005 - DNA, 23 bp, Artificial Sequence
  Description of Artificial Sequence: Synthetic oligonucleotide
  Epidermal growth factor receptor (EGFR), ERBB1 phosphotyrosine kinase siRNA
cccagcgctaccttgtcattcag

SEQ ID NO: 8006 - DNA, 23 bp, Artificial Sequence
  Description of Artificial Sequence: Synthetic oligonucleotide
  Epidermal growth factor receptor (EGFR), ERBB1 phosphotyrosine kinase siRNA
ccagcgctaccttgtcattcagg

SEQ ID NO: 8007 - DNA, 23 bp, Artificial Sequence
  Description of Artificial Sequence: Synthetic oligonucleotide
  Epidermal growth factor receptor (EGFR), ERBB1 phosphotyrosine kinase siRNA
cagcgctaccttgtcattcaggg

SEQ ID NO: 8008 - DNA, 23 bp, Artificial Sequence
  Description of Artificial Sequence: Synthetic oligonucleotide
  Epidermal growth factor receptor (EGFR), ERBB1 phosphotyrosine kinase siRNA
agcgctaccttgtcattcagggg

SEQ ID NO: 8009 - DNA, 23 bp, Artificial Sequence
  Description of Artificial Sequence: Synthetic oligonucleotide
  Epidermal growth factor receptor (EGFR), ERBB1 phosphotyrosine kinase siRNA
gcgctaccttgtcattcaggggg

SEQ ID NO: 8010 - DNA, 23 bp, Artificial Sequence
  Description of Artificial Sequence: Synthetic oligonucleotide
  Epidermal growth factor receptor (EGFR), ERBB1 phosphotyrosine kinase siRNA
cgctaccttgtcattcaggggga

SEQ ID NO: 8011 - DNA, 23 bp, Artificial Sequence
  Description of Artificial Sequence: Synthetic oligonucleotide
  Epidermal growth factor receptor (EGFR), ERBB1 phosphotyrosine kinase siRNA
gctaccttgtcattcagggggat

SEQ ID NO: 8012 - DNA, 23 bp, Artificial Sequence
  Description of Artificial Sequence: Synthetic oligonucleotide
  Epidermal growth factor receptor (EGFR), ERBB1 phosphotyrosine kinase siRNA
ctaccttgtcattcagggggatg

SEQ ID NO: 8013 - DNA, 23 bp, Artificial Sequence
  Description of Artificial Sequence: Synthetic oligonucleotide
  Epidermal growth factor receptor (EGFR), ERBB1 phosphotyrosine kinase siRNA
taccttgtcattcagggggatga

SEQ ID NO: 8014 - DNA, 23 bp, Artificial Sequence
  Description of Artificial Sequence: Synthetic oligonucleotide
  Epidermal growth factor receptor (EGFR), ERBB1 phosphotyrosine kinase siRNA
accttgtcattcagggggatgaa

SEQ ID NO: 8015 - DNA, 23 bp, Artificial Sequence
  Description of Artificial Sequence: Synthetic oligonucleotide
  Epidermal growth factor receptor (EGFR), ERBB1 phosphotyrosine kinase siRNA
ccttgtcattcagggggatgaaa

SEQ ID NO: 8016 - DNA, 23 bp, Artificial Sequence
  Description of Artificial Sequence: Synthetic oligonucleotide
  Epidermal growth factor receptor (EGFR), ERBB1 phosphotyrosine kinase siRNA
cttgtcattcagggggatgaaag

SEQ ID NO: 8017 - DNA, 23 bp, Artificial Sequence
  Description of Artificial Sequence: Synthetic oligonucleotide
  Epidermal growth factor receptor (EGFR), ERBB1 phosphotyrosine kinase siRNA
ttgtcattcagggggatgaaaga

SEQ ID NO: 8018 - DNA, 23 bp, Artificial Sequence
  Description of Artificial Sequence: Synthetic oligonucleotide
  Epidermal growth factor receptor (EGFR), ERBB1 phosphotyrosine kinase siRNA
tgtcattcagggggatgaaagaa

SEQ ID NO: 8019 - DNA, 23 bp, Artificial Sequence
  Description of Artificial Sequence: Synthetic oligonucleotide
  Epidermal growth factor receptor (EGFR), ERBB1 phosphotyrosine kinase siRNA
gtcattcagggggatgaaagaat

SEQ ID NO: 8020 - DNA, 23 bp, Artificial Sequence
  Description of Artificial Sequence: Synthetic oligonucleotide
  Epidermal growth factor receptor (EGFR), ERBB1 phosphotyrosine kinase siRNA
tcattcagggggatgaaagaatg

SEQ ID NO: 8021 - DNA, 23 bp, Artificial Sequence
  Description of Artificial Sequence: Synthetic oligonucleotide
  Epidermal growth factor receptor (EGFR), ERBB1 phosphotyrosine kinase siRNA
cattcagggggatgaaagaatgc

SEQ ID NO: 8022 - DNA, 23 bp, Artificial Sequence
  Description of Artificial Sequence: Synthetic oligonucleotide
  Epidermal growth factor receptor (EGFR), ERBB1 phosphotyrosine kinase siRNA
attcagggggatgaaagaatgca

SEQ ID NO: 8023 - DNA, 23 bp, Artificial Sequence
  Description of Artificial Sequence: Synthetic oligonucleotide
  Epidermal growth factor receptor (EGFR), ERBB1 phosphotyrosine kinase siRNA
ttcagggggatgaaagaatgcat

SEQ ID NO: 8024 - DNA, 23 bp, Artificial Sequence
  Description of Artificial Sequence: Synthetic oligonucleotide
  Epidermal growth factor receptor (EGFR), ERBB1 phosphotyrosine kinase siRNA
tcagggggatgaaagaatgcatt

SEQ ID NO: 8025 - DNA, 23 bp, Artificial Sequence
  Description of Artificial Sequence: Synthetic oligonucleotide
  Epidermal growth factor receptor (EGFR), ERBB1 phosphotyrosine kinase siRNA
cagggggatgaaagaatgcattt

SEQ ID NO: 8026 - DNA, 23 bp, Artificial Sequence
  Description of Artificial Sequence: Synthetic oligonucleotide
  Epidermal growth factor receptor (EGFR), ERBB1 phosphotyrosine kinase siRNA
agggggatgaaagaatgcatttg

SEQ ID NO: 8027 - DNA, 23 bp, Artificial Sequence
  Description of Artificial Sequence: Synthetic oligonucleotide
  Epidermal growth factor receptor (EGFR), ERBB1 phosphotyrosine kinase siRNA
gggggatgaaagaatgcatttgc

SEQ ID NO: 8028 - DNA, 23 bp, Artificial Sequence
  Description of Artificial Sequence: Synthetic oligonucleotide
  Epidermal growth factor receptor (EGFR), ERBB1 phosphotyrosine kinase siRNA
ggggatgaaagaatgcatttgcc

SEQ ID NO: 8029 - DNA, 23 bp, Artificial Sequence
  Description of Artificial Sequence: Synthetic oligonucleotide
  Epidermal growth factor receptor (EGFR), ERBB1 phosphotyrosine kinase siRNA
gggatgaaagaatgcatttgcca

SEQ ID NO: 8030 - DNA, 23 bp, Artificial Sequence
  Description of Artificial Sequence: Synthetic oligonucleotide
  Epidermal growth factor receptor (EGFR), ERBB1 phosphotyrosine kinase siRNA
ggatgaaagaatgcatttgccaa

SEQ ID NO: 8031 - DNA, 23 bp, Artificial Sequence
  Description of Artificial Sequence: Synthetic oligonucleotide
  Epidermal growth factor receptor (EGFR), ERBB1 phosphotyrosine kinase siRNA
gatgaaagaatgcatttgccaag

SEQ ID NO: 8032 - DNA, 23 bp, Artificial Sequence
  Description of Artificial Sequence: Synthetic oligonucleotide
  Epidermal growth factor receptor (EGFR), ERBB1 phosphotyrosine kinase siRNA
atgaaagaatgcatttgccaagt

SEQ ID NO: 8033 - DNA, 23 bp, Artificial Sequence
  Description of Artificial Sequence: Synthetic oligonucleotide
  Epidermal growth factor receptor (EGFR), ERBB1 phosphotyrosine kinase siRNA
tgaaagaatgcatttgccaagtc

SEQ ID NO: 8034 - DNA, 23 bp, Artificial Sequence
  Description of Artificial Sequence: Synthetic oligonucleotide
  Epidermal growth factor receptor (EGFR), ERBB1 phosphotyrosine kinase siRNA
gaaagaatgcatttgccaagtcc

SEQ ID NO: 8035 - DNA, 23 bp, Artificial Sequence
  Description of Artificial Sequence: Synthetic oligonucleotide
  Epidermal growth factor receptor (EGFR), ERBB1 phosphotyrosine kinase siRNA
aaagaatgcatttgccaagtcct

SEQ ID NO: 8036 - DNA, 23 bp, Artificial Sequence
  Description of Artificial Sequence: Synthetic oligonucleotide
  Epidermal growth factor receptor (EGFR), ERBB1 phosphotyrosine kinase siRNA
aagaatgcatttgccaagtccta

SEQ ID NO: 8037 - DNA, 23 bp, Artificial Sequence
  Description of Artificial Sequence: Synthetic oligonucleotide
  Epidermal growth factor receptor (EGFR), ERBB1 phosphotyrosine kinase siRNA
agaatgcatttgccaagtcctac

SEQ ID NO: 8038 - DNA, 23 bp, Artificial Sequence
  Description of Artificial Sequence: Synthetic oligonucleotide
  Epidermal growth factor receptor (EGFR), ERBB1 phosphotyrosine kinase siRNA
gaatgcatttgccaagtcctaca

SEQ ID NO: 8039 - DNA, 23 bp, Artificial Sequence
  Description of Artificial Sequence: Synthetic oligonucleotide
  Epidermal growth factor receptor (EGFR), ERBB1 phosphotyrosine kinase siRNA
aatgcatttgccaagtcctacag

SEQ ID NO: 8040 - DNA, 23 bp, Artificial Sequence
  Description of Artificial Sequence: Synthetic oligonucleotide
  Epidermal growth factor receptor (EGFR), ERBB1 phosphotyrosine kinase siRNA
atgcatttgccaagtcctacaga

SEQ ID NO: 8041 - DNA, 23 bp, Artificial Sequence
  Description of Artificial Sequence: Synthetic oligonucleotide
  Epidermal growth factor receptor (EGFR), ERBB1 phosphotyrosine kinase siRNA
tgcatttgccaagtcctacagac

SEQ ID NO: 8042 - DNA, 23 bp, Artificial Sequence
  Description of Artificial Sequence: Synthetic oligonucleotide
  Epidermal growth factor receptor (EGFR), ERBB1 phosphotyrosine kinase siRNA
gcatttgccaagtcctacagact

SEQ ID NO: 8043 - DNA, 23 bp, Artificial Sequence
  Description of Artificial Sequence: Synthetic oligonucleotide
  Epidermal growth factor receptor (EGFR), ERBB1 phosphotyrosine kinase siRNA
catttgccaagtcctacagactc

SEQ ID NO: 8044 - DNA, 23 bp, Artificial Sequence
  Description of Artificial Sequence: Synthetic oligonucleotide
  Epidermal growth factor receptor (EGFR), ERBB1 phosphotyrosine kinase siRNA
atttgccaagtcctacagactcc

SEQ ID NO: 8045 - DNA, 23 bp, Artificial Sequence
  Description of Artificial Sequence: Synthetic oligonucleotide
  Epidermal growth factor receptor (EGFR), ERBB1 phosphotyrosine kinase siRNA
tttgccaagtcctacagactcca

SEQ ID NO: 8046 - DNA, 23 bp, Artificial Sequence
  Description of Artificial Sequence: Synthetic oligonucleotide
  Epidermal growth factor receptor (EGFR), ERBB1 phosphotyrosine kinase siRNA
ttgccaagtcctacagactccaa

SEQ ID NO: 8047 - DNA, 23 bp, Artificial Sequence
  Description of Artificial Sequence: Synthetic oligonucleotide
  Epidermal growth factor receptor (EGFR), ERBB1 phosphotyrosine kinase siRNA
tgccaagtcctacagactccaac

SEQ ID NO: 8048 - DNA, 23 bp, Artificial Sequence
  Description of Artificial Sequence: Synthetic oligonucleotide
  Epidermal growth factor receptor (EGFR), ERBB1 phosphotyrosine kinase siRNA
gccaagtcctacagactccaact

SEQ ID NO: 8049 - DNA, 23 bp, Artificial Sequence
  Description of Artificial Sequence: Synthetic oligonucleotide
  Epidermal growth factor receptor (EGFR), ERBB1 phosphotyrosine kinase siRNA
ccaagtcctacagactccaactt

SEQ ID NO: 8050 - DNA, 23 bp, Artificial Sequence
  Description of Artificial Sequence: Synthetic oligonucleotide
  Epidermal growth factor receptor (EGFR), ERBB1 phosphotyrosine kinase siRNA
caagtcctacagactccaacttc

SEQ ID NO: 8051 - DNA, 23 bp, Artificial Sequence
  Description of Artificial Sequence: Synthetic oligonucleotide
  Epidermal growth factor receptor (EGFR), ERBB1 phosphotyrosine kinase siRNA
aagtcctacagactccaacttct

SEQ ID NO: 8052 - DNA, 23 bp, Artificial Sequence
  Description of Artificial Sequence: Synthetic oligonucleotide
  Epidermal growth factor receptor (EGFR), ERBB1 phosphotyrosine kinase siRNA
agtcctacagactccaacttcta

SEQ ID NO: 8053 - DNA, 23 bp, Artificial Sequence
  Description of Artificial Sequence: Synthetic oligonucleotide
  Epidermal growth factor receptor (EGFR), ERBB1 phosphotyrosine kinase siRNA
gtcctacagactccaacttctac

SEQ ID NO: 8054 - DNA, 23 bp, Artificial Sequence
  Description of Artificial Sequence: Synthetic oligonucleotide
  Epidermal growth factor receptor (EGFR), ERBB1 phosphotyrosine kinase siRNA
tcctacagactccaacttctacc

SEQ ID NO: 8055 - DNA, 23 bp, Artificial Sequence
  Description of Artificial Sequence: Synthetic oligonucleotide
  Epidermal growth factor receptor (EGFR), ERBB1 phosphotyrosine kinase siRNA
cctacagactccaacttctaccg

SEQ ID NO: 8056 - DNA, 23 bp, Artificial Sequence
  Description of Artificial Sequence: Synthetic oligonucleotide
  Epidermal growth factor receptor (EGFR), ERBB1 phosphotyrosine kinase siRNA
ctacagactccaacttctaccgt

SEQ ID NO: 8057 - DNA, 23 bp, Artificial Sequence
  Description of Artificial Sequence: Synthetic oligonucleotide
  Epidermal growth factor receptor (EGFR), ERBB1 phosphotyrosine kinase siRNA
tacagactccaacttctaccgtg

SEQ ID NO: 8058 - DNA, 23 bp, Artificial Sequence
  Description of Artificial Sequence: Synthetic oligonucleotide
  Epidermal growth factor receptor (EGFR), ERBB1 phosphotyrosine kinase siRNA
acagactccaacttctaccgtgc

SEQ ID NO: 8059 - DNA, 23 bp, Artificial Sequence
  Description of Artificial Sequence: Synthetic oligonucleotide
  Epidermal growth factor receptor (EGFR), ERBB1 phosphotyrosine kinase siRNA
cagactccaacttctaccgtgcc

SEQ ID NO: 8060 - DNA, 23 bp, Artificial Sequence
  Description of Artificial Sequence: Synthetic oligonucleotide
  Epidermal growth factor receptor (EGFR), ERBB1 phosphotyrosine kinase siRNA
agactccaacttctaccgtgccc

SEQ ID NO: 8061 - DNA, 23 bp, Artificial Sequence
  Description of Artificial Sequence: Synthetic oligonucleotide
  Epidermal growth factor receptor (EGFR), ERBB1 phosphotyrosine kinase siRNA
gactccaacttctaccgtgccct

SEQ ID NO: 8062 - DNA, 23 bp, Artificial Sequence
  Description of Artificial Sequence: Synthetic oligonucleotide
  Epidermal growth factor receptor (EGFR), ERBB1 phosphotyrosine kinase siRNA
actccaacttctaccgtgccctg

SEQ ID NO: 8063 - DNA, 23 bp, Artificial Sequence
  Description of Artificial Sequence: Synthetic oligonucleotide
  Epidermal growth factor receptor (EGFR), ERBB1 phosphotyrosine kinase siRNA
ctccaacttctaccgtgccctga

SEQ ID NO: 8064 - DNA, 23 bp, Artificial Sequence
  Description of Artificial Sequence: Synthetic oligonucleotide
  Epidermal growth factor receptor (EGFR), ERBB1 phosphotyrosine kinase siRNA
tccaacttctaccgtgccctgat

SEQ ID NO: 8065 - DNA, 23 bp, Artificial Sequence
  Description of Artificial Sequence: Synthetic oligonucleotide
  Epidermal growth factor receptor (EGFR), ERBB1 phosphotyrosine kinase siRNA
ccaacttctaccgtgccctgatg

SEQ ID NO: 8066 - DNA, 23 bp, Artificial Sequence
  Description of Artificial Sequence: Synthetic oligonucleotide
  Epidermal growth factor receptor (EGFR), ERBB1 phosphotyrosine kinase siRNA
caacttctaccgtgccctgatgg

SEQ ID NO: 8067 - DNA, 23 bp, Artificial Sequence
  Description of Artificial Sequence: Synthetic oligonucleotide
  Epidermal growth factor receptor (EGFR), ERBB1 phosphotyrosine kinase siRNA
aacttctaccgtgccctgatgga

SEQ ID NO: 8068 - DNA, 23 bp, Artificial Sequence
  Description of Artificial Sequence: Synthetic oligonucleotide
  Epidermal growth factor receptor (EGFR), ERBB1 phosphotyrosine kinase siRNA
acttctaccgtgccctgatggat

SEQ ID NO: 8069 - DNA, 23 bp, Artificial Sequence
  Description of Artificial Sequence: Synthetic oligonucleotide
  Epidermal growth factor receptor (EGFR), ERBB1 phosphotyrosine kinase siRNA
cttctaccgtgccctgatggatg

SEQ ID NO: 8070 - DNA, 23 bp, Artificial Sequence
  Description of Artificial Sequence: Synthetic oligonucleotide
  Epidermal growth factor receptor (EGFR), ERBB1 phosphotyrosine kinase siRNA
ttctaccgtgccctgatggatga

SEQ ID NO: 8071 - DNA, 23 bp, Artificial Sequence
  Description of Artificial Sequence: Synthetic oligonucleotide
  Epidermal growth factor receptor (EGFR), ERBB1 phosphotyrosine kinase siRNA
tctaccgtgccctgatggatgaa

SEQ ID NO: 8072 - DNA, 23 bp, Artificial Sequence
  Description of Artificial Sequence: Synthetic oligonucleotide
  Epidermal growth factor receptor (EGFR), ERBB1 phosphotyrosine kinase siRNA
ctaccgtgccctgatggatgaag

SEQ ID NO: 8073 - DNA, 23 bp, Artificial Sequence
  Description of Artificial Sequence: Synthetic oligonucleotide
  Epidermal growth factor receptor (EGFR), ERBB1 phosphotyrosine kinase siRNA
taccgtgccctgatggatgaaga

SEQ ID NO: 8074 - DNA, 23 bp, Artificial Sequence
  Description of Artificial Sequence: Synthetic oligonucleotide
  Epidermal growth factor receptor (EGFR), ERBB1 phosphotyrosine kinase siRNA
accgtgccctgatggatgaagaa

SEQ ID NO: 8075 - DNA, 23 bp, Artificial Sequence
  Description of Artificial Sequence: Synthetic oligonucleotide
  Epidermal growth factor receptor (EGFR), ERBB1 phosphotyrosine kinase siRNA
ccgtgccctgatggatgaagaag

SEQ ID NO: 8076 - DNA, 23 bp, Artificial Sequence
  Description of Artificial Sequence: Synthetic oligonucleotide
  Epidermal growth factor receptor (EGFR), ERBB1 phosphotyrosine kinase siRNA
cgtgccctgatggatgaagaaga

SEQ ID NO: 8077 - DNA, 23 bp, Artificial Sequence
  Description of Artificial Sequence: Synthetic oligonucleotide
  Epidermal growth factor receptor (EGFR), ERBB1 phosphotyrosine kinase siRNA
gtgccctgatggatgaagaagac

SEQ ID NO: 8078 - DNA, 23 bp, Artificial Sequence
  Description of Artificial Sequence: Synthetic oligonucleotide
  Epidermal growth factor receptor (EGFR), ERBB1 phosphotyrosine kinase siRNA
tgccctgatggatgaagaagaca

SEQ ID NO: 8079 - DNA, 23 bp, Artificial Sequence
  Description of Artificial Sequence: Synthetic oligonucleotide
  Epidermal growth factor receptor (EGFR), ERBB1 phosphotyrosine kinase siRNA
gccctgatggatgaagaagacat

SEQ ID NO: 8080 - DNA, 23 bp, Artificial Sequence
  Description of Artificial Sequence: Synthetic oligonucleotide
  Epidermal growth factor receptor (EGFR), ERBB1 phosphotyrosine kinase siRNA
ccctgatggatgaagaagacatg

SEQ ID NO: 8081 - DNA, 23 bp, Artificial Sequence
  Description of Artificial Sequence: Synthetic oligonucleotide
  Epidermal growth factor receptor (EGFR), ERBB1 phosphotyrosine kinase siRNA
cctgatggatgaagaagacatgg

SEQ ID NO: 8082 - DNA, 23 bp, Artificial Sequence
  Description of Artificial Sequence: Synthetic oligonucleotide
  Epidermal growth factor receptor (EGFR), ERBB1 phosphotyrosine kinase siRNA
ctgatggatgaagaagacatgga

SEQ ID NO: 8083 - DNA, 23 bp, Artificial Sequence
  Description of Artificial Sequence: Synthetic oligonucleotide
  Epidermal growth factor receptor (EGFR), ERBB1 phosphotyrosine kinase siRNA
tgatggatgaagaagacatggac

SEQ ID NO: 8084 - DNA, 23 bp, Artificial Sequence
  Description of Artificial Sequence: Synthetic oligonucleotide
  Epidermal growth factor receptor (EGFR), ERBB1 phosphotyrosine kinase siRNA
gatggatgaagaagacatggacg

SEQ ID NO: 8085 - DNA, 23 bp, Artificial Sequence
  Description of Artificial Sequence: Synthetic oligonucleotide
  Epidermal growth factor receptor (EGFR), ERBB1 phosphotyrosine kinase siRNA
atggatgaagaagacatggacga

SEQ ID NO: 8086 - DNA, 23 bp, Artificial Sequence
  Description of Artificial Sequence: Synthetic oligonucleotide
  Epidermal growth factor receptor (EGFR), ERBB1 phosphotyrosine kinase siRNA
tggatgaagaagacatggacgac

SEQ ID NO: 8087 - DNA, 23 bp, Artificial Sequence
  Description of Artificial Sequence: Synthetic oligonucleotide
  Epidermal growth factor receptor (EGFR), ERBB1 phosphotyrosine kinase siRNA
ggatgaagaagacatggacgacg

SEQ ID NO: 8088 - DNA, 23 bp, Artificial Sequence
  Description of Artificial Sequence: Synthetic oligonucleotide
  Epidermal growth factor receptor (EGFR), ERBB1 phosphotyrosine kinase siRNA
gatgaagaagacatggacgacgt

SEQ ID NO: 8089 - DNA, 23 bp, Artificial Sequence
  Description of Artificial Sequence: Synthetic oligonucleotide
  Epidermal growth factor receptor (EGFR), ERBB1 phosphotyrosine kinase siRNA
atgaagaagacatggacgacgtg

SEQ ID NO: 8090 - DNA, 23 bp, Artificial Sequence
  Description of Artificial Sequence: Synthetic oligonucleotide
  Epidermal growth factor receptor (EGFR), ERBB1 phosphotyrosine kinase siRNA
tgaagaagacatggacgacgtgg

SEQ ID NO: 8091 - DNA, 23 bp, Artificial Sequence
  Description of Artificial Sequence: Synthetic oligonucleotide
  Epidermal growth factor receptor (EGFR), ERBB1 phosphotyrosine kinase siRNA
gaagaagacatggacgacgtggt

SEQ ID NO: 8092 - DNA, 23 bp, Artificial Sequence
  Description of Artificial Sequence: Synthetic oligonucleotide
  Epidermal growth factor receptor (EGFR), ERBB1 phosphotyrosine kinase siRNA
aagaagacatggacgacgtggtg

SEQ ID NO: 8093 - DNA, 23 bp, Artificial Sequence
  Description of Artificial Sequence: Synthetic oligonucleotide
  Epidermal growth factor receptor (EGFR), ERBB1 phosphotyrosine kinase siRNA
agaagacatggacgacgtggtgg

SEQ ID NO: 8094 - DNA, 23 bp, Artificial Sequence
  Description of Artificial Sequence: Synthetic oligonucleotide
  Epidermal growth factor receptor (EGFR), ERBB1 phosphotyrosine kinase siRNA
gaagacatggacgacgtggtgga

SEQ ID NO: 8095 - DNA, 23 bp, Artificial Sequence
  Description of Artificial Sequence: Synthetic oligonucleotide
  Epidermal growth factor receptor (EGFR), ERBB1 phosphotyrosine kinase siRNA
aagacatggacgacgtggtggat

SEQ ID NO: 8096 - DNA, 23 bp, Artificial Sequence
  Description of Artificial Sequence: Synthetic oligonucleotide
  Epidermal growth factor receptor (EGFR), ERBB1 phosphotyrosine kinase siRNA
agacatggacgacgtggtggatg

SEQ ID NO: 8097 - DNA, 23 bp, Artificial Sequence
  Description of Artificial Sequence: Synthetic oligonucleotide
  Epidermal growth factor receptor (EGFR), ERBB1 phosphotyrosine kinase siRNA
gacatggacgacgtggtggatgc

SEQ ID NO: 8098 - DNA, 23 bp, Artificial Sequence
  Description of Artificial Sequence: Synthetic oligonucleotide
  Epidermal growth factor receptor (EGFR), ERBB1 phosphotyrosine kinase siRNA
acatggacgacgtggtggatgcc

SEQ ID NO: 8099 - DNA, 23 bp, Artificial Sequence
  Description of Artificial Sequence: Synthetic oligonucleotide
  Epidermal growth factor receptor (EGFR), ERBB1 phosphotyrosine kinase siRNA
catggacgacgtggtggatgccg

SEQ ID NO: 8100 - DNA, 23 bp, Artificial Sequence
  Description of Artificial Sequence: Synthetic oligonucleotide
  Epidermal growth factor receptor (EGFR), ERBB1 phosphotyrosine kinase siRNA
atggacgacgtggtggatgccga

SEQ ID NO: 8101 - DNA, 23 bp, Artificial Sequence
  Description of Artificial Sequence: Synthetic oligonucleotide
  Epidermal growth factor receptor (EGFR), ERBB1 phosphotyrosine kinase siRNA
tggacgacgtggtggatgccgac

SEQ ID NO: 8102 - DNA, 23 bp, Artificial Sequence
  Description of Artificial Sequence: Synthetic oligonucleotide
  Epidermal growth factor receptor (EGFR), ERBB1 phosphotyrosine kinase siRNA
ggacgacgtggtggatgccgacg

SEQ ID NO: 8103 - DNA, 23 bp, Artificial Sequence
  Description of Artificial Sequence: Synthetic oligonucleotide
  Epidermal growth factor receptor (EGFR), ERBB1 phosphotyrosine kinase siRNA
gacgacgtggtggatgccgacga

SEQ ID NO: 8104 - DNA, 23 bp, Artificial Sequence
  Description of Artificial Sequence: Synthetic oligonucleotide
  Epidermal growth factor receptor (EGFR), ERBB1 phosphotyrosine kinase siRNA
acgacgtggtggatgccgacgag

SEQ ID NO: 8105 - DNA, 23 bp, Artificial Sequence
  Description of Artificial Sequence: Synthetic oligonucleotide
  Epidermal growth factor receptor (EGFR), ERBB1 phosphotyrosine kinase siRNA
cgacgtggtggatgccgacgagt

SEQ ID NO: 8106 - DNA, 23 bp, Artificial Sequence
  Description of Artificial Sequence: Synthetic oligonucleotide
  Epidermal growth factor receptor (EGFR), ERBB1 phosphotyrosine kinase siRNA
gacgtggtggatgccgacgagta

SEQ ID NO: 8107 - DNA, 23 bp, Artificial Sequence
  Description of Artificial Sequence: Synthetic oligonucleotide
  Epidermal growth factor receptor (EGFR), ERBB1 phosphotyrosine kinase siRNA
acgtggtggatgccgacgagtac

SEQ ID NO: 8108 - DNA, 23 bp, Artificial Sequence
  Description of Artificial Sequence: Synthetic oligonucleotide
  Epidermal growth factor receptor (EGFR), ERBB1 phosphotyrosine kinase siRNA
cgtggtggatgccgacgagtacc

SEQ ID NO: 8109 - DNA, 23 bp, Artificial Sequence
  Description of Artificial Sequence: Synthetic oligonucleotide
  Epidermal growth factor receptor (EGFR), ERBB1 phosphotyrosine kinase siRNA
gtggtggatgccgacgagtacct

SEQ ID NO: 8110 - DNA, 23 bp, Artificial Sequence
  Description of Artificial Sequence: Synthetic oligonucleotide
  Epidermal growth factor receptor (EGFR), ERBB1 phosphotyrosine kinase siRNA
tggtggatgccgacgagtacctc

SEQ ID NO: 8111 - DNA, 23 bp, Artificial Sequence
  Description of Artificial Sequence: Synthetic oligonucleotide
  Epidermal growth factor receptor (EGFR), ERBB1 phosphotyrosine kinase siRNA
ggtggatgccgacgagtacctca

SEQ ID NO: 8112 - DNA, 23 bp, Artificial Sequence
  Description of Artificial Sequence: Synthetic oligonucleotide
  Epidermal growth factor receptor (EGFR), ERBB1 phosphotyrosine kinase siRNA
gtggatgccgacgagtacctcat

SEQ ID NO: 8113 - DNA, 23 bp, Artificial Sequence
  Description of Artificial Sequence: Synthetic oligonucleotide
  Epidermal growth factor receptor (EGFR), ERBB1 phosphotyrosine kinase siRNA
tggatgccgacgagtacctcatc

SEQ ID NO: 8114 - DNA, 23 bp, Artificial Sequence
  Description of Artificial Sequence: Synthetic oligonucleotide
  Epidermal growth factor receptor (EGFR), ERBB1 phosphotyrosine kinase siRNA
ggatgccgacgagtacctcatcc

SEQ ID NO: 8115 - DNA, 23 bp, Artificial Sequence
  Description of Artificial Sequence: Synthetic oligonucleotide
  Epidermal growth factor receptor (EGFR), ERBB1 phosphotyrosine kinase siRNA
gatgccgacgagtacctcatccc

SEQ ID NO: 8116 - DNA, 23 bp, Artificial Sequence
  Description of Artificial Sequence: Synthetic oligonucleotide
  Epidermal growth factor receptor (EGFR), ERBB1 phosphotyrosine kinase siRNA
atgccgacgagtacctcatccca

SEQ ID NO: 8117 - DNA, 23 bp, Artificial Sequence
  Description of Artificial Sequence: Synthetic oligonucleotide
  Epidermal growth factor receptor (EGFR), ERBB1 phosphotyrosine kinase siRNA
tgccgacgagtacctcatcccac

SEQ ID NO: 8118 - DNA, 23 bp, Artificial Sequence
  Description of Artificial Sequence: Synthetic oligonucleotide
  Epidermal growth factor receptor (EGFR), ERBB1 phosphotyrosine kinase siRNA
gccgacgagtacctcatcccaca

SEQ ID NO: 8119 - DNA, 23 bp, Artificial Sequence
  Description of Artificial Sequence: Synthetic oligonucleotide
  Epidermal growth factor receptor (EGFR), ERBB1 phosphotyrosine kinase siRNA
ccgacgagtacctcatcccacag

SEQ ID NO: 8120 - DNA, 23 bp, Artificial Sequence
  Description of Artificial Sequence: Synthetic oligonucleotide
  Epidermal growth factor receptor (EGFR), ERBB1 phosphotyrosine kinase siRNA
cgacgagtacctcatcccacagc

SEQ ID NO: 8121 - DNA, 23 bp, Artificial Sequence
  Description of Artificial Sequence: Synthetic oligonucleotide
  Epidermal growth factor receptor (EGFR), ERBB1 phosphotyrosine kinase siRNA
gacgagtacctcatcccacagca

SEQ ID NO: 8122 - DNA, 23 bp, Artificial Sequence
  Description of Artificial Sequence: Synthetic oligonucleotide
  Epidermal growth factor receptor (EGFR), ERBB1 phosphotyrosine kinase siRNA
acgagtacctcatcccacagcag

SEQ ID NO: 8123 - DNA, 23 bp, Artificial Sequence
  Description of Artificial Sequence: Synthetic oligonucleotide
  Epidermal growth factor receptor (EGFR), ERBB1 phosphotyrosine kinase siRNA
cgagtacctcatcccacagcagg

SEQ ID NO: 8124 - DNA, 23 bp, Artificial Sequence
  Description of Artificial Sequence: Synthetic oligonucleotide
  Epidermal growth factor receptor (EGFR), ERBB1 phosphotyrosine kinase siRNA
gagtacctcatcccacagcaggg

SEQ ID NO: 8125 - DNA, 23 bp, Artificial Sequence
  Description of Artificial Sequence: Synthetic oligonucleotide
  Epidermal growth factor receptor (EGFR), ERBB1 phosphotyrosine kinase siRNA
agtacctcatcccacagcagggc

SEQ ID NO: 8126 - DNA, 23 bp, Artificial Sequence
  Description of Artificial Sequence: Synthetic oligonucleotide
  Epidermal growth factor receptor (EGFR), ERBB1 phosphotyrosine kinase siRNA
gtacctcatcccacagcagggct

SEQ ID NO: 8127 - DNA, 23 bp, Artificial Sequence
  Description of Artificial Sequence: Synthetic oligonucleotide
  Epidermal growth factor receptor (EGFR), ERBB1 phosphotyrosine kinase siRNA
tacctcatcccacagcagggctt

SEQ ID NO: 8128 - DNA, 23 bp, Artificial Sequence
  Description of Artificial Sequence: Synthetic oligonucleotide
  Epidermal growth factor receptor (EGFR), ERBB1 phosphotyrosine kinase siRNA
acctcatcccacagcagggcttc

SEQ ID NO: 8129 - DNA, 23 bp, Artificial Sequence
  Description of Artificial Sequence: Synthetic oligonucleotide
  Epidermal growth factor receptor (EGFR), ERBB1 phosphotyrosine kinase siRNA
cctcatcccacagcagggcttct

SEQ ID NO: 8130 - DNA, 23 bp, Artificial Sequence
  Description of Artificial Sequence: Synthetic oligonucleotide
  Epidermal growth factor receptor (EGFR), ERBB1 phosphotyrosine kinase siRNA
ctcatcccacagcagggcttctt

SEQ ID NO: 8131 - DNA, 23 bp, Artificial Sequence
  Description of Artificial Sequence: Synthetic oligonucleotide
  Epidermal growth factor receptor (EGFR), ERBB1 phosphotyrosine kinase siRNA
tcatcccacagcagggcttcttc

SEQ ID NO: 8132 - DNA, 23 bp, Artificial Sequence
  Description of Artificial Sequence: Synthetic oligonucleotide
  Epidermal growth factor receptor (EGFR), ERBB1 phosphotyrosine kinase siRNA
catcccacagcagggcttcttca

SEQ ID NO: 8133 - DNA, 23 bp, Artificial Sequence
  Description of Artificial Sequence: Synthetic oligonucleotide
  Epidermal growth factor receptor (EGFR), ERBB1 phosphotyrosine kinase siRNA
atcccacagcagggcttcttcag

SEQ ID NO: 8134 - DNA, 23 bp, Artificial Sequence
  Description of Artificial Sequence: Synthetic oligonucleotide
  Epidermal growth factor receptor (EGFR), ERBB1 phosphotyrosine kinase siRNA
tcccacagcagggcttcttcagc

SEQ ID NO: 8135 - DNA, 23 bp, Artificial Sequence
  Description of Artificial Sequence: Synthetic oligonucleotide
  Epidermal growth factor receptor (EGFR), ERBB1 phosphotyrosine kinase siRNA
cccacagcagggcttcttcagca

SEQ ID NO: 8136 - DNA, 23 bp, Artificial Sequence
  Description of Artificial Sequence: Synthetic oligonucleotide
  Epidermal growth factor receptor (EGFR), ERBB1 phosphotyrosine kinase siRNA
ccacagcagggcttcttcagcag

SEQ ID NO: 8137 - DNA, 23 bp, Artificial Sequence
  Description of Artificial Sequence: Synthetic oligonucleotide
  Epidermal growth factor receptor (EGFR), ERBB1 phosphotyrosine kinase siRNA
cacagcagggcttcttcagcagc

SEQ ID NO: 8138 - DNA, 23 bp, Artificial Sequence
  Description of Artificial Sequence: Synthetic oligonucleotide
  Epidermal growth factor receptor (EGFR), ERBB1 phosphotyrosine kinase siRNA
acagcagggcttcttcagcagcc

SEQ ID NO: 8139 - DNA, 23 bp, Artificial Sequence
  Description of Artificial Sequence: Synthetic oligonucleotide
  Epidermal growth factor receptor (EGFR), ERBB1 phosphotyrosine kinase siRNA
cagcagggcttcttcagcagccc

SEQ ID NO: 8140 - DNA, 23 bp, Artificial Sequence
  Description of Artificial Sequence: Synthetic oligonucleotide
  Epidermal growth factor receptor (EGFR), ERBB1 phosphotyrosine kinase siRNA
agcagggcttcttcagcagcccc

SEQ ID NO: 8141 - DNA, 23 bp, Artificial Sequence
  Description of Artificial Sequence: Synthetic oligonucleotide
  Epidermal growth factor receptor (EGFR), ERBB1 phosphotyrosine kinase siRNA
gcagggcttcttcagcagcccct

SEQ ID NO: 8142 - DNA, 23 bp, Artificial Sequence
  Description of Artificial Sequence: Synthetic oligonucleotide
  Epidermal growth factor receptor (EGFR), ERBB1 phosphotyrosine kinase siRNA
cagggcttcttcagcagcccctc

SEQ ID NO: 8143 - DNA, 23 bp, Artificial Sequence
  Description of Artificial Sequence: Synthetic oligonucleotide
  Epidermal growth factor receptor (EGFR), ERBB1 phosphotyrosine kinase siRNA
agggcttcttcagcagcccctcc

SEQ ID NO: 8144 - DNA, 23 bp, Artificial Sequence
  Description of Artificial Sequence: Synthetic oligonucleotide
  Epidermal growth factor receptor (EGFR), ERBB1 phosphotyrosine kinase siRNA
gggcttcttcagcagcccctcca

SEQ ID NO: 8145 - DNA, 23 bp, Artificial Sequence
  Description of Artificial Sequence: Synthetic oligonucleotide
  Epidermal growth factor receptor (EGFR), ERBB1 phosphotyrosine kinase siRNA
ggcttcttcagcagcccctccac

SEQ ID NO: 8146 - DNA, 23 bp, Artificial Sequence
  Description of Artificial Sequence: Synthetic oligonucleotide
  Epidermal growth factor receptor (EGFR), ERBB1 phosphotyrosine kinase siRNA
gcttcttcagcagcccctccacg

SEQ ID NO: 8147 - DNA, 23 bp, Artificial Sequence
  Description of Artificial Sequence: Synthetic oligonucleotide
  Epidermal growth factor receptor (EGFR), ERBB1 phosphotyrosine kinase siRNA
cttcttcagcagcccctccacgt

SEQ ID NO: 8148 - DNA, 23 bp, Artificial Sequence
  Description of Artificial Sequence: Synthetic oligonucleotide
  Epidermal growth factor receptor (EGFR), ERBB1 phosphotyrosine kinase siRNA
ttcttcagcagcccctccacgtc

SEQ ID NO: 8149 - DNA, 23 bp, Artificial Sequence
  Description of Artificial Sequence: Synthetic oligonucleotide
  Epidermal growth factor receptor (EGFR), ERBB1 phosphotyrosine kinase siRNA
tcttcagcagcccctccacgtca

SEQ ID NO: 8150 - DNA, 23 bp, Artificial Sequence
  Description of Artificial Sequence: Synthetic oligonucleotide
  Epidermal growth factor receptor (EGFR), ERBB1 phosphotyrosine kinase siRNA
cttcagcagcccctccacgtcac

SEQ ID NO: 8151 - DNA, 23 bp, Artificial Sequence
  Description of Artificial Sequence: Synthetic oligonucleotide
  Epidermal growth factor receptor (EGFR), ERBB1 phosphotyrosine kinase siRNA
ttcagcagcccctccacgtcacg

SEQ ID NO: 8152 - DNA, 23 bp, Artificial Sequence
  Description of Artificial Sequence: Synthetic oligonucleotide
  Epidermal growth factor receptor (EGFR), ERBB1 phosphotyrosine kinase siRNA
tcagcagcccctccacgtcacgg

SEQ ID NO: 8153 - DNA, 23 bp, Artificial Sequence
  Description of Artificial Sequence: Synthetic oligonucleotide
  Epidermal growth factor receptor (EGFR), ERBB1 phosphotyrosine kinase siRNA
cagcagcccctccacgtcacgga

SEQ ID NO: 8154 - DNA, 23 bp, Artificial Sequence
  Description of Artificial Sequence: Synthetic oligonucleotide
  Epidermal growth factor receptor (EGFR), ERBB1 phosphotyrosine kinase siRNA
agcagcccctccacgtcacggac

SEQ ID NO: 8155 - DNA, 23 bp, Artificial Sequence
  Description of Artificial Sequence: Synthetic oligonucleotide
  Epidermal growth factor receptor (EGFR), ERBB1 phosphotyrosine kinase siRNA
gcagcccctccacgtcacggact

SEQ ID NO: 8156 - DNA, 23 bp, Artificial Sequence
  Description of Artificial Sequence: Synthetic oligonucleotide
  Epidermal growth factor receptor (EGFR), ERBB1 phosphotyrosine kinase siRNA
cagcccctccacgtcacggactc

SEQ ID NO: 8157 - DNA, 23 bp, Artificial Sequence
  Description of Artificial Sequence: Synthetic oligonucleotide
  Epidermal growth factor receptor (EGFR), ERBB1 phosphotyrosine kinase siRNA
agcccctccacgtcacggactcc

SEQ ID NO: 8158 - DNA, 23 bp, Artificial Sequence
  Description of Artificial Sequence: Synthetic oligonucleotide
  Epidermal growth factor receptor (EGFR), ERBB1 phosphotyrosine kinase siRNA
gcccctccacgtcacggactccc

SEQ ID NO: 8159 - DNA, 23 bp, Artificial Sequence
  Description of Artificial Sequence: Synthetic oligonucleotide
  Epidermal growth factor receptor (EGFR), ERBB1 phosphotyrosine kinase siRNA
cccctccacgtcacggactcccc

SEQ ID NO: 8160 - DNA, 23 bp, Artificial Sequence
  Description of Artificial Sequence: Synthetic oligonucleotide
  Epidermal growth factor receptor (EGFR), ERBB1 phosphotyrosine kinase siRNA
ccctccacgtcacggactcccct

SEQ ID NO: 8161 - DNA, 23 bp, Artificial Sequence
  Description of Artificial Sequence: Synthetic oligonucleotide
  Epidermal growth factor receptor (EGFR), ERBB1 phosphotyrosine kinase siRNA
cctccacgtcacggactcccctc

SEQ ID NO: 8162 - DNA, 23 bp, Artificial Sequence
  Description of Artificial Sequence: Synthetic oligonucleotide
  Epidermal growth factor receptor (EGFR), ERBB1 phosphotyrosine kinase siRNA
ctccacgtcacggactcccctcc

SEQ ID NO: 8163 - DNA, 23 bp, Artificial Sequence
  Description of Artificial Sequence: Synthetic oligonucleotide
  Epidermal growth factor receptor (EGFR), ERBB1 phosphotyrosine kinase siRNA
tccacgtcacggactcccctcct

SEQ ID NO: 8164 - DNA, 23 bp, Artificial Sequence
  Description of Artificial Sequence: Synthetic oligonucleotide
  Epidermal growth factor receptor (EGFR), ERBB1 phosphotyrosine kinase siRNA
ccacgtcacggactcccctcctg

SEQ ID NO: 8165 - DNA, 23 bp, Artificial Sequence
  Description of Artificial Sequence: Synthetic oligonucleotide
  Epidermal growth factor receptor (EGFR), ERBB1 phosphotyrosine kinase siRNA
cacgtcacggactcccctcctga

SEQ ID NO: 8166 - DNA, 23 bp, Artificial Sequence
  Description of Artificial Sequence: Synthetic oligonucleotide
  Epidermal growth factor receptor (EGFR), ERBB1 phosphotyrosine kinase siRNA
acgtcacggactcccctcctgag

SEQ ID NO: 8167 - DNA, 23 bp, Artificial Sequence
  Description of Artificial Sequence: Synthetic oligonucleotide
  Epidermal growth factor receptor (EGFR), ERBB1 phosphotyrosine kinase siRNA
cgtcacggactcccctcctgagc

SEQ ID NO: 8168 - DNA, 23 bp, Artificial Sequence
  Description of Artificial Sequence: Synthetic oligonucleotide
  Epidermal growth factor receptor (EGFR), ERBB1 phosphotyrosine kinase siRNA
gtcacggactcccctcctgagct

SEQ ID NO: 8169 - DNA, 23 bp, Artificial Sequence
  Description of Artificial Sequence: Synthetic oligonucleotide
  Epidermal growth factor receptor (EGFR), ERBB1 phosphotyrosine kinase siRNA
tcacggactcccctcctgagctc

SEQ ID NO: 8170 - DNA, 23 bp, Artificial Sequence
  Description of Artificial Sequence: Synthetic oligonucleotide
  Epidermal growth factor receptor (EGFR), ERBB1 phosphotyrosine kinase siRNA
cacggactcccctcctgagctct

SEQ ID NO: 8171 - DNA, 23 bp, Artificial Sequence
  Description of Artificial Sequence: Synthetic oligonucleotide
  Epidermal growth factor receptor (EGFR), ERBB1 phosphotyrosine kinase siRNA
acggactcccctcctgagctctc

SEQ ID NO: 8172 - DNA, 23 bp, Artificial Sequence
  Description of Artificial Sequence: Synthetic oligonucleotide
  Epidermal growth factor receptor (EGFR), ERBB1 phosphotyrosine kinase siRNA
cggactcccctcctgagctctct

SEQ ID NO: 8173 - DNA, 23 bp, Artificial Sequence
  Description of Artificial Sequence: Synthetic oligonucleotide
  Epidermal growth factor receptor (EGFR), ERBB1 phosphotyrosine kinase siRNA
ggactcccctcctgagctctctg

SEQ ID NO: 8174 - DNA, 23 bp, Artificial Sequence
  Description of Artificial Sequence: Synthetic oligonucleotide
  Epidermal growth factor receptor (EGFR), ERBB1 phosphotyrosine kinase siRNA
gactcccctcctgagctctctga

SEQ ID NO: 8175 - DNA, 23 bp, Artificial Sequence
  Description of Artificial Sequence: Synthetic oligonucleotide
  Epidermal growth factor receptor (EGFR), ERBB1 phosphotyrosine kinase siRNA
actcccctcctgagctctctgag

SEQ ID NO: 8176 - DNA, 23 bp, Artificial Sequence
  Description of Artificial Sequence: Synthetic oligonucleotide
  Epidermal growth factor receptor (EGFR), ERBB1 phosphotyrosine kinase siRNA
ctcccctcctgagctctctgagt

SEQ ID NO: 8177 - DNA, 23 bp, Artificial Sequence
  Description of Artificial Sequence: Synthetic oligonucleotide
  Epidermal growth factor receptor (EGFR), ERBB1 phosphotyrosine kinase siRNA
tcccctcctgagctctctgagtg

SEQ ID NO: 8178 - DNA, 23 bp, Artificial Sequence
  Description of Artificial Sequence: Synthetic oligonucleotide
  Epidermal growth factor receptor (EGFR), ERBB1 phosphotyrosine kinase siRNA
cccctcctgagctctctgagtgc

SEQ ID NO: 8179 - DNA, 23 bp, Artificial Sequence
  Description of Artificial Sequence: Synthetic oligonucleotide
  Epidermal growth factor receptor (EGFR), ERBB1 phosphotyrosine kinase siRNA
ccctcctgagctctctgagtgca

SEQ ID NO: 8180 - DNA, 23 bp, Artificial Sequence
  Description of Artificial Sequence: Synthetic oligonucleotide
  Epidermal growth factor receptor (EGFR), ERBB1 phosphotyrosine kinase siRNA
cctcctgagctctctgagtgcaa

SEQ ID NO: 8181 - DNA, 23 bp, Artificial Sequence
  Description of Artificial Sequence: Synthetic oligonucleotide
  Epidermal growth factor receptor (EGFR), ERBB1 phosphotyrosine kinase siRNA
ctcctgagctctctgagtgcaac

SEQ ID NO: 8182 - DNA, 23 bp, Artificial Sequence
  Description of Artificial Sequence: Synthetic oligonucleotide
  Epidermal growth factor receptor (EGFR), ERBB1 phosphotyrosine kinase siRNA
tcctgagctctctgagtgcaacc

SEQ ID NO: 8183 - DNA, 23 bp, Artificial Sequence
  Description of Artificial Sequence: Synthetic oligonucleotide
  Epidermal growth factor receptor (EGFR), ERBB1 phosphotyrosine kinase siRNA
cctgagctctctgagtgcaacca

SEQ ID NO: 8184 - DNA, 23 bp, Artificial Sequence
  Description of Artificial Sequence: Synthetic oligonucleotide
  Epidermal growth factor receptor (EGFR), ERBB1 phosphotyrosine kinase siRNA
ctgagctctctgagtgcaaccag

SEQ ID NO: 8185 - DNA, 23 bp, Artificial Sequence
  Description of Artificial Sequence: Synthetic oligonucleotide
  Epidermal growth factor receptor (EGFR), ERBB1 phosphotyrosine kinase siRNA
tgagctctctgagtgcaaccagc

SEQ ID NO: 8186 - DNA, 23 bp, Artificial Sequence
  Description of Artificial Sequence: Synthetic oligonucleotide
  Epidermal growth factor receptor (EGFR), ERBB1 phosphotyrosine kinase siRNA
gagctctctgagtgcaaccagca

SEQ ID NO: 8187 - DNA, 23 bp, Artificial Sequence
  Description of Artificial Sequence: Synthetic oligonucleotide
  Epidermal growth factor receptor (EGFR), ERBB1 phosphotyrosine kinase siRNA
agctctctgagtgcaaccagcaa

SEQ ID NO: 8188 - DNA, 23 bp, Artificial Sequence
  Description of Artificial Sequence: Synthetic oligonucleotide
  Epidermal growth factor receptor (EGFR), ERBB1 phosphotyrosine kinase siRNA
gctctctgagtgcaaccagcaac

SEQ ID NO: 8189 - DNA, 23 bp, Artificial Sequence
  Description of Artificial Sequence: Synthetic oligonucleotide
  Epidermal growth factor receptor (EGFR), ERBB1 phosphotyrosine kinase siRNA
ctctctgagtgcaaccagcaaca

SEQ ID NO: 8190 - DNA, 23 bp, Artificial Sequence
  Description of Artificial Sequence: Synthetic oligonucleotide
  Epidermal growth factor receptor (EGFR), ERBB1 phosphotyrosine kinase siRNA
tctctgagtgcaaccagcaacaa

SEQ ID NO: 8191 - DNA, 23 bp, Artificial Sequence
  Description of Artificial Sequence: Synthetic oligonucleotide
  Epidermal growth factor receptor (EGFR), ERBB1 phosphotyrosine kinase siRNA
ctctgagtgcaaccagcaacaat

SEQ ID NO: 8192 - DNA, 23 bp, Artificial Sequence
  Description of Artificial Sequence: Synthetic oligonucleotide
  Epidermal growth factor receptor (EGFR), ERBB1 phosphotyrosine kinase siRNA
tctgagtgcaaccagcaacaatt

SEQ ID NO: 8193 - DNA, 23 bp, Artificial Sequence
  Description of Artificial Sequence: Synthetic oligonucleotide
  Epidermal growth factor receptor (EGFR), ERBB1 phosphotyrosine kinase siRNA
ctgagtgcaaccagcaacaattc

SEQ ID NO: 8194 - DNA, 23 bp, Artificial Sequence
  Description of Artificial Sequence: Synthetic oligonucleotide
  Epidermal growth factor receptor (EGFR), ERBB1 phosphotyrosine kinase siRNA
tgagtgcaaccagcaacaattcc

SEQ ID NO: 8195 - DNA, 23 bp, Artificial Sequence
  Description of Artificial Sequence: Synthetic oligonucleotide
  Epidermal growth factor receptor (EGFR), ERBB1 phosphotyrosine kinase siRNA
gagtgcaaccagcaacaattcca

SEQ ID NO: 8196 - DNA, 23 bp, Artificial Sequence
  Description of Artificial Sequence: Synthetic oligonucleotide
  Epidermal growth factor receptor (EGFR), ERBB1 phosphotyrosine kinase siRNA
agtgcaaccagcaacaattccac

SEQ ID NO: 8197 - DNA, 23 bp, Artificial Sequence
  Description of Artificial Sequence: Synthetic oligonucleotide
  Epidermal growth factor receptor (EGFR), ERBB1 phosphotyrosine kinase siRNA
gtgcaaccagcaacaattccacc

SEQ ID NO: 8198 - DNA, 23 bp, Artificial Sequence
  Description of Artificial Sequence: Synthetic oligonucleotide
  Epidermal growth factor receptor (EGFR), ERBB1 phosphotyrosine kinase siRNA
tgcaaccagcaacaattccaccg

SEQ ID NO: 8199 - DNA, 23 bp, Artificial Sequence
  Description of Artificial Sequence: Synthetic oligonucleotide
  Epidermal growth factor receptor (EGFR), ERBB1 phosphotyrosine kinase siRNA
gcaaccagcaacaattccaccgt

SEQ ID NO: 8200 - DNA, 23 bp, Artificial Sequence
  Description of Artificial Sequence: Synthetic oligonucleotide
  Epidermal growth factor receptor (EGFR), ERBB1 phosphotyrosine kinase siRNA
caaccagcaacaattccaccgtg

SEQ ID NO: 8201 - DNA, 23 bp, Artificial Sequence
  Description of Artificial Sequence: Synthetic oligonucleotide
  Epidermal growth factor receptor (EGFR), ERBB1 phosphotyrosine kinase siRNA
aaccagcaacaattccaccgtgg

SEQ ID NO: 8202 - DNA, 23 bp, Artificial Sequence
  Description of Artificial Sequence: Synthetic oligonucleotide
  Epidermal growth factor receptor (EGFR), ERBB1 phosphotyrosine kinase siRNA
accagcaacaattccaccgtggc

SEQ ID NO: 8203 - DNA, 23 bp, Artificial Sequence
  Description of Artificial Sequence: Synthetic oligonucleotide
  Epidermal growth factor receptor (EGFR), ERBB1 phosphotyrosine kinase siRNA
ccagcaacaattccaccgtggct

SEQ ID NO: 8204 - DNA, 23 bp, Artificial Sequence
  Description of Artificial Sequence: Synthetic oligonucleotide
  Epidermal growth factor receptor (EGFR), ERBB1 phosphotyrosine kinase siRNA
cagcaacaattccaccgtggctt

SEQ ID NO: 8205 - DNA, 23 bp, Artificial Sequence
  Description of Artificial Sequence: Synthetic oligonucleotide
  Epidermal growth factor receptor (EGFR), ERBB1 phosphotyrosine kinase siRNA
agcaacaattccaccgtggcttg

SEQ ID NO: 8206 - DNA, 23 bp, Artificial Sequence
  Description of Artificial Sequence: Synthetic oligonucleotide
  Epidermal growth factor receptor (EGFR), ERBB1 phosphotyrosine kinase siRNA
gcaacaattccaccgtggcttgc

SEQ ID NO: 8207 - DNA, 23 bp, Artificial Sequence
  Description of Artificial Sequence: Synthetic oligonucleotide
  Epidermal growth factor receptor (EGFR), ERBB1 phosphotyrosine kinase siRNA
caacaattccaccgtggcttgca

SEQ ID NO: 8208 - DNA, 23 bp, Artificial Sequence
  Description of Artificial Sequence: Synthetic oligonucleotide
  Epidermal growth factor receptor (EGFR), ERBB1 phosphotyrosine kinase siRNA
aacaattccaccgtggcttgcat

SEQ ID NO: 8209 - DNA, 23 bp, Artificial Sequence
  Description of Artificial Sequence: Synthetic oligonucleotide
  Epidermal growth factor receptor (EGFR), ERBB1 phosphotyrosine kinase siRNA
acaattccaccgtggcttgcatt

SEQ ID NO: 8210 - DNA, 23 bp, Artificial Sequence
  Description of Artificial Sequence: Synthetic oligonucleotide
  Epidermal growth factor receptor (EGFR), ERBB1 phosphotyrosine kinase siRNA
caattccaccgtggcttgcattg

SEQ ID NO: 8211 - DNA, 23 bp, Artificial Sequence
  Description of Artificial Sequence: Synthetic oligonucleotide
  Epidermal growth factor receptor (EGFR), ERBB1 phosphotyrosine kinase siRNA
aattccaccgtggcttgcattga

SEQ ID NO: 8212 - DNA, 23 bp, Artificial Sequence
  Description of Artificial Sequence: Synthetic oligonucleotide
  Epidermal growth factor receptor (EGFR), ERBB1 phosphotyrosine kinase siRNA
attccaccgtggcttgcattgat

SEQ ID NO: 8213 - DNA, 23 bp, Artificial Sequence
  Description of Artificial Sequence: Synthetic oligonucleotide
  Epidermal growth factor receptor (EGFR), ERBB1 phosphotyrosine kinase siRNA
ttccaccgtggcttgcattgata

SEQ ID NO: 8214 - DNA, 23 bp, Artificial Sequence
  Description of Artificial Sequence: Synthetic oligonucleotide
  Epidermal growth factor receptor (EGFR), ERBB1 phosphotyrosine kinase siRNA
tccaccgtggcttgcattgatag

SEQ ID NO: 8215 - DNA, 23 bp, Artificial Sequence
  Description of Artificial Sequence: Synthetic oligonucleotide
  Epidermal growth factor receptor (EGFR), ERBB1 phosphotyrosine kinase siRNA
ccaccgtggcttgcattgataga

SEQ ID NO: 8216 - DNA, 23 bp, Artificial Sequence
  Description of Artificial Sequence: Synthetic oligonucleotide
  Epidermal growth factor receptor (EGFR), ERBB1 phosphotyrosine kinase siRNA
caccgtggcttgcattgatagaa

SEQ ID NO: 8217 - DNA, 23 bp, Artificial Sequence
  Description of Artificial Sequence: Synthetic oligonucleotide
  Epidermal growth factor receptor (EGFR), ERBB1 phosphotyrosine kinase siRNA
accgtggcttgcattgatagaaa

SEQ ID NO: 8218 - DNA, 23 bp, Artificial Sequence
  Description of Artificial Sequence: Synthetic oligonucleotide
  Epidermal growth factor receptor (EGFR), ERBB1 phosphotyrosine kinase siRNA
ccgtggcttgcattgatagaaat

SEQ ID NO: 8219 - DNA, 23 bp, Artificial Sequence
  Description of Artificial Sequence: Synthetic oligonucleotide
  Epidermal growth factor receptor (EGFR), ERBB1 phosphotyrosine kinase siRNA
cgtggcttgcattgatagaaatg

SEQ ID NO: 8220 - DNA, 23 bp, Artificial Sequence
  Description of Artificial Sequence: Synthetic oligonucleotide
  Epidermal growth factor receptor (EGFR), ERBB1 phosphotyrosine kinase siRNA
gtggcttgcattgatagaaatgg

SEQ ID NO: 8221 - DNA, 23 bp, Artificial Sequence
  Description of Artificial Sequence: Synthetic oligonucleotide
  Epidermal growth factor receptor (EGFR), ERBB1 phosphotyrosine kinase siRNA
tggcttgcattgatagaaatggg

SEQ ID NO: 8222 - DNA, 23 bp, Artificial Sequence
  Description of Artificial Sequence: Synthetic oligonucleotide
  Epidermal growth factor receptor (EGFR), ERBB1 phosphotyrosine kinase siRNA
ggcttgcattgatagaaatgggc

SEQ ID NO: 8223 - DNA, 23 bp, Artificial Sequence
  Description of Artificial Sequence: Synthetic oligonucleotide
  Epidermal growth factor receptor (EGFR), ERBB1 phosphotyrosine kinase siRNA
gcttgcattgatagaaatgggct

SEQ ID NO: 8224 - DNA, 23 bp, Artificial Sequence
  Description of Artificial Sequence: Synthetic oligonucleotide
  Epidermal growth factor receptor (EGFR), ERBB1 phosphotyrosine kinase siRNA
cttgcattgatagaaatgggctg

SEQ ID NO: 8225 - DNA, 23 bp, Artificial Sequence
  Description of Artificial Sequence: Synthetic oligonucleotide
  Epidermal growth factor receptor (EGFR), ERBB1 phosphotyrosine kinase siRNA
ttgcattgatagaaatgggctgc

SEQ ID NO: 8226 - DNA, 23 bp, Artificial Sequence
  Description of Artificial Sequence: Synthetic oligonucleotide
  Epidermal growth factor receptor (EGFR), ERBB1 phosphotyrosine kinase siRNA
tgcattgatagaaatgggctgca

SEQ ID NO: 8227 - DNA, 23 bp, Artificial Sequence
  Description of Artificial Sequence: Synthetic oligonucleotide
  Epidermal growth factor receptor (EGFR), ERBB1 phosphotyrosine kinase siRNA
gcattgatagaaatgggctgcaa

SEQ ID NO: 8228 - DNA, 23 bp, Artificial Sequence
  Description of Artificial Sequence: Synthetic oligonucleotide
  Epidermal growth factor receptor (EGFR), ERBB1 phosphotyrosine kinase siRNA
cattgatagaaatgggctgcaaa

SEQ ID NO: 8229 - DNA, 23 bp, Artificial Sequence
  Description of Artificial Sequence: Synthetic oligonucleotide
  Epidermal growth factor receptor (EGFR), ERBB1 phosphotyrosine kinase siRNA
attgatagaaatgggctgcaaag

SEQ ID NO: 8230 - DNA, 23 bp, Artificial Sequence
  Description of Artificial Sequence: Synthetic oligonucleotide
  Epidermal growth factor receptor (EGFR), ERBB1 phosphotyrosine kinase siRNA
ttgatagaaatgggctgcaaagc

SEQ ID NO: 8231 - DNA, 23 bp, Artificial Sequence
  Description of Artificial Sequence: Synthetic oligonucleotide
  Epidermal growth factor receptor (EGFR), ERBB1 phosphotyrosine kinase siRNA
tgatagaaatgggctgcaaagct

SEQ ID NO: 8232 - DNA, 23 bp, Artificial Sequence
  Description of Artificial Sequence: Synthetic oligonucleotide
  Epidermal growth factor receptor (EGFR), ERBB1 phosphotyrosine kinase siRNA
gatagaaatgggctgcaaagctg

SEQ ID NO: 8233 - DNA, 23 bp, Artificial Sequence
  Description of Artificial Sequence: Synthetic oligonucleotide
  Epidermal growth factor receptor (EGFR), ERBB1 phosphotyrosine kinase siRNA
atagaaatgggctgcaaagctgt

SEQ ID NO: 8234 - DNA, 23 bp, Artificial Sequence
  Description of Artificial Sequence: Synthetic oligonucleotide
  Epidermal growth factor receptor (EGFR), ERBB1 phosphotyrosine kinase siRNA
tagaaatgggctgcaaagctgtc

SEQ ID NO: 8235 - DNA, 23 bp, Artificial Sequence
  Description of Artificial Sequence: Synthetic oligonucleotide
  Epidermal growth factor receptor (EGFR), ERBB1 phosphotyrosine kinase siRNA
agaaatgggctgcaaagctgtcc

SEQ ID NO: 8236 - DNA, 23 bp, Artificial Sequence
  Description of Artificial Sequence: Synthetic oligonucleotide
  Epidermal growth factor receptor (EGFR), ERBB1 phosphotyrosine kinase siRNA
gaaatgggctgcaaagctgtccc

SEQ ID NO: 8237 - DNA, 23 bp, Artificial Sequence
  Description of Artificial Sequence: Synthetic oligonucleotide
  Epidermal growth factor receptor (EGFR), ERBB1 phosphotyrosine kinase siRNA
aaatgggctgcaaagctgtccca

SEQ ID NO: 8238 - DNA, 23 bp, Artificial Sequence
  Description of Artificial Sequence: Synthetic oligonucleotide
  Epidermal growth factor receptor (EGFR), ERBB1 phosphotyrosine kinase siRNA
aatgggctgcaaagctgtcccat

SEQ ID NO: 8239 - DNA, 23 bp, Artificial Sequence
  Description of Artificial Sequence: Synthetic oligonucleotide
  Epidermal growth factor receptor (EGFR), ERBB1 phosphotyrosine kinase siRNA
atgggctgcaaagctgtcccatc

SEQ ID NO: 8240 - DNA, 23 bp, Artificial Sequence
  Description of Artificial Sequence: Synthetic oligonucleotide
  Epidermal growth factor receptor (EGFR), ERBB1 phosphotyrosine kinase siRNA
tgggctgcaaagctgtcccatca

SEQ ID NO: 8241 - DNA, 23 bp, Artificial Sequence
  Description of Artificial Sequence: Synthetic oligonucleotide
  Epidermal growth factor receptor (EGFR), ERBB1 phosphotyrosine kinase siRNA
gggctgcaaagctgtcccatcaa

SEQ ID NO: 8242 - DNA, 23 bp, Artificial Sequence
  Description of Artificial Sequence: Synthetic oligonucleotide
  Epidermal growth factor receptor (EGFR), ERBB1 phosphotyrosine kinase siRNA
ggctgcaaagctgtcccatcaag

SEQ ID NO: 8243 - DNA, 23 bp, Artificial Sequence
  Description of Artificial Sequence: Synthetic oligonucleotide
  Epidermal growth factor receptor (EGFR), ERBB1 phosphotyrosine kinase siRNA
gctgcaaagctgtcccatcaagg

SEQ ID NO: 8244 - DNA, 23 bp, Artificial Sequence
  Description of Artificial Sequence: Synthetic oligonucleotide
  Epidermal growth factor receptor (EGFR), ERBB1 phosphotyrosine kinase siRNA
ctgcaaagctgtcccatcaagga

SEQ ID NO: 8245 - DNA, 23 bp, Artificial Sequence
  Description of Artificial Sequence: Synthetic oligonucleotide
  Epidermal growth factor receptor (EGFR), ERBB1 phosphotyrosine kinase siRNA
tgcaaagctgtcccatcaaggaa

SEQ ID NO: 8246 - DNA, 23 bp, Artificial Sequence
  Description of Artificial Sequence: Synthetic oligonucleotide
  Epidermal growth factor receptor (EGFR), ERBB1 phosphotyrosine kinase siRNA
gcaaagctgtcccatcaaggaag

SEQ ID NO: 8247 - DNA, 23 bp, Artificial Sequence
  Description of Artificial Sequence: Synthetic oligonucleotide
  Epidermal growth factor receptor (EGFR), ERBB1 phosphotyrosine kinase siRNA
caaagctgtcccatcaaggaaga

SEQ ID NO: 8248 - DNA, 23 bp, Artificial Sequence
  Description of Artificial Sequence: Synthetic oligonucleotide
  Epidermal growth factor receptor (EGFR), ERBB1 phosphotyrosine kinase siRNA
aaagctgtcccatcaaggaagac

SEQ ID NO: 8249 - DNA, 23 bp, Artificial Sequence
  Description of Artificial Sequence: Synthetic oligonucleotide
  Epidermal growth factor receptor (EGFR), ERBB1 phosphotyrosine kinase siRNA
aagctgtcccatcaaggaagaca

SEQ ID NO: 8250 - DNA, 23 bp, Artificial Sequence
  Description of Artificial Sequence: Synthetic oligonucleotide
  Epidermal growth factor receptor (EGFR), ERBB1 phosphotyrosine kinase siRNA
agctgtcccatcaaggaagacag

SEQ ID NO: 8251 - DNA, 23 bp, Artificial Sequence
  Description of Artificial Sequence: Synthetic oligonucleotide
  Epidermal growth factor receptor (EGFR), ERBB1 phosphotyrosine kinase siRNA
gctgtcccatcaaggaagacagc

SEQ ID NO: 8252 - DNA, 23 bp, Artificial Sequence
  Description of Artificial Sequence: Synthetic oligonucleotide
  Epidermal growth factor receptor (EGFR), ERBB1 phosphotyrosine kinase siRNA
ctgtcccatcaaggaagacagct

SEQ ID NO: 8253 - DNA, 23 bp, Artificial Sequence
  Description of Artificial Sequence: Synthetic oligonucleotide
  Epidermal growth factor receptor (EGFR), ERBB1 phosphotyrosine kinase siRNA
tgtcccatcaaggaagacagctt

SEQ ID NO: 8254 - DNA, 23 bp, Artificial Sequence
  Description of Artificial Sequence: Synthetic oligonucleotide
  Epidermal growth factor receptor (EGFR), ERBB1 phosphotyrosine kinase siRNA
gtcccatcaaggaagacagcttc

SEQ ID NO: 8255 - DNA, 23 bp, Artificial Sequence
  Description of Artificial Sequence: Synthetic oligonucleotide
  Epidermal growth factor receptor (EGFR), ERBB1 phosphotyrosine kinase siRNA
tcccatcaaggaagacagcttct

SEQ ID NO: 8256 - DNA, 23 bp, Artificial Sequence
  Description of Artificial Sequence: Synthetic oligonucleotide
  Epidermal growth factor receptor (EGFR), ERBB1 phosphotyrosine kinase siRNA
cccatcaaggaagacagcttctt

SEQ ID NO: 8257 - DNA, 23 bp, Artificial Sequence
  Description of Artificial Sequence: Synthetic oligonucleotide
  Epidermal growth factor receptor (EGFR), ERBB1 phosphotyrosine kinase siRNA
ccatcaaggaagacagcttcttg

SEQ ID NO: 8258 - DNA, 23 bp, Artificial Sequence
  Description of Artificial Sequence: Synthetic oligonucleotide
  Epidermal growth factor receptor (EGFR), ERBB1 phosphotyrosine kinase siRNA
catcaaggaagacagcttcttgc

SEQ ID NO: 8259 - DNA, 23 bp, Artificial Sequence
  Description of Artificial Sequence: Synthetic oligonucleotide
  Epidermal growth factor receptor (EGFR), ERBB1 phosphotyrosine kinase siRNA
atcaaggaagacagcttcttgca

SEQ ID NO: 8260 - DNA, 23 bp, Artificial Sequence
  Description of Artificial Sequence: Synthetic oligonucleotide
  Epidermal growth factor receptor (EGFR), ERBB1 phosphotyrosine kinase siRNA
tcaaggaagacagcttcttgcag

SEQ ID NO: 8261 - DNA, 23 bp, Artificial Sequence
  Description of Artificial Sequence: Synthetic oligonucleotide
  Epidermal growth factor receptor (EGFR), ERBB1 phosphotyrosine kinase siRNA
caaggaagacagcttcttgcagc

SEQ ID NO: 8262 - DNA, 23 bp, Artificial Sequence
  Description of Artificial Sequence: Synthetic oligonucleotide
  Epidermal growth factor receptor (EGFR), ERBB1 phosphotyrosine kinase siRNA
aaggaagacagcttcttgcagcg

SEQ ID NO: 8263 - DNA, 23 bp, Artificial Sequence
  Description of Artificial Sequence: Synthetic oligonucleotide
  Epidermal growth factor receptor (EGFR), ERBB1 phosphotyrosine kinase siRNA
aggaagacagcttcttgcagcga

SEQ ID NO: 8264 - DNA, 23 bp, Artificial Sequence
  Description of Artificial Sequence: Synthetic oligonucleotide
  Epidermal growth factor receptor (EGFR), ERBB1 phosphotyrosine kinase siRNA
ggaagacagcttcttgcagcgat

SEQ ID NO: 8265 - DNA, 23 bp, Artificial Sequence
  Description of Artificial Sequence: Synthetic oligonucleotide
  Epidermal growth factor receptor (EGFR), ERBB1 phosphotyrosine kinase siRNA
gaagacagcttcttgcagcgata

SEQ ID NO: 8266 - DNA, 23 bp, Artificial Sequence
  Description of Artificial Sequence: Synthetic oligonucleotide
  Epidermal growth factor receptor (EGFR), ERBB1 phosphotyrosine kinase siRNA
aagacagcttcttgcagcgatac

SEQ ID NO: 8267 - DNA, 23 bp, Artificial Sequence
  Description of Artificial Sequence: Synthetic oligonucleotide
  Epidermal growth factor receptor (EGFR), ERBB1 phosphotyrosine kinase siRNA
agacagcttcttgcagcgataca

SEQ ID NO: 8268 - DNA, 23 bp, Artificial Sequence
  Description of Artificial Sequence: Synthetic oligonucleotide
  Epidermal growth factor receptor (EGFR), ERBB1 phosphotyrosine kinase siRNA
gacagcttcttgcagcgatacag

SEQ ID NO: 8269 - DNA, 23 bp, Artificial Sequence
  Description of Artificial Sequence: Synthetic oligonucleotide
  Epidermal growth factor receptor (EGFR), ERBB1 phosphotyrosine kinase siRNA
acagcttcttgcagcgatacagc

SEQ ID NO: 8270 - DNA, 23 bp, Artificial Sequence
  Description of Artificial Sequence: Synthetic oligonucleotide
  Epidermal growth factor receptor (EGFR), ERBB1 phosphotyrosine kinase siRNA
cagcttcttgcagcgatacagct

SEQ ID NO: 8271 - DNA, 23 bp, Artificial Sequence
  Description of Artificial Sequence: Synthetic oligonucleotide
  Epidermal growth factor receptor (EGFR), ERBB1 phosphotyrosine kinase siRNA
agcttcttgcagcgatacagctc

SEQ ID NO: 8272 - DNA, 23 bp, Artificial Sequence
  Description of Artificial Sequence: Synthetic oligonucleotide
  Epidermal growth factor receptor (EGFR), ERBB1 phosphotyrosine kinase siRNA
gcttcttgcagcgatacagctca

SEQ ID NO: 8273 - DNA, 23 bp, Artificial Sequence
  Description of Artificial Sequence: Synthetic oligonucleotide
  Epidermal growth factor receptor (EGFR), ERBB1 phosphotyrosine kinase siRNA
cttcttgcagcgatacagctcag

SEQ ID NO: 8274 - DNA, 23 bp, Artificial Sequence
  Description of Artificial Sequence: Synthetic oligonucleotide
  Epidermal growth factor receptor (EGFR), ERBB1 phosphotyrosine kinase siRNA
ttcttgcagcgatacagctcaga

SEQ ID NO: 8275 - DNA, 23 bp, Artificial Sequence
  Description of Artificial Sequence: Synthetic oligonucleotide
  Epidermal growth factor receptor (EGFR), ERBB1 phosphotyrosine kinase siRNA
tcttgcagcgatacagctcagac

SEQ ID NO: 8276 - DNA, 23 bp, Artificial Sequence
  Description of Artificial Sequence: Synthetic oligonucleotide
  Epidermal growth factor receptor (EGFR), ERBB1 phosphotyrosine kinase siRNA
cttgcagcgatacagctcagacc

SEQ ID NO: 8277 - DNA, 23 bp, Artificial Sequence
  Description of Artificial Sequence: Synthetic oligonucleotide
  Epidermal growth factor receptor (EGFR), ERBB1 phosphotyrosine kinase siRNA
ttgcagcgatacagctcagaccc

SEQ ID NO: 8278 - DNA, 23 bp, Artificial Sequence
  Description of Artificial Sequence: Synthetic oligonucleotide
  Epidermal growth factor receptor (EGFR), ERBB1 phosphotyrosine kinase siRNA
tgcagcgatacagctcagacccc

SEQ ID NO: 8279 - DNA, 23 bp, Artificial Sequence
  Description of Artificial Sequence: Synthetic oligonucleotide
  Epidermal growth factor receptor (EGFR), ERBB1 phosphotyrosine kinase siRNA
gcagcgatacagctcagacccca

SEQ ID NO: 8280 - DNA, 23 bp, Artificial Sequence
  Description of Artificial Sequence: Synthetic oligonucleotide
  Epidermal growth factor receptor (EGFR), ERBB1 phosphotyrosine kinase siRNA
cagcgatacagctcagaccccac

SEQ ID NO: 8281 - DNA, 23 bp, Artificial Sequence
  Description of Artificial Sequence: Synthetic oligonucleotide
  Epidermal growth factor receptor (EGFR), ERBB1 phosphotyrosine kinase siRNA
agcgatacagctcagaccccaca

SEQ ID NO: 8282 - DNA, 23 bp, Artificial Sequence
  Description of Artificial Sequence: Synthetic oligonucleotide
  Epidermal growth factor receptor (EGFR), ERBB1 phosphotyrosine kinase siRNA
gcgatacagctcagaccccacag

SEQ ID NO: 8283 - DNA, 23 bp, Artificial Sequence
  Description of Artificial Sequence: Synthetic oligonucleotide
  Epidermal growth factor receptor (EGFR), ERBB1 phosphotyrosine kinase siRNA
cgatacagctcagaccccacagg

SEQ ID NO: 8284 - DNA, 23 bp, Artificial Sequence
  Description of Artificial Sequence: Synthetic oligonucleotide
  Epidermal growth factor receptor (EGFR), ERBB1 phosphotyrosine kinase siRNA
gatacagctcagaccccacaggc

SEQ ID NO: 8285 - DNA, 23 bp, Artificial Sequence
  Description of Artificial Sequence: Synthetic oligonucleotide
  Epidermal growth factor receptor (EGFR), ERBB1 phosphotyrosine kinase siRNA
atacagctcagaccccacaggcg

SEQ ID NO: 8286 - DNA, 23 bp, Artificial Sequence
  Description of Artificial Sequence: Synthetic oligonucleotide
  Epidermal growth factor receptor (EGFR), ERBB1 phosphotyrosine kinase siRNA
tacagctcagaccccacaggcgc

SEQ ID NO: 8287 - DNA, 23 bp, Artificial Sequence
  Description of Artificial Sequence: Synthetic oligonucleotide
  Epidermal growth factor receptor (EGFR), ERBB1 phosphotyrosine kinase siRNA
acagctcagaccccacaggcgcc

SEQ ID NO: 8288 - DNA, 23 bp, Artificial Sequence
  Description of Artificial Sequence: Synthetic oligonucleotide
  Epidermal growth factor receptor (EGFR), ERBB1 phosphotyrosine kinase siRNA
cagctcagaccccacaggcgcct

SEQ ID NO: 8289 - DNA, 23 bp, Artificial Sequence
  Description of Artificial Sequence: Synthetic oligonucleotide
  Epidermal growth factor receptor (EGFR), ERBB1 phosphotyrosine kinase siRNA
agctcagaccccacaggcgcctt

SEQ ID NO: 8290 - DNA, 23 bp, Artificial Sequence
  Description of Artificial Sequence: Synthetic oligonucleotide
  Epidermal growth factor receptor (EGFR), ERBB1 phosphotyrosine kinase siRNA
gctcagaccccacaggcgccttg

SEQ ID NO: 8291 - DNA, 23 bp, Artificial Sequence
  Description of Artificial Sequence: Synthetic oligonucleotide
  Epidermal growth factor receptor (EGFR), ERBB1 phosphotyrosine kinase siRNA
ctcagaccccacaggcgccttga

SEQ ID NO: 8292 - DNA, 23 bp, Artificial Sequence
  Description of Artificial Sequence: Synthetic oligonucleotide
  Epidermal growth factor receptor (EGFR), ERBB1 phosphotyrosine kinase siRNA
tcagaccccacaggcgccttgac

SEQ ID NO: 8293 - DNA, 23 bp, Artificial Sequence
  Description of Artificial Sequence: Synthetic oligonucleotide
  Epidermal growth factor receptor (EGFR), ERBB1 phosphotyrosine kinase siRNA
cagaccccacaggcgccttgact

SEQ ID NO: 8294 - DNA, 23 bp, Artificial Sequence
  Description of Artificial Sequence: Synthetic oligonucleotide
  Epidermal growth factor receptor (EGFR), ERBB1 phosphotyrosine kinase siRNA
agaccccacaggcgccttgactg

SEQ ID NO: 8295 - DNA, 23 bp, Artificial Sequence
  Description of Artificial Sequence: Synthetic oligonucleotide
  Epidermal growth factor receptor (EGFR), ERBB1 phosphotyrosine kinase siRNA
gaccccacaggcgccttgactga

SEQ ID NO: 8296 - DNA, 23 bp, Artificial Sequence
  Description of Artificial Sequence: Synthetic oligonucleotide
  Epidermal growth factor receptor (EGFR), ERBB1 phosphotyrosine kinase siRNA
accccacaggcgccttgactgag

SEQ ID NO: 8297 - DNA, 23 bp, Artificial Sequence
  Description of Artificial Sequence: Synthetic oligonucleotide
  Epidermal growth factor receptor (EGFR), ERBB1 phosphotyrosine kinase siRNA
ccccacaggcgccttgactgagg

SEQ ID NO: 8298 - DNA, 23 bp, Artificial Sequence
  Description of Artificial Sequence: Synthetic oligonucleotide
  Epidermal growth factor receptor (EGFR), ERBB1 phosphotyrosine kinase siRNA
cccacaggcgccttgactgagga

SEQ ID NO: 8299 - DNA, 23 bp, Artificial Sequence
  Description of Artificial Sequence: Synthetic oligonucleotide
  Epidermal growth factor receptor (EGFR), ERBB1 phosphotyrosine kinase siRNA
ccacaggcgccttgactgaggac

SEQ ID NO: 8300 - DNA, 23 bp, Artificial Sequence
  Description of Artificial Sequence: Synthetic oligonucleotide
  Epidermal growth factor receptor (EGFR), ERBB1 phosphotyrosine kinase siRNA
cacaggcgccttgactgaggaca

SEQ ID NO: 8301 - DNA, 23 bp, Artificial Sequence
  Description of Artificial Sequence: Synthetic oligonucleotide
  Epidermal growth factor receptor (EGFR), ERBB1 phosphotyrosine kinase siRNA
acaggcgccttgactgaggacag

SEQ ID NO: 8302 - DNA, 23 bp, Artificial Sequence
  Description of Artificial Sequence: Synthetic oligonucleotide
  Epidermal growth factor receptor (EGFR), ERBB1 phosphotyrosine kinase siRNA
caggcgccttgactgaggacagc

SEQ ID NO: 8303 - DNA, 23 bp, Artificial Sequence
  Description of Artificial Sequence: Synthetic oligonucleotide
  Epidermal growth factor receptor (EGFR), ERBB1 phosphotyrosine kinase siRNA
aggcgccttgactgaggacagca

SEQ ID NO: 8304 - DNA, 23 bp, Artificial Sequence
  Description of Artificial Sequence: Synthetic oligonucleotide
  Epidermal growth factor receptor (EGFR), ERBB1 phosphotyrosine kinase siRNA
ggcgccttgactgaggacagcat

SEQ ID NO: 8305 - DNA, 23 bp, Artificial Sequence
  Description of Artificial Sequence: Synthetic oligonucleotide
  Epidermal growth factor receptor (EGFR), ERBB1 phosphotyrosine kinase siRNA
gcgccttgactgaggacagcata

SEQ ID NO: 8306 - DNA, 23 bp, Artificial Sequence
  Description of Artificial Sequence: Synthetic oligonucleotide
  Epidermal growth factor receptor (EGFR), ERBB1 phosphotyrosine kinase siRNA
cgccttgactgaggacagcatag

SEQ ID NO: 8307 - DNA, 23 bp, Artificial Sequence
  Description of Artificial Sequence: Synthetic oligonucleotide
  Epidermal growth factor receptor (EGFR), ERBB1 phosphotyrosine kinase siRNA
gccttgactgaggacagcataga

SEQ ID NO: 8308 - DNA, 23 bp, Artificial Sequence
  Description of Artificial Sequence: Synthetic oligonucleotide
  Epidermal growth factor receptor (EGFR), ERBB1 phosphotyrosine kinase siRNA
ccttgactgaggacagcatagac

SEQ ID NO: 8309 - DNA, 23 bp, Artificial Sequence
  Description of Artificial Sequence: Synthetic oligonucleotide
  Epidermal growth factor receptor (EGFR), ERBB1 phosphotyrosine kinase siRNA
cttgactgaggacagcatagacg

SEQ ID NO: 8310 - DNA, 23 bp, Artificial Sequence
  Description of Artificial Sequence: Synthetic oligonucleotide
  Epidermal growth factor receptor (EGFR), ERBB1 phosphotyrosine kinase siRNA
ttgactgaggacagcatagacga

SEQ ID NO: 8311 - DNA, 23 bp, Artificial Sequence
  Description of Artificial Sequence: Synthetic oligonucleotide
  Epidermal growth factor receptor (EGFR), ERBB1 phosphotyrosine kinase siRNA
tgactgaggacagcatagacgac

SEQ ID NO: 8312 - DNA, 23 bp, Artificial Sequence
  Description of Artificial Sequence: Synthetic oligonucleotide
  Epidermal growth factor receptor (EGFR), ERBB1 phosphotyrosine kinase siRNA
gactgaggacagcatagacgaca

SEQ ID NO: 8313 - DNA, 23 bp, Artificial Sequence
  Description of Artificial Sequence: Synthetic oligonucleotide
  Epidermal growth factor receptor (EGFR), ERBB1 phosphotyrosine kinase siRNA
actgaggacagcatagacgacac

SEQ ID NO: 8314 - DNA, 23 bp, Artificial Sequence
  Description of Artificial Sequence: Synthetic oligonucleotide
  Epidermal growth factor receptor (EGFR), ERBB1 phosphotyrosine kinase siRNA
ctgaggacagcatagacgacacc

SEQ ID NO: 8315 - DNA, 23 bp, Artificial Sequence
  Description of Artificial Sequence: Synthetic oligonucleotide
  Epidermal growth factor receptor (EGFR), ERBB1 phosphotyrosine kinase siRNA
tgaggacagcatagacgacacct

SEQ ID NO: 8316 - DNA, 23 bp, Artificial Sequence
  Description of Artificial Sequence: Synthetic oligonucleotide
  Epidermal growth factor receptor (EGFR), ERBB1 phosphotyrosine kinase siRNA
gaggacagcatagacgacacctt

SEQ ID NO: 8317 - DNA, 23 bp, Artificial Sequence
  Description of Artificial Sequence: Synthetic oligonucleotide
  Epidermal growth factor receptor (EGFR), ERBB1 phosphotyrosine kinase siRNA
aggacagcatagacgacaccttc

SEQ ID NO: 8318 - DNA, 23 bp, Artificial Sequence
  Description of Artificial Sequence: Synthetic oligonucleotide
  Epidermal growth factor receptor (EGFR), ERBB1 phosphotyrosine kinase siRNA
ggacagcatagacgacaccttcc

SEQ ID NO: 8319 - DNA, 23 bp, Artificial Sequence
  Description of Artificial Sequence: Synthetic oligonucleotide
  Epidermal growth factor receptor (EGFR), ERBB1 phosphotyrosine kinase siRNA
gacagcatagacgacaccttcct

SEQ ID NO: 8320 - DNA, 23 bp, Artificial Sequence
  Description of Artificial Sequence: Synthetic oligonucleotide
  Epidermal growth factor receptor (EGFR), ERBB1 phosphotyrosine kinase siRNA
acagcatagacgacaccttcctc

SEQ ID NO: 8321 - DNA, 23 bp, Artificial Sequence
  Description of Artificial Sequence: Synthetic oligonucleotide
  Epidermal growth factor receptor (EGFR), ERBB1 phosphotyrosine kinase siRNA
cagcatagacgacaccttcctcc

SEQ ID NO: 8322 - DNA, 23 bp, Artificial Sequence
  Description of Artificial Sequence: Synthetic oligonucleotide
  Epidermal growth factor receptor (EGFR), ERBB1 phosphotyrosine kinase siRNA
agcatagacgacaccttcctccc

SEQ ID NO: 8323 - DNA, 23 bp, Artificial Sequence
  Description of Artificial Sequence: Synthetic oligonucleotide
  Epidermal growth factor receptor (EGFR), ERBB1 phosphotyrosine kinase siRNA
gcatagacgacaccttcctccca

SEQ ID NO: 8324 - DNA, 23 bp, Artificial Sequence
  Description of Artificial Sequence: Synthetic oligonucleotide
  Epidermal growth factor receptor (EGFR), ERBB1 phosphotyrosine kinase siRNA
catagacgacaccttcctcccag

SEQ ID NO: 8325 - DNA, 23 bp, Artificial Sequence
  Description of Artificial Sequence: Synthetic oligonucleotide
  Epidermal growth factor receptor (EGFR), ERBB1 phosphotyrosine kinase siRNA
atagacgacaccttcctcccagt

SEQ ID NO: 8326 - DNA, 23 bp, Artificial Sequence
  Description of Artificial Sequence: Synthetic oligonucleotide
  Epidermal growth factor receptor (EGFR), ERBB1 phosphotyrosine kinase siRNA
tagacgacaccttcctcccagtg

SEQ ID NO: 8327 - DNA, 23 bp, Artificial Sequence
  Description of Artificial Sequence: Synthetic oligonucleotide
  Epidermal growth factor receptor (EGFR), ERBB1 phosphotyrosine kinase siRNA
agacgacaccttcctcccagtgc

SEQ ID NO: 8328 - DNA, 23 bp, Artificial Sequence
  Description of Artificial Sequence: Synthetic oligonucleotide
  Epidermal growth factor receptor (EGFR), ERBB1 phosphotyrosine kinase siRNA
gacgacaccttcctcccagtgcc

SEQ ID NO: 8329 - DNA, 23 bp, Artificial Sequence
  Description of Artificial Sequence: Synthetic oligonucleotide
  Epidermal growth factor receptor (EGFR), ERBB1 phosphotyrosine kinase siRNA
acgacaccttcctcccagtgcct

SEQ ID NO: 8330 - DNA, 23 bp, Artificial Sequence
  Description of Artificial Sequence: Synthetic oligonucleotide
  Epidermal growth factor receptor (EGFR), ERBB1 phosphotyrosine kinase siRNA
cgacaccttcctcccagtgcctg

SEQ ID NO: 8331 - DNA, 23 bp, Artificial Sequence
  Description of Artificial Sequence: Synthetic oligonucleotide
  Epidermal growth factor receptor (EGFR), ERBB1 phosphotyrosine kinase siRNA
gacaccttcctcccagtgcctga

SEQ ID NO: 8332 - DNA, 23 bp, Artificial Sequence
  Description of Artificial Sequence: Synthetic oligonucleotide
  Epidermal growth factor receptor (EGFR), ERBB1 phosphotyrosine kinase siRNA
acaccttcctcccagtgcctgaa

SEQ ID NO: 8333 - DNA, 23 bp, Artificial Sequence
  Description of Artificial Sequence: Synthetic oligonucleotide
  Epidermal growth factor receptor (EGFR), ERBB1 phosphotyrosine kinase siRNA
caccttcctcccagtgcctgaat

SEQ ID NO: 8334 - DNA, 23 bp, Artificial Sequence
  Description of Artificial Sequence: Synthetic oligonucleotide
  Epidermal growth factor receptor (EGFR), ERBB1 phosphotyrosine kinase siRNA
accttcctcccagtgcctgaata

SEQ ID NO: 8335 - DNA, 23 bp, Artificial Sequence
  Description of Artificial Sequence: Synthetic oligonucleotide
  Epidermal growth factor receptor (EGFR), ERBB1 phosphotyrosine kinase siRNA
ccttcctcccagtgcctgaatac

SEQ ID NO: 8336 - DNA, 23 bp, Artificial Sequence
  Description of Artificial Sequence: Synthetic oligonucleotide
  Epidermal growth factor receptor (EGFR), ERBB1 phosphotyrosine kinase siRNA
cttcctcccagtgcctgaataca

SEQ ID NO: 8337 - DNA, 23 bp, Artificial Sequence
  Description of Artificial Sequence: Synthetic oligonucleotide
  Epidermal growth factor receptor (EGFR), ERBB1 phosphotyrosine kinase siRNA
ttcctcccagtgcctgaatacat

SEQ ID NO: 8338 - DNA, 23 bp, Artificial Sequence
  Description of Artificial Sequence: Synthetic oligonucleotide
  Epidermal growth factor receptor (EGFR), ERBB1 phosphotyrosine kinase siRNA
tcctcccagtgcctgaatacata

SEQ ID NO: 8339 - DNA, 23 bp, Artificial Sequence
  Description of Artificial Sequence: Synthetic oligonucleotide
  Epidermal growth factor receptor (EGFR), ERBB1 phosphotyrosine kinase siRNA
cctcccagtgcctgaatacataa

SEQ ID NO: 8340 - DNA, 23 bp, Artificial Sequence
  Description of Artificial Sequence: Synthetic oligonucleotide
  Epidermal growth factor receptor (EGFR), ERBB1 phosphotyrosine kinase siRNA
ctcccagtgcctgaatacataaa

SEQ ID NO: 8341 - DNA, 23 bp, Artificial Sequence
  Description of Artificial Sequence: Synthetic oligonucleotide
  Epidermal growth factor receptor (EGFR), ERBB1 phosphotyrosine kinase siRNA
tcccagtgcctgaatacataaac

SEQ ID NO: 8342 - DNA, 23 bp, Artificial Sequence
  Description of Artificial Sequence: Synthetic oligonucleotide
  Epidermal growth factor receptor (EGFR), ERBB1 phosphotyrosine kinase siRNA
cccagtgcctgaatacataaacc

SEQ ID NO: 8343 - DNA, 23 bp, Artificial Sequence
  Description of Artificial Sequence: Synthetic oligonucleotide
  Epidermal growth factor receptor (EGFR), ERBB1 phosphotyrosine kinase siRNA
ccagtgcctgaatacataaacca

SEQ ID NO: 8344 - DNA, 23 bp, Artificial Sequence
  Description of Artificial Sequence: Synthetic oligonucleotide
  Epidermal growth factor receptor (EGFR), ERBB1 phosphotyrosine kinase siRNA
cagtgcctgaatacataaaccag

SEQ ID NO: 8345 - DNA, 23 bp, Artificial Sequence
  Description of Artificial Sequence: Synthetic oligonucleotide
  Epidermal growth factor receptor (EGFR), ERBB1 phosphotyrosine kinase siRNA
agtgcctgaatacataaaccagt

SEQ ID NO: 8346 - DNA, 23 bp, Artificial Sequence
  Description of Artificial Sequence: Synthetic oligonucleotide
  Epidermal growth factor receptor (EGFR), ERBB1 phosphotyrosine kinase siRNA
gtgcctgaatacataaaccagtc

SEQ ID NO: 8347 - DNA, 23 bp, Artificial Sequence
  Description of Artificial Sequence: Synthetic oligonucleotide
  Epidermal growth factor receptor (EGFR), ERBB1 phosphotyrosine kinase siRNA
tgcctgaatacataaaccagtcc

SEQ ID NO: 8348 - DNA, 23 bp, Artificial Sequence
  Description of Artificial Sequence: Synthetic oligonucleotide
  Epidermal growth factor receptor (EGFR), ERBB1 phosphotyrosine kinase siRNA
gcctgaatacataaaccagtccg

SEQ ID NO: 8349 - DNA, 23 bp, Artificial Sequence
  Description of Artificial Sequence: Synthetic oligonucleotide
  Epidermal growth factor receptor (EGFR), ERBB1 phosphotyrosine kinase siRNA
cctgaatacataaaccagtccgt

SEQ ID NO: 8350 - DNA, 23 bp, Artificial Sequence
  Description of Artificial Sequence: Synthetic oligonucleotide
  Epidermal growth factor receptor (EGFR), ERBB1 phosphotyrosine kinase siRNA
ctgaatacataaaccagtccgtt

SEQ ID NO: 8351 - DNA, 23 bp, Artificial Sequence
  Description of Artificial Sequence: Synthetic oligonucleotide
  Epidermal growth factor receptor (EGFR), ERBB1 phosphotyrosine kinase siRNA
tgaatacataaaccagtccgttc

SEQ ID NO: 8352 - DNA, 23 bp, Artificial Sequence
  Description of Artificial Sequence: Synthetic oligonucleotide
  Epidermal growth factor receptor (EGFR), ERBB1 phosphotyrosine kinase siRNA
gaatacataaaccagtccgttcc

SEQ ID NO: 8353 - DNA, 23 bp, Artificial Sequence
  Description of Artificial Sequence: Synthetic oligonucleotide
  Epidermal growth factor receptor (EGFR), ERBB1 phosphotyrosine kinase siRNA
aatacataaaccagtccgttccc

SEQ ID NO: 8354 - DNA, 23 bp, Artificial Sequence
  Description of Artificial Sequence: Synthetic oligonucleotide
  Epidermal growth factor receptor (EGFR), ERBB1 phosphotyrosine kinase siRNA
atacataaaccagtccgttccca

SEQ ID NO: 8355 - DNA, 23 bp, Artificial Sequence
  Description of Artificial Sequence: Synthetic oligonucleotide
  Epidermal growth factor receptor (EGFR), ERBB1 phosphotyrosine kinase siRNA
tacataaaccagtccgttcccaa

SEQ ID NO: 8356 - DNA, 23 bp, Artificial Sequence
  Description of Artificial Sequence: Synthetic oligonucleotide
  Epidermal growth factor receptor (EGFR), ERBB1 phosphotyrosine kinase siRNA
acataaaccagtccgttcccaaa

SEQ ID NO: 8357 - DNA, 23 bp, Artificial Sequence
  Description of Artificial Sequence: Synthetic oligonucleotide
  Epidermal growth factor receptor (EGFR), ERBB1 phosphotyrosine kinase siRNA
cataaaccagtccgttcccaaaa

SEQ ID NO: 8358 - DNA, 23 bp, Artificial Sequence
  Description of Artificial Sequence: Synthetic oligonucleotide
  Epidermal growth factor receptor (EGFR), ERBB1 phosphotyrosine kinase siRNA
ataaaccagtccgttcccaaaag

SEQ ID NO: 8359 - DNA, 23 bp, Artificial Sequence
  Description of Artificial Sequence: Synthetic oligonucleotide
  Epidermal growth factor receptor (EGFR), ERBB1 phosphotyrosine kinase siRNA
taaaccagtccgttcccaaaagg

SEQ ID NO: 8360 - DNA, 23 bp, Artificial Sequence
  Description of Artificial Sequence: Synthetic oligonucleotide
  Epidermal growth factor receptor (EGFR), ERBB1 phosphotyrosine kinase siRNA
aaaccagtccgttcccaaaaggc

SEQ ID NO: 8361 - DNA, 23 bp, Artificial Sequence
  Description of Artificial Sequence: Synthetic oligonucleotide
  Epidermal growth factor receptor (EGFR), ERBB1 phosphotyrosine kinase siRNA
aaccagtccgttcccaaaaggcc

SEQ ID NO: 8362 - DNA, 23 bp, Artificial Sequence
  Description of Artificial Sequence: Synthetic oligonucleotide
  Epidermal growth factor receptor (EGFR), ERBB1 phosphotyrosine kinase siRNA
accagtccgttcccaaaaggccc

SEQ ID NO: 8363 - DNA, 23 bp, Artificial Sequence
  Description of Artificial Sequence: Synthetic oligonucleotide
  Epidermal growth factor receptor (EGFR), ERBB1 phosphotyrosine kinase siRNA
ccagtccgttcccaaaaggcccg

SEQ ID NO: 8364 - DNA, 23 bp, Artificial Sequence
  Description of Artificial Sequence: Synthetic oligonucleotide
  Epidermal growth factor receptor (EGFR), ERBB1 phosphotyrosine kinase siRNA
cagtccgttcccaaaaggcccgc

SEQ ID NO: 8365 - DNA, 23 bp, Artificial Sequence
  Description of Artificial Sequence: Synthetic oligonucleotide
  Epidermal growth factor receptor (EGFR), ERBB1 phosphotyrosine kinase siRNA
agtccgttcccaaaaggcccgct

SEQ ID NO: 8366 - DNA, 23 bp, Artificial Sequence
  Description of Artificial Sequence: Synthetic oligonucleotide
  Epidermal growth factor receptor (EGFR), ERBB1 phosphotyrosine kinase siRNA
gtccgttcccaaaaggcccgctg

SEQ ID NO: 8367 - DNA, 23 bp, Artificial Sequence
  Description of Artificial Sequence: Synthetic oligonucleotide
  Epidermal growth factor receptor (EGFR), ERBB1 phosphotyrosine kinase siRNA
tccgttcccaaaaggcccgctgg

SEQ ID NO: 8368 - DNA, 23 bp, Artificial Sequence
  Description of Artificial Sequence: Synthetic oligonucleotide
  Epidermal growth factor receptor (EGFR), ERBB1 phosphotyrosine kinase siRNA
ccgttcccaaaaggcccgctggc

SEQ ID NO: 8369 - DNA, 23 bp, Artificial Sequence
  Description of Artificial Sequence: Synthetic oligonucleotide
  Epidermal growth factor receptor (EGFR), ERBB1 phosphotyrosine kinase siRNA
cgttcccaaaaggcccgctggct

SEQ ID NO: 8370 - DNA, 23 bp, Artificial Sequence
  Description of Artificial Sequence: Synthetic oligonucleotide
  Epidermal growth factor receptor (EGFR), ERBB1 phosphotyrosine kinase siRNA
gttcccaaaaggcccgctggctc

SEQ ID NO: 8371 - DNA, 23 bp, Artificial Sequence
  Description of Artificial Sequence: Synthetic oligonucleotide
  Epidermal growth factor receptor (EGFR), ERBB1 phosphotyrosine kinase siRNA
ttcccaaaaggcccgctggctct

SEQ ID NO: 8372 - DNA, 23 bp, Artificial Sequence
  Description of Artificial Sequence: Synthetic oligonucleotide
  Epidermal growth factor receptor (EGFR), ERBB1 phosphotyrosine kinase siRNA
tcccaaaaggcccgctggctctg

SEQ ID NO: 8373 - DNA, 23 bp, Artificial Sequence
  Description of Artificial Sequence: Synthetic oligonucleotide
  Epidermal growth factor receptor (EGFR), ERBB1 phosphotyrosine kinase siRNA
cccaaaaggcccgctggctctgt

SEQ ID NO: 8374 - DNA, 23 bp, Artificial Sequence
  Description of Artificial Sequence: Synthetic oligonucleotide
  Epidermal growth factor receptor (EGFR), ERBB1 phosphotyrosine kinase siRNA
ccaaaaggcccgctggctctgtg

SEQ ID NO: 8375 - DNA, 23 bp, Artificial Sequence
  Description of Artificial Sequence: Synthetic oligonucleotide
  Epidermal growth factor receptor (EGFR), ERBB1 phosphotyrosine kinase siRNA
caaaaggcccgctggctctgtgc

SEQ ID NO: 8376 - DNA, 23 bp, Artificial Sequence
  Description of Artificial Sequence: Synthetic oligonucleotide
  Epidermal growth factor receptor (EGFR), ERBB1 phosphotyrosine kinase siRNA
aaaaggcccgctggctctgtgca

SEQ ID NO: 8377 - DNA, 23 bp, Artificial Sequence
  Description of Artificial Sequence: Synthetic oligonucleotide
  Epidermal growth factor receptor (EGFR), ERBB1 phosphotyrosine kinase siRNA
aaaggcccgctggctctgtgcag

SEQ ID NO: 8378 - DNA, 23 bp, Artificial Sequence
  Description of Artificial Sequence: Synthetic oligonucleotide
  Epidermal growth factor receptor (EGFR), ERBB1 phosphotyrosine kinase siRNA
aaggcccgctggctctgtgcaga

SEQ ID NO: 8379 - DNA, 23 bp, Artificial Sequence
  Description of Artificial Sequence: Synthetic oligonucleotide
  Epidermal growth factor receptor (EGFR), ERBB1 phosphotyrosine kinase siRNA
aggcccgctggctctgtgcagaa

SEQ ID NO: 8380 - DNA, 23 bp, Artificial Sequence
  Description of Artificial Sequence: Synthetic oligonucleotide
  Epidermal growth factor receptor (EGFR), ERBB1 phosphotyrosine kinase siRNA
ggcccgctggctctgtgcagaat

SEQ ID NO: 8381 - DNA, 23 bp, Artificial Sequence
  Description of Artificial Sequence: Synthetic oligonucleotide
  Epidermal growth factor receptor (EGFR), ERBB1 phosphotyrosine kinase siRNA
gcccgctggctctgtgcagaatc

SEQ ID NO: 8382 - DNA, 23 bp, Artificial Sequence
  Description of Artificial Sequence: Synthetic oligonucleotide
  Epidermal growth factor receptor (EGFR), ERBB1 phosphotyrosine kinase siRNA
cccgctggctctgtgcagaatcc

SEQ ID NO: 8383 - DNA, 23 bp, Artificial Sequence
  Description of Artificial Sequence: Synthetic oligonucleotide
  Epidermal growth factor receptor (EGFR), ERBB1 phosphotyrosine kinase siRNA
ccgctggctctgtgcagaatcct

SEQ ID NO: 8384 - DNA, 23 bp, Artificial Sequence
  Description of Artificial Sequence: Synthetic oligonucleotide
  Epidermal growth factor receptor (EGFR), ERBB1 phosphotyrosine kinase siRNA
cgctggctctgtgcagaatcctg

SEQ ID NO: 8385 - DNA, 23 bp, Artificial Sequence
  Description of Artificial Sequence: Synthetic oligonucleotide
  Epidermal growth factor receptor (EGFR), ERBB1 phosphotyrosine kinase siRNA
gctggctctgtgcagaatcctgt

SEQ ID NO: 8386 - DNA, 23 bp, Artificial Sequence
  Description of Artificial Sequence: Synthetic oligonucleotide
  Epidermal growth factor receptor (EGFR), ERBB1 phosphotyrosine kinase siRNA
ctggctctgtgcagaatcctgtc

SEQ ID NO: 8387 - DNA, 23 bp, Artificial Sequence
  Description of Artificial Sequence: Synthetic oligonucleotide
  Epidermal growth factor receptor (EGFR), ERBB1 phosphotyrosine kinase siRNA
tggctctgtgcagaatcctgtct

SEQ ID NO: 8388 - DNA, 23 bp, Artificial Sequence
  Description of Artificial Sequence: Synthetic oligonucleotide
  Epidermal growth factor receptor (EGFR), ERBB1 phosphotyrosine kinase siRNA
ggctctgtgcagaatcctgtcta

SEQ ID NO: 8389 - DNA, 23 bp, Artificial Sequence
  Description of Artificial Sequence: Synthetic oligonucleotide
  Epidermal growth factor receptor (EGFR), ERBB1 phosphotyrosine kinase siRNA
gctctgtgcagaatcctgtctat

SEQ ID NO: 8390 - DNA, 23 bp, Artificial Sequence
  Description of Artificial Sequence: Synthetic oligonucleotide
  Epidermal growth factor receptor (EGFR), ERBB1 phosphotyrosine kinase siRNA
ctctgtgcagaatcctgtctatc

SEQ ID NO: 8391 - DNA, 23 bp, Artificial Sequence
  Description of Artificial Sequence: Synthetic oligonucleotide
  Epidermal growth factor receptor (EGFR), ERBB1 phosphotyrosine kinase siRNA
tctgtgcagaatcctgtctatca

SEQ ID NO: 8392 - DNA, 23 bp, Artificial Sequence
  Description of Artificial Sequence: Synthetic oligonucleotide
  Epidermal growth factor receptor (EGFR), ERBB1 phosphotyrosine kinase siRNA
ctgtgcagaatcctgtctatcac

SEQ ID NO: 8393 - DNA, 23 bp, Artificial Sequence
  Description of Artificial Sequence: Synthetic oligonucleotide
  Epidermal growth factor receptor (EGFR), ERBB1 phosphotyrosine kinase siRNA
tgtgcagaatcctgtctatcaca

SEQ ID NO: 8394 - DNA, 23 bp, Artificial Sequence
  Description of Artificial Sequence: Synthetic oligonucleotide
  Epidermal growth factor receptor (EGFR), ERBB1 phosphotyrosine kinase siRNA
gtgcagaatcctgtctatcacaa

SEQ ID NO: 8395 - DNA, 23 bp, Artificial Sequence
  Description of Artificial Sequence: Synthetic oligonucleotide
  Epidermal growth factor receptor (EGFR), ERBB1 phosphotyrosine kinase siRNA
tgcagaatcctgtctatcacaat

SEQ ID NO: 8396 - DNA, 23 bp, Artificial Sequence
  Description of Artificial Sequence: Synthetic oligonucleotide
  Epidermal growth factor receptor (EGFR), ERBB1 phosphotyrosine kinase siRNA
gcagaatcctgtctatcacaatc

SEQ ID NO: 8397 - DNA, 23 bp, Artificial Sequence
  Description of Artificial Sequence: Synthetic oligonucleotide
  Epidermal growth factor receptor (EGFR), ERBB1 phosphotyrosine kinase siRNA
cagaatcctgtctatcacaatca

SEQ ID NO: 8398 - DNA, 23 bp, Artificial Sequence
  Description of Artificial Sequence: Synthetic oligonucleotide
  Epidermal growth factor receptor (EGFR), ERBB1 phosphotyrosine kinase siRNA
agaatcctgtctatcacaatcag

SEQ ID NO: 8399 - DNA, 23 bp, Artificial Sequence
  Description of Artificial Sequence: Synthetic oligonucleotide
  Epidermal growth factor receptor (EGFR), ERBB1 phosphotyrosine kinase siRNA
gaatcctgtctatcacaatcagc

SEQ ID NO: 8400 - DNA, 23 bp, Artificial Sequence
  Description of Artificial Sequence: Synthetic oligonucleotide
  Epidermal growth factor receptor (EGFR), ERBB1 phosphotyrosine kinase siRNA
aatcctgtctatcacaatcagcc

SEQ ID NO: 8401 - DNA, 23 bp, Artificial Sequence
  Description of Artificial Sequence: Synthetic oligonucleotide
  Epidermal growth factor receptor (EGFR), ERBB1 phosphotyrosine kinase siRNA
atcctgtctatcacaatcagcct

SEQ ID NO: 8402 - DNA, 23 bp, Artificial Sequence
  Description of Artificial Sequence: Synthetic oligonucleotide
  Epidermal growth factor receptor (EGFR), ERBB1 phosphotyrosine kinase siRNA
tcctgtctatcacaatcagcctc

SEQ ID NO: 8403 - DNA, 23 bp, Artificial Sequence
  Description of Artificial Sequence: Synthetic oligonucleotide
  Epidermal growth factor receptor (EGFR), ERBB1 phosphotyrosine kinase siRNA
cctgtctatcacaatcagcctct

SEQ ID NO: 8404 - DNA, 23 bp, Artificial Sequence
  Description of Artificial Sequence: Synthetic oligonucleotide
  Epidermal growth factor receptor (EGFR), ERBB1 phosphotyrosine kinase siRNA
ctgtctatcacaatcagcctctg

SEQ ID NO: 8405 - DNA, 23 bp, Artificial Sequence
  Description of Artificial Sequence: Synthetic oligonucleotide
  Epidermal growth factor receptor (EGFR), ERBB1 phosphotyrosine kinase siRNA
tgtctatcacaatcagcctctga

SEQ ID NO: 8406 - DNA, 23 bp, Artificial Sequence
  Description of Artificial Sequence: Synthetic oligonucleotide
  Epidermal growth factor receptor (EGFR), ERBB1 phosphotyrosine kinase siRNA
gtctatcacaatcagcctctgaa

SEQ ID NO: 8407 - DNA, 23 bp, Artificial Sequence
  Description of Artificial Sequence: Synthetic oligonucleotide
  Epidermal growth factor receptor (EGFR), ERBB1 phosphotyrosine kinase siRNA
tctatcacaatcagcctctgaac

SEQ ID NO: 8408 - DNA, 23 bp, Artificial Sequence
  Description of Artificial Sequence: Synthetic oligonucleotide
  Epidermal growth factor receptor (EGFR), ERBB1 phosphotyrosine kinase siRNA
ctatcacaatcagcctctgaacc

SEQ ID NO: 8409 - DNA, 23 bp, Artificial Sequence
  Description of Artificial Sequence: Synthetic oligonucleotide
  Epidermal growth factor receptor (EGFR), ERBB1 phosphotyrosine kinase siRNA
tatcacaatcagcctctgaaccc

SEQ ID NO: 8410 - DNA, 23 bp, Artificial Sequence
  Description of Artificial Sequence: Synthetic oligonucleotide
  Epidermal growth factor receptor (EGFR), ERBB1 phosphotyrosine kinase siRNA
atcacaatcagcctctgaacccc

SEQ ID NO: 8411 - DNA, 23 bp, Artificial Sequence
  Description of Artificial Sequence: Synthetic oligonucleotide
  Epidermal growth factor receptor (EGFR), ERBB1 phosphotyrosine kinase siRNA
tcacaatcagcctctgaaccccg

SEQ ID NO: 8412 - DNA, 23 bp, Artificial Sequence
  Description of Artificial Sequence: Synthetic oligonucleotide
  Epidermal growth factor receptor (EGFR), ERBB1 phosphotyrosine kinase siRNA
cacaatcagcctctgaaccccgc

SEQ ID NO: 8413 - DNA, 23 bp, Artificial Sequence
  Description of Artificial Sequence: Synthetic oligonucleotide
  Epidermal growth factor receptor (EGFR), ERBB1 phosphotyrosine kinase siRNA
acaatcagcctctgaaccccgcg

SEQ ID NO: 8414 - DNA, 23 bp, Artificial Sequence
  Description of Artificial Sequence: Synthetic oligonucleotide
  Epidermal growth factor receptor (EGFR), ERBB1 phosphotyrosine kinase siRNA
caatcagcctctgaaccccgcgc

SEQ ID NO: 8415 - DNA, 23 bp, Artificial Sequence
  Description of Artificial Sequence: Synthetic oligonucleotide
  Epidermal growth factor receptor (EGFR), ERBB1 phosphotyrosine kinase siRNA
ccgcgcccagcagagacccacac

SEQ ID NO: 8416 - DNA, 23 bp, Artificial Sequence
  Description of Artificial Sequence: Synthetic oligonucleotide
  Epidermal growth factor receptor (EGFR), ERBB1 phosphotyrosine kinase siRNA
cgcgcccagcagagacccacact

SEQ ID NO: 8417 - DNA, 23 bp, Artificial Sequence
  Description of Artificial Sequence: Synthetic oligonucleotide
  Epidermal growth factor receptor (EGFR), ERBB1 phosphotyrosine kinase siRNA
gcgcccagcagagacccacacta

SEQ ID NO: 8418 - DNA, 23 bp, Artificial Sequence
  Description of Artificial Sequence: Synthetic oligonucleotide
  Epidermal growth factor receptor (EGFR), ERBB1 phosphotyrosine kinase siRNA
cgcccagcagagacccacactac

SEQ ID NO: 8419 - DNA, 23 bp, Artificial Sequence
  Description of Artificial Sequence: Synthetic oligonucleotide
  Epidermal growth factor receptor (EGFR), ERBB1 phosphotyrosine kinase siRNA
gcccagcagagacccacactacc

SEQ ID NO: 8420 - DNA, 23 bp, Artificial Sequence
  Description of Artificial Sequence: Synthetic oligonucleotide
  Epidermal growth factor receptor (EGFR), ERBB1 phosphotyrosine kinase siRNA
cccagcagagacccacactacca

SEQ ID NO: 8421 - DNA, 23 bp, Artificial Sequence
  Description of Artificial Sequence: Synthetic oligonucleotide
  Epidermal growth factor receptor (EGFR), ERBB1 phosphotyrosine kinase siRNA
ccagcagagacccacactaccag

SEQ ID NO: 8422 - DNA, 23 bp, Artificial Sequence
  Description of Artificial Sequence: Synthetic oligonucleotide
  Epidermal growth factor receptor (EGFR), ERBB1 phosphotyrosine kinase siRNA
cagcagagacccacactaccagg

SEQ ID NO: 8423 - DNA, 23 bp, Artificial Sequence
  Description of Artificial Sequence: Synthetic oligonucleotide
  Epidermal growth factor receptor (EGFR), ERBB1 phosphotyrosine kinase siRNA
agcagagacccacactaccagga

SEQ ID NO: 8424 - DNA, 23 bp, Artificial Sequence
  Description of Artificial Sequence: Synthetic oligonucleotide
  Epidermal growth factor receptor (EGFR), ERBB1 phosphotyrosine kinase siRNA
gcagagacccacactaccaggac

SEQ ID NO: 8425 - DNA, 23 bp, Artificial Sequence
  Description of Artificial Sequence: Synthetic oligonucleotide
  Epidermal growth factor receptor (EGFR), ERBB1 phosphotyrosine kinase siRNA
cagagacccacactaccaggacc

SEQ ID NO: 8426 - DNA, 23 bp, Artificial Sequence
  Description of Artificial Sequence: Synthetic oligonucleotide
  Epidermal growth factor receptor (EGFR), ERBB1 phosphotyrosine kinase siRNA
agagacccacactaccaggaccc

SEQ ID NO: 8427 - DNA, 23 bp, Artificial Sequence
  Description of Artificial Sequence: Synthetic oligonucleotide
  Epidermal growth factor receptor (EGFR), ERBB1 phosphotyrosine kinase siRNA
gagacccacactaccaggacccc

SEQ ID NO: 8428 - DNA, 23 bp, Artificial Sequence
  Description of Artificial Sequence: Synthetic oligonucleotide
  Epidermal growth factor receptor (EGFR), ERBB1 phosphotyrosine kinase siRNA
agacccacactaccaggaccccc

SEQ ID NO: 8429 - DNA, 23 bp, Artificial Sequence
  Description of Artificial Sequence: Synthetic oligonucleotide
  Epidermal growth factor receptor (EGFR), ERBB1 phosphotyrosine kinase siRNA
gacccacactaccaggaccccca

SEQ ID NO: 8430 - DNA, 23 bp, Artificial Sequence
  Description of Artificial Sequence: Synthetic oligonucleotide
  Epidermal growth factor receptor (EGFR), ERBB1 phosphotyrosine kinase siRNA
acccacactaccaggacccccac

SEQ ID NO: 8431 - DNA, 23 bp, Artificial Sequence
  Description of Artificial Sequence: Synthetic oligonucleotide
  Epidermal growth factor receptor (EGFR), ERBB1 phosphotyrosine kinase siRNA
cccacactaccaggacccccaca

SEQ ID NO: 8432 - DNA, 23 bp, Artificial Sequence
  Description of Artificial Sequence: Synthetic oligonucleotide
  Epidermal growth factor receptor (EGFR), ERBB1 phosphotyrosine kinase siRNA
ccacactaccaggacccccacag

SEQ ID NO: 8433 - DNA, 23 bp, Artificial Sequence
  Description of Artificial Sequence: Synthetic oligonucleotide
  Epidermal growth factor receptor (EGFR), ERBB1 phosphotyrosine kinase siRNA
cacactaccaggacccccacagc

SEQ ID NO: 8434 - DNA, 23 bp, Artificial Sequence
  Description of Artificial Sequence: Synthetic oligonucleotide
  Epidermal growth factor receptor (EGFR), ERBB1 phosphotyrosine kinase siRNA
acactaccaggacccccacagca

SEQ ID NO: 8435 - DNA, 23 bp, Artificial Sequence
  Description of Artificial Sequence: Synthetic oligonucleotide
  Epidermal growth factor receptor (EGFR), ERBB1 phosphotyrosine kinase siRNA
cactaccaggacccccacagcac

SEQ ID NO: 8436 - DNA, 23 bp, Artificial Sequence
  Description of Artificial Sequence: Synthetic oligonucleotide
  Epidermal growth factor receptor (EGFR), ERBB1 phosphotyrosine kinase siRNA
actaccaggacccccacagcact

SEQ ID NO: 8437 - DNA, 23 bp, Artificial Sequence
  Description of Artificial Sequence: Synthetic oligonucleotide
  Epidermal growth factor receptor (EGFR), ERBB1 phosphotyrosine kinase siRNA
ctaccaggacccccacagcactg

SEQ ID NO: 8438 - DNA, 23 bp, Artificial Sequence
  Description of Artificial Sequence: Synthetic oligonucleotide
  Epidermal growth factor receptor (EGFR), ERBB1 phosphotyrosine kinase siRNA
taccaggacccccacagcactgc

SEQ ID NO: 8439 - DNA, 23 bp, Artificial Sequence
  Description of Artificial Sequence: Synthetic oligonucleotide
  Epidermal growth factor receptor (EGFR), ERBB1 phosphotyrosine kinase siRNA
accaggacccccacagcactgca

SEQ ID NO: 8440 - DNA, 23 bp, Artificial Sequence
  Description of Artificial Sequence: Synthetic oligonucleotide
  Epidermal growth factor receptor (EGFR), ERBB1 phosphotyrosine kinase siRNA
ccaggacccccacagcactgcag

SEQ ID NO: 8441 - DNA, 23 bp, Artificial Sequence
  Description of Artificial Sequence: Synthetic oligonucleotide
  Epidermal growth factor receptor (EGFR), ERBB1 phosphotyrosine kinase siRNA
caggacccccacagcactgcagt

SEQ ID NO: 8442 - DNA, 23 bp, Artificial Sequence
  Description of Artificial Sequence: Synthetic oligonucleotide
  Epidermal growth factor receptor (EGFR), ERBB1 phosphotyrosine kinase siRNA
aggacccccacagcactgcagtg

SEQ ID NO: 8443 - DNA, 23 bp, Artificial Sequence
  Description of Artificial Sequence: Synthetic oligonucleotide
  Epidermal growth factor receptor (EGFR), ERBB1 phosphotyrosine kinase siRNA
ggacccccacagcactgcagtgg

SEQ ID NO: 8444 - DNA, 23 bp, Artificial Sequence
  Description of Artificial Sequence: Synthetic oligonucleotide
  Epidermal growth factor receptor (EGFR), ERBB1 phosphotyrosine kinase siRNA
gacccccacagcactgcagtggg

SEQ ID NO: 8445 - DNA, 23 bp, Artificial Sequence
  Description of Artificial Sequence: Synthetic oligonucleotide
  Epidermal growth factor receptor (EGFR), ERBB1 phosphotyrosine kinase siRNA
acccccacagcactgcagtgggc

SEQ ID NO: 8446 - DNA, 23 bp, Artificial Sequence
  Description of Artificial Sequence: Synthetic oligonucleotide
  Epidermal growth factor receptor (EGFR), ERBB1 phosphotyrosine kinase siRNA
cccccacagcactgcagtgggca

SEQ ID NO: 8447 - DNA, 23 bp, Artificial Sequence
  Description of Artificial Sequence: Synthetic oligonucleotide
  Epidermal growth factor receptor (EGFR), ERBB1 phosphotyrosine kinase siRNA
ccccacagcactgcagtgggcaa

SEQ ID NO: 8448 - DNA, 23 bp, Artificial Sequence
  Description of Artificial Sequence: Synthetic oligonucleotide
  Epidermal growth factor receptor (EGFR), ERBB1 phosphotyrosine kinase siRNA
cccacagcactgcagtgggcaac

SEQ ID NO: 8449 - DNA, 23 bp, Artificial Sequence
  Description of Artificial Sequence: Synthetic oligonucleotide
  Epidermal growth factor receptor (EGFR), ERBB1 phosphotyrosine kinase siRNA
ccacagcactgcagtgggcaacc

SEQ ID NO: 8450 - DNA, 23 bp, Artificial Sequence
  Description of Artificial Sequence: Synthetic oligonucleotide
  Epidermal growth factor receptor (EGFR), ERBB1 phosphotyrosine kinase siRNA
cacagcactgcagtgggcaaccc

SEQ ID NO: 8451 - DNA, 23 bp, Artificial Sequence
  Description of Artificial Sequence: Synthetic oligonucleotide
  Epidermal growth factor receptor (EGFR), ERBB1 phosphotyrosine kinase siRNA
acagcactgcagtgggcaacccc

SEQ ID NO: 8452 - DNA, 23 bp, Artificial Sequence
  Description of Artificial Sequence: Synthetic oligonucleotide
  Epidermal growth factor receptor (EGFR), ERBB1 phosphotyrosine kinase siRNA
cagcactgcagtgggcaaccccg

SEQ ID NO: 8453 - DNA, 23 bp, Artificial Sequence
  Description of Artificial Sequence: Synthetic oligonucleotide
  Epidermal growth factor receptor (EGFR), ERBB1 phosphotyrosine kinase siRNA
agcactgcagtgggcaaccccga

SEQ ID NO: 8454 - DNA, 23 bp, Artificial Sequence
  Description of Artificial Sequence: Synthetic oligonucleotide
  Epidermal growth factor receptor (EGFR), ERBB1 phosphotyrosine kinase siRNA
gcactgcagtgggcaaccccgag

SEQ ID NO: 8455 - DNA, 23 bp, Artificial Sequence
  Description of Artificial Sequence: Synthetic oligonucleotide
  Epidermal growth factor receptor (EGFR), ERBB1 phosphotyrosine kinase siRNA
cactgcagtgggcaaccccgagt

SEQ ID NO: 8456 - DNA, 23 bp, Artificial Sequence
  Description of Artificial Sequence: Synthetic oligonucleotide
  Epidermal growth factor receptor (EGFR), ERBB1 phosphotyrosine kinase siRNA
actgcagtgggcaaccccgagta

SEQ ID NO: 8457 - DNA, 23 bp, Artificial Sequence
  Description of Artificial Sequence: Synthetic oligonucleotide
  Epidermal growth factor receptor (EGFR), ERBB1 phosphotyrosine kinase siRNA
ctgcagtgggcaaccccgagtat

SEQ ID NO: 8458 - DNA, 23 bp, Artificial Sequence
  Description of Artificial Sequence: Synthetic oligonucleotide
  Epidermal growth factor receptor (EGFR), ERBB1 phosphotyrosine kinase siRNA
tgcagtgggcaaccccgagtatc

SEQ ID NO: 8459 - DNA, 23 bp, Artificial Sequence
  Description of Artificial Sequence: Synthetic oligonucleotide
  Epidermal growth factor receptor (EGFR), ERBB1 phosphotyrosine kinase siRNA
gcagtgggcaaccccgagtatct

SEQ ID NO: 8460 - DNA, 23 bp, Artificial Sequence
  Description of Artificial Sequence: Synthetic oligonucleotide
  Epidermal growth factor receptor (EGFR), ERBB1 phosphotyrosine kinase siRNA
cagtgggcaaccccgagtatctc

SEQ ID NO: 8461 - DNA, 23 bp, Artificial Sequence
  Description of Artificial Sequence: Synthetic oligonucleotide
  Epidermal growth factor receptor (EGFR), ERBB1 phosphotyrosine kinase siRNA
agtgggcaaccccgagtatctca

SEQ ID NO: 8462 - DNA, 23 bp, Artificial Sequence
  Description of Artificial Sequence: Synthetic oligonucleotide
  Epidermal growth factor receptor (EGFR), ERBB1 phosphotyrosine kinase siRNA
gtgggcaaccccgagtatctcaa

SEQ ID NO: 8463 - DNA, 23 bp, Artificial Sequence
  Description of Artificial Sequence: Synthetic oligonucleotide
  Epidermal growth factor receptor (EGFR), ERBB1 phosphotyrosine kinase siRNA
tgggcaaccccgagtatctcaac

SEQ ID NO: 8464 - DNA, 23 bp, Artificial Sequence
  Description of Artificial Sequence: Synthetic oligonucleotide
  Epidermal growth factor receptor (EGFR), ERBB1 phosphotyrosine kinase siRNA
gggcaaccccgagtatctcaaca

SEQ ID NO: 8465 - DNA, 23 bp, Artificial Sequence
  Description of Artificial Sequence: Synthetic oligonucleotide
  Epidermal growth factor receptor (EGFR), ERBB1 phosphotyrosine kinase siRNA
ggcaaccccgagtatctcaacac

SEQ ID NO: 8466 - DNA, 23 bp, Artificial Sequence
  Description of Artificial Sequence: Synthetic oligonucleotide
  Epidermal growth factor receptor (EGFR), ERBB1 phosphotyrosine kinase siRNA
gcaaccccgagtatctcaacact

SEQ ID NO: 8467 - DNA, 23 bp, Artificial Sequence
  Description of Artificial Sequence: Synthetic oligonucleotide
  Epidermal growth factor receptor (EGFR), ERBB1 phosphotyrosine kinase siRNA
caaccccgagtatctcaacactg

SEQ ID NO: 8468 - DNA, 23 bp, Artificial Sequence
  Description of Artificial Sequence: Synthetic oligonucleotide
  Epidermal growth factor receptor (EGFR), ERBB1 phosphotyrosine kinase siRNA
aaccccgagtatctcaacactgt

SEQ ID NO: 8469 - DNA, 23 bp, Artificial Sequence
  Description of Artificial Sequence: Synthetic oligonucleotide
  Epidermal growth factor receptor (EGFR), ERBB1 phosphotyrosine kinase siRNA
accccgagtatctcaacactgtc

SEQ ID NO: 8470 - DNA, 23 bp, Artificial Sequence
  Description of Artificial Sequence: Synthetic oligonucleotide
  Epidermal growth factor receptor (EGFR), ERBB1 phosphotyrosine kinase siRNA
ccccgagtatctcaacactgtcc

SEQ ID NO: 8471 - DNA, 23 bp, Artificial Sequence
  Description of Artificial Sequence: Synthetic oligonucleotide
  Epidermal growth factor receptor (EGFR), ERBB1 phosphotyrosine kinase siRNA
cccgagtatctcaacactgtcca

SEQ ID NO: 8472 - DNA, 23 bp, Artificial Sequence
  Description of Artificial Sequence: Synthetic oligonucleotide
  Epidermal growth factor receptor (EGFR), ERBB1 phosphotyrosine kinase siRNA
ccgagtatctcaacactgtccag

SEQ ID NO: 8473 - DNA, 23 bp, Artificial Sequence
  Description of Artificial Sequence: Synthetic oligonucleotide
  Epidermal growth factor receptor (EGFR), ERBB1 phosphotyrosine kinase siRNA
cgagtatctcaacactgtccagc

SEQ ID NO: 8474 - DNA, 23 bp, Artificial Sequence
  Description of Artificial Sequence: Synthetic oligonucleotide
  Epidermal growth factor receptor (EGFR), ERBB1 phosphotyrosine kinase siRNA
gagtatctcaacactgtccagcc

SEQ ID NO: 8475 - DNA, 23 bp, Artificial Sequence
  Description of Artificial Sequence: Synthetic oligonucleotide
  Epidermal growth factor receptor (EGFR), ERBB1 phosphotyrosine kinase siRNA
agtatctcaacactgtccagccc

SEQ ID NO: 8476 - DNA, 23 bp, Artificial Sequence
  Description of Artificial Sequence: Synthetic oligonucleotide
  Epidermal growth factor receptor (EGFR), ERBB1 phosphotyrosine kinase siRNA
gtatctcaacactgtccagccca

SEQ ID NO: 8477 - DNA, 23 bp, Artificial Sequence
  Description of Artificial Sequence: Synthetic oligonucleotide
  Epidermal growth factor receptor (EGFR), ERBB1 phosphotyrosine kinase siRNA
tatctcaacactgtccagcccac

SEQ ID NO: 8478 - DNA, 23 bp, Artificial Sequence
  Description of Artificial Sequence: Synthetic oligonucleotide
  Epidermal growth factor receptor (EGFR), ERBB1 phosphotyrosine kinase siRNA
atctcaacactgtccagcccacc

SEQ ID NO: 8479 - DNA, 23 bp, Artificial Sequence
  Description of Artificial Sequence: Synthetic oligonucleotide
  Epidermal growth factor receptor (EGFR), ERBB1 phosphotyrosine kinase siRNA
tctcaacactgtccagcccacct

SEQ ID NO: 8480 - DNA, 23 bp, Artificial Sequence
  Description of Artificial Sequence: Synthetic oligonucleotide
  Epidermal growth factor receptor (EGFR), ERBB1 phosphotyrosine kinase siRNA
ctcaacactgtccagcccacctg

SEQ ID NO: 8481 - DNA, 23 bp, Artificial Sequence
  Description of Artificial Sequence: Synthetic oligonucleotide
  Epidermal growth factor receptor (EGFR), ERBB1 phosphotyrosine kinase siRNA
tcaacactgtccagcccacctgt

SEQ ID NO: 8482 - DNA, 23 bp, Artificial Sequence
  Description of Artificial Sequence: Synthetic oligonucleotide
  Epidermal growth factor receptor (EGFR), ERBB1 phosphotyrosine kinase siRNA
caacactgtccagcccacctgtg

SEQ ID NO: 8483 - DNA, 23 bp, Artificial Sequence
  Description of Artificial Sequence: Synthetic oligonucleotide
  Epidermal growth factor receptor (EGFR), ERBB1 phosphotyrosine kinase siRNA
aacactgtccagcccacctgtgt

SEQ ID NO: 8484 - DNA, 23 bp, Artificial Sequence
  Description of Artificial Sequence: Synthetic oligonucleotide
  Epidermal growth factor receptor (EGFR), ERBB1 phosphotyrosine kinase siRNA
acactgtccagcccacctgtgtc

SEQ ID NO: 8485 - DNA, 23 bp, Artificial Sequence
  Description of Artificial Sequence: Synthetic oligonucleotide
  Epidermal growth factor receptor (EGFR), ERBB1 phosphotyrosine kinase siRNA
cactgtccagcccacctgtgtca

SEQ ID NO: 8486 - DNA, 23 bp, Artificial Sequence
  Description of Artificial Sequence: Synthetic oligonucleotide
  Epidermal growth factor receptor (EGFR), ERBB1 phosphotyrosine kinase siRNA
actgtccagcccacctgtgtcaa

SEQ ID NO: 8487 - DNA, 23 bp, Artificial Sequence
  Description of Artificial Sequence: Synthetic oligonucleotide
  Epidermal growth factor receptor (EGFR), ERBB1 phosphotyrosine kinase siRNA
ctgtccagcccacctgtgtcaac

SEQ ID NO: 8488 - DNA, 23 bp, Artificial Sequence
  Description of Artificial Sequence: Synthetic oligonucleotide
  Epidermal growth factor receptor (EGFR), ERBB1 phosphotyrosine kinase siRNA
tgtccagcccacctgtgtcaaca

SEQ ID NO: 8489 - DNA, 23 bp, Artificial Sequence
  Description of Artificial Sequence: Synthetic oligonucleotide
  Epidermal growth factor receptor (EGFR), ERBB1 phosphotyrosine kinase siRNA
gtccagcccacctgtgtcaacag

SEQ ID NO: 8490 - DNA, 23 bp, Artificial Sequence
  Description of Artificial Sequence: Synthetic oligonucleotide
  Epidermal growth factor receptor (EGFR), ERBB1 phosphotyrosine kinase siRNA
tccagcccacctgtgtcaacagc

SEQ ID NO: 8491 - DNA, 23 bp, Artificial Sequence
  Description of Artificial Sequence: Synthetic oligonucleotide
  Epidermal growth factor receptor (EGFR), ERBB1 phosphotyrosine kinase siRNA
ccagcccacctgtgtcaacagca

SEQ ID NO: 8492 - DNA, 23 bp, Artificial Sequence
  Description of Artificial Sequence: Synthetic oligonucleotide
  Epidermal growth factor receptor (EGFR), ERBB1 phosphotyrosine kinase siRNA
cagcccacctgtgtcaacagcac

SEQ ID NO: 8493 - DNA, 23 bp, Artificial Sequence
  Description of Artificial Sequence: Synthetic oligonucleotide
  Epidermal growth factor receptor (EGFR), ERBB1 phosphotyrosine kinase siRNA
agcccacctgtgtcaacagcaca

SEQ ID NO: 8494 - DNA, 23 bp, Artificial Sequence
  Description of Artificial Sequence: Synthetic oligonucleotide
  Epidermal growth factor receptor (EGFR), ERBB1 phosphotyrosine kinase siRNA
gcccacctgtgtcaacagcacat

SEQ ID NO: 8495 - DNA, 23 bp, Artificial Sequence
  Description of Artificial Sequence: Synthetic oligonucleotide
  Epidermal growth factor receptor (EGFR), ERBB1 phosphotyrosine kinase siRNA
cccacctgtgtcaacagcacatt

SEQ ID NO: 8496 - DNA, 23 bp, Artificial Sequence
  Description of Artificial Sequence: Synthetic oligonucleotide
  Epidermal growth factor receptor (EGFR), ERBB1 phosphotyrosine kinase siRNA
ccacctgtgtcaacagcacattc

SEQ ID NO: 8497 - DNA, 23 bp, Artificial Sequence
  Description of Artificial Sequence: Synthetic oligonucleotide
  Epidermal growth factor receptor (EGFR), ERBB1 phosphotyrosine kinase siRNA
cacctgtgtcaacagcacattcg

SEQ ID NO: 8498 - DNA, 23 bp, Artificial Sequence
  Description of Artificial Sequence: Synthetic oligonucleotide
  Epidermal growth factor receptor (EGFR), ERBB1 phosphotyrosine kinase siRNA
acctgtgtcaacagcacattcga

SEQ ID NO: 8499 - DNA, 23 bp, Artificial Sequence
  Description of Artificial Sequence: Synthetic oligonucleotide
  Epidermal growth factor receptor (EGFR), ERBB1 phosphotyrosine kinase siRNA
cctgtgtcaacagcacattcgac

SEQ ID NO: 8500 - DNA, 23 bp, Artificial Sequence
  Description of Artificial Sequence: Synthetic oligonucleotide
  Epidermal growth factor receptor (EGFR), ERBB1 phosphotyrosine kinase siRNA
ctgtgtcaacagcacattcgaca

SEQ ID NO: 8501 - DNA, 23 bp, Artificial Sequence
  Description of Artificial Sequence: Synthetic oligonucleotide
  Epidermal growth factor receptor (EGFR), ERBB1 phosphotyrosine kinase siRNA
tgtgtcaacagcacattcgacag

SEQ ID NO: 8502 - DNA, 23 bp, Artificial Sequence
  Description of Artificial Sequence: Synthetic oligonucleotide
  Epidermal growth factor receptor (EGFR), ERBB1 phosphotyrosine kinase siRNA
gtgtcaacagcacattcgacagc

SEQ ID NO: 8503 - DNA, 23 bp, Artificial Sequence
  Description of Artificial Sequence: Synthetic oligonucleotide
  Epidermal growth factor receptor (EGFR), ERBB1 phosphotyrosine kinase siRNA
tgtcaacagcacattcgacagcc

SEQ ID NO: 8504 - DNA, 23 bp, Artificial Sequence
  Description of Artificial Sequence: Synthetic oligonucleotide
  Epidermal growth factor receptor (EGFR), ERBB1 phosphotyrosine kinase siRNA
gtcaacagcacattcgacagccc

SEQ ID NO: 8505 - DNA, 23 bp, Artificial Sequence
  Description of Artificial Sequence: Synthetic oligonucleotide
  Epidermal growth factor receptor (EGFR), ERBB1 phosphotyrosine kinase siRNA
tcaacagcacattcgacagccct

SEQ ID NO: 8506 - DNA, 23 bp, Artificial Sequence
  Description of Artificial Sequence: Synthetic oligonucleotide
  Epidermal growth factor receptor (EGFR), ERBB1 phosphotyrosine kinase siRNA
caacagcacattcgacagccctg

SEQ ID NO: 8507 - DNA, 23 bp, Artificial Sequence
  Description of Artificial Sequence: Synthetic oligonucleotide
  Epidermal growth factor receptor (EGFR), ERBB1 phosphotyrosine kinase siRNA
aacagcacattcgacagccctgc

SEQ ID NO: 8508 - DNA, 23 bp, Artificial Sequence
  Description of Artificial Sequence: Synthetic oligonucleotide
  Epidermal growth factor receptor (EGFR), ERBB1 phosphotyrosine kinase siRNA
acagcacattcgacagccctgcc

SEQ ID NO: 8509 - DNA, 23 bp, Artificial Sequence
  Description of Artificial Sequence: Synthetic oligonucleotide
  Epidermal growth factor receptor (EGFR), ERBB1 phosphotyrosine kinase siRNA
cagcacattcgacagccctgccc

SEQ ID NO: 8510 - DNA, 23 bp, Artificial Sequence
  Description of Artificial Sequence: Synthetic oligonucleotide
  Epidermal growth factor receptor (EGFR), ERBB1 phosphotyrosine kinase siRNA
agcacattcgacagccctgccca

SEQ ID NO: 8511 - DNA, 23 bp, Artificial Sequence
  Description of Artificial Sequence: Synthetic oligonucleotide
  Epidermal growth factor receptor (EGFR), ERBB1 phosphotyrosine kinase siRNA
gcacattcgacagccctgcccac

SEQ ID NO: 8512 - DNA, 23 bp, Artificial Sequence
  Description of Artificial Sequence: Synthetic oligonucleotide
  Epidermal growth factor receptor (EGFR), ERBB1 phosphotyrosine kinase siRNA
cacattcgacagccctgcccact

SEQ ID NO: 8513 - DNA, 23 bp, Artificial Sequence
  Description of Artificial Sequence: Synthetic oligonucleotide
  Epidermal growth factor receptor (EGFR), ERBB1 phosphotyrosine kinase siRNA
acattcgacagccctgcccactg

SEQ ID NO: 8514 - DNA, 23 bp, Artificial Sequence
  Description of Artificial Sequence: Synthetic oligonucleotide
  Epidermal growth factor receptor (EGFR), ERBB1 phosphotyrosine kinase siRNA
cattcgacagccctgcccactgg

SEQ ID NO: 8515 - DNA, 23 bp, Artificial Sequence
  Description of Artificial Sequence: Synthetic oligonucleotide
  Epidermal growth factor receptor (EGFR), ERBB1 phosphotyrosine kinase siRNA
attcgacagccctgcccactggg

SEQ ID NO: 8516 - DNA, 23 bp, Artificial Sequence
  Description of Artificial Sequence: Synthetic oligonucleotide
  Epidermal growth factor receptor (EGFR), ERBB1 phosphotyrosine kinase siRNA
ttcgacagccctgcccactgggc

SEQ ID NO: 8517 - DNA, 23 bp, Artificial Sequence
  Description of Artificial Sequence: Synthetic oligonucleotide
  Epidermal growth factor receptor (EGFR), ERBB1 phosphotyrosine kinase siRNA
tcgacagccctgcccactgggcc

SEQ ID NO: 8518 - DNA, 23 bp, Artificial Sequence
  Description of Artificial Sequence: Synthetic oligonucleotide
  Epidermal growth factor receptor (EGFR), ERBB1 phosphotyrosine kinase siRNA
cgacagccctgcccactgggccc

SEQ ID NO: 8519 - DNA, 23 bp, Artificial Sequence
  Description of Artificial Sequence: Synthetic oligonucleotide
  Epidermal growth factor receptor (EGFR), ERBB1 phosphotyrosine kinase siRNA
gacagccctgcccactgggccca

SEQ ID NO: 8520 - DNA, 23 bp, Artificial Sequence
  Description of Artificial Sequence: Synthetic oligonucleotide
  Epidermal growth factor receptor (EGFR), ERBB1 phosphotyrosine kinase siRNA
acagccctgcccactgggcccag

SEQ ID NO: 8521 - DNA, 23 bp, Artificial Sequence
  Description of Artificial Sequence: Synthetic oligonucleotide
  Epidermal growth factor receptor (EGFR), ERBB1 phosphotyrosine kinase siRNA
cagccctgcccactgggcccaga

SEQ ID NO: 8522 - DNA, 23 bp, Artificial Sequence
  Description of Artificial Sequence: Synthetic oligonucleotide
  Epidermal growth factor receptor (EGFR), ERBB1 phosphotyrosine kinase siRNA
agccctgcccactgggcccagaa

SEQ ID NO: 8523 - DNA, 23 bp, Artificial Sequence
  Description of Artificial Sequence: Synthetic oligonucleotide
  Epidermal growth factor receptor (EGFR), ERBB1 phosphotyrosine kinase siRNA
gccctgcccactgggcccagaaa

SEQ ID NO: 8524 - DNA, 23 bp, Artificial Sequence
  Description of Artificial Sequence: Synthetic oligonucleotide
  Epidermal growth factor receptor (EGFR), ERBB1 phosphotyrosine kinase siRNA
ccctgcccactgggcccagaaag

SEQ ID NO: 8525 - DNA, 23 bp, Artificial Sequence
  Description of Artificial Sequence: Synthetic oligonucleotide
  Epidermal growth factor receptor (EGFR), ERBB1 phosphotyrosine kinase siRNA
cctgcccactgggcccagaaagg

SEQ ID NO: 8526 - DNA, 23 bp, Artificial Sequence
  Description of Artificial Sequence: Synthetic oligonucleotide
  Epidermal growth factor receptor (EGFR), ERBB1 phosphotyrosine kinase siRNA
ctgcccactgggcccagaaaggc

SEQ ID NO: 8527 - DNA, 23 bp, Artificial Sequence
  Description of Artificial Sequence: Synthetic oligonucleotide
  Epidermal growth factor receptor (EGFR), ERBB1 phosphotyrosine kinase siRNA
tgcccactgggcccagaaaggca

SEQ ID NO: 8528 - DNA, 23 bp, Artificial Sequence
  Description of Artificial Sequence: Synthetic oligonucleotide
  Epidermal growth factor receptor (EGFR), ERBB1 phosphotyrosine kinase siRNA
gcccactgggcccagaaaggcag

SEQ ID NO: 8529 - DNA, 23 bp, Artificial Sequence
  Description of Artificial Sequence: Synthetic oligonucleotide
  Epidermal growth factor receptor (EGFR), ERBB1 phosphotyrosine kinase siRNA
cccactgggcccagaaaggcagc

SEQ ID NO: 8530 - DNA, 23 bp, Artificial Sequence
  Description of Artificial Sequence: Synthetic oligonucleotide
  Epidermal growth factor receptor (EGFR), ERBB1 phosphotyrosine kinase siRNA
ccactgggcccagaaaggcagcc

SEQ ID NO: 8531 - DNA, 23 bp, Artificial Sequence
  Description of Artificial Sequence: Synthetic oligonucleotide
  Epidermal growth factor receptor (EGFR), ERBB1 phosphotyrosine kinase siRNA
cactgggcccagaaaggcagcca

SEQ ID NO: 8532 - DNA, 23 bp, Artificial Sequence
  Description of Artificial Sequence: Synthetic oligonucleotide
  Epidermal growth factor receptor (EGFR), ERBB1 phosphotyrosine kinase siRNA
actgggcccagaaaggcagccac

SEQ ID NO: 8533 - DNA, 23 bp, Artificial Sequence
  Description of Artificial Sequence: Synthetic oligonucleotide
  Epidermal growth factor receptor (EGFR), ERBB1 phosphotyrosine kinase siRNA
ctgggcccagaaaggcagccacc

SEQ ID NO: 8534 - DNA, 23 bp, Artificial Sequence
  Description of Artificial Sequence: Synthetic oligonucleotide
  Epidermal growth factor receptor (EGFR), ERBB1 phosphotyrosine kinase siRNA
tgggcccagaaaggcagccacca

SEQ ID NO: 8535 - DNA, 23 bp, Artificial Sequence
  Description of Artificial Sequence: Synthetic oligonucleotide
  Epidermal growth factor receptor (EGFR), ERBB1 phosphotyrosine kinase siRNA
gggcccagaaaggcagccaccaa

SEQ ID NO: 8536 - DNA, 23 bp, Artificial Sequence
  Description of Artificial Sequence: Synthetic oligonucleotide
  Epidermal growth factor receptor (EGFR), ERBB1 phosphotyrosine kinase siRNA
ggcccagaaaggcagccaccaaa

SEQ ID NO: 8537 - DNA, 23 bp, Artificial Sequence
  Description of Artificial Sequence: Synthetic oligonucleotide
  Epidermal growth factor receptor (EGFR), ERBB1 phosphotyrosine kinase siRNA
gcccagaaaggcagccaccaaat

SEQ ID NO: 8538 - DNA, 23 bp, Artificial Sequence
  Description of Artificial Sequence: Synthetic oligonucleotide
  Epidermal growth factor receptor (EGFR), ERBB1 phosphotyrosine kinase siRNA
cccagaaaggcagccaccaaatt

SEQ ID NO: 8539 - DNA, 23 bp, Artificial Sequence
  Description of Artificial Sequence: Synthetic oligonucleotide
  Epidermal growth factor receptor (EGFR), ERBB1 phosphotyrosine kinase siRNA
ccagaaaggcagccaccaaatta

SEQ ID NO: 8540 - DNA, 23 bp, Artificial Sequence
  Description of Artificial Sequence: Synthetic oligonucleotide
  Epidermal growth factor receptor (EGFR), ERBB1 phosphotyrosine kinase siRNA
cagaaaggcagccaccaaattag

SEQ ID NO: 8541 - DNA, 23 bp, Artificial Sequence
  Description of Artificial Sequence: Synthetic oligonucleotide
  Epidermal growth factor receptor (EGFR), ERBB1 phosphotyrosine kinase siRNA
agaaaggcagccaccaaattagc

SEQ ID NO: 8542 - DNA, 23 bp, Artificial Sequence
  Description of Artificial Sequence: Synthetic oligonucleotide
  Epidermal growth factor receptor (EGFR), ERBB1 phosphotyrosine kinase siRNA
gaaaggcagccaccaaattagcc

SEQ ID NO: 8543 - DNA, 23 bp, Artificial Sequence
  Description of Artificial Sequence: Synthetic oligonucleotide
  Epidermal growth factor receptor (EGFR), ERBB1 phosphotyrosine kinase siRNA
aaaggcagccaccaaattagcct

SEQ ID NO: 8544 - DNA, 23 bp, Artificial Sequence
  Description of Artificial Sequence: Synthetic oligonucleotide
  Epidermal growth factor receptor (EGFR), ERBB1 phosphotyrosine kinase siRNA
aaggcagccaccaaattagcctg

SEQ ID NO: 8545 - DNA, 23 bp, Artificial Sequence
  Description of Artificial Sequence: Synthetic oligonucleotide
  Epidermal growth factor receptor (EGFR), ERBB1 phosphotyrosine kinase siRNA
aggcagccaccaaattagcctgg

SEQ ID NO: 8546 - DNA, 23 bp, Artificial Sequence
  Description of Artificial Sequence: Synthetic oligonucleotide
  Epidermal growth factor receptor (EGFR), ERBB1 phosphotyrosine kinase siRNA
ggcagccaccaaattagcctgga

SEQ ID NO: 8547 - DNA, 23 bp, Artificial Sequence
  Description of Artificial Sequence: Synthetic oligonucleotide
  Epidermal growth factor receptor (EGFR), ERBB1 phosphotyrosine kinase siRNA
gcagccaccaaattagcctggac

SEQ ID NO: 8548 - DNA, 23 bp, Artificial Sequence
  Description of Artificial Sequence: Synthetic oligonucleotide
  Epidermal growth factor receptor (EGFR), ERBB1 phosphotyrosine kinase siRNA
cagccaccaaattagcctggaca

SEQ ID NO: 8549 - DNA, 23 bp, Artificial Sequence
  Description of Artificial Sequence: Synthetic oligonucleotide
  Epidermal growth factor receptor (EGFR), ERBB1 phosphotyrosine kinase siRNA
agccaccaaattagcctggacaa

SEQ ID NO: 8550 - DNA, 23 bp, Artificial Sequence
  Description of Artificial Sequence: Synthetic oligonucleotide
  Epidermal growth factor receptor (EGFR), ERBB1 phosphotyrosine kinase siRNA
gccaccaaattagcctggacaac

SEQ ID NO: 8551 - DNA, 23 bp, Artificial Sequence
  Description of Artificial Sequence: Synthetic oligonucleotide
  Epidermal growth factor receptor (EGFR), ERBB1 phosphotyrosine kinase siRNA
ccaccaaattagcctggacaacc

SEQ ID NO: 8552 - DNA, 23 bp, Artificial Sequence
  Description of Artificial Sequence: Synthetic oligonucleotide
  Epidermal growth factor receptor (EGFR), ERBB1 phosphotyrosine kinase siRNA
caccaaattagcctggacaaccc

SEQ ID NO: 8553 - DNA, 23 bp, Artificial Sequence
  Description of Artificial Sequence: Synthetic oligonucleotide
  Epidermal growth factor receptor (EGFR), ERBB1 phosphotyrosine kinase siRNA
accaaattagcctggacaaccct

SEQ ID NO: 8554 - DNA, 23 bp, Artificial Sequence
  Description of Artificial Sequence: Synthetic oligonucleotide
  Epidermal growth factor receptor (EGFR), ERBB1 phosphotyrosine kinase siRNA
ccaaattagcctggacaaccctg

SEQ ID NO: 8555 - DNA, 23 bp, Artificial Sequence
  Description of Artificial Sequence: Synthetic oligonucleotide
  Epidermal growth factor receptor (EGFR), ERBB1 phosphotyrosine kinase siRNA
caaattagcctggacaaccctga

SEQ ID NO: 8556 - DNA, 23 bp, Artificial Sequence
  Description of Artificial Sequence: Synthetic oligonucleotide
  Epidermal growth factor receptor (EGFR), ERBB1 phosphotyrosine kinase siRNA
aaattagcctggacaaccctgac

SEQ ID NO: 8557 - DNA, 23 bp, Artificial Sequence
  Description of Artificial Sequence: Synthetic oligonucleotide
  Epidermal growth factor receptor (EGFR), ERBB1 phosphotyrosine kinase siRNA
aattagcctggacaaccctgact

SEQ ID NO: 8558 - DNA, 23 bp, Artificial Sequence
  Description of Artificial Sequence: Synthetic oligonucleotide
  Epidermal growth factor receptor (EGFR), ERBB1 phosphotyrosine kinase siRNA
attagcctggacaaccctgacta

SEQ ID NO: 8559 - DNA, 23 bp, Artificial Sequence
  Description of Artificial Sequence: Synthetic oligonucleotide
  Epidermal growth factor receptor (EGFR), ERBB1 phosphotyrosine kinase siRNA
ttagcctggacaaccctgactac

SEQ ID NO: 8560 - DNA, 23 bp, Artificial Sequence
  Description of Artificial Sequence: Synthetic oligonucleotide
  Epidermal growth factor receptor (EGFR), ERBB1 phosphotyrosine kinase siRNA
tagcctggacaaccctgactacc

SEQ ID NO: 8561 - DNA, 23 bp, Artificial Sequence
  Description of Artificial Sequence: Synthetic oligonucleotide
  Epidermal growth factor receptor (EGFR), ERBB1 phosphotyrosine kinase siRNA
agcctggacaaccctgactacca

SEQ ID NO: 8562 - DNA, 23 bp, Artificial Sequence
  Description of Artificial Sequence: Synthetic oligonucleotide
  Epidermal growth factor receptor (EGFR), ERBB1 phosphotyrosine kinase siRNA
gcctggacaaccctgactaccag

SEQ ID NO: 8563 - DNA, 23 bp, Artificial Sequence
  Description of Artificial Sequence: Synthetic oligonucleotide
  Epidermal growth factor receptor (EGFR), ERBB1 phosphotyrosine kinase siRNA
cctggacaaccctgactaccagc

SEQ ID NO: 8564 - DNA, 23 bp, Artificial Sequence
  Description of Artificial Sequence: Synthetic oligonucleotide
  Epidermal growth factor receptor (EGFR), ERBB1 phosphotyrosine kinase siRNA
ctggacaaccctgactaccagca

SEQ ID NO: 8565 - DNA, 23 bp, Artificial Sequence
  Description of Artificial Sequence: Synthetic oligonucleotide
  Epidermal growth factor receptor (EGFR), ERBB1 phosphotyrosine kinase siRNA
tggacaaccctgactaccagcag

SEQ ID NO: 8566 - DNA, 23 bp, Artificial Sequence
  Description of Artificial Sequence: Synthetic oligonucleotide
  Epidermal growth factor receptor (EGFR), ERBB1 phosphotyrosine kinase siRNA
ggacaaccctgactaccagcagg

SEQ ID NO: 8567 - DNA, 23 bp, Artificial Sequence
  Description of Artificial Sequence: Synthetic oligonucleotide
  Epidermal growth factor receptor (EGFR), ERBB1 phosphotyrosine kinase siRNA
gacaaccctgactaccagcagga

SEQ ID NO: 8568 - DNA, 23 bp, Artificial Sequence
  Description of Artificial Sequence: Synthetic oligonucleotide
  Epidermal growth factor receptor (EGFR), ERBB1 phosphotyrosine kinase siRNA
acaaccctgactaccagcaggac

SEQ ID NO: 8569 - DNA, 23 bp, Artificial Sequence
  Description of Artificial Sequence: Synthetic oligonucleotide
  Epidermal growth factor receptor (EGFR), ERBB1 phosphotyrosine kinase siRNA
caaccctgactaccagcaggact

SEQ ID NO: 8570 - DNA, 23 bp, Artificial Sequence
  Description of Artificial Sequence: Synthetic oligonucleotide
  Epidermal growth factor receptor (EGFR), ERBB1 phosphotyrosine kinase siRNA
aaccctgactaccagcaggactt

SEQ ID NO: 8571 - DNA, 23 bp, Artificial Sequence
  Description of Artificial Sequence: Synthetic oligonucleotide
  Epidermal growth factor receptor (EGFR), ERBB1 phosphotyrosine kinase siRNA
accctgactaccagcaggacttc

SEQ ID NO: 8572 - DNA, 23 bp, Artificial Sequence
  Description of Artificial Sequence: Synthetic oligonucleotide
  Epidermal growth factor receptor (EGFR), ERBB1 phosphotyrosine kinase siRNA
ccctgactaccagcaggacttct

SEQ ID NO: 8573 - DNA, 23 bp, Artificial Sequence
  Description of Artificial Sequence: Synthetic oligonucleotide
  Epidermal growth factor receptor (EGFR), ERBB1 phosphotyrosine kinase siRNA
cctgactaccagcaggacttctt

SEQ ID NO: 8574 - DNA, 23 bp, Artificial Sequence
  Description of Artificial Sequence: Synthetic oligonucleotide
  Epidermal growth factor receptor (EGFR), ERBB1 phosphotyrosine kinase siRNA
ctgactaccagcaggacttcttt

SEQ ID NO: 8575 - DNA, 23 bp, Artificial Sequence
  Description of Artificial Sequence: Synthetic oligonucleotide
  Epidermal growth factor receptor (EGFR), ERBB1 phosphotyrosine kinase siRNA
tgactaccagcaggacttctttc

SEQ ID NO: 8576 - DNA, 23 bp, Artificial Sequence
  Description of Artificial Sequence: Synthetic oligonucleotide
  Epidermal growth factor receptor (EGFR), ERBB1 phosphotyrosine kinase siRNA
gactaccagcaggacttctttcc

SEQ ID NO: 8577 - DNA, 23 bp, Artificial Sequence
  Description of Artificial Sequence: Synthetic oligonucleotide
  Epidermal growth factor receptor (EGFR), ERBB1 phosphotyrosine kinase siRNA
actaccagcaggacttctttccc

SEQ ID NO: 8578 - DNA, 23 bp, Artificial Sequence
  Description of Artificial Sequence: Synthetic oligonucleotide
  Epidermal growth factor receptor (EGFR), ERBB1 phosphotyrosine kinase siRNA
ctaccagcaggacttctttccca

SEQ ID NO: 8579 - DNA, 23 bp, Artificial Sequence
  Description of Artificial Sequence: Synthetic oligonucleotide
  Epidermal growth factor receptor (EGFR), ERBB1 phosphotyrosine kinase siRNA
taccagcaggacttctttcccaa

SEQ ID NO: 8580 - DNA, 23 bp, Artificial Sequence
  Description of Artificial Sequence: Synthetic oligonucleotide
  Epidermal growth factor receptor (EGFR), ERBB1 phosphotyrosine kinase siRNA
accagcaggacttctttcccaag

SEQ ID NO: 8581 - DNA, 23 bp, Artificial Sequence
  Description of Artificial Sequence: Synthetic oligonucleotide
  Epidermal growth factor receptor (EGFR), ERBB1 phosphotyrosine kinase siRNA
ccagcaggacttctttcccaagg

SEQ ID NO: 8582 - DNA, 23 bp, Artificial Sequence
  Description of Artificial Sequence: Synthetic oligonucleotide
  Epidermal growth factor receptor (EGFR), ERBB1 phosphotyrosine kinase siRNA
cagcaggacttctttcccaagga

SEQ ID NO: 8583 - DNA, 23 bp, Artificial Sequence
  Description of Artificial Sequence: Synthetic oligonucleotide
  Epidermal growth factor receptor (EGFR), ERBB1 phosphotyrosine kinase siRNA
agcaggacttctttcccaaggaa

SEQ ID NO: 8584 - DNA, 23 bp, Artificial Sequence
  Description of Artificial Sequence: Synthetic oligonucleotide
  Epidermal growth factor receptor (EGFR), ERBB1 phosphotyrosine kinase siRNA
gcaggacttctttcccaaggaag

SEQ ID NO: 8585 - DNA, 23 bp, Artificial Sequence
  Description of Artificial Sequence: Synthetic oligonucleotide
  Epidermal growth factor receptor (EGFR), ERBB1 phosphotyrosine kinase siRNA
caggacttctttcccaaggaagc

SEQ ID NO: 8586 - DNA, 23 bp, Artificial Sequence
  Description of Artificial Sequence: Synthetic oligonucleotide
  Epidermal growth factor receptor (EGFR), ERBB1 phosphotyrosine kinase siRNA
aggacttctttcccaaggaagcc

SEQ ID NO: 8587 - DNA, 23 bp, Artificial Sequence
  Description of Artificial Sequence: Synthetic oligonucleotide
  Epidermal growth factor receptor (EGFR), ERBB1 phosphotyrosine kinase siRNA
ggacttctttcccaaggaagcca

SEQ ID NO: 8588 - DNA, 23 bp, Artificial Sequence
  Description of Artificial Sequence: Synthetic oligonucleotide
  Epidermal growth factor receptor (EGFR), ERBB1 phosphotyrosine kinase siRNA
gacttctttcccaaggaagccaa

SEQ ID NO: 8589 - DNA, 23 bp, Artificial Sequence
  Description of Artificial Sequence: Synthetic oligonucleotide
  Epidermal growth factor receptor (EGFR), ERBB1 phosphotyrosine kinase siRNA
acttctttcccaaggaagccaag

SEQ ID NO: 8590 - DNA, 23 bp, Artificial Sequence
  Description of Artificial Sequence: Synthetic oligonucleotide
  Epidermal growth factor receptor (EGFR), ERBB1 phosphotyrosine kinase siRNA
cttctttcccaaggaagccaagc

SEQ ID NO: 8591 - DNA, 23 bp, Artificial Sequence
  Description of Artificial Sequence: Synthetic oligonucleotide
  Epidermal growth factor receptor (EGFR), ERBB1 phosphotyrosine kinase siRNA
ttctttcccaaggaagccaagcc

SEQ ID NO: 8592 - DNA, 23 bp, Artificial Sequence
  Description of Artificial Sequence: Synthetic oligonucleotide
  Epidermal growth factor receptor (EGFR), ERBB1 phosphotyrosine kinase siRNA
tctttcccaaggaagccaagcca

SEQ ID NO: 8593 - DNA, 23 bp, Artificial Sequence
  Description of Artificial Sequence: Synthetic oligonucleotide
  Epidermal growth factor receptor (EGFR), ERBB1 phosphotyrosine kinase siRNA
ctttcccaaggaagccaagccaa

SEQ ID NO: 8594 - DNA, 23 bp, Artificial Sequence
  Description of Artificial Sequence: Synthetic oligonucleotide
  Epidermal growth factor receptor (EGFR), ERBB1 phosphotyrosine kinase siRNA
tttcccaaggaagccaagccaaa

SEQ ID NO: 8595 - DNA, 23 bp, Artificial Sequence
  Description of Artificial Sequence: Synthetic oligonucleotide
  Epidermal growth factor receptor (EGFR), ERBB1 phosphotyrosine kinase siRNA
ttcccaaggaagccaagccaaat

SEQ ID NO: 8596 - DNA, 23 bp, Artificial Sequence
  Description of Artificial Sequence: Synthetic oligonucleotide
  Epidermal growth factor receptor (EGFR), ERBB1 phosphotyrosine kinase siRNA
tcccaaggaagccaagccaaatg

SEQ ID NO: 8597 - DNA, 23 bp, Artificial Sequence
  Description of Artificial Sequence: Synthetic oligonucleotide
  Epidermal growth factor receptor (EGFR), ERBB1 phosphotyrosine kinase siRNA
cccaaggaagccaagccaaatgg

SEQ ID NO: 8598 - DNA, 23 bp, Artificial Sequence
  Description of Artificial Sequence: Synthetic oligonucleotide
  Epidermal growth factor receptor (EGFR), ERBB1 phosphotyrosine kinase siRNA
ccaaggaagccaagccaaatggc

SEQ ID NO: 8599 - DNA, 23 bp, Artificial Sequence
  Description of Artificial Sequence: Synthetic oligonucleotide
  Epidermal growth factor receptor (EGFR), ERBB1 phosphotyrosine kinase siRNA
caaggaagccaagccaaatggca

SEQ ID NO: 8600 - DNA, 23 bp, Artificial Sequence
  Description of Artificial Sequence: Synthetic oligonucleotide
  Epidermal growth factor receptor (EGFR), ERBB1 phosphotyrosine kinase siRNA
aaggaagccaagccaaatggcat

SEQ ID NO: 8601 - DNA, 23 bp, Artificial Sequence
  Description of Artificial Sequence: Synthetic oligonucleotide
  Epidermal growth factor receptor (EGFR), ERBB1 phosphotyrosine kinase siRNA
aggaagccaagccaaatggcatc

SEQ ID NO: 8602 - DNA, 23 bp, Artificial Sequence
  Description of Artificial Sequence: Synthetic oligonucleotide
  Epidermal growth factor receptor (EGFR), ERBB1 phosphotyrosine kinase siRNA
ggaagccaagccaaatggcatct

SEQ ID NO: 8603 - DNA, 23 bp, Artificial Sequence
  Description of Artificial Sequence: Synthetic oligonucleotide
  Epidermal growth factor receptor (EGFR), ERBB1 phosphotyrosine kinase siRNA
gaagccaagccaaatggcatctt

SEQ ID NO: 8604 - DNA, 23 bp, Artificial Sequence
  Description of Artificial Sequence: Synthetic oligonucleotide
  Epidermal growth factor receptor (EGFR), ERBB1 phosphotyrosine kinase siRNA
aagccaagccaaatggcatcttt

SEQ ID NO: 8605 - DNA, 23 bp, Artificial Sequence
  Description of Artificial Sequence: Synthetic oligonucleotide
  Epidermal growth factor receptor (EGFR), ERBB1 phosphotyrosine kinase siRNA
agccaagccaaatggcatcttta

SEQ ID NO: 8606 - DNA, 23 bp, Artificial Sequence
  Description of Artificial Sequence: Synthetic oligonucleotide
  Epidermal growth factor receptor (EGFR), ERBB1 phosphotyrosine kinase siRNA
gccaagccaaatggcatctttaa

SEQ ID NO: 8607 - DNA, 23 bp, Artificial Sequence
  Description of Artificial Sequence: Synthetic oligonucleotide
  Epidermal growth factor receptor (EGFR), ERBB1 phosphotyrosine kinase siRNA
ccaagccaaatggcatctttaag

SEQ ID NO: 8608 - DNA, 23 bp, Artificial Sequence
  Description of Artificial Sequence: Synthetic oligonucleotide
  Epidermal growth factor receptor (EGFR), ERBB1 phosphotyrosine kinase siRNA
caagccaaatggcatctttaagg

SEQ ID NO: 8609 - DNA, 23 bp, Artificial Sequence
  Description of Artificial Sequence: Synthetic oligonucleotide
  Epidermal growth factor receptor (EGFR), ERBB1 phosphotyrosine kinase siRNA
aagccaaatggcatctttaaggg

SEQ ID NO: 8610 - DNA, 23 bp, Artificial Sequence
  Description of Artificial Sequence: Synthetic oligonucleotide
  Epidermal growth factor receptor (EGFR), ERBB1 phosphotyrosine kinase siRNA
agccaaatggcatctttaagggc

SEQ ID NO: 8611 - DNA, 23 bp, Artificial Sequence
  Description of Artificial Sequence: Synthetic oligonucleotide
  Epidermal growth factor receptor (EGFR), ERBB1 phosphotyrosine kinase siRNA
gccaaatggcatctttaagggct

SEQ ID NO: 8612 - DNA, 23 bp, Artificial Sequence
  Description of Artificial Sequence: Synthetic oligonucleotide
  Epidermal growth factor receptor (EGFR), ERBB1 phosphotyrosine kinase siRNA
ccaaatggcatctttaagggctc

SEQ ID NO: 8613 - DNA, 23 bp, Artificial Sequence
  Description of Artificial Sequence: Synthetic oligonucleotide
  Epidermal growth factor receptor (EGFR), ERBB1 phosphotyrosine kinase siRNA
caaatggcatctttaagggctcc

SEQ ID NO: 8614 - DNA, 23 bp, Artificial Sequence
  Description of Artificial Sequence: Synthetic oligonucleotide
  Epidermal growth factor receptor (EGFR), ERBB1 phosphotyrosine kinase siRNA
aaatggcatctttaagggctcca

SEQ ID NO: 8615 - DNA, 23 bp, Artificial Sequence
  Description of Artificial Sequence: Synthetic oligonucleotide
  Epidermal growth factor receptor (EGFR), ERBB1 phosphotyrosine kinase siRNA
aatggcatctttaagggctccac

SEQ ID NO: 8616 - DNA, 23 bp, Artificial Sequence
  Description of Artificial Sequence: Synthetic oligonucleotide
  Epidermal growth factor receptor (EGFR), ERBB1 phosphotyrosine kinase siRNA
atggcatctttaagggctccaca

SEQ ID NO: 8617 - DNA, 23 bp, Artificial Sequence
  Description of Artificial Sequence: Synthetic oligonucleotide
  Epidermal growth factor receptor (EGFR), ERBB1 phosphotyrosine kinase siRNA
tggcatctttaagggctccacag

SEQ ID NO: 8618 - DNA, 23 bp, Artificial Sequence
  Description of Artificial Sequence: Synthetic oligonucleotide
  Epidermal growth factor receptor (EGFR), ERBB1 phosphotyrosine kinase siRNA
ggcatctttaagggctccacagc

SEQ ID NO: 8619 - DNA, 23 bp, Artificial Sequence
  Description of Artificial Sequence: Synthetic oligonucleotide
  Epidermal growth factor receptor (EGFR), ERBB1 phosphotyrosine kinase siRNA
gcatctttaagggctccacagct

SEQ ID NO: 8620 - DNA, 23 bp, Artificial Sequence
  Description of Artificial Sequence: Synthetic oligonucleotide
  Epidermal growth factor receptor (EGFR), ERBB1 phosphotyrosine kinase siRNA
catctttaagggctccacagctg

SEQ ID NO: 8621 - DNA, 23 bp, Artificial Sequence
  Description of Artificial Sequence: Synthetic oligonucleotide
  Epidermal growth factor receptor (EGFR), ERBB1 phosphotyrosine kinase siRNA
atctttaagggctccacagctga

SEQ ID NO: 8622 - DNA, 23 bp, Artificial Sequence
  Description of Artificial Sequence: Synthetic oligonucleotide
  Epidermal growth factor receptor (EGFR), ERBB1 phosphotyrosine kinase siRNA
tctttaagggctccacagctgaa

SEQ ID NO: 8623 - DNA, 23 bp, Artificial Sequence
  Description of Artificial Sequence: Synthetic oligonucleotide
  Epidermal growth factor receptor (EGFR), ERBB1 phosphotyrosine kinase siRNA
ctttaagggctccacagctgaaa

SEQ ID NO: 8624 - DNA, 23 bp, Artificial Sequence
  Description of Artificial Sequence: Synthetic oligonucleotide
  Epidermal growth factor receptor (EGFR), ERBB1 phosphotyrosine kinase siRNA
tttaagggctccacagctgaaaa

SEQ ID NO: 8625 - DNA, 23 bp, Artificial Sequence
  Description of Artificial Sequence: Synthetic oligonucleotide
  Epidermal growth factor receptor (EGFR), ERBB1 phosphotyrosine kinase siRNA
ttaagggctccacagctgaaaat

SEQ ID NO: 8626 - DNA, 23 bp, Artificial Sequence
  Description of Artificial Sequence: Synthetic oligonucleotide
  Epidermal growth factor receptor (EGFR), ERBB1 phosphotyrosine kinase siRNA
taagggctccacagctgaaaatg

SEQ ID NO: 8627 - DNA, 23 bp, Artificial Sequence
  Description of Artificial Sequence: Synthetic oligonucleotide
  Epidermal growth factor receptor (EGFR), ERBB1 phosphotyrosine kinase siRNA
aagggctccacagctgaaaatgc

SEQ ID NO: 8628 - DNA, 23 bp, Artificial Sequence
  Description of Artificial Sequence: Synthetic oligonucleotide
  Epidermal growth factor receptor (EGFR), ERBB1 phosphotyrosine kinase siRNA
agggctccacagctgaaaatgca

SEQ ID NO: 8629 - DNA, 23 bp, Artificial Sequence
  Description of Artificial Sequence: Synthetic oligonucleotide
  Epidermal growth factor receptor (EGFR), ERBB1 phosphotyrosine kinase siRNA
gggctccacagctgaaaatgcag

SEQ ID NO: 8630 - DNA, 23 bp, Artificial Sequence
  Description of Artificial Sequence: Synthetic oligonucleotide
  Epidermal growth factor receptor (EGFR), ERBB1 phosphotyrosine kinase siRNA
ggctccacagctgaaaatgcaga

SEQ ID NO: 8631 - DNA, 23 bp, Artificial Sequence
  Description of Artificial Sequence: Synthetic oligonucleotide
  Epidermal growth factor receptor (EGFR), ERBB1 phosphotyrosine kinase siRNA
gctccacagctgaaaatgcagaa

SEQ ID NO: 8632 - DNA, 23 bp, Artificial Sequence
  Description of Artificial Sequence: Synthetic oligonucleotide
  Epidermal growth factor receptor (EGFR), ERBB1 phosphotyrosine kinase siRNA
ctccacagctgaaaatgcagaat

SEQ ID NO: 8633 - DNA, 23 bp, Artificial Sequence
  Description of Artificial Sequence: Synthetic oligonucleotide
  Epidermal growth factor receptor (EGFR), ERBB1 phosphotyrosine kinase siRNA
tccacagctgaaaatgcagaata

SEQ ID NO: 8634 - DNA, 23 bp, Artificial Sequence
  Description of Artificial Sequence: Synthetic oligonucleotide
  Epidermal growth factor receptor (EGFR), ERBB1 phosphotyrosine kinase siRNA
ccacagctgaaaatgcagaatac

SEQ ID NO: 8635 - DNA, 23 bp, Artificial Sequence
  Description of Artificial Sequence: Synthetic oligonucleotide
  Epidermal growth factor receptor (EGFR), ERBB1 phosphotyrosine kinase siRNA
cacagctgaaaatgcagaatacc

SEQ ID NO: 8636 - DNA, 23 bp, Artificial Sequence
  Description of Artificial Sequence: Synthetic oligonucleotide
  Epidermal growth factor receptor (EGFR), ERBB1 phosphotyrosine kinase siRNA
acagctgaaaatgcagaatacct

SEQ ID NO: 8637 - DNA, 23 bp, Artificial Sequence
  Description of Artificial Sequence: Synthetic oligonucleotide
  Epidermal growth factor receptor (EGFR), ERBB1 phosphotyrosine kinase siRNA
cagctgaaaatgcagaataccta

SEQ ID NO: 8638 - DNA, 23 bp, Artificial Sequence
  Description of Artificial Sequence: Synthetic oligonucleotide
  Epidermal growth factor receptor (EGFR), ERBB1 phosphotyrosine kinase siRNA
agctgaaaatgcagaatacctaa

SEQ ID NO: 8639 - DNA, 23 bp, Artificial Sequence
  Description of Artificial Sequence: Synthetic oligonucleotide
  Epidermal growth factor receptor (EGFR), ERBB1 phosphotyrosine kinase siRNA
gctgaaaatgcagaatacctaag

SEQ ID NO: 8640 - DNA, 23 bp, Artificial Sequence
  Description of Artificial Sequence: Synthetic oligonucleotide
  Epidermal growth factor receptor (EGFR), ERBB1 phosphotyrosine kinase siRNA
ctgaaaatgcagaatacctaagg

SEQ ID NO: 8641 - DNA, 23 bp, Artificial Sequence
  Description of Artificial Sequence: Synthetic oligonucleotide
  Epidermal growth factor receptor (EGFR), ERBB1 phosphotyrosine kinase siRNA
tgaaaatgcagaatacctaaggg

SEQ ID NO: 8642 - DNA, 23 bp, Artificial Sequence
  Description of Artificial Sequence: Synthetic oligonucleotide
  Epidermal growth factor receptor (EGFR), ERBB1 phosphotyrosine kinase siRNA
gaaaatgcagaatacctaagggt

SEQ ID NO: 8643 - DNA, 23 bp, Artificial Sequence
  Description of Artificial Sequence: Synthetic oligonucleotide
  Epidermal growth factor receptor (EGFR), ERBB1 phosphotyrosine kinase siRNA
aaaatgcagaatacctaagggtc

SEQ ID NO: 8644 - DNA, 23 bp, Artificial Sequence
  Description of Artificial Sequence: Synthetic oligonucleotide
  Epidermal growth factor receptor (EGFR), ERBB1 phosphotyrosine kinase siRNA
aaatgcagaatacctaagggtcg

SEQ ID NO: 8645 - DNA, 23 bp, Artificial Sequence
  Description of Artificial Sequence: Synthetic oligonucleotide
  Epidermal growth factor receptor (EGFR), ERBB1 phosphotyrosine kinase siRNA
aatgcagaatacctaagggtcgc

SEQ ID NO: 8646 - DNA, 23 bp, Artificial Sequence
  Description of Artificial Sequence: Synthetic oligonucleotide
  Epidermal growth factor receptor (EGFR), ERBB1 phosphotyrosine kinase siRNA
atgcagaatacctaagggtcgcg

SEQ ID NO: 8647 - DNA, 23 bp, Artificial Sequence
  Description of Artificial Sequence: Synthetic oligonucleotide
  Epidermal growth factor receptor (EGFR), ERBB1 phosphotyrosine kinase siRNA
tgcagaatacctaagggtcgcgc

SEQ ID NO: 8648 - DNA, 23 bp, Artificial Sequence
  Description of Artificial Sequence: Synthetic oligonucleotide
  Epidermal growth factor receptor (EGFR), ERBB1 phosphotyrosine kinase siRNA
gcagaatacctaagggtcgcgcc

SEQ ID NO: 8649 - DNA, 23 bp, Artificial Sequence
  Description of Artificial Sequence: Synthetic oligonucleotide
  Epidermal growth factor receptor (EGFR), ERBB1 phosphotyrosine kinase siRNA
cagaatacctaagggtcgcgcca

SEQ ID NO: 8650 - DNA, 23 bp, Artificial Sequence
  Description of Artificial Sequence: Synthetic oligonucleotide
  Epidermal growth factor receptor (EGFR), ERBB1 phosphotyrosine kinase siRNA
agaatacctaagggtcgcgccac

SEQ ID NO: 8651 - DNA, 23 bp, Artificial Sequence
  Description of Artificial Sequence: Synthetic oligonucleotide
  Epidermal growth factor receptor (EGFR), ERBB1 phosphotyrosine kinase siRNA
gaatacctaagggtcgcgccaca

SEQ ID NO: 8652 - DNA, 23 bp, Artificial Sequence
  Description of Artificial Sequence: Synthetic oligonucleotide
  Epidermal growth factor receptor (EGFR), ERBB1 phosphotyrosine kinase siRNA
aatacctaagggtcgcgccacaa

SEQ ID NO: 8653 - DNA, 23 bp, Artificial Sequence
  Description of Artificial Sequence: Synthetic oligonucleotide
  Epidermal growth factor receptor (EGFR), ERBB1 phosphotyrosine kinase siRNA
atacctaagggtcgcgccacaaa

SEQ ID NO: 8654 - DNA, 23 bp, Artificial Sequence
  Description of Artificial Sequence: Synthetic oligonucleotide
  Epidermal growth factor receptor (EGFR), ERBB1 phosphotyrosine kinase siRNA
tacctaagggtcgcgccacaaag

SEQ ID NO: 8655 - DNA, 23 bp, Artificial Sequence
  Description of Artificial Sequence: Synthetic oligonucleotide
  Epidermal growth factor receptor (EGFR), ERBB1 phosphotyrosine kinase siRNA
acctaagggtcgcgccacaaagc

SEQ ID NO: 8656 - DNA, 23 bp, Artificial Sequence
  Description of Artificial Sequence: Synthetic oligonucleotide
  Epidermal growth factor receptor (EGFR), ERBB1 phosphotyrosine kinase siRNA
cctaagggtcgcgccacaaagca

SEQ ID NO: 8657 - DNA, 23 bp, Artificial Sequence
  Description of Artificial Sequence: Synthetic oligonucleotide
  Epidermal growth factor receptor (EGFR), ERBB1 phosphotyrosine kinase siRNA
ctaagggtcgcgccacaaagcag

SEQ ID NO: 8658 - DNA, 23 bp, Artificial Sequence
  Description of Artificial Sequence: Synthetic oligonucleotide
  Epidermal growth factor receptor (EGFR), ERBB1 phosphotyrosine kinase siRNA
taagggtcgcgccacaaagcagt

SEQ ID NO: 8659 - DNA, 23 bp, Artificial Sequence
  Description of Artificial Sequence: Synthetic oligonucleotide
  Epidermal growth factor receptor (EGFR), ERBB1 phosphotyrosine kinase siRNA
aagggtcgcgccacaaagcagtg

SEQ ID NO: 8660 - DNA, 23 bp, Artificial Sequence
  Description of Artificial Sequence: Synthetic oligonucleotide
  Epidermal growth factor receptor (EGFR), ERBB1 phosphotyrosine kinase siRNA
agggtcgcgccacaaagcagtga

SEQ ID NO: 8661 - DNA, 23 bp, Artificial Sequence
  Description of Artificial Sequence: Synthetic oligonucleotide
  Epidermal growth factor receptor (EGFR), ERBB1 phosphotyrosine kinase siRNA
gggtcgcgccacaaagcagtgaa

SEQ ID NO: 8662 - DNA, 23 bp, Artificial Sequence
  Description of Artificial Sequence: Synthetic oligonucleotide
  Epidermal growth factor receptor (EGFR), ERBB1 phosphotyrosine kinase siRNA
ggtcgcgccacaaagcagtgaat

SEQ ID NO: 8663 - DNA, 23 bp, Artificial Sequence
  Description of Artificial Sequence: Synthetic oligonucleotide
  Epidermal growth factor receptor (EGFR), ERBB1 phosphotyrosine kinase siRNA
gtcgcgccacaaagcagtgaatt

SEQ ID NO: 8664 - DNA, 23 bp, Artificial Sequence
  Description of Artificial Sequence: Synthetic oligonucleotide
  Epidermal growth factor receptor (EGFR), ERBB1 phosphotyrosine kinase siRNA
tcgcgccacaaagcagtgaattt

SEQ ID NO: 8665 - DNA, 23 bp, Artificial Sequence
  Description of Artificial Sequence: Synthetic oligonucleotide
  Epidermal growth factor receptor (EGFR), ERBB1 phosphotyrosine kinase siRNA
cgcgccacaaagcagtgaattta

SEQ ID NO: 8666 - DNA, 23 bp, Artificial Sequence
  Description of Artificial Sequence: Synthetic oligonucleotide
  Epidermal growth factor receptor (EGFR), ERBB1 phosphotyrosine kinase siRNA
gcgccacaaagcagtgaatttat

SEQ ID NO: 8667 - DNA, 23 bp, Artificial Sequence
  Description of Artificial Sequence: Synthetic oligonucleotide
  Epidermal growth factor receptor (EGFR), ERBB1 phosphotyrosine kinase siRNA
cgccacaaagcagtgaatttatt

SEQ ID NO: 8668 - DNA, 23 bp, Artificial Sequence
  Description of Artificial Sequence: Synthetic oligonucleotide
  Epidermal growth factor receptor (EGFR), ERBB1 phosphotyrosine kinase siRNA
gccacaaagcagtgaatttattg

SEQ ID NO: 8669 - DNA, 23 bp, Artificial Sequence
  Description of Artificial Sequence: Synthetic oligonucleotide
  Epidermal growth factor receptor (EGFR), ERBB1 phosphotyrosine kinase siRNA
ccacaaagcagtgaatttattgg

SEQ ID NO: 8670 - DNA, 23 bp, Artificial Sequence
  Description of Artificial Sequence: Synthetic oligonucleotide
  Epidermal growth factor receptor (EGFR), ERBB1 phosphotyrosine kinase siRNA
cacaaagcagtgaatttattgga

SEQ ID NO: 8671 - DNA, 23 bp, Artificial Sequence
  Description of Artificial Sequence: Synthetic oligonucleotide
  Epidermal growth factor receptor (EGFR), ERBB1 phosphotyrosine kinase siRNA
acaaagcagtgaatttattggag

SEQ ID NO: 8672 - DNA, 23 bp, Artificial Sequence
  Description of Artificial Sequence: Synthetic oligonucleotide
  Epidermal growth factor receptor (EGFR), ERBB1 phosphotyrosine kinase siRNA
caaagcagtgaatttattggagc

SEQ ID NO: 8673 - DNA, 23 bp, Artificial Sequence
  Description of Artificial Sequence: Synthetic oligonucleotide
  Epidermal growth factor receptor (EGFR), ERBB1 phosphotyrosine kinase siRNA
aaagcagtgaatttattggagca

SEQ ID NO: 8674 - DNA, 23 bp, Artificial Sequence
  Description of Artificial Sequence: Synthetic oligonucleotide
  Epidermal growth factor receptor (EGFR), ERBB1 phosphotyrosine kinase siRNA
aagcagtgaatttattggagcat

SEQ ID NO: 8675 - DNA, 23 bp, Artificial Sequence
  Description of Artificial Sequence: Synthetic oligonucleotide
  Epidermal growth factor receptor (EGFR), ERBB1 phosphotyrosine kinase siRNA
agcagtgaatttattggagcatg

SEQ ID NO: 8676 - DNA, 23 bp, Artificial Sequence
  Description of Artificial Sequence: Synthetic oligonucleotide
  Epidermal growth factor receptor (EGFR), ERBB1 phosphotyrosine kinase siRNA
ccacggaggatagtatgagccct

SEQ ID NO: 8677 - DNA, 23 bp, Artificial Sequence
  Description of Artificial Sequence: Synthetic oligonucleotide
  Epidermal growth factor receptor (EGFR), ERBB1 phosphotyrosine kinase siRNA
cacggaggatagtatgagcccta

SEQ ID NO: 8678 - DNA, 23 bp, Artificial Sequence
  Description of Artificial Sequence: Synthetic oligonucleotide
  Epidermal growth factor receptor (EGFR), ERBB1 phosphotyrosine kinase siRNA
acggaggatagtatgagccctaa

SEQ ID NO: 8679 - DNA, 23 bp, Artificial Sequence
  Description of Artificial Sequence: Synthetic oligonucleotide
  Epidermal growth factor receptor (EGFR), ERBB1 phosphotyrosine kinase siRNA
cggaggatagtatgagccctaaa

SEQ ID NO: 8680 - DNA, 23 bp, Artificial Sequence
  Description of Artificial Sequence: Synthetic oligonucleotide
  Epidermal growth factor receptor (EGFR), ERBB1 phosphotyrosine kinase siRNA
ggaggatagtatgagccctaaaa

SEQ ID NO: 8681 - DNA, 23 bp, Artificial Sequence
  Description of Artificial Sequence: Synthetic oligonucleotide
  Epidermal growth factor receptor (EGFR), ERBB1 phosphotyrosine kinase siRNA
gaggatagtatgagccctaaaaa

SEQ ID NO: 8682 - DNA, 23 bp, Artificial Sequence
  Description of Artificial Sequence: Synthetic oligonucleotide
  Epidermal growth factor receptor (EGFR), ERBB1 phosphotyrosine kinase siRNA
aggatagtatgagccctaaaaat

SEQ ID NO: 8683 - DNA, 23 bp, Artificial Sequence
  Description of Artificial Sequence: Synthetic oligonucleotide
  Epidermal growth factor receptor (EGFR), ERBB1 phosphotyrosine kinase siRNA
ggatagtatgagccctaaaaatc

SEQ ID NO: 8684 - DNA, 23 bp, Artificial Sequence
  Description of Artificial Sequence: Synthetic oligonucleotide
  Epidermal growth factor receptor (EGFR), ERBB1 phosphotyrosine kinase siRNA
gatagtatgagccctaaaaatcc

SEQ ID NO: 8685 - DNA, 23 bp, Artificial Sequence
  Description of Artificial Sequence: Synthetic oligonucleotide
  Epidermal growth factor receptor (EGFR), ERBB1 phosphotyrosine kinase siRNA
atagtatgagccctaaaaatcca

SEQ ID NO: 8686 - DNA, 23 bp, Artificial Sequence
  Description of Artificial Sequence: Synthetic oligonucleotide
  Epidermal growth factor receptor (EGFR), ERBB1 phosphotyrosine kinase siRNA
tagtatgagccctaaaaatccag

SEQ ID NO: 8687 - DNA, 23 bp, Artificial Sequence
  Description of Artificial Sequence: Synthetic oligonucleotide
  Epidermal growth factor receptor (EGFR), ERBB1 phosphotyrosine kinase siRNA
agtatgagccctaaaaatccaga

SEQ ID NO: 8688 - DNA, 23 bp, Artificial Sequence
  Description of Artificial Sequence: Synthetic oligonucleotide
  Epidermal growth factor receptor (EGFR), ERBB1 phosphotyrosine kinase siRNA
gtatgagccctaaaaatccagac

SEQ ID NO: 8689 - DNA, 23 bp, Artificial Sequence
  Description of Artificial Sequence: Synthetic oligonucleotide
  Epidermal growth factor receptor (EGFR), ERBB1 phosphotyrosine kinase siRNA
tatgagccctaaaaatccagact

SEQ ID NO: 8690 - DNA, 23 bp, Artificial Sequence
  Description of Artificial Sequence: Synthetic oligonucleotide
  Epidermal growth factor receptor (EGFR), ERBB1 phosphotyrosine kinase siRNA
atgagccctaaaaatccagactc

SEQ ID NO: 8691 - DNA, 23 bp, Artificial Sequence
  Description of Artificial Sequence: Synthetic oligonucleotide
  Epidermal growth factor receptor (EGFR), ERBB1 phosphotyrosine kinase siRNA
tgagccctaaaaatccagactct

SEQ ID NO: 8692 - DNA, 23 bp, Artificial Sequence
  Description of Artificial Sequence: Synthetic oligonucleotide
  Epidermal growth factor receptor (EGFR), ERBB1 phosphotyrosine kinase siRNA
gagccctaaaaatccagactctt

SEQ ID NO: 8693 - DNA, 23 bp, Artificial Sequence
  Description of Artificial Sequence: Synthetic oligonucleotide
  Epidermal growth factor receptor (EGFR), ERBB1 phosphotyrosine kinase siRNA
agccctaaaaatccagactcttt

SEQ ID NO: 8694 - DNA, 23 bp, Artificial Sequence
  Description of Artificial Sequence: Synthetic oligonucleotide
  Epidermal growth factor receptor (EGFR), ERBB1 phosphotyrosine kinase siRNA
gccctaaaaatccagactctttc

SEQ ID NO: 8695 - DNA, 23 bp, Artificial Sequence
  Description of Artificial Sequence: Synthetic oligonucleotide
  Epidermal growth factor receptor (EGFR), ERBB1 phosphotyrosine kinase siRNA
ccctaaaaatccagactctttcg

SEQ ID NO: 8696 - DNA, 23 bp, Artificial Sequence
  Description of Artificial Sequence: Synthetic oligonucleotide
  Epidermal growth factor receptor (EGFR), ERBB1 phosphotyrosine kinase siRNA
cctaaaaatccagactctttcga

SEQ ID NO: 8697 - DNA, 23 bp, Artificial Sequence
  Description of Artificial Sequence: Synthetic oligonucleotide
  Epidermal growth factor receptor (EGFR), ERBB1 phosphotyrosine kinase siRNA
ctaaaaatccagactctttcgat

SEQ ID NO: 8698 - DNA, 23 bp, Artificial Sequence
  Description of Artificial Sequence: Synthetic oligonucleotide
  Epidermal growth factor receptor (EGFR), ERBB1 phosphotyrosine kinase siRNA
taaaaatccagactctttcgata

SEQ ID NO: 8699 - DNA, 23 bp, Artificial Sequence
  Description of Artificial Sequence: Synthetic oligonucleotide
  Epidermal growth factor receptor (EGFR), ERBB1 phosphotyrosine kinase siRNA
aaaaatccagactctttcgatac

SEQ ID NO: 8700 - DNA, 23 bp, Artificial Sequence
  Description of Artificial Sequence: Synthetic oligonucleotide
  Epidermal growth factor receptor (EGFR), ERBB1 phosphotyrosine kinase siRNA
aaaatccagactctttcgatacc

SEQ ID NO: 8701 - DNA, 23 bp, Artificial Sequence
  Description of Artificial Sequence: Synthetic oligonucleotide
  Epidermal growth factor receptor (EGFR), ERBB1 phosphotyrosine kinase siRNA
aaatccagactctttcgataccc

SEQ ID NO: 8702 - DNA, 23 bp, Artificial Sequence
  Description of Artificial Sequence: Synthetic oligonucleotide
  Epidermal growth factor receptor (EGFR), ERBB1 phosphotyrosine kinase siRNA
aatccagactctttcgataccca

SEQ ID NO: 8703 - DNA, 23 bp, Artificial Sequence
  Description of Artificial Sequence: Synthetic oligonucleotide
  Epidermal growth factor receptor (EGFR), ERBB1 phosphotyrosine kinase siRNA
atccagactctttcgatacccag

SEQ ID NO: 8704 - DNA, 23 bp, Artificial Sequence
  Description of Artificial Sequence: Synthetic oligonucleotide
  Epidermal growth factor receptor (EGFR), ERBB1 phosphotyrosine kinase siRNA
tccagactctttcgatacccagg

SEQ ID NO: 8705 - DNA, 23 bp, Artificial Sequence
  Description of Artificial Sequence: Synthetic oligonucleotide
  Epidermal growth factor receptor (EGFR), ERBB1 phosphotyrosine kinase siRNA
ccagactctttcgatacccagga

SEQ ID NO: 8706 - DNA, 23 bp, Artificial Sequence
  Description of Artificial Sequence: Synthetic oligonucleotide
  Epidermal growth factor receptor (EGFR), ERBB1 phosphotyrosine kinase siRNA
cagactctttcgatacccaggac

SEQ ID NO: 8707 - DNA, 23 bp, Artificial Sequence
  Description of Artificial Sequence: Synthetic oligonucleotide
  Epidermal growth factor receptor (EGFR), ERBB1 phosphotyrosine kinase siRNA
agactctttcgatacccaggacc

SEQ ID NO: 8708 - DNA, 23 bp, Artificial Sequence
  Description of Artificial Sequence: Synthetic oligonucleotide
  Epidermal growth factor receptor (EGFR), ERBB1 phosphotyrosine kinase siRNA
gactctttcgatacccaggacca

SEQ ID NO: 8709 - DNA, 23 bp, Artificial Sequence
  Description of Artificial Sequence: Synthetic oligonucleotide
  Epidermal growth factor receptor (EGFR), ERBB1 phosphotyrosine kinase siRNA
actctttcgatacccaggaccaa

SEQ ID NO: 8710 - DNA, 23 bp, Artificial Sequence
  Description of Artificial Sequence: Synthetic oligonucleotide
  Epidermal growth factor receptor (EGFR), ERBB1 phosphotyrosine kinase siRNA
ctctttcgatacccaggaccaag

SEQ ID NO: 8711 - DNA, 23 bp, Artificial Sequence
  Description of Artificial Sequence: Synthetic oligonucleotide
  Epidermal growth factor receptor (EGFR), ERBB1 phosphotyrosine kinase siRNA
tctttcgatacccaggaccaagc

SEQ ID NO: 8712 - DNA, 23 bp, Artificial Sequence
  Description of Artificial Sequence: Synthetic oligonucleotide
  Epidermal growth factor receptor (EGFR), ERBB1 phosphotyrosine kinase siRNA
ctttcgatacccaggaccaagcc

SEQ ID NO: 8713 - DNA, 23 bp, Artificial Sequence
  Description of Artificial Sequence: Synthetic oligonucleotide
  Epidermal growth factor receptor (EGFR), ERBB1 phosphotyrosine kinase siRNA
tttcgatacccaggaccaagcca

SEQ ID NO: 8714 - DNA, 23 bp, Artificial Sequence
  Description of Artificial Sequence: Synthetic oligonucleotide
  Epidermal growth factor receptor (EGFR), ERBB1 phosphotyrosine kinase siRNA
ttcgatacccaggaccaagccac

SEQ ID NO: 8715 - DNA, 23 bp, Artificial Sequence
  Description of Artificial Sequence: Synthetic oligonucleotide
  Epidermal growth factor receptor (EGFR), ERBB1 phosphotyrosine kinase siRNA
tcgatacccaggaccaagccaca

SEQ ID NO: 8716 - DNA, 23 bp, Artificial Sequence
  Description of Artificial Sequence: Synthetic oligonucleotide
  Epidermal growth factor receptor (EGFR), ERBB1 phosphotyrosine kinase siRNA
cgatacccaggaccaagccacag

SEQ ID NO: 8717 - DNA, 23 bp, Artificial Sequence
  Description of Artificial Sequence: Synthetic oligonucleotide
  Epidermal growth factor receptor (EGFR), ERBB1 phosphotyrosine kinase siRNA
gatacccaggaccaagccacagc

SEQ ID NO: 8718 - DNA, 23 bp, Artificial Sequence
  Description of Artificial Sequence: Synthetic oligonucleotide
  Epidermal growth factor receptor (EGFR), ERBB1 phosphotyrosine kinase siRNA
atacccaggaccaagccacagca

SEQ ID NO: 8719 - DNA, 23 bp, Artificial Sequence
  Description of Artificial Sequence: Synthetic oligonucleotide
  Epidermal growth factor receptor (EGFR), ERBB1 phosphotyrosine kinase siRNA
tacccaggaccaagccacagcag

SEQ ID NO: 8720 - DNA, 23 bp, Artificial Sequence
  Description of Artificial Sequence: Synthetic oligonucleotide
  Epidermal growth factor receptor (EGFR), ERBB1 phosphotyrosine kinase siRNA
acccaggaccaagccacagcagg

SEQ ID NO: 8721 - DNA, 23 bp, Artificial Sequence
  Description of Artificial Sequence: Synthetic oligonucleotide
  Epidermal growth factor receptor (EGFR), ERBB1 phosphotyrosine kinase siRNA
cccaggaccaagccacagcaggt

SEQ ID NO: 8722 - DNA, 23 bp, Artificial Sequence
  Description of Artificial Sequence: Synthetic oligonucleotide
  Epidermal growth factor receptor (EGFR), ERBB1 phosphotyrosine kinase siRNA
ccaggaccaagccacagcaggtc

SEQ ID NO: 8723 - DNA, 23 bp, Artificial Sequence
  Description of Artificial Sequence: Synthetic oligonucleotide
  Epidermal growth factor receptor (EGFR), ERBB1 phosphotyrosine kinase siRNA
caggaccaagccacagcaggtcc

SEQ ID NO: 8724 - DNA, 23 bp, Artificial Sequence
  Description of Artificial Sequence: Synthetic oligonucleotide
  Epidermal growth factor receptor (EGFR), ERBB1 phosphotyrosine kinase siRNA
aggaccaagccacagcaggtcct

SEQ ID NO: 8725 - DNA, 23 bp, Artificial Sequence
  Description of Artificial Sequence: Synthetic oligonucleotide
  Epidermal growth factor receptor (EGFR), ERBB1 phosphotyrosine kinase siRNA
ggaccaagccacagcaggtcctc

SEQ ID NO: 8726 - DNA, 23 bp, Artificial Sequence
  Description of Artificial Sequence: Synthetic oligonucleotide
  Epidermal growth factor receptor (EGFR), ERBB1 phosphotyrosine kinase siRNA
gaccaagccacagcaggtcctcc

SEQ ID NO: 8727 - DNA, 23 bp, Artificial Sequence
  Description of Artificial Sequence: Synthetic oligonucleotide
  Epidermal growth factor receptor (EGFR), ERBB1 phosphotyrosine kinase siRNA
accaagccacagcaggtcctcca

SEQ ID NO: 8728 - DNA, 23 bp, Artificial Sequence
  Description of Artificial Sequence: Synthetic oligonucleotide
  Epidermal growth factor receptor (EGFR), ERBB1 phosphotyrosine kinase siRNA
ccaagccacagcaggtcctccat

SEQ ID NO: 8729 - DNA, 23 bp, Artificial Sequence
  Description of Artificial Sequence: Synthetic oligonucleotide
  Epidermal growth factor receptor (EGFR), ERBB1 phosphotyrosine kinase siRNA
caagccacagcaggtcctccatc

SEQ ID NO: 8730 - DNA, 23 bp, Artificial Sequence
  Description of Artificial Sequence: Synthetic oligonucleotide
  Epidermal growth factor receptor (EGFR), ERBB1 phosphotyrosine kinase siRNA
aagccacagcaggtcctccatcc

SEQ ID NO: 8731 - DNA, 23 bp, Artificial Sequence
  Description of Artificial Sequence: Synthetic oligonucleotide
  Epidermal growth factor receptor (EGFR), ERBB1 phosphotyrosine kinase siRNA
agccacagcaggtcctccatccc

SEQ ID NO: 8732 - DNA, 23 bp, Artificial Sequence
  Description of Artificial Sequence: Synthetic oligonucleotide
  Epidermal growth factor receptor (EGFR), ERBB1 phosphotyrosine kinase siRNA
gccacagcaggtcctccatccca

SEQ ID NO: 8733 - DNA, 23 bp, Artificial Sequence
  Description of Artificial Sequence: Synthetic oligonucleotide
  Epidermal growth factor receptor (EGFR), ERBB1 phosphotyrosine kinase siRNA
ccacagcaggtcctccatcccaa

SEQ ID NO: 8734 - DNA, 23 bp, Artificial Sequence
  Description of Artificial Sequence: Synthetic oligonucleotide
  Epidermal growth factor receptor (EGFR), ERBB1 phosphotyrosine kinase siRNA
cacagcaggtcctccatcccaac

SEQ ID NO: 8735 - DNA, 23 bp, Artificial Sequence
  Description of Artificial Sequence: Synthetic oligonucleotide
  Epidermal growth factor receptor (EGFR), ERBB1 phosphotyrosine kinase siRNA
acagcaggtcctccatcccaaca

SEQ ID NO: 8736 - DNA, 23 bp, Artificial Sequence
  Description of Artificial Sequence: Synthetic oligonucleotide
  Epidermal growth factor receptor (EGFR), ERBB1 phosphotyrosine kinase siRNA
cagcaggtcctccatcccaacag

SEQ ID NO: 8737 - DNA, 23 bp, Artificial Sequence
  Description of Artificial Sequence: Synthetic oligonucleotide
  Epidermal growth factor receptor (EGFR), ERBB1 phosphotyrosine kinase siRNA
agcaggtcctccatcccaacagc

SEQ ID NO: 8738 - DNA, 23 bp, Artificial Sequence
  Description of Artificial Sequence: Synthetic oligonucleotide
  Epidermal growth factor receptor (EGFR), ERBB1 phosphotyrosine kinase siRNA
gcaggtcctccatcccaacagcc

SEQ ID NO: 8739 - DNA, 23 bp, Artificial Sequence
  Description of Artificial Sequence: Synthetic oligonucleotide
  Epidermal growth factor receptor (EGFR), ERBB1 phosphotyrosine kinase siRNA
caggtcctccatcccaacagcca

SEQ ID NO: 8740 - DNA, 23 bp, Artificial Sequence
  Description of Artificial Sequence: Synthetic oligonucleotide
  Epidermal growth factor receptor (EGFR), ERBB1 phosphotyrosine kinase siRNA
aggtcctccatcccaacagccat

SEQ ID NO: 8741 - DNA, 23 bp, Artificial Sequence
  Description of Artificial Sequence: Synthetic oligonucleotide
  Epidermal growth factor receptor (EGFR), ERBB1 phosphotyrosine kinase siRNA
ggtcctccatcccaacagccatg

SEQ ID NO: 8742 - DNA, 23 bp, Artificial Sequence
  Description of Artificial Sequence: Synthetic oligonucleotide
  Epidermal growth factor receptor (EGFR), ERBB1 phosphotyrosine kinase siRNA
gtcctccatcccaacagccatgc

SEQ ID NO: 8743 - DNA, 23 bp, Artificial Sequence
  Description of Artificial Sequence: Synthetic oligonucleotide
  Epidermal growth factor receptor (EGFR), ERBB1 phosphotyrosine kinase siRNA
tcctccatcccaacagccatgcc

SEQ ID NO: 8744 - DNA, 23 bp, Artificial Sequence
  Description of Artificial Sequence: Synthetic oligonucleotide
  Epidermal growth factor receptor (EGFR), ERBB1 phosphotyrosine kinase siRNA
cctccatcccaacagccatgccc

SEQ ID NO: 8745 - DNA, 23 bp, Artificial Sequence
  Description of Artificial Sequence: Synthetic oligonucleotide
  Epidermal growth factor receptor (EGFR), ERBB1 phosphotyrosine kinase siRNA
ctccatcccaacagccatgcccg

SEQ ID NO: 8746 - DNA, 23 bp, Artificial Sequence
  Description of Artificial Sequence: Synthetic oligonucleotide
  Epidermal growth factor receptor (EGFR), ERBB1 phosphotyrosine kinase siRNA
tccatcccaacagccatgcccgc

SEQ ID NO: 8747 - DNA, 23 bp, Artificial Sequence
  Description of Artificial Sequence: Synthetic oligonucleotide
  Epidermal growth factor receptor (EGFR), ERBB1 phosphotyrosine kinase siRNA
ccatcccaacagccatgcccgca

SEQ ID NO: 8748 - DNA, 23 bp, Artificial Sequence
  Description of Artificial Sequence: Synthetic oligonucleotide
  Epidermal growth factor receptor (EGFR), ERBB1 phosphotyrosine kinase siRNA
catcccaacagccatgcccgcat

SEQ ID NO: 8749 - DNA, 23 bp, Artificial Sequence
  Description of Artificial Sequence: Synthetic oligonucleotide
  Epidermal growth factor receptor (EGFR), ERBB1 phosphotyrosine kinase siRNA
atcccaacagccatgcccgcatt

SEQ ID NO: 8750 - DNA, 23 bp, Artificial Sequence
  Description of Artificial Sequence: Synthetic oligonucleotide
  Epidermal growth factor receptor (EGFR), ERBB1 phosphotyrosine kinase siRNA
tcccaacagccatgcccgcatta

SEQ ID NO: 8751 - DNA, 23 bp, Artificial Sequence
  Description of Artificial Sequence: Synthetic oligonucleotide
  Epidermal growth factor receptor (EGFR), ERBB1 phosphotyrosine kinase siRNA
cccaacagccatgcccgcattag

SEQ ID NO: 8752 - DNA, 23 bp, Artificial Sequence
  Description of Artificial Sequence: Synthetic oligonucleotide
  Epidermal growth factor receptor (EGFR), ERBB1 phosphotyrosine kinase siRNA
ccaacagccatgcccgcattagc

SEQ ID NO: 8753 - DNA, 23 bp, Artificial Sequence
  Description of Artificial Sequence: Synthetic oligonucleotide
  Epidermal growth factor receptor (EGFR), ERBB1 phosphotyrosine kinase siRNA
caacagccatgcccgcattagct

SEQ ID NO: 8754 - DNA, 23 bp, Artificial Sequence
  Description of Artificial Sequence: Synthetic oligonucleotide
  Epidermal growth factor receptor (EGFR), ERBB1 phosphotyrosine kinase siRNA
aacagccatgcccgcattagctc

SEQ ID NO: 8755 - DNA, 23 bp, Artificial Sequence
  Description of Artificial Sequence: Synthetic oligonucleotide
  Epidermal growth factor receptor (EGFR), ERBB1 phosphotyrosine kinase siRNA
acagccatgcccgcattagctct

SEQ ID NO: 8756 - DNA, 23 bp, Artificial Sequence
  Description of Artificial Sequence: Synthetic oligonucleotide
  Epidermal growth factor receptor (EGFR), ERBB1 phosphotyrosine kinase siRNA
cagccatgcccgcattagctctt

SEQ ID NO: 8757 - DNA, 23 bp, Artificial Sequence
  Description of Artificial Sequence: Synthetic oligonucleotide
  Epidermal growth factor receptor (EGFR), ERBB1 phosphotyrosine kinase siRNA
agccatgcccgcattagctctta

SEQ ID NO: 8758 - DNA, 23 bp, Artificial Sequence
  Description of Artificial Sequence: Synthetic oligonucleotide
  Epidermal growth factor receptor (EGFR), ERBB1 phosphotyrosine kinase siRNA
gccatgcccgcattagctcttag

SEQ ID NO: 8759 - DNA, 23 bp, Artificial Sequence
  Description of Artificial Sequence: Synthetic oligonucleotide
  Epidermal growth factor receptor (EGFR), ERBB1 phosphotyrosine kinase siRNA
ccatgcccgcattagctcttaga

SEQ ID NO: 8760 - DNA, 23 bp, Artificial Sequence
  Description of Artificial Sequence: Synthetic oligonucleotide
  Epidermal growth factor receptor (EGFR), ERBB1 phosphotyrosine kinase siRNA
catgcccgcattagctcttagac

SEQ ID NO: 8761 - DNA, 23 bp, Artificial Sequence
  Description of Artificial Sequence: Synthetic oligonucleotide
  Epidermal growth factor receptor (EGFR), ERBB1 phosphotyrosine kinase siRNA
atgcccgcattagctcttagacc

SEQ ID NO: 8762 - DNA, 23 bp, Artificial Sequence
  Description of Artificial Sequence: Synthetic oligonucleotide
  Epidermal growth factor receptor (EGFR), ERBB1 phosphotyrosine kinase siRNA
tgcccgcattagctcttagaccc

SEQ ID NO: 8763 - DNA, 23 bp, Artificial Sequence
  Description of Artificial Sequence: Synthetic oligonucleotide
  Epidermal growth factor receptor (EGFR), ERBB1 phosphotyrosine kinase siRNA
gcccgcattagctcttagaccca

SEQ ID NO: 8764 - DNA, 23 bp, Artificial Sequence
  Description of Artificial Sequence: Synthetic oligonucleotide
  Epidermal growth factor receptor (EGFR), ERBB1 phosphotyrosine kinase siRNA
cccgcattagctcttagacccac

SEQ ID NO: 8765 - DNA, 23 bp, Artificial Sequence
  Description of Artificial Sequence: Synthetic oligonucleotide
  Epidermal growth factor receptor (EGFR), ERBB1 phosphotyrosine kinase siRNA
ccgcattagctcttagacccaca

SEQ ID NO: 8766 - DNA, 23 bp, Artificial Sequence
  Description of Artificial Sequence: Synthetic oligonucleotide
  Epidermal growth factor receptor (EGFR), ERBB1 phosphotyrosine kinase siRNA
cgcattagctcttagacccacag

SEQ ID NO: 8767 - DNA, 23 bp, Artificial Sequence
  Description of Artificial Sequence: Synthetic oligonucleotide
  Epidermal growth factor receptor (EGFR), ERBB1 phosphotyrosine kinase siRNA
gcattagctcttagacccacaga

SEQ ID NO: 8768 - DNA, 23 bp, Artificial Sequence
  Description of Artificial Sequence: Synthetic oligonucleotide
  Epidermal growth factor receptor (EGFR), ERBB1 phosphotyrosine kinase siRNA
cattagctcttagacccacagac

SEQ ID NO: 8769 - DNA, 23 bp, Artificial Sequence
  Description of Artificial Sequence: Synthetic oligonucleotide
  Epidermal growth factor receptor (EGFR), ERBB1 phosphotyrosine kinase siRNA
attagctcttagacccacagact

SEQ ID NO: 8770 - DNA, 23 bp, Artificial Sequence
  Description of Artificial Sequence: Synthetic oligonucleotide
  Epidermal growth factor receptor (EGFR), ERBB1 phosphotyrosine kinase siRNA
ttagctcttagacccacagactg

SEQ ID NO: 8771 - DNA, 23 bp, Artificial Sequence
  Description of Artificial Sequence: Synthetic oligonucleotide
  Epidermal growth factor receptor (EGFR), ERBB1 phosphotyrosine kinase siRNA
tagctcttagacccacagactgg

SEQ ID NO: 8772 - DNA, 23 bp, Artificial Sequence
  Description of Artificial Sequence: Synthetic oligonucleotide
  Epidermal growth factor receptor (EGFR), ERBB1 phosphotyrosine kinase siRNA
agctcttagacccacagactggt

SEQ ID NO: 8773 - DNA, 23 bp, Artificial Sequence
  Description of Artificial Sequence: Synthetic oligonucleotide
  Epidermal growth factor receptor (EGFR), ERBB1 phosphotyrosine kinase siRNA
gctcttagacccacagactggtt

SEQ ID NO: 8774 - DNA, 23 bp, Artificial Sequence
  Description of Artificial Sequence: Synthetic oligonucleotide
  Epidermal growth factor receptor (EGFR), ERBB1 phosphotyrosine kinase siRNA
ctcttagacccacagactggttt

SEQ ID NO: 8775 - DNA, 23 bp, Artificial Sequence
  Description of Artificial Sequence: Synthetic oligonucleotide
  Epidermal growth factor receptor (EGFR), ERBB1 phosphotyrosine kinase siRNA
tcttagacccacagactggtttt

SEQ ID NO: 8776 - DNA, 23 bp, Artificial Sequence
  Description of Artificial Sequence: Synthetic oligonucleotide
  Epidermal growth factor receptor (EGFR), ERBB1 phosphotyrosine kinase siRNA
cttagacccacagactggttttg

SEQ ID NO: 8777 - DNA, 23 bp, Artificial Sequence
  Description of Artificial Sequence: Synthetic oligonucleotide
  Epidermal growth factor receptor (EGFR), ERBB1 phosphotyrosine kinase siRNA
ttagacccacagactggttttgc

SEQ ID NO: 8778 - DNA, 23 bp, Artificial Sequence
  Description of Artificial Sequence: Synthetic oligonucleotide
  Epidermal growth factor receptor (EGFR), ERBB1 phosphotyrosine kinase siRNA
tagacccacagactggttttgca

SEQ ID NO: 8779 - DNA, 23 bp, Artificial Sequence
  Description of Artificial Sequence: Synthetic oligonucleotide
  Epidermal growth factor receptor (EGFR), ERBB1 phosphotyrosine kinase siRNA
agacccacagactggttttgcaa

SEQ ID NO: 8780 - DNA, 23 bp, Artificial Sequence
  Description of Artificial Sequence: Synthetic oligonucleotide
  Epidermal growth factor receptor (EGFR), ERBB1 phosphotyrosine kinase siRNA
gacccacagactggttttgcaac

SEQ ID NO: 8781 - DNA, 23 bp, Artificial Sequence
  Description of Artificial Sequence: Synthetic oligonucleotide
  Epidermal growth factor receptor (EGFR), ERBB1 phosphotyrosine kinase siRNA
acccacagactggttttgcaacg

SEQ ID NO: 8782 - DNA, 23 bp, Artificial Sequence
  Description of Artificial Sequence: Synthetic oligonucleotide
  Epidermal growth factor receptor (EGFR), ERBB1 phosphotyrosine kinase siRNA
cccacagactggttttgcaacgt

SEQ ID NO: 8783 - DNA, 23 bp, Artificial Sequence
  Description of Artificial Sequence: Synthetic oligonucleotide
  Epidermal growth factor receptor (EGFR), ERBB1 phosphotyrosine kinase siRNA
ccacagactggttttgcaacgtt

SEQ ID NO: 8784 - DNA, 23 bp, Artificial Sequence
  Description of Artificial Sequence: Synthetic oligonucleotide
  Epidermal growth factor receptor (EGFR), ERBB1 phosphotyrosine kinase siRNA
cacagactggttttgcaacgttt

SEQ ID NO: 8785 - DNA, 23 bp, Artificial Sequence
  Description of Artificial Sequence: Synthetic oligonucleotide
  Epidermal growth factor receptor (EGFR), ERBB1 phosphotyrosine kinase siRNA
acagactggttttgcaacgttta

SEQ ID NO: 8786 - DNA, 23 bp, Artificial Sequence
  Description of Artificial Sequence: Synthetic oligonucleotide
  Epidermal growth factor receptor (EGFR), ERBB1 phosphotyrosine kinase siRNA
cagactggttttgcaacgtttac

SEQ ID NO: 8787 - DNA, 23 bp, Artificial Sequence
  Description of Artificial Sequence: Synthetic oligonucleotide
  Epidermal growth factor receptor (EGFR), ERBB1 phosphotyrosine kinase siRNA
agactggttttgcaacgtttaca

SEQ ID NO: 8788 - DNA, 23 bp, Artificial Sequence
  Description of Artificial Sequence: Synthetic oligonucleotide
  Epidermal growth factor receptor (EGFR), ERBB1 phosphotyrosine kinase siRNA
gactggttttgcaacgtttacac

SEQ ID NO: 8789 - DNA, 23 bp, Artificial Sequence
  Description of Artificial Sequence: Synthetic oligonucleotide
  Epidermal growth factor receptor (EGFR), ERBB1 phosphotyrosine kinase siRNA
actggttttgcaacgtttacacc

SEQ ID NO: 8790 - DNA, 23 bp, Artificial Sequence
  Description of Artificial Sequence: Synthetic oligonucleotide
  Epidermal growth factor receptor (EGFR), ERBB1 phosphotyrosine kinase siRNA
ctggttttgcaacgtttacaccg

SEQ ID NO: 8791 - DNA, 23 bp, Artificial Sequence
  Description of Artificial Sequence: Synthetic oligonucleotide
  Epidermal growth factor receptor (EGFR), ERBB1 phosphotyrosine kinase siRNA
tggttttgcaacgtttacaccga

SEQ ID NO: 8792 - DNA, 23 bp, Artificial Sequence
  Description of Artificial Sequence: Synthetic oligonucleotide
  Epidermal growth factor receptor (EGFR), ERBB1 phosphotyrosine kinase siRNA
ggttttgcaacgtttacaccgac

SEQ ID NO: 8793 - DNA, 23 bp, Artificial Sequence
  Description of Artificial Sequence: Synthetic oligonucleotide
  Epidermal growth factor receptor (EGFR), ERBB1 phosphotyrosine kinase siRNA
gttttgcaacgtttacaccgact

SEQ ID NO: 8794 - DNA, 23 bp, Artificial Sequence
  Description of Artificial Sequence: Synthetic oligonucleotide
  Epidermal growth factor receptor (EGFR), ERBB1 phosphotyrosine kinase siRNA
ttttgcaacgtttacaccgacta

SEQ ID NO: 8795 - DNA, 23 bp, Artificial Sequence
  Description of Artificial Sequence: Synthetic oligonucleotide
  Epidermal growth factor receptor (EGFR), ERBB1 phosphotyrosine kinase siRNA
tttgcaacgtttacaccgactag

SEQ ID NO: 8796 - DNA, 23 bp, Artificial Sequence
  Description of Artificial Sequence: Synthetic oligonucleotide
  Epidermal growth factor receptor (EGFR), ERBB1 phosphotyrosine kinase siRNA
ttgcaacgtttacaccgactagc

SEQ ID NO: 8797 - DNA, 23 bp, Artificial Sequence
  Description of Artificial Sequence: Synthetic oligonucleotide
  Epidermal growth factor receptor (EGFR), ERBB1 phosphotyrosine kinase siRNA
tgcaacgtttacaccgactagcc

SEQ ID NO: 8798 - DNA, 23 bp, Artificial Sequence
  Description of Artificial Sequence: Synthetic oligonucleotide
  Epidermal growth factor receptor (EGFR), ERBB1 phosphotyrosine kinase siRNA
gcaacgtttacaccgactagcca

SEQ ID NO: 8799 - DNA, 23 bp, Artificial Sequence
  Description of Artificial Sequence: Synthetic oligonucleotide
  Epidermal growth factor receptor (EGFR), ERBB1 phosphotyrosine kinase siRNA
caacgtttacaccgactagccag

SEQ ID NO: 8800 - DNA, 23 bp, Artificial Sequence
  Description of Artificial Sequence: Synthetic oligonucleotide
  Epidermal growth factor receptor (EGFR), ERBB1 phosphotyrosine kinase siRNA
aacgtttacaccgactagccagg

SEQ ID NO: 8801 - DNA, 23 bp, Artificial Sequence
  Description of Artificial Sequence: Synthetic oligonucleotide
  Epidermal growth factor receptor (EGFR), ERBB1 phosphotyrosine kinase siRNA
acgtttacaccgactagccagga

SEQ ID NO: 8802 - DNA, 23 bp, Artificial Sequence
  Description of Artificial Sequence: Synthetic oligonucleotide
  Epidermal growth factor receptor (EGFR), ERBB1 phosphotyrosine kinase siRNA
cgtttacaccgactagccaggaa

SEQ ID NO: 8803 - DNA, 23 bp, Artificial Sequence
  Description of Artificial Sequence: Synthetic oligonucleotide
  Epidermal growth factor receptor (EGFR), ERBB1 phosphotyrosine kinase siRNA
gtttacaccgactagccaggaag

SEQ ID NO: 8804 - DNA, 23 bp, Artificial Sequence
  Description of Artificial Sequence: Synthetic oligonucleotide
  Epidermal growth factor receptor (EGFR), ERBB1 phosphotyrosine kinase siRNA
tttacaccgactagccaggaagt

SEQ ID NO: 8805 - DNA, 23 bp, Artificial Sequence
  Description of Artificial Sequence: Synthetic oligonucleotide
  Epidermal growth factor receptor (EGFR), ERBB1 phosphotyrosine kinase siRNA
ttacaccgactagccaggaagta

SEQ ID NO: 8806 - DNA, 23 bp, Artificial Sequence
  Description of Artificial Sequence: Synthetic oligonucleotide
  Epidermal growth factor receptor (EGFR), ERBB1 phosphotyrosine kinase siRNA
tacaccgactagccaggaagtac

SEQ ID NO: 8807 - DNA, 23 bp, Artificial Sequence
  Description of Artificial Sequence: Synthetic oligonucleotide
  Epidermal growth factor receptor (EGFR), ERBB1 phosphotyrosine kinase siRNA
acaccgactagccaggaagtact

SEQ ID NO: 8808 - DNA, 23 bp, Artificial Sequence
  Description of Artificial Sequence: Synthetic oligonucleotide
  Epidermal growth factor receptor (EGFR), ERBB1 phosphotyrosine kinase siRNA
caccgactagccaggaagtactt

SEQ ID NO: 8809 - DNA, 23 bp, Artificial Sequence
  Description of Artificial Sequence: Synthetic oligonucleotide
  Epidermal growth factor receptor (EGFR), ERBB1 phosphotyrosine kinase siRNA
accgactagccaggaagtacttc

SEQ ID NO: 8810 - DNA, 23 bp, Artificial Sequence
  Description of Artificial Sequence: Synthetic oligonucleotide
  Epidermal growth factor receptor (EGFR), ERBB1 phosphotyrosine kinase siRNA
ccgactagccaggaagtacttcc

SEQ ID NO: 8811 - DNA, 23 bp, Artificial Sequence
  Description of Artificial Sequence: Synthetic oligonucleotide
  Epidermal growth factor receptor (EGFR), ERBB1 phosphotyrosine kinase siRNA
cgactagccaggaagtacttcca

SEQ ID NO: 8812 - DNA, 23 bp, Artificial Sequence
  Description of Artificial Sequence: Synthetic oligonucleotide
  Epidermal growth factor receptor (EGFR), ERBB1 phosphotyrosine kinase siRNA
gactagccaggaagtacttccac

SEQ ID NO: 8813 - DNA, 23 bp, Artificial Sequence
  Description of Artificial Sequence: Synthetic oligonucleotide
  Epidermal growth factor receptor (EGFR), ERBB1 phosphotyrosine kinase siRNA
actagccaggaagtacttccacc

SEQ ID NO: 8814 - DNA, 23 bp, Artificial Sequence
  Description of Artificial Sequence: Synthetic oligonucleotide
  Epidermal growth factor receptor (EGFR), ERBB1 phosphotyrosine kinase siRNA
ctagccaggaagtacttccacct

SEQ ID NO: 8815 - DNA, 23 bp, Artificial Sequence
  Description of Artificial Sequence: Synthetic oligonucleotide
  Epidermal growth factor receptor (EGFR), ERBB1 phosphotyrosine kinase siRNA
tagccaggaagtacttccacctc

SEQ ID NO: 8816 - DNA, 23 bp, Artificial Sequence
  Description of Artificial Sequence: Synthetic oligonucleotide
  Epidermal growth factor receptor (EGFR), ERBB1 phosphotyrosine kinase siRNA
agccaggaagtacttccacctcg

SEQ ID NO: 8817 - DNA, 23 bp, Artificial Sequence
  Description of Artificial Sequence: Synthetic oligonucleotide
  Epidermal growth factor receptor (EGFR), ERBB1 phosphotyrosine kinase siRNA
gccaggaagtacttccacctcgg

SEQ ID NO: 8818 - DNA, 23 bp, Artificial Sequence
  Description of Artificial Sequence: Synthetic oligonucleotide
  Epidermal growth factor receptor (EGFR), ERBB1 phosphotyrosine kinase siRNA
ccaggaagtacttccacctcggg

SEQ ID NO: 8819 - DNA, 23 bp, Artificial Sequence
  Description of Artificial Sequence: Synthetic oligonucleotide
  Epidermal growth factor receptor (EGFR), ERBB1 phosphotyrosine kinase siRNA
caggaagtacttccacctcgggc

SEQ ID NO: 8820 - DNA, 23 bp, Artificial Sequence
  Description of Artificial Sequence: Synthetic oligonucleotide
  Epidermal growth factor receptor (EGFR), ERBB1 phosphotyrosine kinase siRNA
aggaagtacttccacctcgggca

SEQ ID NO: 8821 - DNA, 23 bp, Artificial Sequence
  Description of Artificial Sequence: Synthetic oligonucleotide
  Epidermal growth factor receptor (EGFR), ERBB1 phosphotyrosine kinase siRNA
ggaagtacttccacctcgggcac

SEQ ID NO: 8822 - DNA, 23 bp, Artificial Sequence
  Description of Artificial Sequence: Synthetic oligonucleotide
  Epidermal growth factor receptor (EGFR), ERBB1 phosphotyrosine kinase siRNA
gaagtacttccacctcgggcaca

SEQ ID NO: 8823 - DNA, 23 bp, Artificial Sequence
  Description of Artificial Sequence: Synthetic oligonucleotide
  Epidermal growth factor receptor (EGFR), ERBB1 phosphotyrosine kinase siRNA
aagtacttccacctcgggcacat

SEQ ID NO: 8824 - DNA, 23 bp, Artificial Sequence
  Description of Artificial Sequence: Synthetic oligonucleotide
  Epidermal growth factor receptor (EGFR), ERBB1 phosphotyrosine kinase siRNA
agtacttccacctcgggcacatt

SEQ ID NO: 8825 - DNA, 23 bp, Artificial Sequence
  Description of Artificial Sequence: Synthetic oligonucleotide
  Epidermal growth factor receptor (EGFR), ERBB1 phosphotyrosine kinase siRNA
gtacttccacctcgggcacattt

SEQ ID NO: 8826 - DNA, 23 bp, Artificial Sequence
  Description of Artificial Sequence: Synthetic oligonucleotide
  Epidermal growth factor receptor (EGFR), ERBB1 phosphotyrosine kinase siRNA
tacttccacctcgggcacatttt

SEQ ID NO: 8827 - DNA, 23 bp, Artificial Sequence
  Description of Artificial Sequence: Synthetic oligonucleotide
  Epidermal growth factor receptor (EGFR), ERBB1 phosphotyrosine kinase siRNA
acttccacctcgggcacattttg

SEQ ID NO: 8828 - DNA, 23 bp, Artificial Sequence
  Description of Artificial Sequence: Synthetic oligonucleotide
  Epidermal growth factor receptor (EGFR), ERBB1 phosphotyrosine kinase siRNA
cttccacctcgggcacattttgg

SEQ ID NO: 8829 - DNA, 23 bp, Artificial Sequence
  Description of Artificial Sequence: Synthetic oligonucleotide
  Epidermal growth factor receptor (EGFR), ERBB1 phosphotyrosine kinase siRNA
ttccacctcgggcacattttggg

SEQ ID NO: 8830 - DNA, 23 bp, Artificial Sequence
  Description of Artificial Sequence: Synthetic oligonucleotide
  Epidermal growth factor receptor (EGFR), ERBB1 phosphotyrosine kinase siRNA
tccacctcgggcacattttggga

SEQ ID NO: 8831 - DNA, 23 bp, Artificial Sequence
  Description of Artificial Sequence: Synthetic oligonucleotide
  Epidermal growth factor receptor (EGFR), ERBB1 phosphotyrosine kinase siRNA
ccacctcgggcacattttgggaa

SEQ ID NO: 8832 - DNA, 23 bp, Artificial Sequence
  Description of Artificial Sequence: Synthetic oligonucleotide
  Epidermal growth factor receptor (EGFR), ERBB1 phosphotyrosine kinase siRNA
cacctcgggcacattttgggaag

SEQ ID NO: 8833 - DNA, 23 bp, Artificial Sequence
  Description of Artificial Sequence: Synthetic oligonucleotide
  Epidermal growth factor receptor (EGFR), ERBB1 phosphotyrosine kinase siRNA
acctcgggcacattttgggaagt

SEQ ID NO: 8834 - DNA, 23 bp, Artificial Sequence
  Description of Artificial Sequence: Synthetic oligonucleotide
  Epidermal growth factor receptor (EGFR), ERBB1 phosphotyrosine kinase siRNA
cctcgggcacattttgggaagtt

SEQ ID NO: 8835 - DNA, 23 bp, Artificial Sequence
  Description of Artificial Sequence: Synthetic oligonucleotide
  Epidermal growth factor receptor (EGFR), ERBB1 phosphotyrosine kinase siRNA
ctcgggcacattttgggaagttg

SEQ ID NO: 8836 - DNA, 23 bp, Artificial Sequence
  Description of Artificial Sequence: Synthetic oligonucleotide
  Epidermal growth factor receptor (EGFR), ERBB1 phosphotyrosine kinase siRNA
tcgggcacattttgggaagttgc

SEQ ID NO: 8837 - DNA, 23 bp, Artificial Sequence
  Description of Artificial Sequence: Synthetic oligonucleotide
  Epidermal growth factor receptor (EGFR), ERBB1 phosphotyrosine kinase siRNA
cgggcacattttgggaagttgca

SEQ ID NO: 8838 - DNA, 23 bp, Artificial Sequence
  Description of Artificial Sequence: Synthetic oligonucleotide
  Epidermal growth factor receptor (EGFR), ERBB1 phosphotyrosine kinase siRNA
gggcacattttgggaagttgcat

SEQ ID NO: 8839 - DNA, 23 bp, Artificial Sequence
  Description of Artificial Sequence: Synthetic oligonucleotide
  Epidermal growth factor receptor (EGFR), ERBB1 phosphotyrosine kinase siRNA
ggcacattttgggaagttgcatt

SEQ ID NO: 8840 - DNA, 23 bp, Artificial Sequence
  Description of Artificial Sequence: Synthetic oligonucleotide
  Epidermal growth factor receptor (EGFR), ERBB1 phosphotyrosine kinase siRNA
gcacattttgggaagttgcattc

SEQ ID NO: 8841 - DNA, 23 bp, Artificial Sequence
  Description of Artificial Sequence: Synthetic oligonucleotide
  Epidermal growth factor receptor (EGFR), ERBB1 phosphotyrosine kinase siRNA
cacattttgggaagttgcattcc

SEQ ID NO: 8842 - DNA, 23 bp, Artificial Sequence
  Description of Artificial Sequence: Synthetic oligonucleotide
  Epidermal growth factor receptor (EGFR), ERBB1 phosphotyrosine kinase siRNA
acattttgggaagttgcattcct

SEQ ID NO: 8843 - DNA, 23 bp, Artificial Sequence
  Description of Artificial Sequence: Synthetic oligonucleotide
  Epidermal growth factor receptor (EGFR), ERBB1 phosphotyrosine kinase siRNA
cattttgggaagttgcattcctt

SEQ ID NO: 8844 - DNA, 23 bp, Artificial Sequence
  Description of Artificial Sequence: Synthetic oligonucleotide
  Epidermal growth factor receptor (EGFR), ERBB1 phosphotyrosine kinase siRNA
attttgggaagttgcattccttt

SEQ ID NO: 8845 - DNA, 23 bp, Artificial Sequence
  Description of Artificial Sequence: Synthetic oligonucleotide
  Epidermal growth factor receptor (EGFR), ERBB1 phosphotyrosine kinase siRNA
ttttgggaagttgcattcctttg

SEQ ID NO: 8846 - DNA, 23 bp, Artificial Sequence
  Description of Artificial Sequence: Synthetic oligonucleotide
  Epidermal growth factor receptor (EGFR), ERBB1 phosphotyrosine kinase siRNA
tttgggaagttgcattcctttgt

SEQ ID NO: 8847 - DNA, 23 bp, Artificial Sequence
  Description of Artificial Sequence: Synthetic oligonucleotide
  Epidermal growth factor receptor (EGFR), ERBB1 phosphotyrosine kinase siRNA
ttgggaagttgcattcctttgtc

SEQ ID NO: 8848 - DNA, 23 bp, Artificial Sequence
  Description of Artificial Sequence: Synthetic oligonucleotide
  Epidermal growth factor receptor (EGFR), ERBB1 phosphotyrosine kinase siRNA
tgggaagttgcattcctttgtct

SEQ ID NO: 8849 - DNA, 23 bp, Artificial Sequence
  Description of Artificial Sequence: Synthetic oligonucleotide
  Epidermal growth factor receptor (EGFR), ERBB1 phosphotyrosine kinase siRNA
gggaagttgcattcctttgtctt

SEQ ID NO: 8850 - DNA, 23 bp, Artificial Sequence
  Description of Artificial Sequence: Synthetic oligonucleotide
  Epidermal growth factor receptor (EGFR), ERBB1 phosphotyrosine kinase siRNA
ggaagttgcattcctttgtcttc

SEQ ID NO: 8851 - DNA, 23 bp, Artificial Sequence
  Description of Artificial Sequence: Synthetic oligonucleotide
  Epidermal growth factor receptor (EGFR), ERBB1 phosphotyrosine kinase siRNA
gaagttgcattcctttgtcttca

SEQ ID NO: 8852 - DNA, 23 bp, Artificial Sequence
  Description of Artificial Sequence: Synthetic oligonucleotide
  Epidermal growth factor receptor (EGFR), ERBB1 phosphotyrosine kinase siRNA
aagttgcattcctttgtcttcaa

SEQ ID NO: 8853 - DNA, 23 bp, Artificial Sequence
  Description of Artificial Sequence: Synthetic oligonucleotide
  Epidermal growth factor receptor (EGFR), ERBB1 phosphotyrosine kinase siRNA
agttgcattcctttgtcttcaaa

SEQ ID NO: 8854 - DNA, 23 bp, Artificial Sequence
  Description of Artificial Sequence: Synthetic oligonucleotide
  Epidermal growth factor receptor (EGFR), ERBB1 phosphotyrosine kinase siRNA
gttgcattcctttgtcttcaaac

SEQ ID NO: 8855 - DNA, 23 bp, Artificial Sequence
  Description of Artificial Sequence: Synthetic oligonucleotide
  Epidermal growth factor receptor (EGFR), ERBB1 phosphotyrosine kinase siRNA
ttgcattcctttgtcttcaaact

SEQ ID NO: 8856 - DNA, 23 bp, Artificial Sequence
  Description of Artificial Sequence: Synthetic oligonucleotide
  Epidermal growth factor receptor (EGFR), ERBB1 phosphotyrosine kinase siRNA
tgcattcctttgtcttcaaactg

SEQ ID NO: 8857 - DNA, 23 bp, Artificial Sequence
  Description of Artificial Sequence: Synthetic oligonucleotide
  Epidermal growth factor receptor (EGFR), ERBB1 phosphotyrosine kinase siRNA
gcattcctttgtcttcaaactgt

SEQ ID NO: 8858 - DNA, 23 bp, Artificial Sequence
  Description of Artificial Sequence: Synthetic oligonucleotide
  Epidermal growth factor receptor (EGFR), ERBB1 phosphotyrosine kinase siRNA
cattcctttgtcttcaaactgtg

SEQ ID NO: 8859 - DNA, 23 bp, Artificial Sequence
  Description of Artificial Sequence: Synthetic oligonucleotide
  Epidermal growth factor receptor (EGFR), ERBB1 phosphotyrosine kinase siRNA
attcctttgtcttcaaactgtga

SEQ ID NO: 8860 - DNA, 23 bp, Artificial Sequence
  Description of Artificial Sequence: Synthetic oligonucleotide
  Epidermal growth factor receptor (EGFR), ERBB1 phosphotyrosine kinase siRNA
ttcctttgtcttcaaactgtgaa

SEQ ID NO: 8861 - DNA, 23 bp, Artificial Sequence
  Description of Artificial Sequence: Synthetic oligonucleotide
  Epidermal growth factor receptor (EGFR), ERBB1 phosphotyrosine kinase siRNA
tcctttgtcttcaaactgtgaag

SEQ ID NO: 8862 - DNA, 23 bp, Artificial Sequence
  Description of Artificial Sequence: Synthetic oligonucleotide
  Epidermal growth factor receptor (EGFR), ERBB1 phosphotyrosine kinase siRNA
cctttgtcttcaaactgtgaagc

SEQ ID NO: 8863 - DNA, 23 bp, Artificial Sequence
  Description of Artificial Sequence: Synthetic oligonucleotide
  Epidermal growth factor receptor (EGFR), ERBB1 phosphotyrosine kinase siRNA
ctttgtcttcaaactgtgaagca

SEQ ID NO: 8864 - DNA, 23 bp, Artificial Sequence
  Description of Artificial Sequence: Synthetic oligonucleotide
  Epidermal growth factor receptor (EGFR), ERBB1 phosphotyrosine kinase siRNA
tttgtcttcaaactgtgaagcat

SEQ ID NO: 8865 - DNA, 23 bp, Artificial Sequence
  Description of Artificial Sequence: Synthetic oligonucleotide
  Epidermal growth factor receptor (EGFR), ERBB1 phosphotyrosine kinase siRNA
ttgtcttcaaactgtgaagcatt

SEQ ID NO: 8866 - DNA, 23 bp, Artificial Sequence
  Description of Artificial Sequence: Synthetic oligonucleotide
  Epidermal growth factor receptor (EGFR), ERBB1 phosphotyrosine kinase siRNA
tgtcttcaaactgtgaagcattt

SEQ ID NO: 8867 - DNA, 23 bp, Artificial Sequence
  Description of Artificial Sequence: Synthetic oligonucleotide
  Epidermal growth factor receptor (EGFR), ERBB1 phosphotyrosine kinase siRNA
gtcttcaaactgtgaagcattta

SEQ ID NO: 8868 - DNA, 23 bp, Artificial Sequence
  Description of Artificial Sequence: Synthetic oligonucleotide
  Epidermal growth factor receptor (EGFR), ERBB1 phosphotyrosine kinase siRNA
tcttcaaactgtgaagcatttac

SEQ ID NO: 8869 - DNA, 23 bp, Artificial Sequence
  Description of Artificial Sequence: Synthetic oligonucleotide
  Epidermal growth factor receptor (EGFR), ERBB1 phosphotyrosine kinase siRNA
cttcaaactgtgaagcatttaca

SEQ ID NO: 8870 - DNA, 23 bp, Artificial Sequence
  Description of Artificial Sequence: Synthetic oligonucleotide
  Epidermal growth factor receptor (EGFR), ERBB1 phosphotyrosine kinase siRNA
ttcaaactgtgaagcatttacag

SEQ ID NO: 8871 - DNA, 23 bp, Artificial Sequence
  Description of Artificial Sequence: Synthetic oligonucleotide
  Epidermal growth factor receptor (EGFR), ERBB1 phosphotyrosine kinase siRNA
tcaaactgtgaagcatttacaga

SEQ ID NO: 8872 - DNA, 23 bp, Artificial Sequence
  Description of Artificial Sequence: Synthetic oligonucleotide
  Epidermal growth factor receptor (EGFR), ERBB1 phosphotyrosine kinase siRNA
caaactgtgaagcatttacagaa

SEQ ID NO: 8873 - DNA, 23 bp, Artificial Sequence
  Description of Artificial Sequence: Synthetic oligonucleotide
  Epidermal growth factor receptor (EGFR), ERBB1 phosphotyrosine kinase siRNA
aaactgtgaagcatttacagaaa

SEQ ID NO: 8874 - DNA, 23 bp, Artificial Sequence
  Description of Artificial Sequence: Synthetic oligonucleotide
  Epidermal growth factor receptor (EGFR), ERBB1 phosphotyrosine kinase siRNA
aactgtgaagcatttacagaaac

SEQ ID NO: 8875 - DNA, 23 bp, Artificial Sequence
  Description of Artificial Sequence: Synthetic oligonucleotide
  Epidermal growth factor receptor (EGFR), ERBB1 phosphotyrosine kinase siRNA
actgtgaagcatttacagaaacg

SEQ ID NO: 8876 - DNA, 23 bp, Artificial Sequence
  Description of Artificial Sequence: Synthetic oligonucleotide
  Epidermal growth factor receptor (EGFR), ERBB1 phosphotyrosine kinase siRNA
ctgtgaagcatttacagaaacgc

SEQ ID NO: 8877 - DNA, 23 bp, Artificial Sequence
  Description of Artificial Sequence: Synthetic oligonucleotide
  Epidermal growth factor receptor (EGFR), ERBB1 phosphotyrosine kinase siRNA
tgtgaagcatttacagaaacgca

SEQ ID NO: 8878 - DNA, 23 bp, Artificial Sequence
  Description of Artificial Sequence: Synthetic oligonucleotide
  Epidermal growth factor receptor (EGFR), ERBB1 phosphotyrosine kinase siRNA
gtgaagcatttacagaaacgcat

SEQ ID NO: 8879 - DNA, 23 bp, Artificial Sequence
  Description of Artificial Sequence: Synthetic oligonucleotide
  Epidermal growth factor receptor (EGFR), ERBB1 phosphotyrosine kinase siRNA
tgaagcatttacagaaacgcatc

SEQ ID NO: 8880 - DNA, 23 bp, Artificial Sequence
  Description of Artificial Sequence: Synthetic oligonucleotide
  Epidermal growth factor receptor (EGFR), ERBB1 phosphotyrosine kinase siRNA
gaagcatttacagaaacgcatcc

SEQ ID NO: 8881 - DNA, 23 bp, Artificial Sequence
  Description of Artificial Sequence: Synthetic oligonucleotide
  Epidermal growth factor receptor (EGFR), ERBB1 phosphotyrosine kinase siRNA
aagcatttacagaaacgcatcca

SEQ ID NO: 8882 - DNA, 23 bp, Artificial Sequence
  Description of Artificial Sequence: Synthetic oligonucleotide
  Epidermal growth factor receptor (EGFR), ERBB1 phosphotyrosine kinase siRNA
agcatttacagaaacgcatccag

SEQ ID NO: 8883 - DNA, 23 bp, Artificial Sequence
  Description of Artificial Sequence: Synthetic oligonucleotide
  Epidermal growth factor receptor (EGFR), ERBB1 phosphotyrosine kinase siRNA
gcatttacagaaacgcatccagc

SEQ ID NO: 8884 - DNA, 23 bp, Artificial Sequence
  Description of Artificial Sequence: Synthetic oligonucleotide
  Epidermal growth factor receptor (EGFR), ERBB1 phosphotyrosine kinase siRNA
catttacagaaacgcatccagca

SEQ ID NO: 8885 - DNA, 23 bp, Artificial Sequence
  Description of Artificial Sequence: Synthetic oligonucleotide
  Epidermal growth factor receptor (EGFR), ERBB1 phosphotyrosine kinase siRNA
atttacagaaacgcatccagcaa

SEQ ID NO: 8886 - DNA, 23 bp, Artificial Sequence
  Description of Artificial Sequence: Synthetic oligonucleotide
  Epidermal growth factor receptor (EGFR), ERBB1 phosphotyrosine kinase siRNA
tttacagaaacgcatccagcaag

SEQ ID NO: 8887 - DNA, 23 bp, Artificial Sequence
  Description of Artificial Sequence: Synthetic oligonucleotide
  Epidermal growth factor receptor (EGFR), ERBB1 phosphotyrosine kinase siRNA
ttacagaaacgcatccagcaaga

SEQ ID NO: 8888 - DNA, 23 bp, Artificial Sequence
  Description of Artificial Sequence: Synthetic oligonucleotide
  Epidermal growth factor receptor (EGFR), ERBB1 phosphotyrosine kinase siRNA
tacagaaacgcatccagcaagaa

SEQ ID NO: 8889 - DNA, 23 bp, Artificial Sequence
  Description of Artificial Sequence: Synthetic oligonucleotide
  Epidermal growth factor receptor (EGFR), ERBB1 phosphotyrosine kinase siRNA
acagaaacgcatccagcaagaat

SEQ ID NO: 8890 - DNA, 23 bp, Artificial Sequence
  Description of Artificial Sequence: Synthetic oligonucleotide
  Epidermal growth factor receptor (EGFR), ERBB1 phosphotyrosine kinase siRNA
cagaaacgcatccagcaagaata

SEQ ID NO: 8891 - DNA, 23 bp, Artificial Sequence
  Description of Artificial Sequence: Synthetic oligonucleotide
  Epidermal growth factor receptor (EGFR), ERBB1 phosphotyrosine kinase siRNA
agaaacgcatccagcaagaatat

SEQ ID NO: 8892 - DNA, 23 bp, Artificial Sequence
  Description of Artificial Sequence: Synthetic oligonucleotide
  Epidermal growth factor receptor (EGFR), ERBB1 phosphotyrosine kinase siRNA
gaaacgcatccagcaagaatatt

SEQ ID NO: 8893 - DNA, 23 bp, Artificial Sequence
  Description of Artificial Sequence: Synthetic oligonucleotide
  Epidermal growth factor receptor (EGFR), ERBB1 phosphotyrosine kinase siRNA
aaacgcatccagcaagaatattg

SEQ ID NO: 8894 - DNA, 23 bp, Artificial Sequence
  Description of Artificial Sequence: Synthetic oligonucleotide
  Epidermal growth factor receptor (EGFR), ERBB1 phosphotyrosine kinase siRNA
aacgcatccagcaagaatattgt

SEQ ID NO: 8895 - DNA, 23 bp, Artificial Sequence
  Description of Artificial Sequence: Synthetic oligonucleotide
  Epidermal growth factor receptor (EGFR), ERBB1 phosphotyrosine kinase siRNA
acgcatccagcaagaatattgtc

SEQ ID NO: 8896 - DNA, 23 bp, Artificial Sequence
  Description of Artificial Sequence: Synthetic oligonucleotide
  Epidermal growth factor receptor (EGFR), ERBB1 phosphotyrosine kinase siRNA
cgcatccagcaagaatattgtcc

SEQ ID NO: 8897 - DNA, 23 bp, Artificial Sequence
  Description of Artificial Sequence: Synthetic oligonucleotide
  Epidermal growth factor receptor (EGFR), ERBB1 phosphotyrosine kinase siRNA
gcatccagcaagaatattgtccc

SEQ ID NO: 8898 - DNA, 23 bp, Artificial Sequence
  Description of Artificial Sequence: Synthetic oligonucleotide
  Epidermal growth factor receptor (EGFR), ERBB1 phosphotyrosine kinase siRNA
catccagcaagaatattgtccct

SEQ ID NO: 8899 - DNA, 23 bp, Artificial Sequence
  Description of Artificial Sequence: Synthetic oligonucleotide
  Epidermal growth factor receptor (EGFR), ERBB1 phosphotyrosine kinase siRNA
atccagcaagaatattgtccctt

SEQ ID NO: 8900 - DNA, 23 bp, Artificial Sequence
  Description of Artificial Sequence: Synthetic oligonucleotide
  Epidermal growth factor receptor (EGFR), ERBB1 phosphotyrosine kinase siRNA
tccagcaagaatattgtcccttt

SEQ ID NO: 8901 - DNA, 23 bp, Artificial Sequence
  Description of Artificial Sequence: Synthetic oligonucleotide
  Epidermal growth factor receptor (EGFR), ERBB1 phosphotyrosine kinase siRNA
ccagcaagaatattgtccctttg

SEQ ID NO: 8902 - DNA, 23 bp, Artificial Sequence
  Description of Artificial Sequence: Synthetic oligonucleotide
  Epidermal growth factor receptor (EGFR), ERBB1 phosphotyrosine kinase siRNA
cagcaagaatattgtccctttga

SEQ ID NO: 8903 - DNA, 23 bp, Artificial Sequence
  Description of Artificial Sequence: Synthetic oligonucleotide
  Epidermal growth factor receptor (EGFR), ERBB1 phosphotyrosine kinase siRNA
agcaagaatattgtccctttgag

SEQ ID NO: 8904 - DNA, 23 bp, Artificial Sequence
  Description of Artificial Sequence: Synthetic oligonucleotide
  Epidermal growth factor receptor (EGFR), ERBB1 phosphotyrosine kinase siRNA
gcaagaatattgtccctttgagc

SEQ ID NO: 8905 - DNA, 23 bp, Artificial Sequence
  Description of Artificial Sequence: Synthetic oligonucleotide
  Epidermal growth factor receptor (EGFR), ERBB1 phosphotyrosine kinase siRNA
caagaatattgtccctttgagca

SEQ ID NO: 8906 - DNA, 23 bp, Artificial Sequence
  Description of Artificial Sequence: Synthetic oligonucleotide
  Epidermal growth factor receptor (EGFR), ERBB1 phosphotyrosine kinase siRNA
aagaatattgtccctttgagcag

SEQ ID NO: 8907 - DNA, 23 bp, Artificial Sequence
  Description of Artificial Sequence: Synthetic oligonucleotide
  Epidermal growth factor receptor (EGFR), ERBB1 phosphotyrosine kinase siRNA
agaatattgtccctttgagcaga

SEQ ID NO: 8908 - DNA, 23 bp, Artificial Sequence
  Description of Artificial Sequence: Synthetic oligonucleotide
  Epidermal growth factor receptor (EGFR), ERBB1 phosphotyrosine kinase siRNA
gaatattgtccctttgagcagaa

SEQ ID NO: 8909 - DNA, 23 bp, Artificial Sequence
  Description of Artificial Sequence: Synthetic oligonucleotide
  Epidermal growth factor receptor (EGFR), ERBB1 phosphotyrosine kinase siRNA
aatattgtccctttgagcagaaa

SEQ ID NO: 8910 - DNA, 23 bp, Artificial Sequence
  Description of Artificial Sequence: Synthetic oligonucleotide
  Epidermal growth factor receptor (EGFR), ERBB1 phosphotyrosine kinase siRNA
atattgtccctttgagcagaaat

SEQ ID NO: 8911 - DNA, 23 bp, Artificial Sequence
  Description of Artificial Sequence: Synthetic oligonucleotide
  Epidermal growth factor receptor (EGFR), ERBB1 phosphotyrosine kinase siRNA
tattgtccctttgagcagaaatt

SEQ ID NO: 8912 - DNA, 23 bp, Artificial Sequence
  Description of Artificial Sequence: Synthetic oligonucleotide
  Epidermal growth factor receptor (EGFR), ERBB1 phosphotyrosine kinase siRNA
attgtccctttgagcagaaattt

SEQ ID NO: 8913 - DNA, 23 bp, Artificial Sequence
  Description of Artificial Sequence: Synthetic oligonucleotide
  Epidermal growth factor receptor (EGFR), ERBB1 phosphotyrosine kinase siRNA
ttgtccctttgagcagaaattta

SEQ ID NO: 8914 - DNA, 23 bp, Artificial Sequence
  Description of Artificial Sequence: Synthetic oligonucleotide
  Epidermal growth factor receptor (EGFR), ERBB1 phosphotyrosine kinase siRNA
tgtccctttgagcagaaatttat

SEQ ID NO: 8915 - DNA, 23 bp, Artificial Sequence
  Description of Artificial Sequence: Synthetic oligonucleotide
  Epidermal growth factor receptor (EGFR), ERBB1 phosphotyrosine kinase siRNA
gtccctttgagcagaaatttatc

SEQ ID NO: 8916 - DNA, 23 bp, Artificial Sequence
  Description of Artificial Sequence: Synthetic oligonucleotide
  Epidermal growth factor receptor (EGFR), ERBB1 phosphotyrosine kinase siRNA
tccctttgagcagaaatttatct

SEQ ID NO: 8917 - DNA, 23 bp, Artificial Sequence
  Description of Artificial Sequence: Synthetic oligonucleotide
  Epidermal growth factor receptor (EGFR), ERBB1 phosphotyrosine kinase siRNA
ccctttgagcagaaatttatctt

SEQ ID NO: 8918 - DNA, 23 bp, Artificial Sequence
  Description of Artificial Sequence: Synthetic oligonucleotide
  Epidermal growth factor receptor (EGFR), ERBB1 phosphotyrosine kinase siRNA
cctttgagcagaaatttatcttt

SEQ ID NO: 8919 - DNA, 23 bp, Artificial Sequence
  Description of Artificial Sequence: Synthetic oligonucleotide
  Epidermal growth factor receptor (EGFR), ERBB1 phosphotyrosine kinase siRNA
ctttgagcagaaatttatctttc

SEQ ID NO: 8920 - DNA, 23 bp, Artificial Sequence
  Description of Artificial Sequence: Synthetic oligonucleotide
  Epidermal growth factor receptor (EGFR), ERBB1 phosphotyrosine kinase siRNA
tttgagcagaaatttatctttca

SEQ ID NO: 8921 - DNA, 23 bp, Artificial Sequence
  Description of Artificial Sequence: Synthetic oligonucleotide
  Epidermal growth factor receptor (EGFR), ERBB1 phosphotyrosine kinase siRNA
ttgagcagaaatttatctttcaa

SEQ ID NO: 8922 - DNA, 23 bp, Artificial Sequence
  Description of Artificial Sequence: Synthetic oligonucleotide
  Epidermal growth factor receptor (EGFR), ERBB1 phosphotyrosine kinase siRNA
tgagcagaaatttatctttcaaa

SEQ ID NO: 8923 - DNA, 23 bp, Artificial Sequence
  Description of Artificial Sequence: Synthetic oligonucleotide
  Epidermal growth factor receptor (EGFR), ERBB1 phosphotyrosine kinase siRNA
gagcagaaatttatctttcaaag

SEQ ID NO: 8924 - DNA, 23 bp, Artificial Sequence
  Description of Artificial Sequence: Synthetic oligonucleotide
  Epidermal growth factor receptor (EGFR), ERBB1 phosphotyrosine kinase siRNA
agcagaaatttatctttcaaaga

SEQ ID NO: 8925 - DNA, 23 bp, Artificial Sequence
  Description of Artificial Sequence: Synthetic oligonucleotide
  Epidermal growth factor receptor (EGFR), ERBB1 phosphotyrosine kinase siRNA
gcagaaatttatctttcaaagag

SEQ ID NO: 8926 - DNA, 23 bp, Artificial Sequence
  Description of Artificial Sequence: Synthetic oligonucleotide
  Epidermal growth factor receptor (EGFR), ERBB1 phosphotyrosine kinase siRNA
cagaaatttatctttcaaagagg

SEQ ID NO: 8927 - DNA, 23 bp, Artificial Sequence
  Description of Artificial Sequence: Synthetic oligonucleotide
  Epidermal growth factor receptor (EGFR), ERBB1 phosphotyrosine kinase siRNA
agaaatttatctttcaaagaggt

SEQ ID NO: 8928 - DNA, 23 bp, Artificial Sequence
  Description of Artificial Sequence: Synthetic oligonucleotide
  Epidermal growth factor receptor (EGFR), ERBB1 phosphotyrosine kinase siRNA
gaaatttatctttcaaagaggta

SEQ ID NO: 8929 - DNA, 23 bp, Artificial Sequence
  Description of Artificial Sequence: Synthetic oligonucleotide
  Epidermal growth factor receptor (EGFR), ERBB1 phosphotyrosine kinase siRNA
aaatttatctttcaaagaggtat

SEQ ID NO: 8930 - DNA, 23 bp, Artificial Sequence
  Description of Artificial Sequence: Synthetic oligonucleotide
  Epidermal growth factor receptor (EGFR), ERBB1 phosphotyrosine kinase siRNA
aatttatctttcaaagaggtata

SEQ ID NO: 8931 - DNA, 23 bp, Artificial Sequence
  Description of Artificial Sequence: Synthetic oligonucleotide
  Epidermal growth factor receptor (EGFR), ERBB1 phosphotyrosine kinase siRNA
atttatctttcaaagaggtatat

SEQ ID NO: 8932 - DNA, 23 bp, Artificial Sequence
  Description of Artificial Sequence: Synthetic oligonucleotide
  Epidermal growth factor receptor (EGFR), ERBB1 phosphotyrosine kinase siRNA
tttatctttcaaagaggtatatt

SEQ ID NO: 8933 - DNA, 23 bp, Artificial Sequence
  Description of Artificial Sequence: Synthetic oligonucleotide
  Epidermal growth factor receptor (EGFR), ERBB1 phosphotyrosine kinase siRNA
ttatctttcaaagaggtatattt

SEQ ID NO: 8934 - DNA, 23 bp, Artificial Sequence
  Description of Artificial Sequence: Synthetic oligonucleotide
  Epidermal growth factor receptor (EGFR), ERBB1 phosphotyrosine kinase siRNA
tatctttcaaagaggtatatttg

SEQ ID NO: 8935 - DNA, 23 bp, Artificial Sequence
  Description of Artificial Sequence: Synthetic oligonucleotide
  Epidermal growth factor receptor (EGFR), ERBB1 phosphotyrosine kinase siRNA
atctttcaaagaggtatatttga

SEQ ID NO: 8936 - DNA, 23 bp, Artificial Sequence
  Description of Artificial Sequence: Synthetic oligonucleotide
  Epidermal growth factor receptor (EGFR), ERBB1 phosphotyrosine kinase siRNA
tctttcaaagaggtatatttgaa

SEQ ID NO: 8937 - DNA, 23 bp, Artificial Sequence
  Description of Artificial Sequence: Synthetic oligonucleotide
  Epidermal growth factor receptor (EGFR), ERBB1 phosphotyrosine kinase siRNA
ctttcaaagaggtatatttgaaa

SEQ ID NO: 8938 - DNA, 23 bp, Artificial Sequence
  Description of Artificial Sequence: Synthetic oligonucleotide
  Epidermal growth factor receptor (EGFR), ERBB1 phosphotyrosine kinase siRNA
tttcaaagaggtatatttgaaaa

SEQ ID NO: 8939 - DNA, 23 bp, Artificial Sequence
  Description of Artificial Sequence: Synthetic oligonucleotide
  Epidermal growth factor receptor (EGFR), ERBB1 phosphotyrosine kinase siRNA
ttcaaagaggtatatttgaaaaa

SEQ ID NO: 8940 - DNA, 23 bp, Artificial Sequence
  Description of Artificial Sequence: Synthetic oligonucleotide
  Epidermal growth factor receptor (EGFR), ERBB1 phosphotyrosine kinase siRNA
tcaaagaggtatatttgaaaaaa

SEQ ID NO: 8941 - DNA, 23 bp, Artificial Sequence
  Description of Artificial Sequence: Synthetic oligonucleotide
  Epidermal growth factor receptor (EGFR), ERBB1 phosphotyrosine kinase siRNA
caaagaggtatatttgaaaaaaa

SEQ ID NO: 8942 - DNA, 23 bp, Artificial Sequence
  Description of Artificial Sequence: Synthetic oligonucleotide
  Epidermal growth factor receptor (EGFR), ERBB1 phosphotyrosine kinase siRNA
aaagaggtatatttgaaaaaaaa

SEQ ID NO: 8943 - DNA, 23 bp, Artificial Sequence
  Description of Artificial Sequence: Synthetic oligonucleotide
  Epidermal growth factor receptor (EGFR), ERBB1 phosphotyrosine kinase siRNA
aaaaaaaagtatatgtgaggatt

SEQ ID NO: 8944 - DNA, 23 bp, Artificial Sequence
  Description of Artificial Sequence: Synthetic oligonucleotide
  Epidermal growth factor receptor (EGFR), ERBB1 phosphotyrosine kinase siRNA
aaaaaaagtatatgtgaggattt

SEQ ID NO: 8945 - DNA, 23 bp, Artificial Sequence
  Description of Artificial Sequence: Synthetic oligonucleotide
  Epidermal growth factor receptor (EGFR), ERBB1 phosphotyrosine kinase siRNA
aaaaaagtatatgtgaggatttt

SEQ ID NO: 8946 - DNA, 23 bp, Artificial Sequence
  Description of Artificial Sequence: Synthetic oligonucleotide
  Epidermal growth factor receptor (EGFR), ERBB1 phosphotyrosine kinase siRNA
aaaaagtatatgtgaggattttt

SEQ ID NO: 8947 - DNA, 23 bp, Artificial Sequence
  Description of Artificial Sequence: Synthetic oligonucleotide
  Epidermal growth factor receptor (EGFR), ERBB1 phosphotyrosine kinase siRNA
aaaagtatatgtgaggattttta

SEQ ID NO: 8948 - DNA, 23 bp, Artificial Sequence
  Description of Artificial Sequence: Synthetic oligonucleotide
  Epidermal growth factor receptor (EGFR), ERBB1 phosphotyrosine kinase siRNA
aaagtatatgtgaggatttttat

SEQ ID NO: 8949 - DNA, 23 bp, Artificial Sequence
  Description of Artificial Sequence: Synthetic oligonucleotide
  Epidermal growth factor receptor (EGFR), ERBB1 phosphotyrosine kinase siRNA
aagtatatgtgaggatttttatt

SEQ ID NO: 8950 - DNA, 23 bp, Artificial Sequence
  Description of Artificial Sequence: Synthetic oligonucleotide
  Epidermal growth factor receptor (EGFR), ERBB1 phosphotyrosine kinase siRNA
agtatatgtgaggatttttattg

SEQ ID NO: 8951 - DNA, 23 bp, Artificial Sequence
  Description of Artificial Sequence: Synthetic oligonucleotide
  Epidermal growth factor receptor (EGFR), ERBB1 phosphotyrosine kinase siRNA
gtatatgtgaggatttttattga

SEQ ID NO: 8952 - DNA, 23 bp, Artificial Sequence
  Description of Artificial Sequence: Synthetic oligonucleotide
  Epidermal growth factor receptor (EGFR), ERBB1 phosphotyrosine kinase siRNA
tatatgtgaggatttttattgat

SEQ ID NO: 8953 - DNA, 23 bp, Artificial Sequence
  Description of Artificial Sequence: Synthetic oligonucleotide
  Epidermal growth factor receptor (EGFR), ERBB1 phosphotyrosine kinase siRNA
atatgtgaggatttttattgatt

SEQ ID NO: 8954 - DNA, 23 bp, Artificial Sequence
  Description of Artificial Sequence: Synthetic oligonucleotide
  Epidermal growth factor receptor (EGFR), ERBB1 phosphotyrosine kinase siRNA
tatgtgaggatttttattgattg

SEQ ID NO: 8955 - DNA, 23 bp, Artificial Sequence
  Description of Artificial Sequence: Synthetic oligonucleotide
  Epidermal growth factor receptor (EGFR), ERBB1 phosphotyrosine kinase siRNA
atgtgaggatttttattgattgg

SEQ ID NO: 8956 - DNA, 23 bp, Artificial Sequence
  Description of Artificial Sequence: Synthetic oligonucleotide
  Epidermal growth factor receptor (EGFR), ERBB1 phosphotyrosine kinase siRNA
tgtgaggatttttattgattggg

SEQ ID NO: 8957 - DNA, 23 bp, Artificial Sequence
  Description of Artificial Sequence: Synthetic oligonucleotide
  Epidermal growth factor receptor (EGFR), ERBB1 phosphotyrosine kinase siRNA
gtgaggatttttattgattgggg

SEQ ID NO: 8958 - DNA, 23 bp, Artificial Sequence
  Description of Artificial Sequence: Synthetic oligonucleotide
  Epidermal growth factor receptor (EGFR), ERBB1 phosphotyrosine kinase siRNA
tgaggatttttattgattgggga

SEQ ID NO: 8959 - DNA, 23 bp, Artificial Sequence
  Description of Artificial Sequence: Synthetic oligonucleotide
  Epidermal growth factor receptor (EGFR), ERBB1 phosphotyrosine kinase siRNA
gaggatttttattgattggggat

SEQ ID NO: 8960 - DNA, 23 bp, Artificial Sequence
  Description of Artificial Sequence: Synthetic oligonucleotide
  Epidermal growth factor receptor (EGFR), ERBB1 phosphotyrosine kinase siRNA
aggatttttattgattggggatc

SEQ ID NO: 8961 - DNA, 23 bp, Artificial Sequence
  Description of Artificial Sequence: Synthetic oligonucleotide
  Epidermal growth factor receptor (EGFR), ERBB1 phosphotyrosine kinase siRNA
ggatttttattgattggggatct

SEQ ID NO: 8962 - DNA, 23 bp, Artificial Sequence
  Description of Artificial Sequence: Synthetic oligonucleotide
  Epidermal growth factor receptor (EGFR), ERBB1 phosphotyrosine kinase siRNA
gatttttattgattggggatctt

SEQ ID NO: 8963 - DNA, 23 bp, Artificial Sequence
  Description of Artificial Sequence: Synthetic oligonucleotide
  Epidermal growth factor receptor (EGFR), ERBB1 phosphotyrosine kinase siRNA
atttttattgattggggatcttg

SEQ ID NO: 8964 - DNA, 23 bp, Artificial Sequence
  Description of Artificial Sequence: Synthetic oligonucleotide
  Epidermal growth factor receptor (EGFR), ERBB1 phosphotyrosine kinase siRNA
tttttattgattggggatcttgg

SEQ ID NO: 8965 - DNA, 23 bp, Artificial Sequence
  Description of Artificial Sequence: Synthetic oligonucleotide
  Epidermal growth factor receptor (EGFR), ERBB1 phosphotyrosine kinase siRNA
ttttattgattggggatcttgga

SEQ ID NO: 8966 - DNA, 23 bp, Artificial Sequence
  Description of Artificial Sequence: Synthetic oligonucleotide
  Epidermal growth factor receptor (EGFR), ERBB1 phosphotyrosine kinase siRNA
tttattgattggggatcttggag

SEQ ID NO: 8967 - DNA, 23 bp, Artificial Sequence
  Description of Artificial Sequence: Synthetic oligonucleotide
  Epidermal growth factor receptor (EGFR), ERBB1 phosphotyrosine kinase siRNA
ttattgattggggatcttggagt

SEQ ID NO: 8968 - DNA, 23 bp, Artificial Sequence
  Description of Artificial Sequence: Synthetic oligonucleotide
  Epidermal growth factor receptor (EGFR), ERBB1 phosphotyrosine kinase siRNA
tattgattggggatcttggagtt

SEQ ID NO: 8969 - DNA, 23 bp, Artificial Sequence
  Description of Artificial Sequence: Synthetic oligonucleotide
  Epidermal growth factor receptor (EGFR), ERBB1 phosphotyrosine kinase siRNA
attgattggggatcttggagttt

SEQ ID NO: 8970 - DNA, 23 bp, Artificial Sequence
  Description of Artificial Sequence: Synthetic oligonucleotide
  Epidermal growth factor receptor (EGFR), ERBB1 phosphotyrosine kinase siRNA
ttgattggggatcttggagtttt

SEQ ID NO: 8971 - DNA, 23 bp, Artificial Sequence
  Description of Artificial Sequence: Synthetic oligonucleotide
  Epidermal growth factor receptor (EGFR), ERBB1 phosphotyrosine kinase siRNA
tgattggggatcttggagttttt

SEQ ID NO: 8972 - DNA, 23 bp, Artificial Sequence
  Description of Artificial Sequence: Synthetic oligonucleotide
  Epidermal growth factor receptor (EGFR), ERBB1 phosphotyrosine kinase siRNA
gattggggatcttggagtttttc

SEQ ID NO: 8973 - DNA, 23 bp, Artificial Sequence
  Description of Artificial Sequence: Synthetic oligonucleotide
  Epidermal growth factor receptor (EGFR), ERBB1 phosphotyrosine kinase siRNA
attggggatcttggagtttttca

SEQ ID NO: 8974 - DNA, 23 bp, Artificial Sequence
  Description of Artificial Sequence: Synthetic oligonucleotide
  Epidermal growth factor receptor (EGFR), ERBB1 phosphotyrosine kinase siRNA
ttggggatcttggagtttttcat

SEQ ID NO: 8975 - DNA, 23 bp, Artificial Sequence
  Description of Artificial Sequence: Synthetic oligonucleotide
  Epidermal growth factor receptor (EGFR), ERBB1 phosphotyrosine kinase siRNA
tggggatcttggagtttttcatt

SEQ ID NO: 8976 - DNA, 23 bp, Artificial Sequence
  Description of Artificial Sequence: Synthetic oligonucleotide
  Epidermal growth factor receptor (EGFR), ERBB1 phosphotyrosine kinase siRNA
ggggatcttggagtttttcattg

SEQ ID NO: 8977 - DNA, 23 bp, Artificial Sequence
  Description of Artificial Sequence: Synthetic oligonucleotide
  Epidermal growth factor receptor (EGFR), ERBB1 phosphotyrosine kinase siRNA
gggatcttggagtttttcattgt

SEQ ID NO: 8978 - DNA, 23 bp, Artificial Sequence
  Description of Artificial Sequence: Synthetic oligonucleotide
  Epidermal growth factor receptor (EGFR), ERBB1 phosphotyrosine kinase siRNA
ggatcttggagtttttcattgtc

SEQ ID NO: 8979 - DNA, 23 bp, Artificial Sequence
  Description of Artificial Sequence: Synthetic oligonucleotide
  Epidermal growth factor receptor (EGFR), ERBB1 phosphotyrosine kinase siRNA
gatcttggagtttttcattgtcg

SEQ ID NO: 8980 - DNA, 23 bp, Artificial Sequence
  Description of Artificial Sequence: Synthetic oligonucleotide
  Epidermal growth factor receptor (EGFR), ERBB1 phosphotyrosine kinase siRNA
atcttggagtttttcattgtcgc

SEQ ID NO: 8981 - DNA, 23 bp, Artificial Sequence
  Description of Artificial Sequence: Synthetic oligonucleotide
  Epidermal growth factor receptor (EGFR), ERBB1 phosphotyrosine kinase siRNA
tcttggagtttttcattgtcgct

SEQ ID NO: 8982 - DNA, 23 bp, Artificial Sequence
  Description of Artificial Sequence: Synthetic oligonucleotide
  Epidermal growth factor receptor (EGFR), ERBB1 phosphotyrosine kinase siRNA
cttggagtttttcattgtcgcta

SEQ ID NO: 8983 - DNA, 23 bp, Artificial Sequence
  Description of Artificial Sequence: Synthetic oligonucleotide
  Epidermal growth factor receptor (EGFR), ERBB1 phosphotyrosine kinase siRNA
ttggagtttttcattgtcgctat

SEQ ID NO: 8984 - DNA, 23 bp, Artificial Sequence
  Description of Artificial Sequence: Synthetic oligonucleotide
  Epidermal growth factor receptor (EGFR), ERBB1 phosphotyrosine kinase siRNA
tggagtttttcattgtcgctatt

SEQ ID NO: 8985 - DNA, 23 bp, Artificial Sequence
  Description of Artificial Sequence: Synthetic oligonucleotide
  Epidermal growth factor receptor (EGFR), ERBB1 phosphotyrosine kinase siRNA
ggagtttttcattgtcgctattg

SEQ ID NO: 8986 - DNA, 23 bp, Artificial Sequence
  Description of Artificial Sequence: Synthetic oligonucleotide
  Epidermal growth factor receptor (EGFR), ERBB1 phosphotyrosine kinase siRNA
gagtttttcattgtcgctattga

SEQ ID NO: 8987 - DNA, 23 bp, Artificial Sequence
  Description of Artificial Sequence: Synthetic oligonucleotide
  Epidermal growth factor receptor (EGFR), ERBB1 phosphotyrosine kinase siRNA
agtttttcattgtcgctattgat

SEQ ID NO: 8988 - DNA, 23 bp, Artificial Sequence
  Description of Artificial Sequence: Synthetic oligonucleotide
  Epidermal growth factor receptor (EGFR), ERBB1 phosphotyrosine kinase siRNA
gtttttcattgtcgctattgatt

SEQ ID NO: 8989 - DNA, 23 bp, Artificial Sequence
  Description of Artificial Sequence: Synthetic oligonucleotide
  Epidermal growth factor receptor (EGFR), ERBB1 phosphotyrosine kinase siRNA
tttttcattgtcgctattgattt

SEQ ID NO: 8990 - DNA, 23 bp, Artificial Sequence
  Description of Artificial Sequence: Synthetic oligonucleotide
  Epidermal growth factor receptor (EGFR), ERBB1 phosphotyrosine kinase siRNA
ttttcattgtcgctattgatttt

SEQ ID NO: 8991 - DNA, 23 bp, Artificial Sequence
  Description of Artificial Sequence: Synthetic oligonucleotide
  Epidermal growth factor receptor (EGFR), ERBB1 phosphotyrosine kinase siRNA
tttcattgtcgctattgattttt

SEQ ID NO: 8992 - DNA, 23 bp, Artificial Sequence
  Description of Artificial Sequence: Synthetic oligonucleotide
  Epidermal growth factor receptor (EGFR), ERBB1 phosphotyrosine kinase siRNA
ttcattgtcgctattgattttta

SEQ ID NO: 8993 - DNA, 23 bp, Artificial Sequence
  Description of Artificial Sequence: Synthetic oligonucleotide
  Epidermal growth factor receptor (EGFR), ERBB1 phosphotyrosine kinase siRNA
tcattgtcgctattgatttttac

SEQ ID NO: 8994 - DNA, 23 bp, Artificial Sequence
  Description of Artificial Sequence: Synthetic oligonucleotide
  Epidermal growth factor receptor (EGFR), ERBB1 phosphotyrosine kinase siRNA
cattgtcgctattgatttttact

SEQ ID NO: 8995 - DNA, 23 bp, Artificial Sequence
  Description of Artificial Sequence: Synthetic oligonucleotide
  Epidermal growth factor receptor (EGFR), ERBB1 phosphotyrosine kinase siRNA
attgtcgctattgatttttactt

SEQ ID NO: 8996 - DNA, 23 bp, Artificial Sequence
  Description of Artificial Sequence: Synthetic oligonucleotide
  Epidermal growth factor receptor (EGFR), ERBB1 phosphotyrosine kinase siRNA
ttgtcgctattgatttttacttc

SEQ ID NO: 8997 - DNA, 23 bp, Artificial Sequence
  Description of Artificial Sequence: Synthetic oligonucleotide
  Epidermal growth factor receptor (EGFR), ERBB1 phosphotyrosine kinase siRNA
tgtcgctattgatttttacttca

SEQ ID NO: 8998 - DNA, 23 bp, Artificial Sequence
  Description of Artificial Sequence: Synthetic oligonucleotide
  Epidermal growth factor receptor (EGFR), ERBB1 phosphotyrosine kinase siRNA
gtcgctattgatttttacttcaa

SEQ ID NO: 8999 - DNA, 23 bp, Artificial Sequence
  Description of Artificial Sequence: Synthetic oligonucleotide
  Epidermal growth factor receptor (EGFR), ERBB1 phosphotyrosine kinase siRNA
tcgctattgatttttacttcaat

SEQ ID NO: 9000 - DNA, 23 bp, Artificial Sequence
  Description of Artificial Sequence: Synthetic oligonucleotide
  Epidermal growth factor receptor (EGFR), ERBB1 phosphotyrosine kinase siRNA
cgctattgatttttacttcaatg

SEQ ID NO: 9001 - DNA, 23 bp, Artificial Sequence
  Description of Artificial Sequence: Synthetic oligonucleotide
  Epidermal growth factor receptor (EGFR), ERBB1 phosphotyrosine kinase siRNA
gctattgatttttacttcaatgg

SEQ ID NO: 9002 - DNA, 23 bp, Artificial Sequence
  Description of Artificial Sequence: Synthetic oligonucleotide
  Epidermal growth factor receptor (EGFR), ERBB1 phosphotyrosine kinase siRNA
ctattgatttttacttcaatggg

SEQ ID NO: 9003 - DNA, 23 bp, Artificial Sequence
  Description of Artificial Sequence: Synthetic oligonucleotide
  Epidermal growth factor receptor (EGFR), ERBB1 phosphotyrosine kinase siRNA
tattgatttttacttcaatgggc

SEQ ID NO: 9004 - DNA, 23 bp, Artificial Sequence
  Description of Artificial Sequence: Synthetic oligonucleotide
  Epidermal growth factor receptor (EGFR), ERBB1 phosphotyrosine kinase siRNA
attgatttttacttcaatgggct

SEQ ID NO: 9005 - DNA, 23 bp, Artificial Sequence
  Description of Artificial Sequence: Synthetic oligonucleotide
  Epidermal growth factor receptor (EGFR), ERBB1 phosphotyrosine kinase siRNA
ttgatttttacttcaatgggctc

SEQ ID NO: 9006 - DNA, 23 bp, Artificial Sequence
  Description of Artificial Sequence: Synthetic oligonucleotide
  Epidermal growth factor receptor (EGFR), ERBB1 phosphotyrosine kinase siRNA
tgatttttacttcaatgggctct

SEQ ID NO: 9007 - DNA, 23 bp, Artificial Sequence
  Description of Artificial Sequence: Synthetic oligonucleotide
  Epidermal growth factor receptor (EGFR), ERBB1 phosphotyrosine kinase siRNA
gatttttacttcaatgggctctt

SEQ ID NO: 9008 - DNA, 23 bp, Artificial Sequence
  Description of Artificial Sequence: Synthetic oligonucleotide
  Epidermal growth factor receptor (EGFR), ERBB1 phosphotyrosine kinase siRNA
atttttacttcaatgggctcttc

SEQ ID NO: 9009 - DNA, 23 bp, Artificial Sequence
  Description of Artificial Sequence: Synthetic oligonucleotide
  Epidermal growth factor receptor (EGFR), ERBB1 phosphotyrosine kinase siRNA
tttttacttcaatgggctcttcc

SEQ ID NO: 9010 - DNA, 23 bp, Artificial Sequence
  Description of Artificial Sequence: Synthetic oligonucleotide
  Epidermal growth factor receptor (EGFR), ERBB1 phosphotyrosine kinase siRNA
ttttacttcaatgggctcttcca

SEQ ID NO: 9011 - DNA, 23 bp, Artificial Sequence
  Description of Artificial Sequence: Synthetic oligonucleotide
  Epidermal growth factor receptor (EGFR), ERBB1 phosphotyrosine kinase siRNA
tttacttcaatgggctcttccaa

SEQ ID NO: 9012 - DNA, 23 bp, Artificial Sequence
  Description of Artificial Sequence: Synthetic oligonucleotide
  Epidermal growth factor receptor (EGFR), ERBB1 phosphotyrosine kinase siRNA
ttacttcaatgggctcttccaac

SEQ ID NO: 9013 - DNA, 23 bp, Artificial Sequence
  Description of Artificial Sequence: Synthetic oligonucleotide
  Epidermal growth factor receptor (EGFR), ERBB1 phosphotyrosine kinase siRNA
tacttcaatgggctcttccaaca

SEQ ID NO: 9014 - DNA, 23 bp, Artificial Sequence
  Description of Artificial Sequence: Synthetic oligonucleotide
  Epidermal growth factor receptor (EGFR), ERBB1 phosphotyrosine kinase siRNA
acttcaatgggctcttccaacaa

SEQ ID NO: 9015 - DNA, 23 bp, Artificial Sequence
  Description of Artificial Sequence: Synthetic oligonucleotide
  Epidermal growth factor receptor (EGFR), ERBB1 phosphotyrosine kinase siRNA
cttcaatgggctcttccaacaag

SEQ ID NO: 9016 - DNA, 23 bp, Artificial Sequence
  Description of Artificial Sequence: Synthetic oligonucleotide
  Epidermal growth factor receptor (EGFR), ERBB1 phosphotyrosine kinase siRNA
ttcaatgggctcttccaacaagg

SEQ ID NO: 9017 - DNA, 23 bp, Artificial Sequence
  Description of Artificial Sequence: Synthetic oligonucleotide
  Epidermal growth factor receptor (EGFR), ERBB1 phosphotyrosine kinase siRNA
tcaatgggctcttccaacaagga

SEQ ID NO: 9018 - DNA, 23 bp, Artificial Sequence
  Description of Artificial Sequence: Synthetic oligonucleotide
  Epidermal growth factor receptor (EGFR), ERBB1 phosphotyrosine kinase siRNA
caatgggctcttccaacaaggaa

SEQ ID NO: 9019 - DNA, 23 bp, Artificial Sequence
  Description of Artificial Sequence: Synthetic oligonucleotide
  Epidermal growth factor receptor (EGFR), ERBB1 phosphotyrosine kinase siRNA
aatgggctcttccaacaaggaag

SEQ ID NO: 9020 - DNA, 23 bp, Artificial Sequence
  Description of Artificial Sequence: Synthetic oligonucleotide
  Epidermal growth factor receptor (EGFR), ERBB1 phosphotyrosine kinase siRNA
atgggctcttccaacaaggaaga

SEQ ID NO: 9021 - DNA, 23 bp, Artificial Sequence
  Description of Artificial Sequence: Synthetic oligonucleotide
  Epidermal growth factor receptor (EGFR), ERBB1 phosphotyrosine kinase siRNA
tgggctcttccaacaaggaagaa

SEQ ID NO: 9022 - DNA, 23 bp, Artificial Sequence
  Description of Artificial Sequence: Synthetic oligonucleotide
  Epidermal growth factor receptor (EGFR), ERBB1 phosphotyrosine kinase siRNA
gggctcttccaacaaggaagaag

SEQ ID NO: 9023 - DNA, 23 bp, Artificial Sequence
  Description of Artificial Sequence: Synthetic oligonucleotide
  Epidermal growth factor receptor (EGFR), ERBB1 phosphotyrosine kinase siRNA
ggctcttccaacaaggaagaagc

SEQ ID NO: 9024 - DNA, 23 bp, Artificial Sequence
  Description of Artificial Sequence: Synthetic oligonucleotide
  Epidermal growth factor receptor (EGFR), ERBB1 phosphotyrosine kinase siRNA
gctcttccaacaaggaagaagct

SEQ ID NO: 9025 - DNA, 23 bp, Artificial Sequence
  Description of Artificial Sequence: Synthetic oligonucleotide
  Epidermal growth factor receptor (EGFR), ERBB1 phosphotyrosine kinase siRNA
ctcttccaacaaggaagaagctt

SEQ ID NO: 9026 - DNA, 23 bp, Artificial Sequence
  Description of Artificial Sequence: Synthetic oligonucleotide
  Epidermal growth factor receptor (EGFR), ERBB1 phosphotyrosine kinase siRNA
tcttccaacaaggaagaagcttg

SEQ ID NO: 9027 - DNA, 23 bp, Artificial Sequence
  Description of Artificial Sequence: Synthetic oligonucleotide
  Epidermal growth factor receptor (EGFR), ERBB1 phosphotyrosine kinase siRNA
cttccaacaaggaagaagcttgc

SEQ ID NO: 9028 - DNA, 23 bp, Artificial Sequence
  Description of Artificial Sequence: Synthetic oligonucleotide
  Epidermal growth factor receptor (EGFR), ERBB1 phosphotyrosine kinase siRNA
ttccaacaaggaagaagcttgct

SEQ ID NO: 9029 - DNA, 23 bp, Artificial Sequence
  Description of Artificial Sequence: Synthetic oligonucleotide
  Epidermal growth factor receptor (EGFR), ERBB1 phosphotyrosine kinase siRNA
tccaacaaggaagaagcttgctg

SEQ ID NO: 9030 - DNA, 23 bp, Artificial Sequence
  Description of Artificial Sequence: Synthetic oligonucleotide
  Epidermal growth factor receptor (EGFR), ERBB1 phosphotyrosine kinase siRNA
ccaacaaggaagaagcttgctgg

SEQ ID NO: 9031 - DNA, 23 bp, Artificial Sequence
  Description of Artificial Sequence: Synthetic oligonucleotide
  Epidermal growth factor receptor (EGFR), ERBB1 phosphotyrosine kinase siRNA
caacaaggaagaagcttgctggt

SEQ ID NO: 9032 - DNA, 23 bp, Artificial Sequence
  Description of Artificial Sequence: Synthetic oligonucleotide
  Epidermal growth factor receptor (EGFR), ERBB1 phosphotyrosine kinase siRNA
aacaaggaagaagcttgctggta

SEQ ID NO: 9033 - DNA, 23 bp, Artificial Sequence
  Description of Artificial Sequence: Synthetic oligonucleotide
  Epidermal growth factor receptor (EGFR), ERBB1 phosphotyrosine kinase siRNA
acaaggaagaagcttgctggtag

SEQ ID NO: 9034 - DNA, 23 bp, Artificial Sequence
  Description of Artificial Sequence: Synthetic oligonucleotide
  Epidermal growth factor receptor (EGFR), ERBB1 phosphotyrosine kinase siRNA
caaggaagaagcttgctggtagc

SEQ ID NO: 9035 - DNA, 23 bp, Artificial Sequence
  Description of Artificial Sequence: Synthetic oligonucleotide
  Epidermal growth factor receptor (EGFR), ERBB1 phosphotyrosine kinase siRNA
aaggaagaagcttgctggtagca

SEQ ID NO: 9036 - DNA, 23 bp, Artificial Sequence
  Description of Artificial Sequence: Synthetic oligonucleotide
  Epidermal growth factor receptor (EGFR), ERBB1 phosphotyrosine kinase siRNA
aggaagaagcttgctggtagcac

SEQ ID NO: 9037 - DNA, 23 bp, Artificial Sequence
  Description of Artificial Sequence: Synthetic oligonucleotide
  Epidermal growth factor receptor (EGFR), ERBB1 phosphotyrosine kinase siRNA
ggaagaagcttgctggtagcact

SEQ ID NO: 9038 - DNA, 23 bp, Artificial Sequence
  Description of Artificial Sequence: Synthetic oligonucleotide
  Epidermal growth factor receptor (EGFR), ERBB1 phosphotyrosine kinase siRNA
gaagaagcttgctggtagcactt

SEQ ID NO: 9039 - DNA, 23 bp, Artificial Sequence
  Description of Artificial Sequence: Synthetic oligonucleotide
  Epidermal growth factor receptor (EGFR), ERBB1 phosphotyrosine kinase siRNA
aagaagcttgctggtagcacttg

SEQ ID NO: 9040 - DNA, 23 bp, Artificial Sequence
  Description of Artificial Sequence: Synthetic oligonucleotide
  Epidermal growth factor receptor (EGFR), ERBB1 phosphotyrosine kinase siRNA
agaagcttgctggtagcacttgc

SEQ ID NO: 9041 - DNA, 23 bp, Artificial Sequence
  Description of Artificial Sequence: Synthetic oligonucleotide
  Epidermal growth factor receptor (EGFR), ERBB1 phosphotyrosine kinase siRNA
gaagcttgctggtagcacttgct

SEQ ID NO: 9042 - DNA, 23 bp, Artificial Sequence
  Description of Artificial Sequence: Synthetic oligonucleotide
  Epidermal growth factor receptor (EGFR), ERBB1 phosphotyrosine kinase siRNA
aagcttgctggtagcacttgcta

SEQ ID NO: 9043 - DNA, 23 bp, Artificial Sequence
  Description of Artificial Sequence: Synthetic oligonucleotide
  Epidermal growth factor receptor (EGFR), ERBB1 phosphotyrosine kinase siRNA
agcttgctggtagcacttgctac

SEQ ID NO: 9044 - DNA, 23 bp, Artificial Sequence
  Description of Artificial Sequence: Synthetic oligonucleotide
  Epidermal growth factor receptor (EGFR), ERBB1 phosphotyrosine kinase siRNA
gcttgctggtagcacttgctacc

SEQ ID NO: 9045 - DNA, 23 bp, Artificial Sequence
  Description of Artificial Sequence: Synthetic oligonucleotide
  Epidermal growth factor receptor (EGFR), ERBB1 phosphotyrosine kinase siRNA
cttgctggtagcacttgctaccc

SEQ ID NO: 9046 - DNA, 23 bp, Artificial Sequence
  Description of Artificial Sequence: Synthetic oligonucleotide
  Epidermal growth factor receptor (EGFR), ERBB1 phosphotyrosine kinase siRNA
ttgctggtagcacttgctaccct

SEQ ID NO: 9047 - DNA, 23 bp, Artificial Sequence
  Description of Artificial Sequence: Synthetic oligonucleotide
  Epidermal growth factor receptor (EGFR), ERBB1 phosphotyrosine kinase siRNA
tgctggtagcacttgctaccctg

SEQ ID NO: 9048 - DNA, 23 bp, Artificial Sequence
  Description of Artificial Sequence: Synthetic oligonucleotide
  Epidermal growth factor receptor (EGFR), ERBB1 phosphotyrosine kinase siRNA
gctggtagcacttgctaccctga

SEQ ID NO: 9049 - DNA, 23 bp, Artificial Sequence
  Description of Artificial Sequence: Synthetic oligonucleotide
  Epidermal growth factor receptor (EGFR), ERBB1 phosphotyrosine kinase siRNA
ctggtagcacttgctaccctgag

SEQ ID NO: 9050 - DNA, 23 bp, Artificial Sequence
  Description of Artificial Sequence: Synthetic oligonucleotide
  Epidermal growth factor receptor (EGFR), ERBB1 phosphotyrosine kinase siRNA
tggtagcacttgctaccctgagt

SEQ ID NO: 9051 - DNA, 23 bp, Artificial Sequence
  Description of Artificial Sequence: Synthetic oligonucleotide
  Epidermal growth factor receptor (EGFR), ERBB1 phosphotyrosine kinase siRNA
ggtagcacttgctaccctgagtt

SEQ ID NO: 9052 - DNA, 23 bp, Artificial Sequence
  Description of Artificial Sequence: Synthetic oligonucleotide
  Epidermal growth factor receptor (EGFR), ERBB1 phosphotyrosine kinase siRNA
gtagcacttgctaccctgagttc

SEQ ID NO: 9053 - DNA, 23 bp, Artificial Sequence
  Description of Artificial Sequence: Synthetic oligonucleotide
  Epidermal growth factor receptor (EGFR), ERBB1 phosphotyrosine kinase siRNA
tagcacttgctaccctgagttca

SEQ ID NO: 9054 - DNA, 23 bp, Artificial Sequence
  Description of Artificial Sequence: Synthetic oligonucleotide
  Epidermal growth factor receptor (EGFR), ERBB1 phosphotyrosine kinase siRNA
agcacttgctaccctgagttcat

SEQ ID NO: 9055 - DNA, 23 bp, Artificial Sequence
  Description of Artificial Sequence: Synthetic oligonucleotide
  Epidermal growth factor receptor (EGFR), ERBB1 phosphotyrosine kinase siRNA
gcacttgctaccctgagttcatc

SEQ ID NO: 9056 - DNA, 23 bp, Artificial Sequence
  Description of Artificial Sequence: Synthetic oligonucleotide
  Epidermal growth factor receptor (EGFR), ERBB1 phosphotyrosine kinase siRNA
cacttgctaccctgagttcatcc

SEQ ID NO: 9057 - DNA, 23 bp, Artificial Sequence
  Description of Artificial Sequence: Synthetic oligonucleotide
  Epidermal growth factor receptor (EGFR), ERBB1 phosphotyrosine kinase siRNA
acttgctaccctgagttcatcca

SEQ ID NO: 9058 - DNA, 23 bp, Artificial Sequence
  Description of Artificial Sequence: Synthetic oligonucleotide
  Epidermal growth factor receptor (EGFR), ERBB1 phosphotyrosine kinase siRNA
cttgctaccctgagttcatccag

SEQ ID NO: 9059 - DNA, 23 bp, Artificial Sequence
  Description of Artificial Sequence: Synthetic oligonucleotide
  Epidermal growth factor receptor (EGFR), ERBB1 phosphotyrosine kinase siRNA
ttgctaccctgagttcatccagg

SEQ ID NO: 9060 - DNA, 23 bp, Artificial Sequence
  Description of Artificial Sequence: Synthetic oligonucleotide
  Epidermal growth factor receptor (EGFR), ERBB1 phosphotyrosine kinase siRNA
tgctaccctgagttcatccaggc

SEQ ID NO: 9061 - DNA, 23 bp, Artificial Sequence
  Description of Artificial Sequence: Synthetic oligonucleotide
  Epidermal growth factor receptor (EGFR), ERBB1 phosphotyrosine kinase siRNA
gctaccctgagttcatccaggcc

SEQ ID NO: 9062 - DNA, 23 bp, Artificial Sequence
  Description of Artificial Sequence: Synthetic oligonucleotide
  Epidermal growth factor receptor (EGFR), ERBB1 phosphotyrosine kinase siRNA
ctaccctgagttcatccaggccc

SEQ ID NO: 9063 - DNA, 23 bp, Artificial Sequence
  Description of Artificial Sequence: Synthetic oligonucleotide
  Epidermal growth factor receptor (EGFR), ERBB1 phosphotyrosine kinase siRNA
taccctgagttcatccaggccca

SEQ ID NO: 9064 - DNA, 23 bp, Artificial Sequence
  Description of Artificial Sequence: Synthetic oligonucleotide
  Epidermal growth factor receptor (EGFR), ERBB1 phosphotyrosine kinase siRNA
accctgagttcatccaggcccaa

SEQ ID NO: 9065 - DNA, 23 bp, Artificial Sequence
  Description of Artificial Sequence: Synthetic oligonucleotide
  Epidermal growth factor receptor (EGFR), ERBB1 phosphotyrosine kinase siRNA
ccctgagttcatccaggcccaac

SEQ ID NO: 9066 - DNA, 23 bp, Artificial Sequence
  Description of Artificial Sequence: Synthetic oligonucleotide
  Epidermal growth factor receptor (EGFR), ERBB1 phosphotyrosine kinase siRNA
cctgagttcatccaggcccaact

SEQ ID NO: 9067 - DNA, 23 bp, Artificial Sequence
  Description of Artificial Sequence: Synthetic oligonucleotide
  Epidermal growth factor receptor (EGFR), ERBB1 phosphotyrosine kinase siRNA
ctgagttcatccaggcccaactg

SEQ ID NO: 9068 - DNA, 23 bp, Artificial Sequence
  Description of Artificial Sequence: Synthetic oligonucleotide
  Epidermal growth factor receptor (EGFR), ERBB1 phosphotyrosine kinase siRNA
tgagttcatccaggcccaactgt

SEQ ID NO: 9069 - DNA, 23 bp, Artificial Sequence
  Description of Artificial Sequence: Synthetic oligonucleotide
  Epidermal growth factor receptor (EGFR), ERBB1 phosphotyrosine kinase siRNA
gagttcatccaggcccaactgtg

SEQ ID NO: 9070 - DNA, 23 bp, Artificial Sequence
  Description of Artificial Sequence: Synthetic oligonucleotide
  Epidermal growth factor receptor (EGFR), ERBB1 phosphotyrosine kinase siRNA
agttcatccaggcccaactgtga

SEQ ID NO: 9071 - DNA, 23 bp, Artificial Sequence
  Description of Artificial Sequence: Synthetic oligonucleotide
  Epidermal growth factor receptor (EGFR), ERBB1 phosphotyrosine kinase siRNA
gttcatccaggcccaactgtgag

SEQ ID NO: 9072 - DNA, 23 bp, Artificial Sequence
  Description of Artificial Sequence: Synthetic oligonucleotide
  Epidermal growth factor receptor (EGFR), ERBB1 phosphotyrosine kinase siRNA
ttcatccaggcccaactgtgagc

SEQ ID NO: 9073 - DNA, 23 bp, Artificial Sequence
  Description of Artificial Sequence: Synthetic oligonucleotide
  Epidermal growth factor receptor (EGFR), ERBB1 phosphotyrosine kinase siRNA
tcatccaggcccaactgtgagca

SEQ ID NO: 9074 - DNA, 23 bp, Artificial Sequence
  Description of Artificial Sequence: Synthetic oligonucleotide
  Epidermal growth factor receptor (EGFR), ERBB1 phosphotyrosine kinase siRNA
catccaggcccaactgtgagcaa

SEQ ID NO: 9075 - DNA, 23 bp, Artificial Sequence
  Description of Artificial Sequence: Synthetic oligonucleotide
  Epidermal growth factor receptor (EGFR), ERBB1 phosphotyrosine kinase siRNA
atccaggcccaactgtgagcaag

SEQ ID NO: 9076 - DNA, 23 bp, Artificial Sequence
  Description of Artificial Sequence: Synthetic oligonucleotide
  Epidermal growth factor receptor (EGFR), ERBB1 phosphotyrosine kinase siRNA
tccaggcccaactgtgagcaagg

SEQ ID NO: 9077 - DNA, 23 bp, Artificial Sequence
  Description of Artificial Sequence: Synthetic oligonucleotide
  Epidermal growth factor receptor (EGFR), ERBB1 phosphotyrosine kinase siRNA
ccaggcccaactgtgagcaagga

SEQ ID NO: 9078 - DNA, 23 bp, Artificial Sequence
  Description of Artificial Sequence: Synthetic oligonucleotide
  Epidermal growth factor receptor (EGFR), ERBB1 phosphotyrosine kinase siRNA
caggcccaactgtgagcaaggag

SEQ ID NO: 9079 - DNA, 23 bp, Artificial Sequence
  Description of Artificial Sequence: Synthetic oligonucleotide
  Epidermal growth factor receptor (EGFR), ERBB1 phosphotyrosine kinase siRNA
aggcccaactgtgagcaaggagc

SEQ ID NO: 9080 - DNA, 23 bp, Artificial Sequence
  Description of Artificial Sequence: Synthetic oligonucleotide
  Epidermal growth factor receptor (EGFR), ERBB1 phosphotyrosine kinase siRNA
ggcccaactgtgagcaaggagca

SEQ ID NO: 9081 - DNA, 23 bp, Artificial Sequence
  Description of Artificial Sequence: Synthetic oligonucleotide
  Epidermal growth factor receptor (EGFR), ERBB1 phosphotyrosine kinase siRNA
gcccaactgtgagcaaggagcac

SEQ ID NO: 9082 - DNA, 23 bp, Artificial Sequence
  Description of Artificial Sequence: Synthetic oligonucleotide
  Epidermal growth factor receptor (EGFR), ERBB1 phosphotyrosine kinase siRNA
cccaactgtgagcaaggagcaca

SEQ ID NO: 9083 - DNA, 23 bp, Artificial Sequence
  Description of Artificial Sequence: Synthetic oligonucleotide
  Epidermal growth factor receptor (EGFR), ERBB1 phosphotyrosine kinase siRNA
ccaactgtgagcaaggagcacaa

SEQ ID NO: 9084 - DNA, 23 bp, Artificial Sequence
  Description of Artificial Sequence: Synthetic oligonucleotide
  Epidermal growth factor receptor (EGFR), ERBB1 phosphotyrosine kinase siRNA
caactgtgagcaaggagcacaag

SEQ ID NO: 9085 - DNA, 23 bp, Artificial Sequence
  Description of Artificial Sequence: Synthetic oligonucleotide
  Epidermal growth factor receptor (EGFR), ERBB1 phosphotyrosine kinase siRNA
aactgtgagcaaggagcacaagc

SEQ ID NO: 9086 - DNA, 23 bp, Artificial Sequence
  Description of Artificial Sequence: Synthetic oligonucleotide
  Epidermal growth factor receptor (EGFR), ERBB1 phosphotyrosine kinase siRNA
actgtgagcaaggagcacaagcc

SEQ ID NO: 9087 - DNA, 23 bp, Artificial Sequence
  Description of Artificial Sequence: Synthetic oligonucleotide
  Epidermal growth factor receptor (EGFR), ERBB1 phosphotyrosine kinase siRNA
ctgtgagcaaggagcacaagcca

SEQ ID NO: 9088 - DNA, 23 bp, Artificial Sequence
  Description of Artificial Sequence: Synthetic oligonucleotide
  Epidermal growth factor receptor (EGFR), ERBB1 phosphotyrosine kinase siRNA
tgtgagcaaggagcacaagccac

SEQ ID NO: 9089 - DNA, 23 bp, Artificial Sequence
  Description of Artificial Sequence: Synthetic oligonucleotide
  Epidermal growth factor receptor (EGFR), ERBB1 phosphotyrosine kinase siRNA
gtgagcaaggagcacaagccaca

SEQ ID NO: 9090 - DNA, 23 bp, Artificial Sequence
  Description of Artificial Sequence: Synthetic oligonucleotide
  Epidermal growth factor receptor (EGFR), ERBB1 phosphotyrosine kinase siRNA
tgagcaaggagcacaagccacaa

SEQ ID NO: 9091 - DNA, 23 bp, Artificial Sequence
  Description of Artificial Sequence: Synthetic oligonucleotide
  Epidermal growth factor receptor (EGFR), ERBB1 phosphotyrosine kinase siRNA
gagcaaggagcacaagccacaag

SEQ ID NO: 9092 - DNA, 23 bp, Artificial Sequence
  Description of Artificial Sequence: Synthetic oligonucleotide
  Epidermal growth factor receptor (EGFR), ERBB1 phosphotyrosine kinase siRNA
agcaaggagcacaagccacaagt

SEQ ID NO: 9093 - DNA, 23 bp, Artificial Sequence
  Description of Artificial Sequence: Synthetic oligonucleotide
  Epidermal growth factor receptor (EGFR), ERBB1 phosphotyrosine kinase siRNA
gcaaggagcacaagccacaagtc

SEQ ID NO: 9094 - DNA, 23 bp, Artificial Sequence
  Description of Artificial Sequence: Synthetic oligonucleotide
  Epidermal growth factor receptor (EGFR), ERBB1 phosphotyrosine kinase siRNA
caaggagcacaagccacaagtct

SEQ ID NO: 9095 - DNA, 23 bp, Artificial Sequence
  Description of Artificial Sequence: Synthetic oligonucleotide
  Epidermal growth factor receptor (EGFR), ERBB1 phosphotyrosine kinase siRNA
aaggagcacaagccacaagtctt

SEQ ID NO: 9096 - DNA, 23 bp, Artificial Sequence
  Description of Artificial Sequence: Synthetic oligonucleotide
  Epidermal growth factor receptor (EGFR), ERBB1 phosphotyrosine kinase siRNA
aggagcacaagccacaagtcttc

SEQ ID NO: 9097 - DNA, 23 bp, Artificial Sequence
  Description of Artificial Sequence: Synthetic oligonucleotide
  Epidermal growth factor receptor (EGFR), ERBB1 phosphotyrosine kinase siRNA
ggagcacaagccacaagtcttcc

SEQ ID NO: 9098 - DNA, 23 bp, Artificial Sequence
  Description of Artificial Sequence: Synthetic oligonucleotide
  Epidermal growth factor receptor (EGFR), ERBB1 phosphotyrosine kinase siRNA
gagcacaagccacaagtcttcca

SEQ ID NO: 9099 - DNA, 23 bp, Artificial Sequence
  Description of Artificial Sequence: Synthetic oligonucleotide
  Epidermal growth factor receptor (EGFR), ERBB1 phosphotyrosine kinase siRNA
agcacaagccacaagtcttccag

SEQ ID NO: 9100 - DNA, 23 bp, Artificial Sequence
  Description of Artificial Sequence: Synthetic oligonucleotide
  Epidermal growth factor receptor (EGFR), ERBB1 phosphotyrosine kinase siRNA
gcacaagccacaagtcttccaga

SEQ ID NO: 9101 - DNA, 23 bp, Artificial Sequence
  Description of Artificial Sequence: Synthetic oligonucleotide
  Epidermal growth factor receptor (EGFR), ERBB1 phosphotyrosine kinase siRNA
cacaagccacaagtcttccagag

SEQ ID NO: 9102 - DNA, 23 bp, Artificial Sequence
  Description of Artificial Sequence: Synthetic oligonucleotide
  Epidermal growth factor receptor (EGFR), ERBB1 phosphotyrosine kinase siRNA
acaagccacaagtcttccagagg

SEQ ID NO: 9103 - DNA, 23 bp, Artificial Sequence
  Description of Artificial Sequence: Synthetic oligonucleotide
  Epidermal growth factor receptor (EGFR), ERBB1 phosphotyrosine kinase siRNA
caagccacaagtcttccagagga

SEQ ID NO: 9104 - DNA, 23 bp, Artificial Sequence
  Description of Artificial Sequence: Synthetic oligonucleotide
  Epidermal growth factor receptor (EGFR), ERBB1 phosphotyrosine kinase siRNA
aagccacaagtcttccagaggat

SEQ ID NO: 9105 - DNA, 23 bp, Artificial Sequence
  Description of Artificial Sequence: Synthetic oligonucleotide
  Epidermal growth factor receptor (EGFR), ERBB1 phosphotyrosine kinase siRNA
agccacaagtcttccagaggatg

SEQ ID NO: 9106 - DNA, 23 bp, Artificial Sequence
  Description of Artificial Sequence: Synthetic oligonucleotide
  Epidermal growth factor receptor (EGFR), ERBB1 phosphotyrosine kinase siRNA
gccacaagtcttccagaggatgc

SEQ ID NO: 9107 - DNA, 23 bp, Artificial Sequence
  Description of Artificial Sequence: Synthetic oligonucleotide
  Epidermal growth factor receptor (EGFR), ERBB1 phosphotyrosine kinase siRNA
ccacaagtcttccagaggatgct

SEQ ID NO: 9108 - DNA, 23 bp, Artificial Sequence
  Description of Artificial Sequence: Synthetic oligonucleotide
  Epidermal growth factor receptor (EGFR), ERBB1 phosphotyrosine kinase siRNA
cacaagtcttccagaggatgctt

SEQ ID NO: 9109 - DNA, 23 bp, Artificial Sequence
  Description of Artificial Sequence: Synthetic oligonucleotide
  Epidermal growth factor receptor (EGFR), ERBB1 phosphotyrosine kinase siRNA
acaagtcttccagaggatgcttg

SEQ ID NO: 9110 - DNA, 23 bp, Artificial Sequence
  Description of Artificial Sequence: Synthetic oligonucleotide
  Epidermal growth factor receptor (EGFR), ERBB1 phosphotyrosine kinase siRNA
caagtcttccagaggatgcttga

SEQ ID NO: 9111 - DNA, 23 bp, Artificial Sequence
  Description of Artificial Sequence: Synthetic oligonucleotide
  Epidermal growth factor receptor (EGFR), ERBB1 phosphotyrosine kinase siRNA
aagtcttccagaggatgcttgat

SEQ ID NO: 9112 - DNA, 23 bp, Artificial Sequence
  Description of Artificial Sequence: Synthetic oligonucleotide
  Epidermal growth factor receptor (EGFR), ERBB1 phosphotyrosine kinase siRNA
agtcttccagaggatgcttgatt

SEQ ID NO: 9113 - DNA, 23 bp, Artificial Sequence
  Description of Artificial Sequence: Synthetic oligonucleotide
  Epidermal growth factor receptor (EGFR), ERBB1 phosphotyrosine kinase siRNA
gtcttccagaggatgcttgattc

SEQ ID NO: 9114 - DNA, 23 bp, Artificial Sequence
  Description of Artificial Sequence: Synthetic oligonucleotide
  Epidermal growth factor receptor (EGFR), ERBB1 phosphotyrosine kinase siRNA
tcttccagaggatgcttgattcc

SEQ ID NO: 9115 - DNA, 23 bp, Artificial Sequence
  Description of Artificial Sequence: Synthetic oligonucleotide
  Epidermal growth factor receptor (EGFR), ERBB1 phosphotyrosine kinase siRNA
cttccagaggatgcttgattcca

SEQ ID NO: 9116 - DNA, 23 bp, Artificial Sequence
  Description of Artificial Sequence: Synthetic oligonucleotide
  Epidermal growth factor receptor (EGFR), ERBB1 phosphotyrosine kinase siRNA
ttccagaggatgcttgattccag

SEQ ID NO: 9117 - DNA, 23 bp, Artificial Sequence
  Description of Artificial Sequence: Synthetic oligonucleotide
  Epidermal growth factor receptor (EGFR), ERBB1 phosphotyrosine kinase siRNA
tccagaggatgcttgattccagt

SEQ ID NO: 9118 - DNA, 23 bp, Artificial Sequence
  Description of Artificial Sequence: Synthetic oligonucleotide
  Epidermal growth factor receptor (EGFR), ERBB1 phosphotyrosine kinase siRNA
ccagaggatgcttgattccagtg

SEQ ID NO: 9119 - DNA, 23 bp, Artificial Sequence
  Description of Artificial Sequence: Synthetic oligonucleotide
  Epidermal growth factor receptor (EGFR), ERBB1 phosphotyrosine kinase siRNA
cagaggatgcttgattccagtgg

SEQ ID NO: 9120 - DNA, 23 bp, Artificial Sequence
  Description of Artificial Sequence: Synthetic oligonucleotide
  Epidermal growth factor receptor (EGFR), ERBB1 phosphotyrosine kinase siRNA
agaggatgcttgattccagtggt

SEQ ID NO: 9121 - DNA, 23 bp, Artificial Sequence
  Description of Artificial Sequence: Synthetic oligonucleotide
  Epidermal growth factor receptor (EGFR), ERBB1 phosphotyrosine kinase siRNA
gaggatgcttgattccagtggtt

SEQ ID NO: 9122 - DNA, 23 bp, Artificial Sequence
  Description of Artificial Sequence: Synthetic oligonucleotide
  Epidermal growth factor receptor (EGFR), ERBB1 phosphotyrosine kinase siRNA
aggatgcttgattccagtggttc

SEQ ID NO: 9123 - DNA, 23 bp, Artificial Sequence
  Description of Artificial Sequence: Synthetic oligonucleotide
  Epidermal growth factor receptor (EGFR), ERBB1 phosphotyrosine kinase siRNA
ggatgcttgattccagtggttct

SEQ ID NO: 9124 - DNA, 23 bp, Artificial Sequence
  Description of Artificial Sequence: Synthetic oligonucleotide
  Epidermal growth factor receptor (EGFR), ERBB1 phosphotyrosine kinase siRNA
gatgcttgattccagtggttctg

SEQ ID NO: 9125 - DNA, 23 bp, Artificial Sequence
  Description of Artificial Sequence: Synthetic oligonucleotide
  Epidermal growth factor receptor (EGFR), ERBB1 phosphotyrosine kinase siRNA
atgcttgattccagtggttctgc

SEQ ID NO: 9126 - DNA, 23 bp, Artificial Sequence
  Description of Artificial Sequence: Synthetic oligonucleotide
  Epidermal growth factor receptor (EGFR), ERBB1 phosphotyrosine kinase siRNA
tgcttgattccagtggttctgct

SEQ ID NO: 9127 - DNA, 23 bp, Artificial Sequence
  Description of Artificial Sequence: Synthetic oligonucleotide
  Epidermal growth factor receptor (EGFR), ERBB1 phosphotyrosine kinase siRNA
gcttgattccagtggttctgctt

SEQ ID NO: 9128 - DNA, 23 bp, Artificial Sequence
  Description of Artificial Sequence: Synthetic oligonucleotide
  Epidermal growth factor receptor (EGFR), ERBB1 phosphotyrosine kinase siRNA
cttgattccagtggttctgcttc

SEQ ID NO: 9129 - DNA, 23 bp, Artificial Sequence
  Description of Artificial Sequence: Synthetic oligonucleotide
  Epidermal growth factor receptor (EGFR), ERBB1 phosphotyrosine kinase siRNA
ttgattccagtggttctgcttca

SEQ ID NO: 9130 - DNA, 23 bp, Artificial Sequence
  Description of Artificial Sequence: Synthetic oligonucleotide
  Epidermal growth factor receptor (EGFR), ERBB1 phosphotyrosine kinase siRNA
tgattccagtggttctgcttcaa

SEQ ID NO: 9131 - DNA, 23 bp, Artificial Sequence
  Description of Artificial Sequence: Synthetic oligonucleotide
  Epidermal growth factor receptor (EGFR), ERBB1 phosphotyrosine kinase siRNA
gattccagtggttctgcttcaag

SEQ ID NO: 9132 - DNA, 23 bp, Artificial Sequence
  Description of Artificial Sequence: Synthetic oligonucleotide
  Epidermal growth factor receptor (EGFR), ERBB1 phosphotyrosine kinase siRNA
attccagtggttctgcttcaagg

SEQ ID NO: 9133 - DNA, 23 bp, Artificial Sequence
  Description of Artificial Sequence: Synthetic oligonucleotide
  Epidermal growth factor receptor (EGFR), ERBB1 phosphotyrosine kinase siRNA
ttccagtggttctgcttcaaggc

SEQ ID NO: 9134 - DNA, 23 bp, Artificial Sequence
  Description of Artificial Sequence: Synthetic oligonucleotide
  Epidermal growth factor receptor (EGFR), ERBB1 phosphotyrosine kinase siRNA
tccagtggttctgcttcaaggct

SEQ ID NO: 9135 - DNA, 23 bp, Artificial Sequence
  Description of Artificial Sequence: Synthetic oligonucleotide
  Epidermal growth factor receptor (EGFR), ERBB1 phosphotyrosine kinase siRNA
ccagtggttctgcttcaaggctt

SEQ ID NO: 9136 - DNA, 23 bp, Artificial Sequence
  Description of Artificial Sequence: Synthetic oligonucleotide
  Epidermal growth factor receptor (EGFR), ERBB1 phosphotyrosine kinase siRNA
cagtggttctgcttcaaggcttc

SEQ ID NO: 9137 - DNA, 23 bp, Artificial Sequence
  Description of Artificial Sequence: Synthetic oligonucleotide
  Epidermal growth factor receptor (EGFR), ERBB1 phosphotyrosine kinase siRNA
agtggttctgcttcaaggcttcc

SEQ ID NO: 9138 - DNA, 23 bp, Artificial Sequence
  Description of Artificial Sequence: Synthetic oligonucleotide
  Epidermal growth factor receptor (EGFR), ERBB1 phosphotyrosine kinase siRNA
gtggttctgcttcaaggcttcca

SEQ ID NO: 9139 - DNA, 23 bp, Artificial Sequence
  Description of Artificial Sequence: Synthetic oligonucleotide
  Epidermal growth factor receptor (EGFR), ERBB1 phosphotyrosine kinase siRNA
tggttctgcttcaaggcttccac

SEQ ID NO: 9140 - DNA, 23 bp, Artificial Sequence
  Description of Artificial Sequence: Synthetic oligonucleotide
  Epidermal growth factor receptor (EGFR), ERBB1 phosphotyrosine kinase siRNA
ggttctgcttcaaggcttccact

SEQ ID NO: 9141 - DNA, 23 bp, Artificial Sequence
  Description of Artificial Sequence: Synthetic oligonucleotide
  Epidermal growth factor receptor (EGFR), ERBB1 phosphotyrosine kinase siRNA
gttctgcttcaaggcttccactg

SEQ ID NO: 9142 - DNA, 23 bp, Artificial Sequence
  Description of Artificial Sequence: Synthetic oligonucleotide
  Epidermal growth factor receptor (EGFR), ERBB1 phosphotyrosine kinase siRNA
ttctgcttcaaggcttccactgc

SEQ ID NO: 9143 - DNA, 23 bp, Artificial Sequence
  Description of Artificial Sequence: Synthetic oligonucleotide
  Epidermal growth factor receptor (EGFR), ERBB1 phosphotyrosine kinase siRNA
tctgcttcaaggcttccactgca

SEQ ID NO: 9144 - DNA, 23 bp, Artificial Sequence
  Description of Artificial Sequence: Synthetic oligonucleotide
  Epidermal growth factor receptor (EGFR), ERBB1 phosphotyrosine kinase siRNA
ctgcttcaaggcttccactgcaa

SEQ ID NO: 9145 - DNA, 23 bp, Artificial Sequence
  Description of Artificial Sequence: Synthetic oligonucleotide
  Epidermal growth factor receptor (EGFR), ERBB1 phosphotyrosine kinase siRNA
tgcttcaaggcttccactgcaaa

SEQ ID NO: 9146 - DNA, 23 bp, Artificial Sequence
  Description of Artificial Sequence: Synthetic oligonucleotide
  Epidermal growth factor receptor (EGFR), ERBB1 phosphotyrosine kinase siRNA
gcttcaaggcttccactgcaaaa

SEQ ID NO: 9147 - DNA, 23 bp, Artificial Sequence
  Description of Artificial Sequence: Synthetic oligonucleotide
  Epidermal growth factor receptor (EGFR), ERBB1 phosphotyrosine kinase siRNA
cttcaaggcttccactgcaaaac

SEQ ID NO: 9148 - DNA, 23 bp, Artificial Sequence
  Description of Artificial Sequence: Synthetic oligonucleotide
  Epidermal growth factor receptor (EGFR), ERBB1 phosphotyrosine kinase siRNA
ttcaaggcttccactgcaaaaca

SEQ ID NO: 9149 - DNA, 23 bp, Artificial Sequence
  Description of Artificial Sequence: Synthetic oligonucleotide
  Epidermal growth factor receptor (EGFR), ERBB1 phosphotyrosine kinase siRNA
tcaaggcttccactgcaaaacac

SEQ ID NO: 9150 - DNA, 23 bp, Artificial Sequence
  Description of Artificial Sequence: Synthetic oligonucleotide
  Epidermal growth factor receptor (EGFR), ERBB1 phosphotyrosine kinase siRNA
caaggcttccactgcaaaacact

SEQ ID NO: 9151 - DNA, 23 bp, Artificial Sequence
  Description of Artificial Sequence: Synthetic oligonucleotide
  Epidermal growth factor receptor (EGFR), ERBB1 phosphotyrosine kinase siRNA
aaggcttccactgcaaaacacta

SEQ ID NO: 9152 - DNA, 23 bp, Artificial Sequence
  Description of Artificial Sequence: Synthetic oligonucleotide
  Epidermal growth factor receptor (EGFR), ERBB1 phosphotyrosine kinase siRNA
aggcttccactgcaaaacactaa

SEQ ID NO: 9153 - DNA, 23 bp, Artificial Sequence
  Description of Artificial Sequence: Synthetic oligonucleotide
  Epidermal growth factor receptor (EGFR), ERBB1 phosphotyrosine kinase siRNA
ggcttccactgcaaaacactaaa

SEQ ID NO: 9154 - DNA, 23 bp, Artificial Sequence
  Description of Artificial Sequence: Synthetic oligonucleotide
  Epidermal growth factor receptor (EGFR), ERBB1 phosphotyrosine kinase siRNA
gcttccactgcaaaacactaaag

SEQ ID NO: 9155 - DNA, 23 bp, Artificial Sequence
  Description of Artificial Sequence: Synthetic oligonucleotide
  Epidermal growth factor receptor (EGFR), ERBB1 phosphotyrosine kinase siRNA
cttccactgcaaaacactaaaga

SEQ ID NO: 9156 - DNA, 23 bp, Artificial Sequence
  Description of Artificial Sequence: Synthetic oligonucleotide
  Epidermal growth factor receptor (EGFR), ERBB1 phosphotyrosine kinase siRNA
ttccactgcaaaacactaaagat

SEQ ID NO: 9157 - DNA, 23 bp, Artificial Sequence
  Description of Artificial Sequence: Synthetic oligonucleotide
  Epidermal growth factor receptor (EGFR), ERBB1 phosphotyrosine kinase siRNA
tccactgcaaaacactaaagatc

SEQ ID NO: 9158 - DNA, 23 bp, Artificial Sequence
  Description of Artificial Sequence: Synthetic oligonucleotide
  Epidermal growth factor receptor (EGFR), ERBB1 phosphotyrosine kinase siRNA
ccactgcaaaacactaaagatcc

SEQ ID NO: 9159 - DNA, 23 bp, Artificial Sequence
  Description of Artificial Sequence: Synthetic oligonucleotide
  Epidermal growth factor receptor (EGFR), ERBB1 phosphotyrosine kinase siRNA
cactgcaaaacactaaagatcca

SEQ ID NO: 9160 - DNA, 23 bp, Artificial Sequence
  Description of Artificial Sequence: Synthetic oligonucleotide
  Epidermal growth factor receptor (EGFR), ERBB1 phosphotyrosine kinase siRNA
actgcaaaacactaaagatccaa

SEQ ID NO: 9161 - DNA, 23 bp, Artificial Sequence
  Description of Artificial Sequence: Synthetic oligonucleotide
  Epidermal growth factor receptor (EGFR), ERBB1 phosphotyrosine kinase siRNA
ctgcaaaacactaaagatccaag

SEQ ID NO: 9162 - DNA, 23 bp, Artificial Sequence
  Description of Artificial Sequence: Synthetic oligonucleotide
  Epidermal growth factor receptor (EGFR), ERBB1 phosphotyrosine kinase siRNA
tgcaaaacactaaagatccaaga

SEQ ID NO: 9163 - DNA, 23 bp, Artificial Sequence
  Description of Artificial Sequence: Synthetic oligonucleotide
  Epidermal growth factor receptor (EGFR), ERBB1 phosphotyrosine kinase siRNA
gcaaaacactaaagatccaagaa

SEQ ID NO: 9164 - DNA, 23 bp, Artificial Sequence
  Description of Artificial Sequence: Synthetic oligonucleotide
  Epidermal growth factor receptor (EGFR), ERBB1 phosphotyrosine kinase siRNA
caaaacactaaagatccaagaag

SEQ ID NO: 9165 - DNA, 23 bp, Artificial Sequence
  Description of Artificial Sequence: Synthetic oligonucleotide
  Epidermal growth factor receptor (EGFR), ERBB1 phosphotyrosine kinase siRNA
aaaacactaaagatccaagaagg

SEQ ID NO: 9166 - DNA, 23 bp, Artificial Sequence
  Description of Artificial Sequence: Synthetic oligonucleotide
  Epidermal growth factor receptor (EGFR), ERBB1 phosphotyrosine kinase siRNA
aaacactaaagatccaagaaggc

SEQ ID NO: 9167 - DNA, 23 bp, Artificial Sequence
  Description of Artificial Sequence: Synthetic oligonucleotide
  Epidermal growth factor receptor (EGFR), ERBB1 phosphotyrosine kinase siRNA
aacactaaagatccaagaaggcc

SEQ ID NO: 9168 - DNA, 23 bp, Artificial Sequence
  Description of Artificial Sequence: Synthetic oligonucleotide
  Epidermal growth factor receptor (EGFR), ERBB1 phosphotyrosine kinase siRNA
acactaaagatccaagaaggcct

SEQ ID NO: 9169 - DNA, 23 bp, Artificial Sequence
  Description of Artificial Sequence: Synthetic oligonucleotide
  Epidermal growth factor receptor (EGFR), ERBB1 phosphotyrosine kinase siRNA
cactaaagatccaagaaggcctt

SEQ ID NO: 9170 - DNA, 23 bp, Artificial Sequence
  Description of Artificial Sequence: Synthetic oligonucleotide
  Epidermal growth factor receptor (EGFR), ERBB1 phosphotyrosine kinase siRNA
actaaagatccaagaaggccttc

SEQ ID NO: 9171 - DNA, 23 bp, Artificial Sequence
  Description of Artificial Sequence: Synthetic oligonucleotide
  Epidermal growth factor receptor (EGFR), ERBB1 phosphotyrosine kinase siRNA
ctaaagatccaagaaggccttca

SEQ ID NO: 9172 - DNA, 23 bp, Artificial Sequence
  Description of Artificial Sequence: Synthetic oligonucleotide
  Epidermal growth factor receptor (EGFR), ERBB1 phosphotyrosine kinase siRNA
taaagatccaagaaggccttcat

SEQ ID NO: 9173 - DNA, 23 bp, Artificial Sequence
  Description of Artificial Sequence: Synthetic oligonucleotide
  Epidermal growth factor receptor (EGFR), ERBB1 phosphotyrosine kinase siRNA
aaagatccaagaaggccttcatg

SEQ ID NO: 9174 - DNA, 23 bp, Artificial Sequence
  Description of Artificial Sequence: Synthetic oligonucleotide
  Epidermal growth factor receptor (EGFR), ERBB1 phosphotyrosine kinase siRNA
aagatccaagaaggccttcatgg

SEQ ID NO: 9175 - DNA, 23 bp, Artificial Sequence
  Description of Artificial Sequence: Synthetic oligonucleotide
  Epidermal growth factor receptor (EGFR), ERBB1 phosphotyrosine kinase siRNA
agatccaagaaggccttcatggc

SEQ ID NO: 9176 - DNA, 23 bp, Artificial Sequence
  Description of Artificial Sequence: Synthetic oligonucleotide
  Epidermal growth factor receptor (EGFR), ERBB1 phosphotyrosine kinase siRNA
gatccaagaaggccttcatggcc

SEQ ID NO: 9177 - DNA, 23 bp, Artificial Sequence
  Description of Artificial Sequence: Synthetic oligonucleotide
  Epidermal growth factor receptor (EGFR), ERBB1 phosphotyrosine kinase siRNA
atccaagaaggccttcatggccc

SEQ ID NO: 9178 - DNA, 23 bp, Artificial Sequence
  Description of Artificial Sequence: Synthetic oligonucleotide
  Epidermal growth factor receptor (EGFR), ERBB1 phosphotyrosine kinase siRNA
tccaagaaggccttcatggcccc

SEQ ID NO: 9179 - DNA, 23 bp, Artificial Sequence
  Description of Artificial Sequence: Synthetic oligonucleotide
  Epidermal growth factor receptor (EGFR), ERBB1 phosphotyrosine kinase siRNA
ccaagaaggccttcatggcccca

SEQ ID NO: 9180 - DNA, 23 bp, Artificial Sequence
  Description of Artificial Sequence: Synthetic oligonucleotide
  Epidermal growth factor receptor (EGFR), ERBB1 phosphotyrosine kinase siRNA
caagaaggccttcatggccccag

SEQ ID NO: 9181 - DNA, 23 bp, Artificial Sequence
  Description of Artificial Sequence: Synthetic oligonucleotide
  Epidermal growth factor receptor (EGFR), ERBB1 phosphotyrosine kinase siRNA
aagaaggccttcatggccccagc

SEQ ID NO: 9182 - DNA, 23 bp, Artificial Sequence
  Description of Artificial Sequence: Synthetic oligonucleotide
  Epidermal growth factor receptor (EGFR), ERBB1 phosphotyrosine kinase siRNA
agaaggccttcatggccccagca

SEQ ID NO: 9183 - DNA, 23 bp, Artificial Sequence
  Description of Artificial Sequence: Synthetic oligonucleotide
  Epidermal growth factor receptor (EGFR), ERBB1 phosphotyrosine kinase siRNA
gaaggccttcatggccccagcag

SEQ ID NO: 9184 - DNA, 23 bp, Artificial Sequence
  Description of Artificial Sequence: Synthetic oligonucleotide
  Epidermal growth factor receptor (EGFR), ERBB1 phosphotyrosine kinase siRNA
aaggccttcatggccccagcagg

SEQ ID NO: 9185 - DNA, 23 bp, Artificial Sequence
  Description of Artificial Sequence: Synthetic oligonucleotide
  Epidermal growth factor receptor (EGFR), ERBB1 phosphotyrosine kinase siRNA
aggccttcatggccccagcaggc

SEQ ID NO: 9186 - DNA, 23 bp, Artificial Sequence
  Description of Artificial Sequence: Synthetic oligonucleotide
  Epidermal growth factor receptor (EGFR), ERBB1 phosphotyrosine kinase siRNA
ggccttcatggccccagcaggcc

SEQ ID NO: 9187 - DNA, 23 bp, Artificial Sequence
  Description of Artificial Sequence: Synthetic oligonucleotide
  Epidermal growth factor receptor (EGFR), ERBB1 phosphotyrosine kinase siRNA
gccttcatggccccagcaggccg

SEQ ID NO: 9188 - DNA, 23 bp, Artificial Sequence
  Description of Artificial Sequence: Synthetic oligonucleotide
  Epidermal growth factor receptor (EGFR), ERBB1 phosphotyrosine kinase siRNA
ccttcatggccccagcaggccgg

SEQ ID NO: 9189 - DNA, 23 bp, Artificial Sequence
  Description of Artificial Sequence: Synthetic oligonucleotide
  Epidermal growth factor receptor (EGFR), ERBB1 phosphotyrosine kinase siRNA
cttcatggccccagcaggccgga

SEQ ID NO: 9190 - DNA, 23 bp, Artificial Sequence
  Description of Artificial Sequence: Synthetic oligonucleotide
  Epidermal growth factor receptor (EGFR), ERBB1 phosphotyrosine kinase siRNA
ttcatggccccagcaggccggat

SEQ ID NO: 9191 - DNA, 23 bp, Artificial Sequence
  Description of Artificial Sequence: Synthetic oligonucleotide
  Epidermal growth factor receptor (EGFR), ERBB1 phosphotyrosine kinase siRNA
tcatggccccagcaggccggatc

SEQ ID NO: 9192 - DNA, 23 bp, Artificial Sequence
  Description of Artificial Sequence: Synthetic oligonucleotide
  Epidermal growth factor receptor (EGFR), ERBB1 phosphotyrosine kinase siRNA
catggccccagcaggccggatcg

SEQ ID NO: 9193 - DNA, 23 bp, Artificial Sequence
  Description of Artificial Sequence: Synthetic oligonucleotide
  Epidermal growth factor receptor (EGFR), ERBB1 phosphotyrosine kinase siRNA
atggccccagcaggccggatcgg

SEQ ID NO: 9194 - DNA, 23 bp, Artificial Sequence
  Description of Artificial Sequence: Synthetic oligonucleotide
  Epidermal growth factor receptor (EGFR), ERBB1 phosphotyrosine kinase siRNA
tggccccagcaggccggatcggt

SEQ ID NO: 9195 - DNA, 23 bp, Artificial Sequence
  Description of Artificial Sequence: Synthetic oligonucleotide
  Epidermal growth factor receptor (EGFR), ERBB1 phosphotyrosine kinase siRNA
ggccccagcaggccggatcggta

SEQ ID NO: 9196 - DNA, 23 bp, Artificial Sequence
  Description of Artificial Sequence: Synthetic oligonucleotide
  Epidermal growth factor receptor (EGFR), ERBB1 phosphotyrosine kinase siRNA
gccccagcaggccggatcggtac

SEQ ID NO: 9197 - DNA, 23 bp, Artificial Sequence
  Description of Artificial Sequence: Synthetic oligonucleotide
  Epidermal growth factor receptor (EGFR), ERBB1 phosphotyrosine kinase siRNA
ccccagcaggccggatcggtact

SEQ ID NO: 9198 - DNA, 23 bp, Artificial Sequence
  Description of Artificial Sequence: Synthetic oligonucleotide
  Epidermal growth factor receptor (EGFR), ERBB1 phosphotyrosine kinase siRNA
cccagcaggccggatcggtactg

SEQ ID NO: 9199 - DNA, 23 bp, Artificial Sequence
  Description of Artificial Sequence: Synthetic oligonucleotide
  Epidermal growth factor receptor (EGFR), ERBB1 phosphotyrosine kinase siRNA
ccagcaggccggatcggtactgt

SEQ ID NO: 9200 - DNA, 23 bp, Artificial Sequence
  Description of Artificial Sequence: Synthetic oligonucleotide
  Epidermal growth factor receptor (EGFR), ERBB1 phosphotyrosine kinase siRNA
cagcaggccggatcggtactgta

SEQ ID NO: 9201 - DNA, 23 bp, Artificial Sequence
  Description of Artificial Sequence: Synthetic oligonucleotide
  Epidermal growth factor receptor (EGFR), ERBB1 phosphotyrosine kinase siRNA
agcaggccggatcggtactgtat

SEQ ID NO: 9202 - DNA, 23 bp, Artificial Sequence
  Description of Artificial Sequence: Synthetic oligonucleotide
  Epidermal growth factor receptor (EGFR), ERBB1 phosphotyrosine kinase siRNA
gcaggccggatcggtactgtatc

SEQ ID NO: 9203 - DNA, 23 bp, Artificial Sequence
  Description of Artificial Sequence: Synthetic oligonucleotide
  Epidermal growth factor receptor (EGFR), ERBB1 phosphotyrosine kinase siRNA
caggccggatcggtactgtatca

SEQ ID NO: 9204 - DNA, 23 bp, Artificial Sequence
  Description of Artificial Sequence: Synthetic oligonucleotide
  Epidermal growth factor receptor (EGFR), ERBB1 phosphotyrosine kinase siRNA
aggccggatcggtactgtatcaa

SEQ ID NO: 9205 - DNA, 23 bp, Artificial Sequence
  Description of Artificial Sequence: Synthetic oligonucleotide
  Epidermal growth factor receptor (EGFR), ERBB1 phosphotyrosine kinase siRNA
ggccggatcggtactgtatcaag

SEQ ID NO: 9206 - DNA, 23 bp, Artificial Sequence
  Description of Artificial Sequence: Synthetic oligonucleotide
  Epidermal growth factor receptor (EGFR), ERBB1 phosphotyrosine kinase siRNA
gccggatcggtactgtatcaagt

SEQ ID NO: 9207 - DNA, 23 bp, Artificial Sequence
  Description of Artificial Sequence: Synthetic oligonucleotide
  Epidermal growth factor receptor (EGFR), ERBB1 phosphotyrosine kinase siRNA
ccggatcggtactgtatcaagtc

SEQ ID NO: 9208 - DNA, 23 bp, Artificial Sequence
  Description of Artificial Sequence: Synthetic oligonucleotide
  Epidermal growth factor receptor (EGFR), ERBB1 phosphotyrosine kinase siRNA
cggatcggtactgtatcaagtca

SEQ ID NO: 9209 - DNA, 23 bp, Artificial Sequence
  Description of Artificial Sequence: Synthetic oligonucleotide
  Epidermal growth factor receptor (EGFR), ERBB1 phosphotyrosine kinase siRNA
ggatcggtactgtatcaagtcat

SEQ ID NO: 9210 - DNA, 23 bp, Artificial Sequence
  Description of Artificial Sequence: Synthetic oligonucleotide
  Epidermal growth factor receptor (EGFR), ERBB1 phosphotyrosine kinase siRNA
gatcggtactgtatcaagtcatg

SEQ ID NO: 9211 - DNA, 23 bp, Artificial Sequence
  Description of Artificial Sequence: Synthetic oligonucleotide
  Epidermal growth factor receptor (EGFR), ERBB1 phosphotyrosine kinase siRNA
atcggtactgtatcaagtcatgg

SEQ ID NO: 9212 - DNA, 23 bp, Artificial Sequence
  Description of Artificial Sequence: Synthetic oligonucleotide
  Epidermal growth factor receptor (EGFR), ERBB1 phosphotyrosine kinase siRNA
tcggtactgtatcaagtcatggc

SEQ ID NO: 9213 - DNA, 23 bp, Artificial Sequence
  Description of Artificial Sequence: Synthetic oligonucleotide
  Epidermal growth factor receptor (EGFR), ERBB1 phosphotyrosine kinase siRNA
cggtactgtatcaagtcatggca

SEQ ID NO: 9214 - DNA, 23 bp, Artificial Sequence
  Description of Artificial Sequence: Synthetic oligonucleotide
  Epidermal growth factor receptor (EGFR), ERBB1 phosphotyrosine kinase siRNA
ggtactgtatcaagtcatggcag

SEQ ID NO: 9215 - DNA, 23 bp, Artificial Sequence
  Description of Artificial Sequence: Synthetic oligonucleotide
  Epidermal growth factor receptor (EGFR), ERBB1 phosphotyrosine kinase siRNA
gtactgtatcaagtcatggcagg

SEQ ID NO: 9216 - DNA, 23 bp, Artificial Sequence
  Description of Artificial Sequence: Synthetic oligonucleotide
  Epidermal growth factor receptor (EGFR), ERBB1 phosphotyrosine kinase siRNA
tactgtatcaagtcatggcaggt

SEQ ID NO: 9217 - DNA, 23 bp, Artificial Sequence
  Description of Artificial Sequence: Synthetic oligonucleotide
  Epidermal growth factor receptor (EGFR), ERBB1 phosphotyrosine kinase siRNA
actgtatcaagtcatggcaggta

SEQ ID NO: 9218 - DNA, 23 bp, Artificial Sequence
  Description of Artificial Sequence: Synthetic oligonucleotide
  Epidermal growth factor receptor (EGFR), ERBB1 phosphotyrosine kinase siRNA
ctgtatcaagtcatggcaggtac

SEQ ID NO: 9219 - DNA, 23 bp, Artificial Sequence
  Description of Artificial Sequence: Synthetic oligonucleotide
  Epidermal growth factor receptor (EGFR), ERBB1 phosphotyrosine kinase siRNA
tgtatcaagtcatggcaggtaca

SEQ ID NO: 9220 - DNA, 23 bp, Artificial Sequence
  Description of Artificial Sequence: Synthetic oligonucleotide
  Epidermal growth factor receptor (EGFR), ERBB1 phosphotyrosine kinase siRNA
gtatcaagtcatggcaggtacag

SEQ ID NO: 9221 - DNA, 23 bp, Artificial Sequence
  Description of Artificial Sequence: Synthetic oligonucleotide
  Epidermal growth factor receptor (EGFR), ERBB1 phosphotyrosine kinase siRNA
tatcaagtcatggcaggtacagt

SEQ ID NO: 9222 - DNA, 23 bp, Artificial Sequence
  Description of Artificial Sequence: Synthetic oligonucleotide
  Epidermal growth factor receptor (EGFR), ERBB1 phosphotyrosine kinase siRNA
atcaagtcatggcaggtacagta

SEQ ID NO: 9223 - DNA, 23 bp, Artificial Sequence
  Description of Artificial Sequence: Synthetic oligonucleotide
  Epidermal growth factor receptor (EGFR), ERBB1 phosphotyrosine kinase siRNA
tcaagtcatggcaggtacagtag

SEQ ID NO: 9224 - DNA, 23 bp, Artificial Sequence
  Description of Artificial Sequence: Synthetic oligonucleotide
  Epidermal growth factor receptor (EGFR), ERBB1 phosphotyrosine kinase siRNA
caagtcatggcaggtacagtagg

SEQ ID NO: 9225 - DNA, 23 bp, Artificial Sequence
  Description of Artificial Sequence: Synthetic oligonucleotide
  Epidermal growth factor receptor (EGFR), ERBB1 phosphotyrosine kinase siRNA
aagtcatggcaggtacagtagga

SEQ ID NO: 9226 - DNA, 23 bp, Artificial Sequence
  Description of Artificial Sequence: Synthetic oligonucleotide
  Epidermal growth factor receptor (EGFR), ERBB1 phosphotyrosine kinase siRNA
agtcatggcaggtacagtaggat

SEQ ID NO: 9227 - DNA, 23 bp, Artificial Sequence
  Description of Artificial Sequence: Synthetic oligonucleotide
  Epidermal growth factor receptor (EGFR), ERBB1 phosphotyrosine kinase siRNA
gtcatggcaggtacagtaggata

SEQ ID NO: 9228 - DNA, 23 bp, Artificial Sequence
  Description of Artificial Sequence: Synthetic oligonucleotide
  Epidermal growth factor receptor (EGFR), ERBB1 phosphotyrosine kinase siRNA
tcatggcaggtacagtaggataa

SEQ ID NO: 9229 - DNA, 23 bp, Artificial Sequence
  Description of Artificial Sequence: Synthetic oligonucleotide
  Epidermal growth factor receptor (EGFR), ERBB1 phosphotyrosine kinase siRNA
catggcaggtacagtaggataag

SEQ ID NO: 9230 - DNA, 23 bp, Artificial Sequence
  Description of Artificial Sequence: Synthetic oligonucleotide
  Epidermal growth factor receptor (EGFR), ERBB1 phosphotyrosine kinase siRNA
atggcaggtacagtaggataagc

SEQ ID NO: 9231 - DNA, 23 bp, Artificial Sequence
  Description of Artificial Sequence: Synthetic oligonucleotide
  Epidermal growth factor receptor (EGFR), ERBB1 phosphotyrosine kinase siRNA
tggcaggtacagtaggataagcc

SEQ ID NO: 9232 - DNA, 23 bp, Artificial Sequence
  Description of Artificial Sequence: Synthetic oligonucleotide
  Epidermal growth factor receptor (EGFR), ERBB1 phosphotyrosine kinase siRNA
ggcaggtacagtaggataagcca

SEQ ID NO: 9233 - DNA, 23 bp, Artificial Sequence
  Description of Artificial Sequence: Synthetic oligonucleotide
  Epidermal growth factor receptor (EGFR), ERBB1 phosphotyrosine kinase siRNA
gcaggtacagtaggataagccac

SEQ ID NO: 9234 - DNA, 23 bp, Artificial Sequence
  Description of Artificial Sequence: Synthetic oligonucleotide
  Epidermal growth factor receptor (EGFR), ERBB1 phosphotyrosine kinase siRNA
caggtacagtaggataagccact

SEQ ID NO: 9235 - DNA, 23 bp, Artificial Sequence
  Description of Artificial Sequence: Synthetic oligonucleotide
  Epidermal growth factor receptor (EGFR), ERBB1 phosphotyrosine kinase siRNA
aggtacagtaggataagccactc

SEQ ID NO: 9236 - DNA, 23 bp, Artificial Sequence
  Description of Artificial Sequence: Synthetic oligonucleotide
  Epidermal growth factor receptor (EGFR), ERBB1 phosphotyrosine kinase siRNA
ggtacagtaggataagccactct

SEQ ID NO: 9237 - DNA, 23 bp, Artificial Sequence
  Description of Artificial Sequence: Synthetic oligonucleotide
  Epidermal growth factor receptor (EGFR), ERBB1 phosphotyrosine kinase siRNA
gtacagtaggataagccactctg

SEQ ID NO: 9238 - DNA, 23 bp, Artificial Sequence
  Description of Artificial Sequence: Synthetic oligonucleotide
  Epidermal growth factor receptor (EGFR), ERBB1 phosphotyrosine kinase siRNA
tacagtaggataagccactctgt

SEQ ID NO: 9239 - DNA, 23 bp, Artificial Sequence
  Description of Artificial Sequence: Synthetic oligonucleotide
  Epidermal growth factor receptor (EGFR), ERBB1 phosphotyrosine kinase siRNA
acagtaggataagccactctgtc

SEQ ID NO: 9240 - DNA, 23 bp, Artificial Sequence
  Description of Artificial Sequence: Synthetic oligonucleotide
  Epidermal growth factor receptor (EGFR), ERBB1 phosphotyrosine kinase siRNA
cagtaggataagccactctgtcc

SEQ ID NO: 9241 - DNA, 23 bp, Artificial Sequence
  Description of Artificial Sequence: Synthetic oligonucleotide
  Epidermal growth factor receptor (EGFR), ERBB1 phosphotyrosine kinase siRNA
agtaggataagccactctgtccc

SEQ ID NO: 9242 - DNA, 23 bp, Artificial Sequence
  Description of Artificial Sequence: Synthetic oligonucleotide
  Epidermal growth factor receptor (EGFR), ERBB1 phosphotyrosine kinase siRNA
gtaggataagccactctgtccct

SEQ ID NO: 9243 - DNA, 23 bp, Artificial Sequence
  Description of Artificial Sequence: Synthetic oligonucleotide
  Epidermal growth factor receptor (EGFR), ERBB1 phosphotyrosine kinase siRNA
taggataagccactctgtccctt

SEQ ID NO: 9244 - DNA, 23 bp, Artificial Sequence
  Description of Artificial Sequence: Synthetic oligonucleotide
  Epidermal growth factor receptor (EGFR), ERBB1 phosphotyrosine kinase siRNA
aggataagccactctgtcccttc

SEQ ID NO: 9245 - DNA, 23 bp, Artificial Sequence
  Description of Artificial Sequence: Synthetic oligonucleotide
  Epidermal growth factor receptor (EGFR), ERBB1 phosphotyrosine kinase siRNA
ggataagccactctgtcccttcc

SEQ ID NO: 9246 - DNA, 23 bp, Artificial Sequence
  Description of Artificial Sequence: Synthetic oligonucleotide
  Epidermal growth factor receptor (EGFR), ERBB1 phosphotyrosine kinase siRNA
gataagccactctgtcccttcct

SEQ ID NO: 9247 - DNA, 23 bp, Artificial Sequence
  Description of Artificial Sequence: Synthetic oligonucleotide
  Epidermal growth factor receptor (EGFR), ERBB1 phosphotyrosine kinase siRNA
ataagccactctgtcccttcctg

SEQ ID NO: 9248 - DNA, 23 bp, Artificial Sequence
  Description of Artificial Sequence: Synthetic oligonucleotide
  Epidermal growth factor receptor (EGFR), ERBB1 phosphotyrosine kinase siRNA
taagccactctgtcccttcctgg

SEQ ID NO: 9249 - DNA, 23 bp, Artificial Sequence
  Description of Artificial Sequence: Synthetic oligonucleotide
  Epidermal growth factor receptor (EGFR), ERBB1 phosphotyrosine kinase siRNA
aagccactctgtcccttcctggg

SEQ ID NO: 9250 - DNA, 23 bp, Artificial Sequence
  Description of Artificial Sequence: Synthetic oligonucleotide
  Epidermal growth factor receptor (EGFR), ERBB1 phosphotyrosine kinase siRNA
agccactctgtcccttcctgggc

SEQ ID NO: 9251 - DNA, 23 bp, Artificial Sequence
  Description of Artificial Sequence: Synthetic oligonucleotide
  Epidermal growth factor receptor (EGFR), ERBB1 phosphotyrosine kinase siRNA
gccactctgtcccttcctgggca

SEQ ID NO: 9252 - DNA, 23 bp, Artificial Sequence
  Description of Artificial Sequence: Synthetic oligonucleotide
  Epidermal growth factor receptor (EGFR), ERBB1 phosphotyrosine kinase siRNA
ccactctgtcccttcctgggcaa

SEQ ID NO: 9253 - DNA, 23 bp, Artificial Sequence
  Description of Artificial Sequence: Synthetic oligonucleotide
  Epidermal growth factor receptor (EGFR), ERBB1 phosphotyrosine kinase siRNA
cactctgtcccttcctgggcaaa

SEQ ID NO: 9254 - DNA, 23 bp, Artificial Sequence
  Description of Artificial Sequence: Synthetic oligonucleotide
  Epidermal growth factor receptor (EGFR), ERBB1 phosphotyrosine kinase siRNA
actctgtcccttcctgggcaaag

SEQ ID NO: 9255 - DNA, 23 bp, Artificial Sequence
  Description of Artificial Sequence: Synthetic oligonucleotide
  Epidermal growth factor receptor (EGFR), ERBB1 phosphotyrosine kinase siRNA
ctctgtcccttcctgggcaaaga

SEQ ID NO: 9256 - DNA, 23 bp, Artificial Sequence
  Description of Artificial Sequence: Synthetic oligonucleotide
  Epidermal growth factor receptor (EGFR), ERBB1 phosphotyrosine kinase siRNA
tctgtcccttcctgggcaaagaa

SEQ ID NO: 9257 - DNA, 23 bp, Artificial Sequence
  Description of Artificial Sequence: Synthetic oligonucleotide
  Epidermal growth factor receptor (EGFR), ERBB1 phosphotyrosine kinase siRNA
ctgtcccttcctgggcaaagaag

SEQ ID NO: 9258 - DNA, 23 bp, Artificial Sequence
  Description of Artificial Sequence: Synthetic oligonucleotide
  Epidermal growth factor receptor (EGFR), ERBB1 phosphotyrosine kinase siRNA
tgtcccttcctgggcaaagaaga

SEQ ID NO: 9259 - DNA, 23 bp, Artificial Sequence
  Description of Artificial Sequence: Synthetic oligonucleotide
  Epidermal growth factor receptor (EGFR), ERBB1 phosphotyrosine kinase siRNA
gtcccttcctgggcaaagaagaa

SEQ ID NO: 9260 - DNA, 23 bp, Artificial Sequence
  Description of Artificial Sequence: Synthetic oligonucleotide
  Epidermal growth factor receptor (EGFR), ERBB1 phosphotyrosine kinase siRNA
tcccttcctgggcaaagaagaaa

SEQ ID NO: 9261 - DNA, 23 bp, Artificial Sequence
  Description of Artificial Sequence: Synthetic oligonucleotide
  Epidermal growth factor receptor (EGFR), ERBB1 phosphotyrosine kinase siRNA
cccttcctgggcaaagaagaaac

SEQ ID NO: 9262 - DNA, 23 bp, Artificial Sequence
  Description of Artificial Sequence: Synthetic oligonucleotide
  Epidermal growth factor receptor (EGFR), ERBB1 phosphotyrosine kinase siRNA
ccttcctgggcaaagaagaaacg

SEQ ID NO: 9263 - DNA, 23 bp, Artificial Sequence
  Description of Artificial Sequence: Synthetic oligonucleotide
  Epidermal growth factor receptor (EGFR), ERBB1 phosphotyrosine kinase siRNA
cttcctgggcaaagaagaaacgg

SEQ ID NO: 9264 - DNA, 23 bp, Artificial Sequence
  Description of Artificial Sequence: Synthetic oligonucleotide
  Epidermal growth factor receptor (EGFR), ERBB1 phosphotyrosine kinase siRNA
ttcctgggcaaagaagaaacgga

SEQ ID NO: 9265 - DNA, 23 bp, Artificial Sequence
  Description of Artificial Sequence: Synthetic oligonucleotide
  Epidermal growth factor receptor (EGFR), ERBB1 phosphotyrosine kinase siRNA
tcctgggcaaagaagaaacggag

SEQ ID NO: 9266 - DNA, 23 bp, Artificial Sequence
  Description of Artificial Sequence: Synthetic oligonucleotide
  Epidermal growth factor receptor (EGFR), ERBB1 phosphotyrosine kinase siRNA
cctgggcaaagaagaaacggagg

SEQ ID NO: 9267 - DNA, 23 bp, Artificial Sequence
  Description of Artificial Sequence: Synthetic oligonucleotide
  Epidermal growth factor receptor (EGFR), ERBB1 phosphotyrosine kinase siRNA
ctgggcaaagaagaaacggaggg

SEQ ID NO: 9268 - DNA, 23 bp, Artificial Sequence
  Description of Artificial Sequence: Synthetic oligonucleotide
  Epidermal growth factor receptor (EGFR), ERBB1 phosphotyrosine kinase siRNA
tgggcaaagaagaaacggagggg

SEQ ID NO: 9269 - DNA, 23 bp, Artificial Sequence
  Description of Artificial Sequence: Synthetic oligonucleotide
  Epidermal growth factor receptor (EGFR), ERBB1 phosphotyrosine kinase siRNA
gggcaaagaagaaacggagggga

SEQ ID NO: 9270 - DNA, 23 bp, Artificial Sequence
  Description of Artificial Sequence: Synthetic oligonucleotide
  Epidermal growth factor receptor (EGFR), ERBB1 phosphotyrosine kinase siRNA
ggcaaagaagaaacggaggggat

SEQ ID NO: 9271 - DNA, 23 bp, Artificial Sequence
  Description of Artificial Sequence: Synthetic oligonucleotide
  Epidermal growth factor receptor (EGFR), ERBB1 phosphotyrosine kinase siRNA
gcaaagaagaaacggaggggatg

SEQ ID NO: 9272 - DNA, 23 bp, Artificial Sequence
  Description of Artificial Sequence: Synthetic oligonucleotide
  Epidermal growth factor receptor (EGFR), ERBB1 phosphotyrosine kinase siRNA
caaagaagaaacggaggggatgg

SEQ ID NO: 9273 - DNA, 23 bp, Artificial Sequence
  Description of Artificial Sequence: Synthetic oligonucleotide
  Epidermal growth factor receptor (EGFR), ERBB1 phosphotyrosine kinase siRNA
aaagaagaaacggaggggatgga

SEQ ID NO: 9274 - DNA, 23 bp, Artificial Sequence
  Description of Artificial Sequence: Synthetic oligonucleotide
  Epidermal growth factor receptor (EGFR), ERBB1 phosphotyrosine kinase siRNA
aagaagaaacggaggggatggaa

SEQ ID NO: 9275 - DNA, 23 bp, Artificial Sequence
  Description of Artificial Sequence: Synthetic oligonucleotide
  Epidermal growth factor receptor (EGFR), ERBB1 phosphotyrosine kinase siRNA
agaagaaacggaggggatggaat

SEQ ID NO: 9276 - DNA, 23 bp, Artificial Sequence
  Description of Artificial Sequence: Synthetic oligonucleotide
  Epidermal growth factor receptor (EGFR), ERBB1 phosphotyrosine kinase siRNA
gaagaaacggaggggatggaatt

SEQ ID NO: 9277 - DNA, 23 bp, Artificial Sequence
  Description of Artificial Sequence: Synthetic oligonucleotide
  Epidermal growth factor receptor (EGFR), ERBB1 phosphotyrosine kinase siRNA
aagaaacggaggggatggaattc

SEQ ID NO: 9278 - DNA, 23 bp, Artificial Sequence
  Description of Artificial Sequence: Synthetic oligonucleotide
  Epidermal growth factor receptor (EGFR), ERBB1 phosphotyrosine kinase siRNA
agaaacggaggggatggaattct

SEQ ID NO: 9279 - DNA, 23 bp, Artificial Sequence
  Description of Artificial Sequence: Synthetic oligonucleotide
  Epidermal growth factor receptor (EGFR), ERBB1 phosphotyrosine kinase siRNA
gaaacggaggggatggaattctt

SEQ ID NO: 9280 - DNA, 23 bp, Artificial Sequence
  Description of Artificial Sequence: Synthetic oligonucleotide
  Epidermal growth factor receptor (EGFR), ERBB1 phosphotyrosine kinase siRNA
aaacggaggggatggaattcttc

SEQ ID NO: 9281 - DNA, 23 bp, Artificial Sequence
  Description of Artificial Sequence: Synthetic oligonucleotide
  Epidermal growth factor receptor (EGFR), ERBB1 phosphotyrosine kinase siRNA
aacggaggggatggaattcttcc

SEQ ID NO: 9282 - DNA, 23 bp, Artificial Sequence
  Description of Artificial Sequence: Synthetic oligonucleotide
  Epidermal growth factor receptor (EGFR), ERBB1 phosphotyrosine kinase siRNA
acggaggggatggaattcttcct

SEQ ID NO: 9283 - DNA, 23 bp, Artificial Sequence
  Description of Artificial Sequence: Synthetic oligonucleotide
  Epidermal growth factor receptor (EGFR), ERBB1 phosphotyrosine kinase siRNA
cggaggggatggaattcttcctt

SEQ ID NO: 9284 - DNA, 23 bp, Artificial Sequence
  Description of Artificial Sequence: Synthetic oligonucleotide
  Epidermal growth factor receptor (EGFR), ERBB1 phosphotyrosine kinase siRNA
ggaggggatggaattcttcctta

SEQ ID NO: 9285 - DNA, 23 bp, Artificial Sequence
  Description of Artificial Sequence: Synthetic oligonucleotide
  Epidermal growth factor receptor (EGFR), ERBB1 phosphotyrosine kinase siRNA
gaggggatggaattcttccttag

SEQ ID NO: 9286 - DNA, 23 bp, Artificial Sequence
  Description of Artificial Sequence: Synthetic oligonucleotide
  Epidermal growth factor receptor (EGFR), ERBB1 phosphotyrosine kinase siRNA
aggggatggaattcttccttaga

SEQ ID NO: 9287 - DNA, 23 bp, Artificial Sequence
  Description of Artificial Sequence: Synthetic oligonucleotide
  Epidermal growth factor receptor (EGFR), ERBB1 phosphotyrosine kinase siRNA
ggggatggaattcttccttagac

SEQ ID NO: 9288 - DNA, 23 bp, Artificial Sequence
  Description of Artificial Sequence: Synthetic oligonucleotide
  Epidermal growth factor receptor (EGFR), ERBB1 phosphotyrosine kinase siRNA
gggatggaattcttccttagact

SEQ ID NO: 9289 - DNA, 23 bp, Artificial Sequence
  Description of Artificial Sequence: Synthetic oligonucleotide
  Epidermal growth factor receptor (EGFR), ERBB1 phosphotyrosine kinase siRNA
ggatggaattcttccttagactt

SEQ ID NO: 9290 - DNA, 23 bp, Artificial Sequence
  Description of Artificial Sequence: Synthetic oligonucleotide
  Epidermal growth factor receptor (EGFR), ERBB1 phosphotyrosine kinase siRNA
gatggaattcttccttagactta

SEQ ID NO: 9291 - DNA, 23 bp, Artificial Sequence
  Description of Artificial Sequence: Synthetic oligonucleotide
  Epidermal growth factor receptor (EGFR), ERBB1 phosphotyrosine kinase siRNA
atggaattcttccttagacttac

SEQ ID NO: 9292 - DNA, 23 bp, Artificial Sequence
  Description of Artificial Sequence: Synthetic oligonucleotide
  Epidermal growth factor receptor (EGFR), ERBB1 phosphotyrosine kinase siRNA
tggaattcttccttagacttact

SEQ ID NO: 9293 - DNA, 23 bp, Artificial Sequence
  Description of Artificial Sequence: Synthetic oligonucleotide
  Epidermal growth factor receptor (EGFR), ERBB1 phosphotyrosine kinase siRNA
ggaattcttccttagacttactt

SEQ ID NO: 9294 - DNA, 23 bp, Artificial Sequence
  Description of Artificial Sequence: Synthetic oligonucleotide
  Epidermal growth factor receptor (EGFR), ERBB1 phosphotyrosine kinase siRNA
gaattcttccttagacttacttt

SEQ ID NO: 9295 - DNA, 23 bp, Artificial Sequence
  Description of Artificial Sequence: Synthetic oligonucleotide
  Epidermal growth factor receptor (EGFR), ERBB1 phosphotyrosine kinase siRNA
aattcttccttagacttactttt

SEQ ID NO: 9296 - DNA, 23 bp, Artificial Sequence
  Description of Artificial Sequence: Synthetic oligonucleotide
  Epidermal growth factor receptor (EGFR), ERBB1 phosphotyrosine kinase siRNA
attcttccttagacttacttttg

SEQ ID NO: 9297 - DNA, 23 bp, Artificial Sequence
  Description of Artificial Sequence: Synthetic oligonucleotide
  Epidermal growth factor receptor (EGFR), ERBB1 phosphotyrosine kinase siRNA
ttcttccttagacttacttttgt

SEQ ID NO: 9298 - DNA, 23 bp, Artificial Sequence
  Description of Artificial Sequence: Synthetic oligonucleotide
  Epidermal growth factor receptor (EGFR), ERBB1 phosphotyrosine kinase siRNA
tcttccttagacttacttttgta

SEQ ID NO: 9299 - DNA, 23 bp, Artificial Sequence
  Description of Artificial Sequence: Synthetic oligonucleotide
  Epidermal growth factor receptor (EGFR), ERBB1 phosphotyrosine kinase siRNA
cttccttagacttacttttgtaa

SEQ ID NO: 9300 - DNA, 23 bp, Artificial Sequence
  Description of Artificial Sequence: Synthetic oligonucleotide
  Epidermal growth factor receptor (EGFR), ERBB1 phosphotyrosine kinase siRNA
ttccttagacttacttttgtaaa

SEQ ID NO: 9301 - DNA, 23 bp, Artificial Sequence
  Description of Artificial Sequence: Synthetic oligonucleotide
  Epidermal growth factor receptor (EGFR), ERBB1 phosphotyrosine kinase siRNA
tccttagacttacttttgtaaaa

SEQ ID NO: 9302 - DNA, 23 bp, Artificial Sequence
  Description of Artificial Sequence: Synthetic oligonucleotide
  Epidermal growth factor receptor (EGFR), ERBB1 phosphotyrosine kinase siRNA
ccttagacttacttttgtaaaaa

SEQ ID NO: 9303 - DNA, 23 bp, Artificial Sequence
  Description of Artificial Sequence: Synthetic oligonucleotide
  Epidermal growth factor receptor (EGFR), ERBB1 phosphotyrosine kinase siRNA
cttagacttacttttgtaaaaat

SEQ ID NO: 9304 - DNA, 23 bp, Artificial Sequence
  Description of Artificial Sequence: Synthetic oligonucleotide
  Epidermal growth factor receptor (EGFR), ERBB1 phosphotyrosine kinase siRNA
ttagacttacttttgtaaaaatg

SEQ ID NO: 9305 - DNA, 23 bp, Artificial Sequence
  Description of Artificial Sequence: Synthetic oligonucleotide
  Epidermal growth factor receptor (EGFR), ERBB1 phosphotyrosine kinase siRNA
tagacttacttttgtaaaaatgt

SEQ ID NO: 9306 - DNA, 23 bp, Artificial Sequence
  Description of Artificial Sequence: Synthetic oligonucleotide
  Epidermal growth factor receptor (EGFR), ERBB1 phosphotyrosine kinase siRNA
agacttacttttgtaaaaatgtc

SEQ ID NO: 9307 - DNA, 23 bp, Artificial Sequence
  Description of Artificial Sequence: Synthetic oligonucleotide
  Epidermal growth factor receptor (EGFR), ERBB1 phosphotyrosine kinase siRNA
gacttacttttgtaaaaatgtcc

SEQ ID NO: 9308 - DNA, 23 bp, Artificial Sequence
  Description of Artificial Sequence: Synthetic oligonucleotide
  Epidermal growth factor receptor (EGFR), ERBB1 phosphotyrosine kinase siRNA
acttacttttgtaaaaatgtccc

SEQ ID NO: 9309 - DNA, 23 bp, Artificial Sequence
  Description of Artificial Sequence: Synthetic oligonucleotide
  Epidermal growth factor receptor (EGFR), ERBB1 phosphotyrosine kinase siRNA
cttacttttgtaaaaatgtcccc

SEQ ID NO: 9310 - DNA, 23 bp, Artificial Sequence
  Description of Artificial Sequence: Synthetic oligonucleotide
  Epidermal growth factor receptor (EGFR), ERBB1 phosphotyrosine kinase siRNA
ttacttttgtaaaaatgtcccca

SEQ ID NO: 9311 - DNA, 23 bp, Artificial Sequence
  Description of Artificial Sequence: Synthetic oligonucleotide
  Epidermal growth factor receptor (EGFR), ERBB1 phosphotyrosine kinase siRNA
tacttttgtaaaaatgtccccac

SEQ ID NO: 9312 - DNA, 23 bp, Artificial Sequence
  Description of Artificial Sequence: Synthetic oligonucleotide
  Epidermal growth factor receptor (EGFR), ERBB1 phosphotyrosine kinase siRNA
acttttgtaaaaatgtccccacg

SEQ ID NO: 9313 - DNA, 23 bp, Artificial Sequence
  Description of Artificial Sequence: Synthetic oligonucleotide
  Epidermal growth factor receptor (EGFR), ERBB1 phosphotyrosine kinase siRNA
cttttgtaaaaatgtccccacgg

SEQ ID NO: 9314 - DNA, 23 bp, Artificial Sequence
  Description of Artificial Sequence: Synthetic oligonucleotide
  Epidermal growth factor receptor (EGFR), ERBB1 phosphotyrosine kinase siRNA
ttttgtaaaaatgtccccacggt

SEQ ID NO: 9315 - DNA, 23 bp, Artificial Sequence
  Description of Artificial Sequence: Synthetic oligonucleotide
  Epidermal growth factor receptor (EGFR), ERBB1 phosphotyrosine kinase siRNA
tttgtaaaaatgtccccacggta

SEQ ID NO: 9316 - DNA, 23 bp, Artificial Sequence
  Description of Artificial Sequence: Synthetic oligonucleotide
  Epidermal growth factor receptor (EGFR), ERBB1 phosphotyrosine kinase siRNA
ttgtaaaaatgtccccacggtac

SEQ ID NO: 9317 - DNA, 23 bp, Artificial Sequence
  Description of Artificial Sequence: Synthetic oligonucleotide
  Epidermal growth factor receptor (EGFR), ERBB1 phosphotyrosine kinase siRNA
tgtaaaaatgtccccacggtact

SEQ ID NO: 9318 - DNA, 23 bp, Artificial Sequence
  Description of Artificial Sequence: Synthetic oligonucleotide
  Epidermal growth factor receptor (EGFR), ERBB1 phosphotyrosine kinase siRNA
gtaaaaatgtccccacggtactt

SEQ ID NO: 9319 - DNA, 23 bp, Artificial Sequence
  Description of Artificial Sequence: Synthetic oligonucleotide
  Epidermal growth factor receptor (EGFR), ERBB1 phosphotyrosine kinase siRNA
taaaaatgtccccacggtactta

SEQ ID NO: 9320 - DNA, 23 bp, Artificial Sequence
  Description of Artificial Sequence: Synthetic oligonucleotide
  Epidermal growth factor receptor (EGFR), ERBB1 phosphotyrosine kinase siRNA
aaaaatgtccccacggtacttac

SEQ ID NO: 9321 - DNA, 23 bp, Artificial Sequence
  Description of Artificial Sequence: Synthetic oligonucleotide
  Epidermal growth factor receptor (EGFR), ERBB1 phosphotyrosine kinase siRNA
aaaatgtccccacggtacttact

SEQ ID NO: 9322 - DNA, 23 bp, Artificial Sequence
  Description of Artificial Sequence: Synthetic oligonucleotide
  Epidermal growth factor receptor (EGFR), ERBB1 phosphotyrosine kinase siRNA
aaatgtccccacggtacttactc

SEQ ID NO: 9323 - DNA, 23 bp, Artificial Sequence
  Description of Artificial Sequence: Synthetic oligonucleotide
  Epidermal growth factor receptor (EGFR), ERBB1 phosphotyrosine kinase siRNA
aatgtccccacggtacttactcc

SEQ ID NO: 9324 - DNA, 23 bp, Artificial Sequence
  Description of Artificial Sequence: Synthetic oligonucleotide
  Epidermal growth factor receptor (EGFR), ERBB1 phosphotyrosine kinase siRNA
atgtccccacggtacttactccc

SEQ ID NO: 9325 - DNA, 23 bp, Artificial Sequence
  Description of Artificial Sequence: Synthetic oligonucleotide
  Epidermal growth factor receptor (EGFR), ERBB1 phosphotyrosine kinase siRNA
tgtccccacggtacttactcccc

SEQ ID NO: 9326 - DNA, 23 bp, Artificial Sequence
  Description of Artificial Sequence: Synthetic oligonucleotide
  Epidermal growth factor receptor (EGFR), ERBB1 phosphotyrosine kinase siRNA
gtccccacggtacttactcccca

SEQ ID NO: 9327 - DNA, 23 bp, Artificial Sequence
  Description of Artificial Sequence: Synthetic oligonucleotide
  Epidermal growth factor receptor (EGFR), ERBB1 phosphotyrosine kinase siRNA
tccccacggtacttactccccac

SEQ ID NO: 9328 - DNA, 23 bp, Artificial Sequence
  Description of Artificial Sequence: Synthetic oligonucleotide
  Epidermal growth factor receptor (EGFR), ERBB1 phosphotyrosine kinase siRNA
ccccacggtacttactccccact

SEQ ID NO: 9329 - DNA, 23 bp, Artificial Sequence
  Description of Artificial Sequence: Synthetic oligonucleotide
  Epidermal growth factor receptor (EGFR), ERBB1 phosphotyrosine kinase siRNA
cccacggtacttactccccactg

SEQ ID NO: 9330 - DNA, 23 bp, Artificial Sequence
  Description of Artificial Sequence: Synthetic oligonucleotide
  Epidermal growth factor receptor (EGFR), ERBB1 phosphotyrosine kinase siRNA
ccacggtacttactccccactga

SEQ ID NO: 9331 - DNA, 23 bp, Artificial Sequence
  Description of Artificial Sequence: Synthetic oligonucleotide
  Epidermal growth factor receptor (EGFR), ERBB1 phosphotyrosine kinase siRNA
cacggtacttactccccactgat

SEQ ID NO: 9332 - DNA, 23 bp, Artificial Sequence
  Description of Artificial Sequence: Synthetic oligonucleotide
  Epidermal growth factor receptor (EGFR), ERBB1 phosphotyrosine kinase siRNA
acggtacttactccccactgatg

SEQ ID NO: 9333 - DNA, 23 bp, Artificial Sequence
  Description of Artificial Sequence: Synthetic oligonucleotide
  Epidermal growth factor receptor (EGFR), ERBB1 phosphotyrosine kinase siRNA
cggtacttactccccactgatgg

SEQ ID NO: 9334 - DNA, 23 bp, Artificial Sequence
  Description of Artificial Sequence: Synthetic oligonucleotide
  Epidermal growth factor receptor (EGFR), ERBB1 phosphotyrosine kinase siRNA
ggtacttactccccactgatgga

SEQ ID NO: 9335 - DNA, 23 bp, Artificial Sequence
  Description of Artificial Sequence: Synthetic oligonucleotide
  Epidermal growth factor receptor (EGFR), ERBB1 phosphotyrosine kinase siRNA
gtacttactccccactgatggac

SEQ ID NO: 9336 - DNA, 23 bp, Artificial Sequence
  Description of Artificial Sequence: Synthetic oligonucleotide
  Epidermal growth factor receptor (EGFR), ERBB1 phosphotyrosine kinase siRNA
tacttactccccactgatggacc

SEQ ID NO: 9337 - DNA, 23 bp, Artificial Sequence
  Description of Artificial Sequence: Synthetic oligonucleotide
  Epidermal growth factor receptor (EGFR), ERBB1 phosphotyrosine kinase siRNA
acttactccccactgatggacca

SEQ ID NO: 9338 - DNA, 23 bp, Artificial Sequence
  Description of Artificial Sequence: Synthetic oligonucleotide
  Epidermal growth factor receptor (EGFR), ERBB1 phosphotyrosine kinase siRNA
cttactccccactgatggaccag

SEQ ID NO: 9339 - DNA, 23 bp, Artificial Sequence
  Description of Artificial Sequence: Synthetic oligonucleotide
  Epidermal growth factor receptor (EGFR), ERBB1 phosphotyrosine kinase siRNA
ttactccccactgatggaccagt

SEQ ID NO: 9340 - DNA, 23 bp, Artificial Sequence
  Description of Artificial Sequence: Synthetic oligonucleotide
  Epidermal growth factor receptor (EGFR), ERBB1 phosphotyrosine kinase siRNA
tactccccactgatggaccagtg

SEQ ID NO: 9341 - DNA, 23 bp, Artificial Sequence
  Description of Artificial Sequence: Synthetic oligonucleotide
  Epidermal growth factor receptor (EGFR), ERBB1 phosphotyrosine kinase siRNA
actccccactgatggaccagtgg

SEQ ID NO: 9342 - DNA, 23 bp, Artificial Sequence
  Description of Artificial Sequence: Synthetic oligonucleotide
  Epidermal growth factor receptor (EGFR), ERBB1 phosphotyrosine kinase siRNA
ctccccactgatggaccagtggt

SEQ ID NO: 9343 - DNA, 23 bp, Artificial Sequence
  Description of Artificial Sequence: Synthetic oligonucleotide
  Epidermal growth factor receptor (EGFR), ERBB1 phosphotyrosine kinase siRNA
tccccactgatggaccagtggtt

SEQ ID NO: 9344 - DNA, 23 bp, Artificial Sequence
  Description of Artificial Sequence: Synthetic oligonucleotide
  Epidermal growth factor receptor (EGFR), ERBB1 phosphotyrosine kinase siRNA
ccccactgatggaccagtggttt

SEQ ID NO: 9345 - DNA, 23 bp, Artificial Sequence
  Description of Artificial Sequence: Synthetic oligonucleotide
  Epidermal growth factor receptor (EGFR), ERBB1 phosphotyrosine kinase siRNA
cccactgatggaccagtggtttc

SEQ ID NO: 9346 - DNA, 23 bp, Artificial Sequence
  Description of Artificial Sequence: Synthetic oligonucleotide
  Epidermal growth factor receptor (EGFR), ERBB1 phosphotyrosine kinase siRNA
ccactgatggaccagtggtttcc

SEQ ID NO: 9347 - DNA, 23 bp, Artificial Sequence
  Description of Artificial Sequence: Synthetic oligonucleotide
  Epidermal growth factor receptor (EGFR), ERBB1 phosphotyrosine kinase siRNA
cactgatggaccagtggtttcca

SEQ ID NO: 9348 - DNA, 23 bp, Artificial Sequence
  Description of Artificial Sequence: Synthetic oligonucleotide
  Epidermal growth factor receptor (EGFR), ERBB1 phosphotyrosine kinase siRNA
actgatggaccagtggtttccag

SEQ ID NO: 9349 - DNA, 23 bp, Artificial Sequence
  Description of Artificial Sequence: Synthetic oligonucleotide
  Epidermal growth factor receptor (EGFR), ERBB1 phosphotyrosine kinase siRNA
ctgatggaccagtggtttccagt

SEQ ID NO: 9350 - DNA, 23 bp, Artificial Sequence
  Description of Artificial Sequence: Synthetic oligonucleotide
  Epidermal growth factor receptor (EGFR), ERBB1 phosphotyrosine kinase siRNA
tgatggaccagtggtttccagtc

SEQ ID NO: 9351 - DNA, 23 bp, Artificial Sequence
  Description of Artificial Sequence: Synthetic oligonucleotide
  Epidermal growth factor receptor (EGFR), ERBB1 phosphotyrosine kinase siRNA
gatggaccagtggtttccagtca

SEQ ID NO: 9352 - DNA, 23 bp, Artificial Sequence
  Description of Artificial Sequence: Synthetic oligonucleotide
  Epidermal growth factor receptor (EGFR), ERBB1 phosphotyrosine kinase siRNA
atggaccagtggtttccagtcat

SEQ ID NO: 9353 - DNA, 23 bp, Artificial Sequence
  Description of Artificial Sequence: Synthetic oligonucleotide
  Epidermal growth factor receptor (EGFR), ERBB1 phosphotyrosine kinase siRNA
tggaccagtggtttccagtcatg

SEQ ID NO: 9354 - DNA, 23 bp, Artificial Sequence
  Description of Artificial Sequence: Synthetic oligonucleotide
  Epidermal growth factor receptor (EGFR), ERBB1 phosphotyrosine kinase siRNA
ggaccagtggtttccagtcatga

SEQ ID NO: 9355 - DNA, 23 bp, Artificial Sequence
  Description of Artificial Sequence: Synthetic oligonucleotide
  Epidermal growth factor receptor (EGFR), ERBB1 phosphotyrosine kinase siRNA
gaccagtggtttccagtcatgag

SEQ ID NO: 9356 - DNA, 23 bp, Artificial Sequence
  Description of Artificial Sequence: Synthetic oligonucleotide
  Epidermal growth factor receptor (EGFR), ERBB1 phosphotyrosine kinase siRNA
accagtggtttccagtcatgagc

SEQ ID NO: 9357 - DNA, 23 bp, Artificial Sequence
  Description of Artificial Sequence: Synthetic oligonucleotide
  Epidermal growth factor receptor (EGFR), ERBB1 phosphotyrosine kinase siRNA
ccagtggtttccagtcatgagcg

SEQ ID NO: 9358 - DNA, 23 bp, Artificial Sequence
  Description of Artificial Sequence: Synthetic oligonucleotide
  Epidermal growth factor receptor (EGFR), ERBB1 phosphotyrosine kinase siRNA
cagtggtttccagtcatgagcgt

SEQ ID NO: 9359 - DNA, 23 bp, Artificial Sequence
  Description of Artificial Sequence: Synthetic oligonucleotide
  Epidermal growth factor receptor (EGFR), ERBB1 phosphotyrosine kinase siRNA
agtggtttccagtcatgagcgtt

SEQ ID NO: 9360 - DNA, 23 bp, Artificial Sequence
  Description of Artificial Sequence: Synthetic oligonucleotide
  Epidermal growth factor receptor (EGFR), ERBB1 phosphotyrosine kinase siRNA
gtggtttccagtcatgagcgtta

SEQ ID NO: 9361 - DNA, 23 bp, Artificial Sequence
  Description of Artificial Sequence: Synthetic oligonucleotide
  Epidermal growth factor receptor (EGFR), ERBB1 phosphotyrosine kinase siRNA
tggtttccagtcatgagcgttag

SEQ ID NO: 9362 - DNA, 23 bp, Artificial Sequence
  Description of Artificial Sequence: Synthetic oligonucleotide
  Epidermal growth factor receptor (EGFR), ERBB1 phosphotyrosine kinase siRNA
ggtttccagtcatgagcgttaga

SEQ ID NO: 9363 - DNA, 23 bp, Artificial Sequence
  Description of Artificial Sequence: Synthetic oligonucleotide
  Epidermal growth factor receptor (EGFR), ERBB1 phosphotyrosine kinase siRNA
gtttccagtcatgagcgttagac

SEQ ID NO: 9364 - DNA, 23 bp, Artificial Sequence
  Description of Artificial Sequence: Synthetic oligonucleotide
  Epidermal growth factor receptor (EGFR), ERBB1 phosphotyrosine kinase siRNA
tttccagtcatgagcgttagact

SEQ ID NO: 9365 - DNA, 23 bp, Artificial Sequence
  Description of Artificial Sequence: Synthetic oligonucleotide
  Epidermal growth factor receptor (EGFR), ERBB1 phosphotyrosine kinase siRNA
ttccagtcatgagcgttagactg

SEQ ID NO: 9366 - DNA, 23 bp, Artificial Sequence
  Description of Artificial Sequence: Synthetic oligonucleotide
  Epidermal growth factor receptor (EGFR), ERBB1 phosphotyrosine kinase siRNA
tccagtcatgagcgttagactga

SEQ ID NO: 9367 - DNA, 23 bp, Artificial Sequence
  Description of Artificial Sequence: Synthetic oligonucleotide
  Epidermal growth factor receptor (EGFR), ERBB1 phosphotyrosine kinase siRNA
ccagtcatgagcgttagactgac

SEQ ID NO: 9368 - DNA, 23 bp, Artificial Sequence
  Description of Artificial Sequence: Synthetic oligonucleotide
  Epidermal growth factor receptor (EGFR), ERBB1 phosphotyrosine kinase siRNA
cagtcatgagcgttagactgact

SEQ ID NO: 9369 - DNA, 23 bp, Artificial Sequence
  Description of Artificial Sequence: Synthetic oligonucleotide
  Epidermal growth factor receptor (EGFR), ERBB1 phosphotyrosine kinase siRNA
agtcatgagcgttagactgactt

SEQ ID NO: 9370 - DNA, 23 bp, Artificial Sequence
  Description of Artificial Sequence: Synthetic oligonucleotide
  Epidermal growth factor receptor (EGFR), ERBB1 phosphotyrosine kinase siRNA
gtcatgagcgttagactgacttg

SEQ ID NO: 9371 - DNA, 23 bp, Artificial Sequence
  Description of Artificial Sequence: Synthetic oligonucleotide
  Epidermal growth factor receptor (EGFR), ERBB1 phosphotyrosine kinase siRNA
tcatgagcgttagactgacttgt

SEQ ID NO: 9372 - DNA, 23 bp, Artificial Sequence
  Description of Artificial Sequence: Synthetic oligonucleotide
  Epidermal growth factor receptor (EGFR), ERBB1 phosphotyrosine kinase siRNA
catgagcgttagactgacttgtt

SEQ ID NO: 9373 - DNA, 23 bp, Artificial Sequence
  Description of Artificial Sequence: Synthetic oligonucleotide
  Epidermal growth factor receptor (EGFR), ERBB1 phosphotyrosine kinase siRNA
atgagcgttagactgacttgttt

SEQ ID NO: 9374 - DNA, 23 bp, Artificial Sequence
  Description of Artificial Sequence: Synthetic oligonucleotide
  Epidermal growth factor receptor (EGFR), ERBB1 phosphotyrosine kinase siRNA
tgagcgttagactgacttgtttg

SEQ ID NO: 9375 - DNA, 23 bp, Artificial Sequence
  Description of Artificial Sequence: Synthetic oligonucleotide
  Epidermal growth factor receptor (EGFR), ERBB1 phosphotyrosine kinase siRNA
gagcgttagactgacttgtttgt

SEQ ID NO: 9376 - DNA, 23 bp, Artificial Sequence
  Description of Artificial Sequence: Synthetic oligonucleotide
  Epidermal growth factor receptor (EGFR), ERBB1 phosphotyrosine kinase siRNA
agcgttagactgacttgtttgtc

SEQ ID NO: 9377 - DNA, 23 bp, Artificial Sequence
  Description of Artificial Sequence: Synthetic oligonucleotide
  Epidermal growth factor receptor (EGFR), ERBB1 phosphotyrosine kinase siRNA
gcgttagactgacttgtttgtct

SEQ ID NO: 9378 - DNA, 23 bp, Artificial Sequence
  Description of Artificial Sequence: Synthetic oligonucleotide
  Epidermal growth factor receptor (EGFR), ERBB1 phosphotyrosine kinase siRNA
cgttagactgacttgtttgtctt

SEQ ID NO: 9379 - DNA, 23 bp, Artificial Sequence
  Description of Artificial Sequence: Synthetic oligonucleotide
  Epidermal growth factor receptor (EGFR), ERBB1 phosphotyrosine kinase siRNA
gttagactgacttgtttgtcttc

SEQ ID NO: 9380 - DNA, 23 bp, Artificial Sequence
  Description of Artificial Sequence: Synthetic oligonucleotide
  Epidermal growth factor receptor (EGFR), ERBB1 phosphotyrosine kinase siRNA
ttagactgacttgtttgtcttcc

SEQ ID NO: 9381 - DNA, 23 bp, Artificial Sequence
  Description of Artificial Sequence: Synthetic oligonucleotide
  Epidermal growth factor receptor (EGFR), ERBB1 phosphotyrosine kinase siRNA
tagactgacttgtttgtcttcca

SEQ ID NO: 9382 - DNA, 23 bp, Artificial Sequence
  Description of Artificial Sequence: Synthetic oligonucleotide
  Epidermal growth factor receptor (EGFR), ERBB1 phosphotyrosine kinase siRNA
agactgacttgtttgtcttccat

SEQ ID NO: 9383 - DNA, 23 bp, Artificial Sequence
  Description of Artificial Sequence: Synthetic oligonucleotide
  Epidermal growth factor receptor (EGFR), ERBB1 phosphotyrosine kinase siRNA
gactgacttgtttgtcttccatt

SEQ ID NO: 9384 - DNA, 23 bp, Artificial Sequence
  Description of Artificial Sequence: Synthetic oligonucleotide
  Epidermal growth factor receptor (EGFR), ERBB1 phosphotyrosine kinase siRNA
actgacttgtttgtcttccattc

SEQ ID NO: 9385 - DNA, 23 bp, Artificial Sequence
  Description of Artificial Sequence: Synthetic oligonucleotide
  Epidermal growth factor receptor (EGFR), ERBB1 phosphotyrosine kinase siRNA
ctgacttgtttgtcttccattcc

SEQ ID NO: 9386 - DNA, 23 bp, Artificial Sequence
  Description of Artificial Sequence: Synthetic oligonucleotide
  Epidermal growth factor receptor (EGFR), ERBB1 phosphotyrosine kinase siRNA
tgacttgtttgtcttccattcca

SEQ ID NO: 9387 - DNA, 23 bp, Artificial Sequence
  Description of Artificial Sequence: Synthetic oligonucleotide
  Epidermal growth factor receptor (EGFR), ERBB1 phosphotyrosine kinase siRNA
gacttgtttgtcttccattccat

SEQ ID NO: 9388 - DNA, 23 bp, Artificial Sequence
  Description of Artificial Sequence: Synthetic oligonucleotide
  Epidermal growth factor receptor (EGFR), ERBB1 phosphotyrosine kinase siRNA
acttgtttgtcttccattccatt

SEQ ID NO: 9389 - DNA, 23 bp, Artificial Sequence
  Description of Artificial Sequence: Synthetic oligonucleotide
  Epidermal growth factor receptor (EGFR), ERBB1 phosphotyrosine kinase siRNA
cttgtttgtcttccattccattg

SEQ ID NO: 9390 - DNA, 23 bp, Artificial Sequence
  Description of Artificial Sequence: Synthetic oligonucleotide
  Epidermal growth factor receptor (EGFR), ERBB1 phosphotyrosine kinase siRNA
ttgtttgtcttccattccattgt

SEQ ID NO: 9391 - DNA, 23 bp, Artificial Sequence
  Description of Artificial Sequence: Synthetic oligonucleotide
  Epidermal growth factor receptor (EGFR), ERBB1 phosphotyrosine kinase siRNA
tgtttgtcttccattccattgtt

SEQ ID NO: 9392 - DNA, 23 bp, Artificial Sequence
  Description of Artificial Sequence: Synthetic oligonucleotide
  Epidermal growth factor receptor (EGFR), ERBB1 phosphotyrosine kinase siRNA
gtttgtcttccattccattgttt

SEQ ID NO: 9393 - DNA, 23 bp, Artificial Sequence
  Description of Artificial Sequence: Synthetic oligonucleotide
  Epidermal growth factor receptor (EGFR), ERBB1 phosphotyrosine kinase siRNA
tttgtcttccattccattgtttt

SEQ ID NO: 9394 - DNA, 23 bp, Artificial Sequence
  Description of Artificial Sequence: Synthetic oligonucleotide
  Epidermal growth factor receptor (EGFR), ERBB1 phosphotyrosine kinase siRNA
ttgtcttccattccattgttttg

SEQ ID NO: 9395 - DNA, 23 bp, Artificial Sequence
  Description of Artificial Sequence: Synthetic oligonucleotide
  Epidermal growth factor receptor (EGFR), ERBB1 phosphotyrosine kinase siRNA
tgtcttccattccattgttttga

SEQ ID NO: 9396 - DNA, 23 bp, Artificial Sequence
  Description of Artificial Sequence: Synthetic oligonucleotide
  Epidermal growth factor receptor (EGFR), ERBB1 phosphotyrosine kinase siRNA
gtcttccattccattgttttgaa

SEQ ID NO: 9397 - DNA, 23 bp, Artificial Sequence
  Description of Artificial Sequence: Synthetic oligonucleotide
  Epidermal growth factor receptor (EGFR), ERBB1 phosphotyrosine kinase siRNA
tcttccattccattgttttgaaa

SEQ ID NO: 9398 - DNA, 23 bp, Artificial Sequence
  Description of Artificial Sequence: Synthetic oligonucleotide
  Epidermal growth factor receptor (EGFR), ERBB1 phosphotyrosine kinase siRNA
cttccattccattgttttgaaac

SEQ ID NO: 9399 - DNA, 23 bp, Artificial Sequence
  Description of Artificial Sequence: Synthetic oligonucleotide
  Epidermal growth factor receptor (EGFR), ERBB1 phosphotyrosine kinase siRNA
ttccattccattgttttgaaact

SEQ ID NO: 9400 - DNA, 23 bp, Artificial Sequence
  Description of Artificial Sequence: Synthetic oligonucleotide
  Epidermal growth factor receptor (EGFR), ERBB1 phosphotyrosine kinase siRNA
tccattccattgttttgaaactc

SEQ ID NO: 9401 - DNA, 23 bp, Artificial Sequence
  Description of Artificial Sequence: Synthetic oligonucleotide
  Epidermal growth factor receptor (EGFR), ERBB1 phosphotyrosine kinase siRNA
ccattccattgttttgaaactca

SEQ ID NO: 9402 - DNA, 23 bp, Artificial Sequence
  Description of Artificial Sequence: Synthetic oligonucleotide
  Epidermal growth factor receptor (EGFR), ERBB1 phosphotyrosine kinase siRNA
cattccattgttttgaaactcag

SEQ ID NO: 9403 - DNA, 23 bp, Artificial Sequence
  Description of Artificial Sequence: Synthetic oligonucleotide
  Epidermal growth factor receptor (EGFR), ERBB1 phosphotyrosine kinase siRNA
attccattgttttgaaactcagt

SEQ ID NO: 9404 - DNA, 23 bp, Artificial Sequence
  Description of Artificial Sequence: Synthetic oligonucleotide
  Epidermal growth factor receptor (EGFR), ERBB1 phosphotyrosine kinase siRNA
ttccattgttttgaaactcagta

SEQ ID NO: 9405 - DNA, 23 bp, Artificial Sequence
  Description of Artificial Sequence: Synthetic oligonucleotide
  Epidermal growth factor receptor (EGFR), ERBB1 phosphotyrosine kinase siRNA
tccattgttttgaaactcagtat

SEQ ID NO: 9406 - DNA, 23 bp, Artificial Sequence
  Description of Artificial Sequence: Synthetic oligonucleotide
  Epidermal growth factor receptor (EGFR), ERBB1 phosphotyrosine kinase siRNA
ccattgttttgaaactcagtatg

SEQ ID NO: 9407 - DNA, 23 bp, Artificial Sequence
  Description of Artificial Sequence: Synthetic oligonucleotide
  Epidermal growth factor receptor (EGFR), ERBB1 phosphotyrosine kinase siRNA
cattgttttgaaactcagtatgc

SEQ ID NO: 9408 - DNA, 23 bp, Artificial Sequence
  Description of Artificial Sequence: Synthetic oligonucleotide
  Epidermal growth factor receptor (EGFR), ERBB1 phosphotyrosine kinase siRNA
attgttttgaaactcagtatgct

SEQ ID NO: 9409 - DNA, 23 bp, Artificial Sequence
  Description of Artificial Sequence: Synthetic oligonucleotide
  Epidermal growth factor receptor (EGFR), ERBB1 phosphotyrosine kinase siRNA
ttgttttgaaactcagtatgctg

SEQ ID NO: 9410 - DNA, 23 bp, Artificial Sequence
  Description of Artificial Sequence: Synthetic oligonucleotide
  Epidermal growth factor receptor (EGFR), ERBB1 phosphotyrosine kinase siRNA
tgttttgaaactcagtatgctgc

SEQ ID NO: 9411 - DNA, 23 bp, Artificial Sequence
  Description of Artificial Sequence: Synthetic oligonucleotide
  Epidermal growth factor receptor (EGFR), ERBB1 phosphotyrosine kinase siRNA
gttttgaaactcagtatgctgcc

SEQ ID NO: 9412 - DNA, 23 bp, Artificial Sequence
  Description of Artificial Sequence: Synthetic oligonucleotide
  Epidermal growth factor receptor (EGFR), ERBB1 phosphotyrosine kinase siRNA
ttttgaaactcagtatgctgccc

SEQ ID NO: 9413 - DNA, 23 bp, Artificial Sequence
  Description of Artificial Sequence: Synthetic oligonucleotide
  Epidermal growth factor receptor (EGFR), ERBB1 phosphotyrosine kinase siRNA
tttgaaactcagtatgctgcccc

SEQ ID NO: 9414 - DNA, 23 bp, Artificial Sequence
  Description of Artificial Sequence: Synthetic oligonucleotide
  Epidermal growth factor receptor (EGFR), ERBB1 phosphotyrosine kinase siRNA
ttgaaactcagtatgctgcccct

SEQ ID NO: 9415 - DNA, 23 bp, Artificial Sequence
  Description of Artificial Sequence: Synthetic oligonucleotide
  Epidermal growth factor receptor (EGFR), ERBB1 phosphotyrosine kinase siRNA
tgaaactcagtatgctgcccctg

SEQ ID NO: 9416 - DNA, 23 bp, Artificial Sequence
  Description of Artificial Sequence: Synthetic oligonucleotide
  Epidermal growth factor receptor (EGFR), ERBB1 phosphotyrosine kinase siRNA
gaaactcagtatgctgcccctgt

SEQ ID NO: 9417 - DNA, 23 bp, Artificial Sequence
  Description of Artificial Sequence: Synthetic oligonucleotide
  Epidermal growth factor receptor (EGFR), ERBB1 phosphotyrosine kinase siRNA
aaactcagtatgctgcccctgtc

SEQ ID NO: 9418 - DNA, 23 bp, Artificial Sequence
  Description of Artificial Sequence: Synthetic oligonucleotide
  Epidermal growth factor receptor (EGFR), ERBB1 phosphotyrosine kinase siRNA
aactcagtatgctgcccctgtct

SEQ ID NO: 9419 - DNA, 23 bp, Artificial Sequence
  Description of Artificial Sequence: Synthetic oligonucleotide
  Epidermal growth factor receptor (EGFR), ERBB1 phosphotyrosine kinase siRNA
actcagtatgctgcccctgtctt

SEQ ID NO: 9420 - DNA, 23 bp, Artificial Sequence
  Description of Artificial Sequence: Synthetic oligonucleotide
  Epidermal growth factor receptor (EGFR), ERBB1 phosphotyrosine kinase siRNA
ctcagtatgctgcccctgtcttg

SEQ ID NO: 9421 - DNA, 23 bp, Artificial Sequence
  Description of Artificial Sequence: Synthetic oligonucleotide
  Epidermal growth factor receptor (EGFR), ERBB1 phosphotyrosine kinase siRNA
tcagtatgctgcccctgtcttgc

SEQ ID NO: 9422 - DNA, 23 bp, Artificial Sequence
  Description of Artificial Sequence: Synthetic oligonucleotide
  Epidermal growth factor receptor (EGFR), ERBB1 phosphotyrosine kinase siRNA
cagtatgctgcccctgtcttgct

SEQ ID NO: 9423 - DNA, 23 bp, Artificial Sequence
  Description of Artificial Sequence: Synthetic oligonucleotide
  Epidermal growth factor receptor (EGFR), ERBB1 phosphotyrosine kinase siRNA
agtatgctgcccctgtcttgctg

SEQ ID NO: 9424 - DNA, 23 bp, Artificial Sequence
  Description of Artificial Sequence: Synthetic oligonucleotide
  Epidermal growth factor receptor (EGFR), ERBB1 phosphotyrosine kinase siRNA
gtatgctgcccctgtcttgctgt

SEQ ID NO: 9425 - DNA, 23 bp, Artificial Sequence
  Description of Artificial Sequence: Synthetic oligonucleotide
  Epidermal growth factor receptor (EGFR), ERBB1 phosphotyrosine kinase siRNA
tatgctgcccctgtcttgctgtc

SEQ ID NO: 9426 - DNA, 23 bp, Artificial Sequence
  Description of Artificial Sequence: Synthetic oligonucleotide
  Epidermal growth factor receptor (EGFR), ERBB1 phosphotyrosine kinase siRNA
atgctgcccctgtcttgctgtca

SEQ ID NO: 9427 - DNA, 23 bp, Artificial Sequence
  Description of Artificial Sequence: Synthetic oligonucleotide
  Epidermal growth factor receptor (EGFR), ERBB1 phosphotyrosine kinase siRNA
tgctgcccctgtcttgctgtcat

SEQ ID NO: 9428 - DNA, 23 bp, Artificial Sequence
  Description of Artificial Sequence: Synthetic oligonucleotide
  Epidermal growth factor receptor (EGFR), ERBB1 phosphotyrosine kinase siRNA
gctgcccctgtcttgctgtcatg

SEQ ID NO: 9429 - DNA, 23 bp, Artificial Sequence
  Description of Artificial Sequence: Synthetic oligonucleotide
  Epidermal growth factor receptor (EGFR), ERBB1 phosphotyrosine kinase siRNA
ctgcccctgtcttgctgtcatga

SEQ ID NO: 9430 - DNA, 23 bp, Artificial Sequence
  Description of Artificial Sequence: Synthetic oligonucleotide
  Epidermal growth factor receptor (EGFR), ERBB1 phosphotyrosine kinase siRNA
tgcccctgtcttgctgtcatgaa

SEQ ID NO: 9431 - DNA, 23 bp, Artificial Sequence
  Description of Artificial Sequence: Synthetic oligonucleotide
  Epidermal growth factor receptor (EGFR), ERBB1 phosphotyrosine kinase siRNA
gcccctgtcttgctgtcatgaaa

SEQ ID NO: 9432 - DNA, 23 bp, Artificial Sequence
  Description of Artificial Sequence: Synthetic oligonucleotide
  Epidermal growth factor receptor (EGFR), ERBB1 phosphotyrosine kinase siRNA
cccctgtcttgctgtcatgaaat

SEQ ID NO: 9433 - DNA, 23 bp, Artificial Sequence
  Description of Artificial Sequence: Synthetic oligonucleotide
  Epidermal growth factor receptor (EGFR), ERBB1 phosphotyrosine kinase siRNA
ccctgtcttgctgtcatgaaatc

SEQ ID NO: 9434 - DNA, 23 bp, Artificial Sequence
  Description of Artificial Sequence: Synthetic oligonucleotide
  Epidermal growth factor receptor (EGFR), ERBB1 phosphotyrosine kinase siRNA
cctgtcttgctgtcatgaaatca

SEQ ID NO: 9435 - DNA, 23 bp, Artificial Sequence
  Description of Artificial Sequence: Synthetic oligonucleotide
  Epidermal growth factor receptor (EGFR), ERBB1 phosphotyrosine kinase siRNA
ctgtcttgctgtcatgaaatcag

SEQ ID NO: 9436 - DNA, 23 bp, Artificial Sequence
  Description of Artificial Sequence: Synthetic oligonucleotide
  Epidermal growth factor receptor (EGFR), ERBB1 phosphotyrosine kinase siRNA
tgtcttgctgtcatgaaatcagc

SEQ ID NO: 9437 - DNA, 23 bp, Artificial Sequence
  Description of Artificial Sequence: Synthetic oligonucleotide
  Epidermal growth factor receptor (EGFR), ERBB1 phosphotyrosine kinase siRNA
gtcttgctgtcatgaaatcagca

SEQ ID NO: 9438 - DNA, 23 bp, Artificial Sequence
  Description of Artificial Sequence: Synthetic oligonucleotide
  Epidermal growth factor receptor (EGFR), ERBB1 phosphotyrosine kinase siRNA
tcttgctgtcatgaaatcagcaa

SEQ ID NO: 9439 - DNA, 23 bp, Artificial Sequence
  Description of Artificial Sequence: Synthetic oligonucleotide
  Epidermal growth factor receptor (EGFR), ERBB1 phosphotyrosine kinase siRNA
cttgctgtcatgaaatcagcaag

SEQ ID NO: 9440 - DNA, 23 bp, Artificial Sequence
  Description of Artificial Sequence: Synthetic oligonucleotide
  Epidermal growth factor receptor (EGFR), ERBB1 phosphotyrosine kinase siRNA
ttgctgtcatgaaatcagcaaga

SEQ ID NO: 9441 - DNA, 23 bp, Artificial Sequence
  Description of Artificial Sequence: Synthetic oligonucleotide
  Epidermal growth factor receptor (EGFR), ERBB1 phosphotyrosine kinase siRNA
tgctgtcatgaaatcagcaagag

SEQ ID NO: 9442 - DNA, 23 bp, Artificial Sequence
  Description of Artificial Sequence: Synthetic oligonucleotide
  Epidermal growth factor receptor (EGFR), ERBB1 phosphotyrosine kinase siRNA
gctgtcatgaaatcagcaagaga

SEQ ID NO: 9443 - DNA, 23 bp, Artificial Sequence
  Description of Artificial Sequence: Synthetic oligonucleotide
  Epidermal growth factor receptor (EGFR), ERBB1 phosphotyrosine kinase siRNA
ctgtcatgaaatcagcaagagag

SEQ ID NO: 9444 - DNA, 23 bp, Artificial Sequence
  Description of Artificial Sequence: Synthetic oligonucleotide
  Epidermal growth factor receptor (EGFR), ERBB1 phosphotyrosine kinase siRNA
tgtcatgaaatcagcaagagagg

SEQ ID NO: 9445 - DNA, 23 bp, Artificial Sequence
  Description of Artificial Sequence: Synthetic oligonucleotide
  Epidermal growth factor receptor (EGFR), ERBB1 phosphotyrosine kinase siRNA
gtcatgaaatcagcaagagagga

SEQ ID NO: 9446 - DNA, 23 bp, Artificial Sequence
  Description of Artificial Sequence: Synthetic oligonucleotide
  Epidermal growth factor receptor (EGFR), ERBB1 phosphotyrosine kinase siRNA
tcatgaaatcagcaagagaggat

SEQ ID NO: 9447 - DNA, 23 bp, Artificial Sequence
  Description of Artificial Sequence: Synthetic oligonucleotide
  Epidermal growth factor receptor (EGFR), ERBB1 phosphotyrosine kinase siRNA
catgaaatcagcaagagaggatg

SEQ ID NO: 9448 - DNA, 23 bp, Artificial Sequence
  Description of Artificial Sequence: Synthetic oligonucleotide
  Epidermal growth factor receptor (EGFR), ERBB1 phosphotyrosine kinase siRNA
atgaaatcagcaagagaggatga

SEQ ID NO: 9449 - DNA, 23 bp, Artificial Sequence
  Description of Artificial Sequence: Synthetic oligonucleotide
  Epidermal growth factor receptor (EGFR), ERBB1 phosphotyrosine kinase siRNA
tgaaatcagcaagagaggatgac

SEQ ID NO: 9450 - DNA, 23 bp, Artificial Sequence
  Description of Artificial Sequence: Synthetic oligonucleotide
  Epidermal growth factor receptor (EGFR), ERBB1 phosphotyrosine kinase siRNA
gaaatcagcaagagaggatgaca

SEQ ID NO: 9451 - DNA, 23 bp, Artificial Sequence
  Description of Artificial Sequence: Synthetic oligonucleotide
  Epidermal growth factor receptor (EGFR), ERBB1 phosphotyrosine kinase siRNA
aaatcagcaagagaggatgacac

SEQ ID NO: 9452 - DNA, 23 bp, Artificial Sequence
  Description of Artificial Sequence: Synthetic oligonucleotide
  Epidermal growth factor receptor (EGFR), ERBB1 phosphotyrosine kinase siRNA
aatcagcaagagaggatgacaca

SEQ ID NO: 9453 - DNA, 23 bp, Artificial Sequence
  Description of Artificial Sequence: Synthetic oligonucleotide
  Epidermal growth factor receptor (EGFR), ERBB1 phosphotyrosine kinase siRNA
atcagcaagagaggatgacacat

SEQ ID NO: 9454 - DNA, 23 bp, Artificial Sequence
  Description of Artificial Sequence: Synthetic oligonucleotide
  Epidermal growth factor receptor (EGFR), ERBB1 phosphotyrosine kinase siRNA
tcagcaagagaggatgacacatc

SEQ ID NO: 9455 - DNA, 23 bp, Artificial Sequence
  Description of Artificial Sequence: Synthetic oligonucleotide
  Epidermal growth factor receptor (EGFR), ERBB1 phosphotyrosine kinase siRNA
cagcaagagaggatgacacatca

SEQ ID NO: 9456 - DNA, 23 bp, Artificial Sequence
  Description of Artificial Sequence: Synthetic oligonucleotide
  Epidermal growth factor receptor (EGFR), ERBB1 phosphotyrosine kinase siRNA
agcaagagaggatgacacatcaa

SEQ ID NO: 9457 - DNA, 23 bp, Artificial Sequence
  Description of Artificial Sequence: Synthetic oligonucleotide
  Epidermal growth factor receptor (EGFR), ERBB1 phosphotyrosine kinase siRNA
gcaagagaggatgacacatcaaa

SEQ ID NO: 9458 - DNA, 23 bp, Artificial Sequence
  Description of Artificial Sequence: Synthetic oligonucleotide
  Epidermal growth factor receptor (EGFR), ERBB1 phosphotyrosine kinase siRNA
caagagaggatgacacatcaaat

SEQ ID NO: 9459 - DNA, 23 bp, Artificial Sequence
  Description of Artificial Sequence: Synthetic oligonucleotide
  Epidermal growth factor receptor (EGFR), ERBB1 phosphotyrosine kinase siRNA
aagagaggatgacacatcaaata

SEQ ID NO: 9460 - DNA, 23 bp, Artificial Sequence
  Description of Artificial Sequence: Synthetic oligonucleotide
  Epidermal growth factor receptor (EGFR), ERBB1 phosphotyrosine kinase siRNA
agagaggatgacacatcaaataa

SEQ ID NO: 9461 - DNA, 23 bp, Artificial Sequence
  Description of Artificial Sequence: Synthetic oligonucleotide
  Epidermal growth factor receptor (EGFR), ERBB1 phosphotyrosine kinase siRNA
gagaggatgacacatcaaataat

SEQ ID NO: 9462 - DNA, 23 bp, Artificial Sequence
  Description of Artificial Sequence: Synthetic oligonucleotide
  Epidermal growth factor receptor (EGFR), ERBB1 phosphotyrosine kinase siRNA
agaggatgacacatcaaataata

SEQ ID NO: 9463 - DNA, 23 bp, Artificial Sequence
  Description of Artificial Sequence: Synthetic oligonucleotide
  Epidermal growth factor receptor (EGFR), ERBB1 phosphotyrosine kinase siRNA
gaggatgacacatcaaataataa

SEQ ID NO: 9464 - DNA, 23 bp, Artificial Sequence
  Description of Artificial Sequence: Synthetic oligonucleotide
  Epidermal growth factor receptor (EGFR), ERBB1 phosphotyrosine kinase siRNA
aggatgacacatcaaataataac

SEQ ID NO: 9465 - DNA, 23 bp, Artificial Sequence
  Description of Artificial Sequence: Synthetic oligonucleotide
  Epidermal growth factor receptor (EGFR), ERBB1 phosphotyrosine kinase siRNA
ggatgacacatcaaataataact

SEQ ID NO: 9466 - DNA, 23 bp, Artificial Sequence
  Description of Artificial Sequence: Synthetic oligonucleotide
  Epidermal growth factor receptor (EGFR), ERBB1 phosphotyrosine kinase siRNA
gatgacacatcaaataataactc

SEQ ID NO: 9467 - DNA, 23 bp, Artificial Sequence
  Description of Artificial Sequence: Synthetic oligonucleotide
  Epidermal growth factor receptor (EGFR), ERBB1 phosphotyrosine kinase siRNA
atgacacatcaaataataactcg

SEQ ID NO: 9468 - DNA, 23 bp, Artificial Sequence
  Description of Artificial Sequence: Synthetic oligonucleotide
  Epidermal growth factor receptor (EGFR), ERBB1 phosphotyrosine kinase siRNA
tgacacatcaaataataactcgg

SEQ ID NO: 9469 - DNA, 23 bp, Artificial Sequence
  Description of Artificial Sequence: Synthetic oligonucleotide
  Epidermal growth factor receptor (EGFR), ERBB1 phosphotyrosine kinase siRNA
gacacatcaaataataactcgga

SEQ ID NO: 9470 - DNA, 23 bp, Artificial Sequence
  Description of Artificial Sequence: Synthetic oligonucleotide
  Epidermal growth factor receptor (EGFR), ERBB1 phosphotyrosine kinase siRNA
acacatcaaataataactcggat

SEQ ID NO: 9471 - DNA, 23 bp, Artificial Sequence
  Description of Artificial Sequence: Synthetic oligonucleotide
  Epidermal growth factor receptor (EGFR), ERBB1 phosphotyrosine kinase siRNA
cacatcaaataataactcggatt

SEQ ID NO: 9472 - DNA, 23 bp, Artificial Sequence
  Description of Artificial Sequence: Synthetic oligonucleotide
  Epidermal growth factor receptor (EGFR), ERBB1 phosphotyrosine kinase siRNA
acatcaaataataactcggattc

SEQ ID NO: 9473 - DNA, 23 bp, Artificial Sequence
  Description of Artificial Sequence: Synthetic oligonucleotide
  Epidermal growth factor receptor (EGFR), ERBB1 phosphotyrosine kinase siRNA
catcaaataataactcggattcc

SEQ ID NO: 9474 - DNA, 23 bp, Artificial Sequence
  Description of Artificial Sequence: Synthetic oligonucleotide
  Epidermal growth factor receptor (EGFR), ERBB1 phosphotyrosine kinase siRNA
atcaaataataactcggattcca

SEQ ID NO: 9475 - DNA, 23 bp, Artificial Sequence
  Description of Artificial Sequence: Synthetic oligonucleotide
  Epidermal growth factor receptor (EGFR), ERBB1 phosphotyrosine kinase siRNA
tcaaataataactcggattccag

SEQ ID NO: 9476 - DNA, 23 bp, Artificial Sequence
  Description of Artificial Sequence: Synthetic oligonucleotide
  Epidermal growth factor receptor (EGFR), ERBB1 phosphotyrosine kinase siRNA
caaataataactcggattccagc

SEQ ID NO: 9477 - DNA, 23 bp, Artificial Sequence
  Description of Artificial Sequence: Synthetic oligonucleotide
  Epidermal growth factor receptor (EGFR), ERBB1 phosphotyrosine kinase siRNA
aaataataactcggattccagcc

SEQ ID NO: 9478 - DNA, 23 bp, Artificial Sequence
  Description of Artificial Sequence: Synthetic oligonucleotide
  Epidermal growth factor receptor (EGFR), ERBB1 phosphotyrosine kinase siRNA
aataataactcggattccagccc

SEQ ID NO: 9479 - DNA, 23 bp, Artificial Sequence
  Description of Artificial Sequence: Synthetic oligonucleotide
  Epidermal growth factor receptor (EGFR), ERBB1 phosphotyrosine kinase siRNA
ataataactcggattccagccca

SEQ ID NO: 9480 - DNA, 23 bp, Artificial Sequence
  Description of Artificial Sequence: Synthetic oligonucleotide
  Epidermal growth factor receptor (EGFR), ERBB1 phosphotyrosine kinase siRNA
taataactcggattccagcccac

SEQ ID NO: 9481 - DNA, 23 bp, Artificial Sequence
  Description of Artificial Sequence: Synthetic oligonucleotide
  Epidermal growth factor receptor (EGFR), ERBB1 phosphotyrosine kinase siRNA
aataactcggattccagcccaca

SEQ ID NO: 9482 - DNA, 23 bp, Artificial Sequence
  Description of Artificial Sequence: Synthetic oligonucleotide
  Epidermal growth factor receptor (EGFR), ERBB1 phosphotyrosine kinase siRNA
ataactcggattccagcccacat

SEQ ID NO: 9483 - DNA, 23 bp, Artificial Sequence
  Description of Artificial Sequence: Synthetic oligonucleotide
  Epidermal growth factor receptor (EGFR), ERBB1 phosphotyrosine kinase siRNA
taactcggattccagcccacatt

SEQ ID NO: 9484 - DNA, 23 bp, Artificial Sequence
  Description of Artificial Sequence: Synthetic oligonucleotide
  Epidermal growth factor receptor (EGFR), ERBB1 phosphotyrosine kinase siRNA
aactcggattccagcccacattg

SEQ ID NO: 9485 - DNA, 23 bp, Artificial Sequence
  Description of Artificial Sequence: Synthetic oligonucleotide
  Epidermal growth factor receptor (EGFR), ERBB1 phosphotyrosine kinase siRNA
actcggattccagcccacattgg

SEQ ID NO: 9486 - DNA, 23 bp, Artificial Sequence
  Description of Artificial Sequence: Synthetic oligonucleotide
  Epidermal growth factor receptor (EGFR), ERBB1 phosphotyrosine kinase siRNA
ctcggattccagcccacattgga

SEQ ID NO: 9487 - DNA, 23 bp, Artificial Sequence
  Description of Artificial Sequence: Synthetic oligonucleotide
  Epidermal growth factor receptor (EGFR), ERBB1 phosphotyrosine kinase siRNA
tcggattccagcccacattggat

SEQ ID NO: 9488 - DNA, 23 bp, Artificial Sequence
  Description of Artificial Sequence: Synthetic oligonucleotide
  Epidermal growth factor receptor (EGFR), ERBB1 phosphotyrosine kinase siRNA
cggattccagcccacattggatt

SEQ ID NO: 9489 - DNA, 23 bp, Artificial Sequence
  Description of Artificial Sequence: Synthetic oligonucleotide
  Epidermal growth factor receptor (EGFR), ERBB1 phosphotyrosine kinase siRNA
ggattccagcccacattggattc

SEQ ID NO: 9490 - DNA, 23 bp, Artificial Sequence
  Description of Artificial Sequence: Synthetic oligonucleotide
  Epidermal growth factor receptor (EGFR), ERBB1 phosphotyrosine kinase siRNA
gattccagcccacattggattca

SEQ ID NO: 9491 - DNA, 23 bp, Artificial Sequence
  Description of Artificial Sequence: Synthetic oligonucleotide
  Epidermal growth factor receptor (EGFR), ERBB1 phosphotyrosine kinase siRNA
attccagcccacattggattcat

SEQ ID NO: 9492 - DNA, 23 bp, Artificial Sequence
  Description of Artificial Sequence: Synthetic oligonucleotide
  Epidermal growth factor receptor (EGFR), ERBB1 phosphotyrosine kinase siRNA
ttccagcccacattggattcatc

SEQ ID NO: 9493 - DNA, 23 bp, Artificial Sequence
  Description of Artificial Sequence: Synthetic oligonucleotide
  Epidermal growth factor receptor (EGFR), ERBB1 phosphotyrosine kinase siRNA
tccagcccacattggattcatca

SEQ ID NO: 9494 - DNA, 23 bp, Artificial Sequence
  Description of Artificial Sequence: Synthetic oligonucleotide
  Epidermal growth factor receptor (EGFR), ERBB1 phosphotyrosine kinase siRNA
ccagcccacattggattcatcag

SEQ ID NO: 9495 - DNA, 23 bp, Artificial Sequence
  Description of Artificial Sequence: Synthetic oligonucleotide
  Epidermal growth factor receptor (EGFR), ERBB1 phosphotyrosine kinase siRNA
cagcccacattggattcatcagc

SEQ ID NO: 9496 - DNA, 23 bp, Artificial Sequence
  Description of Artificial Sequence: Synthetic oligonucleotide
  Epidermal growth factor receptor (EGFR), ERBB1 phosphotyrosine kinase siRNA
agcccacattggattcatcagca

SEQ ID NO: 9497 - DNA, 23 bp, Artificial Sequence
  Description of Artificial Sequence: Synthetic oligonucleotide
  Epidermal growth factor receptor (EGFR), ERBB1 phosphotyrosine kinase siRNA
gcccacattggattcatcagcat

SEQ ID NO: 9498 - DNA, 23 bp, Artificial Sequence
  Description of Artificial Sequence: Synthetic oligonucleotide
  Epidermal growth factor receptor (EGFR), ERBB1 phosphotyrosine kinase siRNA
cccacattggattcatcagcatt

SEQ ID NO: 9499 - DNA, 23 bp, Artificial Sequence
  Description of Artificial Sequence: Synthetic oligonucleotide
  Epidermal growth factor receptor (EGFR), ERBB1 phosphotyrosine kinase siRNA
ccacattggattcatcagcattt

SEQ ID NO: 9500 - DNA, 23 bp, Artificial Sequence
  Description of Artificial Sequence: Synthetic oligonucleotide
  Epidermal growth factor receptor (EGFR), ERBB1 phosphotyrosine kinase siRNA
cacattggattcatcagcatttg

SEQ ID NO: 9501 - DNA, 23 bp, Artificial Sequence
  Description of Artificial Sequence: Synthetic oligonucleotide
  Epidermal growth factor receptor (EGFR), ERBB1 phosphotyrosine kinase siRNA
acattggattcatcagcatttgg

SEQ ID NO: 9502 - DNA, 23 bp, Artificial Sequence
  Description of Artificial Sequence: Synthetic oligonucleotide
  Epidermal growth factor receptor (EGFR), ERBB1 phosphotyrosine kinase siRNA
cattggattcatcagcatttgga

SEQ ID NO: 9503 - DNA, 23 bp, Artificial Sequence
  Description of Artificial Sequence: Synthetic oligonucleotide
  Epidermal growth factor receptor (EGFR), ERBB1 phosphotyrosine kinase siRNA
attggattcatcagcatttggac

SEQ ID NO: 9504 - DNA, 23 bp, Artificial Sequence
  Description of Artificial Sequence: Synthetic oligonucleotide
  Epidermal growth factor receptor (EGFR), ERBB1 phosphotyrosine kinase siRNA
ttggattcatcagcatttggacc

SEQ ID NO: 9505 - DNA, 23 bp, Artificial Sequence
  Description of Artificial Sequence: Synthetic oligonucleotide
  Epidermal growth factor receptor (EGFR), ERBB1 phosphotyrosine kinase siRNA
tggattcatcagcatttggacca

SEQ ID NO: 9506 - DNA, 23 bp, Artificial Sequence
  Description of Artificial Sequence: Synthetic oligonucleotide
  Epidermal growth factor receptor (EGFR), ERBB1 phosphotyrosine kinase siRNA
ggattcatcagcatttggaccaa

SEQ ID NO: 9507 - DNA, 23 bp, Artificial Sequence
  Description of Artificial Sequence: Synthetic oligonucleotide
  Epidermal growth factor receptor (EGFR), ERBB1 phosphotyrosine kinase siRNA
gattcatcagcatttggaccaat

SEQ ID NO: 9508 - DNA, 23 bp, Artificial Sequence
  Description of Artificial Sequence: Synthetic oligonucleotide
  Epidermal growth factor receptor (EGFR), ERBB1 phosphotyrosine kinase siRNA
attcatcagcatttggaccaata

SEQ ID NO: 9509 - DNA, 23 bp, Artificial Sequence
  Description of Artificial Sequence: Synthetic oligonucleotide
  Epidermal growth factor receptor (EGFR), ERBB1 phosphotyrosine kinase siRNA
ttcatcagcatttggaccaatag

SEQ ID NO: 9510 - DNA, 23 bp, Artificial Sequence
  Description of Artificial Sequence: Synthetic oligonucleotide
  Epidermal growth factor receptor (EGFR), ERBB1 phosphotyrosine kinase siRNA
tcatcagcatttggaccaatagc

SEQ ID NO: 9511 - DNA, 23 bp, Artificial Sequence
  Description of Artificial Sequence: Synthetic oligonucleotide
  Epidermal growth factor receptor (EGFR), ERBB1 phosphotyrosine kinase siRNA
catcagcatttggaccaatagcc

SEQ ID NO: 9512 - DNA, 23 bp, Artificial Sequence
  Description of Artificial Sequence: Synthetic oligonucleotide
  Epidermal growth factor receptor (EGFR), ERBB1 phosphotyrosine kinase siRNA
atcagcatttggaccaatagccc

SEQ ID NO: 9513 - DNA, 23 bp, Artificial Sequence
  Description of Artificial Sequence: Synthetic oligonucleotide
  Epidermal growth factor receptor (EGFR), ERBB1 phosphotyrosine kinase siRNA
tcagcatttggaccaatagccca

SEQ ID NO: 9514 - DNA, 23 bp, Artificial Sequence
  Description of Artificial Sequence: Synthetic oligonucleotide
  Epidermal growth factor receptor (EGFR), ERBB1 phosphotyrosine kinase siRNA
cagcatttggaccaatagcccac

SEQ ID NO: 9515 - DNA, 23 bp, Artificial Sequence
  Description of Artificial Sequence: Synthetic oligonucleotide
  Epidermal growth factor receptor (EGFR), ERBB1 phosphotyrosine kinase siRNA
agcatttggaccaatagcccaca

SEQ ID NO: 9516 - DNA, 23 bp, Artificial Sequence
  Description of Artificial Sequence: Synthetic oligonucleotide
  Epidermal growth factor receptor (EGFR), ERBB1 phosphotyrosine kinase siRNA
gcatttggaccaatagcccacag

SEQ ID NO: 9517 - DNA, 23 bp, Artificial Sequence
  Description of Artificial Sequence: Synthetic oligonucleotide
  Epidermal growth factor receptor (EGFR), ERBB1 phosphotyrosine kinase siRNA
catttggaccaatagcccacagc

SEQ ID NO: 9518 - DNA, 23 bp, Artificial Sequence
  Description of Artificial Sequence: Synthetic oligonucleotide
  Epidermal growth factor receptor (EGFR), ERBB1 phosphotyrosine kinase siRNA
atttggaccaatagcccacagct

SEQ ID NO: 9519 - DNA, 23 bp, Artificial Sequence
  Description of Artificial Sequence: Synthetic oligonucleotide
  Epidermal growth factor receptor (EGFR), ERBB1 phosphotyrosine kinase siRNA
tttggaccaatagcccacagctg

SEQ ID NO: 9520 - DNA, 23 bp, Artificial Sequence
  Description of Artificial Sequence: Synthetic oligonucleotide
  Epidermal growth factor receptor (EGFR), ERBB1 phosphotyrosine kinase siRNA
ttggaccaatagcccacagctga

SEQ ID NO: 9521 - DNA, 23 bp, Artificial Sequence
  Description of Artificial Sequence: Synthetic oligonucleotide
  Epidermal growth factor receptor (EGFR), ERBB1 phosphotyrosine kinase siRNA
tggaccaatagcccacagctgag

SEQ ID NO: 9522 - DNA, 23 bp, Artificial Sequence
  Description of Artificial Sequence: Synthetic oligonucleotide
  Epidermal growth factor receptor (EGFR), ERBB1 phosphotyrosine kinase siRNA
ggaccaatagcccacagctgaga

SEQ ID NO: 9523 - DNA, 23 bp, Artificial Sequence
  Description of Artificial Sequence: Synthetic oligonucleotide
  Epidermal growth factor receptor (EGFR), ERBB1 phosphotyrosine kinase siRNA
gaccaatagcccacagctgagaa

SEQ ID NO: 9524 - DNA, 23 bp, Artificial Sequence
  Description of Artificial Sequence: Synthetic oligonucleotide
  Epidermal growth factor receptor (EGFR), ERBB1 phosphotyrosine kinase siRNA
accaatagcccacagctgagaat

SEQ ID NO: 9525 - DNA, 23 bp, Artificial Sequence
  Description of Artificial Sequence: Synthetic oligonucleotide
  Epidermal growth factor receptor (EGFR), ERBB1 phosphotyrosine kinase siRNA
ccaatagcccacagctgagaatg

SEQ ID NO: 9526 - DNA, 23 bp, Artificial Sequence
  Description of Artificial Sequence: Synthetic oligonucleotide
  Epidermal growth factor receptor (EGFR), ERBB1 phosphotyrosine kinase siRNA
caatagcccacagctgagaatgt

SEQ ID NO: 9527 - DNA, 23 bp, Artificial Sequence
  Description of Artificial Sequence: Synthetic oligonucleotide
  Epidermal growth factor receptor (EGFR), ERBB1 phosphotyrosine kinase siRNA
aatagcccacagctgagaatgtg

SEQ ID NO: 9528 - DNA, 23 bp, Artificial Sequence
  Description of Artificial Sequence: Synthetic oligonucleotide
  Epidermal growth factor receptor (EGFR), ERBB1 phosphotyrosine kinase siRNA
atagcccacagctgagaatgtgg

SEQ ID NO: 9529 - DNA, 23 bp, Artificial Sequence
  Description of Artificial Sequence: Synthetic oligonucleotide
  Epidermal growth factor receptor (EGFR), ERBB1 phosphotyrosine kinase siRNA
tagcccacagctgagaatgtgga

SEQ ID NO: 9530 - DNA, 23 bp, Artificial Sequence
  Description of Artificial Sequence: Synthetic oligonucleotide
  Epidermal growth factor receptor (EGFR), ERBB1 phosphotyrosine kinase siRNA
agcccacagctgagaatgtggaa

SEQ ID NO: 9531 - DNA, 23 bp, Artificial Sequence
  Description of Artificial Sequence: Synthetic oligonucleotide
  Epidermal growth factor receptor (EGFR), ERBB1 phosphotyrosine kinase siRNA
gcccacagctgagaatgtggaat

SEQ ID NO: 9532 - DNA, 23 bp, Artificial Sequence
  Description of Artificial Sequence: Synthetic oligonucleotide
  Epidermal growth factor receptor (EGFR), ERBB1 phosphotyrosine kinase siRNA
cccacagctgagaatgtggaata

SEQ ID NO: 9533 - DNA, 23 bp, Artificial Sequence
  Description of Artificial Sequence: Synthetic oligonucleotide
  Epidermal growth factor receptor (EGFR), ERBB1 phosphotyrosine kinase siRNA
ccacagctgagaatgtggaatac

SEQ ID NO: 9534 - DNA, 23 bp, Artificial Sequence
  Description of Artificial Sequence: Synthetic oligonucleotide
  Epidermal growth factor receptor (EGFR), ERBB1 phosphotyrosine kinase siRNA
cacagctgagaatgtggaatacc

SEQ ID NO: 9535 - DNA, 23 bp, Artificial Sequence
  Description of Artificial Sequence: Synthetic oligonucleotide
  Epidermal growth factor receptor (EGFR), ERBB1 phosphotyrosine kinase siRNA
acagctgagaatgtggaatacct

SEQ ID NO: 9536 - DNA, 23 bp, Artificial Sequence
  Description of Artificial Sequence: Synthetic oligonucleotide
  Epidermal growth factor receptor (EGFR), ERBB1 phosphotyrosine kinase siRNA
cagctgagaatgtggaataccta

SEQ ID NO: 9537 - DNA, 23 bp, Artificial Sequence
  Description of Artificial Sequence: Synthetic oligonucleotide
  Epidermal growth factor receptor (EGFR), ERBB1 phosphotyrosine kinase siRNA
agctgagaatgtggaatacctaa

SEQ ID NO: 9538 - DNA, 23 bp, Artificial Sequence
  Description of Artificial Sequence: Synthetic oligonucleotide
  Epidermal growth factor receptor (EGFR), ERBB1 phosphotyrosine kinase siRNA
gctgagaatgtggaatacctaag

SEQ ID NO: 9539 - DNA, 23 bp, Artificial Sequence
  Description of Artificial Sequence: Synthetic oligonucleotide
  Epidermal growth factor receptor (EGFR), ERBB1 phosphotyrosine kinase siRNA
ctgagaatgtggaatacctaagg

SEQ ID NO: 9540 - DNA, 23 bp, Artificial Sequence
  Description of Artificial Sequence: Synthetic oligonucleotide
  Epidermal growth factor receptor (EGFR), ERBB1 phosphotyrosine kinase siRNA
tgagaatgtggaatacctaagga

SEQ ID NO: 9541 - DNA, 23 bp, Artificial Sequence
  Description of Artificial Sequence: Synthetic oligonucleotide
  Epidermal growth factor receptor (EGFR), ERBB1 phosphotyrosine kinase siRNA
gagaatgtggaatacctaaggat

SEQ ID NO: 9542 - DNA, 23 bp, Artificial Sequence
  Description of Artificial Sequence: Synthetic oligonucleotide
  Epidermal growth factor receptor (EGFR), ERBB1 phosphotyrosine kinase siRNA
agaatgtggaatacctaaggata

SEQ ID NO: 9543 - DNA, 23 bp, Artificial Sequence
  Description of Artificial Sequence: Synthetic oligonucleotide
  Epidermal growth factor receptor (EGFR), ERBB1 phosphotyrosine kinase siRNA
gaatgtggaatacctaaggatag

SEQ ID NO: 9544 - DNA, 23 bp, Artificial Sequence
  Description of Artificial Sequence: Synthetic oligonucleotide
  Epidermal growth factor receptor (EGFR), ERBB1 phosphotyrosine kinase siRNA
aatgtggaatacctaaggatagc

SEQ ID NO: 9545 - DNA, 23 bp, Artificial Sequence
  Description of Artificial Sequence: Synthetic oligonucleotide
  Epidermal growth factor receptor (EGFR), ERBB1 phosphotyrosine kinase siRNA
atgtggaatacctaaggatagca

SEQ ID NO: 9546 - DNA, 23 bp, Artificial Sequence
  Description of Artificial Sequence: Synthetic oligonucleotide
  Epidermal growth factor receptor (EGFR), ERBB1 phosphotyrosine kinase siRNA
tgtggaatacctaaggatagcac

SEQ ID NO: 9547 - DNA, 23 bp, Artificial Sequence
  Description of Artificial Sequence: Synthetic oligonucleotide
  Epidermal growth factor receptor (EGFR), ERBB1 phosphotyrosine kinase siRNA
gtggaatacctaaggatagcacc

SEQ ID NO: 9548 - DNA, 23 bp, Artificial Sequence
  Description of Artificial Sequence: Synthetic oligonucleotide
  Epidermal growth factor receptor (EGFR), ERBB1 phosphotyrosine kinase siRNA
tggaatacctaaggatagcaccg

SEQ ID NO: 9549 - DNA, 23 bp, Artificial Sequence
  Description of Artificial Sequence: Synthetic oligonucleotide
  Epidermal growth factor receptor (EGFR), ERBB1 phosphotyrosine kinase siRNA
ggaatacctaaggatagcaccgc

SEQ ID NO: 9550 - DNA, 23 bp, Artificial Sequence
  Description of Artificial Sequence: Synthetic oligonucleotide
  Epidermal growth factor receptor (EGFR), ERBB1 phosphotyrosine kinase siRNA
gaatacctaaggatagcaccgct

SEQ ID NO: 9551 - DNA, 23 bp, Artificial Sequence
  Description of Artificial Sequence: Synthetic oligonucleotide
  Epidermal growth factor receptor (EGFR), ERBB1 phosphotyrosine kinase siRNA
aatacctaaggatagcaccgctt

SEQ ID NO: 9552 - DNA, 23 bp, Artificial Sequence
  Description of Artificial Sequence: Synthetic oligonucleotide
  Epidermal growth factor receptor (EGFR), ERBB1 phosphotyrosine kinase siRNA
atacctaaggatagcaccgcttt

SEQ ID NO: 9553 - DNA, 23 bp, Artificial Sequence
  Description of Artificial Sequence: Synthetic oligonucleotide
  Epidermal growth factor receptor (EGFR), ERBB1 phosphotyrosine kinase siRNA
tacctaaggatagcaccgctttt

SEQ ID NO: 9554 - DNA, 23 bp, Artificial Sequence
  Description of Artificial Sequence: Synthetic oligonucleotide
  Epidermal growth factor receptor (EGFR), ERBB1 phosphotyrosine kinase siRNA
acctaaggatagcaccgcttttg

SEQ ID NO: 9555 - DNA, 23 bp, Artificial Sequence
  Description of Artificial Sequence: Synthetic oligonucleotide
  Epidermal growth factor receptor (EGFR), ERBB1 phosphotyrosine kinase siRNA
cctaaggatagcaccgcttttgt

SEQ ID NO: 9556 - DNA, 23 bp, Artificial Sequence
  Description of Artificial Sequence: Synthetic oligonucleotide
  Epidermal growth factor receptor (EGFR), ERBB1 phosphotyrosine kinase siRNA
ctaaggatagcaccgcttttgtt

SEQ ID NO: 9557 - DNA, 23 bp, Artificial Sequence
  Description of Artificial Sequence: Synthetic oligonucleotide
  Epidermal growth factor receptor (EGFR), ERBB1 phosphotyrosine kinase siRNA
taaggatagcaccgcttttgttc

SEQ ID NO: 9558 - DNA, 23 bp, Artificial Sequence
  Description of Artificial Sequence: Synthetic oligonucleotide
  Epidermal growth factor receptor (EGFR), ERBB1 phosphotyrosine kinase siRNA
aaggatagcaccgcttttgttct

SEQ ID NO: 9559 - DNA, 23 bp, Artificial Sequence
  Description of Artificial Sequence: Synthetic oligonucleotide
  Epidermal growth factor receptor (EGFR), ERBB1 phosphotyrosine kinase siRNA
aggatagcaccgcttttgttctc

SEQ ID NO: 9560 - DNA, 23 bp, Artificial Sequence
  Description of Artificial Sequence: Synthetic oligonucleotide
  Epidermal growth factor receptor (EGFR), ERBB1 phosphotyrosine kinase siRNA
ggatagcaccgcttttgttctcg

SEQ ID NO: 9561 - DNA, 23 bp, Artificial Sequence
  Description of Artificial Sequence: Synthetic oligonucleotide
  Epidermal growth factor receptor (EGFR), ERBB1 phosphotyrosine kinase siRNA
gatagcaccgcttttgttctcgc

SEQ ID NO: 9562 - DNA, 23 bp, Artificial Sequence
  Description of Artificial Sequence: Synthetic oligonucleotide
  Epidermal growth factor receptor (EGFR), ERBB1 phosphotyrosine kinase siRNA
atagcaccgcttttgttctcgca

SEQ ID NO: 9563 - DNA, 23 bp, Artificial Sequence
  Description of Artificial Sequence: Synthetic oligonucleotide
  Epidermal growth factor receptor (EGFR), ERBB1 phosphotyrosine kinase siRNA
tagcaccgcttttgttctcgcaa

SEQ ID NO: 9564 - DNA, 23 bp, Artificial Sequence
  Description of Artificial Sequence: Synthetic oligonucleotide
  Epidermal growth factor receptor (EGFR), ERBB1 phosphotyrosine kinase siRNA
agcaccgcttttgttctcgcaaa

SEQ ID NO: 9565 - DNA, 23 bp, Artificial Sequence
  Description of Artificial Sequence: Synthetic oligonucleotide
  Epidermal growth factor receptor (EGFR), ERBB1 phosphotyrosine kinase siRNA
gcaccgcttttgttctcgcaaaa

SEQ ID NO: 9566 - DNA, 23 bp, Artificial Sequence
  Description of Artificial Sequence: Synthetic oligonucleotide
  Epidermal growth factor receptor (EGFR), ERBB1 phosphotyrosine kinase siRNA
caccgcttttgttctcgcaaaaa

SEQ ID NO: 9567 - DNA, 23 bp, Artificial Sequence
  Description of Artificial Sequence: Synthetic oligonucleotide
  Epidermal growth factor receptor (EGFR), ERBB1 phosphotyrosine kinase siRNA
accgcttttgttctcgcaaaaac

SEQ ID NO: 9568 - DNA, 23 bp, Artificial Sequence
  Description of Artificial Sequence: Synthetic oligonucleotide
  Epidermal growth factor receptor (EGFR), ERBB1 phosphotyrosine kinase siRNA
ccgcttttgttctcgcaaaaacg

SEQ ID NO: 9569 - DNA, 23 bp, Artificial Sequence
  Description of Artificial Sequence: Synthetic oligonucleotide
  Epidermal growth factor receptor (EGFR), ERBB1 phosphotyrosine kinase siRNA
cgcttttgttctcgcaaaaacgt

SEQ ID NO: 9570 - DNA, 23 bp, Artificial Sequence
  Description of Artificial Sequence: Synthetic oligonucleotide
  Epidermal growth factor receptor (EGFR), ERBB1 phosphotyrosine kinase siRNA
gcttttgttctcgcaaaaacgta

SEQ ID NO: 9571 - DNA, 23 bp, Artificial Sequence
  Description of Artificial Sequence: Synthetic oligonucleotide
  Epidermal growth factor receptor (EGFR), ERBB1 phosphotyrosine kinase siRNA
cttttgttctcgcaaaaacgtat

SEQ ID NO: 9572 - DNA, 23 bp, Artificial Sequence
  Description of Artificial Sequence: Synthetic oligonucleotide
  Epidermal growth factor receptor (EGFR), ERBB1 phosphotyrosine kinase siRNA
ttttgttctcgcaaaaacgtatc

SEQ ID NO: 9573 - DNA, 23 bp, Artificial Sequence
  Description of Artificial Sequence: Synthetic oligonucleotide
  Epidermal growth factor receptor (EGFR), ERBB1 phosphotyrosine kinase siRNA
tttgttctcgcaaaaacgtatct

SEQ ID NO: 9574 - DNA, 23 bp, Artificial Sequence
  Description of Artificial Sequence: Synthetic oligonucleotide
  Epidermal growth factor receptor (EGFR), ERBB1 phosphotyrosine kinase siRNA
ttgttctcgcaaaaacgtatctc

SEQ ID NO: 9575 - DNA, 23 bp, Artificial Sequence
  Description of Artificial Sequence: Synthetic oligonucleotide
  Epidermal growth factor receptor (EGFR), ERBB1 phosphotyrosine kinase siRNA
tgttctcgcaaaaacgtatctcc

SEQ ID NO: 9576 - DNA, 23 bp, Artificial Sequence
  Description of Artificial Sequence: Synthetic oligonucleotide
  Epidermal growth factor receptor (EGFR), ERBB1 phosphotyrosine kinase siRNA
gttctcgcaaaaacgtatctcct

SEQ ID NO: 9577 - DNA, 23 bp, Artificial Sequence
  Description of Artificial Sequence: Synthetic oligonucleotide
  Epidermal growth factor receptor (EGFR), ERBB1 phosphotyrosine kinase siRNA
ttctcgcaaaaacgtatctccta

SEQ ID NO: 9578 - DNA, 23 bp, Artificial Sequence
  Description of Artificial Sequence: Synthetic oligonucleotide
  Epidermal growth factor receptor (EGFR), ERBB1 phosphotyrosine kinase siRNA
tctcgcaaaaacgtatctcctaa

SEQ ID NO: 9579 - DNA, 23 bp, Artificial Sequence
  Description of Artificial Sequence: Synthetic oligonucleotide
  Epidermal growth factor receptor (EGFR), ERBB1 phosphotyrosine kinase siRNA
ctcgcaaaaacgtatctcctaat

SEQ ID NO: 9580 - DNA, 23 bp, Artificial Sequence
  Description of Artificial Sequence: Synthetic oligonucleotide
  Epidermal growth factor receptor (EGFR), ERBB1 phosphotyrosine kinase siRNA
tcgcaaaaacgtatctcctaatt

SEQ ID NO: 9581 - DNA, 23 bp, Artificial Sequence
  Description of Artificial Sequence: Synthetic oligonucleotide
  Epidermal growth factor receptor (EGFR), ERBB1 phosphotyrosine kinase siRNA
cgcaaaaacgtatctcctaattt

SEQ ID NO: 9582 - DNA, 23 bp, Artificial Sequence
  Description of Artificial Sequence: Synthetic oligonucleotide
  Epidermal growth factor receptor (EGFR), ERBB1 phosphotyrosine kinase siRNA
gcaaaaacgtatctcctaatttg

SEQ ID NO: 9583 - DNA, 23 bp, Artificial Sequence
  Description of Artificial Sequence: Synthetic oligonucleotide
  Epidermal growth factor receptor (EGFR), ERBB1 phosphotyrosine kinase siRNA
caaaaacgtatctcctaatttga

SEQ ID NO: 9584 - DNA, 23 bp, Artificial Sequence
  Description of Artificial Sequence: Synthetic oligonucleotide
  Epidermal growth factor receptor (EGFR), ERBB1 phosphotyrosine kinase siRNA
aaaaacgtatctcctaatttgag

SEQ ID NO: 9585 - DNA, 23 bp, Artificial Sequence
  Description of Artificial Sequence: Synthetic oligonucleotide
  Epidermal growth factor receptor (EGFR), ERBB1 phosphotyrosine kinase siRNA
aaaacgtatctcctaatttgagg

SEQ ID NO: 9586 - DNA, 23 bp, Artificial Sequence
  Description of Artificial Sequence: Synthetic oligonucleotide
  Epidermal growth factor receptor (EGFR), ERBB1 phosphotyrosine kinase siRNA
aaacgtatctcctaatttgaggc

SEQ ID NO: 9587 - DNA, 23 bp, Artificial Sequence
  Description of Artificial Sequence: Synthetic oligonucleotide
  Epidermal growth factor receptor (EGFR), ERBB1 phosphotyrosine kinase siRNA
aacgtatctcctaatttgaggct

SEQ ID NO: 9588 - DNA, 23 bp, Artificial Sequence
  Description of Artificial Sequence: Synthetic oligonucleotide
  Epidermal growth factor receptor (EGFR), ERBB1 phosphotyrosine kinase siRNA
acgtatctcctaatttgaggctc

SEQ ID NO: 9589 - DNA, 23 bp, Artificial Sequence
  Description of Artificial Sequence: Synthetic oligonucleotide
  Epidermal growth factor receptor (EGFR), ERBB1 phosphotyrosine kinase siRNA
cgtatctcctaatttgaggctca

SEQ ID NO: 9590 - DNA, 23 bp, Artificial Sequence
  Description of Artificial Sequence: Synthetic oligonucleotide
  Epidermal growth factor receptor (EGFR), ERBB1 phosphotyrosine kinase siRNA
gtatctcctaatttgaggctcag

SEQ ID NO: 9591 - DNA, 23 bp, Artificial Sequence
  Description of Artificial Sequence: Synthetic oligonucleotide
  Epidermal growth factor receptor (EGFR), ERBB1 phosphotyrosine kinase siRNA
tatctcctaatttgaggctcaga

SEQ ID NO: 9592 - DNA, 23 bp, Artificial Sequence
  Description of Artificial Sequence: Synthetic oligonucleotide
  Epidermal growth factor receptor (EGFR), ERBB1 phosphotyrosine kinase siRNA
atctcctaatttgaggctcagat

SEQ ID NO: 9593 - DNA, 23 bp, Artificial Sequence
  Description of Artificial Sequence: Synthetic oligonucleotide
  Epidermal growth factor receptor (EGFR), ERBB1 phosphotyrosine kinase siRNA
tctcctaatttgaggctcagatg

SEQ ID NO: 9594 - DNA, 23 bp, Artificial Sequence
  Description of Artificial Sequence: Synthetic oligonucleotide
  Epidermal growth factor receptor (EGFR), ERBB1 phosphotyrosine kinase siRNA
ctcctaatttgaggctcagatga

SEQ ID NO: 9595 - DNA, 23 bp, Artificial Sequence
  Description of Artificial Sequence: Synthetic oligonucleotide
  Epidermal growth factor receptor (EGFR), ERBB1 phosphotyrosine kinase siRNA
tcctaatttgaggctcagatgaa

SEQ ID NO: 9596 - DNA, 23 bp, Artificial Sequence
  Description of Artificial Sequence: Synthetic oligonucleotide
  Epidermal growth factor receptor (EGFR), ERBB1 phosphotyrosine kinase siRNA
cctaatttgaggctcagatgaaa

SEQ ID NO: 9597 - DNA, 23 bp, Artificial Sequence
  Description of Artificial Sequence: Synthetic oligonucleotide
  Epidermal growth factor receptor (EGFR), ERBB1 phosphotyrosine kinase siRNA
ctaatttgaggctcagatgaaat

SEQ ID NO: 9598 - DNA, 23 bp, Artificial Sequence
  Description of Artificial Sequence: Synthetic oligonucleotide
  Epidermal growth factor receptor (EGFR), ERBB1 phosphotyrosine kinase siRNA
taatttgaggctcagatgaaatg

SEQ ID NO: 9599 - DNA, 23 bp, Artificial Sequence
  Description of Artificial Sequence: Synthetic oligonucleotide
  Epidermal growth factor receptor (EGFR), ERBB1 phosphotyrosine kinase siRNA
aatttgaggctcagatgaaatgc

SEQ ID NO: 9600 - DNA, 23 bp, Artificial Sequence
  Description of Artificial Sequence: Synthetic oligonucleotide
  Epidermal growth factor receptor (EGFR), ERBB1 phosphotyrosine kinase siRNA
atttgaggctcagatgaaatgca

SEQ ID NO: 9601 - DNA, 23 bp, Artificial Sequence
  Description of Artificial Sequence: Synthetic oligonucleotide
  Epidermal growth factor receptor (EGFR), ERBB1 phosphotyrosine kinase siRNA
tttgaggctcagatgaaatgcat

SEQ ID NO: 9602 - DNA, 23 bp, Artificial Sequence
  Description of Artificial Sequence: Synthetic oligonucleotide
  Epidermal growth factor receptor (EGFR), ERBB1 phosphotyrosine kinase siRNA
ttgaggctcagatgaaatgcatc

SEQ ID NO: 9603 - DNA, 23 bp, Artificial Sequence
  Description of Artificial Sequence: Synthetic oligonucleotide
  Epidermal growth factor receptor (EGFR), ERBB1 phosphotyrosine kinase siRNA
tgaggctcagatgaaatgcatca

SEQ ID NO: 9604 - DNA, 23 bp, Artificial Sequence
  Description of Artificial Sequence: Synthetic oligonucleotide
  Epidermal growth factor receptor (EGFR), ERBB1 phosphotyrosine kinase siRNA
gaggctcagatgaaatgcatcag

SEQ ID NO: 9605 - DNA, 23 bp, Artificial Sequence
  Description of Artificial Sequence: Synthetic oligonucleotide
  Epidermal growth factor receptor (EGFR), ERBB1 phosphotyrosine kinase siRNA
aggctcagatgaaatgcatcagg

SEQ ID NO: 9606 - DNA, 23 bp, Artificial Sequence
  Description of Artificial Sequence: Synthetic oligonucleotide
  Epidermal growth factor receptor (EGFR), ERBB1 phosphotyrosine kinase siRNA
ggctcagatgaaatgcatcaggt

SEQ ID NO: 9607 - DNA, 23 bp, Artificial Sequence
  Description of Artificial Sequence: Synthetic oligonucleotide
  Epidermal growth factor receptor (EGFR), ERBB1 phosphotyrosine kinase siRNA
gctcagatgaaatgcatcaggtc

SEQ ID NO: 9608 - DNA, 23 bp, Artificial Sequence
  Description of Artificial Sequence: Synthetic oligonucleotide
  Epidermal growth factor receptor (EGFR), ERBB1 phosphotyrosine kinase siRNA
ctcagatgaaatgcatcaggtcc

SEQ ID NO: 9609 - DNA, 23 bp, Artificial Sequence
  Description of Artificial Sequence: Synthetic oligonucleotide
  Epidermal growth factor receptor (EGFR), ERBB1 phosphotyrosine kinase siRNA
tcagatgaaatgcatcaggtcct

SEQ ID NO: 9610 - DNA, 23 bp, Artificial Sequence
  Description of Artificial Sequence: Synthetic oligonucleotide
  Epidermal growth factor receptor (EGFR), ERBB1 phosphotyrosine kinase siRNA
cagatgaaatgcatcaggtcctt

SEQ ID NO: 9611 - DNA, 23 bp, Artificial Sequence
  Description of Artificial Sequence: Synthetic oligonucleotide
  Epidermal growth factor receptor (EGFR), ERBB1 phosphotyrosine kinase siRNA
agatgaaatgcatcaggtccttt

SEQ ID NO: 9612 - DNA, 23 bp, Artificial Sequence
  Description of Artificial Sequence: Synthetic oligonucleotide
  Epidermal growth factor receptor (EGFR), ERBB1 phosphotyrosine kinase siRNA
gatgaaatgcatcaggtcctttg

SEQ ID NO: 9613 - DNA, 23 bp, Artificial Sequence
  Description of Artificial Sequence: Synthetic oligonucleotide
  Epidermal growth factor receptor (EGFR), ERBB1 phosphotyrosine kinase siRNA
atgaaatgcatcaggtcctttgg

SEQ ID NO: 9614 - DNA, 23 bp, Artificial Sequence
  Description of Artificial Sequence: Synthetic oligonucleotide
  Epidermal growth factor receptor (EGFR), ERBB1 phosphotyrosine kinase siRNA
tgaaatgcatcaggtcctttggg

SEQ ID NO: 9615 - DNA, 23 bp, Artificial Sequence
  Description of Artificial Sequence: Synthetic oligonucleotide
  Epidermal growth factor receptor (EGFR), ERBB1 phosphotyrosine kinase siRNA
gaaatgcatcaggtcctttgggg

SEQ ID NO: 9616 - DNA, 23 bp, Artificial Sequence
  Description of Artificial Sequence: Synthetic oligonucleotide
  Epidermal growth factor receptor (EGFR), ERBB1 phosphotyrosine kinase siRNA
aaatgcatcaggtcctttggggc

SEQ ID NO: 9617 - DNA, 23 bp, Artificial Sequence
  Description of Artificial Sequence: Synthetic oligonucleotide
  Epidermal growth factor receptor (EGFR), ERBB1 phosphotyrosine kinase siRNA
aatgcatcaggtcctttggggca

SEQ ID NO: 9618 - DNA, 23 bp, Artificial Sequence
  Description of Artificial Sequence: Synthetic oligonucleotide
  Epidermal growth factor receptor (EGFR), ERBB1 phosphotyrosine kinase siRNA
atgcatcaggtcctttggggcat

SEQ ID NO: 9619 - DNA, 23 bp, Artificial Sequence
  Description of Artificial Sequence: Synthetic oligonucleotide
  Epidermal growth factor receptor (EGFR), ERBB1 phosphotyrosine kinase siRNA
tgcatcaggtcctttggggcata

SEQ ID NO: 9620 - DNA, 23 bp, Artificial Sequence
  Description of Artificial Sequence: Synthetic oligonucleotide
  Epidermal growth factor receptor (EGFR), ERBB1 phosphotyrosine kinase siRNA
gcatcaggtcctttggggcatag

SEQ ID NO: 9621 - DNA, 23 bp, Artificial Sequence
  Description of Artificial Sequence: Synthetic oligonucleotide
  Epidermal growth factor receptor (EGFR), ERBB1 phosphotyrosine kinase siRNA
catcaggtcctttggggcataga

SEQ ID NO: 9622 - DNA, 23 bp, Artificial Sequence
  Description of Artificial Sequence: Synthetic oligonucleotide
  Epidermal growth factor receptor (EGFR), ERBB1 phosphotyrosine kinase siRNA
atcaggtcctttggggcatagat

SEQ ID NO: 9623 - DNA, 23 bp, Artificial Sequence
  Description of Artificial Sequence: Synthetic oligonucleotide
  Epidermal growth factor receptor (EGFR), ERBB1 phosphotyrosine kinase siRNA
tcaggtcctttggggcatagatc

SEQ ID NO: 9624 - DNA, 23 bp, Artificial Sequence
  Description of Artificial Sequence: Synthetic oligonucleotide
  Epidermal growth factor receptor (EGFR), ERBB1 phosphotyrosine kinase siRNA
caggtcctttggggcatagatca

SEQ ID NO: 9625 - DNA, 23 bp, Artificial Sequence
  Description of Artificial Sequence: Synthetic oligonucleotide
  Epidermal growth factor receptor (EGFR), ERBB1 phosphotyrosine kinase siRNA
aggtcctttggggcatagatcag

SEQ ID NO: 9626 - DNA, 23 bp, Artificial Sequence
  Description of Artificial Sequence: Synthetic oligonucleotide
  Epidermal growth factor receptor (EGFR), ERBB1 phosphotyrosine kinase siRNA
ggtcctttggggcatagatcaga

SEQ ID NO: 9627 - DNA, 23 bp, Artificial Sequence
  Description of Artificial Sequence: Synthetic oligonucleotide
  Epidermal growth factor receptor (EGFR), ERBB1 phosphotyrosine kinase siRNA
gtcctttggggcatagatcagaa

SEQ ID NO: 9628 - DNA, 23 bp, Artificial Sequence
  Description of Artificial Sequence: Synthetic oligonucleotide
  Epidermal growth factor receptor (EGFR), ERBB1 phosphotyrosine kinase siRNA
tcctttggggcatagatcagaag

SEQ ID NO: 9629 - DNA, 23 bp, Artificial Sequence
  Description of Artificial Sequence: Synthetic oligonucleotide
  Epidermal growth factor receptor (EGFR), ERBB1 phosphotyrosine kinase siRNA
cctttggggcatagatcagaaga

SEQ ID NO: 9630 - DNA, 23 bp, Artificial Sequence
  Description of Artificial Sequence: Synthetic oligonucleotide
  Epidermal growth factor receptor (EGFR), ERBB1 phosphotyrosine kinase siRNA
ctttggggcatagatcagaagac

SEQ ID NO: 9631 - DNA, 23 bp, Artificial Sequence
  Description of Artificial Sequence: Synthetic oligonucleotide
  Epidermal growth factor receptor (EGFR), ERBB1 phosphotyrosine kinase siRNA
tttggggcatagatcagaagact

SEQ ID NO: 9632 - DNA, 23 bp, Artificial Sequence
  Description of Artificial Sequence: Synthetic oligonucleotide
  Epidermal growth factor receptor (EGFR), ERBB1 phosphotyrosine kinase siRNA
ttggggcatagatcagaagacta

SEQ ID NO: 9633 - DNA, 23 bp, Artificial Sequence
  Description of Artificial Sequence: Synthetic oligonucleotide
  Epidermal growth factor receptor (EGFR), ERBB1 phosphotyrosine kinase siRNA
tggggcatagatcagaagactac

SEQ ID NO: 9634 - DNA, 23 bp, Artificial Sequence
  Description of Artificial Sequence: Synthetic oligonucleotide
  Epidermal growth factor receptor (EGFR), ERBB1 phosphotyrosine kinase siRNA
ggggcatagatcagaagactaca

SEQ ID NO: 9635 - DNA, 23 bp, Artificial Sequence
  Description of Artificial Sequence: Synthetic oligonucleotide
  Epidermal growth factor receptor (EGFR), ERBB1 phosphotyrosine kinase siRNA
gggcatagatcagaagactacaa

SEQ ID NO: 9636 - DNA, 23 bp, Artificial Sequence
  Description of Artificial Sequence: Synthetic oligonucleotide
  Epidermal growth factor receptor (EGFR), ERBB1 phosphotyrosine kinase siRNA
ggcatagatcagaagactacaaa

SEQ ID NO: 9637 - DNA, 23 bp, Artificial Sequence
  Description of Artificial Sequence: Synthetic oligonucleotide
  Epidermal growth factor receptor (EGFR), ERBB1 phosphotyrosine kinase siRNA
gcatagatcagaagactacaaaa

SEQ ID NO: 9638 - DNA, 23 bp, Artificial Sequence
  Description of Artificial Sequence: Synthetic oligonucleotide
  Epidermal growth factor receptor (EGFR), ERBB1 phosphotyrosine kinase siRNA
catagatcagaagactacaaaaa

SEQ ID NO: 9639 - DNA, 23 bp, Artificial Sequence
  Description of Artificial Sequence: Synthetic oligonucleotide
  Epidermal growth factor receptor (EGFR), ERBB1 phosphotyrosine kinase siRNA
atagatcagaagactacaaaaat

SEQ ID NO: 9640 - DNA, 23 bp, Artificial Sequence
  Description of Artificial Sequence: Synthetic oligonucleotide
  Epidermal growth factor receptor (EGFR), ERBB1 phosphotyrosine kinase siRNA
tagatcagaagactacaaaaatg

SEQ ID NO: 9641 - DNA, 23 bp, Artificial Sequence
  Description of Artificial Sequence: Synthetic oligonucleotide
  Epidermal growth factor receptor (EGFR), ERBB1 phosphotyrosine kinase siRNA
agatcagaagactacaaaaatga

SEQ ID NO: 9642 - DNA, 23 bp, Artificial Sequence
  Description of Artificial Sequence: Synthetic oligonucleotide
  Epidermal growth factor receptor (EGFR), ERBB1 phosphotyrosine kinase siRNA
gatcagaagactacaaaaatgaa

SEQ ID NO: 9643 - DNA, 23 bp, Artificial Sequence
  Description of Artificial Sequence: Synthetic oligonucleotide
  Epidermal growth factor receptor (EGFR), ERBB1 phosphotyrosine kinase siRNA
atcagaagactacaaaaatgaag

SEQ ID NO: 9644 - DNA, 23 bp, Artificial Sequence
  Description of Artificial Sequence: Synthetic oligonucleotide
  Epidermal growth factor receptor (EGFR), ERBB1 phosphotyrosine kinase siRNA
tcagaagactacaaaaatgaagc

SEQ ID NO: 9645 - DNA, 23 bp, Artificial Sequence
  Description of Artificial Sequence: Synthetic oligonucleotide
  Epidermal growth factor receptor (EGFR), ERBB1 phosphotyrosine kinase siRNA
cagaagactacaaaaatgaagct

SEQ ID NO: 9646 - DNA, 23 bp, Artificial Sequence
  Description of Artificial Sequence: Synthetic oligonucleotide
  Epidermal growth factor receptor (EGFR), ERBB1 phosphotyrosine kinase siRNA
agaagactacaaaaatgaagctg

SEQ ID NO: 9647 - DNA, 23 bp, Artificial Sequence
  Description of Artificial Sequence: Synthetic oligonucleotide
  Epidermal growth factor receptor (EGFR), ERBB1 phosphotyrosine kinase siRNA
gaagactacaaaaatgaagctgc

SEQ ID NO: 9648 - DNA, 23 bp, Artificial Sequence
  Description of Artificial Sequence: Synthetic oligonucleotide
  Epidermal growth factor receptor (EGFR), ERBB1 phosphotyrosine kinase siRNA
aagactacaaaaatgaagctgct

SEQ ID NO: 9649 - DNA, 23 bp, Artificial Sequence
  Description of Artificial Sequence: Synthetic oligonucleotide
  Epidermal growth factor receptor (EGFR), ERBB1 phosphotyrosine kinase siRNA
agactacaaaaatgaagctgctc

SEQ ID NO: 9650 - DNA, 23 bp, Artificial Sequence
  Description of Artificial Sequence: Synthetic oligonucleotide
  Epidermal growth factor receptor (EGFR), ERBB1 phosphotyrosine kinase siRNA
gactacaaaaatgaagctgctct

SEQ ID NO: 9651 - DNA, 23 bp, Artificial Sequence
  Description of Artificial Sequence: Synthetic oligonucleotide
  Epidermal growth factor receptor (EGFR), ERBB1 phosphotyrosine kinase siRNA
actacaaaaatgaagctgctctg

SEQ ID NO: 9652 - DNA, 23 bp, Artificial Sequence
  Description of Artificial Sequence: Synthetic oligonucleotide
  Epidermal growth factor receptor (EGFR), ERBB1 phosphotyrosine kinase siRNA
ctacaaaaatgaagctgctctga

SEQ ID NO: 9653 - DNA, 23 bp, Artificial Sequence
  Description of Artificial Sequence: Synthetic oligonucleotide
  Epidermal growth factor receptor (EGFR), ERBB1 phosphotyrosine kinase siRNA
tacaaaaatgaagctgctctgaa

SEQ ID NO: 9654 - DNA, 23 bp, Artificial Sequence
  Description of Artificial Sequence: Synthetic oligonucleotide
  Epidermal growth factor receptor (EGFR), ERBB1 phosphotyrosine kinase siRNA
acaaaaatgaagctgctctgaaa

SEQ ID NO: 9655 - DNA, 23 bp, Artificial Sequence
  Description of Artificial Sequence: Synthetic oligonucleotide
  Epidermal growth factor receptor (EGFR), ERBB1 phosphotyrosine kinase siRNA
caaaaatgaagctgctctgaaat

SEQ ID NO: 9656 - DNA, 23 bp, Artificial Sequence
  Description of Artificial Sequence: Synthetic oligonucleotide
  Epidermal growth factor receptor (EGFR), ERBB1 phosphotyrosine kinase siRNA
aaaaatgaagctgctctgaaatc

SEQ ID NO: 9657 - DNA, 23 bp, Artificial Sequence
  Description of Artificial Sequence: Synthetic oligonucleotide
  Epidermal growth factor receptor (EGFR), ERBB1 phosphotyrosine kinase siRNA
aaaatgaagctgctctgaaatct

SEQ ID NO: 9658 - DNA, 23 bp, Artificial Sequence
  Description of Artificial Sequence: Synthetic oligonucleotide
  Epidermal growth factor receptor (EGFR), ERBB1 phosphotyrosine kinase siRNA
aaatgaagctgctctgaaatctc

SEQ ID NO: 9659 - DNA, 23 bp, Artificial Sequence
  Description of Artificial Sequence: Synthetic oligonucleotide
  Epidermal growth factor receptor (EGFR), ERBB1 phosphotyrosine kinase siRNA
aatgaagctgctctgaaatctcc

SEQ ID NO: 9660 - DNA, 23 bp, Artificial Sequence
  Description of Artificial Sequence: Synthetic oligonucleotide
  Epidermal growth factor receptor (EGFR), ERBB1 phosphotyrosine kinase siRNA
atgaagctgctctgaaatctcct

SEQ ID NO: 9661 - DNA, 23 bp, Artificial Sequence
  Description of Artificial Sequence: Synthetic oligonucleotide
  Epidermal growth factor receptor (EGFR), ERBB1 phosphotyrosine kinase siRNA
tgaagctgctctgaaatctcctt

SEQ ID NO: 9662 - DNA, 23 bp, Artificial Sequence
  Description of Artificial Sequence: Synthetic oligonucleotide
  Epidermal growth factor receptor (EGFR), ERBB1 phosphotyrosine kinase siRNA
gaagctgctctgaaatctccttt

SEQ ID NO: 9663 - DNA, 23 bp, Artificial Sequence
  Description of Artificial Sequence: Synthetic oligonucleotide
  Epidermal growth factor receptor (EGFR), ERBB1 phosphotyrosine kinase siRNA
aagctgctctgaaatctccttta

SEQ ID NO: 9664 - DNA, 23 bp, Artificial Sequence
  Description of Artificial Sequence: Synthetic oligonucleotide
  Epidermal growth factor receptor (EGFR), ERBB1 phosphotyrosine kinase siRNA
agctgctctgaaatctcctttag

SEQ ID NO: 9665 - DNA, 23 bp, Artificial Sequence
  Description of Artificial Sequence: Synthetic oligonucleotide
  Epidermal growth factor receptor (EGFR), ERBB1 phosphotyrosine kinase siRNA
gctgctctgaaatctcctttagc

SEQ ID NO: 9666 - DNA, 23 bp, Artificial Sequence
  Description of Artificial Sequence: Synthetic oligonucleotide
  Epidermal growth factor receptor (EGFR), ERBB1 phosphotyrosine kinase siRNA
ctgctctgaaatctcctttagcc

SEQ ID NO: 9667 - DNA, 23 bp, Artificial Sequence
  Description of Artificial Sequence: Synthetic oligonucleotide
  Epidermal growth factor receptor (EGFR), ERBB1 phosphotyrosine kinase siRNA
tgctctgaaatctcctttagcca

SEQ ID NO: 9668 - DNA, 23 bp, Artificial Sequence
  Description of Artificial Sequence: Synthetic oligonucleotide
  Epidermal growth factor receptor (EGFR), ERBB1 phosphotyrosine kinase siRNA
gctctgaaatctcctttagccat

SEQ ID NO: 9669 - DNA, 23 bp, Artificial Sequence
  Description of Artificial Sequence: Synthetic oligonucleotide
  Epidermal growth factor receptor (EGFR), ERBB1 phosphotyrosine kinase siRNA
ctctgaaatctcctttagccatc

SEQ ID NO: 9670 - DNA, 23 bp, Artificial Sequence
  Description of Artificial Sequence: Synthetic oligonucleotide
  Epidermal growth factor receptor (EGFR), ERBB1 phosphotyrosine kinase siRNA
tctgaaatctcctttagccatca

SEQ ID NO: 9671 - DNA, 23 bp, Artificial Sequence
  Description of Artificial Sequence: Synthetic oligonucleotide
  Epidermal growth factor receptor (EGFR), ERBB1 phosphotyrosine kinase siRNA
ctgaaatctcctttagccatcac

SEQ ID NO: 9672 - DNA, 23 bp, Artificial Sequence
  Description of Artificial Sequence: Synthetic oligonucleotide
  Epidermal growth factor receptor (EGFR), ERBB1 phosphotyrosine kinase siRNA
tgaaatctcctttagccatcacc

SEQ ID NO: 9673 - DNA, 23 bp, Artificial Sequence
  Description of Artificial Sequence: Synthetic oligonucleotide
  Epidermal growth factor receptor (EGFR), ERBB1 phosphotyrosine kinase siRNA
gaaatctcctttagccatcaccc

SEQ ID NO: 9674 - DNA, 23 bp, Artificial Sequence
  Description of Artificial Sequence: Synthetic oligonucleotide
  Epidermal growth factor receptor (EGFR), ERBB1 phosphotyrosine kinase siRNA
aaatctcctttagccatcacccc

SEQ ID NO: 9675 - DNA, 23 bp, Artificial Sequence
  Description of Artificial Sequence: Synthetic oligonucleotide
  Epidermal growth factor receptor (EGFR), ERBB1 phosphotyrosine kinase siRNA
aatctcctttagccatcacccca

SEQ ID NO: 9676 - DNA, 23 bp, Artificial Sequence
  Description of Artificial Sequence: Synthetic oligonucleotide
  Epidermal growth factor receptor (EGFR), ERBB1 phosphotyrosine kinase siRNA
atctcctttagccatcaccccaa

SEQ ID NO: 9677 - DNA, 23 bp, Artificial Sequence
  Description of Artificial Sequence: Synthetic oligonucleotide
  Epidermal growth factor receptor (EGFR), ERBB1 phosphotyrosine kinase siRNA
tctcctttagccatcaccccaac

SEQ ID NO: 9678 - DNA, 23 bp, Artificial Sequence
  Description of Artificial Sequence: Synthetic oligonucleotide
  Epidermal growth factor receptor (EGFR), ERBB1 phosphotyrosine kinase siRNA
ctcctttagccatcaccccaacc

SEQ ID NO: 9679 - DNA, 23 bp, Artificial Sequence
  Description of Artificial Sequence: Synthetic oligonucleotide
  Epidermal growth factor receptor (EGFR), ERBB1 phosphotyrosine kinase siRNA
tcctttagccatcaccccaaccc

SEQ ID NO: 9680 - DNA, 23 bp, Artificial Sequence
  Description of Artificial Sequence: Synthetic oligonucleotide
  Epidermal growth factor receptor (EGFR), ERBB1 phosphotyrosine kinase siRNA
cctttagccatcaccccaacccc

SEQ ID NO: 9681 - DNA, 23 bp, Artificial Sequence
  Description of Artificial Sequence: Synthetic oligonucleotide
  Epidermal growth factor receptor (EGFR), ERBB1 phosphotyrosine kinase siRNA
ctttagccatcaccccaaccccc

SEQ ID NO: 9682 - DNA, 23 bp, Artificial Sequence
  Description of Artificial Sequence: Synthetic oligonucleotide
  Epidermal growth factor receptor (EGFR), ERBB1 phosphotyrosine kinase siRNA
tttagccatcaccccaacccccc

SEQ ID NO: 9683 - DNA, 23 bp, Artificial Sequence
  Description of Artificial Sequence: Synthetic oligonucleotide
  Epidermal growth factor receptor (EGFR), ERBB1 phosphotyrosine kinase siRNA
ttagccatcaccccaacccccca

SEQ ID NO: 9684 - DNA, 23 bp, Artificial Sequence
  Description of Artificial Sequence: Synthetic oligonucleotide
  Epidermal growth factor receptor (EGFR), ERBB1 phosphotyrosine kinase siRNA
tagccatcaccccaaccccccaa

SEQ ID NO: 9685 - DNA, 23 bp, Artificial Sequence
  Description of Artificial Sequence: Synthetic oligonucleotide
  Epidermal growth factor receptor (EGFR), ERBB1 phosphotyrosine kinase siRNA
agccatcaccccaaccccccaaa

SEQ ID NO: 9686 - DNA, 23 bp, Artificial Sequence
  Description of Artificial Sequence: Synthetic oligonucleotide
  Epidermal growth factor receptor (EGFR), ERBB1 phosphotyrosine kinase siRNA
gccatcaccccaaccccccaaaa

SEQ ID NO: 9687 - DNA, 23 bp, Artificial Sequence
  Description of Artificial Sequence: Synthetic oligonucleotide
  Epidermal growth factor receptor (EGFR), ERBB1 phosphotyrosine kinase siRNA
ccatcaccccaaccccccaaaat

SEQ ID NO: 9688 - DNA, 23 bp, Artificial Sequence
  Description of Artificial Sequence: Synthetic oligonucleotide
  Epidermal growth factor receptor (EGFR), ERBB1 phosphotyrosine kinase siRNA
catcaccccaaccccccaaaatt

SEQ ID NO: 9689 - DNA, 23 bp, Artificial Sequence
  Description of Artificial Sequence: Synthetic oligonucleotide
  Epidermal growth factor receptor (EGFR), ERBB1 phosphotyrosine kinase siRNA
atcaccccaaccccccaaaatta

SEQ ID NO: 9690 - DNA, 23 bp, Artificial Sequence
  Description of Artificial Sequence: Synthetic oligonucleotide
  Epidermal growth factor receptor (EGFR), ERBB1 phosphotyrosine kinase siRNA
tcaccccaaccccccaaaattag

SEQ ID NO: 9691 - DNA, 23 bp, Artificial Sequence
  Description of Artificial Sequence: Synthetic oligonucleotide
  Epidermal growth factor receptor (EGFR), ERBB1 phosphotyrosine kinase siRNA
caccccaaccccccaaaattagt

SEQ ID NO: 9692 - DNA, 23 bp, Artificial Sequence
  Description of Artificial Sequence: Synthetic oligonucleotide
  Epidermal growth factor receptor (EGFR), ERBB1 phosphotyrosine kinase siRNA
accccaaccccccaaaattagtt

SEQ ID NO: 9693 - DNA, 23 bp, Artificial Sequence
  Description of Artificial Sequence: Synthetic oligonucleotide
  Epidermal growth factor receptor (EGFR), ERBB1 phosphotyrosine kinase siRNA
ccccaaccccccaaaattagttt

SEQ ID NO: 9694 - DNA, 23 bp, Artificial Sequence
  Description of Artificial Sequence: Synthetic oligonucleotide
  Epidermal growth factor receptor (EGFR), ERBB1 phosphotyrosine kinase siRNA
cccaaccccccaaaattagtttg

SEQ ID NO: 9695 - DNA, 23 bp, Artificial Sequence
  Description of Artificial Sequence: Synthetic oligonucleotide
  Epidermal growth factor receptor (EGFR), ERBB1 phosphotyrosine kinase siRNA
ccaaccccccaaaattagtttgt

SEQ ID NO: 9696 - DNA, 23 bp, Artificial Sequence
  Description of Artificial Sequence: Synthetic oligonucleotide
  Epidermal growth factor receptor (EGFR), ERBB1 phosphotyrosine kinase siRNA
caaccccccaaaattagtttgtg

SEQ ID NO: 9697 - DNA, 23 bp, Artificial Sequence
  Description of Artificial Sequence: Synthetic oligonucleotide
  Epidermal growth factor receptor (EGFR), ERBB1 phosphotyrosine kinase siRNA
aaccccccaaaattagtttgtgt

SEQ ID NO: 9698 - DNA, 23 bp, Artificial Sequence
  Description of Artificial Sequence: Synthetic oligonucleotide
  Epidermal growth factor receptor (EGFR), ERBB1 phosphotyrosine kinase siRNA
accccccaaaattagtttgtgtt

SEQ ID NO: 9699 - DNA, 23 bp, Artificial Sequence
  Description of Artificial Sequence: Synthetic oligonucleotide
  Epidermal growth factor receptor (EGFR), ERBB1 phosphotyrosine kinase siRNA
ccccccaaaattagtttgtgtta

SEQ ID NO: 9700 - DNA, 23 bp, Artificial Sequence
  Description of Artificial Sequence: Synthetic oligonucleotide
  Epidermal growth factor receptor (EGFR), ERBB1 phosphotyrosine kinase siRNA
cccccaaaattagtttgtgttac

SEQ ID NO: 9701 - DNA, 23 bp, Artificial Sequence
  Description of Artificial Sequence: Synthetic oligonucleotide
  Epidermal growth factor receptor (EGFR), ERBB1 phosphotyrosine kinase siRNA
ccccaaaattagtttgtgttact

SEQ ID NO: 9702 - DNA, 23 bp, Artificial Sequence
  Description of Artificial Sequence: Synthetic oligonucleotide
  Epidermal growth factor receptor (EGFR), ERBB1 phosphotyrosine kinase siRNA
cccaaaattagtttgtgttactt

SEQ ID NO: 9703 - DNA, 23 bp, Artificial Sequence
  Description of Artificial Sequence: Synthetic oligonucleotide
  Epidermal growth factor receptor (EGFR), ERBB1 phosphotyrosine kinase siRNA
ccaaaattagtttgtgttactta

SEQ ID NO: 9704 - DNA, 23 bp, Artificial Sequence
  Description of Artificial Sequence: Synthetic oligonucleotide
  Epidermal growth factor receptor (EGFR), ERBB1 phosphotyrosine kinase siRNA
caaaattagtttgtgttacttat

SEQ ID NO: 9705 - DNA, 23 bp, Artificial Sequence
  Description of Artificial Sequence: Synthetic oligonucleotide
  Epidermal growth factor receptor (EGFR), ERBB1 phosphotyrosine kinase siRNA
aaaattagtttgtgttacttatg

SEQ ID NO: 9706 - DNA, 23 bp, Artificial Sequence
  Description of Artificial Sequence: Synthetic oligonucleotide
  Epidermal growth factor receptor (EGFR), ERBB1 phosphotyrosine kinase siRNA
aaattagtttgtgttacttatgg

SEQ ID NO: 9707 - DNA, 23 bp, Artificial Sequence
  Description of Artificial Sequence: Synthetic oligonucleotide
  Epidermal growth factor receptor (EGFR), ERBB1 phosphotyrosine kinase siRNA
aattagtttgtgttacttatgga

SEQ ID NO: 9708 - DNA, 23 bp, Artificial Sequence
  Description of Artificial Sequence: Synthetic oligonucleotide
  Epidermal growth factor receptor (EGFR), ERBB1 phosphotyrosine kinase siRNA
attagtttgtgttacttatggaa

SEQ ID NO: 9709 - DNA, 23 bp, Artificial Sequence
  Description of Artificial Sequence: Synthetic oligonucleotide
  Epidermal growth factor receptor (EGFR), ERBB1 phosphotyrosine kinase siRNA
ttagtttgtgttacttatggaag

SEQ ID NO: 9710 - DNA, 23 bp, Artificial Sequence
  Description of Artificial Sequence: Synthetic oligonucleotide
  Epidermal growth factor receptor (EGFR), ERBB1 phosphotyrosine kinase siRNA
tagtttgtgttacttatggaaga

SEQ ID NO: 9711 - DNA, 23 bp, Artificial Sequence
  Description of Artificial Sequence: Synthetic oligonucleotide
  Epidermal growth factor receptor (EGFR), ERBB1 phosphotyrosine kinase siRNA
agtttgtgttacttatggaagat

SEQ ID NO: 9712 - DNA, 23 bp, Artificial Sequence
  Description of Artificial Sequence: Synthetic oligonucleotide
  Epidermal growth factor receptor (EGFR), ERBB1 phosphotyrosine kinase siRNA
gtttgtgttacttatggaagata

SEQ ID NO: 9713 - DNA, 23 bp, Artificial Sequence
  Description of Artificial Sequence: Synthetic oligonucleotide
  Epidermal growth factor receptor (EGFR), ERBB1 phosphotyrosine kinase siRNA
tttgtgttacttatggaagatag

SEQ ID NO: 9714 - DNA, 23 bp, Artificial Sequence
  Description of Artificial Sequence: Synthetic oligonucleotide
  Epidermal growth factor receptor (EGFR), ERBB1 phosphotyrosine kinase siRNA
ttgtgttacttatggaagatagt

SEQ ID NO: 9715 - DNA, 23 bp, Artificial Sequence
  Description of Artificial Sequence: Synthetic oligonucleotide
  Epidermal growth factor receptor (EGFR), ERBB1 phosphotyrosine kinase siRNA
tgtgttacttatggaagatagtt

SEQ ID NO: 9716 - DNA, 23 bp, Artificial Sequence
  Description of Artificial Sequence: Synthetic oligonucleotide
  Epidermal growth factor receptor (EGFR), ERBB1 phosphotyrosine kinase siRNA
gtgttacttatggaagatagttt

SEQ ID NO: 9717 - DNA, 23 bp, Artificial Sequence
  Description of Artificial Sequence: Synthetic oligonucleotide
  Epidermal growth factor receptor (EGFR), ERBB1 phosphotyrosine kinase siRNA
tgttacttatggaagatagtttt

SEQ ID NO: 9718 - DNA, 23 bp, Artificial Sequence
  Description of Artificial Sequence: Synthetic oligonucleotide
  Epidermal growth factor receptor (EGFR), ERBB1 phosphotyrosine kinase siRNA
gttacttatggaagatagttttc

SEQ ID NO: 9719 - DNA, 23 bp, Artificial Sequence
  Description of Artificial Sequence: Synthetic oligonucleotide
  Epidermal growth factor receptor (EGFR), ERBB1 phosphotyrosine kinase siRNA
ttacttatggaagatagttttct

SEQ ID NO: 9720 - DNA, 23 bp, Artificial Sequence
  Description of Artificial Sequence: Synthetic oligonucleotide
  Epidermal growth factor receptor (EGFR), ERBB1 phosphotyrosine kinase siRNA
tacttatggaagatagttttctc

SEQ ID NO: 9721 - DNA, 23 bp, Artificial Sequence
  Description of Artificial Sequence: Synthetic oligonucleotide
  Epidermal growth factor receptor (EGFR), ERBB1 phosphotyrosine kinase siRNA
acttatggaagatagttttctcc

SEQ ID NO: 9722 - DNA, 23 bp, Artificial Sequence
  Description of Artificial Sequence: Synthetic oligonucleotide
  Epidermal growth factor receptor (EGFR), ERBB1 phosphotyrosine kinase siRNA
cttatggaagatagttttctcct

SEQ ID NO: 9723 - DNA, 23 bp, Artificial Sequence
  Description of Artificial Sequence: Synthetic oligonucleotide
  Epidermal growth factor receptor (EGFR), ERBB1 phosphotyrosine kinase siRNA
ttatggaagatagttttctcctt

SEQ ID NO: 9724 - DNA, 23 bp, Artificial Sequence
  Description of Artificial Sequence: Synthetic oligonucleotide
  Epidermal growth factor receptor (EGFR), ERBB1 phosphotyrosine kinase siRNA
tatggaagatagttttctccttt

SEQ ID NO: 9725 - DNA, 23 bp, Artificial Sequence
  Description of Artificial Sequence: Synthetic oligonucleotide
  Epidermal growth factor receptor (EGFR), ERBB1 phosphotyrosine kinase siRNA
atggaagatagttttctcctttt

SEQ ID NO: 9726 - DNA, 23 bp, Artificial Sequence
  Description of Artificial Sequence: Synthetic oligonucleotide
  Epidermal growth factor receptor (EGFR), ERBB1 phosphotyrosine kinase siRNA
tggaagatagttttctcctttta

SEQ ID NO: 9727 - DNA, 23 bp, Artificial Sequence
  Description of Artificial Sequence: Synthetic oligonucleotide
  Epidermal growth factor receptor (EGFR), ERBB1 phosphotyrosine kinase siRNA
ggaagatagttttctccttttac

SEQ ID NO: 9728 - DNA, 23 bp, Artificial Sequence
  Description of Artificial Sequence: Synthetic oligonucleotide
  Epidermal growth factor receptor (EGFR), ERBB1 phosphotyrosine kinase siRNA
gaagatagttttctccttttact

SEQ ID NO: 9729 - DNA, 23 bp, Artificial Sequence
  Description of Artificial Sequence: Synthetic oligonucleotide
  Epidermal growth factor receptor (EGFR), ERBB1 phosphotyrosine kinase siRNA
aagatagttttctccttttactt

SEQ ID NO: 9730 - DNA, 23 bp, Artificial Sequence
  Description of Artificial Sequence: Synthetic oligonucleotide
  Epidermal growth factor receptor (EGFR), ERBB1 phosphotyrosine kinase siRNA
agatagttttctccttttacttc

SEQ ID NO: 9731 - DNA, 23 bp, Artificial Sequence
  Description of Artificial Sequence: Synthetic oligonucleotide
  Epidermal growth factor receptor (EGFR), ERBB1 phosphotyrosine kinase siRNA
gatagttttctccttttacttca

SEQ ID NO: 9732 - DNA, 23 bp, Artificial Sequence
  Description of Artificial Sequence: Synthetic oligonucleotide
  Epidermal growth factor receptor (EGFR), ERBB1 phosphotyrosine kinase siRNA
atagttttctccttttacttcac

SEQ ID NO: 9733 - DNA, 23 bp, Artificial Sequence
  Description of Artificial Sequence: Synthetic oligonucleotide
  Epidermal growth factor receptor (EGFR), ERBB1 phosphotyrosine kinase siRNA
tagttttctccttttacttcact

SEQ ID NO: 9734 - DNA, 23 bp, Artificial Sequence
  Description of Artificial Sequence: Synthetic oligonucleotide
  Epidermal growth factor receptor (EGFR), ERBB1 phosphotyrosine kinase siRNA
agttttctccttttacttcactt

SEQ ID NO: 9735 - DNA, 23 bp, Artificial Sequence
  Description of Artificial Sequence: Synthetic oligonucleotide
  Epidermal growth factor receptor (EGFR), ERBB1 phosphotyrosine kinase siRNA
gttttctccttttacttcacttc

SEQ ID NO: 9736 - DNA, 23 bp, Artificial Sequence
  Description of Artificial Sequence: Synthetic oligonucleotide
  Epidermal growth factor receptor (EGFR), ERBB1 phosphotyrosine kinase siRNA
ttttctccttttacttcacttca

SEQ ID NO: 9737 - DNA, 23 bp, Artificial Sequence
  Description of Artificial Sequence: Synthetic oligonucleotide
  Epidermal growth factor receptor (EGFR), ERBB1 phosphotyrosine kinase siRNA
tttctccttttacttcacttcaa

SEQ ID NO: 9738 - DNA, 23 bp, Artificial Sequence
  Description of Artificial Sequence: Synthetic oligonucleotide
  Epidermal growth factor receptor (EGFR), ERBB1 phosphotyrosine kinase siRNA
ttctccttttacttcacttcaaa

SEQ ID NO: 9739 - DNA, 23 bp, Artificial Sequence
  Description of Artificial Sequence: Synthetic oligonucleotide
  Epidermal growth factor receptor (EGFR), ERBB1 phosphotyrosine kinase siRNA
tctccttttacttcacttcaaaa

SEQ ID NO: 9740 - DNA, 23 bp, Artificial Sequence
  Description of Artificial Sequence: Synthetic oligonucleotide
  Epidermal growth factor receptor (EGFR), ERBB1 phosphotyrosine kinase siRNA
ctccttttacttcacttcaaaag

SEQ ID NO: 9741 - DNA, 23 bp, Artificial Sequence
  Description of Artificial Sequence: Synthetic oligonucleotide
  Epidermal growth factor receptor (EGFR), ERBB1 phosphotyrosine kinase siRNA
tccttttacttcacttcaaaagc

SEQ ID NO: 9742 - DNA, 23 bp, Artificial Sequence
  Description of Artificial Sequence: Synthetic oligonucleotide
  Epidermal growth factor receptor (EGFR), ERBB1 phosphotyrosine kinase siRNA
ccttttacttcacttcaaaagct

SEQ ID NO: 9743 - DNA, 23 bp, Artificial Sequence
  Description of Artificial Sequence: Synthetic oligonucleotide
  Epidermal growth factor receptor (EGFR), ERBB1 phosphotyrosine kinase siRNA
cttttacttcacttcaaaagctt

SEQ ID NO: 9744 - DNA, 23 bp, Artificial Sequence
  Description of Artificial Sequence: Synthetic oligonucleotide
  Epidermal growth factor receptor (EGFR), ERBB1 phosphotyrosine kinase siRNA
ttttacttcacttcaaaagcttt

SEQ ID NO: 9745 - DNA, 23 bp, Artificial Sequence
  Description of Artificial Sequence: Synthetic oligonucleotide
  Epidermal growth factor receptor (EGFR), ERBB1 phosphotyrosine kinase siRNA
tttacttcacttcaaaagctttt

SEQ ID NO: 9746 - DNA, 23 bp, Artificial Sequence
  Description of Artificial Sequence: Synthetic oligonucleotide
  Epidermal growth factor receptor (EGFR), ERBB1 phosphotyrosine kinase siRNA
ttacttcacttcaaaagcttttt

SEQ ID NO: 9747 - DNA, 23 bp, Artificial Sequence
  Description of Artificial Sequence: Synthetic oligonucleotide
  Epidermal growth factor receptor (EGFR), ERBB1 phosphotyrosine kinase siRNA
tacttcacttcaaaagcttttta

SEQ ID NO: 9748 - DNA, 23 bp, Artificial Sequence
  Description of Artificial Sequence: Synthetic oligonucleotide
  Epidermal growth factor receptor (EGFR), ERBB1 phosphotyrosine kinase siRNA
acttcacttcaaaagctttttac

SEQ ID NO: 9749 - DNA, 23 bp, Artificial Sequence
  Description of Artificial Sequence: Synthetic oligonucleotide
  Epidermal growth factor receptor (EGFR), ERBB1 phosphotyrosine kinase siRNA
cttcacttcaaaagctttttact

SEQ ID NO: 9750 - DNA, 23 bp, Artificial Sequence
  Description of Artificial Sequence: Synthetic oligonucleotide
  Epidermal growth factor receptor (EGFR), ERBB1 phosphotyrosine kinase siRNA
ttcacttcaaaagctttttactc

SEQ ID NO: 9751 - DNA, 23 bp, Artificial Sequence
  Description of Artificial Sequence: Synthetic oligonucleotide
  Epidermal growth factor receptor (EGFR), ERBB1 phosphotyrosine kinase siRNA
tcacttcaaaagctttttactca

SEQ ID NO: 9752 - DNA, 23 bp, Artificial Sequence
  Description of Artificial Sequence: Synthetic oligonucleotide
  Epidermal growth factor receptor (EGFR), ERBB1 phosphotyrosine kinase siRNA
cacttcaaaagctttttactcaa

SEQ ID NO: 9753 - DNA, 23 bp, Artificial Sequence
  Description of Artificial Sequence: Synthetic oligonucleotide
  Epidermal growth factor receptor (EGFR), ERBB1 phosphotyrosine kinase siRNA
acttcaaaagctttttactcaaa

SEQ ID NO: 9754 - DNA, 23 bp, Artificial Sequence
  Description of Artificial Sequence: Synthetic oligonucleotide
  Epidermal growth factor receptor (EGFR), ERBB1 phosphotyrosine kinase siRNA
cttcaaaagctttttactcaaag

SEQ ID NO: 9755 - DNA, 23 bp, Artificial Sequence
  Description of Artificial Sequence: Synthetic oligonucleotide
  Epidermal growth factor receptor (EGFR), ERBB1 phosphotyrosine kinase siRNA
ttcaaaagctttttactcaaaga

SEQ ID NO: 9756 - DNA, 23 bp, Artificial Sequence
  Description of Artificial Sequence: Synthetic oligonucleotide
  Epidermal growth factor receptor (EGFR), ERBB1 phosphotyrosine kinase siRNA
tcaaaagctttttactcaaagag

SEQ ID NO: 9757 - DNA, 23 bp, Artificial Sequence
  Description of Artificial Sequence: Synthetic oligonucleotide
  Epidermal growth factor receptor (EGFR), ERBB1 phosphotyrosine kinase siRNA
caaaagctttttactcaaagagt

SEQ ID NO: 9758 - DNA, 23 bp, Artificial Sequence
  Description of Artificial Sequence: Synthetic oligonucleotide
  Epidermal growth factor receptor (EGFR), ERBB1 phosphotyrosine kinase siRNA
aaaagctttttactcaaagagta

SEQ ID NO: 9759 - DNA, 23 bp, Artificial Sequence
  Description of Artificial Sequence: Synthetic oligonucleotide
  Epidermal growth factor receptor (EGFR), ERBB1 phosphotyrosine kinase siRNA
aaagctttttactcaaagagtat

SEQ ID NO: 9760 - DNA, 23 bp, Artificial Sequence
  Description of Artificial Sequence: Synthetic oligonucleotide
  Epidermal growth factor receptor (EGFR), ERBB1 phosphotyrosine kinase siRNA
aagctttttactcaaagagtata

SEQ ID NO: 9761 - DNA, 23 bp, Artificial Sequence
  Description of Artificial Sequence: Synthetic oligonucleotide
  Epidermal growth factor receptor (EGFR), ERBB1 phosphotyrosine kinase siRNA
agctttttactcaaagagtatat

SEQ ID NO: 9762 - DNA, 23 bp, Artificial Sequence
  Description of Artificial Sequence: Synthetic oligonucleotide
  Epidermal growth factor receptor (EGFR), ERBB1 phosphotyrosine kinase siRNA
gctttttactcaaagagtatatg

SEQ ID NO: 9763 - DNA, 23 bp, Artificial Sequence
  Description of Artificial Sequence: Synthetic oligonucleotide
  Epidermal growth factor receptor (EGFR), ERBB1 phosphotyrosine kinase siRNA
ctttttactcaaagagtatatgt

SEQ ID NO: 9764 - DNA, 23 bp, Artificial Sequence
  Description of Artificial Sequence: Synthetic oligonucleotide
  Epidermal growth factor receptor (EGFR), ERBB1 phosphotyrosine kinase siRNA
tttttactcaaagagtatatgtt

SEQ ID NO: 9765 - DNA, 23 bp, Artificial Sequence
  Description of Artificial Sequence: Synthetic oligonucleotide
  Epidermal growth factor receptor (EGFR), ERBB1 phosphotyrosine kinase siRNA
ttttactcaaagagtatatgttc

SEQ ID NO: 9766 - DNA, 23 bp, Artificial Sequence
  Description of Artificial Sequence: Synthetic oligonucleotide
  Epidermal growth factor receptor (EGFR), ERBB1 phosphotyrosine kinase siRNA
tttactcaaagagtatatgttcc

SEQ ID NO: 9767 - DNA, 23 bp, Artificial Sequence
  Description of Artificial Sequence: Synthetic oligonucleotide
  Epidermal growth factor receptor (EGFR), ERBB1 phosphotyrosine kinase siRNA
ttactcaaagagtatatgttccc

SEQ ID NO: 9768 - DNA, 23 bp, Artificial Sequence
  Description of Artificial Sequence: Synthetic oligonucleotide
  Epidermal growth factor receptor (EGFR), ERBB1 phosphotyrosine kinase siRNA
tactcaaagagtatatgttccct

SEQ ID NO: 9769 - DNA, 23 bp, Artificial Sequence
  Description of Artificial Sequence: Synthetic oligonucleotide
  Epidermal growth factor receptor (EGFR), ERBB1 phosphotyrosine kinase siRNA
actcaaagagtatatgttccctc

SEQ ID NO: 9770 - DNA, 23 bp, Artificial Sequence
  Description of Artificial Sequence: Synthetic oligonucleotide
  Epidermal growth factor receptor (EGFR), ERBB1 phosphotyrosine kinase siRNA
ctcaaagagtatatgttccctcc

SEQ ID NO: 9771 - DNA, 23 bp, Artificial Sequence
  Description of Artificial Sequence: Synthetic oligonucleotide
  Epidermal growth factor receptor (EGFR), ERBB1 phosphotyrosine kinase siRNA
tcaaagagtatatgttccctcca

SEQ ID NO: 9772 - DNA, 23 bp, Artificial Sequence
  Description of Artificial Sequence: Synthetic oligonucleotide
  Epidermal growth factor receptor (EGFR), ERBB1 phosphotyrosine kinase siRNA
caaagagtatatgttccctccag

SEQ ID NO: 9773 - DNA, 23 bp, Artificial Sequence
  Description of Artificial Sequence: Synthetic oligonucleotide
  Epidermal growth factor receptor (EGFR), ERBB1 phosphotyrosine kinase siRNA
aaagagtatatgttccctccagg

SEQ ID NO: 9774 - DNA, 23 bp, Artificial Sequence
  Description of Artificial Sequence: Synthetic oligonucleotide
  Epidermal growth factor receptor (EGFR), ERBB1 phosphotyrosine kinase siRNA
aagagtatatgttccctccaggt

SEQ ID NO: 9775 - DNA, 23 bp, Artificial Sequence
  Description of Artificial Sequence: Synthetic oligonucleotide
  Epidermal growth factor receptor (EGFR), ERBB1 phosphotyrosine kinase siRNA
agagtatatgttccctccaggtc

SEQ ID NO: 9776 - DNA, 23 bp, Artificial Sequence
  Description of Artificial Sequence: Synthetic oligonucleotide
  Epidermal growth factor receptor (EGFR), ERBB1 phosphotyrosine kinase siRNA
gagtatatgttccctccaggtca

SEQ ID NO: 9777 - DNA, 23 bp, Artificial Sequence
  Description of Artificial Sequence: Synthetic oligonucleotide
  Epidermal growth factor receptor (EGFR), ERBB1 phosphotyrosine kinase siRNA
agtatatgttccctccaggtcag

SEQ ID NO: 9778 - DNA, 23 bp, Artificial Sequence
  Description of Artificial Sequence: Synthetic oligonucleotide
  Epidermal growth factor receptor (EGFR), ERBB1 phosphotyrosine kinase siRNA
gtatatgttccctccaggtcagc

SEQ ID NO: 9779 - DNA, 23 bp, Artificial Sequence
  Description of Artificial Sequence: Synthetic oligonucleotide
  Epidermal growth factor receptor (EGFR), ERBB1 phosphotyrosine kinase siRNA
tatatgttccctccaggtcagct

SEQ ID NO: 9780 - DNA, 23 bp, Artificial Sequence
  Description of Artificial Sequence: Synthetic oligonucleotide
  Epidermal growth factor receptor (EGFR), ERBB1 phosphotyrosine kinase siRNA
atatgttccctccaggtcagctg

SEQ ID NO: 9781 - DNA, 23 bp, Artificial Sequence
  Description of Artificial Sequence: Synthetic oligonucleotide
  Epidermal growth factor receptor (EGFR), ERBB1 phosphotyrosine kinase siRNA
tatgttccctccaggtcagctgc

SEQ ID NO: 9782 - DNA, 23 bp, Artificial Sequence
  Description of Artificial Sequence: Synthetic oligonucleotide
  Epidermal growth factor receptor (EGFR), ERBB1 phosphotyrosine kinase siRNA
atgttccctccaggtcagctgcc

SEQ ID NO: 9783 - DNA, 23 bp, Artificial Sequence
  Description of Artificial Sequence: Synthetic oligonucleotide
  Epidermal growth factor receptor (EGFR), ERBB1 phosphotyrosine kinase siRNA
tgttccctccaggtcagctgccc

SEQ ID NO: 9784 - DNA, 23 bp, Artificial Sequence
  Description of Artificial Sequence: Synthetic oligonucleotide
  Epidermal growth factor receptor (EGFR), ERBB1 phosphotyrosine kinase siRNA
gttccctccaggtcagctgcccc

SEQ ID NO: 9785 - DNA, 23 bp, Artificial Sequence
  Description of Artificial Sequence: Synthetic oligonucleotide
  Epidermal growth factor receptor (EGFR), ERBB1 phosphotyrosine kinase siRNA
ttccctccaggtcagctgccccc

SEQ ID NO: 9786 - DNA, 23 bp, Artificial Sequence
  Description of Artificial Sequence: Synthetic oligonucleotide
  Epidermal growth factor receptor (EGFR), ERBB1 phosphotyrosine kinase siRNA
tccctccaggtcagctgccccca

SEQ ID NO: 9787 - DNA, 23 bp, Artificial Sequence
  Description of Artificial Sequence: Synthetic oligonucleotide
  Epidermal growth factor receptor (EGFR), ERBB1 phosphotyrosine kinase siRNA
ccctccaggtcagctgcccccaa

SEQ ID NO: 9788 - DNA, 23 bp, Artificial Sequence
  Description of Artificial Sequence: Synthetic oligonucleotide
  Epidermal growth factor receptor (EGFR), ERBB1 phosphotyrosine kinase siRNA
cctccaggtcagctgcccccaaa

SEQ ID NO: 9789 - DNA, 23 bp, Artificial Sequence
  Description of Artificial Sequence: Synthetic oligonucleotide
  Epidermal growth factor receptor (EGFR), ERBB1 phosphotyrosine kinase siRNA
ctccaggtcagctgcccccaaac

SEQ ID NO: 9790 - DNA, 23 bp, Artificial Sequence
  Description of Artificial Sequence: Synthetic oligonucleotide
  Epidermal growth factor receptor (EGFR), ERBB1 phosphotyrosine kinase siRNA
tccaggtcagctgcccccaaacc

SEQ ID NO: 9791 - DNA, 23 bp, Artificial Sequence
  Description of Artificial Sequence: Synthetic oligonucleotide
  Epidermal growth factor receptor (EGFR), ERBB1 phosphotyrosine kinase siRNA
ccaggtcagctgcccccaaaccc

SEQ ID NO: 9792 - DNA, 23 bp, Artificial Sequence
  Description of Artificial Sequence: Synthetic oligonucleotide
  Epidermal growth factor receptor (EGFR), ERBB1 phosphotyrosine kinase siRNA
caggtcagctgcccccaaacccc

SEQ ID NO: 9793 - DNA, 23 bp, Artificial Sequence
  Description of Artificial Sequence: Synthetic oligonucleotide
  Epidermal growth factor receptor (EGFR), ERBB1 phosphotyrosine kinase siRNA
aggtcagctgcccccaaaccccc

SEQ ID NO: 9794 - DNA, 23 bp, Artificial Sequence
  Description of Artificial Sequence: Synthetic oligonucleotide
  Epidermal growth factor receptor (EGFR), ERBB1 phosphotyrosine kinase siRNA
ggtcagctgcccccaaaccccct

SEQ ID NO: 9795 - DNA, 23 bp, Artificial Sequence
  Description of Artificial Sequence: Synthetic oligonucleotide
  Epidermal growth factor receptor (EGFR), ERBB1 phosphotyrosine kinase siRNA
gtcagctgcccccaaaccccctc

SEQ ID NO: 9796 - DNA, 23 bp, Artificial Sequence
  Description of Artificial Sequence: Synthetic oligonucleotide
  Epidermal growth factor receptor (EGFR), ERBB1 phosphotyrosine kinase siRNA
tcagctgcccccaaaccccctcc

SEQ ID NO: 9797 - DNA, 23 bp, Artificial Sequence
  Description of Artificial Sequence: Synthetic oligonucleotide
  Epidermal growth factor receptor (EGFR), ERBB1 phosphotyrosine kinase siRNA
cagctgcccccaaaccccctcct

SEQ ID NO: 9798 - DNA, 23 bp, Artificial Sequence
  Description of Artificial Sequence: Synthetic oligonucleotide
  Epidermal growth factor receptor (EGFR), ERBB1 phosphotyrosine kinase siRNA
agctgcccccaaaccccctcctt

SEQ ID NO: 9799 - DNA, 23 bp, Artificial Sequence
  Description of Artificial Sequence: Synthetic oligonucleotide
  Epidermal growth factor receptor (EGFR), ERBB1 phosphotyrosine kinase siRNA
gctgcccccaaaccccctcctta

SEQ ID NO: 9800 - DNA, 23 bp, Artificial Sequence
  Description of Artificial Sequence: Synthetic oligonucleotide
  Epidermal growth factor receptor (EGFR), ERBB1 phosphotyrosine kinase siRNA
ctgcccccaaaccccctccttac

SEQ ID NO: 9801 - DNA, 23 bp, Artificial Sequence
  Description of Artificial Sequence: Synthetic oligonucleotide
  Epidermal growth factor receptor (EGFR), ERBB1 phosphotyrosine kinase siRNA
tgcccccaaaccccctccttacg

SEQ ID NO: 9802 - DNA, 23 bp, Artificial Sequence
  Description of Artificial Sequence: Synthetic oligonucleotide
  Epidermal growth factor receptor (EGFR), ERBB1 phosphotyrosine kinase siRNA
gcccccaaaccccctccttacgc

SEQ ID NO: 9803 - DNA, 23 bp, Artificial Sequence
  Description of Artificial Sequence: Synthetic oligonucleotide
  Epidermal growth factor receptor (EGFR), ERBB1 phosphotyrosine kinase siRNA
cccccaaaccccctccttacgct

SEQ ID NO: 9804 - DNA, 23 bp, Artificial Sequence
  Description of Artificial Sequence: Synthetic oligonucleotide
  Epidermal growth factor receptor (EGFR), ERBB1 phosphotyrosine kinase siRNA
ccccaaaccccctccttacgctt

SEQ ID NO: 9805 - DNA, 23 bp, Artificial Sequence
  Description of Artificial Sequence: Synthetic oligonucleotide
  Epidermal growth factor receptor (EGFR), ERBB1 phosphotyrosine kinase siRNA
cccaaaccccctccttacgcttt

SEQ ID NO: 9806 - DNA, 23 bp, Artificial Sequence
  Description of Artificial Sequence: Synthetic oligonucleotide
  Epidermal growth factor receptor (EGFR), ERBB1 phosphotyrosine kinase siRNA
ccaaaccccctccttacgctttg

SEQ ID NO: 9807 - DNA, 23 bp, Artificial Sequence
  Description of Artificial Sequence: Synthetic oligonucleotide
  Epidermal growth factor receptor (EGFR), ERBB1 phosphotyrosine kinase siRNA
caaaccccctccttacgctttgt

SEQ ID NO: 9808 - DNA, 23 bp, Artificial Sequence
  Description of Artificial Sequence: Synthetic oligonucleotide
  Epidermal growth factor receptor (EGFR), ERBB1 phosphotyrosine kinase siRNA
aaaccccctccttacgctttgtc

SEQ ID NO: 9809 - DNA, 23 bp, Artificial Sequence
  Description of Artificial Sequence: Synthetic oligonucleotide
  Epidermal growth factor receptor (EGFR), ERBB1 phosphotyrosine kinase siRNA
aaccccctccttacgctttgtca

SEQ ID NO: 9810 - DNA, 23 bp, Artificial Sequence
  Description of Artificial Sequence: Synthetic oligonucleotide
  Epidermal growth factor receptor (EGFR), ERBB1 phosphotyrosine kinase siRNA
accccctccttacgctttgtcac

SEQ ID NO: 9811 - DNA, 23 bp, Artificial Sequence
  Description of Artificial Sequence: Synthetic oligonucleotide
  Epidermal growth factor receptor (EGFR), ERBB1 phosphotyrosine kinase siRNA
ccccctccttacgctttgtcaca

SEQ ID NO: 9812 - DNA, 23 bp, Artificial Sequence
  Description of Artificial Sequence: Synthetic oligonucleotide
  Epidermal growth factor receptor (EGFR), ERBB1 phosphotyrosine kinase siRNA
cccctccttacgctttgtcacac

SEQ ID NO: 9813 - DNA, 23 bp, Artificial Sequence
  Description of Artificial Sequence: Synthetic oligonucleotide
  Epidermal growth factor receptor (EGFR), ERBB1 phosphotyrosine kinase siRNA
ccctccttacgctttgtcacaca

SEQ ID NO: 9814 - DNA, 23 bp, Artificial Sequence
  Description of Artificial Sequence: Synthetic oligonucleotide
  Epidermal growth factor receptor (EGFR), ERBB1 phosphotyrosine kinase siRNA
cctccttacgctttgtcacacaa

SEQ ID NO: 9815 - DNA, 23 bp, Artificial Sequence
  Description of Artificial Sequence: Synthetic oligonucleotide
  Epidermal growth factor receptor (EGFR), ERBB1 phosphotyrosine kinase siRNA
ctccttacgctttgtcacacaaa

SEQ ID NO: 9816 - DNA, 23 bp, Artificial Sequence
  Description of Artificial Sequence: Synthetic oligonucleotide
  Epidermal growth factor receptor (EGFR), ERBB1 phosphotyrosine kinase siRNA
tccttacgctttgtcacacaaaa

SEQ ID NO: 9817 - DNA, 23 bp, Artificial Sequence
  Description of Artificial Sequence: Synthetic oligonucleotide
  Epidermal growth factor receptor (EGFR), ERBB1 phosphotyrosine kinase siRNA
ccttacgctttgtcacacaaaaa

SEQ ID NO: 9818 - DNA, 23 bp, Artificial Sequence
  Description of Artificial Sequence: Synthetic oligonucleotide
  Epidermal growth factor receptor (EGFR), ERBB1 phosphotyrosine kinase siRNA
cttacgctttgtcacacaaaaag

SEQ ID NO: 9819 - DNA, 23 bp, Artificial Sequence
  Description of Artificial Sequence: Synthetic oligonucleotide
  Epidermal growth factor receptor (EGFR), ERBB1 phosphotyrosine kinase siRNA
ttacgctttgtcacacaaaaagt

SEQ ID NO: 9820 - DNA, 23 bp, Artificial Sequence
  Description of Artificial Sequence: Synthetic oligonucleotide
  Epidermal growth factor receptor (EGFR), ERBB1 phosphotyrosine kinase siRNA
tacgctttgtcacacaaaaagtg

SEQ ID NO: 9821 - DNA, 23 bp, Artificial Sequence
  Description of Artificial Sequence: Synthetic oligonucleotide
  Epidermal growth factor receptor (EGFR), ERBB1 phosphotyrosine kinase siRNA
acgctttgtcacacaaaaagtgt

SEQ ID NO: 9822 - DNA, 23 bp, Artificial Sequence
  Description of Artificial Sequence: Synthetic oligonucleotide
  Epidermal growth factor receptor (EGFR), ERBB1 phosphotyrosine kinase siRNA
cgctttgtcacacaaaaagtgtc

SEQ ID NO: 9823 - DNA, 23 bp, Artificial Sequence
  Description of Artificial Sequence: Synthetic oligonucleotide
  Epidermal growth factor receptor (EGFR), ERBB1 phosphotyrosine kinase siRNA
gctttgtcacacaaaaagtgtct

SEQ ID NO: 9824 - DNA, 23 bp, Artificial Sequence
  Description of Artificial Sequence: Synthetic oligonucleotide
  Epidermal growth factor receptor (EGFR), ERBB1 phosphotyrosine kinase siRNA
ctttgtcacacaaaaagtgtctc

SEQ ID NO: 9825 - DNA, 23 bp, Artificial Sequence
  Description of Artificial Sequence: Synthetic oligonucleotide
  Epidermal growth factor receptor (EGFR), ERBB1 phosphotyrosine kinase siRNA
tttgtcacacaaaaagtgtctct

SEQ ID NO: 9826 - DNA, 23 bp, Artificial Sequence
  Description of Artificial Sequence: Synthetic oligonucleotide
  Epidermal growth factor receptor (EGFR), ERBB1 phosphotyrosine kinase siRNA
ttgtcacacaaaaagtgtctctg

SEQ ID NO: 9827 - DNA, 23 bp, Artificial Sequence
  Description of Artificial Sequence: Synthetic oligonucleotide
  Epidermal growth factor receptor (EGFR), ERBB1 phosphotyrosine kinase siRNA
tgtcacacaaaaagtgtctctgc

SEQ ID NO: 9828 - DNA, 23 bp, Artificial Sequence
  Description of Artificial Sequence: Synthetic oligonucleotide
  Epidermal growth factor receptor (EGFR), ERBB1 phosphotyrosine kinase siRNA
gtcacacaaaaagtgtctctgcc

SEQ ID NO: 9829 - DNA, 23 bp, Artificial Sequence
  Description of Artificial Sequence: Synthetic oligonucleotide
  Epidermal growth factor receptor (EGFR), ERBB1 phosphotyrosine kinase siRNA
tcacacaaaaagtgtctctgcct

SEQ ID NO: 9830 - DNA, 23 bp, Artificial Sequence
  Description of Artificial Sequence: Synthetic oligonucleotide
  Epidermal growth factor receptor (EGFR), ERBB1 phosphotyrosine kinase siRNA
cacacaaaaagtgtctctgcctt

SEQ ID NO: 9831 - DNA, 23 bp, Artificial Sequence
  Description of Artificial Sequence: Synthetic oligonucleotide
  Epidermal growth factor receptor (EGFR), ERBB1 phosphotyrosine kinase siRNA
acacaaaaagtgtctctgccttg

SEQ ID NO: 9832 - DNA, 23 bp, Artificial Sequence
  Description of Artificial Sequence: Synthetic oligonucleotide
  Epidermal growth factor receptor (EGFR), ERBB1 phosphotyrosine kinase siRNA
cacaaaaagtgtctctgccttga

SEQ ID NO: 9833 - DNA, 23 bp, Artificial Sequence
  Description of Artificial Sequence: Synthetic oligonucleotide
  Epidermal growth factor receptor (EGFR), ERBB1 phosphotyrosine kinase siRNA
acaaaaagtgtctctgccttgag

SEQ ID NO: 9834 - DNA, 23 bp, Artificial Sequence
  Description of Artificial Sequence: Synthetic oligonucleotide
  Epidermal growth factor receptor (EGFR), ERBB1 phosphotyrosine kinase siRNA
caaaaagtgtctctgccttgagt

SEQ ID NO: 9835 - DNA, 23 bp, Artificial Sequence
  Description of Artificial Sequence: Synthetic oligonucleotide
  Epidermal growth factor receptor (EGFR), ERBB1 phosphotyrosine kinase siRNA
aaaaagtgtctctgccttgagtc

SEQ ID NO: 9836 - DNA, 23 bp, Artificial Sequence
  Description of Artificial Sequence: Synthetic oligonucleotide
  Epidermal growth factor receptor (EGFR), ERBB1 phosphotyrosine kinase siRNA
aaaagtgtctctgccttgagtca

SEQ ID NO: 9837 - DNA, 23 bp, Artificial Sequence
  Description of Artificial Sequence: Synthetic oligonucleotide
  Epidermal growth factor receptor (EGFR), ERBB1 phosphotyrosine kinase siRNA
aaagtgtctctgccttgagtcat

SEQ ID NO: 9838 - DNA, 23 bp, Artificial Sequence
  Description of Artificial Sequence: Synthetic oligonucleotide
  Epidermal growth factor receptor (EGFR), ERBB1 phosphotyrosine kinase siRNA
aagtgtctctgccttgagtcatc

SEQ ID NO: 9839 - DNA, 23 bp, Artificial Sequence
  Description of Artificial Sequence: Synthetic oligonucleotide
  Epidermal growth factor receptor (EGFR), ERBB1 phosphotyrosine kinase siRNA
agtgtctctgccttgagtcatct

SEQ ID NO: 9840 - DNA, 23 bp, Artificial Sequence
  Description of Artificial Sequence: Synthetic oligonucleotide
  Epidermal growth factor receptor (EGFR), ERBB1 phosphotyrosine kinase siRNA
gtgtctctgccttgagtcatcta

SEQ ID NO: 9841 - DNA, 23 bp, Artificial Sequence
  Description of Artificial Sequence: Synthetic oligonucleotide
  Epidermal growth factor receptor (EGFR), ERBB1 phosphotyrosine kinase siRNA
tgtctctgccttgagtcatctat

SEQ ID NO: 9842 - DNA, 23 bp, Artificial Sequence
  Description of Artificial Sequence: Synthetic oligonucleotide
  Epidermal growth factor receptor (EGFR), ERBB1 phosphotyrosine kinase siRNA
gtctctgccttgagtcatctatt

SEQ ID NO: 9843 - DNA, 23 bp, Artificial Sequence
  Description of Artificial Sequence: Synthetic oligonucleotide
  Epidermal growth factor receptor (EGFR), ERBB1 phosphotyrosine kinase siRNA
tctctgccttgagtcatctattc

SEQ ID NO: 9844 - DNA, 23 bp, Artificial Sequence
  Description of Artificial Sequence: Synthetic oligonucleotide
  Epidermal growth factor receptor (EGFR), ERBB1 phosphotyrosine kinase siRNA
ctctgccttgagtcatctattca

SEQ ID NO: 9845 - DNA, 23 bp, Artificial Sequence
  Description of Artificial Sequence: Synthetic oligonucleotide
  Epidermal growth factor receptor (EGFR), ERBB1 phosphotyrosine kinase siRNA
tctgccttgagtcatctattcaa

SEQ ID NO: 9846 - DNA, 23 bp, Artificial Sequence
  Description of Artificial Sequence: Synthetic oligonucleotide
  Epidermal growth factor receptor (EGFR), ERBB1 phosphotyrosine kinase siRNA
ctgccttgagtcatctattcaag

SEQ ID NO: 9847 - DNA, 23 bp, Artificial Sequence
  Description of Artificial Sequence: Synthetic oligonucleotide
  Epidermal growth factor receptor (EGFR), ERBB1 phosphotyrosine kinase siRNA
tgccttgagtcatctattcaagc

SEQ ID NO: 9848 - DNA, 23 bp, Artificial Sequence
  Description of Artificial Sequence: Synthetic oligonucleotide
  Epidermal growth factor receptor (EGFR), ERBB1 phosphotyrosine kinase siRNA
gccttgagtcatctattcaagca

SEQ ID NO: 9849 - DNA, 23 bp, Artificial Sequence
  Description of Artificial Sequence: Synthetic oligonucleotide
  Epidermal growth factor receptor (EGFR), ERBB1 phosphotyrosine kinase siRNA
ccttgagtcatctattcaagcac

SEQ ID NO: 9850 - DNA, 23 bp, Artificial Sequence
  Description of Artificial Sequence: Synthetic oligonucleotide
  Epidermal growth factor receptor (EGFR), ERBB1 phosphotyrosine kinase siRNA
cttgagtcatctattcaagcact

SEQ ID NO: 9851 - DNA, 23 bp, Artificial Sequence
  Description of Artificial Sequence: Synthetic oligonucleotide
  Epidermal growth factor receptor (EGFR), ERBB1 phosphotyrosine kinase siRNA
ttgagtcatctattcaagcactt

SEQ ID NO: 9852 - DNA, 23 bp, Artificial Sequence
  Description of Artificial Sequence: Synthetic oligonucleotide
  Epidermal growth factor receptor (EGFR), ERBB1 phosphotyrosine kinase siRNA
tgagtcatctattcaagcactta

SEQ ID NO: 9853 - DNA, 23 bp, Artificial Sequence
  Description of Artificial Sequence: Synthetic oligonucleotide
  Epidermal growth factor receptor (EGFR), ERBB1 phosphotyrosine kinase siRNA
gagtcatctattcaagcacttac

SEQ ID NO: 9854 - DNA, 23 bp, Artificial Sequence
  Description of Artificial Sequence: Synthetic oligonucleotide
  Epidermal growth factor receptor (EGFR), ERBB1 phosphotyrosine kinase siRNA
agtcatctattcaagcacttaca

SEQ ID NO: 9855 - DNA, 23 bp, Artificial Sequence
  Description of Artificial Sequence: Synthetic oligonucleotide
  Epidermal growth factor receptor (EGFR), ERBB1 phosphotyrosine kinase siRNA
gtcatctattcaagcacttacag

SEQ ID NO: 9856 - DNA, 23 bp, Artificial Sequence
  Description of Artificial Sequence: Synthetic oligonucleotide
  Epidermal growth factor receptor (EGFR), ERBB1 phosphotyrosine kinase siRNA
tcatctattcaagcacttacagc

SEQ ID NO: 9857 - DNA, 23 bp, Artificial Sequence
  Description of Artificial Sequence: Synthetic oligonucleotide
  Epidermal growth factor receptor (EGFR), ERBB1 phosphotyrosine kinase siRNA
catctattcaagcacttacagct

SEQ ID NO: 9858 - DNA, 23 bp, Artificial Sequence
  Description of Artificial Sequence: Synthetic oligonucleotide
  Epidermal growth factor receptor (EGFR), ERBB1 phosphotyrosine kinase siRNA
atctattcaagcacttacagctc

SEQ ID NO: 9859 - DNA, 23 bp, Artificial Sequence
  Description of Artificial Sequence: Synthetic oligonucleotide
  Epidermal growth factor receptor (EGFR), ERBB1 phosphotyrosine kinase siRNA
tctattcaagcacttacagctct

SEQ ID NO: 9860 - DNA, 23 bp, Artificial Sequence
  Description of Artificial Sequence: Synthetic oligonucleotide
  Epidermal growth factor receptor (EGFR), ERBB1 phosphotyrosine kinase siRNA
ctattcaagcacttacagctctg

SEQ ID NO: 9861 - DNA, 23 bp, Artificial Sequence
  Description of Artificial Sequence: Synthetic oligonucleotide
  Epidermal growth factor receptor (EGFR), ERBB1 phosphotyrosine kinase siRNA
tattcaagcacttacagctctgg

SEQ ID NO: 9862 - DNA, 23 bp, Artificial Sequence
  Description of Artificial Sequence: Synthetic oligonucleotide
  Epidermal growth factor receptor (EGFR), ERBB1 phosphotyrosine kinase siRNA
attcaagcacttacagctctggc

SEQ ID NO: 9863 - DNA, 23 bp, Artificial Sequence
  Description of Artificial Sequence: Synthetic oligonucleotide
  Epidermal growth factor receptor (EGFR), ERBB1 phosphotyrosine kinase siRNA
ttcaagcacttacagctctggcc

SEQ ID NO: 9864 - DNA, 23 bp, Artificial Sequence
  Description of Artificial Sequence: Synthetic oligonucleotide
  Epidermal growth factor receptor (EGFR), ERBB1 phosphotyrosine kinase siRNA
tcaagcacttacagctctggcca

SEQ ID NO: 9865 - DNA, 23 bp, Artificial Sequence
  Description of Artificial Sequence: Synthetic oligonucleotide
  Epidermal growth factor receptor (EGFR), ERBB1 phosphotyrosine kinase siRNA
caagcacttacagctctggccac

SEQ ID NO: 9866 - DNA, 23 bp, Artificial Sequence
  Description of Artificial Sequence: Synthetic oligonucleotide
  Epidermal growth factor receptor (EGFR), ERBB1 phosphotyrosine kinase siRNA
aagcacttacagctctggccaca

SEQ ID NO: 9867 - DNA, 23 bp, Artificial Sequence
  Description of Artificial Sequence: Synthetic oligonucleotide
  Epidermal growth factor receptor (EGFR), ERBB1 phosphotyrosine kinase siRNA
agcacttacagctctggccacaa

SEQ ID NO: 9868 - DNA, 23 bp, Artificial Sequence
  Description of Artificial Sequence: Synthetic oligonucleotide
  Epidermal growth factor receptor (EGFR), ERBB1 phosphotyrosine kinase siRNA
gcacttacagctctggccacaac

SEQ ID NO: 9869 - DNA, 23 bp, Artificial Sequence
  Description of Artificial Sequence: Synthetic oligonucleotide
  Epidermal growth factor receptor (EGFR), ERBB1 phosphotyrosine kinase siRNA
cacttacagctctggccacaaca

SEQ ID NO: 9870 - DNA, 23 bp, Artificial Sequence
  Description of Artificial Sequence: Synthetic oligonucleotide
  Epidermal growth factor receptor (EGFR), ERBB1 phosphotyrosine kinase siRNA
acttacagctctggccacaacag

SEQ ID NO: 9871 - DNA, 23 bp, Artificial Sequence
  Description of Artificial Sequence: Synthetic oligonucleotide
  Epidermal growth factor receptor (EGFR), ERBB1 phosphotyrosine kinase siRNA
cttacagctctggccacaacagg

SEQ ID NO: 9872 - DNA, 23 bp, Artificial Sequence
  Description of Artificial Sequence: Synthetic oligonucleotide
  Epidermal growth factor receptor (EGFR), ERBB1 phosphotyrosine kinase siRNA
ttacagctctggccacaacaggg

SEQ ID NO: 9873 - DNA, 23 bp, Artificial Sequence
  Description of Artificial Sequence: Synthetic oligonucleotide
  Epidermal growth factor receptor (EGFR), ERBB1 phosphotyrosine kinase siRNA
tacagctctggccacaacagggc

SEQ ID NO: 9874 - DNA, 23 bp, Artificial Sequence
  Description of Artificial Sequence: Synthetic oligonucleotide
  Epidermal growth factor receptor (EGFR), ERBB1 phosphotyrosine kinase siRNA
acagctctggccacaacagggca

SEQ ID NO: 9875 - DNA, 23 bp, Artificial Sequence
  Description of Artificial Sequence: Synthetic oligonucleotide
  Epidermal growth factor receptor (EGFR), ERBB1 phosphotyrosine kinase siRNA
cagctctggccacaacagggcat

SEQ ID NO: 9876 - DNA, 23 bp, Artificial Sequence
  Description of Artificial Sequence: Synthetic oligonucleotide
  Epidermal growth factor receptor (EGFR), ERBB1 phosphotyrosine kinase siRNA
agctctggccacaacagggcatt

SEQ ID NO: 9877 - DNA, 23 bp, Artificial Sequence
  Description of Artificial Sequence: Synthetic oligonucleotide
  Epidermal growth factor receptor (EGFR), ERBB1 phosphotyrosine kinase siRNA
gctctggccacaacagggcattt

SEQ ID NO: 9878 - DNA, 23 bp, Artificial Sequence
  Description of Artificial Sequence: Synthetic oligonucleotide
  Epidermal growth factor receptor (EGFR), ERBB1 phosphotyrosine kinase siRNA
ctctggccacaacagggcatttt

SEQ ID NO: 9879 - DNA, 23 bp, Artificial Sequence
  Description of Artificial Sequence: Synthetic oligonucleotide
  Epidermal growth factor receptor (EGFR), ERBB1 phosphotyrosine kinase siRNA
tctggccacaacagggcatttta

SEQ ID NO: 9880 - DNA, 23 bp, Artificial Sequence
  Description of Artificial Sequence: Synthetic oligonucleotide
  Epidermal growth factor receptor (EGFR), ERBB1 phosphotyrosine kinase siRNA
ctggccacaacagggcattttac

SEQ ID NO: 9881 - DNA, 23 bp, Artificial Sequence
  Description of Artificial Sequence: Synthetic oligonucleotide
  Epidermal growth factor receptor (EGFR), ERBB1 phosphotyrosine kinase siRNA
tggccacaacagggcattttaca

SEQ ID NO: 9882 - DNA, 23 bp, Artificial Sequence
  Description of Artificial Sequence: Synthetic oligonucleotide
  Epidermal growth factor receptor (EGFR), ERBB1 phosphotyrosine kinase siRNA
ggccacaacagggcattttacag

SEQ ID NO: 9883 - DNA, 23 bp, Artificial Sequence
  Description of Artificial Sequence: Synthetic oligonucleotide
  Epidermal growth factor receptor (EGFR), ERBB1 phosphotyrosine kinase siRNA
gccacaacagggcattttacagg

SEQ ID NO: 9884 - DNA, 23 bp, Artificial Sequence
  Description of Artificial Sequence: Synthetic oligonucleotide
  Epidermal growth factor receptor (EGFR), ERBB1 phosphotyrosine kinase siRNA
ccacaacagggcattttacaggt

SEQ ID NO: 9885 - DNA, 23 bp, Artificial Sequence
  Description of Artificial Sequence: Synthetic oligonucleotide
  Epidermal growth factor receptor (EGFR), ERBB1 phosphotyrosine kinase siRNA
cacaacagggcattttacaggtg

SEQ ID NO: 9886 - DNA, 23 bp, Artificial Sequence
  Description of Artificial Sequence: Synthetic oligonucleotide
  Epidermal growth factor receptor (EGFR), ERBB1 phosphotyrosine kinase siRNA
acaacagggcattttacaggtgc

SEQ ID NO: 9887 - DNA, 23 bp, Artificial Sequence
  Description of Artificial Sequence: Synthetic oligonucleotide
  Epidermal growth factor receptor (EGFR), ERBB1 phosphotyrosine kinase siRNA
caacagggcattttacaggtgcg

SEQ ID NO: 9888 - DNA, 23 bp, Artificial Sequence
  Description of Artificial Sequence: Synthetic oligonucleotide
  Epidermal growth factor receptor (EGFR), ERBB1 phosphotyrosine kinase siRNA
aacagggcattttacaggtgcga

SEQ ID NO: 9889 - DNA, 23 bp, Artificial Sequence
  Description of Artificial Sequence: Synthetic oligonucleotide
  Epidermal growth factor receptor (EGFR), ERBB1 phosphotyrosine kinase siRNA
acagggcattttacaggtgcgaa

SEQ ID NO: 9890 - DNA, 23 bp, Artificial Sequence
  Description of Artificial Sequence: Synthetic oligonucleotide
  Epidermal growth factor receptor (EGFR), ERBB1 phosphotyrosine kinase siRNA
cagggcattttacaggtgcgaat

SEQ ID NO: 9891 - DNA, 23 bp, Artificial Sequence
  Description of Artificial Sequence: Synthetic oligonucleotide
  Epidermal growth factor receptor (EGFR), ERBB1 phosphotyrosine kinase siRNA
agggcattttacaggtgcgaatg

SEQ ID NO: 9892 - DNA, 23 bp, Artificial Sequence
  Description of Artificial Sequence: Synthetic oligonucleotide
  Epidermal growth factor receptor (EGFR), ERBB1 phosphotyrosine kinase siRNA
gggcattttacaggtgcgaatga

SEQ ID NO: 9893 - DNA, 23 bp, Artificial Sequence
  Description of Artificial Sequence: Synthetic oligonucleotide
  Epidermal growth factor receptor (EGFR), ERBB1 phosphotyrosine kinase siRNA
ggcattttacaggtgcgaatgac

SEQ ID NO: 9894 - DNA, 23 bp, Artificial Sequence
  Description of Artificial Sequence: Synthetic oligonucleotide
  Epidermal growth factor receptor (EGFR), ERBB1 phosphotyrosine kinase siRNA
gcattttacaggtgcgaatgaca

SEQ ID NO: 9895 - DNA, 23 bp, Artificial Sequence
  Description of Artificial Sequence: Synthetic oligonucleotide
  Epidermal growth factor receptor (EGFR), ERBB1 phosphotyrosine kinase siRNA
cattttacaggtgcgaatgacag

SEQ ID NO: 9896 - DNA, 23 bp, Artificial Sequence
  Description of Artificial Sequence: Synthetic oligonucleotide
  Epidermal growth factor receptor (EGFR), ERBB1 phosphotyrosine kinase siRNA
attttacaggtgcgaatgacagt

SEQ ID NO: 9897 - DNA, 23 bp, Artificial Sequence
  Description of Artificial Sequence: Synthetic oligonucleotide
  Epidermal growth factor receptor (EGFR), ERBB1 phosphotyrosine kinase siRNA
ttttacaggtgcgaatgacagta

SEQ ID NO: 9898 - DNA, 23 bp, Artificial Sequence
  Description of Artificial Sequence: Synthetic oligonucleotide
  Epidermal growth factor receptor (EGFR), ERBB1 phosphotyrosine kinase siRNA
tttacaggtgcgaatgacagtag

SEQ ID NO: 9899 - DNA, 23 bp, Artificial Sequence
  Description of Artificial Sequence: Synthetic oligonucleotide
  Epidermal growth factor receptor (EGFR), ERBB1 phosphotyrosine kinase siRNA
ttacaggtgcgaatgacagtagc

SEQ ID NO: 9900 - DNA, 23 bp, Artificial Sequence
  Description of Artificial Sequence: Synthetic oligonucleotide
  Epidermal growth factor receptor (EGFR), ERBB1 phosphotyrosine kinase siRNA
tacaggtgcgaatgacagtagca

SEQ ID NO: 9901 - DNA, 23 bp, Artificial Sequence
  Description of Artificial Sequence: Synthetic oligonucleotide
  Epidermal growth factor receptor (EGFR), ERBB1 phosphotyrosine kinase siRNA
acaggtgcgaatgacagtagcat

SEQ ID NO: 9902 - DNA, 23 bp, Artificial Sequence
  Description of Artificial Sequence: Synthetic oligonucleotide
  Epidermal growth factor receptor (EGFR), ERBB1 phosphotyrosine kinase siRNA
caggtgcgaatgacagtagcatt

SEQ ID NO: 9903 - DNA, 23 bp, Artificial Sequence
  Description of Artificial Sequence: Synthetic oligonucleotide
  Epidermal growth factor receptor (EGFR), ERBB1 phosphotyrosine kinase siRNA
aggtgcgaatgacagtagcatta

SEQ ID NO: 9904 - DNA, 23 bp, Artificial Sequence
  Description of Artificial Sequence: Synthetic oligonucleotide
  Epidermal growth factor receptor (EGFR), ERBB1 phosphotyrosine kinase siRNA
ggtgcgaatgacagtagcattat

SEQ ID NO: 9905 - DNA, 23 bp, Artificial Sequence
  Description of Artificial Sequence: Synthetic oligonucleotide
  Epidermal growth factor receptor (EGFR), ERBB1 phosphotyrosine kinase siRNA
gtgcgaatgacagtagcattatg

SEQ ID NO: 9906 - DNA, 23 bp, Artificial Sequence
  Description of Artificial Sequence: Synthetic oligonucleotide
  Epidermal growth factor receptor (EGFR), ERBB1 phosphotyrosine kinase siRNA
tgcgaatgacagtagcattatga

SEQ ID NO: 9907 - DNA, 23 bp, Artificial Sequence
  Description of Artificial Sequence: Synthetic oligonucleotide
  Epidermal growth factor receptor (EGFR), ERBB1 phosphotyrosine kinase siRNA
gcgaatgacagtagcattatgag

SEQ ID NO: 9908 - DNA, 23 bp, Artificial Sequence
  Description of Artificial Sequence: Synthetic oligonucleotide
  Epidermal growth factor receptor (EGFR), ERBB1 phosphotyrosine kinase siRNA
cgaatgacagtagcattatgagt

SEQ ID NO: 9909 - DNA, 23 bp, Artificial Sequence
  Description of Artificial Sequence: Synthetic oligonucleotide
  Epidermal growth factor receptor (EGFR), ERBB1 phosphotyrosine kinase siRNA
gaatgacagtagcattatgagta

SEQ ID NO: 9910 - DNA, 23 bp, Artificial Sequence
  Description of Artificial Sequence: Synthetic oligonucleotide
  Epidermal growth factor receptor (EGFR), ERBB1 phosphotyrosine kinase siRNA
aatgacagtagcattatgagtag

SEQ ID NO: 9911 - DNA, 23 bp, Artificial Sequence
  Description of Artificial Sequence: Synthetic oligonucleotide
  Epidermal growth factor receptor (EGFR), ERBB1 phosphotyrosine kinase siRNA
atgacagtagcattatgagtagt

SEQ ID NO: 9912 - DNA, 23 bp, Artificial Sequence
  Description of Artificial Sequence: Synthetic oligonucleotide
  Epidermal growth factor receptor (EGFR), ERBB1 phosphotyrosine kinase siRNA
tgacagtagcattatgagtagtg

SEQ ID NO: 9913 - DNA, 23 bp, Artificial Sequence
  Description of Artificial Sequence: Synthetic oligonucleotide
  Epidermal growth factor receptor (EGFR), ERBB1 phosphotyrosine kinase siRNA
gacagtagcattatgagtagtgt

SEQ ID NO: 9914 - DNA, 23 bp, Artificial Sequence
  Description of Artificial Sequence: Synthetic oligonucleotide
  Epidermal growth factor receptor (EGFR), ERBB1 phosphotyrosine kinase siRNA
acagtagcattatgagtagtgtg

SEQ ID NO: 9915 - DNA, 23 bp, Artificial Sequence
  Description of Artificial Sequence: Synthetic oligonucleotide
  Epidermal growth factor receptor (EGFR), ERBB1 phosphotyrosine kinase siRNA
cagtagcattatgagtagtgtgg

SEQ ID NO: 9916 - DNA, 23 bp, Artificial Sequence
  Description of Artificial Sequence: Synthetic oligonucleotide
  Epidermal growth factor receptor (EGFR), ERBB1 phosphotyrosine kinase siRNA
agtagcattatgagtagtgtgga

SEQ ID NO: 9917 - DNA, 23 bp, Artificial Sequence
  Description of Artificial Sequence: Synthetic oligonucleotide
  Epidermal growth factor receptor (EGFR), ERBB1 phosphotyrosine kinase siRNA
gtagcattatgagtagtgtggaa

SEQ ID NO: 9918 - DNA, 23 bp, Artificial Sequence
  Description of Artificial Sequence: Synthetic oligonucleotide
  Epidermal growth factor receptor (EGFR), ERBB1 phosphotyrosine kinase siRNA
tagcattatgagtagtgtggaat

SEQ ID NO: 9919 - DNA, 23 bp, Artificial Sequence
  Description of Artificial Sequence: Synthetic oligonucleotide
  Epidermal growth factor receptor (EGFR), ERBB1 phosphotyrosine kinase siRNA
agcattatgagtagtgtggaatt

SEQ ID NO: 9920 - DNA, 23 bp, Artificial Sequence
  Description of Artificial Sequence: Synthetic oligonucleotide
  Epidermal growth factor receptor (EGFR), ERBB1 phosphotyrosine kinase siRNA
gcattatgagtagtgtggaattc

SEQ ID NO: 9921 - DNA, 23 bp, Artificial Sequence
  Description of Artificial Sequence: Synthetic oligonucleotide
  Epidermal growth factor receptor (EGFR), ERBB1 phosphotyrosine kinase siRNA
cattatgagtagtgtggaattca

SEQ ID NO: 9922 - DNA, 23 bp, Artificial Sequence
  Description of Artificial Sequence: Synthetic oligonucleotide
  Epidermal growth factor receptor (EGFR), ERBB1 phosphotyrosine kinase siRNA
attatgagtagtgtggaattcag

SEQ ID NO: 9923 - DNA, 23 bp, Artificial Sequence
  Description of Artificial Sequence: Synthetic oligonucleotide
  Epidermal growth factor receptor (EGFR), ERBB1 phosphotyrosine kinase siRNA
ttatgagtagtgtggaattcagg

SEQ ID NO: 9924 - DNA, 23 bp, Artificial Sequence
  Description of Artificial Sequence: Synthetic oligonucleotide
  Epidermal growth factor receptor (EGFR), ERBB1 phosphotyrosine kinase siRNA
tatgagtagtgtggaattcaggt

SEQ ID NO: 9925 - DNA, 23 bp, Artificial Sequence
  Description of Artificial Sequence: Synthetic oligonucleotide
  Epidermal growth factor receptor (EGFR), ERBB1 phosphotyrosine kinase siRNA
atgagtagtgtggaattcaggta

SEQ ID NO: 9926 - DNA, 23 bp, Artificial Sequence
  Description of Artificial Sequence: Synthetic oligonucleotide
  Epidermal growth factor receptor (EGFR), ERBB1 phosphotyrosine kinase siRNA
tgagtagtgtggaattcaggtag

SEQ ID NO: 9927 - DNA, 23 bp, Artificial Sequence
  Description of Artificial Sequence: Synthetic oligonucleotide
  Epidermal growth factor receptor (EGFR), ERBB1 phosphotyrosine kinase siRNA
gagtagtgtggaattcaggtagt

SEQ ID NO: 9928 - DNA, 23 bp, Artificial Sequence
  Description of Artificial Sequence: Synthetic oligonucleotide
  Epidermal growth factor receptor (EGFR), ERBB1 phosphotyrosine kinase siRNA
agtagtgtggaattcaggtagta

SEQ ID NO: 9929 - DNA, 23 bp, Artificial Sequence
  Description of Artificial Sequence: Synthetic oligonucleotide
  Epidermal growth factor receptor (EGFR), ERBB1 phosphotyrosine kinase siRNA
gtagtgtggaattcaggtagtaa

SEQ ID NO: 9930 - DNA, 23 bp, Artificial Sequence
  Description of Artificial Sequence: Synthetic oligonucleotide
  Epidermal growth factor receptor (EGFR), ERBB1 phosphotyrosine kinase siRNA
tagtgtggaattcaggtagtaaa

SEQ ID NO: 9931 - DNA, 23 bp, Artificial Sequence
  Description of Artificial Sequence: Synthetic oligonucleotide
  Epidermal growth factor receptor (EGFR), ERBB1 phosphotyrosine kinase siRNA
agtgtggaattcaggtagtaaat

SEQ ID NO: 9932 - DNA, 23 bp, Artificial Sequence
  Description of Artificial Sequence: Synthetic oligonucleotide
  Epidermal growth factor receptor (EGFR), ERBB1 phosphotyrosine kinase siRNA
gtgtggaattcaggtagtaaata

SEQ ID NO: 9933 - DNA, 23 bp, Artificial Sequence
  Description of Artificial Sequence: Synthetic oligonucleotide
  Epidermal growth factor receptor (EGFR), ERBB1 phosphotyrosine kinase siRNA
tgtggaattcaggtagtaaatat

SEQ ID NO: 9934 - DNA, 23 bp, Artificial Sequence
  Description of Artificial Sequence: Synthetic oligonucleotide
  Epidermal growth factor receptor (EGFR), ERBB1 phosphotyrosine kinase siRNA
gtggaattcaggtagtaaatatg

SEQ ID NO: 9935 - DNA, 23 bp, Artificial Sequence
  Description of Artificial Sequence: Synthetic oligonucleotide
  Epidermal growth factor receptor (EGFR), ERBB1 phosphotyrosine kinase siRNA
tggaattcaggtagtaaatatga

SEQ ID NO: 9936 - DNA, 23 bp, Artificial Sequence
  Description of Artificial Sequence: Synthetic oligonucleotide
  Epidermal growth factor receptor (EGFR), ERBB1 phosphotyrosine kinase siRNA
ggaattcaggtagtaaatatgaa

SEQ ID NO: 9937 - DNA, 23 bp, Artificial Sequence
  Description of Artificial Sequence: Synthetic oligonucleotide
  Epidermal growth factor receptor (EGFR), ERBB1 phosphotyrosine kinase siRNA
gaattcaggtagtaaatatgaaa

SEQ ID NO: 9938 - DNA, 23 bp, Artificial Sequence
  Description of Artificial Sequence: Synthetic oligonucleotide
  Epidermal growth factor receptor (EGFR), ERBB1 phosphotyrosine kinase siRNA
aattcaggtagtaaatatgaaac

SEQ ID NO: 9939 - DNA, 23 bp, Artificial Sequence
  Description of Artificial Sequence: Synthetic oligonucleotide
  Epidermal growth factor receptor (EGFR), ERBB1 phosphotyrosine kinase siRNA
attcaggtagtaaatatgaaact

SEQ ID NO: 9940 - DNA, 23 bp, Artificial Sequence
  Description of Artificial Sequence: Synthetic oligonucleotide
  Epidermal growth factor receptor (EGFR), ERBB1 phosphotyrosine kinase siRNA
ttcaggtagtaaatatgaaacta

SEQ ID NO: 9941 - DNA, 23 bp, Artificial Sequence
  Description of Artificial Sequence: Synthetic oligonucleotide
  Epidermal growth factor receptor (EGFR), ERBB1 phosphotyrosine kinase siRNA
tcaggtagtaaatatgaaactag

SEQ ID NO: 9942 - DNA, 23 bp, Artificial Sequence
  Description of Artificial Sequence: Synthetic oligonucleotide
  Epidermal growth factor receptor (EGFR), ERBB1 phosphotyrosine kinase siRNA
caggtagtaaatatgaaactagg

SEQ ID NO: 9943 - DNA, 23 bp, Artificial Sequence
  Description of Artificial Sequence: Synthetic oligonucleotide
  Epidermal growth factor receptor (EGFR), ERBB1 phosphotyrosine kinase siRNA
aggtagtaaatatgaaactaggg

SEQ ID NO: 9944 - DNA, 23 bp, Artificial Sequence
  Description of Artificial Sequence: Synthetic oligonucleotide
  Epidermal growth factor receptor (EGFR), ERBB1 phosphotyrosine kinase siRNA
ggtagtaaatatgaaactagggt

SEQ ID NO: 9945 - DNA, 23 bp, Artificial Sequence
  Description of Artificial Sequence: Synthetic oligonucleotide
  Epidermal growth factor receptor (EGFR), ERBB1 phosphotyrosine kinase siRNA
gtagtaaatatgaaactagggtt

SEQ ID NO: 9946 - DNA, 23 bp, Artificial Sequence
  Description of Artificial Sequence: Synthetic oligonucleotide
  Epidermal growth factor receptor (EGFR), ERBB1 phosphotyrosine kinase siRNA
tagtaaatatgaaactagggttt

SEQ ID NO: 9947 - DNA, 23 bp, Artificial Sequence
  Description of Artificial Sequence: Synthetic oligonucleotide
  Epidermal growth factor receptor (EGFR), ERBB1 phosphotyrosine kinase siRNA
agtaaatatgaaactagggtttg

SEQ ID NO: 9948 - DNA, 23 bp, Artificial Sequence
  Description of Artificial Sequence: Synthetic oligonucleotide
  Epidermal growth factor receptor (EGFR), ERBB1 phosphotyrosine kinase siRNA
gtaaatatgaaactagggtttga

SEQ ID NO: 9949 - DNA, 23 bp, Artificial Sequence
  Description of Artificial Sequence: Synthetic oligonucleotide
  Epidermal growth factor receptor (EGFR), ERBB1 phosphotyrosine kinase siRNA
taaatatgaaactagggtttgaa

SEQ ID NO: 9950 - DNA, 23 bp, Artificial Sequence
  Description of Artificial Sequence: Synthetic oligonucleotide
  Epidermal growth factor receptor (EGFR), ERBB1 phosphotyrosine kinase siRNA
aaatatgaaactagggtttgaaa

SEQ ID NO: 9951 - DNA, 23 bp, Artificial Sequence
  Description of Artificial Sequence: Synthetic oligonucleotide
  Epidermal growth factor receptor (EGFR), ERBB1 phosphotyrosine kinase siRNA
aatatgaaactagggtttgaaat

SEQ ID NO: 9952 - DNA, 23 bp, Artificial Sequence
  Description of Artificial Sequence: Synthetic oligonucleotide
  Epidermal growth factor receptor (EGFR), ERBB1 phosphotyrosine kinase siRNA
atatgaaactagggtttgaaatt

SEQ ID NO: 9953 - DNA, 23 bp, Artificial Sequence
  Description of Artificial Sequence: Synthetic oligonucleotide
  Epidermal growth factor receptor (EGFR), ERBB1 phosphotyrosine kinase siRNA
tatgaaactagggtttgaaattg

SEQ ID NO: 9954 - DNA, 23 bp, Artificial Sequence
  Description of Artificial Sequence: Synthetic oligonucleotide
  Epidermal growth factor receptor (EGFR), ERBB1 phosphotyrosine kinase siRNA
atgaaactagggtttgaaattga

SEQ ID NO: 9955 - DNA, 23 bp, Artificial Sequence
  Description of Artificial Sequence: Synthetic oligonucleotide
  Epidermal growth factor receptor (EGFR), ERBB1 phosphotyrosine kinase siRNA
tgaaactagggtttgaaattgat

SEQ ID NO: 9956 - DNA, 23 bp, Artificial Sequence
  Description of Artificial Sequence: Synthetic oligonucleotide
  Epidermal growth factor receptor (EGFR), ERBB1 phosphotyrosine kinase siRNA
gaaactagggtttgaaattgata

SEQ ID NO: 9957 - DNA, 23 bp, Artificial Sequence
  Description of Artificial Sequence: Synthetic oligonucleotide
  Epidermal growth factor receptor (EGFR), ERBB1 phosphotyrosine kinase siRNA
aaactagggtttgaaattgataa

SEQ ID NO: 9958 - DNA, 23 bp, Artificial Sequence
  Description of Artificial Sequence: Synthetic oligonucleotide
  Epidermal growth factor receptor (EGFR), ERBB1 phosphotyrosine kinase siRNA
aactagggtttgaaattgataat

SEQ ID NO: 9959 - DNA, 23 bp, Artificial Sequence
  Description of Artificial Sequence: Synthetic oligonucleotide
  Epidermal growth factor receptor (EGFR), ERBB1 phosphotyrosine kinase siRNA
actagggtttgaaattgataatg

SEQ ID NO: 9960 - DNA, 23 bp, Artificial Sequence
  Description of Artificial Sequence: Synthetic oligonucleotide
  Epidermal growth factor receptor (EGFR), ERBB1 phosphotyrosine kinase siRNA
ctagggtttgaaattgataatgc

SEQ ID NO: 9961 - DNA, 23 bp, Artificial Sequence
  Description of Artificial Sequence: Synthetic oligonucleotide
  Epidermal growth factor receptor (EGFR), ERBB1 phosphotyrosine kinase siRNA
tagggtttgaaattgataatgct

SEQ ID NO: 9962 - DNA, 23 bp, Artificial Sequence
  Description of Artificial Sequence: Synthetic oligonucleotide
  Epidermal growth factor receptor (EGFR), ERBB1 phosphotyrosine kinase siRNA
agggtttgaaattgataatgctt

SEQ ID NO: 9963 - DNA, 23 bp, Artificial Sequence
  Description of Artificial Sequence: Synthetic oligonucleotide
  Epidermal growth factor receptor (EGFR), ERBB1 phosphotyrosine kinase siRNA
gggtttgaaattgataatgcttt

SEQ ID NO: 9964 - DNA, 23 bp, Artificial Sequence
  Description of Artificial Sequence: Synthetic oligonucleotide
  Epidermal growth factor receptor (EGFR), ERBB1 phosphotyrosine kinase siRNA
ggtttgaaattgataatgctttc

SEQ ID NO: 9965 - DNA, 23 bp, Artificial Sequence
  Description of Artificial Sequence: Synthetic oligonucleotide
  Epidermal growth factor receptor (EGFR), ERBB1 phosphotyrosine kinase siRNA
gtttgaaattgataatgctttca

SEQ ID NO: 9966 - DNA, 23 bp, Artificial Sequence
  Description of Artificial Sequence: Synthetic oligonucleotide
  Epidermal growth factor receptor (EGFR), ERBB1 phosphotyrosine kinase siRNA
tttgaaattgataatgctttcac

SEQ ID NO: 9967 - DNA, 23 bp, Artificial Sequence
  Description of Artificial Sequence: Synthetic oligonucleotide
  Epidermal growth factor receptor (EGFR), ERBB1 phosphotyrosine kinase siRNA
ttgaaattgataatgctttcaca

SEQ ID NO: 9968 - DNA, 23 bp, Artificial Sequence
  Description of Artificial Sequence: Synthetic oligonucleotide
  Epidermal growth factor receptor (EGFR), ERBB1 phosphotyrosine kinase siRNA
tgaaattgataatgctttcacaa

SEQ ID NO: 9969 - DNA, 23 bp, Artificial Sequence
  Description of Artificial Sequence: Synthetic oligonucleotide
  Epidermal growth factor receptor (EGFR), ERBB1 phosphotyrosine kinase siRNA
gaaattgataatgctttcacaac

SEQ ID NO: 9970 - DNA, 23 bp, Artificial Sequence
  Description of Artificial Sequence: Synthetic oligonucleotide
  Epidermal growth factor receptor (EGFR), ERBB1 phosphotyrosine kinase siRNA
aaattgataatgctttcacaaca

SEQ ID NO: 9971 - DNA, 23 bp, Artificial Sequence
  Description of Artificial Sequence: Synthetic oligonucleotide
  Epidermal growth factor receptor (EGFR), ERBB1 phosphotyrosine kinase siRNA
aattgataatgctttcacaacat

SEQ ID NO: 9972 - DNA, 23 bp, Artificial Sequence
  Description of Artificial Sequence: Synthetic oligonucleotide
  Epidermal growth factor receptor (EGFR), ERBB1 phosphotyrosine kinase siRNA
attgataatgctttcacaacatt

SEQ ID NO: 9973 - DNA, 23 bp, Artificial Sequence
  Description of Artificial Sequence: Synthetic oligonucleotide
  Epidermal growth factor receptor (EGFR), ERBB1 phosphotyrosine kinase siRNA
ttgataatgctttcacaacattt

SEQ ID NO: 9974 - DNA, 23 bp, Artificial Sequence
  Description of Artificial Sequence: Synthetic oligonucleotide
  Epidermal growth factor receptor (EGFR), ERBB1 phosphotyrosine kinase siRNA
tgataatgctttcacaacatttg

SEQ ID NO: 9975 - DNA, 23 bp, Artificial Sequence
  Description of Artificial Sequence: Synthetic oligonucleotide
  Epidermal growth factor receptor (EGFR), ERBB1 phosphotyrosine kinase siRNA
gataatgctttcacaacatttgc

SEQ ID NO: 9976 - DNA, 23 bp, Artificial Sequence
  Description of Artificial Sequence: Synthetic oligonucleotide
  Epidermal growth factor receptor (EGFR), ERBB1 phosphotyrosine kinase siRNA
ataatgctttcacaacatttgca

SEQ ID NO: 9977 - DNA, 23 bp, Artificial Sequence
  Description of Artificial Sequence: Synthetic oligonucleotide
  Epidermal growth factor receptor (EGFR), ERBB1 phosphotyrosine kinase siRNA
taatgctttcacaacatttgcag

SEQ ID NO: 9978 - DNA, 23 bp, Artificial Sequence
  Description of Artificial Sequence: Synthetic oligonucleotide
  Epidermal growth factor receptor (EGFR), ERBB1 phosphotyrosine kinase siRNA
aatgctttcacaacatttgcaga

SEQ ID NO: 9979 - DNA, 23 bp, Artificial Sequence
  Description of Artificial Sequence: Synthetic oligonucleotide
  Epidermal growth factor receptor (EGFR), ERBB1 phosphotyrosine kinase siRNA
atgctttcacaacatttgcagat

SEQ ID NO: 9980 - DNA, 23 bp, Artificial Sequence
  Description of Artificial Sequence: Synthetic oligonucleotide
  Epidermal growth factor receptor (EGFR), ERBB1 phosphotyrosine kinase siRNA
tgctttcacaacatttgcagatg

SEQ ID NO: 9981 - DNA, 23 bp, Artificial Sequence
  Description of Artificial Sequence: Synthetic oligonucleotide
  Epidermal growth factor receptor (EGFR), ERBB1 phosphotyrosine kinase siRNA
gctttcacaacatttgcagatgt

SEQ ID NO: 9982 - DNA, 23 bp, Artificial Sequence
  Description of Artificial Sequence: Synthetic oligonucleotide
  Epidermal growth factor receptor (EGFR), ERBB1 phosphotyrosine kinase siRNA
ctttcacaacatttgcagatgtt

SEQ ID NO: 9983 - DNA, 23 bp, Artificial Sequence
  Description of Artificial Sequence: Synthetic oligonucleotide
  Epidermal growth factor receptor (EGFR), ERBB1 phosphotyrosine kinase siRNA
tttcacaacatttgcagatgttt

SEQ ID NO: 9984 - DNA, 23 bp, Artificial Sequence
  Description of Artificial Sequence: Synthetic oligonucleotide
  Epidermal growth factor receptor (EGFR), ERBB1 phosphotyrosine kinase siRNA
ttcacaacatttgcagatgtttt

SEQ ID NO: 9985 - DNA, 23 bp, Artificial Sequence
  Description of Artificial Sequence: Synthetic oligonucleotide
  Epidermal growth factor receptor (EGFR), ERBB1 phosphotyrosine kinase siRNA
tcacaacatttgcagatgtttta

SEQ ID NO: 9986 - DNA, 23 bp, Artificial Sequence
  Description of Artificial Sequence: Synthetic oligonucleotide
  Epidermal growth factor receptor (EGFR), ERBB1 phosphotyrosine kinase siRNA
cacaacatttgcagatgttttag

SEQ ID NO: 9987 - DNA, 23 bp, Artificial Sequence
  Description of Artificial Sequence: Synthetic oligonucleotide
  Epidermal growth factor receptor (EGFR), ERBB1 phosphotyrosine kinase siRNA
acaacatttgcagatgttttaga

SEQ ID NO: 9988 - DNA, 23 bp, Artificial Sequence
  Description of Artificial Sequence: Synthetic oligonucleotide
  Epidermal growth factor receptor (EGFR), ERBB1 phosphotyrosine kinase siRNA
caacatttgcagatgttttagaa

SEQ ID NO: 9989 - DNA, 23 bp, Artificial Sequence
  Description of Artificial Sequence: Synthetic oligonucleotide
  Epidermal growth factor receptor (EGFR), ERBB1 phosphotyrosine kinase siRNA
aacatttgcagatgttttagaag

SEQ ID NO: 9990 - DNA, 23 bp, Artificial Sequence
  Description of Artificial Sequence: Synthetic oligonucleotide
  Epidermal growth factor receptor (EGFR), ERBB1 phosphotyrosine kinase siRNA
acatttgcagatgttttagaagg

SEQ ID NO: 9991 - DNA, 23 bp, Artificial Sequence
  Description of Artificial Sequence: Synthetic oligonucleotide
  Epidermal growth factor receptor (EGFR), ERBB1 phosphotyrosine kinase siRNA
catttgcagatgttttagaagga

SEQ ID NO: 9992 - DNA, 23 bp, Artificial Sequence
  Description of Artificial Sequence: Synthetic oligonucleotide
  Epidermal growth factor receptor (EGFR), ERBB1 phosphotyrosine kinase siRNA
atttgcagatgttttagaaggaa

SEQ ID NO: 9993 - DNA, 23 bp, Artificial Sequence
  Description of Artificial Sequence: Synthetic oligonucleotide
  Epidermal growth factor receptor (EGFR), ERBB1 phosphotyrosine kinase siRNA
tttgcagatgttttagaaggaaa

SEQ ID NO: 9994 - DNA, 23 bp, Artificial Sequence
  Description of Artificial Sequence: Synthetic oligonucleotide
  Epidermal growth factor receptor (EGFR), ERBB1 phosphotyrosine kinase siRNA
ttgcagatgttttagaaggaaaa

SEQ ID NO: 9995 - DNA, 23 bp, Artificial Sequence
  Description of Artificial Sequence: Synthetic oligonucleotide
  Epidermal growth factor receptor (EGFR), ERBB1 phosphotyrosine kinase siRNA
tgcagatgttttagaaggaaaaa

SEQ ID NO: 9996 - DNA, 23 bp, Artificial Sequence
  Description of Artificial Sequence: Synthetic oligonucleotide
  Epidermal growth factor receptor (EGFR), ERBB1 phosphotyrosine kinase siRNA
gcagatgttttagaaggaaaaaa

SEQ ID NO: 9997 - DNA, 23 bp, Artificial Sequence
  Description of Artificial Sequence: Synthetic oligonucleotide
  Epidermal growth factor receptor (EGFR), ERBB1 phosphotyrosine kinase siRNA
cagatgttttagaaggaaaaaag

SEQ ID NO: 9998 - DNA, 23 bp, Artificial Sequence
  Description of Artificial Sequence: Synthetic oligonucleotide
  Epidermal growth factor receptor (EGFR), ERBB1 phosphotyrosine kinase siRNA
agatgttttagaaggaaaaaagt

SEQ ID NO: 9999 - DNA, 23 bp, Artificial Sequence
  Description of Artificial Sequence: Synthetic oligonucleotide
  Epidermal growth factor receptor (EGFR), ERBB1 phosphotyrosine kinase siRNA
gatgttttagaaggaaaaaagtt

SEQ ID NO: 10000 - DNA, 23 bp, Artificial Sequence
  Description of Artificial Sequence: Synthetic oligonucleotide
  Epidermal growth factor receptor (EGFR), ERBB1 phosphotyrosine kinase siRNA
atgttttagaaggaaaaaagttc

SEQ ID NO: 10001 - DNA, 23 bp, Artificial Sequence
  Description of Artificial Sequence: Synthetic oligonucleotide
  Epidermal growth factor receptor (EGFR), ERBB1 phosphotyrosine kinase siRNA
tgttttagaaggaaaaaagttcc

SEQ ID NO: 10002 - DNA, 23 bp, Artificial Sequence
  Description of Artificial Sequence: Synthetic oligonucleotide
  Epidermal growth factor receptor (EGFR), ERBB1 phosphotyrosine kinase siRNA
gttttagaaggaaaaaagttcct

SEQ ID NO: 10003 - DNA, 23 bp, Artificial Sequence
  Description of Artificial Sequence: Synthetic oligonucleotide
  Epidermal growth factor receptor (EGFR), ERBB1 phosphotyrosine kinase siRNA
ttttagaaggaaaaaagttcctt

SEQ ID NO: 10004 - DNA, 23 bp, Artificial Sequence
  Description of Artificial Sequence: Synthetic oligonucleotide
  Epidermal growth factor receptor (EGFR), ERBB1 phosphotyrosine kinase siRNA
tttagaaggaaaaaagttccttc

SEQ ID NO: 10005 - DNA, 23 bp, Artificial Sequence
  Description of Artificial Sequence: Synthetic oligonucleotide
  Epidermal growth factor receptor (EGFR), ERBB1 phosphotyrosine kinase siRNA
ttagaaggaaaaaagttccttcc

SEQ ID NO: 10006 - DNA, 23 bp, Artificial Sequence
  Description of Artificial Sequence: Synthetic oligonucleotide
  Epidermal growth factor receptor (EGFR), ERBB1 phosphotyrosine kinase siRNA
tagaaggaaaaaagttccttcct

SEQ ID NO: 10007 - DNA, 23 bp, Artificial Sequence
  Description of Artificial Sequence: Synthetic oligonucleotide
  Epidermal growth factor receptor (EGFR), ERBB1 phosphotyrosine kinase siRNA
agaaggaaaaaagttccttccta

SEQ ID NO: 10008 - DNA, 23 bp, Artificial Sequence
  Description of Artificial Sequence: Synthetic oligonucleotide
  Epidermal growth factor receptor (EGFR), ERBB1 phosphotyrosine kinase siRNA
gaaggaaaaaagttccttcctaa

SEQ ID NO: 10009 - DNA, 23 bp, Artificial Sequence
  Description of Artificial Sequence: Synthetic oligonucleotide
  Epidermal growth factor receptor (EGFR), ERBB1 phosphotyrosine kinase siRNA
aaggaaaaaagttccttcctaaa

SEQ ID NO: 10010 - DNA, 23 bp, Artificial Sequence
  Description of Artificial Sequence: Synthetic oligonucleotide
  Epidermal growth factor receptor (EGFR), ERBB1 phosphotyrosine kinase siRNA
aggaaaaaagttccttcctaaaa

SEQ ID NO: 10011 - DNA, 23 bp, Artificial Sequence
  Description of Artificial Sequence: Synthetic oligonucleotide
  Epidermal growth factor receptor (EGFR), ERBB1 phosphotyrosine kinase siRNA
ggaaaaaagttccttcctaaaat

SEQ ID NO: 10012 - DNA, 23 bp, Artificial Sequence
  Description of Artificial Sequence: Synthetic oligonucleotide
  Epidermal growth factor receptor (EGFR), ERBB1 phosphotyrosine kinase siRNA
gaaaaaagttccttcctaaaata

SEQ ID NO: 10013 - DNA, 23 bp, Artificial Sequence
  Description of Artificial Sequence: Synthetic oligonucleotide
  Epidermal growth factor receptor (EGFR), ERBB1 phosphotyrosine kinase siRNA
aaaaaagttccttcctaaaataa

SEQ ID NO: 10014 - DNA, 23 bp, Artificial Sequence
  Description of Artificial Sequence: Synthetic oligonucleotide
  Epidermal growth factor receptor (EGFR), ERBB1 phosphotyrosine kinase siRNA
aaaaagttccttcctaaaataat

SEQ ID NO: 10015 - DNA, 23 bp, Artificial Sequence
  Description of Artificial Sequence: Synthetic oligonucleotide
  Epidermal growth factor receptor (EGFR), ERBB1 phosphotyrosine kinase siRNA
aaaagttccttcctaaaataatt

SEQ ID NO: 10016 - DNA, 23 bp, Artificial Sequence
  Description of Artificial Sequence: Synthetic oligonucleotide
  Epidermal growth factor receptor (EGFR), ERBB1 phosphotyrosine kinase siRNA
aaagttccttcctaaaataattt

SEQ ID NO: 10017 - DNA, 23 bp, Artificial Sequence
  Description of Artificial Sequence: Synthetic oligonucleotide
  Epidermal growth factor receptor (EGFR), ERBB1 phosphotyrosine kinase siRNA
aagttccttcctaaaataatttc

SEQ ID NO: 10018 - DNA, 23 bp, Artificial Sequence
  Description of Artificial Sequence: Synthetic oligonucleotide
  Epidermal growth factor receptor (EGFR), ERBB1 phosphotyrosine kinase siRNA
agttccttcctaaaataatttct

SEQ ID NO: 10019 - DNA, 23 bp, Artificial Sequence
  Description of Artificial Sequence: Synthetic oligonucleotide
  Epidermal growth factor receptor (EGFR), ERBB1 phosphotyrosine kinase siRNA
gttccttcctaaaataatttctc

SEQ ID NO: 10020 - DNA, 23 bp, Artificial Sequence
  Description of Artificial Sequence: Synthetic oligonucleotide
  Epidermal growth factor receptor (EGFR), ERBB1 phosphotyrosine kinase siRNA
ttccttcctaaaataatttctct

SEQ ID NO: 10021 - DNA, 23 bp, Artificial Sequence
  Description of Artificial Sequence: Synthetic oligonucleotide
  Epidermal growth factor receptor (EGFR), ERBB1 phosphotyrosine kinase siRNA
tccttcctaaaataatttctcta

SEQ ID NO: 10022 - DNA, 23 bp, Artificial Sequence
  Description of Artificial Sequence: Synthetic oligonucleotide
  Epidermal growth factor receptor (EGFR), ERBB1 phosphotyrosine kinase siRNA
ccttcctaaaataatttctctac

SEQ ID NO: 10023 - DNA, 23 bp, Artificial Sequence
  Description of Artificial Sequence: Synthetic oligonucleotide
  Epidermal growth factor receptor (EGFR), ERBB1 phosphotyrosine kinase siRNA
cttcctaaaataatttctctaca

SEQ ID NO: 10024 - DNA, 23 bp, Artificial Sequence
  Description of Artificial Sequence: Synthetic oligonucleotide
  Epidermal growth factor receptor (EGFR), ERBB1 phosphotyrosine kinase siRNA
ttcctaaaataatttctctacaa

SEQ ID NO: 10025 - DNA, 23 bp, Artificial Sequence
  Description of Artificial Sequence: Synthetic oligonucleotide
  Epidermal growth factor receptor (EGFR), ERBB1 phosphotyrosine kinase siRNA
tcctaaaataatttctctacaat

SEQ ID NO: 10026 - DNA, 23 bp, Artificial Sequence
  Description of Artificial Sequence: Synthetic oligonucleotide
  Epidermal growth factor receptor (EGFR), ERBB1 phosphotyrosine kinase siRNA
cctaaaataatttctctacaatt

SEQ ID NO: 10027 - DNA, 23 bp, Artificial Sequence
  Description of Artificial Sequence: Synthetic oligonucleotide
  Epidermal growth factor receptor (EGFR), ERBB1 phosphotyrosine kinase siRNA
ctaaaataatttctctacaattg

SEQ ID NO: 10028 - DNA, 23 bp, Artificial Sequence
  Description of Artificial Sequence: Synthetic oligonucleotide
  Epidermal growth factor receptor (EGFR), ERBB1 phosphotyrosine kinase siRNA
taaaataatttctctacaattgg

SEQ ID NO: 10029 - DNA, 23 bp, Artificial Sequence
  Description of Artificial Sequence: Synthetic oligonucleotide
  Epidermal growth factor receptor (EGFR), ERBB1 phosphotyrosine kinase siRNA
aaaataatttctctacaattgga

SEQ ID NO: 10030 - DNA, 23 bp, Artificial Sequence
  Description of Artificial Sequence: Synthetic oligonucleotide
  Epidermal growth factor receptor (EGFR), ERBB1 phosphotyrosine kinase siRNA
aaataatttctctacaattggaa

SEQ ID NO: 10031 - DNA, 23 bp, Artificial Sequence
  Description of Artificial Sequence: Synthetic oligonucleotide
  Epidermal growth factor receptor (EGFR), ERBB1 phosphotyrosine kinase siRNA
aataatttctctacaattggaag

SEQ ID NO: 10032 - DNA, 23 bp, Artificial Sequence
  Description of Artificial Sequence: Synthetic oligonucleotide
  Epidermal growth factor receptor (EGFR), ERBB1 phosphotyrosine kinase siRNA
ataatttctctacaattggaaga

SEQ ID NO: 10033 - DNA, 23 bp, Artificial Sequence
  Description of Artificial Sequence: Synthetic oligonucleotide
  Epidermal growth factor receptor (EGFR), ERBB1 phosphotyrosine kinase siRNA
taatttctctacaattggaagat

SEQ ID NO: 10034 - DNA, 23 bp, Artificial Sequence
  Description of Artificial Sequence: Synthetic oligonucleotide
  Epidermal growth factor receptor (EGFR), ERBB1 phosphotyrosine kinase siRNA
aatttctctacaattggaagatt

SEQ ID NO: 10035 - DNA, 23 bp, Artificial Sequence
  Description of Artificial Sequence: Synthetic oligonucleotide
  Epidermal growth factor receptor (EGFR), ERBB1 phosphotyrosine kinase siRNA
atttctctacaattggaagattg

SEQ ID NO: 10036 - DNA, 23 bp, Artificial Sequence
  Description of Artificial Sequence: Synthetic oligonucleotide
  Epidermal growth factor receptor (EGFR), ERBB1 phosphotyrosine kinase siRNA
tttctctacaattggaagattgg

SEQ ID NO: 10037 - DNA, 23 bp, Artificial Sequence
  Description of Artificial Sequence: Synthetic oligonucleotide
  Epidermal growth factor receptor (EGFR), ERBB1 phosphotyrosine kinase siRNA
ttctctacaattggaagattgga

SEQ ID NO: 10038 - DNA, 23 bp, Artificial Sequence
  Description of Artificial Sequence: Synthetic oligonucleotide
  Epidermal growth factor receptor (EGFR), ERBB1 phosphotyrosine kinase siRNA
tctctacaattggaagattggaa

SEQ ID NO: 10039 - DNA, 23 bp, Artificial Sequence
  Description of Artificial Sequence: Synthetic oligonucleotide
  Epidermal growth factor receptor (EGFR), ERBB1 phosphotyrosine kinase siRNA
ctctacaattggaagattggaag

SEQ ID NO: 10040 - DNA, 23 bp, Artificial Sequence
  Description of Artificial Sequence: Synthetic oligonucleotide
  Epidermal growth factor receptor (EGFR), ERBB1 phosphotyrosine kinase siRNA
tctacaattggaagattggaaga

SEQ ID NO: 10041 - DNA, 23 bp, Artificial Sequence
  Description of Artificial Sequence: Synthetic oligonucleotide
  Epidermal growth factor receptor (EGFR), ERBB1 phosphotyrosine kinase siRNA
ctacaattggaagattggaagat

SEQ ID NO: 10042 - DNA, 23 bp, Artificial Sequence
  Description of Artificial Sequence: Synthetic oligonucleotide
  Epidermal growth factor receptor (EGFR), ERBB1 phosphotyrosine kinase siRNA
tacaattggaagattggaagatt

SEQ ID NO: 10043 - DNA, 23 bp, Artificial Sequence
  Description of Artificial Sequence: Synthetic oligonucleotide
  Epidermal growth factor receptor (EGFR), ERBB1 phosphotyrosine kinase siRNA
acaattggaagattggaagattc

SEQ ID NO: 10044 - DNA, 23 bp, Artificial Sequence
  Description of Artificial Sequence: Synthetic oligonucleotide
  Epidermal growth factor receptor (EGFR), ERBB1 phosphotyrosine kinase siRNA
caattggaagattggaagattca

SEQ ID NO: 10045 - DNA, 23 bp, Artificial Sequence
  Description of Artificial Sequence: Synthetic oligonucleotide
  Epidermal growth factor receptor (EGFR), ERBB1 phosphotyrosine kinase siRNA
aattggaagattggaagattcag

SEQ ID NO: 10046 - DNA, 23 bp, Artificial Sequence
  Description of Artificial Sequence: Synthetic oligonucleotide
  Epidermal growth factor receptor (EGFR), ERBB1 phosphotyrosine kinase siRNA
attggaagattggaagattcagc

SEQ ID NO: 10047 - DNA, 23 bp, Artificial Sequence
  Description of Artificial Sequence: Synthetic oligonucleotide
  Epidermal growth factor receptor (EGFR), ERBB1 phosphotyrosine kinase siRNA
ttggaagattggaagattcagct

SEQ ID NO: 10048 - DNA, 23 bp, Artificial Sequence
  Description of Artificial Sequence: Synthetic oligonucleotide
  Epidermal growth factor receptor (EGFR), ERBB1 phosphotyrosine kinase siRNA
tggaagattggaagattcagcta

SEQ ID NO: 10049 - DNA, 23 bp, Artificial Sequence
  Description of Artificial Sequence: Synthetic oligonucleotide
  Epidermal growth factor receptor (EGFR), ERBB1 phosphotyrosine kinase siRNA
ggaagattggaagattcagctag

SEQ ID NO: 10050 - DNA, 23 bp, Artificial Sequence
  Description of Artificial Sequence: Synthetic oligonucleotide
  Epidermal growth factor receptor (EGFR), ERBB1 phosphotyrosine kinase siRNA
gaagattggaagattcagctagt

SEQ ID NO: 10051 - DNA, 23 bp, Artificial Sequence
  Description of Artificial Sequence: Synthetic oligonucleotide
  Epidermal growth factor receptor (EGFR), ERBB1 phosphotyrosine kinase siRNA
aagattggaagattcagctagtt

SEQ ID NO: 10052 - DNA, 23 bp, Artificial Sequence
  Description of Artificial Sequence: Synthetic oligonucleotide
  Epidermal growth factor receptor (EGFR), ERBB1 phosphotyrosine kinase siRNA
agattggaagattcagctagtta

SEQ ID NO: 10053 - DNA, 23 bp, Artificial Sequence
  Description of Artificial Sequence: Synthetic oligonucleotide
  Epidermal growth factor receptor (EGFR), ERBB1 phosphotyrosine kinase siRNA
gattggaagattcagctagttag

SEQ ID NO: 10054 - DNA, 23 bp, Artificial Sequence
  Description of Artificial Sequence: Synthetic oligonucleotide
  Epidermal growth factor receptor (EGFR), ERBB1 phosphotyrosine kinase siRNA
attggaagattcagctagttagg

SEQ ID NO: 10055 - DNA, 23 bp, Artificial Sequence
  Description of Artificial Sequence: Synthetic oligonucleotide
  Epidermal growth factor receptor (EGFR), ERBB1 phosphotyrosine kinase siRNA
ttggaagattcagctagttagga

SEQ ID NO: 10056 - DNA, 23 bp, Artificial Sequence
  Description of Artificial Sequence: Synthetic oligonucleotide
  Epidermal growth factor receptor (EGFR), ERBB1 phosphotyrosine kinase siRNA
tggaagattcagctagttaggag

SEQ ID NO: 10057 - DNA, 23 bp, Artificial Sequence
  Description of Artificial Sequence: Synthetic oligonucleotide
  Epidermal growth factor receptor (EGFR), ERBB1 phosphotyrosine kinase siRNA
ggaagattcagctagttaggagc

SEQ ID NO: 10058 - DNA, 23 bp, Artificial Sequence
  Description of Artificial Sequence: Synthetic oligonucleotide
  Epidermal growth factor receptor (EGFR), ERBB1 phosphotyrosine kinase siRNA
gaagattcagctagttaggagcc

SEQ ID NO: 10059 - DNA, 23 bp, Artificial Sequence
  Description of Artificial Sequence: Synthetic oligonucleotide
  Epidermal growth factor receptor (EGFR), ERBB1 phosphotyrosine kinase siRNA
aagattcagctagttaggagccc

SEQ ID NO: 10060 - DNA, 23 bp, Artificial Sequence
  Description of Artificial Sequence: Synthetic oligonucleotide
  Epidermal growth factor receptor (EGFR), ERBB1 phosphotyrosine kinase siRNA
agattcagctagttaggagccca

SEQ ID NO: 10061 - DNA, 23 bp, Artificial Sequence
  Description of Artificial Sequence: Synthetic oligonucleotide
  Epidermal growth factor receptor (EGFR), ERBB1 phosphotyrosine kinase siRNA
gattcagctagttaggagcccac

SEQ ID NO: 10062 - DNA, 23 bp, Artificial Sequence
  Description of Artificial Sequence: Synthetic oligonucleotide
  Epidermal growth factor receptor (EGFR), ERBB1 phosphotyrosine kinase siRNA
attcagctagttaggagcccacc

SEQ ID NO: 10063 - DNA, 23 bp, Artificial Sequence
  Description of Artificial Sequence: Synthetic oligonucleotide
  Epidermal growth factor receptor (EGFR), ERBB1 phosphotyrosine kinase siRNA
ttcagctagttaggagcccacct

SEQ ID NO: 10064 - DNA, 23 bp, Artificial Sequence
  Description of Artificial Sequence: Synthetic oligonucleotide
  Epidermal growth factor receptor (EGFR), ERBB1 phosphotyrosine kinase siRNA
tcagctagttaggagcccacctt

SEQ ID NO: 10065 - DNA, 23 bp, Artificial Sequence
  Description of Artificial Sequence: Synthetic oligonucleotide
  Epidermal growth factor receptor (EGFR), ERBB1 phosphotyrosine kinase siRNA
cagctagttaggagcccaccttt

SEQ ID NO: 10066 - DNA, 23 bp, Artificial Sequence
  Description of Artificial Sequence: Synthetic oligonucleotide
  Epidermal growth factor receptor (EGFR), ERBB1 phosphotyrosine kinase siRNA
agctagttaggagcccacctttt

SEQ ID NO: 10067 - DNA, 23 bp, Artificial Sequence
  Description of Artificial Sequence: Synthetic oligonucleotide
  Epidermal growth factor receptor (EGFR), ERBB1 phosphotyrosine kinase siRNA
gctagttaggagcccaccttttt

SEQ ID NO: 10068 - DNA, 23 bp, Artificial Sequence
  Description of Artificial Sequence: Synthetic oligonucleotide
  Epidermal growth factor receptor (EGFR), ERBB1 phosphotyrosine kinase siRNA
ctagttaggagcccacctttttt

SEQ ID NO: 10069 - DNA, 23 bp, Artificial Sequence
  Description of Artificial Sequence: Synthetic oligonucleotide
  Epidermal growth factor receptor (EGFR), ERBB1 phosphotyrosine kinase siRNA
tagttaggagcccaccttttttc

SEQ ID NO: 10070 - DNA, 23 bp, Artificial Sequence
  Description of Artificial Sequence: Synthetic oligonucleotide
  Epidermal growth factor receptor (EGFR), ERBB1 phosphotyrosine kinase siRNA
agttaggagcccaccttttttcc

SEQ ID NO: 10071 - DNA, 23 bp, Artificial Sequence
  Description of Artificial Sequence: Synthetic oligonucleotide
  Epidermal growth factor receptor (EGFR), ERBB1 phosphotyrosine kinase siRNA
gttaggagcccaccttttttcct

SEQ ID NO: 10072 - DNA, 23 bp, Artificial Sequence
  Description of Artificial Sequence: Synthetic oligonucleotide
  Epidermal growth factor receptor (EGFR), ERBB1 phosphotyrosine kinase siRNA
ttaggagcccaccttttttccta

SEQ ID NO: 10073 - DNA, 23 bp, Artificial Sequence
  Description of Artificial Sequence: Synthetic oligonucleotide
  Epidermal growth factor receptor (EGFR), ERBB1 phosphotyrosine kinase siRNA
taggagcccaccttttttcctaa

SEQ ID NO: 10074 - DNA, 23 bp, Artificial Sequence
  Description of Artificial Sequence: Synthetic oligonucleotide
  Epidermal growth factor receptor (EGFR), ERBB1 phosphotyrosine kinase siRNA
aggagcccaccttttttcctaat

SEQ ID NO: 10075 - DNA, 23 bp, Artificial Sequence
  Description of Artificial Sequence: Synthetic oligonucleotide
  Epidermal growth factor receptor (EGFR), ERBB1 phosphotyrosine kinase siRNA
ggagcccaccttttttcctaatc

SEQ ID NO: 10076 - DNA, 23 bp, Artificial Sequence
  Description of Artificial Sequence: Synthetic oligonucleotide
  Epidermal growth factor receptor (EGFR), ERBB1 phosphotyrosine kinase siRNA
gagcccaccttttttcctaatct

SEQ ID NO: 10077 - DNA, 23 bp, Artificial Sequence
  Description of Artificial Sequence: Synthetic oligonucleotide
  Epidermal growth factor receptor (EGFR), ERBB1 phosphotyrosine kinase siRNA
agcccaccttttttcctaatctg

SEQ ID NO: 10078 - DNA, 23 bp, Artificial Sequence
  Description of Artificial Sequence: Synthetic oligonucleotide
  Epidermal growth factor receptor (EGFR), ERBB1 phosphotyrosine kinase siRNA
gcccaccttttttcctaatctgt

SEQ ID NO: 10079 - DNA, 23 bp, Artificial Sequence
  Description of Artificial Sequence: Synthetic oligonucleotide
  Epidermal growth factor receptor (EGFR), ERBB1 phosphotyrosine kinase siRNA
cccaccttttttcctaatctgtg

SEQ ID NO: 10080 - DNA, 23 bp, Artificial Sequence
  Description of Artificial Sequence: Synthetic oligonucleotide
  Epidermal growth factor receptor (EGFR), ERBB1 phosphotyrosine kinase siRNA
ccaccttttttcctaatctgtgt

SEQ ID NO: 10081 - DNA, 23 bp, Artificial Sequence
  Description of Artificial Sequence: Synthetic oligonucleotide
  Epidermal growth factor receptor (EGFR), ERBB1 phosphotyrosine kinase siRNA
caccttttttcctaatctgtgtg

SEQ ID NO: 10082 - DNA, 23 bp, Artificial Sequence
  Description of Artificial Sequence: Synthetic oligonucleotide
  Epidermal growth factor receptor (EGFR), ERBB1 phosphotyrosine kinase siRNA
accttttttcctaatctgtgtgt

SEQ ID NO: 10083 - DNA, 23 bp, Artificial Sequence
  Description of Artificial Sequence: Synthetic oligonucleotide
  Epidermal growth factor receptor (EGFR), ERBB1 phosphotyrosine kinase siRNA
ccttttttcctaatctgtgtgtg

SEQ ID NO: 10084 - DNA, 23 bp, Artificial Sequence
  Description of Artificial Sequence: Synthetic oligonucleotide
  Epidermal growth factor receptor (EGFR), ERBB1 phosphotyrosine kinase siRNA
cttttttcctaatctgtgtgtgc

SEQ ID NO: 10085 - DNA, 23 bp, Artificial Sequence
  Description of Artificial Sequence: Synthetic oligonucleotide
  Epidermal growth factor receptor (EGFR), ERBB1 phosphotyrosine kinase siRNA
ttttttcctaatctgtgtgtgcc

SEQ ID NO: 10086 - DNA, 23 bp, Artificial Sequence
  Description of Artificial Sequence: Synthetic oligonucleotide
  Epidermal growth factor receptor (EGFR), ERBB1 phosphotyrosine kinase siRNA
tttttcctaatctgtgtgtgccc

SEQ ID NO: 10087 - DNA, 23 bp, Artificial Sequence
  Description of Artificial Sequence: Synthetic oligonucleotide
  Epidermal growth factor receptor (EGFR), ERBB1 phosphotyrosine kinase siRNA
ttttcctaatctgtgtgtgccct

SEQ ID NO: 10088 - DNA, 23 bp, Artificial Sequence
  Description of Artificial Sequence: Synthetic oligonucleotide
  Epidermal growth factor receptor (EGFR), ERBB1 phosphotyrosine kinase siRNA
tttcctaatctgtgtgtgccctg

SEQ ID NO: 10089 - DNA, 23 bp, Artificial Sequence
  Description of Artificial Sequence: Synthetic oligonucleotide
  Epidermal growth factor receptor (EGFR), ERBB1 phosphotyrosine kinase siRNA
ttcctaatctgtgtgtgccctgt

SEQ ID NO: 10090 - DNA, 23 bp, Artificial Sequence
  Description of Artificial Sequence: Synthetic oligonucleotide
  Epidermal growth factor receptor (EGFR), ERBB1 phosphotyrosine kinase siRNA
tcctaatctgtgtgtgccctgta

SEQ ID NO: 10091 - DNA, 23 bp, Artificial Sequence
  Description of Artificial Sequence: Synthetic oligonucleotide
  Epidermal growth factor receptor (EGFR), ERBB1 phosphotyrosine kinase siRNA
cctaatctgtgtgtgccctgtaa

SEQ ID NO: 10092 - DNA, 23 bp, Artificial Sequence
  Description of Artificial Sequence: Synthetic oligonucleotide
  Epidermal growth factor receptor (EGFR), ERBB1 phosphotyrosine kinase siRNA
ctaatctgtgtgtgccctgtaac

SEQ ID NO: 10093 - DNA, 23 bp, Artificial Sequence
  Description of Artificial Sequence: Synthetic oligonucleotide
  Epidermal growth factor receptor (EGFR), ERBB1 phosphotyrosine kinase siRNA
taatctgtgtgtgccctgtaacc

SEQ ID NO: 10094 - DNA, 23 bp, Artificial Sequence
  Description of Artificial Sequence: Synthetic oligonucleotide
  Epidermal growth factor receptor (EGFR), ERBB1 phosphotyrosine kinase siRNA
aatctgtgtgtgccctgtaacct

SEQ ID NO: 10095 - DNA, 23 bp, Artificial Sequence
  Description of Artificial Sequence: Synthetic oligonucleotide
  Epidermal growth factor receptor (EGFR), ERBB1 phosphotyrosine kinase siRNA
atctgtgtgtgccctgtaacctg

SEQ ID NO: 10096 - DNA, 23 bp, Artificial Sequence
  Description of Artificial Sequence: Synthetic oligonucleotide
  Epidermal growth factor receptor (EGFR), ERBB1 phosphotyrosine kinase siRNA
tctgtgtgtgccctgtaacctga

SEQ ID NO: 10097 - DNA, 23 bp, Artificial Sequence
  Description of Artificial Sequence: Synthetic oligonucleotide
  Epidermal growth factor receptor (EGFR), ERBB1 phosphotyrosine kinase siRNA
ctgtgtgtgccctgtaacctgac

SEQ ID NO: 10098 - DNA, 23 bp, Artificial Sequence
  Description of Artificial Sequence: Synthetic oligonucleotide
  Epidermal growth factor receptor (EGFR), ERBB1 phosphotyrosine kinase siRNA
tgtgtgtgccctgtaacctgact

SEQ ID NO: 10099 - DNA, 23 bp, Artificial Sequence
  Description of Artificial Sequence: Synthetic oligonucleotide
  Epidermal growth factor receptor (EGFR), ERBB1 phosphotyrosine kinase siRNA
gtgtgtgccctgtaacctgactg

SEQ ID NO: 10100 - DNA, 23 bp, Artificial Sequence
  Description of Artificial Sequence: Synthetic oligonucleotide
  Epidermal growth factor receptor (EGFR), ERBB1 phosphotyrosine kinase siRNA
tgtgtgccctgtaacctgactgg

SEQ ID NO: 10101 - DNA, 23 bp, Artificial Sequence
  Description of Artificial Sequence: Synthetic oligonucleotide
  Epidermal growth factor receptor (EGFR), ERBB1 phosphotyrosine kinase siRNA
gtgtgccctgtaacctgactggt

SEQ ID NO: 10102 - DNA, 23 bp, Artificial Sequence
  Description of Artificial Sequence: Synthetic oligonucleotide
  Epidermal growth factor receptor (EGFR), ERBB1 phosphotyrosine kinase siRNA
tgtgccctgtaacctgactggtt

SEQ ID NO: 10103 - DNA, 23 bp, Artificial Sequence
  Description of Artificial Sequence: Synthetic oligonucleotide
  Epidermal growth factor receptor (EGFR), ERBB1 phosphotyrosine kinase siRNA
gtgccctgtaacctgactggtta

SEQ ID NO: 10104 - DNA, 23 bp, Artificial Sequence
  Description of Artificial Sequence: Synthetic oligonucleotide
  Epidermal growth factor receptor (EGFR), ERBB1 phosphotyrosine kinase siRNA
tgccctgtaacctgactggttaa

SEQ ID NO: 10105 - DNA, 23 bp, Artificial Sequence
  Description of Artificial Sequence: Synthetic oligonucleotide
  Epidermal growth factor receptor (EGFR), ERBB1 phosphotyrosine kinase siRNA
gccctgtaacctgactggttaac

SEQ ID NO: 10106 - DNA, 23 bp, Artificial Sequence
  Description of Artificial Sequence: Synthetic oligonucleotide
  Epidermal growth factor receptor (EGFR), ERBB1 phosphotyrosine kinase siRNA
ccctgtaacctgactggttaaca

SEQ ID NO: 10107 - DNA, 23 bp, Artificial Sequence
  Description of Artificial Sequence: Synthetic oligonucleotide
  Epidermal growth factor receptor (EGFR), ERBB1 phosphotyrosine kinase siRNA
cctgtaacctgactggttaacag

SEQ ID NO: 10108 - DNA, 23 bp, Artificial Sequence
  Description of Artificial Sequence: Synthetic oligonucleotide
  Epidermal growth factor receptor (EGFR), ERBB1 phosphotyrosine kinase siRNA
ctgtaacctgactggttaacagc

SEQ ID NO: 10109 - DNA, 23 bp, Artificial Sequence
  Description of Artificial Sequence: Synthetic oligonucleotide
  Epidermal growth factor receptor (EGFR), ERBB1 phosphotyrosine kinase siRNA
tgtaacctgactggttaacagca

SEQ ID NO: 10110 - DNA, 23 bp, Artificial Sequence
  Description of Artificial Sequence: Synthetic oligonucleotide
  Epidermal growth factor receptor (EGFR), ERBB1 phosphotyrosine kinase siRNA
gtaacctgactggttaacagcag

SEQ ID NO: 10111 - DNA, 23 bp, Artificial Sequence
  Description of Artificial Sequence: Synthetic oligonucleotide
  Epidermal growth factor receptor (EGFR), ERBB1 phosphotyrosine kinase siRNA
taacctgactggttaacagcagt

SEQ ID NO: 10112 - DNA, 23 bp, Artificial Sequence
  Description of Artificial Sequence: Synthetic oligonucleotide
  Epidermal growth factor receptor (EGFR), ERBB1 phosphotyrosine kinase siRNA
aacctgactggttaacagcagtc

SEQ ID NO: 10113 - DNA, 23 bp, Artificial Sequence
  Description of Artificial Sequence: Synthetic oligonucleotide
  Epidermal growth factor receptor (EGFR), ERBB1 phosphotyrosine kinase siRNA
acctgactggttaacagcagtcc

SEQ ID NO: 10114 - DNA, 23 bp, Artificial Sequence
  Description of Artificial Sequence: Synthetic oligonucleotide
  Epidermal growth factor receptor (EGFR), ERBB1 phosphotyrosine kinase siRNA
cctgactggttaacagcagtcct

SEQ ID NO: 10115 - DNA, 23 bp, Artificial Sequence
  Description of Artificial Sequence: Synthetic oligonucleotide
  Epidermal growth factor receptor (EGFR), ERBB1 phosphotyrosine kinase siRNA
ctgactggttaacagcagtcctt

SEQ ID NO: 10116 - DNA, 23 bp, Artificial Sequence
  Description of Artificial Sequence: Synthetic oligonucleotide
  Epidermal growth factor receptor (EGFR), ERBB1 phosphotyrosine kinase siRNA
tgactggttaacagcagtccttt

SEQ ID NO: 10117 - DNA, 23 bp, Artificial Sequence
  Description of Artificial Sequence: Synthetic oligonucleotide
  Epidermal growth factor receptor (EGFR), ERBB1 phosphotyrosine kinase siRNA
gactggttaacagcagtcctttg

SEQ ID NO: 10118 - DNA, 23 bp, Artificial Sequence
  Description of Artificial Sequence: Synthetic oligonucleotide
  Epidermal growth factor receptor (EGFR), ERBB1 phosphotyrosine kinase siRNA
actggttaacagcagtcctttgt

SEQ ID NO: 10119 - DNA, 23 bp, Artificial Sequence
  Description of Artificial Sequence: Synthetic oligonucleotide
  Epidermal growth factor receptor (EGFR), ERBB1 phosphotyrosine kinase siRNA
ctggttaacagcagtcctttgta

SEQ ID NO: 10120 - DNA, 23 bp, Artificial Sequence
  Description of Artificial Sequence: Synthetic oligonucleotide
  Epidermal growth factor receptor (EGFR), ERBB1 phosphotyrosine kinase siRNA
tggttaacagcagtcctttgtaa

SEQ ID NO: 10121 - DNA, 23 bp, Artificial Sequence
  Description of Artificial Sequence: Synthetic oligonucleotide
  Epidermal growth factor receptor (EGFR), ERBB1 phosphotyrosine kinase siRNA
ggttaacagcagtcctttgtaaa

SEQ ID NO: 10122 - DNA, 23 bp, Artificial Sequence
  Description of Artificial Sequence: Synthetic oligonucleotide
  Epidermal growth factor receptor (EGFR), ERBB1 phosphotyrosine kinase siRNA
gttaacagcagtcctttgtaaac

SEQ ID NO: 10123 - DNA, 23 bp, Artificial Sequence
  Description of Artificial Sequence: Synthetic oligonucleotide
  Epidermal growth factor receptor (EGFR), ERBB1 phosphotyrosine kinase siRNA
ttaacagcagtcctttgtaaaca

SEQ ID NO: 10124 - DNA, 23 bp, Artificial Sequence
  Description of Artificial Sequence: Synthetic oligonucleotide
  Epidermal growth factor receptor (EGFR), ERBB1 phosphotyrosine kinase siRNA
taacagcagtcctttgtaaacag

SEQ ID NO: 10125 - DNA, 23 bp, Artificial Sequence
  Description of Artificial Sequence: Synthetic oligonucleotide
  Epidermal growth factor receptor (EGFR), ERBB1 phosphotyrosine kinase siRNA
aacagcagtcctttgtaaacagt

SEQ ID NO: 10126 - DNA, 23 bp, Artificial Sequence
  Description of Artificial Sequence: Synthetic oligonucleotide
  Epidermal growth factor receptor (EGFR), ERBB1 phosphotyrosine kinase siRNA
acagcagtcctttgtaaacagtg

SEQ ID NO: 10127 - DNA, 23 bp, Artificial Sequence
  Description of Artificial Sequence: Synthetic oligonucleotide
  Epidermal growth factor receptor (EGFR), ERBB1 phosphotyrosine kinase siRNA
cagcagtcctttgtaaacagtgt

SEQ ID NO: 10128 - DNA, 23 bp, Artificial Sequence
  Description of Artificial Sequence: Synthetic oligonucleotide
  Epidermal growth factor receptor (EGFR), ERBB1 phosphotyrosine kinase siRNA
agcagtcctttgtaaacagtgtt

SEQ ID NO: 10129 - DNA, 23 bp, Artificial Sequence
  Description of Artificial Sequence: Synthetic oligonucleotide
  Epidermal growth factor receptor (EGFR), ERBB1 phosphotyrosine kinase siRNA
gcagtcctttgtaaacagtgttt

SEQ ID NO: 10130 - DNA, 23 bp, Artificial Sequence
  Description of Artificial Sequence: Synthetic oligonucleotide
  Epidermal growth factor receptor (EGFR), ERBB1 phosphotyrosine kinase siRNA
cagtcctttgtaaacagtgtttt

SEQ ID NO: 10131 - DNA, 23 bp, Artificial Sequence
  Description of Artificial Sequence: Synthetic oligonucleotide
  Epidermal growth factor receptor (EGFR), ERBB1 phosphotyrosine kinase siRNA
agtcctttgtaaacagtgtttta

SEQ ID NO: 10132 - DNA, 23 bp, Artificial Sequence
  Description of Artificial Sequence: Synthetic oligonucleotide
  Epidermal growth factor receptor (EGFR), ERBB1 phosphotyrosine kinase siRNA
gtcctttgtaaacagtgttttaa

SEQ ID NO: 10133 - DNA, 23 bp, Artificial Sequence
  Description of Artificial Sequence: Synthetic oligonucleotide
  Epidermal growth factor receptor (EGFR), ERBB1 phosphotyrosine kinase siRNA
tcctttgtaaacagtgttttaaa

SEQ ID NO: 10134 - DNA, 23 bp, Artificial Sequence
  Description of Artificial Sequence: Synthetic oligonucleotide
  Epidermal growth factor receptor (EGFR), ERBB1 phosphotyrosine kinase siRNA
cctttgtaaacagtgttttaaac

SEQ ID NO: 10135 - DNA, 23 bp, Artificial Sequence
  Description of Artificial Sequence: Synthetic oligonucleotide
  Epidermal growth factor receptor (EGFR), ERBB1 phosphotyrosine kinase siRNA
ctttgtaaacagtgttttaaact

SEQ ID NO: 10136 - DNA, 23 bp, Artificial Sequence
  Description of Artificial Sequence: Synthetic oligonucleotide
  Epidermal growth factor receptor (EGFR), ERBB1 phosphotyrosine kinase siRNA
tttgtaaacagtgttttaaactc

SEQ ID NO: 10137 - DNA, 23 bp, Artificial Sequence
  Description of Artificial Sequence: Synthetic oligonucleotide
  Epidermal growth factor receptor (EGFR), ERBB1 phosphotyrosine kinase siRNA
ttgtaaacagtgttttaaactct

SEQ ID NO: 10138 - DNA, 23 bp, Artificial Sequence
  Description of Artificial Sequence: Synthetic oligonucleotide
  Epidermal growth factor receptor (EGFR), ERBB1 phosphotyrosine kinase siRNA
tgtaaacagtgttttaaactctc

SEQ ID NO: 10139 - DNA, 23 bp, Artificial Sequence
  Description of Artificial Sequence: Synthetic oligonucleotide
  Epidermal growth factor receptor (EGFR), ERBB1 phosphotyrosine kinase siRNA
gtaaacagtgttttaaactctcc

SEQ ID NO: 10140 - DNA, 23 bp, Artificial Sequence
  Description of Artificial Sequence: Synthetic oligonucleotide
  Epidermal growth factor receptor (EGFR), ERBB1 phosphotyrosine kinase siRNA
taaacagtgttttaaactctcct

SEQ ID NO: 10141 - DNA, 23 bp, Artificial Sequence
  Description of Artificial Sequence: Synthetic oligonucleotide
  Epidermal growth factor receptor (EGFR), ERBB1 phosphotyrosine kinase siRNA
aaacagtgttttaaactctccta

SEQ ID NO: 10142 - DNA, 23 bp, Artificial Sequence
  Description of Artificial Sequence: Synthetic oligonucleotide
  Epidermal growth factor receptor (EGFR), ERBB1 phosphotyrosine kinase siRNA
aacagtgttttaaactctcctag

SEQ ID NO: 10143 - DNA, 23 bp, Artificial Sequence
  Description of Artificial Sequence: Synthetic oligonucleotide
  Epidermal growth factor receptor (EGFR), ERBB1 phosphotyrosine kinase siRNA
acagtgttttaaactctcctagt

SEQ ID NO: 10144 - DNA, 23 bp, Artificial Sequence
  Description of Artificial Sequence: Synthetic oligonucleotide
  Epidermal growth factor receptor (EGFR), ERBB1 phosphotyrosine kinase siRNA
cagtgttttaaactctcctagtc

SEQ ID NO: 10145 - DNA, 23 bp, Artificial Sequence
  Description of Artificial Sequence: Synthetic oligonucleotide
  Epidermal growth factor receptor (EGFR), ERBB1 phosphotyrosine kinase siRNA
agtgttttaaactctcctagtca

SEQ ID NO: 10146 - DNA, 23 bp, Artificial Sequence
  Description of Artificial Sequence: Synthetic oligonucleotide
  Epidermal growth factor receptor (EGFR), ERBB1 phosphotyrosine kinase siRNA
gtgttttaaactctcctagtcaa

SEQ ID NO: 10147 - DNA, 23 bp, Artificial Sequence
  Description of Artificial Sequence: Synthetic oligonucleotide
  Epidermal growth factor receptor (EGFR), ERBB1 phosphotyrosine kinase siRNA
tgttttaaactctcctagtcaat

SEQ ID NO: 10148 - DNA, 23 bp, Artificial Sequence
  Description of Artificial Sequence: Synthetic oligonucleotide
  Epidermal growth factor receptor (EGFR), ERBB1 phosphotyrosine kinase siRNA
gttttaaactctcctagtcaata

SEQ ID NO: 10149 - DNA, 23 bp, Artificial Sequence
  Description of Artificial Sequence: Synthetic oligonucleotide
  Epidermal growth factor receptor (EGFR), ERBB1 phosphotyrosine kinase siRNA
ttttaaactctcctagtcaatat

SEQ ID NO: 10150 - DNA, 23 bp, Artificial Sequence
  Description of Artificial Sequence: Synthetic oligonucleotide
  Epidermal growth factor receptor (EGFR), ERBB1 phosphotyrosine kinase siRNA
tttaaactctcctagtcaatatc

SEQ ID NO: 10151 - DNA, 23 bp, Artificial Sequence
  Description of Artificial Sequence: Synthetic oligonucleotide
  Epidermal growth factor receptor (EGFR), ERBB1 phosphotyrosine kinase siRNA
ttaaactctcctagtcaatatcc

SEQ ID NO: 10152 - DNA, 23 bp, Artificial Sequence
  Description of Artificial Sequence: Synthetic oligonucleotide
  Epidermal growth factor receptor (EGFR), ERBB1 phosphotyrosine kinase siRNA
taaactctcctagtcaatatcca

SEQ ID NO: 10153 - DNA, 23 bp, Artificial Sequence
  Description of Artificial Sequence: Synthetic oligonucleotide
  Epidermal growth factor receptor (EGFR), ERBB1 phosphotyrosine kinase siRNA
aaactctcctagtcaatatccac

SEQ ID NO: 10154 - DNA, 23 bp, Artificial Sequence
  Description of Artificial Sequence: Synthetic oligonucleotide
  Epidermal growth factor receptor (EGFR), ERBB1 phosphotyrosine kinase siRNA
aactctcctagtcaatatccacc

SEQ ID NO: 10155 - DNA, 23 bp, Artificial Sequence
  Description of Artificial Sequence: Synthetic oligonucleotide
  Epidermal growth factor receptor (EGFR), ERBB1 phosphotyrosine kinase siRNA
actctcctagtcaatatccaccc

SEQ ID NO: 10156 - DNA, 23 bp, Artificial Sequence
  Description of Artificial Sequence: Synthetic oligonucleotide
  Epidermal growth factor receptor (EGFR), ERBB1 phosphotyrosine kinase siRNA
ctctcctagtcaatatccacccc

SEQ ID NO: 10157 - DNA, 23 bp, Artificial Sequence
  Description of Artificial Sequence: Synthetic oligonucleotide
  Epidermal growth factor receptor (EGFR), ERBB1 phosphotyrosine kinase siRNA
tctcctagtcaatatccacccca

SEQ ID NO: 10158 - DNA, 23 bp, Artificial Sequence
  Description of Artificial Sequence: Synthetic oligonucleotide
  Epidermal growth factor receptor (EGFR), ERBB1 phosphotyrosine kinase siRNA
ctcctagtcaatatccaccccat

SEQ ID NO: 10159 - DNA, 23 bp, Artificial Sequence
  Description of Artificial Sequence: Synthetic oligonucleotide
  Epidermal growth factor receptor (EGFR), ERBB1 phosphotyrosine kinase siRNA
tcctagtcaatatccaccccatc

SEQ ID NO: 10160 - DNA, 23 bp, Artificial Sequence
  Description of Artificial Sequence: Synthetic oligonucleotide
  Epidermal growth factor receptor (EGFR), ERBB1 phosphotyrosine kinase siRNA
cctagtcaatatccaccccatcc

SEQ ID NO: 10161 - DNA, 23 bp, Artificial Sequence
  Description of Artificial Sequence: Synthetic oligonucleotide
  Epidermal growth factor receptor (EGFR), ERBB1 phosphotyrosine kinase siRNA
ctagtcaatatccaccccatcca

SEQ ID NO: 10162 - DNA, 23 bp, Artificial Sequence
  Description of Artificial Sequence: Synthetic oligonucleotide
  Epidermal growth factor receptor (EGFR), ERBB1 phosphotyrosine kinase siRNA
tagtcaatatccaccccatccaa

SEQ ID NO: 10163 - DNA, 23 bp, Artificial Sequence
  Description of Artificial Sequence: Synthetic oligonucleotide
  Epidermal growth factor receptor (EGFR), ERBB1 phosphotyrosine kinase siRNA
agtcaatatccaccccatccaat

SEQ ID NO: 10164 - DNA, 23 bp, Artificial Sequence
  Description of Artificial Sequence: Synthetic oligonucleotide
  Epidermal growth factor receptor (EGFR), ERBB1 phosphotyrosine kinase siRNA
gtcaatatccaccccatccaatt

SEQ ID NO: 10165 - DNA, 23 bp, Artificial Sequence
  Description of Artificial Sequence: Synthetic oligonucleotide
  Epidermal growth factor receptor (EGFR), ERBB1 phosphotyrosine kinase siRNA
tcaatatccaccccatccaattt

SEQ ID NO: 10166 - DNA, 23 bp, Artificial Sequence
  Description of Artificial Sequence: Synthetic oligonucleotide
  Epidermal growth factor receptor (EGFR), ERBB1 phosphotyrosine kinase siRNA
caatatccaccccatccaattta

SEQ ID NO: 10167 - DNA, 23 bp, Artificial Sequence
  Description of Artificial Sequence: Synthetic oligonucleotide
  Epidermal growth factor receptor (EGFR), ERBB1 phosphotyrosine kinase siRNA
aatatccaccccatccaatttat

SEQ ID NO: 10168 - DNA, 23 bp, Artificial Sequence
  Description of Artificial Sequence: Synthetic oligonucleotide
  Epidermal growth factor receptor (EGFR), ERBB1 phosphotyrosine kinase siRNA
atatccaccccatccaatttatc

SEQ ID NO: 10169 - DNA, 23 bp, Artificial Sequence
  Description of Artificial Sequence: Synthetic oligonucleotide
  Epidermal growth factor receptor (EGFR), ERBB1 phosphotyrosine kinase siRNA
tatccaccccatccaatttatca

SEQ ID NO: 10170 - DNA, 23 bp, Artificial Sequence
  Description of Artificial Sequence: Synthetic oligonucleotide
  Epidermal growth factor receptor (EGFR), ERBB1 phosphotyrosine kinase siRNA
atccaccccatccaatttatcaa

SEQ ID NO: 10171 - DNA, 23 bp, Artificial Sequence
  Description of Artificial Sequence: Synthetic oligonucleotide
  Epidermal growth factor receptor (EGFR), ERBB1 phosphotyrosine kinase siRNA
tccaccccatccaatttatcaag

SEQ ID NO: 10172 - DNA, 23 bp, Artificial Sequence
  Description of Artificial Sequence: Synthetic oligonucleotide
  Epidermal growth factor receptor (EGFR), ERBB1 phosphotyrosine kinase siRNA
ccaccccatccaatttatcaagg

SEQ ID NO: 10173 - DNA, 23 bp, Artificial Sequence
  Description of Artificial Sequence: Synthetic oligonucleotide
  Epidermal growth factor receptor (EGFR), ERBB1 phosphotyrosine kinase siRNA
caccccatccaatttatcaagga

SEQ ID NO: 10174 - DNA, 23 bp, Artificial Sequence
  Description of Artificial Sequence: Synthetic oligonucleotide
  Epidermal growth factor receptor (EGFR), ERBB1 phosphotyrosine kinase siRNA
accccatccaatttatcaaggaa

SEQ ID NO: 10175 - DNA, 23 bp, Artificial Sequence
  Description of Artificial Sequence: Synthetic oligonucleotide
  Epidermal growth factor receptor (EGFR), ERBB1 phosphotyrosine kinase siRNA
ccccatccaatttatcaaggaag

SEQ ID NO: 10176 - DNA, 23 bp, Artificial Sequence
  Description of Artificial Sequence: Synthetic oligonucleotide
  Epidermal growth factor receptor (EGFR), ERBB1 phosphotyrosine kinase siRNA
cccatccaatttatcaaggaaga

SEQ ID NO: 10177 - DNA, 23 bp, Artificial Sequence
  Description of Artificial Sequence: Synthetic oligonucleotide
  Epidermal growth factor receptor (EGFR), ERBB1 phosphotyrosine kinase siRNA
ccatccaatttatcaaggaagaa

SEQ ID NO: 10178 - DNA, 23 bp, Artificial Sequence
  Description of Artificial Sequence: Synthetic oligonucleotide
  Epidermal growth factor receptor (EGFR), ERBB1 phosphotyrosine kinase siRNA
catccaatttatcaaggaagaaa

SEQ ID NO: 10179 - DNA, 23 bp, Artificial Sequence
  Description of Artificial Sequence: Synthetic oligonucleotide
  Epidermal growth factor receptor (EGFR), ERBB1 phosphotyrosine kinase siRNA
atccaatttatcaaggaagaaat

SEQ ID NO: 10180 - DNA, 23 bp, Artificial Sequence
  Description of Artificial Sequence: Synthetic oligonucleotide
  Epidermal growth factor receptor (EGFR), ERBB1 phosphotyrosine kinase siRNA
tccaatttatcaaggaagaaatg

SEQ ID NO: 10181 - DNA, 23 bp, Artificial Sequence
  Description of Artificial Sequence: Synthetic oligonucleotide
  Epidermal growth factor receptor (EGFR), ERBB1 phosphotyrosine kinase siRNA
ccaatttatcaaggaagaaatgg

SEQ ID NO: 10182 - DNA, 23 bp, Artificial Sequence
  Description of Artificial Sequence: Synthetic oligonucleotide
  Epidermal growth factor receptor (EGFR), ERBB1 phosphotyrosine kinase siRNA
caatttatcaaggaagaaatggt

SEQ ID NO: 10183 - DNA, 23 bp, Artificial Sequence
  Description of Artificial Sequence: Synthetic oligonucleotide
  Epidermal growth factor receptor (EGFR), ERBB1 phosphotyrosine kinase siRNA
aatttatcaaggaagaaatggtt

SEQ ID NO: 10184 - DNA, 23 bp, Artificial Sequence
  Description of Artificial Sequence: Synthetic oligonucleotide
  Epidermal growth factor receptor (EGFR), ERBB1 phosphotyrosine kinase siRNA
atttatcaaggaagaaatggttc

SEQ ID NO: 10185 - DNA, 23 bp, Artificial Sequence
  Description of Artificial Sequence: Synthetic oligonucleotide
  Epidermal growth factor receptor (EGFR), ERBB1 phosphotyrosine kinase siRNA
tttatcaaggaagaaatggttca

SEQ ID NO: 10186 - DNA, 23 bp, Artificial Sequence
  Description of Artificial Sequence: Synthetic oligonucleotide
  Epidermal growth factor receptor (EGFR), ERBB1 phosphotyrosine kinase siRNA
ttatcaaggaagaaatggttcag

SEQ ID NO: 10187 - DNA, 23 bp, Artificial Sequence
  Description of Artificial Sequence: Synthetic oligonucleotide
  Epidermal growth factor receptor (EGFR), ERBB1 phosphotyrosine kinase siRNA
tatcaaggaagaaatggttcaga

SEQ ID NO: 10188 - DNA, 23 bp, Artificial Sequence
  Description of Artificial Sequence: Synthetic oligonucleotide
  Epidermal growth factor receptor (EGFR), ERBB1 phosphotyrosine kinase siRNA
atcaaggaagaaatggttcagaa

SEQ ID NO: 10189 - DNA, 23 bp, Artificial Sequence
  Description of Artificial Sequence: Synthetic oligonucleotide
  Epidermal growth factor receptor (EGFR), ERBB1 phosphotyrosine kinase siRNA
tcaaggaagaaatggttcagaaa

SEQ ID NO: 10190 - DNA, 23 bp, Artificial Sequence
  Description of Artificial Sequence: Synthetic oligonucleotide
  Epidermal growth factor receptor (EGFR), ERBB1 phosphotyrosine kinase siRNA
caaggaagaaatggttcagaaaa

SEQ ID NO: 10191 - DNA, 23 bp, Artificial Sequence
  Description of Artificial Sequence: Synthetic oligonucleotide
  Epidermal growth factor receptor (EGFR), ERBB1 phosphotyrosine kinase siRNA
aaggaagaaatggttcagaaaat

SEQ ID NO: 10192 - DNA, 23 bp, Artificial Sequence
  Description of Artificial Sequence: Synthetic oligonucleotide
  Epidermal growth factor receptor (EGFR), ERBB1 phosphotyrosine kinase siRNA
aggaagaaatggttcagaaaata

SEQ ID NO: 10193 - DNA, 23 bp, Artificial Sequence
  Description of Artificial Sequence: Synthetic oligonucleotide
  Epidermal growth factor receptor (EGFR), ERBB1 phosphotyrosine kinase siRNA
ggaagaaatggttcagaaaatat

SEQ ID NO: 10194 - DNA, 23 bp, Artificial Sequence
  Description of Artificial Sequence: Synthetic oligonucleotide
  Epidermal growth factor receptor (EGFR), ERBB1 phosphotyrosine kinase siRNA
gaagaaatggttcagaaaatatt

SEQ ID NO: 10195 - DNA, 23 bp, Artificial Sequence
  Description of Artificial Sequence: Synthetic oligonucleotide
  Epidermal growth factor receptor (EGFR), ERBB1 phosphotyrosine kinase siRNA
aagaaatggttcagaaaatattt

SEQ ID NO: 10196 - DNA, 23 bp, Artificial Sequence
  Description of Artificial Sequence: Synthetic oligonucleotide
  Epidermal growth factor receptor (EGFR), ERBB1 phosphotyrosine kinase siRNA
agaaatggttcagaaaatatttt

SEQ ID NO: 10197 - DNA, 23 bp, Artificial Sequence
  Description of Artificial Sequence: Synthetic oligonucleotide
  Epidermal growth factor receptor (EGFR), ERBB1 phosphotyrosine kinase siRNA
gaaatggttcagaaaatattttc

SEQ ID NO: 10198 - DNA, 23 bp, Artificial Sequence
  Description of Artificial Sequence: Synthetic oligonucleotide
  Epidermal growth factor receptor (EGFR), ERBB1 phosphotyrosine kinase siRNA
aaatggttcagaaaatattttca

SEQ ID NO: 10199 - DNA, 23 bp, Artificial Sequence
  Description of Artificial Sequence: Synthetic oligonucleotide
  Epidermal growth factor receptor (EGFR), ERBB1 phosphotyrosine kinase siRNA
aatggttcagaaaatattttcag

SEQ ID NO: 10200 - DNA, 23 bp, Artificial Sequence
  Description of Artificial Sequence: Synthetic oligonucleotide
  Epidermal growth factor receptor (EGFR), ERBB1 phosphotyrosine kinase siRNA
atggttcagaaaatattttcagc

SEQ ID NO: 10201 - DNA, 23 bp, Artificial Sequence
  Description of Artificial Sequence: Synthetic oligonucleotide
  Epidermal growth factor receptor (EGFR), ERBB1 phosphotyrosine kinase siRNA
tggttcagaaaatattttcagcc

SEQ ID NO: 10202 - DNA, 23 bp, Artificial Sequence
  Description of Artificial Sequence: Synthetic oligonucleotide
  Epidermal growth factor receptor (EGFR), ERBB1 phosphotyrosine kinase siRNA
ggttcagaaaatattttcagcct

SEQ ID NO: 10203 - DNA, 23 bp, Artificial Sequence
  Description of Artificial Sequence: Synthetic oligonucleotide
  Epidermal growth factor receptor (EGFR), ERBB1 phosphotyrosine kinase siRNA
gttcagaaaatattttcagccta

SEQ ID NO: 10204 - DNA, 23 bp, Artificial Sequence
  Description of Artificial Sequence: Synthetic oligonucleotide
  Epidermal growth factor receptor (EGFR), ERBB1 phosphotyrosine kinase siRNA
ttcagaaaatattttcagcctac

SEQ ID NO: 10205 - DNA, 23 bp, Artificial Sequence
  Description of Artificial Sequence: Synthetic oligonucleotide
  Epidermal growth factor receptor (EGFR), ERBB1 phosphotyrosine kinase siRNA
tcagaaaatattttcagcctaca

SEQ ID NO: 10206 - DNA, 23 bp, Artificial Sequence
  Description of Artificial Sequence: Synthetic oligonucleotide
  Epidermal growth factor receptor (EGFR), ERBB1 phosphotyrosine kinase siRNA
cagaaaatattttcagcctacag

SEQ ID NO: 10207 - DNA, 23 bp, Artificial Sequence
  Description of Artificial Sequence: Synthetic oligonucleotide
  Epidermal growth factor receptor (EGFR), ERBB1 phosphotyrosine kinase siRNA
agaaaatattttcagcctacagt

SEQ ID NO: 10208 - DNA, 23 bp, Artificial Sequence
  Description of Artificial Sequence: Synthetic oligonucleotide
  Epidermal growth factor receptor (EGFR), ERBB1 phosphotyrosine kinase siRNA
gaaaatattttcagcctacagtt

SEQ ID NO: 10209 - DNA, 23 bp, Artificial Sequence
  Description of Artificial Sequence: Synthetic oligonucleotide
  Epidermal growth factor receptor (EGFR), ERBB1 phosphotyrosine kinase siRNA
aaaatattttcagcctacagtta

SEQ ID NO: 10210 - DNA, 23 bp, Artificial Sequence
  Description of Artificial Sequence: Synthetic oligonucleotide
  Epidermal growth factor receptor (EGFR), ERBB1 phosphotyrosine kinase siRNA
aaatattttcagcctacagttat

SEQ ID NO: 10211 - DNA, 23 bp, Artificial Sequence
  Description of Artificial Sequence: Synthetic oligonucleotide
  Epidermal growth factor receptor (EGFR), ERBB1 phosphotyrosine kinase siRNA
aatattttcagcctacagttatg

SEQ ID NO: 10212 - DNA, 23 bp, Artificial Sequence
  Description of Artificial Sequence: Synthetic oligonucleotide
  Epidermal growth factor receptor (EGFR), ERBB1 phosphotyrosine kinase siRNA
atattttcagcctacagttatgt

SEQ ID NO: 10213 - DNA, 23 bp, Artificial Sequence
  Description of Artificial Sequence: Synthetic oligonucleotide
  Epidermal growth factor receptor (EGFR), ERBB1 phosphotyrosine kinase siRNA
tattttcagcctacagttatgtt

SEQ ID NO: 10214 - DNA, 23 bp, Artificial Sequence
  Description of Artificial Sequence: Synthetic oligonucleotide
  Epidermal growth factor receptor (EGFR), ERBB1 phosphotyrosine kinase siRNA
attttcagcctacagttatgttc

SEQ ID NO: 10215 - DNA, 23 bp, Artificial Sequence
  Description of Artificial Sequence: Synthetic oligonucleotide
  Epidermal growth factor receptor (EGFR), ERBB1 phosphotyrosine kinase siRNA
ttttcagcctacagttatgttca

SEQ ID NO: 10216 - DNA, 23 bp, Artificial Sequence
  Description of Artificial Sequence: Synthetic oligonucleotide
  Epidermal growth factor receptor (EGFR), ERBB1 phosphotyrosine kinase siRNA
tttcagcctacagttatgttcag

SEQ ID NO: 10217 - DNA, 23 bp, Artificial Sequence
  Description of Artificial Sequence: Synthetic oligonucleotide
  Epidermal growth factor receptor (EGFR), ERBB1 phosphotyrosine kinase siRNA
ttcagcctacagttatgttcagt

SEQ ID NO: 10218 - DNA, 23 bp, Artificial Sequence
  Description of Artificial Sequence: Synthetic oligonucleotide
  Epidermal growth factor receptor (EGFR), ERBB1 phosphotyrosine kinase siRNA
tcagcctacagttatgttcagtc

SEQ ID NO: 10219 - DNA, 23 bp, Artificial Sequence
  Description of Artificial Sequence: Synthetic oligonucleotide
  Epidermal growth factor receptor (EGFR), ERBB1 phosphotyrosine kinase siRNA
cagcctacagttatgttcagtca

SEQ ID NO: 10220 - DNA, 23 bp, Artificial Sequence
  Description of Artificial Sequence: Synthetic oligonucleotide
  Epidermal growth factor receptor (EGFR), ERBB1 phosphotyrosine kinase siRNA
agcctacagttatgttcagtcac

SEQ ID NO: 10221 - DNA, 23 bp, Artificial Sequence
  Description of Artificial Sequence: Synthetic oligonucleotide
  Epidermal growth factor receptor (EGFR), ERBB1 phosphotyrosine kinase siRNA
gcctacagttatgttcagtcaca

SEQ ID NO: 10222 - DNA, 23 bp, Artificial Sequence
  Description of Artificial Sequence: Synthetic oligonucleotide
  Epidermal growth factor receptor (EGFR), ERBB1 phosphotyrosine kinase siRNA
cctacagttatgttcagtcacac

SEQ ID NO: 10223 - DNA, 23 bp, Artificial Sequence
  Description of Artificial Sequence: Synthetic oligonucleotide
  Epidermal growth factor receptor (EGFR), ERBB1 phosphotyrosine kinase siRNA
ctacagttatgttcagtcacaca

SEQ ID NO: 10224 - DNA, 23 bp, Artificial Sequence
  Description of Artificial Sequence: Synthetic oligonucleotide
  Epidermal growth factor receptor (EGFR), ERBB1 phosphotyrosine kinase siRNA
tacagttatgttcagtcacacac

SEQ ID NO: 10225 - DNA, 23 bp, Artificial Sequence
  Description of Artificial Sequence: Synthetic oligonucleotide
  Epidermal growth factor receptor (EGFR), ERBB1 phosphotyrosine kinase siRNA
acagttatgttcagtcacacaca

SEQ ID NO: 10226 - DNA, 23 bp, Artificial Sequence
  Description of Artificial Sequence: Synthetic oligonucleotide
  Epidermal growth factor receptor (EGFR), ERBB1 phosphotyrosine kinase siRNA
cagttatgttcagtcacacacac

SEQ ID NO: 10227 - DNA, 23 bp, Artificial Sequence
  Description of Artificial Sequence: Synthetic oligonucleotide
  Epidermal growth factor receptor (EGFR), ERBB1 phosphotyrosine kinase siRNA
agttatgttcagtcacacacaca

SEQ ID NO: 10228 - DNA, 23 bp, Artificial Sequence
  Description of Artificial Sequence: Synthetic oligonucleotide
  Epidermal growth factor receptor (EGFR), ERBB1 phosphotyrosine kinase siRNA
gttatgttcagtcacacacacat

SEQ ID NO: 10229 - DNA, 23 bp, Artificial Sequence
  Description of Artificial Sequence: Synthetic oligonucleotide
  Epidermal growth factor receptor (EGFR), ERBB1 phosphotyrosine kinase siRNA
ttatgttcagtcacacacacata

SEQ ID NO: 10230 - DNA, 23 bp, Artificial Sequence
  Description of Artificial Sequence: Synthetic oligonucleotide
  Epidermal growth factor receptor (EGFR), ERBB1 phosphotyrosine kinase siRNA
tatgttcagtcacacacacatac

SEQ ID NO: 10231 - DNA, 23 bp, Artificial Sequence
  Description of Artificial Sequence: Synthetic oligonucleotide
  Epidermal growth factor receptor (EGFR), ERBB1 phosphotyrosine kinase siRNA
atgttcagtcacacacacataca

SEQ ID NO: 10232 - DNA, 23 bp, Artificial Sequence
  Description of Artificial Sequence: Synthetic oligonucleotide
  Epidermal growth factor receptor (EGFR), ERBB1 phosphotyrosine kinase siRNA
tgttcagtcacacacacatacaa

SEQ ID NO: 10233 - DNA, 23 bp, Artificial Sequence
  Description of Artificial Sequence: Synthetic oligonucleotide
  Epidermal growth factor receptor (EGFR), ERBB1 phosphotyrosine kinase siRNA
gttcagtcacacacacatacaaa

SEQ ID NO: 10234 - DNA, 23 bp, Artificial Sequence
  Description of Artificial Sequence: Synthetic oligonucleotide
  Epidermal growth factor receptor (EGFR), ERBB1 phosphotyrosine kinase siRNA
ttcagtcacacacacatacaaaa

SEQ ID NO: 10235 - DNA, 23 bp, Artificial Sequence
  Description of Artificial Sequence: Synthetic oligonucleotide
  Epidermal growth factor receptor (EGFR), ERBB1 phosphotyrosine kinase siRNA
tcagtcacacacacatacaaaat

SEQ ID NO: 10236 - DNA, 23 bp, Artificial Sequence
  Description of Artificial Sequence: Synthetic oligonucleotide
  Epidermal growth factor receptor (EGFR), ERBB1 phosphotyrosine kinase siRNA
cagtcacacacacatacaaaatg

SEQ ID NO: 10237 - DNA, 23 bp, Artificial Sequence
  Description of Artificial Sequence: Synthetic oligonucleotide
  Epidermal growth factor receptor (EGFR), ERBB1 phosphotyrosine kinase siRNA
agtcacacacacatacaaaatgt

SEQ ID NO: 10238 - DNA, 23 bp, Artificial Sequence
  Description of Artificial Sequence: Synthetic oligonucleotide
  Epidermal growth factor receptor (EGFR), ERBB1 phosphotyrosine kinase siRNA
gtcacacacacatacaaaatgtt

SEQ ID NO: 10239 - DNA, 23 bp, Artificial Sequence
  Description of Artificial Sequence: Synthetic oligonucleotide
  Epidermal growth factor receptor (EGFR), ERBB1 phosphotyrosine kinase siRNA
tcacacacacatacaaaatgttc

SEQ ID NO: 10240 - DNA, 23 bp, Artificial Sequence
  Description of Artificial Sequence: Synthetic oligonucleotide
  Epidermal growth factor receptor (EGFR), ERBB1 phosphotyrosine kinase siRNA
cacacacacatacaaaatgttcc

SEQ ID NO: 10241 - DNA, 23 bp, Artificial Sequence
  Description of Artificial Sequence: Synthetic oligonucleotide
  Epidermal growth factor receptor (EGFR), ERBB1 phosphotyrosine kinase siRNA
acacacacatacaaaatgttcct

SEQ ID NO: 10242 - DNA, 23 bp, Artificial Sequence
  Description of Artificial Sequence: Synthetic oligonucleotide
  Epidermal growth factor receptor (EGFR), ERBB1 phosphotyrosine kinase siRNA
cacacacatacaaaatgttcctt

SEQ ID NO: 10243 - DNA, 23 bp, Artificial Sequence
  Description of Artificial Sequence: Synthetic oligonucleotide
  Epidermal growth factor receptor (EGFR), ERBB1 phosphotyrosine kinase siRNA
acacacatacaaaatgttccttt

SEQ ID NO: 10244 - DNA, 23 bp, Artificial Sequence
  Description of Artificial Sequence: Synthetic oligonucleotide
  Epidermal growth factor receptor (EGFR), ERBB1 phosphotyrosine kinase siRNA
cacacatacaaaatgttcctttt

SEQ ID NO: 10245 - DNA, 23 bp, Artificial Sequence
  Description of Artificial Sequence: Synthetic oligonucleotide
  Epidermal growth factor receptor (EGFR), ERBB1 phosphotyrosine kinase siRNA
acacatacaaaatgttccttttg

SEQ ID NO: 10246 - DNA, 23 bp, Artificial Sequence
  Description of Artificial Sequence: Synthetic oligonucleotide
  Epidermal growth factor receptor (EGFR), ERBB1 phosphotyrosine kinase siRNA
cacatacaaaatgttccttttgc

SEQ ID NO: 10247 - DNA, 23 bp, Artificial Sequence
  Description of Artificial Sequence: Synthetic oligonucleotide
  Epidermal growth factor receptor (EGFR), ERBB1 phosphotyrosine kinase siRNA
acatacaaaatgttccttttgct

SEQ ID NO: 10248 - DNA, 23 bp, Artificial Sequence
  Description of Artificial Sequence: Synthetic oligonucleotide
  Epidermal growth factor receptor (EGFR), ERBB1 phosphotyrosine kinase siRNA
catacaaaatgttccttttgctt

SEQ ID NO: 10249 - DNA, 23 bp, Artificial Sequence
  Description of Artificial Sequence: Synthetic oligonucleotide
  Epidermal growth factor receptor (EGFR), ERBB1 phosphotyrosine kinase siRNA
atacaaaatgttccttttgcttt

SEQ ID NO: 10250 - DNA, 23 bp, Artificial Sequence
  Description of Artificial Sequence: Synthetic oligonucleotide
  Epidermal growth factor receptor (EGFR), ERBB1 phosphotyrosine kinase siRNA
tacaaaatgttccttttgctttt

SEQ ID NO: 10251 - DNA, 23 bp, Artificial Sequence
  Description of Artificial Sequence: Synthetic oligonucleotide
  Epidermal growth factor receptor (EGFR), ERBB1 phosphotyrosine kinase siRNA
acaaaatgttccttttgctttta

SEQ ID NO: 10252 - DNA, 23 bp, Artificial Sequence
  Description of Artificial Sequence: Synthetic oligonucleotide
  Epidermal growth factor receptor (EGFR), ERBB1 phosphotyrosine kinase siRNA
caaaatgttccttttgcttttaa

SEQ ID NO: 10253 - DNA, 23 bp, Artificial Sequence
  Description of Artificial Sequence: Synthetic oligonucleotide
  Epidermal growth factor receptor (EGFR), ERBB1 phosphotyrosine kinase siRNA
aaaatgttccttttgcttttaaa

SEQ ID NO: 10254 - DNA, 23 bp, Artificial Sequence
  Description of Artificial Sequence: Synthetic oligonucleotide
  Epidermal growth factor receptor (EGFR), ERBB1 phosphotyrosine kinase siRNA
aaatgttccttttgcttttaaag

SEQ ID NO: 10255 - DNA, 23 bp, Artificial Sequence
  Description of Artificial Sequence: Synthetic oligonucleotide
  Epidermal growth factor receptor (EGFR), ERBB1 phosphotyrosine kinase siRNA
aatgttccttttgcttttaaagt

SEQ ID NO: 10256 - DNA, 23 bp, Artificial Sequence
  Description of Artificial Sequence: Synthetic oligonucleotide
  Epidermal growth factor receptor (EGFR), ERBB1 phosphotyrosine kinase siRNA
atgttccttttgcttttaaagta

SEQ ID NO: 10257 - DNA, 23 bp, Artificial Sequence
  Description of Artificial Sequence: Synthetic oligonucleotide
  Epidermal growth factor receptor (EGFR), ERBB1 phosphotyrosine kinase siRNA
tgttccttttgcttttaaagtaa

SEQ ID NO: 10258 - DNA, 23 bp, Artificial Sequence
  Description of Artificial Sequence: Synthetic oligonucleotide
  Epidermal growth factor receptor (EGFR), ERBB1 phosphotyrosine kinase siRNA
gttccttttgcttttaaagtaat

SEQ ID NO: 10259 - DNA, 23 bp, Artificial Sequence
  Description of Artificial Sequence: Synthetic oligonucleotide
  Epidermal growth factor receptor (EGFR), ERBB1 phosphotyrosine kinase siRNA
ttccttttgcttttaaagtaatt

SEQ ID NO: 10260 - DNA, 23 bp, Artificial Sequence
  Description of Artificial Sequence: Synthetic oligonucleotide
  Epidermal growth factor receptor (EGFR), ERBB1 phosphotyrosine kinase siRNA
tccttttgcttttaaagtaattt

SEQ ID NO: 10261 - DNA, 23 bp, Artificial Sequence
  Description of Artificial Sequence: Synthetic oligonucleotide
  Epidermal growth factor receptor (EGFR), ERBB1 phosphotyrosine kinase siRNA
ccttttgcttttaaagtaatttt

SEQ ID NO: 10262 - DNA, 23 bp, Artificial Sequence
  Description of Artificial Sequence: Synthetic oligonucleotide
  Epidermal growth factor receptor (EGFR), ERBB1 phosphotyrosine kinase siRNA
cttttgcttttaaagtaattttt

SEQ ID NO: 10263 - DNA, 23 bp, Artificial Sequence
  Description of Artificial Sequence: Synthetic oligonucleotide
  Epidermal growth factor receptor (EGFR), ERBB1 phosphotyrosine kinase siRNA
ttttgcttttaaagtaatttttg

SEQ ID NO: 10264 - DNA, 23 bp, Artificial Sequence
  Description of Artificial Sequence: Synthetic oligonucleotide
  Epidermal growth factor receptor (EGFR), ERBB1 phosphotyrosine kinase siRNA
tttgcttttaaagtaatttttga

SEQ ID NO: 10265 - DNA, 23 bp, Artificial Sequence
  Description of Artificial Sequence: Synthetic oligonucleotide
  Epidermal growth factor receptor (EGFR), ERBB1 phosphotyrosine kinase siRNA
ttgcttttaaagtaatttttgac

SEQ ID NO: 10266 - DNA, 23 bp, Artificial Sequence
  Description of Artificial Sequence: Synthetic oligonucleotide
  Epidermal growth factor receptor (EGFR), ERBB1 phosphotyrosine kinase siRNA
tgcttttaaagtaatttttgact

SEQ ID NO: 10267 - DNA, 23 bp, Artificial Sequence
  Description of Artificial Sequence: Synthetic oligonucleotide
  Epidermal growth factor receptor (EGFR), ERBB1 phosphotyrosine kinase siRNA
gcttttaaagtaatttttgactc

SEQ ID NO: 10268 - DNA, 23 bp, Artificial Sequence
  Description of Artificial Sequence: Synthetic oligonucleotide
  Epidermal growth factor receptor (EGFR), ERBB1 phosphotyrosine kinase siRNA
cttttaaagtaatttttgactcc

SEQ ID NO: 10269 - DNA, 23 bp, Artificial Sequence
  Description of Artificial Sequence: Synthetic oligonucleotide
  Epidermal growth factor receptor (EGFR), ERBB1 phosphotyrosine kinase siRNA
ttttaaagtaatttttgactccc

SEQ ID NO: 10270 - DNA, 23 bp, Artificial Sequence
  Description of Artificial Sequence: Synthetic oligonucleotide
  Epidermal growth factor receptor (EGFR), ERBB1 phosphotyrosine kinase siRNA
tttaaagtaatttttgactccca

SEQ ID NO: 10271 - DNA, 23 bp, Artificial Sequence
  Description of Artificial Sequence: Synthetic oligonucleotide
  Epidermal growth factor receptor (EGFR), ERBB1 phosphotyrosine kinase siRNA
ttaaagtaatttttgactcccag

SEQ ID NO: 10272 - DNA, 23 bp, Artificial Sequence
  Description of Artificial Sequence: Synthetic oligonucleotide
  Epidermal growth factor receptor (EGFR), ERBB1 phosphotyrosine kinase siRNA
taaagtaatttttgactcccaga

SEQ ID NO: 10273 - DNA, 23 bp, Artificial Sequence
  Description of Artificial Sequence: Synthetic oligonucleotide
  Epidermal growth factor receptor (EGFR), ERBB1 phosphotyrosine kinase siRNA
aaagtaatttttgactcccagat

SEQ ID NO: 10274 - DNA, 23 bp, Artificial Sequence
  Description of Artificial Sequence: Synthetic oligonucleotide
  Epidermal growth factor receptor (EGFR), ERBB1 phosphotyrosine kinase siRNA
aagtaatttttgactcccagatc

SEQ ID NO: 10275 - DNA, 23 bp, Artificial Sequence
  Description of Artificial Sequence: Synthetic oligonucleotide
  Epidermal growth factor receptor (EGFR), ERBB1 phosphotyrosine kinase siRNA
agtaatttttgactcccagatca

SEQ ID NO: 10276 - DNA, 23 bp, Artificial Sequence
  Description of Artificial Sequence: Synthetic oligonucleotide
  Epidermal growth factor receptor (EGFR), ERBB1 phosphotyrosine kinase siRNA
gtaatttttgactcccagatcag

SEQ ID NO: 10277 - DNA, 23 bp, Artificial Sequence
  Description of Artificial Sequence: Synthetic oligonucleotide
  Epidermal growth factor receptor (EGFR), ERBB1 phosphotyrosine kinase siRNA
taatttttgactcccagatcagt

SEQ ID NO: 10278 - DNA, 23 bp, Artificial Sequence
  Description of Artificial Sequence: Synthetic oligonucleotide
  Epidermal growth factor receptor (EGFR), ERBB1 phosphotyrosine kinase siRNA
aatttttgactcccagatcagtc

SEQ ID NO: 10279 - DNA, 23 bp, Artificial Sequence
  Description of Artificial Sequence: Synthetic oligonucleotide
  Epidermal growth factor receptor (EGFR), ERBB1 phosphotyrosine kinase siRNA
atttttgactcccagatcagtca

SEQ ID NO: 10280 - DNA, 23 bp, Artificial Sequence
  Description of Artificial Sequence: Synthetic oligonucleotide
  Epidermal growth factor receptor (EGFR), ERBB1 phosphotyrosine kinase siRNA
tttttgactcccagatcagtcag

SEQ ID NO: 10281 - DNA, 23 bp, Artificial Sequence
  Description of Artificial Sequence: Synthetic oligonucleotide
  Epidermal growth factor receptor (EGFR), ERBB1 phosphotyrosine kinase siRNA
ttttgactcccagatcagtcaga

SEQ ID NO: 10282 - DNA, 23 bp, Artificial Sequence
  Description of Artificial Sequence: Synthetic oligonucleotide
  Epidermal growth factor receptor (EGFR), ERBB1 phosphotyrosine kinase siRNA
tttgactcccagatcagtcagag

SEQ ID NO: 10283 - DNA, 23 bp, Artificial Sequence
  Description of Artificial Sequence: Synthetic oligonucleotide
  Epidermal growth factor receptor (EGFR), ERBB1 phosphotyrosine kinase siRNA
ttgactcccagatcagtcagagc

SEQ ID NO: 10284 - DNA, 23 bp, Artificial Sequence
  Description of Artificial Sequence: Synthetic oligonucleotide
  Epidermal growth factor receptor (EGFR), ERBB1 phosphotyrosine kinase siRNA
tgactcccagatcagtcagagcc

SEQ ID NO: 10285 - DNA, 23 bp, Artificial Sequence
  Description of Artificial Sequence: Synthetic oligonucleotide
  Epidermal growth factor receptor (EGFR), ERBB1 phosphotyrosine kinase siRNA
gactcccagatcagtcagagccc

SEQ ID NO: 10286 - DNA, 23 bp, Artificial Sequence
  Description of Artificial Sequence: Synthetic oligonucleotide
  Epidermal growth factor receptor (EGFR), ERBB1 phosphotyrosine kinase siRNA
actcccagatcagtcagagcccc

SEQ ID NO: 10287 - DNA, 23 bp, Artificial Sequence
  Description of Artificial Sequence: Synthetic oligonucleotide
  Epidermal growth factor receptor (EGFR), ERBB1 phosphotyrosine kinase siRNA
ctcccagatcagtcagagcccct

SEQ ID NO: 10288 - DNA, 23 bp, Artificial Sequence
  Description of Artificial Sequence: Synthetic oligonucleotide
  Epidermal growth factor receptor (EGFR), ERBB1 phosphotyrosine kinase siRNA
tcccagatcagtcagagccccta

SEQ ID NO: 10289 - DNA, 23 bp, Artificial Sequence
  Description of Artificial Sequence: Synthetic oligonucleotide
  Epidermal growth factor receptor (EGFR), ERBB1 phosphotyrosine kinase siRNA
cccagatcagtcagagcccctac

SEQ ID NO: 10290 - DNA, 23 bp, Artificial Sequence
  Description of Artificial Sequence: Synthetic oligonucleotide
  Epidermal growth factor receptor (EGFR), ERBB1 phosphotyrosine kinase siRNA
ccagatcagtcagagcccctaca

SEQ ID NO: 10291 - DNA, 23 bp, Artificial Sequence
  Description of Artificial Sequence: Synthetic oligonucleotide
  Epidermal growth factor receptor (EGFR), ERBB1 phosphotyrosine kinase siRNA
cagatcagtcagagcccctacag

SEQ ID NO: 10292 - DNA, 23 bp, Artificial Sequence
  Description of Artificial Sequence: Synthetic oligonucleotide
  Epidermal growth factor receptor (EGFR), ERBB1 phosphotyrosine kinase siRNA
agatcagtcagagcccctacagc

SEQ ID NO: 10293 - DNA, 23 bp, Artificial Sequence
  Description of Artificial Sequence: Synthetic oligonucleotide
  Epidermal growth factor receptor (EGFR), ERBB1 phosphotyrosine kinase siRNA
gatcagtcagagcccctacagca

SEQ ID NO: 10294 - DNA, 23 bp, Artificial Sequence
  Description of Artificial Sequence: Synthetic oligonucleotide
  Epidermal growth factor receptor (EGFR), ERBB1 phosphotyrosine kinase siRNA
atcagtcagagcccctacagcat

SEQ ID NO: 10295 - DNA, 23 bp, Artificial Sequence
  Description of Artificial Sequence: Synthetic oligonucleotide
  Epidermal growth factor receptor (EGFR), ERBB1 phosphotyrosine kinase siRNA
tcagtcagagcccctacagcatt

SEQ ID NO: 10296 - DNA, 23 bp, Artificial Sequence
  Description of Artificial Sequence: Synthetic oligonucleotide
  Epidermal growth factor receptor (EGFR), ERBB1 phosphotyrosine kinase siRNA
cagtcagagcccctacagcattg

SEQ ID NO: 10297 - DNA, 23 bp, Artificial Sequence
  Description of Artificial Sequence: Synthetic oligonucleotide
  Epidermal growth factor receptor (EGFR), ERBB1 phosphotyrosine kinase siRNA
agtcagagcccctacagcattgt

SEQ ID NO: 10298 - DNA, 23 bp, Artificial Sequence
  Description of Artificial Sequence: Synthetic oligonucleotide
  Epidermal growth factor receptor (EGFR), ERBB1 phosphotyrosine kinase siRNA
gtcagagcccctacagcattgtt

SEQ ID NO: 10299 - DNA, 23 bp, Artificial Sequence
  Description of Artificial Sequence: Synthetic oligonucleotide
  Epidermal growth factor receptor (EGFR), ERBB1 phosphotyrosine kinase siRNA
tcagagcccctacagcattgtta

SEQ ID NO: 10300 - DNA, 23 bp, Artificial Sequence
  Description of Artificial Sequence: Synthetic oligonucleotide
  Epidermal growth factor receptor (EGFR), ERBB1 phosphotyrosine kinase siRNA
cagagcccctacagcattgttaa

SEQ ID NO: 10301 - DNA, 23 bp, Artificial Sequence
  Description of Artificial Sequence: Synthetic oligonucleotide
  Epidermal growth factor receptor (EGFR), ERBB1 phosphotyrosine kinase siRNA
agagcccctacagcattgttaag

SEQ ID NO: 10302 - DNA, 23 bp, Artificial Sequence
  Description of Artificial Sequence: Synthetic oligonucleotide
  Epidermal growth factor receptor (EGFR), ERBB1 phosphotyrosine kinase siRNA
gagcccctacagcattgttaaga

SEQ ID NO: 10303 - DNA, 23 bp, Artificial Sequence
  Description of Artificial Sequence: Synthetic oligonucleotide
  Epidermal growth factor receptor (EGFR), ERBB1 phosphotyrosine kinase siRNA
agcccctacagcattgttaagaa

SEQ ID NO: 10304 - DNA, 23 bp, Artificial Sequence
  Description of Artificial Sequence: Synthetic oligonucleotide
  Epidermal growth factor receptor (EGFR), ERBB1 phosphotyrosine kinase siRNA
gcccctacagcattgttaagaaa

SEQ ID NO: 10305 - DNA, 23 bp, Artificial Sequence
  Description of Artificial Sequence: Synthetic oligonucleotide
  Epidermal growth factor receptor (EGFR), ERBB1 phosphotyrosine kinase siRNA
cccctacagcattgttaagaaag

SEQ ID NO: 10306 - DNA, 23 bp, Artificial Sequence
  Description of Artificial Sequence: Synthetic oligonucleotide
  Epidermal growth factor receptor (EGFR), ERBB1 phosphotyrosine kinase siRNA
ccctacagcattgttaagaaagt

SEQ ID NO: 10307 - DNA, 23 bp, Artificial Sequence
  Description of Artificial Sequence: Synthetic oligonucleotide
  Epidermal growth factor receptor (EGFR), ERBB1 phosphotyrosine kinase siRNA
cctacagcattgttaagaaagta

SEQ ID NO: 10308 - DNA, 23 bp, Artificial Sequence
  Description of Artificial Sequence: Synthetic oligonucleotide
  Epidermal growth factor receptor (EGFR), ERBB1 phosphotyrosine kinase siRNA
ctacagcattgttaagaaagtat

SEQ ID NO: 10309 - DNA, 23 bp, Artificial Sequence
  Description of Artificial Sequence: Synthetic oligonucleotide
  Epidermal growth factor receptor (EGFR), ERBB1 phosphotyrosine kinase siRNA
tacagcattgttaagaaagtatt

SEQ ID NO: 10310 - DNA, 23 bp, Artificial Sequence
  Description of Artificial Sequence: Synthetic oligonucleotide
  Epidermal growth factor receptor (EGFR), ERBB1 phosphotyrosine kinase siRNA
acagcattgttaagaaagtattt

SEQ ID NO: 10311 - DNA, 23 bp, Artificial Sequence
  Description of Artificial Sequence: Synthetic oligonucleotide
  Epidermal growth factor receptor (EGFR), ERBB1 phosphotyrosine kinase siRNA
cagcattgttaagaaagtatttg

SEQ ID NO: 10312 - DNA, 23 bp, Artificial Sequence
  Description of Artificial Sequence: Synthetic oligonucleotide
  Epidermal growth factor receptor (EGFR), ERBB1 phosphotyrosine kinase siRNA
agcattgttaagaaagtatttga

SEQ ID NO: 10313 - DNA, 23 bp, Artificial Sequence
  Description of Artificial Sequence: Synthetic oligonucleotide
  Epidermal growth factor receptor (EGFR), ERBB1 phosphotyrosine kinase siRNA
gcattgttaagaaagtatttgat

SEQ ID NO: 10314 - DNA, 23 bp, Artificial Sequence
  Description of Artificial Sequence: Synthetic oligonucleotide
  Epidermal growth factor receptor (EGFR), ERBB1 phosphotyrosine kinase siRNA
cattgttaagaaagtatttgatt

SEQ ID NO: 10315 - DNA, 23 bp, Artificial Sequence
  Description of Artificial Sequence: Synthetic oligonucleotide
  Epidermal growth factor receptor (EGFR), ERBB1 phosphotyrosine kinase siRNA
attgttaagaaagtatttgattt

SEQ ID NO: 10316 - DNA, 23 bp, Artificial Sequence
  Description of Artificial Sequence: Synthetic oligonucleotide
  Epidermal growth factor receptor (EGFR), ERBB1 phosphotyrosine kinase siRNA
ttgttaagaaagtatttgatttt

SEQ ID NO: 10317 - DNA, 23 bp, Artificial Sequence
  Description of Artificial Sequence: Synthetic oligonucleotide
  Epidermal growth factor receptor (EGFR), ERBB1 phosphotyrosine kinase siRNA
tgttaagaaagtatttgattttt

SEQ ID NO: 10318 - DNA, 23 bp, Artificial Sequence
  Description of Artificial Sequence: Synthetic oligonucleotide
  Epidermal growth factor receptor (EGFR), ERBB1 phosphotyrosine kinase siRNA
gttaagaaagtatttgatttttg

SEQ ID NO: 10319 - DNA, 23 bp, Artificial Sequence
  Description of Artificial Sequence: Synthetic oligonucleotide
  Epidermal growth factor receptor (EGFR), ERBB1 phosphotyrosine kinase siRNA
ttaagaaagtatttgatttttgt

SEQ ID NO: 10320 - DNA, 23 bp, Artificial Sequence
  Description of Artificial Sequence: Synthetic oligonucleotide
  Epidermal growth factor receptor (EGFR), ERBB1 phosphotyrosine kinase siRNA
taagaaagtatttgatttttgtc

SEQ ID NO: 10321 - DNA, 23 bp, Artificial Sequence
  Description of Artificial Sequence: Synthetic oligonucleotide
  Epidermal growth factor receptor (EGFR), ERBB1 phosphotyrosine kinase siRNA
aagaaagtatttgatttttgtct

SEQ ID NO: 10322 - DNA, 23 bp, Artificial Sequence
  Description of Artificial Sequence: Synthetic oligonucleotide
  Epidermal growth factor receptor (EGFR), ERBB1 phosphotyrosine kinase siRNA
agaaagtatttgatttttgtctc

SEQ ID NO: 10323 - DNA, 23 bp, Artificial Sequence
  Description of Artificial Sequence: Synthetic oligonucleotide
  Epidermal growth factor receptor (EGFR), ERBB1 phosphotyrosine kinase siRNA
gaaagtatttgatttttgtctca

SEQ ID NO: 10324 - DNA, 23 bp, Artificial Sequence
  Description of Artificial Sequence: Synthetic oligonucleotide
  Epidermal growth factor receptor (EGFR), ERBB1 phosphotyrosine kinase siRNA
aaagtatttgatttttgtctcaa

SEQ ID NO: 10325 - DNA, 23 bp, Artificial Sequence
  Description of Artificial Sequence: Synthetic oligonucleotide
  Epidermal growth factor receptor (EGFR), ERBB1 phosphotyrosine kinase siRNA
aagtatttgatttttgtctcaat

SEQ ID NO: 10326 - DNA, 23 bp, Artificial Sequence
  Description of Artificial Sequence: Synthetic oligonucleotide
  Epidermal growth factor receptor (EGFR), ERBB1 phosphotyrosine kinase siRNA
agtatttgatttttgtctcaatg

SEQ ID NO: 10327 - DNA, 23 bp, Artificial Sequence
  Description of Artificial Sequence: Synthetic oligonucleotide
  Epidermal growth factor receptor (EGFR), ERBB1 phosphotyrosine kinase siRNA
gtatttgatttttgtctcaatga

SEQ ID NO: 10328 - DNA, 23 bp, Artificial Sequence
  Description of Artificial Sequence: Synthetic oligonucleotide
  Epidermal growth factor receptor (EGFR), ERBB1 phosphotyrosine kinase siRNA
tatttgatttttgtctcaatgaa

SEQ ID NO: 10329 - DNA, 23 bp, Artificial Sequence
  Description of Artificial Sequence: Synthetic oligonucleotide
  Epidermal growth factor receptor (EGFR), ERBB1 phosphotyrosine kinase siRNA
atttgatttttgtctcaatgaaa

SEQ ID NO: 10330 - DNA, 23 bp, Artificial Sequence
  Description of Artificial Sequence: Synthetic oligonucleotide
  Epidermal growth factor receptor (EGFR), ERBB1 phosphotyrosine kinase siRNA
tttgatttttgtctcaatgaaaa

SEQ ID NO: 10331 - DNA, 23 bp, Artificial Sequence
  Description of Artificial Sequence: Synthetic oligonucleotide
  Epidermal growth factor receptor (EGFR), ERBB1 phosphotyrosine kinase siRNA
ttgatttttgtctcaatgaaaat

SEQ ID NO: 10332 - DNA, 23 bp, Artificial Sequence
  Description of Artificial Sequence: Synthetic oligonucleotide
  Epidermal growth factor receptor (EGFR), ERBB1 phosphotyrosine kinase siRNA
tgatttttgtctcaatgaaaata

SEQ ID NO: 10333 - DNA, 23 bp, Artificial Sequence
  Description of Artificial Sequence: Synthetic oligonucleotide
  Epidermal growth factor receptor (EGFR), ERBB1 phosphotyrosine kinase siRNA
gatttttgtctcaatgaaaataa

SEQ ID NO: 10334 - DNA, 23 bp, Artificial Sequence
  Description of Artificial Sequence: Synthetic oligonucleotide
  Epidermal growth factor receptor (EGFR), ERBB1 phosphotyrosine kinase siRNA
atttttgtctcaatgaaaataaa

SEQ ID NO: 10335 - DNA, 23 bp, Artificial Sequence
  Description of Artificial Sequence: Synthetic oligonucleotide
  Epidermal growth factor receptor (EGFR), ERBB1 phosphotyrosine kinase siRNA
tttttgtctcaatgaaaataaaa

SEQ ID NO: 10336 - DNA, 23 bp, Artificial Sequence
  Description of Artificial Sequence: Synthetic oligonucleotide
  Epidermal growth factor receptor (EGFR), ERBB1 phosphotyrosine kinase siRNA
ttttgtctcaatgaaaataaaac

SEQ ID NO: 10337 - DNA, 23 bp, Artificial Sequence
  Description of Artificial Sequence: Synthetic oligonucleotide
  Epidermal growth factor receptor (EGFR), ERBB1 phosphotyrosine kinase siRNA
tttgtctcaatgaaaataaaact

SEQ ID NO: 10338 - DNA, 23 bp, Artificial Sequence
  Description of Artificial Sequence: Synthetic oligonucleotide
  Epidermal growth factor receptor (EGFR), ERBB1 phosphotyrosine kinase siRNA
ttgtctcaatgaaaataaaacta

SEQ ID NO: 10339 - DNA, 23 bp, Artificial Sequence
  Description of Artificial Sequence: Synthetic oligonucleotide
  Epidermal growth factor receptor (EGFR), ERBB1 phosphotyrosine kinase siRNA
tgtctcaatgaaaataaaactat

SEQ ID NO: 10340 - DNA, 23 bp, Artificial Sequence
  Description of Artificial Sequence: Synthetic oligonucleotide
  Epidermal growth factor receptor (EGFR), ERBB1 phosphotyrosine kinase siRNA
gtctcaatgaaaataaaactata

SEQ ID NO: 10341 - DNA, 23 bp, Artificial Sequence
  Description of Artificial Sequence: Synthetic oligonucleotide
  Epidermal growth factor receptor (EGFR), ERBB1 phosphotyrosine kinase siRNA
tctcaatgaaaataaaactatat

SEQ ID NO: 10342 - DNA, 23 bp, Artificial Sequence
  Description of Artificial Sequence: Synthetic oligonucleotide
  Epidermal growth factor receptor (EGFR), ERBB1 phosphotyrosine kinase siRNA
ctcaatgaaaataaaactatatt

SEQ ID NO: 10343 - DNA, 23 bp, Artificial Sequence
  Description of Artificial Sequence: Synthetic oligonucleotide
  Epidermal growth factor receptor (EGFR), ERBB1 phosphotyrosine kinase siRNA
tcaatgaaaataaaactatattc

SEQ ID NO: 10344 - DNA, 23 bp, Artificial Sequence
  Description of Artificial Sequence: Synthetic oligonucleotide
  Epidermal growth factor receptor (EGFR), ERBB1 phosphotyrosine kinase siRNA
caatgaaaataaaactatattca

SEQ ID NO: 10345 - DNA, 23 bp, Artificial Sequence
  Description of Artificial Sequence: Synthetic oligonucleotide
  Epidermal growth factor receptor (EGFR), ERBB1 phosphotyrosine kinase siRNA
aatgaaaataaaactatattcat

SEQ ID NO: 10346 - DNA, 23 bp, Artificial Sequence
  Description of Artificial Sequence: Synthetic oligonucleotide
  Epidermal growth factor receptor (EGFR), ERBB1 phosphotyrosine kinase siRNA
atgaaaataaaactatattcatt

SEQ ID NO: 10347 - DNA, 23 bp, Artificial Sequence
  Description of Artificial Sequence: Synthetic oligonucleotide
  Epidermal growth factor receptor (EGFR), ERBB1 phosphotyrosine kinase siRNA
tgaaaataaaactatattcattt

SEQ ID NO: 10348 - DNA, 23 bp, Artificial Sequence
  Description of Artificial Sequence: Synthetic oligonucleotide
  Epidermal growth factor receptor (EGFR), ERBB1 phosphotyrosine kinase siRNA
gaaaataaaactatattcatttc

SEQ ID NO: 10349 - DNA, 23 bp, Artificial Sequence
  Description of Artificial Sequence: Synthetic oligonucleotide
  Epidermal growth factor receptor (EGFR), ERBB1 phosphotyrosine kinase siRNA
aaaataaaactatattcatttcc

SEQ ID NO: 10350 - DNA, 23 bp, Artificial Sequence
  Description of Artificial Sequence: Synthetic oligonucleotide
  Epidermal growth factor receptor (EGFR), ERBB1 phosphotyrosine kinase siRNA
aaataaaactatattcatttcca

SEQ ID NO: 10351 - DNA, 23 bp, Artificial Sequence
  Description of Artificial Sequence: Synthetic oligonucleotide
  Epidermal growth factor receptor (EGFR), ERBB1 phosphotyrosine kinase siRNA
aataaaactatattcatttccac

SEQ ID NO: 10352 - DNA, 23 bp, Artificial Sequence
  Description of Artificial Sequence: Synthetic oligonucleotide
  Epidermal growth factor receptor (EGFR), ERBB1 phosphotyrosine kinase siRNA
ataaaactatattcatttccact

SEQ ID NO: 10353 - DNA, 23 bp, Artificial Sequence
  Description of Artificial Sequence: Synthetic oligonucleotide
  Epidermal growth factor receptor (EGFR), ERBB1 phosphotyrosine kinase siRNA
taaaactatattcatttccactc

SEQ ID NO: 10354 - DNA, 23 bp, Artificial Sequence
  Description of Artificial Sequence: Synthetic oligonucleotide
  Epidermal growth factor receptor (EGFR), ERBB1 phosphotyrosine kinase siRNA
aaaactatattcatttccactct

SEQ ID NO: 10355 - DNA, 23 bp, Artificial Sequence
  Description of Artificial Sequence: Synthetic oligonucleotide
  Epidermal growth factor receptor (EGFR), ERBB1 phosphotyrosine kinase siRNA
aaactatattcatttccactcta

SEQ ID NO: 10356 - DNA, 23 bp, Artificial Sequence
  Description of Artificial Sequence: Synthetic oligonucleotide
  Epidermal growth factor receptor (EGFR), ERBB1 phosphotyrosine kinase siRNA
aactatattcatttccactctaa

SEQ ID NO: 10357 - DNA, 23 bp, Artificial Sequence
  Description of Artificial Sequence: Synthetic oligonucleotide
  Epidermal growth factor receptor (EGFR), ERBB1 phosphotyrosine kinase siRNA
actatattcatttccactctaaa

SEQ ID NO: 10358 - DNA, 23 bp, Artificial Sequence
  Description of Artificial Sequence: Synthetic oligonucleotide
  Epidermal growth factor receptor (EGFR), ERBB1 phosphotyrosine kinase siRNA
ctatattcatttccactctaaaa

SEQ ID NO: 10359 - DNA, 23 bp, Artificial Sequence
  Description of Artificial Sequence: Synthetic oligonucleotide
  Epidermal growth factor receptor (EGFR), ERBB1 phosphotyrosine kinase siRNA
tatattcatttccactctaaaaa

SEQ ID NO: 10360 - DNA, 23 bp, Artificial Sequence
  Description of Artificial Sequence: Synthetic oligonucleotide
  Epidermal growth factor receptor (EGFR), ERBB1 phosphotyrosine kinase siRNA
atattcatttccactctaaaaaa

SEQ ID NO: 10361 - DNA, 23 bp, Artificial Sequence
  Description of Artificial Sequence: Synthetic oligonucleotide
  Epidermal growth factor receptor (EGFR), ERBB1 phosphotyrosine kinase siRNA
tattcatttccactctaaaaaaa

SEQ ID NO: 10362 - DNA, 23 bp, Artificial Sequence
  Description of Artificial Sequence: Synthetic oligonucleotide
  Epidermal growth factor receptor (EGFR), ERBB1 phosphotyrosine kinase siRNA
attcatttccactctaaaaaaaa

SEQ ID NO: 10363 - DNA, 23 bp, Artificial Sequence
  Description of Artificial Sequence: Synthetic oligonucleotide
  X-linked inhibitor of apoptosis (XIAP) siRNA
tttccagattggggctcgggccg

SEQ ID NO: 10364 - DNA, 23 bp, Artificial Sequence
  Description of Artificial Sequence: Synthetic oligonucleotide
  X-linked inhibitor of apoptosis (XIAP) siRNA
ttccagattggggctcgggccgc

SEQ ID NO: 10365 - DNA, 23 bp, Artificial Sequence
  Description of Artificial Sequence: Synthetic oligonucleotide
  X-linked inhibitor of apoptosis (XIAP) siRNA
gccgcgcctcctccgggaccctc

SEQ ID NO: 10366 - DNA, 23 bp, Artificial Sequence
  Description of Artificial Sequence: Synthetic oligonucleotide
  X-linked inhibitor of apoptosis (XIAP) siRNA
ccgcgcctcctccgggaccctcc

SEQ ID NO: 10367 - DNA, 23 bp, Artificial Sequence
  Description of Artificial Sequence: Synthetic oligonucleotide
  X-linked inhibitor of apoptosis (XIAP) siRNA
cgcgcctcctccgggaccctccc

SEQ ID NO: 10368 - DNA, 23 bp, Artificial Sequence
  Description of Artificial Sequence: Synthetic oligonucleotide
  X-linked inhibitor of apoptosis (XIAP) siRNA
gcgcctcctccgggaccctcccc

SEQ ID NO: 10369 - DNA, 23 bp, Artificial Sequence
  Description of Artificial Sequence: Synthetic oligonucleotide
  X-linked inhibitor of apoptosis (XIAP) siRNA
cgcctcctccgggaccctcccct

SEQ ID NO: 10370 - DNA, 23 bp, Artificial Sequence
  Description of Artificial Sequence: Synthetic oligonucleotide
  X-linked inhibitor of apoptosis (XIAP) siRNA
gcctcctccgggaccctcccctt

SEQ ID NO: 10371 - DNA, 23 bp, Artificial Sequence
  Description of Artificial Sequence: Synthetic oligonucleotide
  X-linked inhibitor of apoptosis (XIAP) siRNA
cctcctccgggaccctccccttg

SEQ ID NO: 10372 - DNA, 23 bp, Artificial Sequence
  Description of Artificial Sequence: Synthetic oligonucleotide
  X-linked inhibitor of apoptosis (XIAP) siRNA
ctcctccgggaccctccccttgg

SEQ ID NO: 10373 - DNA, 23 bp, Artificial Sequence
  Description of Artificial Sequence: Synthetic oligonucleotide
  X-linked inhibitor of apoptosis (XIAP) siRNA
tcctccgggaccctccccttgga

SEQ ID NO: 10374 - DNA, 23 bp, Artificial Sequence
  Description of Artificial Sequence: Synthetic oligonucleotide
  X-linked inhibitor of apoptosis (XIAP) siRNA
cctccgggaccctccccttggac

SEQ ID NO: 10375 - DNA, 23 bp, Artificial Sequence
  Description of Artificial Sequence: Synthetic oligonucleotide
  X-linked inhibitor of apoptosis (XIAP) siRNA
ctccgggaccctccccttggacc

SEQ ID NO: 10376 - DNA, 23 bp, Artificial Sequence
  Description of Artificial Sequence: Synthetic oligonucleotide
  X-linked inhibitor of apoptosis (XIAP) siRNA
tccgggaccctccccttggaccg

SEQ ID NO: 10377 - DNA, 23 bp, Artificial Sequence
  Description of Artificial Sequence: Synthetic oligonucleotide
  X-linked inhibitor of apoptosis (XIAP) siRNA
ccgggaccctccccttggaccga

SEQ ID NO: 10378 - DNA, 23 bp, Artificial Sequence
  Description of Artificial Sequence: Synthetic oligonucleotide
  X-linked inhibitor of apoptosis (XIAP) siRNA
cgggaccctccccttggaccgag

SEQ ID NO: 10379 - DNA, 23 bp, Artificial Sequence
  Description of Artificial Sequence: Synthetic oligonucleotide
  X-linked inhibitor of apoptosis (XIAP) siRNA
gggaccctccccttggaccgagc

SEQ ID NO: 10380 - DNA, 23 bp, Artificial Sequence
  Description of Artificial Sequence: Synthetic oligonucleotide
  X-linked inhibitor of apoptosis (XIAP) siRNA
ggaccctccccttggaccgagcc

SEQ ID NO: 10381 - DNA, 23 bp, Artificial Sequence
  Description of Artificial Sequence: Synthetic oligonucleotide
  X-linked inhibitor of apoptosis (XIAP) siRNA
gaccctccccttggaccgagccg

SEQ ID NO: 10382 - DNA, 23 bp, Artificial Sequence
  Description of Artificial Sequence: Synthetic oligonucleotide
  X-linked inhibitor of apoptosis (XIAP) siRNA
accctccccttggaccgagccga

SEQ ID NO: 10383 - DNA, 23 bp, Artificial Sequence
  Description of Artificial Sequence: Synthetic oligonucleotide
  X-linked inhibitor of apoptosis (XIAP) siRNA
ccctccccttggaccgagccgat

SEQ ID NO: 10384 - DNA, 23 bp, Artificial Sequence
  Description of Artificial Sequence: Synthetic oligonucleotide
  X-linked inhibitor of apoptosis (XIAP) siRNA
cctccccttggaccgagccgatc

SEQ ID NO: 10385 - DNA, 23 bp, Artificial Sequence
  Description of Artificial Sequence: Synthetic oligonucleotide
  X-linked inhibitor of apoptosis (XIAP) siRNA
ctccccttggaccgagccgatcg

SEQ ID NO: 10386 - DNA, 23 bp, Artificial Sequence
  Description of Artificial Sequence: Synthetic oligonucleotide
  X-linked inhibitor of apoptosis (XIAP) siRNA
tccccttggaccgagccgatcgc

SEQ ID NO: 10387 - DNA, 23 bp, Artificial Sequence
  Description of Artificial Sequence: Synthetic oligonucleotide
  X-linked inhibitor of apoptosis (XIAP) siRNA
ccccttggaccgagccgatcgcc

SEQ ID NO: 10388 - DNA, 23 bp, Artificial Sequence
  Description of Artificial Sequence: Synthetic oligonucleotide
  X-linked inhibitor of apoptosis (XIAP) siRNA
cccttggaccgagccgatcgccg

SEQ ID NO: 10389 - DNA, 23 bp, Artificial Sequence
  Description of Artificial Sequence: Synthetic oligonucleotide
  X-linked inhibitor of apoptosis (XIAP) siRNA
ccttggaccgagccgatcgccgc

SEQ ID NO: 10390 - DNA, 23 bp, Artificial Sequence
  Description of Artificial Sequence: Synthetic oligonucleotide
  X-linked inhibitor of apoptosis (XIAP) siRNA
cttggaccgagccgatcgccgcg

SEQ ID NO: 10391 - DNA, 23 bp, Artificial Sequence
  Description of Artificial Sequence: Synthetic oligonucleotide
  X-linked inhibitor of apoptosis (XIAP) siRNA
ttggaccgagccgatcgccgcgg

SEQ ID NO: 10392 - DNA, 23 bp, Artificial Sequence
  Description of Artificial Sequence: Synthetic oligonucleotide
  X-linked inhibitor of apoptosis (XIAP) siRNA
gggccggctgtcctggcgcgaaa

SEQ ID NO: 10393 - DNA, 23 bp, Artificial Sequence
  Description of Artificial Sequence: Synthetic oligonucleotide
  X-linked inhibitor of apoptosis (XIAP) siRNA
ggccggctgtcctggcgcgaaaa

SEQ ID NO: 10394 - DNA, 23 bp, Artificial Sequence
  Description of Artificial Sequence: Synthetic oligonucleotide
  X-linked inhibitor of apoptosis (XIAP) siRNA
gccggctgtcctggcgcgaaaag

SEQ ID NO: 10395 - DNA, 23 bp, Artificial Sequence
  Description of Artificial Sequence: Synthetic oligonucleotide
  X-linked inhibitor of apoptosis (XIAP) siRNA
ccggctgtcctggcgcgaaaagg

SEQ ID NO: 10396 - DNA, 23 bp, Artificial Sequence
  Description of Artificial Sequence: Synthetic oligonucleotide
  X-linked inhibitor of apoptosis (XIAP) siRNA
cggctgtcctggcgcgaaaaggt

SEQ ID NO: 10397 - DNA, 23 bp, Artificial Sequence
  Description of Artificial Sequence: Synthetic oligonucleotide
  X-linked inhibitor of apoptosis (XIAP) siRNA
ggctgtcctggcgcgaaaaggtg

SEQ ID NO: 10398 - DNA, 23 bp, Artificial Sequence
  Description of Artificial Sequence: Synthetic oligonucleotide
  X-linked inhibitor of apoptosis (XIAP) siRNA
gctgtcctggcgcgaaaaggtgg

SEQ ID NO: 10399 - DNA, 23 bp, Artificial Sequence
  Description of Artificial Sequence: Synthetic oligonucleotide
  X-linked inhibitor of apoptosis (XIAP) siRNA
ctgtcctggcgcgaaaaggtgga

SEQ ID NO: 10400 - DNA, 23 bp, Artificial Sequence
  Description of Artificial Sequence: Synthetic oligonucleotide
  X-linked inhibitor of apoptosis (XIAP) siRNA
tgtcctggcgcgaaaaggtggac

SEQ ID NO: 10401 - DNA, 23 bp, Artificial Sequence
  Description of Artificial Sequence: Synthetic oligonucleotide
  X-linked inhibitor of apoptosis (XIAP) siRNA
gtcctggcgcgaaaaggtggaca

SEQ ID NO: 10402 - DNA, 23 bp, Artificial Sequence
  Description of Artificial Sequence: Synthetic oligonucleotide
  X-linked inhibitor of apoptosis (XIAP) siRNA
tcctggcgcgaaaaggtggacaa

SEQ ID NO: 10403 - DNA, 23 bp, Artificial Sequence
  Description of Artificial Sequence: Synthetic oligonucleotide
  X-linked inhibitor of apoptosis (XIAP) siRNA
cctggcgcgaaaaggtggacaag

SEQ ID NO: 10404 - DNA, 23 bp, Artificial Sequence
  Description of Artificial Sequence: Synthetic oligonucleotide
  X-linked inhibitor of apoptosis (XIAP) siRNA
ctggcgcgaaaaggtggacaagt

SEQ ID NO: 10405 - DNA, 23 bp, Artificial Sequence
  Description of Artificial Sequence: Synthetic oligonucleotide
  X-linked inhibitor of apoptosis (XIAP) siRNA
tggcgcgaaaaggtggacaagtc

SEQ ID NO: 10406 - DNA, 23 bp, Artificial Sequence
  Description of Artificial Sequence: Synthetic oligonucleotide
  X-linked inhibitor of apoptosis (XIAP) siRNA
ggcgcgaaaaggtggacaagtcc

SEQ ID NO: 10407 - DNA, 23 bp, Artificial Sequence
  Description of Artificial Sequence: Synthetic oligonucleotide
  X-linked inhibitor of apoptosis (XIAP) siRNA
gcgcgaaaaggtggacaagtcct

SEQ ID NO: 10408 - DNA, 23 bp, Artificial Sequence
  Description of Artificial Sequence: Synthetic oligonucleotide
  X-linked inhibitor of apoptosis (XIAP) siRNA
cgcgaaaaggtggacaagtccta

SEQ ID NO: 10409 - DNA, 23 bp, Artificial Sequence
  Description of Artificial Sequence: Synthetic oligonucleotide
  X-linked inhibitor of apoptosis (XIAP) siRNA
gcgaaaaggtggacaagtcctat

SEQ ID NO: 10410 - DNA, 23 bp, Artificial Sequence
  Description of Artificial Sequence: Synthetic oligonucleotide
  X-linked inhibitor of apoptosis (XIAP) siRNA
cgaaaaggtggacaagtcctatt

SEQ ID NO: 10411 - DNA, 23 bp, Artificial Sequence
  Description of Artificial Sequence: Synthetic oligonucleotide
  X-linked inhibitor of apoptosis (XIAP) siRNA
gaaaaggtggacaagtcctattt

SEQ ID NO: 10412 - DNA, 23 bp, Artificial Sequence
  Description of Artificial Sequence: Synthetic oligonucleotide
  X-linked inhibitor of apoptosis (XIAP) siRNA
aaaaggtggacaagtcctatttt

SEQ ID NO: 10413 - DNA, 23 bp, Artificial Sequence
  Description of Artificial Sequence: Synthetic oligonucleotide
  X-linked inhibitor of apoptosis (XIAP) siRNA
aaaggtggacaagtcctattttc

SEQ ID NO: 10414 - DNA, 23 bp, Artificial Sequence
  Description of Artificial Sequence: Synthetic oligonucleotide
  X-linked inhibitor of apoptosis (XIAP) siRNA
aaggtggacaagtcctattttca

SEQ ID NO: 10415 - DNA, 23 bp, Artificial Sequence
  Description of Artificial Sequence: Synthetic oligonucleotide
  X-linked inhibitor of apoptosis (XIAP) siRNA
aggtggacaagtcctattttcaa

SEQ ID NO: 10416 - DNA, 23 bp, Artificial Sequence
  Description of Artificial Sequence: Synthetic oligonucleotide
  X-linked inhibitor of apoptosis (XIAP) siRNA
ggtggacaagtcctattttcaag

SEQ ID NO: 10417 - DNA, 23 bp, Artificial Sequence
  Description of Artificial Sequence: Synthetic oligonucleotide
  X-linked inhibitor of apoptosis (XIAP) siRNA
gtggacaagtcctattttcaaga

SEQ ID NO: 10418 - DNA, 23 bp, Artificial Sequence
  Description of Artificial Sequence: Synthetic oligonucleotide
  X-linked inhibitor of apoptosis (XIAP) siRNA
tggacaagtcctattttcaagag

SEQ ID NO: 10419 - DNA, 23 bp, Artificial Sequence
  Description of Artificial Sequence: Synthetic oligonucleotide
  X-linked inhibitor of apoptosis (XIAP) siRNA
ggacaagtcctattttcaagaga

SEQ ID NO: 10420 - DNA, 23 bp, Artificial Sequence
  Description of Artificial Sequence: Synthetic oligonucleotide
  X-linked inhibitor of apoptosis (XIAP) siRNA
gacaagtcctattttcaagagaa

SEQ ID NO: 10421 - DNA, 23 bp, Artificial Sequence
  Description of Artificial Sequence: Synthetic oligonucleotide
  X-linked inhibitor of apoptosis (XIAP) siRNA
atgacttttaacagttttgaagg

SEQ ID NO: 10422 - DNA, 23 bp, Artificial Sequence
  Description of Artificial Sequence: Synthetic oligonucleotide
  X-linked inhibitor of apoptosis (XIAP) siRNA
tgacttttaacagttttgaagga

SEQ ID NO: 10423 - DNA, 23 bp, Artificial Sequence
  Description of Artificial Sequence: Synthetic oligonucleotide
  X-linked inhibitor of apoptosis (XIAP) siRNA
gacttttaacagttttgaaggat

SEQ ID NO: 10424 - DNA, 23 bp, Artificial Sequence
  Description of Artificial Sequence: Synthetic oligonucleotide
  X-linked inhibitor of apoptosis (XIAP) siRNA
acttttaacagttttgaaggatc

SEQ ID NO: 10425 - DNA, 23 bp, Artificial Sequence
  Description of Artificial Sequence: Synthetic oligonucleotide
  X-linked inhibitor of apoptosis (XIAP) siRNA
cttttaacagttttgaaggatct

SEQ ID NO: 10426 - DNA, 23 bp, Artificial Sequence
  Description of Artificial Sequence: Synthetic oligonucleotide
  X-linked inhibitor of apoptosis (XIAP) siRNA
ttttaacagttttgaaggatcta

SEQ ID NO: 10427 - DNA, 23 bp, Artificial Sequence
  Description of Artificial Sequence: Synthetic oligonucleotide
  X-linked inhibitor of apoptosis (XIAP) siRNA
tttaacagttttgaaggatctaa

SEQ ID NO: 10428 - DNA, 23 bp, Artificial Sequence
  Description of Artificial Sequence: Synthetic oligonucleotide
  X-linked inhibitor of apoptosis (XIAP) siRNA
ttaacagttttgaaggatctaaa

SEQ ID NO: 10429 - DNA, 23 bp, Artificial Sequence
  Description of Artificial Sequence: Synthetic oligonucleotide
  X-linked inhibitor of apoptosis (XIAP) siRNA
taacagttttgaaggatctaaaa

SEQ ID NO: 10430 - DNA, 23 bp, Artificial Sequence
  Description of Artificial Sequence: Synthetic oligonucleotide
  X-linked inhibitor of apoptosis (XIAP) siRNA
aacagttttgaaggatctaaaac

SEQ ID NO: 10431 - DNA, 23 bp, Artificial Sequence
  Description of Artificial Sequence: Synthetic oligonucleotide
  X-linked inhibitor of apoptosis (XIAP) siRNA
acagttttgaaggatctaaaact

SEQ ID NO: 10432 - DNA, 23 bp, Artificial Sequence
  Description of Artificial Sequence: Synthetic oligonucleotide
  X-linked inhibitor of apoptosis (XIAP) siRNA
cagttttgaaggatctaaaactt

SEQ ID NO: 10433 - DNA, 23 bp, Artificial Sequence
  Description of Artificial Sequence: Synthetic oligonucleotide
  X-linked inhibitor of apoptosis (XIAP) siRNA
agttttgaaggatctaaaacttg

SEQ ID NO: 10434 - DNA, 23 bp, Artificial Sequence
  Description of Artificial Sequence: Synthetic oligonucleotide
  X-linked inhibitor of apoptosis (XIAP) siRNA
gttttgaaggatctaaaacttgt

SEQ ID NO: 10435 - DNA, 23 bp, Artificial Sequence
  Description of Artificial Sequence: Synthetic oligonucleotide
  X-linked inhibitor of apoptosis (XIAP) siRNA
ttttgaaggatctaaaacttgtg

SEQ ID NO: 10436 - DNA, 23 bp, Artificial Sequence
  Description of Artificial Sequence: Synthetic oligonucleotide
  X-linked inhibitor of apoptosis (XIAP) siRNA
tttgaaggatctaaaacttgtgt

SEQ ID NO: 10437 - DNA, 23 bp, Artificial Sequence
  Description of Artificial Sequence: Synthetic oligonucleotide
  X-linked inhibitor of apoptosis (XIAP) siRNA
ttgaaggatctaaaacttgtgta

SEQ ID NO: 10438 - DNA, 23 bp, Artificial Sequence
  Description of Artificial Sequence: Synthetic oligonucleotide
  X-linked inhibitor of apoptosis (XIAP) siRNA
tgaaggatctaaaacttgtgtac

SEQ ID NO: 10439 - DNA, 23 bp, Artificial Sequence
  Description of Artificial Sequence: Synthetic oligonucleotide
  X-linked inhibitor of apoptosis (XIAP) siRNA
gaaggatctaaaacttgtgtacc

SEQ ID NO: 10440 - DNA, 23 bp, Artificial Sequence
  Description of Artificial Sequence: Synthetic oligonucleotide
  X-linked inhibitor of apoptosis (XIAP) siRNA
aaggatctaaaacttgtgtacct

SEQ ID NO: 10441 - DNA, 23 bp, Artificial Sequence
  Description of Artificial Sequence: Synthetic oligonucleotide
  X-linked inhibitor of apoptosis (XIAP) siRNA
aggatctaaaacttgtgtacctg

SEQ ID NO: 10442 - DNA, 23 bp, Artificial Sequence
  Description of Artificial Sequence: Synthetic oligonucleotide
  X-linked inhibitor of apoptosis (XIAP) siRNA
ggatctaaaacttgtgtacctgc

SEQ ID NO: 10443 - DNA, 23 bp, Artificial Sequence
  Description of Artificial Sequence: Synthetic oligonucleotide
  X-linked inhibitor of apoptosis (XIAP) siRNA
gatctaaaacttgtgtacctgca

SEQ ID NO: 10444 - DNA, 23 bp, Artificial Sequence
  Description of Artificial Sequence: Synthetic oligonucleotide
  X-linked inhibitor of apoptosis (XIAP) siRNA
atctaaaacttgtgtacctgcag

SEQ ID NO: 10445 - DNA, 23 bp, Artificial Sequence
  Description of Artificial Sequence: Synthetic oligonucleotide
  X-linked inhibitor of apoptosis (XIAP) siRNA
tctaaaacttgtgtacctgcaga

SEQ ID NO: 10446 - DNA, 23 bp, Artificial Sequence
  Description of Artificial Sequence: Synthetic oligonucleotide
  X-linked inhibitor of apoptosis (XIAP) siRNA
ctaaaacttgtgtacctgcagac

SEQ ID NO: 10447 - DNA, 23 bp, Artificial Sequence
  Description of Artificial Sequence: Synthetic oligonucleotide
  X-linked inhibitor of apoptosis (XIAP) siRNA
taaaacttgtgtacctgcagaca

SEQ ID NO: 10448 - DNA, 23 bp, Artificial Sequence
  Description of Artificial Sequence: Synthetic oligonucleotide
  X-linked inhibitor of apoptosis (XIAP) siRNA
aaaacttgtgtacctgcagacat

SEQ ID NO: 10449 - DNA, 23 bp, Artificial Sequence
  Description of Artificial Sequence: Synthetic oligonucleotide
  X-linked inhibitor of apoptosis (XIAP) siRNA
aaacttgtgtacctgcagacatc

SEQ ID NO: 10450 - DNA, 23 bp, Artificial Sequence
  Description of Artificial Sequence: Synthetic oligonucleotide
  X-linked inhibitor of apoptosis (XIAP) siRNA
aacttgtgtacctgcagacatca

SEQ ID NO: 10451 - DNA, 23 bp, Artificial Sequence
  Description of Artificial Sequence: Synthetic oligonucleotide
  X-linked inhibitor of apoptosis (XIAP) siRNA
acttgtgtacctgcagacatcaa

SEQ ID NO: 10452 - DNA, 23 bp, Artificial Sequence
  Description of Artificial Sequence: Synthetic oligonucleotide
  X-linked inhibitor of apoptosis (XIAP) siRNA
cttgtgtacctgcagacatcaat

SEQ ID NO: 10453 - DNA, 23 bp, Artificial Sequence
  Description of Artificial Sequence: Synthetic oligonucleotide
  X-linked inhibitor of apoptosis (XIAP) siRNA
ttgtgtacctgcagacatcaata

SEQ ID NO: 10454 - DNA, 23 bp, Artificial Sequence
  Description of Artificial Sequence: Synthetic oligonucleotide
  X-linked inhibitor of apoptosis (XIAP) siRNA
tgtgtacctgcagacatcaataa

SEQ ID NO: 10455 - DNA, 23 bp, Artificial Sequence
  Description of Artificial Sequence: Synthetic oligonucleotide
  X-linked inhibitor of apoptosis (XIAP) siRNA
gtgtacctgcagacatcaataag

SEQ ID NO: 10456 - DNA, 23 bp, Artificial Sequence
  Description of Artificial Sequence: Synthetic oligonucleotide
  X-linked inhibitor of apoptosis (XIAP) siRNA
tgtacctgcagacatcaataagg

SEQ ID NO: 10457 - DNA, 23 bp, Artificial Sequence
  Description of Artificial Sequence: Synthetic oligonucleotide
  X-linked inhibitor of apoptosis (XIAP) siRNA
gtacctgcagacatcaataagga

SEQ ID NO: 10458 - DNA, 23 bp, Artificial Sequence
  Description of Artificial Sequence: Synthetic oligonucleotide
  X-linked inhibitor of apoptosis (XIAP) siRNA
tacctgcagacatcaataaggaa

SEQ ID NO: 10459 - DNA, 23 bp, Artificial Sequence
  Description of Artificial Sequence: Synthetic oligonucleotide
  X-linked inhibitor of apoptosis (XIAP) siRNA
acctgcagacatcaataaggaag

SEQ ID NO: 10460 - DNA, 23 bp, Artificial Sequence
  Description of Artificial Sequence: Synthetic oligonucleotide
  X-linked inhibitor of apoptosis (XIAP) siRNA
cctgcagacatcaataaggaaga

SEQ ID NO: 10461 - DNA, 23 bp, Artificial Sequence
  Description of Artificial Sequence: Synthetic oligonucleotide
  X-linked inhibitor of apoptosis (XIAP) siRNA
ctgcagacatcaataaggaagaa

SEQ ID NO: 10462 - DNA, 23 bp, Artificial Sequence
  Description of Artificial Sequence: Synthetic oligonucleotide
  X-linked inhibitor of apoptosis (XIAP) siRNA
tgcagacatcaataaggaagaag

SEQ ID NO: 10463 - DNA, 23 bp, Artificial Sequence
  Description of Artificial Sequence: Synthetic oligonucleotide
  X-linked inhibitor of apoptosis (XIAP) siRNA
gcagacatcaataaggaagaaga

SEQ ID NO: 10464 - DNA, 23 bp, Artificial Sequence
  Description of Artificial Sequence: Synthetic oligonucleotide
  X-linked inhibitor of apoptosis (XIAP) siRNA
cagacatcaataaggaagaagaa

SEQ ID NO: 10465 - DNA, 23 bp, Artificial Sequence
  Description of Artificial Sequence: Synthetic oligonucleotide
  X-linked inhibitor of apoptosis (XIAP) siRNA
agacatcaataaggaagaagaat

SEQ ID NO: 10466 - DNA, 23 bp, Artificial Sequence
  Description of Artificial Sequence: Synthetic oligonucleotide
  X-linked inhibitor of apoptosis (XIAP) siRNA
gacatcaataaggaagaagaatt

SEQ ID NO: 10467 - DNA, 23 bp, Artificial Sequence
  Description of Artificial Sequence: Synthetic oligonucleotide
  X-linked inhibitor of apoptosis (XIAP) siRNA
acatcaataaggaagaagaattt

SEQ ID NO: 10468 - DNA, 23 bp, Artificial Sequence
  Description of Artificial Sequence: Synthetic oligonucleotide
  X-linked inhibitor of apoptosis (XIAP) siRNA
catcaataaggaagaagaatttg

SEQ ID NO: 10469 - DNA, 23 bp, Artificial Sequence
  Description of Artificial Sequence: Synthetic oligonucleotide
  X-linked inhibitor of apoptosis (XIAP) siRNA
atcaataaggaagaagaatttgt

SEQ ID NO: 10470 - DNA, 23 bp, Artificial Sequence
  Description of Artificial Sequence: Synthetic oligonucleotide
  X-linked inhibitor of apoptosis (XIAP) siRNA
tcaataaggaagaagaatttgta

SEQ ID NO: 10471 - DNA, 23 bp, Artificial Sequence
  Description of Artificial Sequence: Synthetic oligonucleotide
  X-linked inhibitor of apoptosis (XIAP) siRNA
caataaggaagaagaatttgtag

SEQ ID NO: 10472 - DNA, 23 bp, Artificial Sequence
  Description of Artificial Sequence: Synthetic oligonucleotide
  X-linked inhibitor of apoptosis (XIAP) siRNA
aataaggaagaagaatttgtaga

SEQ ID NO: 10473 - DNA, 23 bp, Artificial Sequence
  Description of Artificial Sequence: Synthetic oligonucleotide
  X-linked inhibitor of apoptosis (XIAP) siRNA
ataaggaagaagaatttgtagaa

SEQ ID NO: 10474 - DNA, 23 bp, Artificial Sequence
  Description of Artificial Sequence: Synthetic oligonucleotide
  X-linked inhibitor of apoptosis (XIAP) siRNA
taaggaagaagaatttgtagaag

SEQ ID NO: 10475 - DNA, 23 bp, Artificial Sequence
  Description of Artificial Sequence: Synthetic oligonucleotide
  X-linked inhibitor of apoptosis (XIAP) siRNA
aaggaagaagaatttgtagaaga

SEQ ID NO: 10476 - DNA, 23 bp, Artificial Sequence
  Description of Artificial Sequence: Synthetic oligonucleotide
  X-linked inhibitor of apoptosis (XIAP) siRNA
aggaagaagaatttgtagaagag

SEQ ID NO: 10477 - DNA, 23 bp, Artificial Sequence
  Description of Artificial Sequence: Synthetic oligonucleotide
  X-linked inhibitor of apoptosis (XIAP) siRNA
ggaagaagaatttgtagaagagt

SEQ ID NO: 10478 - DNA, 23 bp, Artificial Sequence
  Description of Artificial Sequence: Synthetic oligonucleotide
  X-linked inhibitor of apoptosis (XIAP) siRNA
gaagaagaatttgtagaagagtt

SEQ ID NO: 10479 - DNA, 23 bp, Artificial Sequence
  Description of Artificial Sequence: Synthetic oligonucleotide
  X-linked inhibitor of apoptosis (XIAP) siRNA
aagaagaatttgtagaagagttt

SEQ ID NO: 10480 - DNA, 23 bp, Artificial Sequence
  Description of Artificial Sequence: Synthetic oligonucleotide
  X-linked inhibitor of apoptosis (XIAP) siRNA
agaagaatttgtagaagagttta

SEQ ID NO: 10481 - DNA, 23 bp, Artificial Sequence
  Description of Artificial Sequence: Synthetic oligonucleotide
  X-linked inhibitor of apoptosis (XIAP) siRNA
gaagaatttgtagaagagtttaa

SEQ ID NO: 10482 - DNA, 23 bp, Artificial Sequence
  Description of Artificial Sequence: Synthetic oligonucleotide
  X-linked inhibitor of apoptosis (XIAP) siRNA
aagaatttgtagaagagtttaat

SEQ ID NO: 10483 - DNA, 23 bp, Artificial Sequence
  Description of Artificial Sequence: Synthetic oligonucleotide
  X-linked inhibitor of apoptosis (XIAP) siRNA
agaatttgtagaagagtttaata

SEQ ID NO: 10484 - DNA, 23 bp, Artificial Sequence
  Description of Artificial Sequence: Synthetic oligonucleotide
  X-linked inhibitor of apoptosis (XIAP) siRNA
gaatttgtagaagagtttaatag

SEQ ID NO: 10485 - DNA, 23 bp, Artificial Sequence
  Description of Artificial Sequence: Synthetic oligonucleotide
  X-linked inhibitor of apoptosis (XIAP) siRNA
aatttgtagaagagtttaataga

SEQ ID NO: 10486 - DNA, 23 bp, Artificial Sequence
  Description of Artificial Sequence: Synthetic oligonucleotide
  X-linked inhibitor of apoptosis (XIAP) siRNA
atttgtagaagagtttaatagat

SEQ ID NO: 10487 - DNA, 23 bp, Artificial Sequence
  Description of Artificial Sequence: Synthetic oligonucleotide
  X-linked inhibitor of apoptosis (XIAP) siRNA
tttgtagaagagtttaatagatt

SEQ ID NO: 10488 - DNA, 23 bp, Artificial Sequence
  Description of Artificial Sequence: Synthetic oligonucleotide
  X-linked inhibitor of apoptosis (XIAP) siRNA
ttgtagaagagtttaatagatta

SEQ ID NO: 10489 - DNA, 23 bp, Artificial Sequence
  Description of Artificial Sequence: Synthetic oligonucleotide
  X-linked inhibitor of apoptosis (XIAP) siRNA
tgtagaagagtttaatagattaa

SEQ ID NO: 10490 - DNA, 23 bp, Artificial Sequence
  Description of Artificial Sequence: Synthetic oligonucleotide
  X-linked inhibitor of apoptosis (XIAP) siRNA
gtagaagagtttaatagattaaa

SEQ ID NO: 10491 - DNA, 23 bp, Artificial Sequence
  Description of Artificial Sequence: Synthetic oligonucleotide
  X-linked inhibitor of apoptosis (XIAP) siRNA
tagaagagtttaatagattaaaa

SEQ ID NO: 10492 - DNA, 23 bp, Artificial Sequence
  Description of Artificial Sequence: Synthetic oligonucleotide
  X-linked inhibitor of apoptosis (XIAP) siRNA
agaagagtttaatagattaaaaa

SEQ ID NO: 10493 - DNA, 23 bp, Artificial Sequence
  Description of Artificial Sequence: Synthetic oligonucleotide
  X-linked inhibitor of apoptosis (XIAP) siRNA
gaagagtttaatagattaaaaac

SEQ ID NO: 10494 - DNA, 23 bp, Artificial Sequence
  Description of Artificial Sequence: Synthetic oligonucleotide
  X-linked inhibitor of apoptosis (XIAP) siRNA
aagagtttaatagattaaaaact

SEQ ID NO: 10495 - DNA, 23 bp, Artificial Sequence
  Description of Artificial Sequence: Synthetic oligonucleotide
  X-linked inhibitor of apoptosis (XIAP) siRNA
agagtttaatagattaaaaactt

SEQ ID NO: 10496 - DNA, 23 bp, Artificial Sequence
  Description of Artificial Sequence: Synthetic oligonucleotide
  X-linked inhibitor of apoptosis (XIAP) siRNA
gagtttaatagattaaaaacttt

SEQ ID NO: 10497 - DNA, 23 bp, Artificial Sequence
  Description of Artificial Sequence: Synthetic oligonucleotide
  X-linked inhibitor of apoptosis (XIAP) siRNA
agtttaatagattaaaaactttt

SEQ ID NO: 10498 - DNA, 23 bp, Artificial Sequence
  Description of Artificial Sequence: Synthetic oligonucleotide
  X-linked inhibitor of apoptosis (XIAP) siRNA
gtttaatagattaaaaacttttg

SEQ ID NO: 10499 - DNA, 23 bp, Artificial Sequence
  Description of Artificial Sequence: Synthetic oligonucleotide
  X-linked inhibitor of apoptosis (XIAP) siRNA
tttaatagattaaaaacttttgc

SEQ ID NO: 10500 - DNA, 23 bp, Artificial Sequence
  Description of Artificial Sequence: Synthetic oligonucleotide
  X-linked inhibitor of apoptosis (XIAP) siRNA
ttaatagattaaaaacttttgct

SEQ ID NO: 10501 - DNA, 23 bp, Artificial Sequence
  Description of Artificial Sequence: Synthetic oligonucleotide
  X-linked inhibitor of apoptosis (XIAP) siRNA
taatagattaaaaacttttgcta

SEQ ID NO: 10502 - DNA, 23 bp, Artificial Sequence
  Description of Artificial Sequence: Synthetic oligonucleotide
  X-linked inhibitor of apoptosis (XIAP) siRNA
aatagattaaaaacttttgctaa

SEQ ID NO: 10503 - DNA, 23 bp, Artificial Sequence
  Description of Artificial Sequence: Synthetic oligonucleotide
  X-linked inhibitor of apoptosis (XIAP) siRNA
atagattaaaaacttttgctaat

SEQ ID NO: 10504 - DNA, 23 bp, Artificial Sequence
  Description of Artificial Sequence: Synthetic oligonucleotide
  X-linked inhibitor of apoptosis (XIAP) siRNA
tagattaaaaacttttgctaatt

SEQ ID NO: 10505 - DNA, 23 bp, Artificial Sequence
  Description of Artificial Sequence: Synthetic oligonucleotide
  X-linked inhibitor of apoptosis (XIAP) siRNA
agattaaaaacttttgctaattt

SEQ ID NO: 10506 - DNA, 23 bp, Artificial Sequence
  Description of Artificial Sequence: Synthetic oligonucleotide
  X-linked inhibitor of apoptosis (XIAP) siRNA
gattaaaaacttttgctaatttt

SEQ ID NO: 10507 - DNA, 23 bp, Artificial Sequence
  Description of Artificial Sequence: Synthetic oligonucleotide
  X-linked inhibitor of apoptosis (XIAP) siRNA
attaaaaacttttgctaattttc

SEQ ID NO: 10508 - DNA, 23 bp, Artificial Sequence
  Description of Artificial Sequence: Synthetic oligonucleotide
  X-linked inhibitor of apoptosis (XIAP) siRNA
ttaaaaacttttgctaattttcc

SEQ ID NO: 10509 - DNA, 23 bp, Artificial Sequence
  Description of Artificial Sequence: Synthetic oligonucleotide
  X-linked inhibitor of apoptosis (XIAP) siRNA
taaaaacttttgctaattttcca

SEQ ID NO: 10510 - DNA, 23 bp, Artificial Sequence
  Description of Artificial Sequence: Synthetic oligonucleotide
  X-linked inhibitor of apoptosis (XIAP) siRNA
aaaaacttttgctaattttccaa

SEQ ID NO: 10511 - DNA, 23 bp, Artificial Sequence
  Description of Artificial Sequence: Synthetic oligonucleotide
  X-linked inhibitor of apoptosis (XIAP) siRNA
aaaacttttgctaattttccaag

SEQ ID NO: 10512 - DNA, 23 bp, Artificial Sequence
  Description of Artificial Sequence: Synthetic oligonucleotide
  X-linked inhibitor of apoptosis (XIAP) siRNA
aaacttttgctaattttccaagt

SEQ ID NO: 10513 - DNA, 23 bp, Artificial Sequence
  Description of Artificial Sequence: Synthetic oligonucleotide
  X-linked inhibitor of apoptosis (XIAP) siRNA
aacttttgctaattttccaagtg

SEQ ID NO: 10514 - DNA, 23 bp, Artificial Sequence
  Description of Artificial Sequence: Synthetic oligonucleotide
  X-linked inhibitor of apoptosis (XIAP) siRNA
acttttgctaattttccaagtgg

SEQ ID NO: 10515 - DNA, 23 bp, Artificial Sequence
  Description of Artificial Sequence: Synthetic oligonucleotide
  X-linked inhibitor of apoptosis (XIAP) siRNA
cttttgctaattttccaagtggt

SEQ ID NO: 10516 - DNA, 23 bp, Artificial Sequence
  Description of Artificial Sequence: Synthetic oligonucleotide
  X-linked inhibitor of apoptosis (XIAP) siRNA
ttttgctaattttccaagtggta

SEQ ID NO: 10517 - DNA, 23 bp, Artificial Sequence
  Description of Artificial Sequence: Synthetic oligonucleotide
  X-linked inhibitor of apoptosis (XIAP) siRNA
tttgctaattttccaagtggtag

SEQ ID NO: 10518 - DNA, 23 bp, Artificial Sequence
  Description of Artificial Sequence: Synthetic oligonucleotide
  X-linked inhibitor of apoptosis (XIAP) siRNA
ttgctaattttccaagtggtagt

SEQ ID NO: 10519 - DNA, 23 bp, Artificial Sequence
  Description of Artificial Sequence: Synthetic oligonucleotide
  X-linked inhibitor of apoptosis (XIAP) siRNA
tgctaattttccaagtggtagtc

SEQ ID NO: 10520 - DNA, 23 bp, Artificial Sequence
  Description of Artificial Sequence: Synthetic oligonucleotide
  X-linked inhibitor of apoptosis (XIAP) siRNA
gctaattttccaagtggtagtcc

SEQ ID NO: 10521 - DNA, 23 bp, Artificial Sequence
  Description of Artificial Sequence: Synthetic oligonucleotide
  X-linked inhibitor of apoptosis (XIAP) siRNA
ctaattttccaagtggtagtcct

SEQ ID NO: 10522 - DNA, 23 bp, Artificial Sequence
  Description of Artificial Sequence: Synthetic oligonucleotide
  X-linked inhibitor of apoptosis (XIAP) siRNA
taattttccaagtggtagtcctg

SEQ ID NO: 10523 - DNA, 23 bp, Artificial Sequence
  Description of Artificial Sequence: Synthetic oligonucleotide
  X-linked inhibitor of apoptosis (XIAP) siRNA
aattttccaagtggtagtcctgt

SEQ ID NO: 10524 - DNA, 23 bp, Artificial Sequence
  Description of Artificial Sequence: Synthetic oligonucleotide
  X-linked inhibitor of apoptosis (XIAP) siRNA
attttccaagtggtagtcctgtt

SEQ ID NO: 10525 - DNA, 23 bp, Artificial Sequence
  Description of Artificial Sequence: Synthetic oligonucleotide
  X-linked inhibitor of apoptosis (XIAP) siRNA
ttttccaagtggtagtcctgttt

SEQ ID NO: 10526 - DNA, 23 bp, Artificial Sequence
  Description of Artificial Sequence: Synthetic oligonucleotide
  X-linked inhibitor of apoptosis (XIAP) siRNA
tttccaagtggtagtcctgtttc

SEQ ID NO: 10527 - DNA, 23 bp, Artificial Sequence
  Description of Artificial Sequence: Synthetic oligonucleotide
  X-linked inhibitor of apoptosis (XIAP) siRNA
ttccaagtggtagtcctgtttca

SEQ ID NO: 10528 - DNA, 23 bp, Artificial Sequence
  Description of Artificial Sequence: Synthetic oligonucleotide
  X-linked inhibitor of apoptosis (XIAP) siRNA
tccaagtggtagtcctgtttcag

SEQ ID NO: 10529 - DNA, 23 bp, Artificial Sequence
  Description of Artificial Sequence: Synthetic oligonucleotide
  X-linked inhibitor of apoptosis (XIAP) siRNA
ccaagtggtagtcctgtttcagc

SEQ ID NO: 10530 - DNA, 23 bp, Artificial Sequence
  Description of Artificial Sequence: Synthetic oligonucleotide
  X-linked inhibitor of apoptosis (XIAP) siRNA
caagtggtagtcctgtttcagca

SEQ ID NO: 10531 - DNA, 23 bp, Artificial Sequence
  Description of Artificial Sequence: Synthetic oligonucleotide
  X-linked inhibitor of apoptosis (XIAP) siRNA
aagtggtagtcctgtttcagcat

SEQ ID NO: 10532 - DNA, 23 bp, Artificial Sequence
  Description of Artificial Sequence: Synthetic oligonucleotide
  X-linked inhibitor of apoptosis (XIAP) siRNA
agtggtagtcctgtttcagcatc

SEQ ID NO: 10533 - DNA, 23 bp, Artificial Sequence
  Description of Artificial Sequence: Synthetic oligonucleotide
  X-linked inhibitor of apoptosis (XIAP) siRNA
gtggtagtcctgtttcagcatca

SEQ ID NO: 10534 - DNA, 23 bp, Artificial Sequence
  Description of Artificial Sequence: Synthetic oligonucleotide
  X-linked inhibitor of apoptosis (XIAP) siRNA
tggtagtcctgtttcagcatcaa

SEQ ID NO: 10535 - DNA, 23 bp, Artificial Sequence
  Description of Artificial Sequence: Synthetic oligonucleotide
  X-linked inhibitor of apoptosis (XIAP) siRNA
ggtagtcctgtttcagcatcaac

SEQ ID NO: 10536 - DNA, 23 bp, Artificial Sequence
  Description of Artificial Sequence: Synthetic oligonucleotide
  X-linked inhibitor of apoptosis (XIAP) siRNA
gtagtcctgtttcagcatcaaca

SEQ ID NO: 10537 - DNA, 23 bp, Artificial Sequence
  Description of Artificial Sequence: Synthetic oligonucleotide
  X-linked inhibitor of apoptosis (XIAP) siRNA
tagtcctgtttcagcatcaacac

SEQ ID NO: 10538 - DNA, 23 bp, Artificial Sequence
  Description of Artificial Sequence: Synthetic oligonucleotide
  X-linked inhibitor of apoptosis (XIAP) siRNA
agtcctgtttcagcatcaacact

SEQ ID NO: 10539 - DNA, 23 bp, Artificial Sequence
  Description of Artificial Sequence: Synthetic oligonucleotide
  X-linked inhibitor of apoptosis (XIAP) siRNA
gtcctgtttcagcatcaacactg

SEQ ID NO: 10540 - DNA, 23 bp, Artificial Sequence
  Description of Artificial Sequence: Synthetic oligonucleotide
  X-linked inhibitor of apoptosis (XIAP) siRNA
tcctgtttcagcatcaacactgg

SEQ ID NO: 10541 - DNA, 23 bp, Artificial Sequence
  Description of Artificial Sequence: Synthetic oligonucleotide
  X-linked inhibitor of apoptosis (XIAP) siRNA
cctgtttcagcatcaacactggc

SEQ ID NO: 10542 - DNA, 23 bp, Artificial Sequence
  Description of Artificial Sequence: Synthetic oligonucleotide
  X-linked inhibitor of apoptosis (XIAP) siRNA
ctgtttcagcatcaacactggca

SEQ ID NO: 10543 - DNA, 23 bp, Artificial Sequence
  Description of Artificial Sequence: Synthetic oligonucleotide
  X-linked inhibitor of apoptosis (XIAP) siRNA
tgtttcagcatcaacactggcac

SEQ ID NO: 10544 - DNA, 23 bp, Artificial Sequence
  Description of Artificial Sequence: Synthetic oligonucleotide
  X-linked inhibitor of apoptosis (XIAP) siRNA
gtttcagcatcaacactggcacg

SEQ ID NO: 10545 - DNA, 23 bp, Artificial Sequence
  Description of Artificial Sequence: Synthetic oligonucleotide
  X-linked inhibitor of apoptosis (XIAP) siRNA
tttcagcatcaacactggcacga

SEQ ID NO: 10546 - DNA, 23 bp, Artificial Sequence
  Description of Artificial Sequence: Synthetic oligonucleotide
  X-linked inhibitor of apoptosis (XIAP) siRNA
ttcagcatcaacactggcacgag

SEQ ID NO: 10547 - DNA, 23 bp, Artificial Sequence
  Description of Artificial Sequence: Synthetic oligonucleotide
  X-linked inhibitor of apoptosis (XIAP) siRNA
tcagcatcaacactggcacgagc

SEQ ID NO: 10548 - DNA, 23 bp, Artificial Sequence
  Description of Artificial Sequence: Synthetic oligonucleotide
  X-linked inhibitor of apoptosis (XIAP) siRNA
cagcatcaacactggcacgagca

SEQ ID NO: 10549 - DNA, 23 bp, Artificial Sequence
  Description of Artificial Sequence: Synthetic oligonucleotide
  X-linked inhibitor of apoptosis (XIAP) siRNA
agcatcaacactggcacgagcag

SEQ ID NO: 10550 - DNA, 23 bp, Artificial Sequence
  Description of Artificial Sequence: Synthetic oligonucleotide
  X-linked inhibitor of apoptosis (XIAP) siRNA
gcatcaacactggcacgagcagg

SEQ ID NO: 10551 - DNA, 23 bp, Artificial Sequence
  Description of Artificial Sequence: Synthetic oligonucleotide
  X-linked inhibitor of apoptosis (XIAP) siRNA
catcaacactggcacgagcaggg

SEQ ID NO: 10552 - DNA, 23 bp, Artificial Sequence
  Description of Artificial Sequence: Synthetic oligonucleotide
  X-linked inhibitor of apoptosis (XIAP) siRNA
atcaacactggcacgagcagggt

SEQ ID NO: 10553 - DNA, 23 bp, Artificial Sequence
  Description of Artificial Sequence: Synthetic oligonucleotide
  X-linked inhibitor of apoptosis (XIAP) siRNA
tcaacactggcacgagcagggtt

SEQ ID NO: 10554 - DNA, 23 bp, Artificial Sequence
  Description of Artificial Sequence: Synthetic oligonucleotide
  X-linked inhibitor of apoptosis (XIAP) siRNA
caacactggcacgagcagggttt

SEQ ID NO: 10555 - DNA, 23 bp, Artificial Sequence
  Description of Artificial Sequence: Synthetic oligonucleotide
  X-linked inhibitor of apoptosis (XIAP) siRNA
aacactggcacgagcagggtttc

SEQ ID NO: 10556 - DNA, 23 bp, Artificial Sequence
  Description of Artificial Sequence: Synthetic oligonucleotide
  X-linked inhibitor of apoptosis (XIAP) siRNA
acactggcacgagcagggtttct

SEQ ID NO: 10557 - DNA, 23 bp, Artificial Sequence
  Description of Artificial Sequence: Synthetic oligonucleotide
  X-linked inhibitor of apoptosis (XIAP) siRNA
cactggcacgagcagggtttctt

SEQ ID NO: 10558 - DNA, 23 bp, Artificial Sequence
  Description of Artificial Sequence: Synthetic oligonucleotide
  X-linked inhibitor of apoptosis (XIAP) siRNA
actggcacgagcagggtttcttt

SEQ ID NO: 10559 - DNA, 23 bp, Artificial Sequence
  Description of Artificial Sequence: Synthetic oligonucleotide
  X-linked inhibitor of apoptosis (XIAP) siRNA
ctggcacgagcagggtttcttta

SEQ ID NO: 10560 - DNA, 23 bp, Artificial Sequence
  Description of Artificial Sequence: Synthetic oligonucleotide
  X-linked inhibitor of apoptosis (XIAP) siRNA
tggcacgagcagggtttctttat

SEQ ID NO: 10561 - DNA, 23 bp, Artificial Sequence
  Description of Artificial Sequence: Synthetic oligonucleotide
  X-linked inhibitor of apoptosis (XIAP) siRNA
ggcacgagcagggtttctttata

SEQ ID NO: 10562 - DNA, 23 bp, Artificial Sequence
  Description of Artificial Sequence: Synthetic oligonucleotide
  X-linked inhibitor of apoptosis (XIAP) siRNA
gcacgagcagggtttctttatac

SEQ ID NO: 10563 - DNA, 23 bp, Artificial Sequence
  Description of Artificial Sequence: Synthetic oligonucleotide
  X-linked inhibitor of apoptosis (XIAP) siRNA
cacgagcagggtttctttatact

SEQ ID NO: 10564 - DNA, 23 bp, Artificial Sequence
  Description of Artificial Sequence: Synthetic oligonucleotide
  X-linked inhibitor of apoptosis (XIAP) siRNA
acgagcagggtttctttatactg

SEQ ID NO: 10565 - DNA, 23 bp, Artificial Sequence
  Description of Artificial Sequence: Synthetic oligonucleotide
  X-linked inhibitor of apoptosis (XIAP) siRNA
cgagcagggtttctttatactgg

SEQ ID NO: 10566 - DNA, 23 bp, Artificial Sequence
  Description of Artificial Sequence: Synthetic oligonucleotide
  X-linked inhibitor of apoptosis (XIAP) siRNA
gagcagggtttctttatactggt

SEQ ID NO: 10567 - DNA, 23 bp, Artificial Sequence
  Description of Artificial Sequence: Synthetic oligonucleotide
  X-linked inhibitor of apoptosis (XIAP) siRNA
agcagggtttctttatactggtg

SEQ ID NO: 10568 - DNA, 23 bp, Artificial Sequence
  Description of Artificial Sequence: Synthetic oligonucleotide
  X-linked inhibitor of apoptosis (XIAP) siRNA
gcagggtttctttatactggtga

SEQ ID NO: 10569 - DNA, 23 bp, Artificial Sequence
  Description of Artificial Sequence: Synthetic oligonucleotide
  X-linked inhibitor of apoptosis (XIAP) siRNA
cagggtttctttatactggtgaa

SEQ ID NO: 10570 - DNA, 23 bp, Artificial Sequence
  Description of Artificial Sequence: Synthetic oligonucleotide
  X-linked inhibitor of apoptosis (XIAP) siRNA
agggtttctttatactggtgaag

SEQ ID NO: 10571 - DNA, 23 bp, Artificial Sequence
  Description of Artificial Sequence: Synthetic oligonucleotide
  X-linked inhibitor of apoptosis (XIAP) siRNA
gggtttctttatactggtgaagg

SEQ ID NO: 10572 - DNA, 23 bp, Artificial Sequence
  Description of Artificial Sequence: Synthetic oligonucleotide
  X-linked inhibitor of apoptosis (XIAP) siRNA
ggtttctttatactggtgaagga

SEQ ID NO: 10573 - DNA, 23 bp, Artificial Sequence
  Description of Artificial Sequence: Synthetic oligonucleotide
  X-linked inhibitor of apoptosis (XIAP) siRNA
gtttctttatactggtgaaggag

SEQ ID NO: 10574 - DNA, 23 bp, Artificial Sequence
  Description of Artificial Sequence: Synthetic oligonucleotide
  X-linked inhibitor of apoptosis (XIAP) siRNA
tttctttatactggtgaaggaga

SEQ ID NO: 10575 - DNA, 23 bp, Artificial Sequence
  Description of Artificial Sequence: Synthetic oligonucleotide
  X-linked inhibitor of apoptosis (XIAP) siRNA
ttctttatactggtgaaggagat

SEQ ID NO: 10576 - DNA, 23 bp, Artificial Sequence
  Description of Artificial Sequence: Synthetic oligonucleotide
  X-linked inhibitor of apoptosis (XIAP) siRNA
tctttatactggtgaaggagata

SEQ ID NO: 10577 - DNA, 23 bp, Artificial Sequence
  Description of Artificial Sequence: Synthetic oligonucleotide
  X-linked inhibitor of apoptosis (XIAP) siRNA
ctttatactggtgaaggagatac

SEQ ID NO: 10578 - DNA, 23 bp, Artificial Sequence
  Description of Artificial Sequence: Synthetic oligonucleotide
  X-linked inhibitor of apoptosis (XIAP) siRNA
tttatactggtgaaggagatacc

SEQ ID NO: 10579 - DNA, 23 bp, Artificial Sequence
  Description of Artificial Sequence: Synthetic oligonucleotide
  X-linked inhibitor of apoptosis (XIAP) siRNA
ttatactggtgaaggagataccg

SEQ ID NO: 10580 - DNA, 23 bp, Artificial Sequence
  Description of Artificial Sequence: Synthetic oligonucleotide
  X-linked inhibitor of apoptosis (XIAP) siRNA
tatactggtgaaggagataccgt

SEQ ID NO: 10581 - DNA, 23 bp, Artificial Sequence
  Description of Artificial Sequence: Synthetic oligonucleotide
  X-linked inhibitor of apoptosis (XIAP) siRNA
atactggtgaaggagataccgtg

SEQ ID NO: 10582 - DNA, 23 bp, Artificial Sequence
  Description of Artificial Sequence: Synthetic oligonucleotide
  X-linked inhibitor of apoptosis (XIAP) siRNA
tactggtgaaggagataccgtgc

SEQ ID NO: 10583 - DNA, 23 bp, Artificial Sequence
  Description of Artificial Sequence: Synthetic oligonucleotide
  X-linked inhibitor of apoptosis (XIAP) siRNA
actggtgaaggagataccgtgcg

SEQ ID NO: 10584 - DNA, 23 bp, Artificial Sequence
  Description of Artificial Sequence: Synthetic oligonucleotide
  X-linked inhibitor of apoptosis (XIAP) siRNA
ctggtgaaggagataccgtgcgg

SEQ ID NO: 10585 - DNA, 23 bp, Artificial Sequence
  Description of Artificial Sequence: Synthetic oligonucleotide
  X-linked inhibitor of apoptosis (XIAP) siRNA
tggtgaaggagataccgtgcggt

SEQ ID NO: 10586 - DNA, 23 bp, Artificial Sequence
  Description of Artificial Sequence: Synthetic oligonucleotide
  X-linked inhibitor of apoptosis (XIAP) siRNA
ggtgaaggagataccgtgcggtg

SEQ ID NO: 10587 - DNA, 23 bp, Artificial Sequence
  Description of Artificial Sequence: Synthetic oligonucleotide
  X-linked inhibitor of apoptosis (XIAP) siRNA
gtgaaggagataccgtgcggtgc

SEQ ID NO: 10588 - DNA, 23 bp, Artificial Sequence
  Description of Artificial Sequence: Synthetic oligonucleotide
  X-linked inhibitor of apoptosis (XIAP) siRNA
tgaaggagataccgtgcggtgct

SEQ ID NO: 10589 - DNA, 23 bp, Artificial Sequence
  Description of Artificial Sequence: Synthetic oligonucleotide
  X-linked inhibitor of apoptosis (XIAP) siRNA
gaaggagataccgtgcggtgctt

SEQ ID NO: 10590 - DNA, 23 bp, Artificial Sequence
  Description of Artificial Sequence: Synthetic oligonucleotide
  X-linked inhibitor of apoptosis (XIAP) siRNA
aaggagataccgtgcggtgcttt

SEQ ID NO: 10591 - DNA, 23 bp, Artificial Sequence
  Description of Artificial Sequence: Synthetic oligonucleotide
  X-linked inhibitor of apoptosis (XIAP) siRNA
aggagataccgtgcggtgcttta

SEQ ID NO: 10592 - DNA, 23 bp, Artificial Sequence
  Description of Artificial Sequence: Synthetic oligonucleotide
  X-linked inhibitor of apoptosis (XIAP) siRNA
ggagataccgtgcggtgctttag

SEQ ID NO: 10593 - DNA, 23 bp, Artificial Sequence
  Description of Artificial Sequence: Synthetic oligonucleotide
  X-linked inhibitor of apoptosis (XIAP) siRNA
gagataccgtgcggtgctttagt

SEQ ID NO: 10594 - DNA, 23 bp, Artificial Sequence
  Description of Artificial Sequence: Synthetic oligonucleotide
  X-linked inhibitor of apoptosis (XIAP) siRNA
agataccgtgcggtgctttagtt

SEQ ID NO: 10595 - DNA, 23 bp, Artificial Sequence
  Description of Artificial Sequence: Synthetic oligonucleotide
  X-linked inhibitor of apoptosis (XIAP) siRNA
gataccgtgcggtgctttagttg

SEQ ID NO: 10596 - DNA, 23 bp, Artificial Sequence
  Description of Artificial Sequence: Synthetic oligonucleotide
  X-linked inhibitor of apoptosis (XIAP) siRNA
ataccgtgcggtgctttagttgt

SEQ ID NO: 10597 - DNA, 23 bp, Artificial Sequence
  Description of Artificial Sequence: Synthetic oligonucleotide
  X-linked inhibitor of apoptosis (XIAP) siRNA
taccgtgcggtgctttagttgtc

SEQ ID NO: 10598 - DNA, 23 bp, Artificial Sequence
  Description of Artificial Sequence: Synthetic oligonucleotide
  X-linked inhibitor of apoptosis (XIAP) siRNA
accgtgcggtgctttagttgtca

SEQ ID NO: 10599 - DNA, 23 bp, Artificial Sequence
  Description of Artificial Sequence: Synthetic oligonucleotide
  X-linked inhibitor of apoptosis (XIAP) siRNA
ccgtgcggtgctttagttgtcat

SEQ ID NO: 10600 - DNA, 23 bp, Artificial Sequence
  Description of Artificial Sequence: Synthetic oligonucleotide
  X-linked inhibitor of apoptosis (XIAP) siRNA
cgtgcggtgctttagttgtcatg

SEQ ID NO: 10601 - DNA, 23 bp, Artificial Sequence
  Description of Artificial Sequence: Synthetic oligonucleotide
  X-linked inhibitor of apoptosis (XIAP) siRNA
gtgcggtgctttagttgtcatgc

SEQ ID NO: 10602 - DNA, 23 bp, Artificial Sequence
  Description of Artificial Sequence: Synthetic oligonucleotide
  X-linked inhibitor of apoptosis (XIAP) siRNA
tgcggtgctttagttgtcatgca

SEQ ID NO: 10603 - DNA, 23 bp, Artificial Sequence
  Description of Artificial Sequence: Synthetic oligonucleotide
  X-linked inhibitor of apoptosis (XIAP) siRNA
gcggtgctttagttgtcatgcag

SEQ ID NO: 10604 - DNA, 23 bp, Artificial Sequence
  Description of Artificial Sequence: Synthetic oligonucleotide
  X-linked inhibitor of apoptosis (XIAP) siRNA
cggtgctttagttgtcatgcagc

SEQ ID NO: 10605 - DNA, 23 bp, Artificial Sequence
  Description of Artificial Sequence: Synthetic oligonucleotide
  X-linked inhibitor of apoptosis (XIAP) siRNA
ggtgctttagttgtcatgcagct

SEQ ID NO: 10606 - DNA, 23 bp, Artificial Sequence
  Description of Artificial Sequence: Synthetic oligonucleotide
  X-linked inhibitor of apoptosis (XIAP) siRNA
gtgctttagttgtcatgcagctg

SEQ ID NO: 10607 - DNA, 23 bp, Artificial Sequence
  Description of Artificial Sequence: Synthetic oligonucleotide
  X-linked inhibitor of apoptosis (XIAP) siRNA
tgctttagttgtcatgcagctgt

SEQ ID NO: 10608 - DNA, 23 bp, Artificial Sequence
  Description of Artificial Sequence: Synthetic oligonucleotide
  X-linked inhibitor of apoptosis (XIAP) siRNA
gctttagttgtcatgcagctgta

SEQ ID NO: 10609 - DNA, 23 bp, Artificial Sequence
  Description of Artificial Sequence: Synthetic oligonucleotide
  X-linked inhibitor of apoptosis (XIAP) siRNA
ctttagttgtcatgcagctgtag

SEQ ID NO: 10610 - DNA, 23 bp, Artificial Sequence
  Description of Artificial Sequence: Synthetic oligonucleotide
  X-linked inhibitor of apoptosis (XIAP) siRNA
tttagttgtcatgcagctgtaga

SEQ ID NO: 10611 - DNA, 23 bp, Artificial Sequence
  Description of Artificial Sequence: Synthetic oligonucleotide
  X-linked inhibitor of apoptosis (XIAP) siRNA
ttagttgtcatgcagctgtagat

SEQ ID NO: 10612 - DNA, 23 bp, Artificial Sequence
  Description of Artificial Sequence: Synthetic oligonucleotide
  X-linked inhibitor of apoptosis (XIAP) siRNA
tagttgtcatgcagctgtagata

SEQ ID NO: 10613 - DNA, 23 bp, Artificial Sequence
  Description of Artificial Sequence: Synthetic oligonucleotide
  X-linked inhibitor of apoptosis (XIAP) siRNA
agttgtcatgcagctgtagatag

SEQ ID NO: 10614 - DNA, 23 bp, Artificial Sequence
  Description of Artificial Sequence: Synthetic oligonucleotide
  X-linked inhibitor of apoptosis (XIAP) siRNA
gttgtcatgcagctgtagataga

SEQ ID NO: 10615 - DNA, 23 bp, Artificial Sequence
  Description of Artificial Sequence: Synthetic oligonucleotide
  X-linked inhibitor of apoptosis (XIAP) siRNA
ttgtcatgcagctgtagatagat

SEQ ID NO: 10616 - DNA, 23 bp, Artificial Sequence
  Description of Artificial Sequence: Synthetic oligonucleotide
  X-linked inhibitor of apoptosis (XIAP) siRNA
tgtcatgcagctgtagatagatg

SEQ ID NO: 10617 - DNA, 23 bp, Artificial Sequence
  Description of Artificial Sequence: Synthetic oligonucleotide
  X-linked inhibitor of apoptosis (XIAP) siRNA
gtcatgcagctgtagatagatgg

SEQ ID NO: 10618 - DNA, 23 bp, Artificial Sequence
  Description of Artificial Sequence: Synthetic oligonucleotide
  X-linked inhibitor of apoptosis (XIAP) siRNA
tcatgcagctgtagatagatggc

SEQ ID NO: 10619 - DNA, 23 bp, Artificial Sequence
  Description of Artificial Sequence: Synthetic oligonucleotide
  X-linked inhibitor of apoptosis (XIAP) siRNA
catgcagctgtagatagatggca

SEQ ID NO: 10620 - DNA, 23 bp, Artificial Sequence
  Description of Artificial Sequence: Synthetic oligonucleotide
  X-linked inhibitor of apoptosis (XIAP) siRNA
atgcagctgtagatagatggcaa

SEQ ID NO: 10621 - DNA, 23 bp, Artificial Sequence
  Description of Artificial Sequence: Synthetic oligonucleotide
  X-linked inhibitor of apoptosis (XIAP) siRNA
tgcagctgtagatagatggcaat

SEQ ID NO: 10622 - DNA, 23 bp, Artificial Sequence
  Description of Artificial Sequence: Synthetic oligonucleotide
  X-linked inhibitor of apoptosis (XIAP) siRNA
gcagctgtagatagatggcaata

SEQ ID NO: 10623 - DNA, 23 bp, Artificial Sequence
  Description of Artificial Sequence: Synthetic oligonucleotide
  X-linked inhibitor of apoptosis (XIAP) siRNA
cagctgtagatagatggcaatat

SEQ ID NO: 10624 - DNA, 23 bp, Artificial Sequence
  Description of Artificial Sequence: Synthetic oligonucleotide
  X-linked inhibitor of apoptosis (XIAP) siRNA
agctgtagatagatggcaatatg

SEQ ID NO: 10625 - DNA, 23 bp, Artificial Sequence
  Description of Artificial Sequence: Synthetic oligonucleotide
  X-linked inhibitor of apoptosis (XIAP) siRNA
gctgtagatagatggcaatatgg

SEQ ID NO: 10626 - DNA, 23 bp, Artificial Sequence
  Description of Artificial Sequence: Synthetic oligonucleotide
  X-linked inhibitor of apoptosis (XIAP) siRNA
ctgtagatagatggcaatatgga

SEQ ID NO: 10627 - DNA, 23 bp, Artificial Sequence
  Description of Artificial Sequence: Synthetic oligonucleotide
  X-linked inhibitor of apoptosis (XIAP) siRNA
tgtagatagatggcaatatggag

SEQ ID NO: 10628 - DNA, 23 bp, Artificial Sequence
  Description of Artificial Sequence: Synthetic oligonucleotide
  X-linked inhibitor of apoptosis (XIAP) siRNA
gtagatagatggcaatatggaga

SEQ ID NO: 10629 - DNA, 23 bp, Artificial Sequence
  Description of Artificial Sequence: Synthetic oligonucleotide
  X-linked inhibitor of apoptosis (XIAP) siRNA
tagatagatggcaatatggagac

SEQ ID NO: 10630 - DNA, 23 bp, Artificial Sequence
  Description of Artificial Sequence: Synthetic oligonucleotide
  X-linked inhibitor of apoptosis (XIAP) siRNA
agatagatggcaatatggagact

SEQ ID NO: 10631 - DNA, 23 bp, Artificial Sequence
  Description of Artificial Sequence: Synthetic oligonucleotide
  X-linked inhibitor of apoptosis (XIAP) siRNA
gatagatggcaatatggagactc

SEQ ID NO: 10632 - DNA, 23 bp, Artificial Sequence
  Description of Artificial Sequence: Synthetic oligonucleotide
  X-linked inhibitor of apoptosis (XIAP) siRNA
atagatggcaatatggagactca

SEQ ID NO: 10633 - DNA, 23 bp, Artificial Sequence
  Description of Artificial Sequence: Synthetic oligonucleotide
  X-linked inhibitor of apoptosis (XIAP) siRNA
tagatggcaatatggagactcag

SEQ ID NO: 10634 - DNA, 23 bp, Artificial Sequence
  Description of Artificial Sequence: Synthetic oligonucleotide
  X-linked inhibitor of apoptosis (XIAP) siRNA
agatggcaatatggagactcagc

SEQ ID NO: 10635 - DNA, 23 bp, Artificial Sequence
  Description of Artificial Sequence: Synthetic oligonucleotide
  X-linked inhibitor of apoptosis (XIAP) siRNA
gatggcaatatggagactcagca

SEQ ID NO: 10636 - DNA, 23 bp, Artificial Sequence
  Description of Artificial Sequence: Synthetic oligonucleotide
  X-linked inhibitor of apoptosis (XIAP) siRNA
atggcaatatggagactcagcag

SEQ ID NO: 10637 - DNA, 23 bp, Artificial Sequence
  Description of Artificial Sequence: Synthetic oligonucleotide
  X-linked inhibitor of apoptosis (XIAP) siRNA
tggcaatatggagactcagcagt

SEQ ID NO: 10638 - DNA, 23 bp, Artificial Sequence
  Description of Artificial Sequence: Synthetic oligonucleotide
  X-linked inhibitor of apoptosis (XIAP) siRNA
ggcaatatggagactcagcagtt

SEQ ID NO: 10639 - DNA, 23 bp, Artificial Sequence
  Description of Artificial Sequence: Synthetic oligonucleotide
  X-linked inhibitor of apoptosis (XIAP) siRNA
gcaatatggagactcagcagttg

SEQ ID NO: 10640 - DNA, 23 bp, Artificial Sequence
  Description of Artificial Sequence: Synthetic oligonucleotide
  X-linked inhibitor of apoptosis (XIAP) siRNA
caatatggagactcagcagttgg

SEQ ID NO: 10641 - DNA, 23 bp, Artificial Sequence
  Description of Artificial Sequence: Synthetic oligonucleotide
  X-linked inhibitor of apoptosis (XIAP) siRNA
aatatggagactcagcagttgga

SEQ ID NO: 10642 - DNA, 23 bp, Artificial Sequence
  Description of Artificial Sequence: Synthetic oligonucleotide
  X-linked inhibitor of apoptosis (XIAP) siRNA
atatggagactcagcagttggaa

SEQ ID NO: 10643 - DNA, 23 bp, Artificial Sequence
  Description of Artificial Sequence: Synthetic oligonucleotide
  X-linked inhibitor of apoptosis (XIAP) siRNA
tatggagactcagcagttggaag

SEQ ID NO: 10644 - DNA, 23 bp, Artificial Sequence
  Description of Artificial Sequence: Synthetic oligonucleotide
  X-linked inhibitor of apoptosis (XIAP) siRNA
atggagactcagcagttggaaga

SEQ ID NO: 10645 - DNA, 23 bp, Artificial Sequence
  Description of Artificial Sequence: Synthetic oligonucleotide
  X-linked inhibitor of apoptosis (XIAP) siRNA
tggagactcagcagttggaagac

SEQ ID NO: 10646 - DNA, 23 bp, Artificial Sequence
  Description of Artificial Sequence: Synthetic oligonucleotide
  X-linked inhibitor of apoptosis (XIAP) siRNA
ggagactcagcagttggaagaca

SEQ ID NO: 10647 - DNA, 23 bp, Artificial Sequence
  Description of Artificial Sequence: Synthetic oligonucleotide
  X-linked inhibitor of apoptosis (XIAP) siRNA
gagactcagcagttggaagacac

SEQ ID NO: 10648 - DNA, 23 bp, Artificial Sequence
  Description of Artificial Sequence: Synthetic oligonucleotide
  X-linked inhibitor of apoptosis (XIAP) siRNA
agactcagcagttggaagacaca

SEQ ID NO: 10649 - DNA, 23 bp, Artificial Sequence
  Description of Artificial Sequence: Synthetic oligonucleotide
  X-linked inhibitor of apoptosis (XIAP) siRNA
gactcagcagttggaagacacag

SEQ ID NO: 10650 - DNA, 23 bp, Artificial Sequence
  Description of Artificial Sequence: Synthetic oligonucleotide
  X-linked inhibitor of apoptosis (XIAP) siRNA
actcagcagttggaagacacagg

SEQ ID NO: 10651 - DNA, 23 bp, Artificial Sequence
  Description of Artificial Sequence: Synthetic oligonucleotide
  X-linked inhibitor of apoptosis (XIAP) siRNA
ctcagcagttggaagacacagga

SEQ ID NO: 10652 - DNA, 23 bp, Artificial Sequence
  Description of Artificial Sequence: Synthetic oligonucleotide
  X-linked inhibitor of apoptosis (XIAP) siRNA
tcagcagttggaagacacaggaa

SEQ ID NO: 10653 - DNA, 23 bp, Artificial Sequence
  Description of Artificial Sequence: Synthetic oligonucleotide
  X-linked inhibitor of apoptosis (XIAP) siRNA
cagcagttggaagacacaggaaa

SEQ ID NO: 10654 - DNA, 23 bp, Artificial Sequence
  Description of Artificial Sequence: Synthetic oligonucleotide
  X-linked inhibitor of apoptosis (XIAP) siRNA
agcagttggaagacacaggaaag

SEQ ID NO: 10655 - DNA, 23 bp, Artificial Sequence
  Description of Artificial Sequence: Synthetic oligonucleotide
  X-linked inhibitor of apoptosis (XIAP) siRNA
gcagttggaagacacaggaaagt

SEQ ID NO: 10656 - DNA, 23 bp, Artificial Sequence
  Description of Artificial Sequence: Synthetic oligonucleotide
  X-linked inhibitor of apoptosis (XIAP) siRNA
cagttggaagacacaggaaagta

SEQ ID NO: 10657 - DNA, 23 bp, Artificial Sequence
  Description of Artificial Sequence: Synthetic oligonucleotide
  X-linked inhibitor of apoptosis (XIAP) siRNA
agttggaagacacaggaaagtat

SEQ ID NO: 10658 - DNA, 23 bp, Artificial Sequence
  Description of Artificial Sequence: Synthetic oligonucleotide
  X-linked inhibitor of apoptosis (XIAP) siRNA
gttggaagacacaggaaagtatc

SEQ ID NO: 10659 - DNA, 23 bp, Artificial Sequence
  Description of Artificial Sequence: Synthetic oligonucleotide
  X-linked inhibitor of apoptosis (XIAP) siRNA
ttggaagacacaggaaagtatcc

SEQ ID NO: 10660 - DNA, 23 bp, Artificial Sequence
  Description of Artificial Sequence: Synthetic oligonucleotide
  X-linked inhibitor of apoptosis (XIAP) siRNA
tggaagacacaggaaagtatccc

SEQ ID NO: 10661 - DNA, 23 bp, Artificial Sequence
  Description of Artificial Sequence: Synthetic oligonucleotide
  X-linked inhibitor of apoptosis (XIAP) siRNA
ggaagacacaggaaagtatcccc

SEQ ID NO: 10662 - DNA, 23 bp, Artificial Sequence
  Description of Artificial Sequence: Synthetic oligonucleotide
  X-linked inhibitor of apoptosis (XIAP) siRNA
gaagacacaggaaagtatcccca

SEQ ID NO: 10663 - DNA, 23 bp, Artificial Sequence
  Description of Artificial Sequence: Synthetic oligonucleotide
  X-linked inhibitor of apoptosis (XIAP) siRNA
aagacacaggaaagtatccccaa

SEQ ID NO: 10664 - DNA, 23 bp, Artificial Sequence
  Description of Artificial Sequence: Synthetic oligonucleotide
  X-linked inhibitor of apoptosis (XIAP) siRNA
agacacaggaaagtatccccaaa

SEQ ID NO: 10665 - DNA, 23 bp, Artificial Sequence
  Description of Artificial Sequence: Synthetic oligonucleotide
  X-linked inhibitor of apoptosis (XIAP) siRNA
gacacaggaaagtatccccaaat

SEQ ID NO: 10666 - DNA, 23 bp, Artificial Sequence
  Description of Artificial Sequence: Synthetic oligonucleotide
  X-linked inhibitor of apoptosis (XIAP) siRNA
acacaggaaagtatccccaaatt

SEQ ID NO: 10667 - DNA, 23 bp, Artificial Sequence
  Description of Artificial Sequence: Synthetic oligonucleotide
  X-linked inhibitor of apoptosis (XIAP) siRNA
cacaggaaagtatccccaaattg

SEQ ID NO: 10668 - DNA, 23 bp, Artificial Sequence
  Description of Artificial Sequence: Synthetic oligonucleotide
  X-linked inhibitor of apoptosis (XIAP) siRNA
acaggaaagtatccccaaattgc

SEQ ID NO: 10669 - DNA, 23 bp, Artificial Sequence
  Description of Artificial Sequence: Synthetic oligonucleotide
  X-linked inhibitor of apoptosis (XIAP) siRNA
caggaaagtatccccaaattgca

SEQ ID NO: 10670 - DNA, 23 bp, Artificial Sequence
  Description of Artificial Sequence: Synthetic oligonucleotide
  X-linked inhibitor of apoptosis (XIAP) siRNA
aggaaagtatccccaaattgcag

SEQ ID NO: 10671 - DNA, 23 bp, Artificial Sequence
  Description of Artificial Sequence: Synthetic oligonucleotide
  X-linked inhibitor of apoptosis (XIAP) siRNA
ggaaagtatccccaaattgcaga

SEQ ID NO: 10672 - DNA, 23 bp, Artificial Sequence
  Description of Artificial Sequence: Synthetic oligonucleotide
  X-linked inhibitor of apoptosis (XIAP) siRNA
gaaagtatccccaaattgcagat

SEQ ID NO: 10673 - DNA, 23 bp, Artificial Sequence
  Description of Artificial Sequence: Synthetic oligonucleotide
  X-linked inhibitor of apoptosis (XIAP) siRNA
aaagtatccccaaattgcagatt

SEQ ID NO: 10674 - DNA, 23 bp, Artificial Sequence
  Description of Artificial Sequence: Synthetic oligonucleotide
  X-linked inhibitor of apoptosis (XIAP) siRNA
aagtatccccaaattgcagattt

SEQ ID NO: 10675 - DNA, 23 bp, Artificial Sequence
  Description of Artificial Sequence: Synthetic oligonucleotide
  X-linked inhibitor of apoptosis (XIAP) siRNA
agtatccccaaattgcagattta

SEQ ID NO: 10676 - DNA, 23 bp, Artificial Sequence
  Description of Artificial Sequence: Synthetic oligonucleotide
  X-linked inhibitor of apoptosis (XIAP) siRNA
gtatccccaaattgcagatttat

SEQ ID NO: 10677 - DNA, 23 bp, Artificial Sequence
  Description of Artificial Sequence: Synthetic oligonucleotide
  X-linked inhibitor of apoptosis (XIAP) siRNA
tatccccaaattgcagatttatc

SEQ ID NO: 10678 - DNA, 23 bp, Artificial Sequence
  Description of Artificial Sequence: Synthetic oligonucleotide
  X-linked inhibitor of apoptosis (XIAP) siRNA
atccccaaattgcagatttatca

SEQ ID NO: 10679 - DNA, 23 bp, Artificial Sequence
  Description of Artificial Sequence: Synthetic oligonucleotide
  X-linked inhibitor of apoptosis (XIAP) siRNA
tccccaaattgcagatttatcaa

SEQ ID NO: 10680 - DNA, 23 bp, Artificial Sequence
  Description of Artificial Sequence: Synthetic oligonucleotide
  X-linked inhibitor of apoptosis (XIAP) siRNA
ccccaaattgcagatttatcaac

SEQ ID NO: 10681 - DNA, 23 bp, Artificial Sequence
  Description of Artificial Sequence: Synthetic oligonucleotide
  X-linked inhibitor of apoptosis (XIAP) siRNA
cccaaattgcagatttatcaacg

SEQ ID NO: 10682 - DNA, 23 bp, Artificial Sequence
  Description of Artificial Sequence: Synthetic oligonucleotide
  X-linked inhibitor of apoptosis (XIAP) siRNA
ccaaattgcagatttatcaacgg

SEQ ID NO: 10683 - DNA, 23 bp, Artificial Sequence
  Description of Artificial Sequence: Synthetic oligonucleotide
  X-linked inhibitor of apoptosis (XIAP) siRNA
caaattgcagatttatcaacggc

SEQ ID NO: 10684 - DNA, 23 bp, Artificial Sequence
  Description of Artificial Sequence: Synthetic oligonucleotide
  X-linked inhibitor of apoptosis (XIAP) siRNA
aaattgcagatttatcaacggct

SEQ ID NO: 10685 - DNA, 23 bp, Artificial Sequence
  Description of Artificial Sequence: Synthetic oligonucleotide
  X-linked inhibitor of apoptosis (XIAP) siRNA
aattgcagatttatcaacggctt

SEQ ID NO: 10686 - DNA, 23 bp, Artificial Sequence
  Description of Artificial Sequence: Synthetic oligonucleotide
  X-linked inhibitor of apoptosis (XIAP) siRNA
attgcagatttatcaacggcttt

SEQ ID NO: 10687 - DNA, 23 bp, Artificial Sequence
  Description of Artificial Sequence: Synthetic oligonucleotide
  X-linked inhibitor of apoptosis (XIAP) siRNA
ttgcagatttatcaacggctttt

SEQ ID NO: 10688 - DNA, 23 bp, Artificial Sequence
  Description of Artificial Sequence: Synthetic oligonucleotide
  X-linked inhibitor of apoptosis (XIAP) siRNA
tgcagatttatcaacggctttta

SEQ ID NO: 10689 - DNA, 23 bp, Artificial Sequence
  Description of Artificial Sequence: Synthetic oligonucleotide
  X-linked inhibitor of apoptosis (XIAP) siRNA
gcagatttatcaacggcttttat

SEQ ID NO: 10690 - DNA, 23 bp, Artificial Sequence
  Description of Artificial Sequence: Synthetic oligonucleotide
  X-linked inhibitor of apoptosis (XIAP) siRNA
cagatttatcaacggcttttatc

SEQ ID NO: 10691 - DNA, 23 bp, Artificial Sequence
  Description of Artificial Sequence: Synthetic oligonucleotide
  X-linked inhibitor of apoptosis (XIAP) siRNA
agatttatcaacggcttttatct

SEQ ID NO: 10692 - DNA, 23 bp, Artificial Sequence
  Description of Artificial Sequence: Synthetic oligonucleotide
  X-linked inhibitor of apoptosis (XIAP) siRNA
gatttatcaacggcttttatctt

SEQ ID NO: 10693 - DNA, 23 bp, Artificial Sequence
  Description of Artificial Sequence: Synthetic oligonucleotide
  X-linked inhibitor of apoptosis (XIAP) siRNA
atttatcaacggcttttatcttg

SEQ ID NO: 10694 - DNA, 23 bp, Artificial Sequence
  Description of Artificial Sequence: Synthetic oligonucleotide
  X-linked inhibitor of apoptosis (XIAP) siRNA
tttatcaacggcttttatcttga

SEQ ID NO: 10695 - DNA, 23 bp, Artificial Sequence
  Description of Artificial Sequence: Synthetic oligonucleotide
  X-linked inhibitor of apoptosis (XIAP) siRNA
ttatcaacggcttttatcttgaa

SEQ ID NO: 10696 - DNA, 23 bp, Artificial Sequence
  Description of Artificial Sequence: Synthetic oligonucleotide
  X-linked inhibitor of apoptosis (XIAP) siRNA
tatcaacggcttttatcttgaaa

SEQ ID NO: 10697 - DNA, 23 bp, Artificial Sequence
  Description of Artificial Sequence: Synthetic oligonucleotide
  X-linked inhibitor of apoptosis (XIAP) siRNA
atcaacggcttttatcttgaaaa

SEQ ID NO: 10698 - DNA, 23 bp, Artificial Sequence
  Description of Artificial Sequence: Synthetic oligonucleotide
  X-linked inhibitor of apoptosis (XIAP) siRNA
tcaacggcttttatcttgaaaat

SEQ ID NO: 10699 - DNA, 23 bp, Artificial Sequence
  Description of Artificial Sequence: Synthetic oligonucleotide
  X-linked inhibitor of apoptosis (XIAP) siRNA
caacggcttttatcttgaaaata

SEQ ID NO: 10700 - DNA, 23 bp, Artificial Sequence
  Description of Artificial Sequence: Synthetic oligonucleotide
  X-linked inhibitor of apoptosis (XIAP) siRNA
aacggcttttatcttgaaaatag

SEQ ID NO: 10701 - DNA, 23 bp, Artificial Sequence
  Description of Artificial Sequence: Synthetic oligonucleotide
  X-linked inhibitor of apoptosis (XIAP) siRNA
acggcttttatcttgaaaatagt

SEQ ID NO: 10702 - DNA, 23 bp, Artificial Sequence
  Description of Artificial Sequence: Synthetic oligonucleotide
  X-linked inhibitor of apoptosis (XIAP) siRNA
cggcttttatcttgaaaatagtg

SEQ ID NO: 10703 - DNA, 23 bp, Artificial Sequence
  Description of Artificial Sequence: Synthetic oligonucleotide
  X-linked inhibitor of apoptosis (XIAP) siRNA
ggcttttatcttgaaaatagtgc

SEQ ID NO: 10704 - DNA, 23 bp, Artificial Sequence
  Description of Artificial Sequence: Synthetic oligonucleotide
  X-linked inhibitor of apoptosis (XIAP) siRNA
gcttttatcttgaaaatagtgcc

SEQ ID NO: 10705 - DNA, 23 bp, Artificial Sequence
  Description of Artificial Sequence: Synthetic oligonucleotide
  X-linked inhibitor of apoptosis (XIAP) siRNA
cttttatcttgaaaatagtgcca

SEQ ID NO: 10706 - DNA, 23 bp, Artificial Sequence
  Description of Artificial Sequence: Synthetic oligonucleotide
  X-linked inhibitor of apoptosis (XIAP) siRNA
ttttatcttgaaaatagtgccac

SEQ ID NO: 10707 - DNA, 23 bp, Artificial Sequence
  Description of Artificial Sequence: Synthetic oligonucleotide
  X-linked inhibitor of apoptosis (XIAP) siRNA
tttatcttgaaaatagtgccacg

SEQ ID NO: 10708 - DNA, 23 bp, Artificial Sequence
  Description of Artificial Sequence: Synthetic oligonucleotide
  X-linked inhibitor of apoptosis (XIAP) siRNA
ttatcttgaaaatagtgccacgc

SEQ ID NO: 10709 - DNA, 23 bp, Artificial Sequence
  Description of Artificial Sequence: Synthetic oligonucleotide
  X-linked inhibitor of apoptosis (XIAP) siRNA
tatcttgaaaatagtgccacgca

SEQ ID NO: 10710 - DNA, 23 bp, Artificial Sequence
  Description of Artificial Sequence: Synthetic oligonucleotide
  X-linked inhibitor of apoptosis (XIAP) siRNA
atcttgaaaatagtgccacgcag

SEQ ID NO: 10711 - DNA, 23 bp, Artificial Sequence
  Description of Artificial Sequence: Synthetic oligonucleotide
  X-linked inhibitor of apoptosis (XIAP) siRNA
tcttgaaaatagtgccacgcagt

SEQ ID NO: 10712 - DNA, 23 bp, Artificial Sequence
  Description of Artificial Sequence: Synthetic oligonucleotide
  X-linked inhibitor of apoptosis (XIAP) siRNA
cttgaaaatagtgccacgcagtc

SEQ ID NO: 10713 - DNA, 23 bp, Artificial Sequence
  Description of Artificial Sequence: Synthetic oligonucleotide
  X-linked inhibitor of apoptosis (XIAP) siRNA
ttgaaaatagtgccacgcagtct

SEQ ID NO: 10714 - DNA, 23 bp, Artificial Sequence
  Description of Artificial Sequence: Synthetic oligonucleotide
  X-linked inhibitor of apoptosis (XIAP) siRNA
tgaaaatagtgccacgcagtcta

SEQ ID NO: 10715 - DNA, 23 bp, Artificial Sequence
  Description of Artificial Sequence: Synthetic oligonucleotide
  X-linked inhibitor of apoptosis (XIAP) siRNA
gaaaatagtgccacgcagtctac

SEQ ID NO: 10716 - DNA, 23 bp, Artificial Sequence
  Description of Artificial Sequence: Synthetic oligonucleotide
  X-linked inhibitor of apoptosis (XIAP) siRNA
aaaatagtgccacgcagtctaca

SEQ ID NO: 10717 - DNA, 23 bp, Artificial Sequence
  Description of Artificial Sequence: Synthetic oligonucleotide
  X-linked inhibitor of apoptosis (XIAP) siRNA
aaatagtgccacgcagtctacaa

SEQ ID NO: 10718 - DNA, 23 bp, Artificial Sequence
  Description of Artificial Sequence: Synthetic oligonucleotide
  X-linked inhibitor of apoptosis (XIAP) siRNA
aatagtgccacgcagtctacaaa

SEQ ID NO: 10719 - DNA, 23 bp, Artificial Sequence
  Description of Artificial Sequence: Synthetic oligonucleotide
  X-linked inhibitor of apoptosis (XIAP) siRNA
atagtgccacgcagtctacaaat

SEQ ID NO: 10720 - DNA, 23 bp, Artificial Sequence
  Description of Artificial Sequence: Synthetic oligonucleotide
  X-linked inhibitor of apoptosis (XIAP) siRNA
tagtgccacgcagtctacaaatt

SEQ ID NO: 10721 - DNA, 23 bp, Artificial Sequence
  Description of Artificial Sequence: Synthetic oligonucleotide
  X-linked inhibitor of apoptosis (XIAP) siRNA
agtgccacgcagtctacaaattc

SEQ ID NO: 10722 - DNA, 23 bp, Artificial Sequence
  Description of Artificial Sequence: Synthetic oligonucleotide
  X-linked inhibitor of apoptosis (XIAP) siRNA
gtgccacgcagtctacaaattct

SEQ ID NO: 10723 - DNA, 23 bp, Artificial Sequence
  Description of Artificial Sequence: Synthetic oligonucleotide
  X-linked inhibitor of apoptosis (XIAP) siRNA
tgccacgcagtctacaaattctg

SEQ ID NO: 10724 - DNA, 23 bp, Artificial Sequence
  Description of Artificial Sequence: Synthetic oligonucleotide
  X-linked inhibitor of apoptosis (XIAP) siRNA
gccacgcagtctacaaattctgg

SEQ ID NO: 10725 - DNA, 23 bp, Artificial Sequence
  Description of Artificial Sequence: Synthetic oligonucleotide
  X-linked inhibitor of apoptosis (XIAP) siRNA
ccacgcagtctacaaattctggt

SEQ ID NO: 10726 - DNA, 23 bp, Artificial Sequence
  Description of Artificial Sequence: Synthetic oligonucleotide
  X-linked inhibitor of apoptosis (XIAP) siRNA
cacgcagtctacaaattctggta

SEQ ID NO: 10727 - DNA, 23 bp, Artificial Sequence
  Description of Artificial Sequence: Synthetic oligonucleotide
  X-linked inhibitor of apoptosis (XIAP) siRNA
acgcagtctacaaattctggtat

SEQ ID NO: 10728 - DNA, 23 bp, Artificial Sequence
  Description of Artificial Sequence: Synthetic oligonucleotide
  X-linked inhibitor of apoptosis (XIAP) siRNA
cgcagtctacaaattctggtatc

SEQ ID NO: 10729 - DNA, 23 bp, Artificial Sequence
  Description of Artificial Sequence: Synthetic oligonucleotide
  X-linked inhibitor of apoptosis (XIAP) siRNA
gcagtctacaaattctggtatcc

SEQ ID NO: 10730 - DNA, 23 bp, Artificial Sequence
  Description of Artificial Sequence: Synthetic oligonucleotide
  X-linked inhibitor of apoptosis (XIAP) siRNA
cagtctacaaattctggtatcca

SEQ ID NO: 10731 - DNA, 23 bp, Artificial Sequence
  Description of Artificial Sequence: Synthetic oligonucleotide
  X-linked inhibitor of apoptosis (XIAP) siRNA
agtctacaaattctggtatccag

SEQ ID NO: 10732 - DNA, 23 bp, Artificial Sequence
  Description of Artificial Sequence: Synthetic oligonucleotide
  X-linked inhibitor of apoptosis (XIAP) siRNA
gtctacaaattctggtatccaga

SEQ ID NO: 10733 - DNA, 23 bp, Artificial Sequence
  Description of Artificial Sequence: Synthetic oligonucleotide
  X-linked inhibitor of apoptosis (XIAP) siRNA
tctacaaattctggtatccagaa

SEQ ID NO: 10734 - DNA, 23 bp, Artificial Sequence
  Description of Artificial Sequence: Synthetic oligonucleotide
  X-linked inhibitor of apoptosis (XIAP) siRNA
ctacaaattctggtatccagaat

SEQ ID NO: 10735 - DNA, 23 bp, Artificial Sequence
  Description of Artificial Sequence: Synthetic oligonucleotide
  X-linked inhibitor of apoptosis (XIAP) siRNA
tacaaattctggtatccagaatg

SEQ ID NO: 10736 - DNA, 23 bp, Artificial Sequence
  Description of Artificial Sequence: Synthetic oligonucleotide
  X-linked inhibitor of apoptosis (XIAP) siRNA
acaaattctggtatccagaatgg

SEQ ID NO: 10737 - DNA, 23 bp, Artificial Sequence
  Description of Artificial Sequence: Synthetic oligonucleotide
  X-linked inhibitor of apoptosis (XIAP) siRNA
caaattctggtatccagaatggt

SEQ ID NO: 10738 - DNA, 23 bp, Artificial Sequence
  Description of Artificial Sequence: Synthetic oligonucleotide
  X-linked inhibitor of apoptosis (XIAP) siRNA
aaattctggtatccagaatggtc

SEQ ID NO: 10739 - DNA, 23 bp, Artificial Sequence
  Description of Artificial Sequence: Synthetic oligonucleotide
  X-linked inhibitor of apoptosis (XIAP) siRNA
aattctggtatccagaatggtca

SEQ ID NO: 10740 - DNA, 23 bp, Artificial Sequence
  Description of Artificial Sequence: Synthetic oligonucleotide
  X-linked inhibitor of apoptosis (XIAP) siRNA
attctggtatccagaatggtcag

SEQ ID NO: 10741 - DNA, 23 bp, Artificial Sequence
  Description of Artificial Sequence: Synthetic oligonucleotide
  X-linked inhibitor of apoptosis (XIAP) siRNA
ttctggtatccagaatggtcagt

SEQ ID NO: 10742 - DNA, 23 bp, Artificial Sequence
  Description of Artificial Sequence: Synthetic oligonucleotide
  X-linked inhibitor of apoptosis (XIAP) siRNA
tctggtatccagaatggtcagta

SEQ ID NO: 10743 - DNA, 23 bp, Artificial Sequence
  Description of Artificial Sequence: Synthetic oligonucleotide
  X-linked inhibitor of apoptosis (XIAP) siRNA
ctggtatccagaatggtcagtac

SEQ ID NO: 10744 - DNA, 23 bp, Artificial Sequence
  Description of Artificial Sequence: Synthetic oligonucleotide
  X-linked inhibitor of apoptosis (XIAP) siRNA
tggtatccagaatggtcagtaca

SEQ ID NO: 10745 - DNA, 23 bp, Artificial Sequence
  Description of Artificial Sequence: Synthetic oligonucleotide
  X-linked inhibitor of apoptosis (XIAP) siRNA
ggtatccagaatggtcagtacaa

SEQ ID NO: 10746 - DNA, 23 bp, Artificial Sequence
  Description of Artificial Sequence: Synthetic oligonucleotide
  X-linked inhibitor of apoptosis (XIAP) siRNA
gtatccagaatggtcagtacaaa

SEQ ID NO: 10747 - DNA, 23 bp, Artificial Sequence
  Description of Artificial Sequence: Synthetic oligonucleotide
  X-linked inhibitor of apoptosis (XIAP) siRNA
tatccagaatggtcagtacaaag

SEQ ID NO: 10748 - DNA, 23 bp, Artificial Sequence
  Description of Artificial Sequence: Synthetic oligonucleotide
  X-linked inhibitor of apoptosis (XIAP) siRNA
atccagaatggtcagtacaaagt

SEQ ID NO: 10749 - DNA, 23 bp, Artificial Sequence
  Description of Artificial Sequence: Synthetic oligonucleotide
  X-linked inhibitor of apoptosis (XIAP) siRNA
tccagaatggtcagtacaaagtt

SEQ ID NO: 10750 - DNA, 23 bp, Artificial Sequence
  Description of Artificial Sequence: Synthetic oligonucleotide
  X-linked inhibitor of apoptosis (XIAP) siRNA
ccagaatggtcagtacaaagttg

SEQ ID NO: 10751 - DNA, 23 bp, Artificial Sequence
  Description of Artificial Sequence: Synthetic oligonucleotide
  X-linked inhibitor of apoptosis (XIAP) siRNA
cagaatggtcagtacaaagttga

SEQ ID NO: 10752 - DNA, 23 bp, Artificial Sequence
  Description of Artificial Sequence: Synthetic oligonucleotide
  X-linked inhibitor of apoptosis (XIAP) siRNA
agaatggtcagtacaaagttgaa

SEQ ID NO: 10753 - DNA, 23 bp, Artificial Sequence
  Description of Artificial Sequence: Synthetic oligonucleotide
  X-linked inhibitor of apoptosis (XIAP) siRNA
gaatggtcagtacaaagttgaaa

SEQ ID NO: 10754 - DNA, 23 bp, Artificial Sequence
  Description of Artificial Sequence: Synthetic oligonucleotide
  X-linked inhibitor of apoptosis (XIAP) siRNA
aatggtcagtacaaagttgaaaa

SEQ ID NO: 10755 - DNA, 23 bp, Artificial Sequence
  Description of Artificial Sequence: Synthetic oligonucleotide
  X-linked inhibitor of apoptosis (XIAP) siRNA
atggtcagtacaaagttgaaaac

SEQ ID NO: 10756 - DNA, 23 bp, Artificial Sequence
  Description of Artificial Sequence: Synthetic oligonucleotide
  X-linked inhibitor of apoptosis (XIAP) siRNA
tggtcagtacaaagttgaaaact

SEQ ID NO: 10757 - DNA, 23 bp, Artificial Sequence
  Description of Artificial Sequence: Synthetic oligonucleotide
  X-linked inhibitor of apoptosis (XIAP) siRNA
ggtcagtacaaagttgaaaacta

SEQ ID NO: 10758 - DNA, 23 bp, Artificial Sequence
  Description of Artificial Sequence: Synthetic oligonucleotide
  X-linked inhibitor of apoptosis (XIAP) siRNA
gtcagtacaaagttgaaaactat

SEQ ID NO: 10759 - DNA, 23 bp, Artificial Sequence
  Description of Artificial Sequence: Synthetic oligonucleotide
  X-linked inhibitor of apoptosis (XIAP) siRNA
tcagtacaaagttgaaaactatc

SEQ ID NO: 10760 - DNA, 23 bp, Artificial Sequence
  Description of Artificial Sequence: Synthetic oligonucleotide
  X-linked inhibitor of apoptosis (XIAP) siRNA
cagtacaaagttgaaaactatct

SEQ ID NO: 10761 - DNA, 23 bp, Artificial Sequence
  Description of Artificial Sequence: Synthetic oligonucleotide
  X-linked inhibitor of apoptosis (XIAP) siRNA
agtacaaagttgaaaactatctg

SEQ ID NO: 10762 - DNA, 23 bp, Artificial Sequence
  Description of Artificial Sequence: Synthetic oligonucleotide
  X-linked inhibitor of apoptosis (XIAP) siRNA
gtacaaagttgaaaactatctgg

SEQ ID NO: 10763 - DNA, 23 bp, Artificial Sequence
  Description of Artificial Sequence: Synthetic oligonucleotide
  X-linked inhibitor of apoptosis (XIAP) siRNA
tacaaagttgaaaactatctggg

SEQ ID NO: 10764 - DNA, 23 bp, Artificial Sequence
  Description of Artificial Sequence: Synthetic oligonucleotide
  X-linked inhibitor of apoptosis (XIAP) siRNA
acaaagttgaaaactatctggga

SEQ ID NO: 10765 - DNA, 23 bp, Artificial Sequence
  Description of Artificial Sequence: Synthetic oligonucleotide
  X-linked inhibitor of apoptosis (XIAP) siRNA
caaagttgaaaactatctgggaa

SEQ ID NO: 10766 - DNA, 23 bp, Artificial Sequence
  Description of Artificial Sequence: Synthetic oligonucleotide
  X-linked inhibitor of apoptosis (XIAP) siRNA
aaagttgaaaactatctgggaag

SEQ ID NO: 10767 - DNA, 23 bp, Artificial Sequence
  Description of Artificial Sequence: Synthetic oligonucleotide
  X-linked inhibitor of apoptosis (XIAP) siRNA
aagttgaaaactatctgggaagc

SEQ ID NO: 10768 - DNA, 23 bp, Artificial Sequence
  Description of Artificial Sequence: Synthetic oligonucleotide
  X-linked inhibitor of apoptosis (XIAP) siRNA
agttgaaaactatctgggaagca

SEQ ID NO: 10769 - DNA, 23 bp, Artificial Sequence
  Description of Artificial Sequence: Synthetic oligonucleotide
  X-linked inhibitor of apoptosis (XIAP) siRNA
gttgaaaactatctgggaagcag

SEQ ID NO: 10770 - DNA, 23 bp, Artificial Sequence
  Description of Artificial Sequence: Synthetic oligonucleotide
  X-linked inhibitor of apoptosis (XIAP) siRNA
ttgaaaactatctgggaagcaga

SEQ ID NO: 10771 - DNA, 23 bp, Artificial Sequence
  Description of Artificial Sequence: Synthetic oligonucleotide
  X-linked inhibitor of apoptosis (XIAP) siRNA
tgaaaactatctgggaagcagag

SEQ ID NO: 10772 - DNA, 23 bp, Artificial Sequence
  Description of Artificial Sequence: Synthetic oligonucleotide
  X-linked inhibitor of apoptosis (XIAP) siRNA
gaaaactatctgggaagcagaga

SEQ ID NO: 10773 - DNA, 23 bp, Artificial Sequence
  Description of Artificial Sequence: Synthetic oligonucleotide
  X-linked inhibitor of apoptosis (XIAP) siRNA
aaaactatctgggaagcagagat

SEQ ID NO: 10774 - DNA, 23 bp, Artificial Sequence
  Description of Artificial Sequence: Synthetic oligonucleotide
  X-linked inhibitor of apoptosis (XIAP) siRNA
aaactatctgggaagcagagatc

SEQ ID NO: 10775 - DNA, 23 bp, Artificial Sequence
  Description of Artificial Sequence: Synthetic oligonucleotide
  X-linked inhibitor of apoptosis (XIAP) siRNA
aactatctgggaagcagagatca

SEQ ID NO: 10776 - DNA, 23 bp, Artificial Sequence
  Description of Artificial Sequence: Synthetic oligonucleotide
  X-linked inhibitor of apoptosis (XIAP) siRNA
actatctgggaagcagagatcat

SEQ ID NO: 10777 - DNA, 23 bp, Artificial Sequence
  Description of Artificial Sequence: Synthetic oligonucleotide
  X-linked inhibitor of apoptosis (XIAP) siRNA
ctatctgggaagcagagatcatt

SEQ ID NO: 10778 - DNA, 23 bp, Artificial Sequence
  Description of Artificial Sequence: Synthetic oligonucleotide
  X-linked inhibitor of apoptosis (XIAP) siRNA
tatctgggaagcagagatcattt

SEQ ID NO: 10779 - DNA, 23 bp, Artificial Sequence
  Description of Artificial Sequence: Synthetic oligonucleotide
  X-linked inhibitor of apoptosis (XIAP) siRNA
atctgggaagcagagatcatttt

SEQ ID NO: 10780 - DNA, 23 bp, Artificial Sequence
  Description of Artificial Sequence: Synthetic oligonucleotide
  X-linked inhibitor of apoptosis (XIAP) siRNA
tctgggaagcagagatcattttg

SEQ ID NO: 10781 - DNA, 23 bp, Artificial Sequence
  Description of Artificial Sequence: Synthetic oligonucleotide
  X-linked inhibitor of apoptosis (XIAP) siRNA
ctgggaagcagagatcattttgc

SEQ ID NO: 10782 - DNA, 23 bp, Artificial Sequence
  Description of Artificial Sequence: Synthetic oligonucleotide
  X-linked inhibitor of apoptosis (XIAP) siRNA
tgggaagcagagatcattttgcc

SEQ ID NO: 10783 - DNA, 23 bp, Artificial Sequence
  Description of Artificial Sequence: Synthetic oligonucleotide
  X-linked inhibitor of apoptosis (XIAP) siRNA
gggaagcagagatcattttgcct

SEQ ID NO: 10784 - DNA, 23 bp, Artificial Sequence
  Description of Artificial Sequence: Synthetic oligonucleotide
  X-linked inhibitor of apoptosis (XIAP) siRNA
ggaagcagagatcattttgcctt

SEQ ID NO: 10785 - DNA, 23 bp, Artificial Sequence
  Description of Artificial Sequence: Synthetic oligonucleotide
  X-linked inhibitor of apoptosis (XIAP) siRNA
gaagcagagatcattttgcctta

SEQ ID NO: 10786 - DNA, 23 bp, Artificial Sequence
  Description of Artificial Sequence: Synthetic oligonucleotide
  X-linked inhibitor of apoptosis (XIAP) siRNA
aagcagagatcattttgccttag

SEQ ID NO: 10787 - DNA, 23 bp, Artificial Sequence
  Description of Artificial Sequence: Synthetic oligonucleotide
  X-linked inhibitor of apoptosis (XIAP) siRNA
agcagagatcattttgccttaga

SEQ ID NO: 10788 - DNA, 23 bp, Artificial Sequence
  Description of Artificial Sequence: Synthetic oligonucleotide
  X-linked inhibitor of apoptosis (XIAP) siRNA
gcagagatcattttgccttagac

SEQ ID NO: 10789 - DNA, 23 bp, Artificial Sequence
  Description of Artificial Sequence: Synthetic oligonucleotide
  X-linked inhibitor of apoptosis (XIAP) siRNA
cagagatcattttgccttagaca

SEQ ID NO: 10790 - DNA, 23 bp, Artificial Sequence
  Description of Artificial Sequence: Synthetic oligonucleotide
  X-linked inhibitor of apoptosis (XIAP) siRNA
agagatcattttgccttagacag

SEQ ID NO: 10791 - DNA, 23 bp, Artificial Sequence
  Description of Artificial Sequence: Synthetic oligonucleotide
  X-linked inhibitor of apoptosis (XIAP) siRNA
gagatcattttgccttagacagg

SEQ ID NO: 10792 - DNA, 23 bp, Artificial Sequence
  Description of Artificial Sequence: Synthetic oligonucleotide
  X-linked inhibitor of apoptosis (XIAP) siRNA
agatcattttgccttagacaggc

SEQ ID NO: 10793 - DNA, 23 bp, Artificial Sequence
  Description of Artificial Sequence: Synthetic oligonucleotide
  X-linked inhibitor of apoptosis (XIAP) siRNA
gatcattttgccttagacaggcc

SEQ ID NO: 10794 - DNA, 23 bp, Artificial Sequence
  Description of Artificial Sequence: Synthetic oligonucleotide
  X-linked inhibitor of apoptosis (XIAP) siRNA
atcattttgccttagacaggcca

SEQ ID NO: 10795 - DNA, 23 bp, Artificial Sequence
  Description of Artificial Sequence: Synthetic oligonucleotide
  X-linked inhibitor of apoptosis (XIAP) siRNA
tcattttgccttagacaggccat

SEQ ID NO: 10796 - DNA, 23 bp, Artificial Sequence
  Description of Artificial Sequence: Synthetic oligonucleotide
  X-linked inhibitor of apoptosis (XIAP) siRNA
cattttgccttagacaggccatc

SEQ ID NO: 10797 - DNA, 23 bp, Artificial Sequence
  Description of Artificial Sequence: Synthetic oligonucleotide
  X-linked inhibitor of apoptosis (XIAP) siRNA
attttgccttagacaggccatct

SEQ ID NO: 10798 - DNA, 23 bp, Artificial Sequence
  Description of Artificial Sequence: Synthetic oligonucleotide
  X-linked inhibitor of apoptosis (XIAP) siRNA
ttttgccttagacaggccatctg

SEQ ID NO: 10799 - DNA, 23 bp, Artificial Sequence
  Description of Artificial Sequence: Synthetic oligonucleotide
  X-linked inhibitor of apoptosis (XIAP) siRNA
tttgccttagacaggccatctga

SEQ ID NO: 10800 - DNA, 23 bp, Artificial Sequence
  Description of Artificial Sequence: Synthetic oligonucleotide
  X-linked inhibitor of apoptosis (XIAP) siRNA
ttgccttagacaggccatctgag

SEQ ID NO: 10801 - DNA, 23 bp, Artificial Sequence
  Description of Artificial Sequence: Synthetic oligonucleotide
  X-linked inhibitor of apoptosis (XIAP) siRNA
tgccttagacaggccatctgaga

SEQ ID NO: 10802 - DNA, 23 bp, Artificial Sequence
  Description of Artificial Sequence: Synthetic oligonucleotide
  X-linked inhibitor of apoptosis (XIAP) siRNA
gccttagacaggccatctgagac

SEQ ID NO: 10803 - DNA, 23 bp, Artificial Sequence
  Description of Artificial Sequence: Synthetic oligonucleotide
  X-linked inhibitor of apoptosis (XIAP) siRNA
ccttagacaggccatctgagaca

SEQ ID NO: 10804 - DNA, 23 bp, Artificial Sequence
  Description of Artificial Sequence: Synthetic oligonucleotide
  X-linked inhibitor of apoptosis (XIAP) siRNA
cttagacaggccatctgagacac

SEQ ID NO: 10805 - DNA, 23 bp, Artificial Sequence
  Description of Artificial Sequence: Synthetic oligonucleotide
  X-linked inhibitor of apoptosis (XIAP) siRNA
ttagacaggccatctgagacaca

SEQ ID NO: 10806 - DNA, 23 bp, Artificial Sequence
  Description of Artificial Sequence: Synthetic oligonucleotide
  X-linked inhibitor of apoptosis (XIAP) siRNA
tagacaggccatctgagacacat

SEQ ID NO: 10807 - DNA, 23 bp, Artificial Sequence
  Description of Artificial Sequence: Synthetic oligonucleotide
  X-linked inhibitor of apoptosis (XIAP) siRNA
agacaggccatctgagacacatg

SEQ ID NO: 10808 - DNA, 23 bp, Artificial Sequence
  Description of Artificial Sequence: Synthetic oligonucleotide
  X-linked inhibitor of apoptosis (XIAP) siRNA
gacaggccatctgagacacatgc

SEQ ID NO: 10809 - DNA, 23 bp, Artificial Sequence
  Description of Artificial Sequence: Synthetic oligonucleotide
  X-linked inhibitor of apoptosis (XIAP) siRNA
acaggccatctgagacacatgca

SEQ ID NO: 10810 - DNA, 23 bp, Artificial Sequence
  Description of Artificial Sequence: Synthetic oligonucleotide
  X-linked inhibitor of apoptosis (XIAP) siRNA
caggccatctgagacacatgcag

SEQ ID NO: 10811 - DNA, 23 bp, Artificial Sequence
  Description of Artificial Sequence: Synthetic oligonucleotide
  X-linked inhibitor of apoptosis (XIAP) siRNA
aggccatctgagacacatgcaga

SEQ ID NO: 10812 - DNA, 23 bp, Artificial Sequence
  Description of Artificial Sequence: Synthetic oligonucleotide
  X-linked inhibitor of apoptosis (XIAP) siRNA
ggccatctgagacacatgcagac

SEQ ID NO: 10813 - DNA, 23 bp, Artificial Sequence
  Description of Artificial Sequence: Synthetic oligonucleotide
  X-linked inhibitor of apoptosis (XIAP) siRNA
gccatctgagacacatgcagact

SEQ ID NO: 10814 - DNA, 23 bp, Artificial Sequence
  Description of Artificial Sequence: Synthetic oligonucleotide
  X-linked inhibitor of apoptosis (XIAP) siRNA
ccatctgagacacatgcagacta

SEQ ID NO: 10815 - DNA, 23 bp, Artificial Sequence
  Description of Artificial Sequence: Synthetic oligonucleotide
  X-linked inhibitor of apoptosis (XIAP) siRNA
catctgagacacatgcagactat

SEQ ID NO: 10816 - DNA, 23 bp, Artificial Sequence
  Description of Artificial Sequence: Synthetic oligonucleotide
  X-linked inhibitor of apoptosis (XIAP) siRNA
atctgagacacatgcagactatc

SEQ ID NO: 10817 - DNA, 23 bp, Artificial Sequence
  Description of Artificial Sequence: Synthetic oligonucleotide
  X-linked inhibitor of apoptosis (XIAP) siRNA
tctgagacacatgcagactatct

SEQ ID NO: 10818 - DNA, 23 bp, Artificial Sequence
  Description of Artificial Sequence: Synthetic oligonucleotide
  X-linked inhibitor of apoptosis (XIAP) siRNA
ctgagacacatgcagactatctt

SEQ ID NO: 10819 - DNA, 23 bp, Artificial Sequence
  Description of Artificial Sequence: Synthetic oligonucleotide
  X-linked inhibitor of apoptosis (XIAP) siRNA
tgagacacatgcagactatcttt

SEQ ID NO: 10820 - DNA, 23 bp, Artificial Sequence
  Description of Artificial Sequence: Synthetic oligonucleotide
  X-linked inhibitor of apoptosis (XIAP) siRNA
gagacacatgcagactatctttt

SEQ ID NO: 10821 - DNA, 23 bp, Artificial Sequence
  Description of Artificial Sequence: Synthetic oligonucleotide
  X-linked inhibitor of apoptosis (XIAP) siRNA
agacacatgcagactatcttttg

SEQ ID NO: 10822 - DNA, 23 bp, Artificial Sequence
  Description of Artificial Sequence: Synthetic oligonucleotide
  X-linked inhibitor of apoptosis (XIAP) siRNA
gacacatgcagactatcttttga

SEQ ID NO: 10823 - DNA, 23 bp, Artificial Sequence
  Description of Artificial Sequence: Synthetic oligonucleotide
  X-linked inhibitor of apoptosis (XIAP) siRNA
acacatgcagactatcttttgag

SEQ ID NO: 10824 - DNA, 23 bp, Artificial Sequence
  Description of Artificial Sequence: Synthetic oligonucleotide
  X-linked inhibitor of apoptosis (XIAP) siRNA
cacatgcagactatcttttgaga

SEQ ID NO: 10825 - DNA, 23 bp, Artificial Sequence
  Description of Artificial Sequence: Synthetic oligonucleotide
  X-linked inhibitor of apoptosis (XIAP) siRNA
acatgcagactatcttttgagaa

SEQ ID NO: 10826 - DNA, 23 bp, Artificial Sequence
  Description of Artificial Sequence: Synthetic oligonucleotide
  X-linked inhibitor of apoptosis (XIAP) siRNA
catgcagactatcttttgagaac

SEQ ID NO: 10827 - DNA, 23 bp, Artificial Sequence
  Description of Artificial Sequence: Synthetic oligonucleotide
  X-linked inhibitor of apoptosis (XIAP) siRNA
atgcagactatcttttgagaact

SEQ ID NO: 10828 - DNA, 23 bp, Artificial Sequence
  Description of Artificial Sequence: Synthetic oligonucleotide
  X-linked inhibitor of apoptosis (XIAP) siRNA
tgcagactatcttttgagaactg

SEQ ID NO: 10829 - DNA, 23 bp, Artificial Sequence
  Description of Artificial Sequence: Synthetic oligonucleotide
  X-linked inhibitor of apoptosis (XIAP) siRNA
gcagactatcttttgagaactgg

SEQ ID NO: 10830 - DNA, 23 bp, Artificial Sequence
  Description of Artificial Sequence: Synthetic oligonucleotide
  X-linked inhibitor of apoptosis (XIAP) siRNA
cagactatcttttgagaactggg

SEQ ID NO: 10831 - DNA, 23 bp, Artificial Sequence
  Description of Artificial Sequence: Synthetic oligonucleotide
  X-linked inhibitor of apoptosis (XIAP) siRNA
agactatcttttgagaactgggc

SEQ ID NO: 10832 - DNA, 23 bp, Artificial Sequence
  Description of Artificial Sequence: Synthetic oligonucleotide
  X-linked inhibitor of apoptosis (XIAP) siRNA
gactatcttttgagaactgggca

SEQ ID NO: 10833 - DNA, 23 bp, Artificial Sequence
  Description of Artificial Sequence: Synthetic oligonucleotide
  X-linked inhibitor of apoptosis (XIAP) siRNA
actatcttttgagaactgggcag

SEQ ID NO: 10834 - DNA, 23 bp, Artificial Sequence
  Description of Artificial Sequence: Synthetic oligonucleotide
  X-linked inhibitor of apoptosis (XIAP) siRNA
ctatcttttgagaactgggcagg

SEQ ID NO: 10835 - DNA, 23 bp, Artificial Sequence
  Description of Artificial Sequence: Synthetic oligonucleotide
  X-linked inhibitor of apoptosis (XIAP) siRNA
tatcttttgagaactgggcaggt

SEQ ID NO: 10836 - DNA, 23 bp, Artificial Sequence
  Description of Artificial Sequence: Synthetic oligonucleotide
  X-linked inhibitor of apoptosis (XIAP) siRNA
atcttttgagaactgggcaggtt

SEQ ID NO: 10837 - DNA, 23 bp, Artificial Sequence
  Description of Artificial Sequence: Synthetic oligonucleotide
  X-linked inhibitor of apoptosis (XIAP) siRNA
tcttttgagaactgggcaggttg

SEQ ID NO: 10838 - DNA, 23 bp, Artificial Sequence
  Description of Artificial Sequence: Synthetic oligonucleotide
  X-linked inhibitor of apoptosis (XIAP) siRNA
cttttgagaactgggcaggttgt

SEQ ID NO: 10839 - DNA, 23 bp, Artificial Sequence
  Description of Artificial Sequence: Synthetic oligonucleotide
  X-linked inhibitor of apoptosis (XIAP) siRNA
ttttgagaactgggcaggttgta

SEQ ID NO: 10840 - DNA, 23 bp, Artificial Sequence
  Description of Artificial Sequence: Synthetic oligonucleotide
  X-linked inhibitor of apoptosis (XIAP) siRNA
tttgagaactgggcaggttgtag

SEQ ID NO: 10841 - DNA, 23 bp, Artificial Sequence
  Description of Artificial Sequence: Synthetic oligonucleotide
  X-linked inhibitor of apoptosis (XIAP) siRNA
ttgagaactgggcaggttgtaga

SEQ ID NO: 10842 - DNA, 23 bp, Artificial Sequence
  Description of Artificial Sequence: Synthetic oligonucleotide
  X-linked inhibitor of apoptosis (XIAP) siRNA
tgagaactgggcaggttgtagat

SEQ ID NO: 10843 - DNA, 23 bp, Artificial Sequence
  Description of Artificial Sequence: Synthetic oligonucleotide
  X-linked inhibitor of apoptosis (XIAP) siRNA
gagaactgggcaggttgtagata

SEQ ID NO: 10844 - DNA, 23 bp, Artificial Sequence
  Description of Artificial Sequence: Synthetic oligonucleotide
  X-linked inhibitor of apoptosis (XIAP) siRNA
agaactgggcaggttgtagatat

SEQ ID NO: 10845 - DNA, 23 bp, Artificial Sequence
  Description of Artificial Sequence: Synthetic oligonucleotide
  X-linked inhibitor of apoptosis (XIAP) siRNA
gaactgggcaggttgtagatata

SEQ ID NO: 10846 - DNA, 23 bp, Artificial Sequence
  Description of Artificial Sequence: Synthetic oligonucleotide
  X-linked inhibitor of apoptosis (XIAP) siRNA
aactgggcaggttgtagatatat

SEQ ID NO: 10847 - DNA, 23 bp, Artificial Sequence
  Description of Artificial Sequence: Synthetic oligonucleotide
  X-linked inhibitor of apoptosis (XIAP) siRNA
actgggcaggttgtagatatatc

SEQ ID NO: 10848 - DNA, 23 bp, Artificial Sequence
  Description of Artificial Sequence: Synthetic oligonucleotide
  X-linked inhibitor of apoptosis (XIAP) siRNA
ctgggcaggttgtagatatatca

SEQ ID NO: 10849 - DNA, 23 bp, Artificial Sequence
  Description of Artificial Sequence: Synthetic oligonucleotide
  X-linked inhibitor of apoptosis (XIAP) siRNA
tgggcaggttgtagatatatcag

SEQ ID NO: 10850 - DNA, 23 bp, Artificial Sequence
  Description of Artificial Sequence: Synthetic oligonucleotide
  X-linked inhibitor of apoptosis (XIAP) siRNA
gggcaggttgtagatatatcaga

SEQ ID NO: 10851 - DNA, 23 bp, Artificial Sequence
  Description of Artificial Sequence: Synthetic oligonucleotide
  X-linked inhibitor of apoptosis (XIAP) siRNA
ggcaggttgtagatatatcagac

SEQ ID NO: 10852 - DNA, 23 bp, Artificial Sequence
  Description of Artificial Sequence: Synthetic oligonucleotide
  X-linked inhibitor of apoptosis (XIAP) siRNA
gcaggttgtagatatatcagaca

SEQ ID NO: 10853 - DNA, 23 bp, Artificial Sequence
  Description of Artificial Sequence: Synthetic oligonucleotide
  X-linked inhibitor of apoptosis (XIAP) siRNA
caggttgtagatatatcagacac

SEQ ID NO: 10854 - DNA, 23 bp, Artificial Sequence
  Description of Artificial Sequence: Synthetic oligonucleotide
  X-linked inhibitor of apoptosis (XIAP) siRNA
aggttgtagatatatcagacacc

SEQ ID NO: 10855 - DNA, 23 bp, Artificial Sequence
  Description of Artificial Sequence: Synthetic oligonucleotide
  X-linked inhibitor of apoptosis (XIAP) siRNA
ggttgtagatatatcagacacca

SEQ ID NO: 10856 - DNA, 23 bp, Artificial Sequence
  Description of Artificial Sequence: Synthetic oligonucleotide
  X-linked inhibitor of apoptosis (XIAP) siRNA
gttgtagatatatcagacaccat

SEQ ID NO: 10857 - DNA, 23 bp, Artificial Sequence
  Description of Artificial Sequence: Synthetic oligonucleotide
  X-linked inhibitor of apoptosis (XIAP) siRNA
ttgtagatatatcagacaccata

SEQ ID NO: 10858 - DNA, 23 bp, Artificial Sequence
  Description of Artificial Sequence: Synthetic oligonucleotide
  X-linked inhibitor of apoptosis (XIAP) siRNA
tgtagatatatcagacaccatat

SEQ ID NO: 10859 - DNA, 23 bp, Artificial Sequence
  Description of Artificial Sequence: Synthetic oligonucleotide
  X-linked inhibitor of apoptosis (XIAP) siRNA
gtagatatatcagacaccatata

SEQ ID NO: 10860 - DNA, 23 bp, Artificial Sequence
  Description of Artificial Sequence: Synthetic oligonucleotide
  X-linked inhibitor of apoptosis (XIAP) siRNA
tagatatatcagacaccatatac

SEQ ID NO: 10861 - DNA, 23 bp, Artificial Sequence
  Description of Artificial Sequence: Synthetic oligonucleotide
  X-linked inhibitor of apoptosis (XIAP) siRNA
agatatatcagacaccatatacc

SEQ ID NO: 10862 - DNA, 23 bp, Artificial Sequence
  Description of Artificial Sequence: Synthetic oligonucleotide
  X-linked inhibitor of apoptosis (XIAP) siRNA
gatatatcagacaccatataccc

SEQ ID NO: 10863 - DNA, 23 bp, Artificial Sequence
  Description of Artificial Sequence: Synthetic oligonucleotide
  X-linked inhibitor of apoptosis (XIAP) siRNA
atatatcagacaccatatacccg

SEQ ID NO: 10864 - DNA, 23 bp, Artificial Sequence
  Description of Artificial Sequence: Synthetic oligonucleotide
  X-linked inhibitor of apoptosis (XIAP) siRNA
tatatcagacaccatatacccga

SEQ ID NO: 10865 - DNA, 23 bp, Artificial Sequence
  Description of Artificial Sequence: Synthetic oligonucleotide
  X-linked inhibitor of apoptosis (XIAP) siRNA
atatcagacaccatatacccgag

SEQ ID NO: 10866 - DNA, 23 bp, Artificial Sequence
  Description of Artificial Sequence: Synthetic oligonucleotide
  X-linked inhibitor of apoptosis (XIAP) siRNA
tatcagacaccatatacccgagg

SEQ ID NO: 10867 - DNA, 23 bp, Artificial Sequence
  Description of Artificial Sequence: Synthetic oligonucleotide
  X-linked inhibitor of apoptosis (XIAP) siRNA
atcagacaccatatacccgagga

SEQ ID NO: 10868 - DNA, 23 bp, Artificial Sequence
  Description of Artificial Sequence: Synthetic oligonucleotide
  X-linked inhibitor of apoptosis (XIAP) siRNA
tcagacaccatatacccgaggaa

SEQ ID NO: 10869 - DNA, 23 bp, Artificial Sequence
  Description of Artificial Sequence: Synthetic oligonucleotide
  X-linked inhibitor of apoptosis (XIAP) siRNA
cagacaccatatacccgaggaac

SEQ ID NO: 10870 - DNA, 23 bp, Artificial Sequence
  Description of Artificial Sequence: Synthetic oligonucleotide
  X-linked inhibitor of apoptosis (XIAP) siRNA
agacaccatatacccgaggaacc

SEQ ID NO: 10871 - DNA, 23 bp, Artificial Sequence
  Description of Artificial Sequence: Synthetic oligonucleotide
  X-linked inhibitor of apoptosis (XIAP) siRNA
gacaccatatacccgaggaaccc

SEQ ID NO: 10872 - DNA, 23 bp, Artificial Sequence
  Description of Artificial Sequence: Synthetic oligonucleotide
  X-linked inhibitor of apoptosis (XIAP) siRNA
acaccatatacccgaggaaccct

SEQ ID NO: 10873 - DNA, 23 bp, Artificial Sequence
  Description of Artificial Sequence: Synthetic oligonucleotide
  X-linked inhibitor of apoptosis (XIAP) siRNA
caccatatacccgaggaaccctg

SEQ ID NO: 10874 - DNA, 23 bp, Artificial Sequence
  Description of Artificial Sequence: Synthetic oligonucleotide
  X-linked inhibitor of apoptosis (XIAP) siRNA
accatatacccgaggaaccctgc

SEQ ID NO: 10875 - DNA, 23 bp, Artificial Sequence
  Description of Artificial Sequence: Synthetic oligonucleotide
  X-linked inhibitor of apoptosis (XIAP) siRNA
ccatatacccgaggaaccctgcc

SEQ ID NO: 10876 - DNA, 23 bp, Artificial Sequence
  Description of Artificial Sequence: Synthetic oligonucleotide
  X-linked inhibitor of apoptosis (XIAP) siRNA
catatacccgaggaaccctgcca

SEQ ID NO: 10877 - DNA, 23 bp, Artificial Sequence
  Description of Artificial Sequence: Synthetic oligonucleotide
  X-linked inhibitor of apoptosis (XIAP) siRNA
atatacccgaggaaccctgccat

SEQ ID NO: 10878 - DNA, 23 bp, Artificial Sequence
  Description of Artificial Sequence: Synthetic oligonucleotide
  X-linked inhibitor of apoptosis (XIAP) siRNA
tatacccgaggaaccctgccatg

SEQ ID NO: 10879 - DNA, 23 bp, Artificial Sequence
  Description of Artificial Sequence: Synthetic oligonucleotide
  X-linked inhibitor of apoptosis (XIAP) siRNA
atacccgaggaaccctgccatgt

SEQ ID NO: 10880 - DNA, 23 bp, Artificial Sequence
  Description of Artificial Sequence: Synthetic oligonucleotide
  X-linked inhibitor of apoptosis (XIAP) siRNA
tacccgaggaaccctgccatgta

SEQ ID NO: 10881 - DNA, 23 bp, Artificial Sequence
  Description of Artificial Sequence: Synthetic oligonucleotide
  X-linked inhibitor of apoptosis (XIAP) siRNA
acccgaggaaccctgccatgtat

SEQ ID NO: 10882 - DNA, 23 bp, Artificial Sequence
  Description of Artificial Sequence: Synthetic oligonucleotide
  X-linked inhibitor of apoptosis (XIAP) siRNA
cccgaggaaccctgccatgtata

SEQ ID NO: 10883 - DNA, 23 bp, Artificial Sequence
  Description of Artificial Sequence: Synthetic oligonucleotide
  X-linked inhibitor of apoptosis (XIAP) siRNA
ccgaggaaccctgccatgtatag

SEQ ID NO: 10884 - DNA, 23 bp, Artificial Sequence
  Description of Artificial Sequence: Synthetic oligonucleotide
  X-linked inhibitor of apoptosis (XIAP) siRNA
cgaggaaccctgccatgtatagt

SEQ ID NO: 10885 - DNA, 23 bp, Artificial Sequence
  Description of Artificial Sequence: Synthetic oligonucleotide
  X-linked inhibitor of apoptosis (XIAP) siRNA
gaggaaccctgccatgtatagtg

SEQ ID NO: 10886 - DNA, 23 bp, Artificial Sequence
  Description of Artificial Sequence: Synthetic oligonucleotide
  X-linked inhibitor of apoptosis (XIAP) siRNA
aggaaccctgccatgtatagtga

SEQ ID NO: 10887 - DNA, 23 bp, Artificial Sequence
  Description of Artificial Sequence: Synthetic oligonucleotide
  X-linked inhibitor of apoptosis (XIAP) siRNA
ggaaccctgccatgtatagtgaa

SEQ ID NO: 10888 - DNA, 23 bp, Artificial Sequence
  Description of Artificial Sequence: Synthetic oligonucleotide
  X-linked inhibitor of apoptosis (XIAP) siRNA
gaaccctgccatgtatagtgaag

SEQ ID NO: 10889 - DNA, 23 bp, Artificial Sequence
  Description of Artificial Sequence: Synthetic oligonucleotide
  X-linked inhibitor of apoptosis (XIAP) siRNA
aaccctgccatgtatagtgaaga

SEQ ID NO: 10890 - DNA, 23 bp, Artificial Sequence
  Description of Artificial Sequence: Synthetic oligonucleotide
  X-linked inhibitor of apoptosis (XIAP) siRNA
accctgccatgtatagtgaagaa

SEQ ID NO: 10891 - DNA, 23 bp, Artificial Sequence
  Description of Artificial Sequence: Synthetic oligonucleotide
  X-linked inhibitor of apoptosis (XIAP) siRNA
ccctgccatgtatagtgaagaag

SEQ ID NO: 10892 - DNA, 23 bp, Artificial Sequence
  Description of Artificial Sequence: Synthetic oligonucleotide
  X-linked inhibitor of apoptosis (XIAP) siRNA
cctgccatgtatagtgaagaagc

SEQ ID NO: 10893 - DNA, 23 bp, Artificial Sequence
  Description of Artificial Sequence: Synthetic oligonucleotide
  X-linked inhibitor of apoptosis (XIAP) siRNA
ctgccatgtatagtgaagaagct

SEQ ID NO: 10894 - DNA, 23 bp, Artificial Sequence
  Description of Artificial Sequence: Synthetic oligonucleotide
  X-linked inhibitor of apoptosis (XIAP) siRNA
tgccatgtatagtgaagaagcta

SEQ ID NO: 10895 - DNA, 23 bp, Artificial Sequence
  Description of Artificial Sequence: Synthetic oligonucleotide
  X-linked inhibitor of apoptosis (XIAP) siRNA
gccatgtatagtgaagaagctag

SEQ ID NO: 10896 - DNA, 23 bp, Artificial Sequence
  Description of Artificial Sequence: Synthetic oligonucleotide
  X-linked inhibitor of apoptosis (XIAP) siRNA
ccatgtatagtgaagaagctaga

SEQ ID NO: 10897 - DNA, 23 bp, Artificial Sequence
  Description of Artificial Sequence: Synthetic oligonucleotide
  X-linked inhibitor of apoptosis (XIAP) siRNA
catgtatagtgaagaagctagat

SEQ ID NO: 10898 - DNA, 23 bp, Artificial Sequence
  Description of Artificial Sequence: Synthetic oligonucleotide
  X-linked inhibitor of apoptosis (XIAP) siRNA
atgtatagtgaagaagctagatt

SEQ ID NO: 10899 - DNA, 23 bp, Artificial Sequence
  Description of Artificial Sequence: Synthetic oligonucleotide
  X-linked inhibitor of apoptosis (XIAP) siRNA
tgtatagtgaagaagctagatta

SEQ ID NO: 10900 - DNA, 23 bp, Artificial Sequence
  Description of Artificial Sequence: Synthetic oligonucleotide
  X-linked inhibitor of apoptosis (XIAP) siRNA
gtatagtgaagaagctagattaa

SEQ ID NO: 10901 - DNA, 23 bp, Artificial Sequence
  Description of Artificial Sequence: Synthetic oligonucleotide
  X-linked inhibitor of apoptosis (XIAP) siRNA
tatagtgaagaagctagattaaa

SEQ ID NO: 10902 - DNA, 23 bp, Artificial Sequence
  Description of Artificial Sequence: Synthetic oligonucleotide
  X-linked inhibitor of apoptosis (XIAP) siRNA
atagtgaagaagctagattaaag

SEQ ID NO: 10903 - DNA, 23 bp, Artificial Sequence
  Description of Artificial Sequence: Synthetic oligonucleotide
  X-linked inhibitor of apoptosis (XIAP) siRNA
tagtgaagaagctagattaaagt

SEQ ID NO: 10904 - DNA, 23 bp, Artificial Sequence
  Description of Artificial Sequence: Synthetic oligonucleotide
  X-linked inhibitor of apoptosis (XIAP) siRNA
agtgaagaagctagattaaagtc

SEQ ID NO: 10905 - DNA, 23 bp, Artificial Sequence
  Description of Artificial Sequence: Synthetic oligonucleotide
  X-linked inhibitor of apoptosis (XIAP) siRNA
gtgaagaagctagattaaagtcc

SEQ ID NO: 10906 - DNA, 23 bp, Artificial Sequence
  Description of Artificial Sequence: Synthetic oligonucleotide
  X-linked inhibitor of apoptosis (XIAP) siRNA
tgaagaagctagattaaagtcct

SEQ ID NO: 10907 - DNA, 23 bp, Artificial Sequence
  Description of Artificial Sequence: Synthetic oligonucleotide
  X-linked inhibitor of apoptosis (XIAP) siRNA
gaagaagctagattaaagtcctt

SEQ ID NO: 10908 - DNA, 23 bp, Artificial Sequence
  Description of Artificial Sequence: Synthetic oligonucleotide
  X-linked inhibitor of apoptosis (XIAP) siRNA
aagaagctagattaaagtccttt

SEQ ID NO: 10909 - DNA, 23 bp, Artificial Sequence
  Description of Artificial Sequence: Synthetic oligonucleotide
  X-linked inhibitor of apoptosis (XIAP) siRNA
agaagctagattaaagtcctttc

SEQ ID NO: 10910 - DNA, 23 bp, Artificial Sequence
  Description of Artificial Sequence: Synthetic oligonucleotide
  X-linked inhibitor of apoptosis (XIAP) siRNA
gaagctagattaaagtcctttca

SEQ ID NO: 10911 - DNA, 23 bp, Artificial Sequence
  Description of Artificial Sequence: Synthetic oligonucleotide
  X-linked inhibitor of apoptosis (XIAP) siRNA
aagctagattaaagtcctttcag

SEQ ID NO: 10912 - DNA, 23 bp, Artificial Sequence
  Description of Artificial Sequence: Synthetic oligonucleotide
  X-linked inhibitor of apoptosis (XIAP) siRNA
agctagattaaagtcctttcaga

SEQ ID NO: 10913 - DNA, 23 bp, Artificial Sequence
  Description of Artificial Sequence: Synthetic oligonucleotide
  X-linked inhibitor of apoptosis (XIAP) siRNA
gctagattaaagtcctttcagaa

SEQ ID NO: 10914 - DNA, 23 bp, Artificial Sequence
  Description of Artificial Sequence: Synthetic oligonucleotide
  X-linked inhibitor of apoptosis (XIAP) siRNA
ctagattaaagtcctttcagaac

SEQ ID NO: 10915 - DNA, 23 bp, Artificial Sequence
  Description of Artificial Sequence: Synthetic oligonucleotide
  X-linked inhibitor of apoptosis (XIAP) siRNA
tagattaaagtcctttcagaact

SEQ ID NO: 10916 - DNA, 23 bp, Artificial Sequence
  Description of Artificial Sequence: Synthetic oligonucleotide
  X-linked inhibitor of apoptosis (XIAP) siRNA
agattaaagtcctttcagaactg

SEQ ID NO: 10917 - DNA, 23 bp, Artificial Sequence
  Description of Artificial Sequence: Synthetic oligonucleotide
  X-linked inhibitor of apoptosis (XIAP) siRNA
gattaaagtcctttcagaactgg

SEQ ID NO: 10918 - DNA, 23 bp, Artificial Sequence
  Description of Artificial Sequence: Synthetic oligonucleotide
  X-linked inhibitor of apoptosis (XIAP) siRNA
attaaagtcctttcagaactggc

SEQ ID NO: 10919 - DNA, 23 bp, Artificial Sequence
  Description of Artificial Sequence: Synthetic oligonucleotide
  X-linked inhibitor of apoptosis (XIAP) siRNA
ttaaagtcctttcagaactggcc

SEQ ID NO: 10920 - DNA, 23 bp, Artificial Sequence
  Description of Artificial Sequence: Synthetic oligonucleotide
  X-linked inhibitor of apoptosis (XIAP) siRNA
taaagtcctttcagaactggcca

SEQ ID NO: 10921 - DNA, 23 bp, Artificial Sequence
  Description of Artificial Sequence: Synthetic oligonucleotide
  X-linked inhibitor of apoptosis (XIAP) siRNA
aaagtcctttcagaactggccag

SEQ ID NO: 10922 - DNA, 23 bp, Artificial Sequence
  Description of Artificial Sequence: Synthetic oligonucleotide
  X-linked inhibitor of apoptosis (XIAP) siRNA
aagtcctttcagaactggccaga

SEQ ID NO: 10923 - DNA, 23 bp, Artificial Sequence
  Description of Artificial Sequence: Synthetic oligonucleotide
  X-linked inhibitor of apoptosis (XIAP) siRNA
agtcctttcagaactggccagac

SEQ ID NO: 10924 - DNA, 23 bp, Artificial Sequence
  Description of Artificial Sequence: Synthetic oligonucleotide
  X-linked inhibitor of apoptosis (XIAP) siRNA
gtcctttcagaactggccagact

SEQ ID NO: 10925 - DNA, 23 bp, Artificial Sequence
  Description of Artificial Sequence: Synthetic oligonucleotide
  X-linked inhibitor of apoptosis (XIAP) siRNA
tcctttcagaactggccagacta

SEQ ID NO: 10926 - DNA, 23 bp, Artificial Sequence
  Description of Artificial Sequence: Synthetic oligonucleotide
  X-linked inhibitor of apoptosis (XIAP) siRNA
cctttcagaactggccagactat

SEQ ID NO: 10927 - DNA, 23 bp, Artificial Sequence
  Description of Artificial Sequence: Synthetic oligonucleotide
  X-linked inhibitor of apoptosis (XIAP) siRNA
ctttcagaactggccagactatg

SEQ ID NO: 10928 - DNA, 23 bp, Artificial Sequence
  Description of Artificial Sequence: Synthetic oligonucleotide
  X-linked inhibitor of apoptosis (XIAP) siRNA
tttcagaactggccagactatgc

SEQ ID NO: 10929 - DNA, 23 bp, Artificial Sequence
  Description of Artificial Sequence: Synthetic oligonucleotide
  X-linked inhibitor of apoptosis (XIAP) siRNA
ttcagaactggccagactatgct

SEQ ID NO: 10930 - DNA, 23 bp, Artificial Sequence
  Description of Artificial Sequence: Synthetic oligonucleotide
  X-linked inhibitor of apoptosis (XIAP) siRNA
tcagaactggccagactatgctc

SEQ ID NO: 10931 - DNA, 23 bp, Artificial Sequence
  Description of Artificial Sequence: Synthetic oligonucleotide
  X-linked inhibitor of apoptosis (XIAP) siRNA
cagaactggccagactatgctca

SEQ ID NO: 10932 - DNA, 23 bp, Artificial Sequence
  Description of Artificial Sequence: Synthetic oligonucleotide
  X-linked inhibitor of apoptosis (XIAP) siRNA
agaactggccagactatgctcac

SEQ ID NO: 10933 - DNA, 23 bp, Artificial Sequence
  Description of Artificial Sequence: Synthetic oligonucleotide
  X-linked inhibitor of apoptosis (XIAP) siRNA
gaactggccagactatgctcacc

SEQ ID NO: 10934 - DNA, 23 bp, Artificial Sequence
  Description of Artificial Sequence: Synthetic oligonucleotide
  X-linked inhibitor of apoptosis (XIAP) siRNA
aactggccagactatgctcacct

SEQ ID NO: 10935 - DNA, 23 bp, Artificial Sequence
  Description of Artificial Sequence: Synthetic oligonucleotide
  X-linked inhibitor of apoptosis (XIAP) siRNA
actggccagactatgctcaccta

SEQ ID NO: 10936 - DNA, 23 bp, Artificial Sequence
  Description of Artificial Sequence: Synthetic oligonucleotide
  X-linked inhibitor of apoptosis (XIAP) siRNA
ctggccagactatgctcacctaa

SEQ ID NO: 10937 - DNA, 23 bp, Artificial Sequence
  Description of Artificial Sequence: Synthetic oligonucleotide
  X-linked inhibitor of apoptosis (XIAP) siRNA
tggccagactatgctcacctaac

SEQ ID NO: 10938 - DNA, 23 bp, Artificial Sequence
  Description of Artificial Sequence: Synthetic oligonucleotide
  X-linked inhibitor of apoptosis (XIAP) siRNA
ggccagactatgctcacctaacc

SEQ ID NO: 10939 - DNA, 23 bp, Artificial Sequence
  Description of Artificial Sequence: Synthetic oligonucleotide
  X-linked inhibitor of apoptosis (XIAP) siRNA
gccagactatgctcacctaaccc

SEQ ID NO: 10940 - DNA, 23 bp, Artificial Sequence
  Description of Artificial Sequence: Synthetic oligonucleotide
  X-linked inhibitor of apoptosis (XIAP) siRNA
ccagactatgctcacctaacccc

SEQ ID NO: 10941 - DNA, 23 bp, Artificial Sequence
  Description of Artificial Sequence: Synthetic oligonucleotide
  X-linked inhibitor of apoptosis (XIAP) siRNA
cagactatgctcacctaacccca

SEQ ID NO: 10942 - DNA, 23 bp, Artificial Sequence
  Description of Artificial Sequence: Synthetic oligonucleotide
  X-linked inhibitor of apoptosis (XIAP) siRNA
agactatgctcacctaaccccaa

SEQ ID NO: 10943 - DNA, 23 bp, Artificial Sequence
  Description of Artificial Sequence: Synthetic oligonucleotide
  X-linked inhibitor of apoptosis (XIAP) siRNA
gactatgctcacctaaccccaag

SEQ ID NO: 10944 - DNA, 23 bp, Artificial Sequence
  Description of Artificial Sequence: Synthetic oligonucleotide
  X-linked inhibitor of apoptosis (XIAP) siRNA
actatgctcacctaaccccaaga

SEQ ID NO: 10945 - DNA, 23 bp, Artificial Sequence
  Description of Artificial Sequence: Synthetic oligonucleotide
  X-linked inhibitor of apoptosis (XIAP) siRNA
ctatgctcacctaaccccaagag

SEQ ID NO: 10946 - DNA, 23 bp, Artificial Sequence
  Description of Artificial Sequence: Synthetic oligonucleotide
  X-linked inhibitor of apoptosis (XIAP) siRNA
tatgctcacctaaccccaagaga

SEQ ID NO: 10947 - DNA, 23 bp, Artificial Sequence
  Description of Artificial Sequence: Synthetic oligonucleotide
  X-linked inhibitor of apoptosis (XIAP) siRNA
atgctcacctaaccccaagagag

SEQ ID NO: 10948 - DNA, 23 bp, Artificial Sequence
  Description of Artificial Sequence: Synthetic oligonucleotide
  X-linked inhibitor of apoptosis (XIAP) siRNA
tgctcacctaaccccaagagagt

SEQ ID NO: 10949 - DNA, 23 bp, Artificial Sequence
  Description of Artificial Sequence: Synthetic oligonucleotide
  X-linked inhibitor of apoptosis (XIAP) siRNA
gctcacctaaccccaagagagtt

SEQ ID NO: 10950 - DNA, 23 bp, Artificial Sequence
  Description of Artificial Sequence: Synthetic oligonucleotide
  X-linked inhibitor of apoptosis (XIAP) siRNA
ctcacctaaccccaagagagtta

SEQ ID NO: 10951 - DNA, 23 bp, Artificial Sequence
  Description of Artificial Sequence: Synthetic oligonucleotide
  X-linked inhibitor of apoptosis (XIAP) siRNA
tcacctaaccccaagagagttag

SEQ ID NO: 10952 - DNA, 23 bp, Artificial Sequence
  Description of Artificial Sequence: Synthetic oligonucleotide
  X-linked inhibitor of apoptosis (XIAP) siRNA
cacctaaccccaagagagttagc

SEQ ID NO: 10953 - DNA, 23 bp, Artificial Sequence
  Description of Artificial Sequence: Synthetic oligonucleotide
  X-linked inhibitor of apoptosis (XIAP) siRNA
acctaaccccaagagagttagca

SEQ ID NO: 10954 - DNA, 23 bp, Artificial Sequence
  Description of Artificial Sequence: Synthetic oligonucleotide
  X-linked inhibitor of apoptosis (XIAP) siRNA
cctaaccccaagagagttagcaa

SEQ ID NO: 10955 - DNA, 23 bp, Artificial Sequence
  Description of Artificial Sequence: Synthetic oligonucleotide
  X-linked inhibitor of apoptosis (XIAP) siRNA
ctaaccccaagagagttagcaag

SEQ ID NO: 10956 - DNA, 23 bp, Artificial Sequence
  Description of Artificial Sequence: Synthetic oligonucleotide
  X-linked inhibitor of apoptosis (XIAP) siRNA
taaccccaagagagttagcaagt

SEQ ID NO: 10957 - DNA, 23 bp, Artificial Sequence
  Description of Artificial Sequence: Synthetic oligonucleotide
  X-linked inhibitor of apoptosis (XIAP) siRNA
aaccccaagagagttagcaagtg

SEQ ID NO: 10958 - DNA, 23 bp, Artificial Sequence
  Description of Artificial Sequence: Synthetic oligonucleotide
  X-linked inhibitor of apoptosis (XIAP) siRNA
accccaagagagttagcaagtgc

SEQ ID NO: 10959 - DNA, 23 bp, Artificial Sequence
  Description of Artificial Sequence: Synthetic oligonucleotide
  X-linked inhibitor of apoptosis (XIAP) siRNA
ccccaagagagttagcaagtgct

SEQ ID NO: 10960 - DNA, 23 bp, Artificial Sequence
  Description of Artificial Sequence: Synthetic oligonucleotide
  X-linked inhibitor of apoptosis (XIAP) siRNA
cccaagagagttagcaagtgctg

SEQ ID NO: 10961 - DNA, 23 bp, Artificial Sequence
  Description of Artificial Sequence: Synthetic oligonucleotide
  X-linked inhibitor of apoptosis (XIAP) siRNA
ccaagagagttagcaagtgctgg

SEQ ID NO: 10962 - DNA, 23 bp, Artificial Sequence
  Description of Artificial Sequence: Synthetic oligonucleotide
  X-linked inhibitor of apoptosis (XIAP) siRNA
caagagagttagcaagtgctgga

SEQ ID NO: 10963 - DNA, 23 bp, Artificial Sequence
  Description of Artificial Sequence: Synthetic oligonucleotide
  X-linked inhibitor of apoptosis (XIAP) siRNA
aagagagttagcaagtgctggac

SEQ ID NO: 10964 - DNA, 23 bp, Artificial Sequence
  Description of Artificial Sequence: Synthetic oligonucleotide
  X-linked inhibitor of apoptosis (XIAP) siRNA
agagagttagcaagtgctggact

SEQ ID NO: 10965 - DNA, 23 bp, Artificial Sequence
  Description of Artificial Sequence: Synthetic oligonucleotide
  X-linked inhibitor of apoptosis (XIAP) siRNA
gagagttagcaagtgctggactc

SEQ ID NO: 10966 - DNA, 23 bp, Artificial Sequence
  Description of Artificial Sequence: Synthetic oligonucleotide
  X-linked inhibitor of apoptosis (XIAP) siRNA
agagttagcaagtgctggactct

SEQ ID NO: 10967 - DNA, 23 bp, Artificial Sequence
  Description of Artificial Sequence: Synthetic oligonucleotide
  X-linked inhibitor of apoptosis (XIAP) siRNA
gagttagcaagtgctggactcta

SEQ ID NO: 10968 - DNA, 23 bp, Artificial Sequence
  Description of Artificial Sequence: Synthetic oligonucleotide
  X-linked inhibitor of apoptosis (XIAP) siRNA
agttagcaagtgctggactctac

SEQ ID NO: 10969 - DNA, 23 bp, Artificial Sequence
  Description of Artificial Sequence: Synthetic oligonucleotide
  X-linked inhibitor of apoptosis (XIAP) siRNA
gttagcaagtgctggactctact

SEQ ID NO: 10970 - DNA, 23 bp, Artificial Sequence
  Description of Artificial Sequence: Synthetic oligonucleotide
  X-linked inhibitor of apoptosis (XIAP) siRNA
ttagcaagtgctggactctacta

SEQ ID NO: 10971 - DNA, 23 bp, Artificial Sequence
  Description of Artificial Sequence: Synthetic oligonucleotide
  X-linked inhibitor of apoptosis (XIAP) siRNA
tagcaagtgctggactctactac

SEQ ID NO: 10972 - DNA, 23 bp, Artificial Sequence
  Description of Artificial Sequence: Synthetic oligonucleotide
  X-linked inhibitor of apoptosis (XIAP) siRNA
agcaagtgctggactctactaca

SEQ ID NO: 10973 - DNA, 23 bp, Artificial Sequence
  Description of Artificial Sequence: Synthetic oligonucleotide
  X-linked inhibitor of apoptosis (XIAP) siRNA
gcaagtgctggactctactacac

SEQ ID NO: 10974 - DNA, 23 bp, Artificial Sequence
  Description of Artificial Sequence: Synthetic oligonucleotide
  X-linked inhibitor of apoptosis (XIAP) siRNA
caagtgctggactctactacaca

SEQ ID NO: 10975 - DNA, 23 bp, Artificial Sequence
  Description of Artificial Sequence: Synthetic oligonucleotide
  X-linked inhibitor of apoptosis (XIAP) siRNA
aagtgctggactctactacacag

SEQ ID NO: 10976 - DNA, 23 bp, Artificial Sequence
  Description of Artificial Sequence: Synthetic oligonucleotide
  X-linked inhibitor of apoptosis (XIAP) siRNA
agtgctggactctactacacagg

SEQ ID NO: 10977 - DNA, 23 bp, Artificial Sequence
  Description of Artificial Sequence: Synthetic oligonucleotide
  X-linked inhibitor of apoptosis (XIAP) siRNA
gtgctggactctactacacaggt

SEQ ID NO: 10978 - DNA, 23 bp, Artificial Sequence
  Description of Artificial Sequence: Synthetic oligonucleotide
  X-linked inhibitor of apoptosis (XIAP) siRNA
tgctggactctactacacaggta

SEQ ID NO: 10979 - DNA, 23 bp, Artificial Sequence
  Description of Artificial Sequence: Synthetic oligonucleotide
  X-linked inhibitor of apoptosis (XIAP) siRNA
gctggactctactacacaggtat

SEQ ID NO: 10980 - DNA, 23 bp, Artificial Sequence
  Description of Artificial Sequence: Synthetic oligonucleotide
  X-linked inhibitor of apoptosis (XIAP) siRNA
ctggactctactacacaggtatt

SEQ ID NO: 10981 - DNA, 23 bp, Artificial Sequence
  Description of Artificial Sequence: Synthetic oligonucleotide
  X-linked inhibitor of apoptosis (XIAP) siRNA
tggactctactacacaggtattg

SEQ ID NO: 10982 - DNA, 23 bp, Artificial Sequence
  Description of Artificial Sequence: Synthetic oligonucleotide
  X-linked inhibitor of apoptosis (XIAP) siRNA
ggactctactacacaggtattgg

SEQ ID NO: 10983 - DNA, 23 bp, Artificial Sequence
  Description of Artificial Sequence: Synthetic oligonucleotide
  X-linked inhibitor of apoptosis (XIAP) siRNA
gactctactacacaggtattggt

SEQ ID NO: 10984 - DNA, 23 bp, Artificial Sequence
  Description of Artificial Sequence: Synthetic oligonucleotide
  X-linked inhibitor of apoptosis (XIAP) siRNA
actctactacacaggtattggtg

SEQ ID NO: 10985 - DNA, 23 bp, Artificial Sequence
  Description of Artificial Sequence: Synthetic oligonucleotide
  X-linked inhibitor of apoptosis (XIAP) siRNA
ctctactacacaggtattggtga

SEQ ID NO: 10986 - DNA, 23 bp, Artificial Sequence
  Description of Artificial Sequence: Synthetic oligonucleotide
  X-linked inhibitor of apoptosis (XIAP) siRNA
tctactacacaggtattggtgac

SEQ ID NO: 10987 - DNA, 23 bp, Artificial Sequence
  Description of Artificial Sequence: Synthetic oligonucleotide
  X-linked inhibitor of apoptosis (XIAP) siRNA
ctactacacaggtattggtgacc

SEQ ID NO: 10988 - DNA, 23 bp, Artificial Sequence
  Description of Artificial Sequence: Synthetic oligonucleotide
  X-linked inhibitor of apoptosis (XIAP) siRNA
tactacacaggtattggtgacca

SEQ ID NO: 10989 - DNA, 23 bp, Artificial Sequence
  Description of Artificial Sequence: Synthetic oligonucleotide
  X-linked inhibitor of apoptosis (XIAP) siRNA
actacacaggtattggtgaccaa

SEQ ID NO: 10990 - DNA, 23 bp, Artificial Sequence
  Description of Artificial Sequence: Synthetic oligonucleotide
  X-linked inhibitor of apoptosis (XIAP) siRNA
ctacacaggtattggtgaccaag

SEQ ID NO: 10991 - DNA, 23 bp, Artificial Sequence
  Description of Artificial Sequence: Synthetic oligonucleotide
  X-linked inhibitor of apoptosis (XIAP) siRNA
tacacaggtattggtgaccaagt

SEQ ID NO: 10992 - DNA, 23 bp, Artificial Sequence
  Description of Artificial Sequence: Synthetic oligonucleotide
  X-linked inhibitor of apoptosis (XIAP) siRNA
acacaggtattggtgaccaagtg

SEQ ID NO: 10993 - DNA, 23 bp, Artificial Sequence
  Description of Artificial Sequence: Synthetic oligonucleotide
  X-linked inhibitor of apoptosis (XIAP) siRNA
cacaggtattggtgaccaagtgc

SEQ ID NO: 10994 - DNA, 23 bp, Artificial Sequence
  Description of Artificial Sequence: Synthetic oligonucleotide
  X-linked inhibitor of apoptosis (XIAP) siRNA
acaggtattggtgaccaagtgca

SEQ ID NO: 10995 - DNA, 23 bp, Artificial Sequence
  Description of Artificial Sequence: Synthetic oligonucleotide
  X-linked inhibitor of apoptosis (XIAP) siRNA
caggtattggtgaccaagtgcag

SEQ ID NO: 10996 - DNA, 23 bp, Artificial Sequence
  Description of Artificial Sequence: Synthetic oligonucleotide
  X-linked inhibitor of apoptosis (XIAP) siRNA
aggtattggtgaccaagtgcagt

SEQ ID NO: 10997 - DNA, 23 bp, Artificial Sequence
  Description of Artificial Sequence: Synthetic oligonucleotide
  X-linked inhibitor of apoptosis (XIAP) siRNA
ggtattggtgaccaagtgcagtg

SEQ ID NO: 10998 - DNA, 23 bp, Artificial Sequence
  Description of Artificial Sequence: Synthetic oligonucleotide
  X-linked inhibitor of apoptosis (XIAP) siRNA
gtattggtgaccaagtgcagtgc

SEQ ID NO: 10999 - DNA, 23 bp, Artificial Sequence
  Description of Artificial Sequence: Synthetic oligonucleotide
  X-linked inhibitor of apoptosis (XIAP) siRNA
tattggtgaccaagtgcagtgct

SEQ ID NO: 11000 - DNA, 23 bp, Artificial Sequence
  Description of Artificial Sequence: Synthetic oligonucleotide
  X-linked inhibitor of apoptosis (XIAP) siRNA
attggtgaccaagtgcagtgctt

SEQ ID NO: 11001 - DNA, 23 bp, Artificial Sequence
  Description of Artificial Sequence: Synthetic oligonucleotide
  X-linked inhibitor of apoptosis (XIAP) siRNA
ttggtgaccaagtgcagtgcttt

SEQ ID NO: 11002 - DNA, 23 bp, Artificial Sequence
  Description of Artificial Sequence: Synthetic oligonucleotide
  X-linked inhibitor of apoptosis (XIAP) siRNA
tggtgaccaagtgcagtgctttt

SEQ ID NO: 11003 - DNA, 23 bp, Artificial Sequence
  Description of Artificial Sequence: Synthetic oligonucleotide
  X-linked inhibitor of apoptosis (XIAP) siRNA
ggtgaccaagtgcagtgcttttg

SEQ ID NO: 11004 - DNA, 23 bp, Artificial Sequence
  Description of Artificial Sequence: Synthetic oligonucleotide
  X-linked inhibitor of apoptosis (XIAP) siRNA
gtgaccaagtgcagtgcttttgt

SEQ ID NO: 11005 - DNA, 23 bp, Artificial Sequence
  Description of Artificial Sequence: Synthetic oligonucleotide
  X-linked inhibitor of apoptosis (XIAP) siRNA
tgaccaagtgcagtgcttttgtt

SEQ ID NO: 11006 - DNA, 23 bp, Artificial Sequence
  Description of Artificial Sequence: Synthetic oligonucleotide
  X-linked inhibitor of apoptosis (XIAP) siRNA
gaccaagtgcagtgcttttgttg

SEQ ID NO: 11007 - DNA, 23 bp, Artificial Sequence
  Description of Artificial Sequence: Synthetic oligonucleotide
  X-linked inhibitor of apoptosis (XIAP) siRNA
accaagtgcagtgcttttgttgt

SEQ ID NO: 11008 - DNA, 23 bp, Artificial Sequence
  Description of Artificial Sequence: Synthetic oligonucleotide
  X-linked inhibitor of apoptosis (XIAP) siRNA
ccaagtgcagtgcttttgttgtg

SEQ ID NO: 11009 - DNA, 23 bp, Artificial Sequence
  Description of Artificial Sequence: Synthetic oligonucleotide
  X-linked inhibitor of apoptosis (XIAP) siRNA
caagtgcagtgcttttgttgtgg

SEQ ID NO: 11010 - DNA, 23 bp, Artificial Sequence
  Description of Artificial Sequence: Synthetic oligonucleotide
  X-linked inhibitor of apoptosis (XIAP) siRNA
aagtgcagtgcttttgttgtggt

SEQ ID NO: 11011 - DNA, 23 bp, Artificial Sequence
  Description of Artificial Sequence: Synthetic oligonucleotide
  X-linked inhibitor of apoptosis (XIAP) siRNA
agtgcagtgcttttgttgtggtg

SEQ ID NO: 11012 - DNA, 23 bp, Artificial Sequence
  Description of Artificial Sequence: Synthetic oligonucleotide
  X-linked inhibitor of apoptosis (XIAP) siRNA
gtgcagtgcttttgttgtggtgg

SEQ ID NO: 11013 - DNA, 23 bp, Artificial Sequence
  Description of Artificial Sequence: Synthetic oligonucleotide
  X-linked inhibitor of apoptosis (XIAP) siRNA
tgcagtgcttttgttgtggtgga

SEQ ID NO: 11014 - DNA, 23 bp, Artificial Sequence
  Description of Artificial Sequence: Synthetic oligonucleotide
  X-linked inhibitor of apoptosis (XIAP) siRNA
gcagtgcttttgttgtggtggaa

SEQ ID NO: 11015 - DNA, 23 bp, Artificial Sequence
  Description of Artificial Sequence: Synthetic oligonucleotide
  X-linked inhibitor of apoptosis (XIAP) siRNA
cagtgcttttgttgtggtggaaa

SEQ ID NO: 11016 - DNA, 23 bp, Artificial Sequence
  Description of Artificial Sequence: Synthetic oligonucleotide
  X-linked inhibitor of apoptosis (XIAP) siRNA
agtgcttttgttgtggtggaaaa

SEQ ID NO: 11017 - DNA, 23 bp, Artificial Sequence
  Description of Artificial Sequence: Synthetic oligonucleotide
  X-linked inhibitor of apoptosis (XIAP) siRNA
gtgcttttgttgtggtggaaaac

SEQ ID NO: 11018 - DNA, 23 bp, Artificial Sequence
  Description of Artificial Sequence: Synthetic oligonucleotide
  X-linked inhibitor of apoptosis (XIAP) siRNA
tgcttttgttgtggtggaaaact

SEQ ID NO: 11019 - DNA, 23 bp, Artificial Sequence
  Description of Artificial Sequence: Synthetic oligonucleotide
  X-linked inhibitor of apoptosis (XIAP) siRNA
gcttttgttgtggtggaaaactg

SEQ ID NO: 11020 - DNA, 23 bp, Artificial Sequence
  Description of Artificial Sequence: Synthetic oligonucleotide
  X-linked inhibitor of apoptosis (XIAP) siRNA
cttttgttgtggtggaaaactga

SEQ ID NO: 11021 - DNA, 23 bp, Artificial Sequence
  Description of Artificial Sequence: Synthetic oligonucleotide
  X-linked inhibitor of apoptosis (XIAP) siRNA
ttttgttgtggtggaaaactgaa

SEQ ID NO: 11022 - DNA, 23 bp, Artificial Sequence
  Description of Artificial Sequence: Synthetic oligonucleotide
  X-linked inhibitor of apoptosis (XIAP) siRNA
tttgttgtggtggaaaactgaaa

SEQ ID NO: 11023 - DNA, 23 bp, Artificial Sequence
  Description of Artificial Sequence: Synthetic oligonucleotide
  X-linked inhibitor of apoptosis (XIAP) siRNA
ttgttgtggtggaaaactgaaaa

SEQ ID NO: 11024 - DNA, 23 bp, Artificial Sequence
  Description of Artificial Sequence: Synthetic oligonucleotide
  X-linked inhibitor of apoptosis (XIAP) siRNA
tgttgtggtggaaaactgaaaaa

SEQ ID NO: 11025 - DNA, 23 bp, Artificial Sequence
  Description of Artificial Sequence: Synthetic oligonucleotide
  X-linked inhibitor of apoptosis (XIAP) siRNA
gttgtggtggaaaactgaaaaat

SEQ ID NO: 11026 - DNA, 23 bp, Artificial Sequence
  Description of Artificial Sequence: Synthetic oligonucleotide
  X-linked inhibitor of apoptosis (XIAP) siRNA
ttgtggtggaaaactgaaaaatt

SEQ ID NO: 11027 - DNA, 23 bp, Artificial Sequence
  Description of Artificial Sequence: Synthetic oligonucleotide
  X-linked inhibitor of apoptosis (XIAP) siRNA
tgtggtggaaaactgaaaaattg

SEQ ID NO: 11028 - DNA, 23 bp, Artificial Sequence
  Description of Artificial Sequence: Synthetic oligonucleotide
  X-linked inhibitor of apoptosis (XIAP) siRNA
gtggtggaaaactgaaaaattgg

SEQ ID NO: 11029 - DNA, 23 bp, Artificial Sequence
  Description of Artificial Sequence: Synthetic oligonucleotide
  X-linked inhibitor of apoptosis (XIAP) siRNA
tggtggaaaactgaaaaattggg

SEQ ID NO: 11030 - DNA, 23 bp, Artificial Sequence
  Description of Artificial Sequence: Synthetic oligonucleotide
  X-linked inhibitor of apoptosis (XIAP) siRNA
ggtggaaaactgaaaaattggga

SEQ ID NO: 11031 - DNA, 23 bp, Artificial Sequence
  Description of Artificial Sequence: Synthetic oligonucleotide
  X-linked inhibitor of apoptosis (XIAP) siRNA
gtggaaaactgaaaaattgggaa

SEQ ID NO: 11032 - DNA, 23 bp, Artificial Sequence
  Description of Artificial Sequence: Synthetic oligonucleotide
  X-linked inhibitor of apoptosis (XIAP) siRNA
tggaaaactgaaaaattgggaac

SEQ ID NO: 11033 - DNA, 23 bp, Artificial Sequence
  Description of Artificial Sequence: Synthetic oligonucleotide
  X-linked inhibitor of apoptosis (XIAP) siRNA
ggaaaactgaaaaattgggaacc

SEQ ID NO: 11034 - DNA, 23 bp, Artificial Sequence
  Description of Artificial Sequence: Synthetic oligonucleotide
  X-linked inhibitor of apoptosis (XIAP) siRNA
gaaaactgaaaaattgggaacct

SEQ ID NO: 11035 - DNA, 23 bp, Artificial Sequence
  Description of Artificial Sequence: Synthetic oligonucleotide
  X-linked inhibitor of apoptosis (XIAP) siRNA
aaaactgaaaaattgggaacctt

SEQ ID NO: 11036 - DNA, 23 bp, Artificial Sequence
  Description of Artificial Sequence: Synthetic oligonucleotide
  X-linked inhibitor of apoptosis (XIAP) siRNA
aaactgaaaaattgggaaccttg

SEQ ID NO: 11037 - DNA, 23 bp, Artificial Sequence
  Description of Artificial Sequence: Synthetic oligonucleotide
  X-linked inhibitor of apoptosis (XIAP) siRNA
aactgaaaaattgggaaccttgt

SEQ ID NO: 11038 - DNA, 23 bp, Artificial Sequence
  Description of Artificial Sequence: Synthetic oligonucleotide
  X-linked inhibitor of apoptosis (XIAP) siRNA
actgaaaaattgggaaccttgtg

SEQ ID NO: 11039 - DNA, 23 bp, Artificial Sequence
  Description of Artificial Sequence: Synthetic oligonucleotide
  X-linked inhibitor of apoptosis (XIAP) siRNA
ctgaaaaattgggaaccttgtga

SEQ ID NO: 11040 - DNA, 23 bp, Artificial Sequence
  Description of Artificial Sequence: Synthetic oligonucleotide
  X-linked inhibitor of apoptosis (XIAP) siRNA
tgaaaaattgggaaccttgtgat

SEQ ID NO: 11041 - DNA, 23 bp, Artificial Sequence
  Description of Artificial Sequence: Synthetic oligonucleotide
  X-linked inhibitor of apoptosis (XIAP) siRNA
gaaaaattgggaaccttgtgatc

SEQ ID NO: 11042 - DNA, 23 bp, Artificial Sequence
  Description of Artificial Sequence: Synthetic oligonucleotide
  X-linked inhibitor of apoptosis (XIAP) siRNA
aaaaattgggaaccttgtgatcg

SEQ ID NO: 11043 - DNA, 23 bp, Artificial Sequence
  Description of Artificial Sequence: Synthetic oligonucleotide
  X-linked inhibitor of apoptosis (XIAP) siRNA
aaaattgggaaccttgtgatcgt

SEQ ID NO: 11044 - DNA, 23 bp, Artificial Sequence
  Description of Artificial Sequence: Synthetic oligonucleotide
  X-linked inhibitor of apoptosis (XIAP) siRNA
aaattgggaaccttgtgatcgtg

SEQ ID NO: 11045 - DNA, 23 bp, Artificial Sequence
  Description of Artificial Sequence: Synthetic oligonucleotide
  X-linked inhibitor of apoptosis (XIAP) siRNA
aattgggaaccttgtgatcgtgc

SEQ ID NO: 11046 - DNA, 23 bp, Artificial Sequence
  Description of Artificial Sequence: Synthetic oligonucleotide
  X-linked inhibitor of apoptosis (XIAP) siRNA
attgggaaccttgtgatcgtgcc

SEQ ID NO: 11047 - DNA, 23 bp, Artificial Sequence
  Description of Artificial Sequence: Synthetic oligonucleotide
  X-linked inhibitor of apoptosis (XIAP) siRNA
ttgggaaccttgtgatcgtgcct

SEQ ID NO: 11048 - DNA, 23 bp, Artificial Sequence
  Description of Artificial Sequence: Synthetic oligonucleotide
  X-linked inhibitor of apoptosis (XIAP) siRNA
tgggaaccttgtgatcgtgcctg

SEQ ID NO: 11049 - DNA, 23 bp, Artificial Sequence
  Description of Artificial Sequence: Synthetic oligonucleotide
  X-linked inhibitor of apoptosis (XIAP) siRNA
gggaaccttgtgatcgtgcctgg

SEQ ID NO: 11050 - DNA, 23 bp, Artificial Sequence
  Description of Artificial Sequence: Synthetic oligonucleotide
  X-linked inhibitor of apoptosis (XIAP) siRNA
ggaaccttgtgatcgtgcctggt

SEQ ID NO: 11051 - DNA, 23 bp, Artificial Sequence
  Description of Artificial Sequence: Synthetic oligonucleotide
  X-linked inhibitor of apoptosis (XIAP) siRNA
gaaccttgtgatcgtgcctggtc

SEQ ID NO: 11052 - DNA, 23 bp, Artificial Sequence
  Description of Artificial Sequence: Synthetic oligonucleotide
  X-linked inhibitor of apoptosis (XIAP) siRNA
aaccttgtgatcgtgcctggtca

SEQ ID NO: 11053 - DNA, 23 bp, Artificial Sequence
  Description of Artificial Sequence: Synthetic oligonucleotide
  X-linked inhibitor of apoptosis (XIAP) siRNA
accttgtgatcgtgcctggtcag

SEQ ID NO: 11054 - DNA, 23 bp, Artificial Sequence
  Description of Artificial Sequence: Synthetic oligonucleotide
  X-linked inhibitor of apoptosis (XIAP) siRNA
ccttgtgatcgtgcctggtcaga

SEQ ID NO: 11055 - DNA, 23 bp, Artificial Sequence
  Description of Artificial Sequence: Synthetic oligonucleotide
  X-linked inhibitor of apoptosis (XIAP) siRNA
cttgtgatcgtgcctggtcagaa

SEQ ID NO: 11056 - DNA, 23 bp, Artificial Sequence
  Description of Artificial Sequence: Synthetic oligonucleotide
  X-linked inhibitor of apoptosis (XIAP) siRNA
ttgtgatcgtgcctggtcagaac

SEQ ID NO: 11057 - DNA, 23 bp, Artificial Sequence
  Description of Artificial Sequence: Synthetic oligonucleotide
  X-linked inhibitor of apoptosis (XIAP) siRNA
tgtgatcgtgcctggtcagaaca

SEQ ID NO: 11058 - DNA, 23 bp, Artificial Sequence
  Description of Artificial Sequence: Synthetic oligonucleotide
  X-linked inhibitor of apoptosis (XIAP) siRNA
gtgatcgtgcctggtcagaacac

SEQ ID NO: 11059 - DNA, 23 bp, Artificial Sequence
  Description of Artificial Sequence: Synthetic oligonucleotide
  X-linked inhibitor of apoptosis (XIAP) siRNA
tgatcgtgcctggtcagaacaca

SEQ ID NO: 11060 - DNA, 23 bp, Artificial Sequence
  Description of Artificial Sequence: Synthetic oligonucleotide
  X-linked inhibitor of apoptosis (XIAP) siRNA
gatcgtgcctggtcagaacacag

SEQ ID NO: 11061 - DNA, 23 bp, Artificial Sequence
  Description of Artificial Sequence: Synthetic oligonucleotide
  X-linked inhibitor of apoptosis (XIAP) siRNA
atcgtgcctggtcagaacacagg

SEQ ID NO: 11062 - DNA, 23 bp, Artificial Sequence
  Description of Artificial Sequence: Synthetic oligonucleotide
  X-linked inhibitor of apoptosis (XIAP) siRNA
tcgtgcctggtcagaacacaggc

SEQ ID NO: 11063 - DNA, 23 bp, Artificial Sequence
  Description of Artificial Sequence: Synthetic oligonucleotide
  X-linked inhibitor of apoptosis (XIAP) siRNA
cgtgcctggtcagaacacaggcg

SEQ ID NO: 11064 - DNA, 23 bp, Artificial Sequence
  Description of Artificial Sequence: Synthetic oligonucleotide
  X-linked inhibitor of apoptosis (XIAP) siRNA
gtgcctggtcagaacacaggcga

SEQ ID NO: 11065 - DNA, 23 bp, Artificial Sequence
  Description of Artificial Sequence: Synthetic oligonucleotide
  X-linked inhibitor of apoptosis (XIAP) siRNA
tgcctggtcagaacacaggcgac

SEQ ID NO: 11066 - DNA, 23 bp, Artificial Sequence
  Description of Artificial Sequence: Synthetic oligonucleotide
  X-linked inhibitor of apoptosis (XIAP) siRNA
gcctggtcagaacacaggcgaca

SEQ ID NO: 11067 - DNA, 23 bp, Artificial Sequence
  Description of Artificial Sequence: Synthetic oligonucleotide
  X-linked inhibitor of apoptosis (XIAP) siRNA
cctggtcagaacacaggcgacac

SEQ ID NO: 11068 - DNA, 23 bp, Artificial Sequence
  Description of Artificial Sequence: Synthetic oligonucleotide
  X-linked inhibitor of apoptosis (XIAP) siRNA
ctggtcagaacacaggcgacact

SEQ ID NO: 11069 - DNA, 23 bp, Artificial Sequence
  Description of Artificial Sequence: Synthetic oligonucleotide
  X-linked inhibitor of apoptosis (XIAP) siRNA
tggtcagaacacaggcgacactt

SEQ ID NO: 11070 - DNA, 23 bp, Artificial Sequence
  Description of Artificial Sequence: Synthetic oligonucleotide
  X-linked inhibitor of apoptosis (XIAP) siRNA
ggtcagaacacaggcgacacttt

SEQ ID NO: 11071 - DNA, 23 bp, Artificial Sequence
  Description of Artificial Sequence: Synthetic oligonucleotide
  X-linked inhibitor of apoptosis (XIAP) siRNA
gtcagaacacaggcgacactttc

SEQ ID NO: 11072 - DNA, 23 bp, Artificial Sequence
  Description of Artificial Sequence: Synthetic oligonucleotide
  X-linked inhibitor of apoptosis (XIAP) siRNA
tcagaacacaggcgacactttcc

SEQ ID NO: 11073 - DNA, 23 bp, Artificial Sequence
  Description of Artificial Sequence: Synthetic oligonucleotide
  X-linked inhibitor of apoptosis (XIAP) siRNA
cagaacacaggcgacactttcct

SEQ ID NO: 11074 - DNA, 23 bp, Artificial Sequence
  Description of Artificial Sequence: Synthetic oligonucleotide
  X-linked inhibitor of apoptosis (XIAP) siRNA
agaacacaggcgacactttccta

SEQ ID NO: 11075 - DNA, 23 bp, Artificial Sequence
  Description of Artificial Sequence: Synthetic oligonucleotide
  X-linked inhibitor of apoptosis (XIAP) siRNA
gaacacaggcgacactttcctaa

SEQ ID NO: 11076 - DNA, 23 bp, Artificial Sequence
  Description of Artificial Sequence: Synthetic oligonucleotide
  X-linked inhibitor of apoptosis (XIAP) siRNA
aacacaggcgacactttcctaat

SEQ ID NO: 11077 - DNA, 23 bp, Artificial Sequence
  Description of Artificial Sequence: Synthetic oligonucleotide
  X-linked inhibitor of apoptosis (XIAP) siRNA
acacaggcgacactttcctaatt

SEQ ID NO: 11078 - DNA, 23 bp, Artificial Sequence
  Description of Artificial Sequence: Synthetic oligonucleotide
  X-linked inhibitor of apoptosis (XIAP) siRNA
cacaggcgacactttcctaattg

SEQ ID NO: 11079 - DNA, 23 bp, Artificial Sequence
  Description of Artificial Sequence: Synthetic oligonucleotide
  X-linked inhibitor of apoptosis (XIAP) siRNA
acaggcgacactttcctaattgc

SEQ ID NO: 11080 - DNA, 23 bp, Artificial Sequence
  Description of Artificial Sequence: Synthetic oligonucleotide
  X-linked inhibitor of apoptosis (XIAP) siRNA
caggcgacactttcctaattgct

SEQ ID NO: 11081 - DNA, 23 bp, Artificial Sequence
  Description of Artificial Sequence: Synthetic oligonucleotide
  X-linked inhibitor of apoptosis (XIAP) siRNA
aggcgacactttcctaattgctt

SEQ ID NO: 11082 - DNA, 23 bp, Artificial Sequence
  Description of Artificial Sequence: Synthetic oligonucleotide
  X-linked inhibitor of apoptosis (XIAP) siRNA
ggcgacactttcctaattgcttc

SEQ ID NO: 11083 - DNA, 23 bp, Artificial Sequence
  Description of Artificial Sequence: Synthetic oligonucleotide
  X-linked inhibitor of apoptosis (XIAP) siRNA
gcgacactttcctaattgcttct

SEQ ID NO: 11084 - DNA, 23 bp, Artificial Sequence
  Description of Artificial Sequence: Synthetic oligonucleotide
  X-linked inhibitor of apoptosis (XIAP) siRNA
cgacactttcctaattgcttctt

SEQ ID NO: 11085 - DNA, 23 bp, Artificial Sequence
  Description of Artificial Sequence: Synthetic oligonucleotide
  X-linked inhibitor of apoptosis (XIAP) siRNA
gacactttcctaattgcttcttt

SEQ ID NO: 11086 - DNA, 23 bp, Artificial Sequence
  Description of Artificial Sequence: Synthetic oligonucleotide
  X-linked inhibitor of apoptosis (XIAP) siRNA
acactttcctaattgcttctttg

SEQ ID NO: 11087 - DNA, 23 bp, Artificial Sequence
  Description of Artificial Sequence: Synthetic oligonucleotide
  X-linked inhibitor of apoptosis (XIAP) siRNA
cactttcctaattgcttctttgt

SEQ ID NO: 11088 - DNA, 23 bp, Artificial Sequence
  Description of Artificial Sequence: Synthetic oligonucleotide
  X-linked inhibitor of apoptosis (XIAP) siRNA
actttcctaattgcttctttgtt

SEQ ID NO: 11089 - DNA, 23 bp, Artificial Sequence
  Description of Artificial Sequence: Synthetic oligonucleotide
  X-linked inhibitor of apoptosis (XIAP) siRNA
ctttcctaattgcttctttgttt

SEQ ID NO: 11090 - DNA, 23 bp, Artificial Sequence
  Description of Artificial Sequence: Synthetic oligonucleotide
  X-linked inhibitor of apoptosis (XIAP) siRNA
tttcctaattgcttctttgtttt

SEQ ID NO: 11091 - DNA, 23 bp, Artificial Sequence
  Description of Artificial Sequence: Synthetic oligonucleotide
  X-linked inhibitor of apoptosis (XIAP) siRNA
ttcctaattgcttctttgttttg

SEQ ID NO: 11092 - DNA, 23 bp, Artificial Sequence
  Description of Artificial Sequence: Synthetic oligonucleotide
  X-linked inhibitor of apoptosis (XIAP) siRNA
tcctaattgcttctttgttttgg

SEQ ID NO: 11093 - DNA, 23 bp, Artificial Sequence
  Description of Artificial Sequence: Synthetic oligonucleotide
  X-linked inhibitor of apoptosis (XIAP) siRNA
cctaattgcttctttgttttggg

SEQ ID NO: 11094 - DNA, 23 bp, Artificial Sequence
  Description of Artificial Sequence: Synthetic oligonucleotide
  X-linked inhibitor of apoptosis (XIAP) siRNA
ctaattgcttctttgttttgggc

SEQ ID NO: 11095 - DNA, 23 bp, Artificial Sequence
  Description of Artificial Sequence: Synthetic oligonucleotide
  X-linked inhibitor of apoptosis (XIAP) siRNA
taattgcttctttgttttgggcc

SEQ ID NO: 11096 - DNA, 23 bp, Artificial Sequence
  Description of Artificial Sequence: Synthetic oligonucleotide
  X-linked inhibitor of apoptosis (XIAP) siRNA
aattgcttctttgttttgggccg

SEQ ID NO: 11097 - DNA, 23 bp, Artificial Sequence
  Description of Artificial Sequence: Synthetic oligonucleotide
  X-linked inhibitor of apoptosis (XIAP) siRNA
attgcttctttgttttgggccgg

SEQ ID NO: 11098 - DNA, 23 bp, Artificial Sequence
  Description of Artificial Sequence: Synthetic oligonucleotide
  X-linked inhibitor of apoptosis (XIAP) siRNA
ttgcttctttgttttgggccgga

SEQ ID NO: 11099 - DNA, 23 bp, Artificial Sequence
  Description of Artificial Sequence: Synthetic oligonucleotide
  X-linked inhibitor of apoptosis (XIAP) siRNA
tgcttctttgttttgggccggaa

SEQ ID NO: 11100 - DNA, 23 bp, Artificial Sequence
  Description of Artificial Sequence: Synthetic oligonucleotide
  X-linked inhibitor of apoptosis (XIAP) siRNA
gcttctttgttttgggccggaat

SEQ ID NO: 11101 - DNA, 23 bp, Artificial Sequence
  Description of Artificial Sequence: Synthetic oligonucleotide
  X-linked inhibitor of apoptosis (XIAP) siRNA
cttctttgttttgggccggaatc

SEQ ID NO: 11102 - DNA, 23 bp, Artificial Sequence
  Description of Artificial Sequence: Synthetic oligonucleotide
  X-linked inhibitor of apoptosis (XIAP) siRNA
ttctttgttttgggccggaatct

SEQ ID NO: 11103 - DNA, 23 bp, Artificial Sequence
  Description of Artificial Sequence: Synthetic oligonucleotide
  X-linked inhibitor of apoptosis (XIAP) siRNA
tctttgttttgggccggaatctt

SEQ ID NO: 11104 - DNA, 23 bp, Artificial Sequence
  Description of Artificial Sequence: Synthetic oligonucleotide
  X-linked inhibitor of apoptosis (XIAP) siRNA
ctttgttttgggccggaatctta

SEQ ID NO: 11105 - DNA, 23 bp, Artificial Sequence
  Description of Artificial Sequence: Synthetic oligonucleotide
  X-linked inhibitor of apoptosis (XIAP) siRNA
tttgttttgggccggaatcttaa

SEQ ID NO: 11106 - DNA, 23 bp, Artificial Sequence
  Description of Artificial Sequence: Synthetic oligonucleotide
  X-linked inhibitor of apoptosis (XIAP) siRNA
ttgttttgggccggaatcttaat

SEQ ID NO: 11107 - DNA, 23 bp, Artificial Sequence
  Description of Artificial Sequence: Synthetic oligonucleotide
  X-linked inhibitor of apoptosis (XIAP) siRNA
tgttttgggccggaatcttaata

SEQ ID NO: 11108 - DNA, 23 bp, Artificial Sequence
  Description of Artificial Sequence: Synthetic oligonucleotide
  X-linked inhibitor of apoptosis (XIAP) siRNA
gttttgggccggaatcttaatat

SEQ ID NO: 11109 - DNA, 23 bp, Artificial Sequence
  Description of Artificial Sequence: Synthetic oligonucleotide
  X-linked inhibitor of apoptosis (XIAP) siRNA
ttttgggccggaatcttaatatt

SEQ ID NO: 11110 - DNA, 23 bp, Artificial Sequence
  Description of Artificial Sequence: Synthetic oligonucleotide
  X-linked inhibitor of apoptosis (XIAP) siRNA
tttgggccggaatcttaatattc

SEQ ID NO: 11111 - DNA, 23 bp, Artificial Sequence
  Description of Artificial Sequence: Synthetic oligonucleotide
  X-linked inhibitor of apoptosis (XIAP) siRNA
ttgggccggaatcttaatattcg

SEQ ID NO: 11112 - DNA, 23 bp, Artificial Sequence
  Description of Artificial Sequence: Synthetic oligonucleotide
  X-linked inhibitor of apoptosis (XIAP) siRNA
tgggccggaatcttaatattcga

SEQ ID NO: 11113 - DNA, 23 bp, Artificial Sequence
  Description of Artificial Sequence: Synthetic oligonucleotide
  X-linked inhibitor of apoptosis (XIAP) siRNA
gggccggaatcttaatattcgaa

SEQ ID NO: 11114 - DNA, 23 bp, Artificial Sequence
  Description of Artificial Sequence: Synthetic oligonucleotide
  X-linked inhibitor of apoptosis (XIAP) siRNA
ggccggaatcttaatattcgaag

SEQ ID NO: 11115 - DNA, 23 bp, Artificial Sequence
  Description of Artificial Sequence: Synthetic oligonucleotide
  X-linked inhibitor of apoptosis (XIAP) siRNA
gccggaatcttaatattcgaagt

SEQ ID NO: 11116 - DNA, 23 bp, Artificial Sequence
  Description of Artificial Sequence: Synthetic oligonucleotide
  X-linked inhibitor of apoptosis (XIAP) siRNA
ccggaatcttaatattcgaagtg

SEQ ID NO: 11117 - DNA, 23 bp, Artificial Sequence
  Description of Artificial Sequence: Synthetic oligonucleotide
  X-linked inhibitor of apoptosis (XIAP) siRNA
cggaatcttaatattcgaagtga

SEQ ID NO: 11118 - DNA, 23 bp, Artificial Sequence
  Description of Artificial Sequence: Synthetic oligonucleotide
  X-linked inhibitor of apoptosis (XIAP) siRNA
ggaatcttaatattcgaagtgaa

SEQ ID NO: 11119 - DNA, 23 bp, Artificial Sequence
  Description of Artificial Sequence: Synthetic oligonucleotide
  X-linked inhibitor of apoptosis (XIAP) siRNA
gaatcttaatattcgaagtgaat

SEQ ID NO: 11120 - DNA, 23 bp, Artificial Sequence
  Description of Artificial Sequence: Synthetic oligonucleotide
  X-linked inhibitor of apoptosis (XIAP) siRNA
aatcttaatattcgaagtgaatc

SEQ ID NO: 11121 - DNA, 23 bp, Artificial Sequence
  Description of Artificial Sequence: Synthetic oligonucleotide
  X-linked inhibitor of apoptosis (XIAP) siRNA
atcttaatattcgaagtgaatct

SEQ ID NO: 11122 - DNA, 23 bp, Artificial Sequence
  Description of Artificial Sequence: Synthetic oligonucleotide
  X-linked inhibitor of apoptosis (XIAP) siRNA
tcttaatattcgaagtgaatctg

SEQ ID NO: 11123 - DNA, 23 bp, Artificial Sequence
  Description of Artificial Sequence: Synthetic oligonucleotide
  X-linked inhibitor of apoptosis (XIAP) siRNA
cttaatattcgaagtgaatctga

SEQ ID NO: 11124 - DNA, 23 bp, Artificial Sequence
  Description of Artificial Sequence: Synthetic oligonucleotide
  X-linked inhibitor of apoptosis (XIAP) siRNA
ttaatattcgaagtgaatctgat

SEQ ID NO: 11125 - DNA, 23 bp, Artificial Sequence
  Description of Artificial Sequence: Synthetic oligonucleotide
  X-linked inhibitor of apoptosis (XIAP) siRNA
taatattcgaagtgaatctgatg

SEQ ID NO: 11126 - DNA, 23 bp, Artificial Sequence
  Description of Artificial Sequence: Synthetic oligonucleotide
  X-linked inhibitor of apoptosis (XIAP) siRNA
aatattcgaagtgaatctgatgc

SEQ ID NO: 11127 - DNA, 23 bp, Artificial Sequence
  Description of Artificial Sequence: Synthetic oligonucleotide
  X-linked inhibitor of apoptosis (XIAP) siRNA
atattcgaagtgaatctgatgct

SEQ ID NO: 11128 - DNA, 23 bp, Artificial Sequence
  Description of Artificial Sequence: Synthetic oligonucleotide
  X-linked inhibitor of apoptosis (XIAP) siRNA
tattcgaagtgaatctgatgctg

SEQ ID NO: 11129 - DNA, 23 bp, Artificial Sequence
  Description of Artificial Sequence: Synthetic oligonucleotide
  X-linked inhibitor of apoptosis (XIAP) siRNA
attcgaagtgaatctgatgctgt

SEQ ID NO: 11130 - DNA, 23 bp, Artificial Sequence
  Description of Artificial Sequence: Synthetic oligonucleotide
  X-linked inhibitor of apoptosis (XIAP) siRNA
ttcgaagtgaatctgatgctgtg

SEQ ID NO: 11131 - DNA, 23 bp, Artificial Sequence
  Description of Artificial Sequence: Synthetic oligonucleotide
  X-linked inhibitor of apoptosis (XIAP) siRNA
tcgaagtgaatctgatgctgtga

SEQ ID NO: 11132 - DNA, 23 bp, Artificial Sequence
  Description of Artificial Sequence: Synthetic oligonucleotide
  X-linked inhibitor of apoptosis (XIAP) siRNA
cgaagtgaatctgatgctgtgag

SEQ ID NO: 11133 - DNA, 23 bp, Artificial Sequence
  Description of Artificial Sequence: Synthetic oligonucleotide
  X-linked inhibitor of apoptosis (XIAP) siRNA
gaagtgaatctgatgctgtgagt

SEQ ID NO: 11134 - DNA, 23 bp, Artificial Sequence
  Description of Artificial Sequence: Synthetic oligonucleotide
  X-linked inhibitor of apoptosis (XIAP) siRNA
aagtgaatctgatgctgtgagtt

SEQ ID NO: 11135 - DNA, 23 bp, Artificial Sequence
  Description of Artificial Sequence: Synthetic oligonucleotide
  X-linked inhibitor of apoptosis (XIAP) siRNA
agtgaatctgatgctgtgagttc

SEQ ID NO: 11136 - DNA, 23 bp, Artificial Sequence
  Description of Artificial Sequence: Synthetic oligonucleotide
  X-linked inhibitor of apoptosis (XIAP) siRNA
gtgaatctgatgctgtgagttct

SEQ ID NO: 11137 - DNA, 23 bp, Artificial Sequence
  Description of Artificial Sequence: Synthetic oligonucleotide
  X-linked inhibitor of apoptosis (XIAP) siRNA
tgaatctgatgctgtgagttctg

SEQ ID NO: 11138 - DNA, 23 bp, Artificial Sequence
  Description of Artificial Sequence: Synthetic oligonucleotide
  X-linked inhibitor of apoptosis (XIAP) siRNA
gaatctgatgctgtgagttctga

SEQ ID NO: 11139 - DNA, 23 bp, Artificial Sequence
  Description of Artificial Sequence: Synthetic oligonucleotide
  X-linked inhibitor of apoptosis (XIAP) siRNA
aatctgatgctgtgagttctgat

SEQ ID NO: 11140 - DNA, 23 bp, Artificial Sequence
  Description of Artificial Sequence: Synthetic oligonucleotide
  X-linked inhibitor of apoptosis (XIAP) siRNA
atctgatgctgtgagttctgata

SEQ ID NO: 11141 - DNA, 23 bp, Artificial Sequence
  Description of Artificial Sequence: Synthetic oligonucleotide
  X-linked inhibitor of apoptosis (XIAP) siRNA
tctgatgctgtgagttctgatag

SEQ ID NO: 11142 - DNA, 23 bp, Artificial Sequence
  Description of Artificial Sequence: Synthetic oligonucleotide
  X-linked inhibitor of apoptosis (XIAP) siRNA
ctgatgctgtgagttctgatagg

SEQ ID NO: 11143 - DNA, 23 bp, Artificial Sequence
  Description of Artificial Sequence: Synthetic oligonucleotide
  X-linked inhibitor of apoptosis (XIAP) siRNA
tgatgctgtgagttctgatagga

SEQ ID NO: 11144 - DNA, 23 bp, Artificial Sequence
  Description of Artificial Sequence: Synthetic oligonucleotide
  X-linked inhibitor of apoptosis (XIAP) siRNA
gatgctgtgagttctgataggaa

SEQ ID NO: 11145 - DNA, 23 bp, Artificial Sequence
  Description of Artificial Sequence: Synthetic oligonucleotide
  X-linked inhibitor of apoptosis (XIAP) siRNA
atgctgtgagttctgataggaat

SEQ ID NO: 11146 - DNA, 23 bp, Artificial Sequence
  Description of Artificial Sequence: Synthetic oligonucleotide
  X-linked inhibitor of apoptosis (XIAP) siRNA
tgctgtgagttctgataggaatt

SEQ ID NO: 11147 - DNA, 23 bp, Artificial Sequence
  Description of Artificial Sequence: Synthetic oligonucleotide
  X-linked inhibitor of apoptosis (XIAP) siRNA
gctgtgagttctgataggaattt

SEQ ID NO: 11148 - DNA, 23 bp, Artificial Sequence
  Description of Artificial Sequence: Synthetic oligonucleotide
  X-linked inhibitor of apoptosis (XIAP) siRNA
ctgtgagttctgataggaatttc

SEQ ID NO: 11149 - DNA, 23 bp, Artificial Sequence
  Description of Artificial Sequence: Synthetic oligonucleotide
  X-linked inhibitor of apoptosis (XIAP) siRNA
tgtgagttctgataggaatttcc

SEQ ID NO: 11150 - DNA, 23 bp, Artificial Sequence
  Description of Artificial Sequence: Synthetic oligonucleotide
  X-linked inhibitor of apoptosis (XIAP) siRNA
gtgagttctgataggaatttccc

SEQ ID NO: 11151 - DNA, 23 bp, Artificial Sequence
  Description of Artificial Sequence: Synthetic oligonucleotide
  X-linked inhibitor of apoptosis (XIAP) siRNA
tgagttctgataggaatttccca

SEQ ID NO: 11152 - DNA, 23 bp, Artificial Sequence
  Description of Artificial Sequence: Synthetic oligonucleotide
  X-linked inhibitor of apoptosis (XIAP) siRNA
gagttctgataggaatttcccaa

SEQ ID NO: 11153 - DNA, 23 bp, Artificial Sequence
  Description of Artificial Sequence: Synthetic oligonucleotide
  X-linked inhibitor of apoptosis (XIAP) siRNA
agttctgataggaatttcccaaa

SEQ ID NO: 11154 - DNA, 23 bp, Artificial Sequence
  Description of Artificial Sequence: Synthetic oligonucleotide
  X-linked inhibitor of apoptosis (XIAP) siRNA
gttctgataggaatttcccaaat

SEQ ID NO: 11155 - DNA, 23 bp, Artificial Sequence
  Description of Artificial Sequence: Synthetic oligonucleotide
  X-linked inhibitor of apoptosis (XIAP) siRNA
ttctgataggaatttcccaaatt

SEQ ID NO: 11156 - DNA, 23 bp, Artificial Sequence
  Description of Artificial Sequence: Synthetic oligonucleotide
  X-linked inhibitor of apoptosis (XIAP) siRNA
tctgataggaatttcccaaattc

SEQ ID NO: 11157 - DNA, 23 bp, Artificial Sequence
  Description of Artificial Sequence: Synthetic oligonucleotide
  X-linked inhibitor of apoptosis (XIAP) siRNA
ctgataggaatttcccaaattca

SEQ ID NO: 11158 - DNA, 23 bp, Artificial Sequence
  Description of Artificial Sequence: Synthetic oligonucleotide
  X-linked inhibitor of apoptosis (XIAP) siRNA
tgataggaatttcccaaattcaa

SEQ ID NO: 11159 - DNA, 23 bp, Artificial Sequence
  Description of Artificial Sequence: Synthetic oligonucleotide
  X-linked inhibitor of apoptosis (XIAP) siRNA
gataggaatttcccaaattcaac

SEQ ID NO: 11160 - DNA, 23 bp, Artificial Sequence
  Description of Artificial Sequence: Synthetic oligonucleotide
  X-linked inhibitor of apoptosis (XIAP) siRNA
ataggaatttcccaaattcaaca

SEQ ID NO: 11161 - DNA, 23 bp, Artificial Sequence
  Description of Artificial Sequence: Synthetic oligonucleotide
  X-linked inhibitor of apoptosis (XIAP) siRNA
taggaatttcccaaattcaacaa

SEQ ID NO: 11162 - DNA, 23 bp, Artificial Sequence
  Description of Artificial Sequence: Synthetic oligonucleotide
  X-linked inhibitor of apoptosis (XIAP) siRNA
aggaatttcccaaattcaacaaa

SEQ ID NO: 11163 - DNA, 23 bp, Artificial Sequence
  Description of Artificial Sequence: Synthetic oligonucleotide
  X-linked inhibitor of apoptosis (XIAP) siRNA
ggaatttcccaaattcaacaaat

SEQ ID NO: 11164 - DNA, 23 bp, Artificial Sequence
  Description of Artificial Sequence: Synthetic oligonucleotide
  X-linked inhibitor of apoptosis (XIAP) siRNA
gaatttcccaaattcaacaaatc

SEQ ID NO: 11165 - DNA, 23 bp, Artificial Sequence
  Description of Artificial Sequence: Synthetic oligonucleotide
  X-linked inhibitor of apoptosis (XIAP) siRNA
aatttcccaaattcaacaaatct

SEQ ID NO: 11166 - DNA, 23 bp, Artificial Sequence
  Description of Artificial Sequence: Synthetic oligonucleotide
  X-linked inhibitor of apoptosis (XIAP) siRNA
atttcccaaattcaacaaatctt

SEQ ID NO: 11167 - DNA, 23 bp, Artificial Sequence
  Description of Artificial Sequence: Synthetic oligonucleotide
  X-linked inhibitor of apoptosis (XIAP) siRNA
tttcccaaattcaacaaatcttc

SEQ ID NO: 11168 - DNA, 23 bp, Artificial Sequence
  Description of Artificial Sequence: Synthetic oligonucleotide
  X-linked inhibitor of apoptosis (XIAP) siRNA
ttcccaaattcaacaaatcttcc

SEQ ID NO: 11169 - DNA, 23 bp, Artificial Sequence
  Description of Artificial Sequence: Synthetic oligonucleotide
  X-linked inhibitor of apoptosis (XIAP) siRNA
tcccaaattcaacaaatcttcca

SEQ ID NO: 11170 - DNA, 23 bp, Artificial Sequence
  Description of Artificial Sequence: Synthetic oligonucleotide
  X-linked inhibitor of apoptosis (XIAP) siRNA
cccaaattcaacaaatcttccaa

SEQ ID NO: 11171 - DNA, 23 bp, Artificial Sequence
  Description of Artificial Sequence: Synthetic oligonucleotide
  X-linked inhibitor of apoptosis (XIAP) siRNA
ccaaattcaacaaatcttccaag

SEQ ID NO: 11172 - DNA, 23 bp, Artificial Sequence
  Description of Artificial Sequence: Synthetic oligonucleotide
  X-linked inhibitor of apoptosis (XIAP) siRNA
caaattcaacaaatcttccaaga

SEQ ID NO: 11173 - DNA, 23 bp, Artificial Sequence
  Description of Artificial Sequence: Synthetic oligonucleotide
  X-linked inhibitor of apoptosis (XIAP) siRNA
aaattcaacaaatcttccaagaa

SEQ ID NO: 11174 - DNA, 23 bp, Artificial Sequence
  Description of Artificial Sequence: Synthetic oligonucleotide
  X-linked inhibitor of apoptosis (XIAP) siRNA
aattcaacaaatcttccaagaaa

SEQ ID NO: 11175 - DNA, 23 bp, Artificial Sequence
  Description of Artificial Sequence: Synthetic oligonucleotide
  X-linked inhibitor of apoptosis (XIAP) siRNA
attcaacaaatcttccaagaaat

SEQ ID NO: 11176 - DNA, 23 bp, Artificial Sequence
  Description of Artificial Sequence: Synthetic oligonucleotide
  X-linked inhibitor of apoptosis (XIAP) siRNA
ttcaacaaatcttccaagaaatc

SEQ ID NO: 11177 - DNA, 23 bp, Artificial Sequence
  Description of Artificial Sequence: Synthetic oligonucleotide
  X-linked inhibitor of apoptosis (XIAP) siRNA
tcaacaaatcttccaagaaatcc

SEQ ID NO: 11178 - DNA, 23 bp, Artificial Sequence
  Description of Artificial Sequence: Synthetic oligonucleotide
  X-linked inhibitor of apoptosis (XIAP) siRNA
caacaaatcttccaagaaatcca

SEQ ID NO: 11179 - DNA, 23 bp, Artificial Sequence
  Description of Artificial Sequence: Synthetic oligonucleotide
  X-linked inhibitor of apoptosis (XIAP) siRNA
aacaaatcttccaagaaatccat

SEQ ID NO: 11180 - DNA, 23 bp, Artificial Sequence
  Description of Artificial Sequence: Synthetic oligonucleotide
  X-linked inhibitor of apoptosis (XIAP) siRNA
acaaatcttccaagaaatccatc

SEQ ID NO: 11181 - DNA, 23 bp, Artificial Sequence
  Description of Artificial Sequence: Synthetic oligonucleotide
  X-linked inhibitor of apoptosis (XIAP) siRNA
caaatcttccaagaaatccatcc

SEQ ID NO: 11182 - DNA, 23 bp, Artificial Sequence
  Description of Artificial Sequence: Synthetic oligonucleotide
  X-linked inhibitor of apoptosis (XIAP) siRNA
aaatcttccaagaaatccatcca

SEQ ID NO: 11183 - DNA, 23 bp, Artificial Sequence
  Description of Artificial Sequence: Synthetic oligonucleotide
  X-linked inhibitor of apoptosis (XIAP) siRNA
aatcttccaagaaatccatccat

SEQ ID NO: 11184 - DNA, 23 bp, Artificial Sequence
  Description of Artificial Sequence: Synthetic oligonucleotide
  X-linked inhibitor of apoptosis (XIAP) siRNA
atcttccaagaaatccatccatg

SEQ ID NO: 11185 - DNA, 23 bp, Artificial Sequence
  Description of Artificial Sequence: Synthetic oligonucleotide
  X-linked inhibitor of apoptosis (XIAP) siRNA
tcttccaagaaatccatccatgg

SEQ ID NO: 11186 - DNA, 23 bp, Artificial Sequence
  Description of Artificial Sequence: Synthetic oligonucleotide
  X-linked inhibitor of apoptosis (XIAP) siRNA
cttccaagaaatccatccatggc

SEQ ID NO: 11187 - DNA, 23 bp, Artificial Sequence
  Description of Artificial Sequence: Synthetic oligonucleotide
  X-linked inhibitor of apoptosis (XIAP) siRNA
ttccaagaaatccatccatggca

SEQ ID NO: 11188 - DNA, 23 bp, Artificial Sequence
  Description of Artificial Sequence: Synthetic oligonucleotide
  X-linked inhibitor of apoptosis (XIAP) siRNA
tccaagaaatccatccatggcag

SEQ ID NO: 11189 - DNA, 23 bp, Artificial Sequence
  Description of Artificial Sequence: Synthetic oligonucleotide
  X-linked inhibitor of apoptosis (XIAP) siRNA
ccaagaaatccatccatggcaga

SEQ ID NO: 11190 - DNA, 23 bp, Artificial Sequence
  Description of Artificial Sequence: Synthetic oligonucleotide
  X-linked inhibitor of apoptosis (XIAP) siRNA
caagaaatccatccatggcagat

SEQ ID NO: 11191 - DNA, 23 bp, Artificial Sequence
  Description of Artificial Sequence: Synthetic oligonucleotide
  X-linked inhibitor of apoptosis (XIAP) siRNA
aagaaatccatccatggcagatt

SEQ ID NO: 11192 - DNA, 23 bp, Artificial Sequence
  Description of Artificial Sequence: Synthetic oligonucleotide
  X-linked inhibitor of apoptosis (XIAP) siRNA
agaaatccatccatggcagatta

SEQ ID NO: 11193 - DNA, 23 bp, Artificial Sequence
  Description of Artificial Sequence: Synthetic oligonucleotide
  X-linked inhibitor of apoptosis (XIAP) siRNA
gaaatccatccatggcagattat

SEQ ID NO: 11194 - DNA, 23 bp, Artificial Sequence
  Description of Artificial Sequence: Synthetic oligonucleotide
  X-linked inhibitor of apoptosis (XIAP) siRNA
aaatccatccatggcagattatg

SEQ ID NO: 11195 - DNA, 23 bp, Artificial Sequence
  Description of Artificial Sequence: Synthetic oligonucleotide
  X-linked inhibitor of apoptosis (XIAP) siRNA
aatccatccatggcagattatga

SEQ ID NO: 11196 - DNA, 23 bp, Artificial Sequence
  Description of Artificial Sequence: Synthetic oligonucleotide
  X-linked inhibitor of apoptosis (XIAP) siRNA
atccatccatggcagattatgaa

SEQ ID NO: 11197 - DNA, 23 bp, Artificial Sequence
  Description of Artificial Sequence: Synthetic oligonucleotide
  X-linked inhibitor of apoptosis (XIAP) siRNA
tccatccatggcagattatgaag

SEQ ID NO: 11198 - DNA, 23 bp, Artificial Sequence
  Description of Artificial Sequence: Synthetic oligonucleotide
  X-linked inhibitor of apoptosis (XIAP) siRNA
ccatccatggcagattatgaagc

SEQ ID NO: 11199 - DNA, 23 bp, Artificial Sequence
  Description of Artificial Sequence: Synthetic oligonucleotide
  X-linked inhibitor of apoptosis (XIAP) siRNA
catccatggcagattatgaagca

SEQ ID NO: 11200 - DNA, 23 bp, Artificial Sequence
  Description of Artificial Sequence: Synthetic oligonucleotide
  X-linked inhibitor of apoptosis (XIAP) siRNA
atccatggcagattatgaagcac

SEQ ID NO: 11201 - DNA, 23 bp, Artificial Sequence
  Description of Artificial Sequence: Synthetic oligonucleotide
  X-linked inhibitor of apoptosis (XIAP) siRNA
tccatggcagattatgaagcacg

SEQ ID NO: 11202 - DNA, 23 bp, Artificial Sequence
  Description of Artificial Sequence: Synthetic oligonucleotide
  X-linked inhibitor of apoptosis (XIAP) siRNA
ccatggcagattatgaagcacgg

SEQ ID NO: 11203 - DNA, 23 bp, Artificial Sequence
  Description of Artificial Sequence: Synthetic oligonucleotide
  X-linked inhibitor of apoptosis (XIAP) siRNA
catggcagattatgaagcacgga

SEQ ID NO: 11204 - DNA, 23 bp, Artificial Sequence
  Description of Artificial Sequence: Synthetic oligonucleotide
  X-linked inhibitor of apoptosis (XIAP) siRNA
atggcagattatgaagcacggat

SEQ ID NO: 11205 - DNA, 23 bp, Artificial Sequence
  Description of Artificial Sequence: Synthetic oligonucleotide
  X-linked inhibitor of apoptosis (XIAP) siRNA
tggcagattatgaagcacggatc

SEQ ID NO: 11206 - DNA, 23 bp, Artificial Sequence
  Description of Artificial Sequence: Synthetic oligonucleotide
  X-linked inhibitor of apoptosis (XIAP) siRNA
ggcagattatgaagcacggatct

SEQ ID NO: 11207 - DNA, 23 bp, Artificial Sequence
  Description of Artificial Sequence: Synthetic oligonucleotide
  X-linked inhibitor of apoptosis (XIAP) siRNA
gcagattatgaagcacggatctt

SEQ ID NO: 11208 - DNA, 23 bp, Artificial Sequence
  Description of Artificial Sequence: Synthetic oligonucleotide
  X-linked inhibitor of apoptosis (XIAP) siRNA
cagattatgaagcacggatcttt

SEQ ID NO: 11209 - DNA, 23 bp, Artificial Sequence
  Description of Artificial Sequence: Synthetic oligonucleotide
  X-linked inhibitor of apoptosis (XIAP) siRNA
agattatgaagcacggatcttta

SEQ ID NO: 11210 - DNA, 23 bp, Artificial Sequence
  Description of Artificial Sequence: Synthetic oligonucleotide
  X-linked inhibitor of apoptosis (XIAP) siRNA
gattatgaagcacggatctttac

SEQ ID NO: 11211 - DNA, 23 bp, Artificial Sequence
  Description of Artificial Sequence: Synthetic oligonucleotide
  X-linked inhibitor of apoptosis (XIAP) siRNA
attatgaagcacggatctttact

SEQ ID NO: 11212 - DNA, 23 bp, Artificial Sequence
  Description of Artificial Sequence: Synthetic oligonucleotide
  X-linked inhibitor of apoptosis (XIAP) siRNA
ttatgaagcacggatctttactt

SEQ ID NO: 11213 - DNA, 23 bp, Artificial Sequence
  Description of Artificial Sequence: Synthetic oligonucleotide
  X-linked inhibitor of apoptosis (XIAP) siRNA
tatgaagcacggatctttacttt

SEQ ID NO: 11214 - DNA, 23 bp, Artificial Sequence
  Description of Artificial Sequence: Synthetic oligonucleotide
  X-linked inhibitor of apoptosis (XIAP) siRNA
atgaagcacggatctttactttt

SEQ ID NO: 11215 - DNA, 23 bp, Artificial Sequence
  Description of Artificial Sequence: Synthetic oligonucleotide
  X-linked inhibitor of apoptosis (XIAP) siRNA
tgaagcacggatctttacttttg

SEQ ID NO: 11216 - DNA, 23 bp, Artificial Sequence
  Description of Artificial Sequence: Synthetic oligonucleotide
  X-linked inhibitor of apoptosis (XIAP) siRNA
gaagcacggatctttacttttgg

SEQ ID NO: 11217 - DNA, 23 bp, Artificial Sequence
  Description of Artificial Sequence: Synthetic oligonucleotide
  X-linked inhibitor of apoptosis (XIAP) siRNA
aagcacggatctttacttttggg

SEQ ID NO: 11218 - DNA, 23 bp, Artificial Sequence
  Description of Artificial Sequence: Synthetic oligonucleotide
  X-linked inhibitor of apoptosis (XIAP) siRNA
agcacggatctttacttttggga

SEQ ID NO: 11219 - DNA, 23 bp, Artificial Sequence
  Description of Artificial Sequence: Synthetic oligonucleotide
  X-linked inhibitor of apoptosis (XIAP) siRNA
gcacggatctttacttttgggac

SEQ ID NO: 11220 - DNA, 23 bp, Artificial Sequence
  Description of Artificial Sequence: Synthetic oligonucleotide
  X-linked inhibitor of apoptosis (XIAP) siRNA
cacggatctttacttttgggaca

SEQ ID NO: 11221 - DNA, 23 bp, Artificial Sequence
  Description of Artificial Sequence: Synthetic oligonucleotide
  X-linked inhibitor of apoptosis (XIAP) siRNA
acggatctttacttttgggacat

SEQ ID NO: 11222 - DNA, 23 bp, Artificial Sequence
  Description of Artificial Sequence: Synthetic oligonucleotide
  X-linked inhibitor of apoptosis (XIAP) siRNA
cggatctttacttttgggacatg

SEQ ID NO: 11223 - DNA, 23 bp, Artificial Sequence
  Description of Artificial Sequence: Synthetic oligonucleotide
  X-linked inhibitor of apoptosis (XIAP) siRNA
ggatctttacttttgggacatgg

SEQ ID NO: 11224 - DNA, 23 bp, Artificial Sequence
  Description of Artificial Sequence: Synthetic oligonucleotide
  X-linked inhibitor of apoptosis (XIAP) siRNA
gatctttacttttgggacatgga

SEQ ID NO: 11225 - DNA, 23 bp, Artificial Sequence
  Description of Artificial Sequence: Synthetic oligonucleotide
  X-linked inhibitor of apoptosis (XIAP) siRNA
atctttacttttgggacatggat

SEQ ID NO: 11226 - DNA, 23 bp, Artificial Sequence
  Description of Artificial Sequence: Synthetic oligonucleotide
  X-linked inhibitor of apoptosis (XIAP) siRNA
tctttacttttgggacatggata

SEQ ID NO: 11227 - DNA, 23 bp, Artificial Sequence
  Description of Artificial Sequence: Synthetic oligonucleotide
  X-linked inhibitor of apoptosis (XIAP) siRNA
ctttacttttgggacatggatat

SEQ ID NO: 11228 - DNA, 23 bp, Artificial Sequence
  Description of Artificial Sequence: Synthetic oligonucleotide
  X-linked inhibitor of apoptosis (XIAP) siRNA
tttacttttgggacatggatata

SEQ ID NO: 11229 - DNA, 23 bp, Artificial Sequence
  Description of Artificial Sequence: Synthetic oligonucleotide
  X-linked inhibitor of apoptosis (XIAP) siRNA
ttacttttgggacatggatatac

SEQ ID NO: 11230 - DNA, 23 bp, Artificial Sequence
  Description of Artificial Sequence: Synthetic oligonucleotide
  X-linked inhibitor of apoptosis (XIAP) siRNA
tacttttgggacatggatatact

SEQ ID NO: 11231 - DNA, 23 bp, Artificial Sequence
  Description of Artificial Sequence: Synthetic oligonucleotide
  X-linked inhibitor of apoptosis (XIAP) siRNA
acttttgggacatggatatactc

SEQ ID NO: 11232 - DNA, 23 bp, Artificial Sequence
  Description of Artificial Sequence: Synthetic oligonucleotide
  X-linked inhibitor of apoptosis (XIAP) siRNA
cttttgggacatggatatactca

SEQ ID NO: 11233 - DNA, 23 bp, Artificial Sequence
  Description of Artificial Sequence: Synthetic oligonucleotide
  X-linked inhibitor of apoptosis (XIAP) siRNA
ttttgggacatggatatactcag

SEQ ID NO: 11234 - DNA, 23 bp, Artificial Sequence
  Description of Artificial Sequence: Synthetic oligonucleotide
  X-linked inhibitor of apoptosis (XIAP) siRNA
tttgggacatggatatactcagt

SEQ ID NO: 11235 - DNA, 23 bp, Artificial Sequence
  Description of Artificial Sequence: Synthetic oligonucleotide
  X-linked inhibitor of apoptosis (XIAP) siRNA
ttgggacatggatatactcagtt

SEQ ID NO: 11236 - DNA, 23 bp, Artificial Sequence
  Description of Artificial Sequence: Synthetic oligonucleotide
  X-linked inhibitor of apoptosis (XIAP) siRNA
tgggacatggatatactcagtta

SEQ ID NO: 11237 - DNA, 23 bp, Artificial Sequence
  Description of Artificial Sequence: Synthetic oligonucleotide
  X-linked inhibitor of apoptosis (XIAP) siRNA
gggacatggatatactcagttaa

SEQ ID NO: 11238 - DNA, 23 bp, Artificial Sequence
  Description of Artificial Sequence: Synthetic oligonucleotide
  X-linked inhibitor of apoptosis (XIAP) siRNA
ggacatggatatactcagttaac

SEQ ID NO: 11239 - DNA, 23 bp, Artificial Sequence
  Description of Artificial Sequence: Synthetic oligonucleotide
  X-linked inhibitor of apoptosis (XIAP) siRNA
gacatggatatactcagttaaca

SEQ ID NO: 11240 - DNA, 23 bp, Artificial Sequence
  Description of Artificial Sequence: Synthetic oligonucleotide
  X-linked inhibitor of apoptosis (XIAP) siRNA
acatggatatactcagttaacaa

SEQ ID NO: 11241 - DNA, 23 bp, Artificial Sequence
  Description of Artificial Sequence: Synthetic oligonucleotide
  X-linked inhibitor of apoptosis (XIAP) siRNA
catggatatactcagttaacaag

SEQ ID NO: 11242 - DNA, 23 bp, Artificial Sequence
  Description of Artificial Sequence: Synthetic oligonucleotide
  X-linked inhibitor of apoptosis (XIAP) siRNA
atggatatactcagttaacaagg

SEQ ID NO: 11243 - DNA, 23 bp, Artificial Sequence
  Description of Artificial Sequence: Synthetic oligonucleotide
  X-linked inhibitor of apoptosis (XIAP) siRNA
tggatatactcagttaacaagga

SEQ ID NO: 11244 - DNA, 23 bp, Artificial Sequence
  Description of Artificial Sequence: Synthetic oligonucleotide
  X-linked inhibitor of apoptosis (XIAP) siRNA
ggatatactcagttaacaaggag

SEQ ID NO: 11245 - DNA, 23 bp, Artificial Sequence
  Description of Artificial Sequence: Synthetic oligonucleotide
  X-linked inhibitor of apoptosis (XIAP) siRNA
gatatactcagttaacaaggagc

SEQ ID NO: 11246 - DNA, 23 bp, Artificial Sequence
  Description of Artificial Sequence: Synthetic oligonucleotide
  X-linked inhibitor of apoptosis (XIAP) siRNA
atatactcagttaacaaggagca

SEQ ID NO: 11247 - DNA, 23 bp, Artificial Sequence
  Description of Artificial Sequence: Synthetic oligonucleotide
  X-linked inhibitor of apoptosis (XIAP) siRNA
tatactcagttaacaaggagcag

SEQ ID NO: 11248 - DNA, 23 bp, Artificial Sequence
  Description of Artificial Sequence: Synthetic oligonucleotide
  X-linked inhibitor of apoptosis (XIAP) siRNA
atactcagttaacaaggagcagc

SEQ ID NO: 11249 - DNA, 23 bp, Artificial Sequence
  Description of Artificial Sequence: Synthetic oligonucleotide
  X-linked inhibitor of apoptosis (XIAP) siRNA
tactcagttaacaaggagcagct

SEQ ID NO: 11250 - DNA, 23 bp, Artificial Sequence
  Description of Artificial Sequence: Synthetic oligonucleotide
  X-linked inhibitor of apoptosis (XIAP) siRNA
actcagttaacaaggagcagctt

SEQ ID NO: 11251 - DNA, 23 bp, Artificial Sequence
  Description of Artificial Sequence: Synthetic oligonucleotide
  X-linked inhibitor of apoptosis (XIAP) siRNA
ctcagttaacaaggagcagcttg

SEQ ID NO: 11252 - DNA, 23 bp, Artificial Sequence
  Description of Artificial Sequence: Synthetic oligonucleotide
  X-linked inhibitor of apoptosis (XIAP) siRNA
tcagttaacaaggagcagcttgc

SEQ ID NO: 11253 - DNA, 23 bp, Artificial Sequence
  Description of Artificial Sequence: Synthetic oligonucleotide
  X-linked inhibitor of apoptosis (XIAP) siRNA
cagttaacaaggagcagcttgca

SEQ ID NO: 11254 - DNA, 23 bp, Artificial Sequence
  Description of Artificial Sequence: Synthetic oligonucleotide
  X-linked inhibitor of apoptosis (XIAP) siRNA
agttaacaaggagcagcttgcaa

SEQ ID NO: 11255 - DNA, 23 bp, Artificial Sequence
  Description of Artificial Sequence: Synthetic oligonucleotide
  X-linked inhibitor of apoptosis (XIAP) siRNA
gttaacaaggagcagcttgcaag

SEQ ID NO: 11256 - DNA, 23 bp, Artificial Sequence
  Description of Artificial Sequence: Synthetic oligonucleotide
  X-linked inhibitor of apoptosis (XIAP) siRNA
ttaacaaggagcagcttgcaaga

SEQ ID NO: 11257 - DNA, 23 bp, Artificial Sequence
  Description of Artificial Sequence: Synthetic oligonucleotide
  X-linked inhibitor of apoptosis (XIAP) siRNA
taacaaggagcagcttgcaagag

SEQ ID NO: 11258 - DNA, 23 bp, Artificial Sequence
  Description of Artificial Sequence: Synthetic oligonucleotide
  X-linked inhibitor of apoptosis (XIAP) siRNA
aacaaggagcagcttgcaagagc

SEQ ID NO: 11259 - DNA, 23 bp, Artificial Sequence
  Description of Artificial Sequence: Synthetic oligonucleotide
  X-linked inhibitor of apoptosis (XIAP) siRNA
acaaggagcagcttgcaagagct

SEQ ID NO: 11260 - DNA, 23 bp, Artificial Sequence
  Description of Artificial Sequence: Synthetic oligonucleotide
  X-linked inhibitor of apoptosis (XIAP) siRNA
caaggagcagcttgcaagagctg

SEQ ID NO: 11261 - DNA, 23 bp, Artificial Sequence
  Description of Artificial Sequence: Synthetic oligonucleotide
  X-linked inhibitor of apoptosis (XIAP) siRNA
aaggagcagcttgcaagagctgg

SEQ ID NO: 11262 - DNA, 23 bp, Artificial Sequence
  Description of Artificial Sequence: Synthetic oligonucleotide
  X-linked inhibitor of apoptosis (XIAP) siRNA
aggagcagcttgcaagagctgga

SEQ ID NO: 11263 - DNA, 23 bp, Artificial Sequence
  Description of Artificial Sequence: Synthetic oligonucleotide
  X-linked inhibitor of apoptosis (XIAP) siRNA
ggagcagcttgcaagagctggat

SEQ ID NO: 11264 - DNA, 23 bp, Artificial Sequence
  Description of Artificial Sequence: Synthetic oligonucleotide
  X-linked inhibitor of apoptosis (XIAP) siRNA
gagcagcttgcaagagctggatt

SEQ ID NO: 11265 - DNA, 23 bp, Artificial Sequence
  Description of Artificial Sequence: Synthetic oligonucleotide
  X-linked inhibitor of apoptosis (XIAP) siRNA
agcagcttgcaagagctggattt

SEQ ID NO: 11266 - DNA, 23 bp, Artificial Sequence
  Description of Artificial Sequence: Synthetic oligonucleotide
  X-linked inhibitor of apoptosis (XIAP) siRNA
gcagcttgcaagagctggatttt

SEQ ID NO: 11267 - DNA, 23 bp, Artificial Sequence
  Description of Artificial Sequence: Synthetic oligonucleotide
  X-linked inhibitor of apoptosis (XIAP) siRNA
cagcttgcaagagctggatttta

SEQ ID NO: 11268 - DNA, 23 bp, Artificial Sequence
  Description of Artificial Sequence: Synthetic oligonucleotide
  X-linked inhibitor of apoptosis (XIAP) siRNA
agcttgcaagagctggattttat

SEQ ID NO: 11269 - DNA, 23 bp, Artificial Sequence
  Description of Artificial Sequence: Synthetic oligonucleotide
  X-linked inhibitor of apoptosis (XIAP) siRNA
gcttgcaagagctggattttatg

SEQ ID NO: 11270 - DNA, 23 bp, Artificial Sequence
  Description of Artificial Sequence: Synthetic oligonucleotide
  X-linked inhibitor of apoptosis (XIAP) siRNA
cttgcaagagctggattttatgc

SEQ ID NO: 11271 - DNA, 23 bp, Artificial Sequence
  Description of Artificial Sequence: Synthetic oligonucleotide
  X-linked inhibitor of apoptosis (XIAP) siRNA
ttgcaagagctggattttatgct

SEQ ID NO: 11272 - DNA, 23 bp, Artificial Sequence
  Description of Artificial Sequence: Synthetic oligonucleotide
  X-linked inhibitor of apoptosis (XIAP) siRNA
tgcaagagctggattttatgctt

SEQ ID NO: 11273 - DNA, 23 bp, Artificial Sequence
  Description of Artificial Sequence: Synthetic oligonucleotide
  X-linked inhibitor of apoptosis (XIAP) siRNA
gcaagagctggattttatgcttt

SEQ ID NO: 11274 - DNA, 23 bp, Artificial Sequence
  Description of Artificial Sequence: Synthetic oligonucleotide
  X-linked inhibitor of apoptosis (XIAP) siRNA
caagagctggattttatgcttta

SEQ ID NO: 11275 - DNA, 23 bp, Artificial Sequence
  Description of Artificial Sequence: Synthetic oligonucleotide
  X-linked inhibitor of apoptosis (XIAP) siRNA
aagagctggattttatgctttag

SEQ ID NO: 11276 - DNA, 23 bp, Artificial Sequence
  Description of Artificial Sequence: Synthetic oligonucleotide
  X-linked inhibitor of apoptosis (XIAP) siRNA
agagctggattttatgctttagg

SEQ ID NO: 11277 - DNA, 23 bp, Artificial Sequence
  Description of Artificial Sequence: Synthetic oligonucleotide
  X-linked inhibitor of apoptosis (XIAP) siRNA
gagctggattttatgctttaggt

SEQ ID NO: 11278 - DNA, 23 bp, Artificial Sequence
  Description of Artificial Sequence: Synthetic oligonucleotide
  X-linked inhibitor of apoptosis (XIAP) siRNA
agctggattttatgctttaggtg

SEQ ID NO: 11279 - DNA, 23 bp, Artificial Sequence
  Description of Artificial Sequence: Synthetic oligonucleotide
  X-linked inhibitor of apoptosis (XIAP) siRNA
gctggattttatgctttaggtga

SEQ ID NO: 11280 - DNA, 23 bp, Artificial Sequence
  Description of Artificial Sequence: Synthetic oligonucleotide
  X-linked inhibitor of apoptosis (XIAP) siRNA
ctggattttatgctttaggtgaa

SEQ ID NO: 11281 - DNA, 23 bp, Artificial Sequence
  Description of Artificial Sequence: Synthetic oligonucleotide
  X-linked inhibitor of apoptosis (XIAP) siRNA
tggattttatgctttaggtgaag

SEQ ID NO: 11282 - DNA, 23 bp, Artificial Sequence
  Description of Artificial Sequence: Synthetic oligonucleotide
  X-linked inhibitor of apoptosis (XIAP) siRNA
ggattttatgctttaggtgaagg

SEQ ID NO: 11283 - DNA, 23 bp, Artificial Sequence
  Description of Artificial Sequence: Synthetic oligonucleotide
  X-linked inhibitor of apoptosis (XIAP) siRNA
gattttatgctttaggtgaaggt

SEQ ID NO: 11284 - DNA, 23 bp, Artificial Sequence
  Description of Artificial Sequence: Synthetic oligonucleotide
  X-linked inhibitor of apoptosis (XIAP) siRNA
attttatgctttaggtgaaggtg

SEQ ID NO: 11285 - DNA, 23 bp, Artificial Sequence
  Description of Artificial Sequence: Synthetic oligonucleotide
  X-linked inhibitor of apoptosis (XIAP) siRNA
ttttatgctttaggtgaaggtga

SEQ ID NO: 11286 - DNA, 23 bp, Artificial Sequence
  Description of Artificial Sequence: Synthetic oligonucleotide
  X-linked inhibitor of apoptosis (XIAP) siRNA
tttatgctttaggtgaaggtgat

SEQ ID NO: 11287 - DNA, 23 bp, Artificial Sequence
  Description of Artificial Sequence: Synthetic oligonucleotide
  X-linked inhibitor of apoptosis (XIAP) siRNA
ttatgctttaggtgaaggtgata

SEQ ID NO: 11288 - DNA, 23 bp, Artificial Sequence
  Description of Artificial Sequence: Synthetic oligonucleotide
  X-linked inhibitor of apoptosis (XIAP) siRNA
tatgctttaggtgaaggtgataa

SEQ ID NO: 11289 - DNA, 23 bp, Artificial Sequence
  Description of Artificial Sequence: Synthetic oligonucleotide
  X-linked inhibitor of apoptosis (XIAP) siRNA
atgctttaggtgaaggtgataaa

SEQ ID NO: 11290 - DNA, 23 bp, Artificial Sequence
  Description of Artificial Sequence: Synthetic oligonucleotide
  X-linked inhibitor of apoptosis (XIAP) siRNA
tgctttaggtgaaggtgataaag

SEQ ID NO: 11291 - DNA, 23 bp, Artificial Sequence
  Description of Artificial Sequence: Synthetic oligonucleotide
  X-linked inhibitor of apoptosis (XIAP) siRNA
gctttaggtgaaggtgataaagt

SEQ ID NO: 11292 - DNA, 23 bp, Artificial Sequence
  Description of Artificial Sequence: Synthetic oligonucleotide
  X-linked inhibitor of apoptosis (XIAP) siRNA
ctttaggtgaaggtgataaagta

SEQ ID NO: 11293 - DNA, 23 bp, Artificial Sequence
  Description of Artificial Sequence: Synthetic oligonucleotide
  X-linked inhibitor of apoptosis (XIAP) siRNA
tttaggtgaaggtgataaagtaa

SEQ ID NO: 11294 - DNA, 23 bp, Artificial Sequence
  Description of Artificial Sequence: Synthetic oligonucleotide
  X-linked inhibitor of apoptosis (XIAP) siRNA
ttaggtgaaggtgataaagtaaa

SEQ ID NO: 11295 - DNA, 23 bp, Artificial Sequence
  Description of Artificial Sequence: Synthetic oligonucleotide
  X-linked inhibitor of apoptosis (XIAP) siRNA
taggtgaaggtgataaagtaaag

SEQ ID NO: 11296 - DNA, 23 bp, Artificial Sequence
  Description of Artificial Sequence: Synthetic oligonucleotide
  X-linked inhibitor of apoptosis (XIAP) siRNA
aggtgaaggtgataaagtaaagt

SEQ ID NO: 11297 - DNA, 23 bp, Artificial Sequence
  Description of Artificial Sequence: Synthetic oligonucleotide
  X-linked inhibitor of apoptosis (XIAP) siRNA
ggtgaaggtgataaagtaaagtg

SEQ ID NO: 11298 - DNA, 23 bp, Artificial Sequence
  Description of Artificial Sequence: Synthetic oligonucleotide
  X-linked inhibitor of apoptosis (XIAP) siRNA
gtgaaggtgataaagtaaagtgc

SEQ ID NO: 11299 - DNA, 23 bp, Artificial Sequence
  Description of Artificial Sequence: Synthetic oligonucleotide
  X-linked inhibitor of apoptosis (XIAP) siRNA
tgaaggtgataaagtaaagtgct

SEQ ID NO: 11300 - DNA, 23 bp, Artificial Sequence
  Description of Artificial Sequence: Synthetic oligonucleotide
  X-linked inhibitor of apoptosis (XIAP) siRNA
gaaggtgataaagtaaagtgctt

SEQ ID NO: 11301 - DNA, 23 bp, Artificial Sequence
  Description of Artificial Sequence: Synthetic oligonucleotide
  X-linked inhibitor of apoptosis (XIAP) siRNA
aaggtgataaagtaaagtgcttt

SEQ ID NO: 11302 - DNA, 23 bp, Artificial Sequence
  Description of Artificial Sequence: Synthetic oligonucleotide
  X-linked inhibitor of apoptosis (XIAP) siRNA
aggtgataaagtaaagtgctttc

SEQ ID NO: 11303 - DNA, 23 bp, Artificial Sequence
  Description of Artificial Sequence: Synthetic oligonucleotide
  X-linked inhibitor of apoptosis (XIAP) siRNA
ggtgataaagtaaagtgctttca

SEQ ID NO: 11304 - DNA, 23 bp, Artificial Sequence
  Description of Artificial Sequence: Synthetic oligonucleotide
  X-linked inhibitor of apoptosis (XIAP) siRNA
gtgataaagtaaagtgctttcac

SEQ ID NO: 11305 - DNA, 23 bp, Artificial Sequence
  Description of Artificial Sequence: Synthetic oligonucleotide
  X-linked inhibitor of apoptosis (XIAP) siRNA
tgataaagtaaagtgctttcact

SEQ ID NO: 11306 - DNA, 23 bp, Artificial Sequence
  Description of Artificial Sequence: Synthetic oligonucleotide
  X-linked inhibitor of apoptosis (XIAP) siRNA
gataaagtaaagtgctttcactg

SEQ ID NO: 11307 - DNA, 23 bp, Artificial Sequence
  Description of Artificial Sequence: Synthetic oligonucleotide
  X-linked inhibitor of apoptosis (XIAP) siRNA
ataaagtaaagtgctttcactgt

SEQ ID NO: 11308 - DNA, 23 bp, Artificial Sequence
  Description of Artificial Sequence: Synthetic oligonucleotide
  X-linked inhibitor of apoptosis (XIAP) siRNA
taaagtaaagtgctttcactgtg

SEQ ID NO: 11309 - DNA, 23 bp, Artificial Sequence
  Description of Artificial Sequence: Synthetic oligonucleotide
  X-linked inhibitor of apoptosis (XIAP) siRNA
aaagtaaagtgctttcactgtgg

SEQ ID NO: 11310 - DNA, 23 bp, Artificial Sequence
  Description of Artificial Sequence: Synthetic oligonucleotide
  X-linked inhibitor of apoptosis (XIAP) siRNA
aagtaaagtgctttcactgtgga

SEQ ID NO: 11311 - DNA, 23 bp, Artificial Sequence
  Description of Artificial Sequence: Synthetic oligonucleotide
  X-linked inhibitor of apoptosis (XIAP) siRNA
agtaaagtgctttcactgtggag

SEQ ID NO: 11312 - DNA, 23 bp, Artificial Sequence
  Description of Artificial Sequence: Synthetic oligonucleotide
  X-linked inhibitor of apoptosis (XIAP) siRNA
gtaaagtgctttcactgtggagg

SEQ ID NO: 11313 - DNA, 23 bp, Artificial Sequence
  Description of Artificial Sequence: Synthetic oligonucleotide
  X-linked inhibitor of apoptosis (XIAP) siRNA
taaagtgctttcactgtggagga

SEQ ID NO: 11314 - DNA, 23 bp, Artificial Sequence
  Description of Artificial Sequence: Synthetic oligonucleotide
  X-linked inhibitor of apoptosis (XIAP) siRNA
aaagtgctttcactgtggaggag

SEQ ID NO: 11315 - DNA, 23 bp, Artificial Sequence
  Description of Artificial Sequence: Synthetic oligonucleotide
  X-linked inhibitor of apoptosis (XIAP) siRNA
aagtgctttcactgtggaggagg

SEQ ID NO: 11316 - DNA, 23 bp, Artificial Sequence
  Description of Artificial Sequence: Synthetic oligonucleotide
  X-linked inhibitor of apoptosis (XIAP) siRNA
agtgctttcactgtggaggaggg

SEQ ID NO: 11317 - DNA, 23 bp, Artificial Sequence
  Description of Artificial Sequence: Synthetic oligonucleotide
  X-linked inhibitor of apoptosis (XIAP) siRNA
gtgctttcactgtggaggagggc

SEQ ID NO: 11318 - DNA, 23 bp, Artificial Sequence
  Description of Artificial Sequence: Synthetic oligonucleotide
  X-linked inhibitor of apoptosis (XIAP) siRNA
tgctttcactgtggaggagggct

SEQ ID NO: 11319 - DNA, 23 bp, Artificial Sequence
  Description of Artificial Sequence: Synthetic oligonucleotide
  X-linked inhibitor of apoptosis (XIAP) siRNA
gctttcactgtggaggagggcta

SEQ ID NO: 11320 - DNA, 23 bp, Artificial Sequence
  Description of Artificial Sequence: Synthetic oligonucleotide
  X-linked inhibitor of apoptosis (XIAP) siRNA
ctttcactgtggaggagggctaa

SEQ ID NO: 11321 - DNA, 23 bp, Artificial Sequence
  Description of Artificial Sequence: Synthetic oligonucleotide
  X-linked inhibitor of apoptosis (XIAP) siRNA
tttcactgtggaggagggctaac

SEQ ID NO: 11322 - DNA, 23 bp, Artificial Sequence
  Description of Artificial Sequence: Synthetic oligonucleotide
  X-linked inhibitor of apoptosis (XIAP) siRNA
ttcactgtggaggagggctaact

SEQ ID NO: 11323 - DNA, 23 bp, Artificial Sequence
  Description of Artificial Sequence: Synthetic oligonucleotide
  X-linked inhibitor of apoptosis (XIAP) siRNA
tcactgtggaggagggctaactg

SEQ ID NO: 11324 - DNA, 23 bp, Artificial Sequence
  Description of Artificial Sequence: Synthetic oligonucleotide
  X-linked inhibitor of apoptosis (XIAP) siRNA
cactgtggaggagggctaactga

SEQ ID NO: 11325 - DNA, 23 bp, Artificial Sequence
  Description of Artificial Sequence: Synthetic oligonucleotide
  X-linked inhibitor of apoptosis (XIAP) siRNA
actgtggaggagggctaactgat

SEQ ID NO: 11326 - DNA, 23 bp, Artificial Sequence
  Description of Artificial Sequence: Synthetic oligonucleotide
  X-linked inhibitor of apoptosis (XIAP) siRNA
ctgtggaggagggctaactgatt

SEQ ID NO: 11327 - DNA, 23 bp, Artificial Sequence
  Description of Artificial Sequence: Synthetic oligonucleotide
  X-linked inhibitor of apoptosis (XIAP) siRNA
tgtggaggagggctaactgattg

SEQ ID NO: 11328 - DNA, 23 bp, Artificial Sequence
  Description of Artificial Sequence: Synthetic oligonucleotide
  X-linked inhibitor of apoptosis (XIAP) siRNA
gtggaggagggctaactgattgg

SEQ ID NO: 11329 - DNA, 23 bp, Artificial Sequence
  Description of Artificial Sequence: Synthetic oligonucleotide
  X-linked inhibitor of apoptosis (XIAP) siRNA
tggaggagggctaactgattgga

SEQ ID NO: 11330 - DNA, 23 bp, Artificial Sequence
  Description of Artificial Sequence: Synthetic oligonucleotide
  X-linked inhibitor of apoptosis (XIAP) siRNA
ggaggagggctaactgattggaa

SEQ ID NO: 11331 - DNA, 23 bp, Artificial Sequence
  Description of Artificial Sequence: Synthetic oligonucleotide
  X-linked inhibitor of apoptosis (XIAP) siRNA
gaggagggctaactgattggaag

SEQ ID NO: 11332 - DNA, 23 bp, Artificial Sequence
  Description of Artificial Sequence: Synthetic oligonucleotide
  X-linked inhibitor of apoptosis (XIAP) siRNA
aggagggctaactgattggaagc

SEQ ID NO: 11333 - DNA, 23 bp, Artificial Sequence
  Description of Artificial Sequence: Synthetic oligonucleotide
  X-linked inhibitor of apoptosis (XIAP) siRNA
ggagggctaactgattggaagcc

SEQ ID NO: 11334 - DNA, 23 bp, Artificial Sequence
  Description of Artificial Sequence: Synthetic oligonucleotide
  X-linked inhibitor of apoptosis (XIAP) siRNA
gagggctaactgattggaagccc

SEQ ID NO: 11335 - DNA, 23 bp, Artificial Sequence
  Description of Artificial Sequence: Synthetic oligonucleotide
  X-linked inhibitor of apoptosis (XIAP) siRNA
agggctaactgattggaagccca

SEQ ID NO: 11336 - DNA, 23 bp, Artificial Sequence
  Description of Artificial Sequence: Synthetic oligonucleotide
  X-linked inhibitor of apoptosis (XIAP) siRNA
gggctaactgattggaagcccag

SEQ ID NO: 11337 - DNA, 23 bp, Artificial Sequence
  Description of Artificial Sequence: Synthetic oligonucleotide
  X-linked inhibitor of apoptosis (XIAP) siRNA
ggctaactgattggaagcccagt

SEQ ID NO: 11338 - DNA, 23 bp, Artificial Sequence
  Description of Artificial Sequence: Synthetic oligonucleotide
  X-linked inhibitor of apoptosis (XIAP) siRNA
gctaactgattggaagcccagtg

SEQ ID NO: 11339 - DNA, 23 bp, Artificial Sequence
  Description of Artificial Sequence: Synthetic oligonucleotide
  X-linked inhibitor of apoptosis (XIAP) siRNA
ctaactgattggaagcccagtga

SEQ ID NO: 11340 - DNA, 23 bp, Artificial Sequence
  Description of Artificial Sequence: Synthetic oligonucleotide
  X-linked inhibitor of apoptosis (XIAP) siRNA
taactgattggaagcccagtgaa

SEQ ID NO: 11341 - DNA, 23 bp, Artificial Sequence
  Description of Artificial Sequence: Synthetic oligonucleotide
  X-linked inhibitor of apoptosis (XIAP) siRNA
aactgattggaagcccagtgaag

SEQ ID NO: 11342 - DNA, 23 bp, Artificial Sequence
  Description of Artificial Sequence: Synthetic oligonucleotide
  X-linked inhibitor of apoptosis (XIAP) siRNA
actgattggaagcccagtgaaga

SEQ ID NO: 11343 - DNA, 23 bp, Artificial Sequence
  Description of Artificial Sequence: Synthetic oligonucleotide
  X-linked inhibitor of apoptosis (XIAP) siRNA
ctgattggaagcccagtgaagac

SEQ ID NO: 11344 - DNA, 23 bp, Artificial Sequence
  Description of Artificial Sequence: Synthetic oligonucleotide
  X-linked inhibitor of apoptosis (XIAP) siRNA
tgattggaagcccagtgaagacc

SEQ ID NO: 11345 - DNA, 23 bp, Artificial Sequence
  Description of Artificial Sequence: Synthetic oligonucleotide
  X-linked inhibitor of apoptosis (XIAP) siRNA
gattggaagcccagtgaagaccc

SEQ ID NO: 11346 - DNA, 23 bp, Artificial Sequence
  Description of Artificial Sequence: Synthetic oligonucleotide
  X-linked inhibitor of apoptosis (XIAP) siRNA
attggaagcccagtgaagaccct

SEQ ID NO: 11347 - DNA, 23 bp, Artificial Sequence
  Description of Artificial Sequence: Synthetic oligonucleotide
  X-linked inhibitor of apoptosis (XIAP) siRNA
ttggaagcccagtgaagaccctt

SEQ ID NO: 11348 - DNA, 23 bp, Artificial Sequence
  Description of Artificial Sequence: Synthetic oligonucleotide
  X-linked inhibitor of apoptosis (XIAP) siRNA
tggaagcccagtgaagacccttg

SEQ ID NO: 11349 - DNA, 23 bp, Artificial Sequence
  Description of Artificial Sequence: Synthetic oligonucleotide
  X-linked inhibitor of apoptosis (XIAP) siRNA
ggaagcccagtgaagacccttgg

SEQ ID NO: 11350 - DNA, 23 bp, Artificial Sequence
  Description of Artificial Sequence: Synthetic oligonucleotide
  X-linked inhibitor of apoptosis (XIAP) siRNA
gaagcccagtgaagacccttggg

SEQ ID NO: 11351 - DNA, 23 bp, Artificial Sequence
  Description of Artificial Sequence: Synthetic oligonucleotide
  X-linked inhibitor of apoptosis (XIAP) siRNA
aagcccagtgaagacccttggga

SEQ ID NO: 11352 - DNA, 23 bp, Artificial Sequence
  Description of Artificial Sequence: Synthetic oligonucleotide
  X-linked inhibitor of apoptosis (XIAP) siRNA
agcccagtgaagacccttgggaa

SEQ ID NO: 11353 - DNA, 23 bp, Artificial Sequence
  Description of Artificial Sequence: Synthetic oligonucleotide
  X-linked inhibitor of apoptosis (XIAP) siRNA
gcccagtgaagacccttgggaac

SEQ ID NO: 11354 - DNA, 23 bp, Artificial Sequence
  Description of Artificial Sequence: Synthetic oligonucleotide
  X-linked inhibitor of apoptosis (XIAP) siRNA
cccagtgaagacccttgggaaca

SEQ ID NO: 11355 - DNA, 23 bp, Artificial Sequence
  Description of Artificial Sequence: Synthetic oligonucleotide
  X-linked inhibitor of apoptosis (XIAP) siRNA
ccagtgaagacccttgggaacaa

SEQ ID NO: 11356 - DNA, 23 bp, Artificial Sequence
  Description of Artificial Sequence: Synthetic oligonucleotide
  X-linked inhibitor of apoptosis (XIAP) siRNA
cagtgaagacccttgggaacaac

SEQ ID NO: 11357 - DNA, 23 bp, Artificial Sequence
  Description of Artificial Sequence: Synthetic oligonucleotide
  X-linked inhibitor of apoptosis (XIAP) siRNA
agtgaagacccttgggaacaaca

SEQ ID NO: 11358 - DNA, 23 bp, Artificial Sequence
  Description of Artificial Sequence: Synthetic oligonucleotide
  X-linked inhibitor of apoptosis (XIAP) siRNA
gtgaagacccttgggaacaacat

SEQ ID NO: 11359 - DNA, 23 bp, Artificial Sequence
  Description of Artificial Sequence: Synthetic oligonucleotide
  X-linked inhibitor of apoptosis (XIAP) siRNA
tgaagacccttgggaacaacatg

SEQ ID NO: 11360 - DNA, 23 bp, Artificial Sequence
  Description of Artificial Sequence: Synthetic oligonucleotide
  X-linked inhibitor of apoptosis (XIAP) siRNA
gaagacccttgggaacaacatgc

SEQ ID NO: 11361 - DNA, 23 bp, Artificial Sequence
  Description of Artificial Sequence: Synthetic oligonucleotide
  X-linked inhibitor of apoptosis (XIAP) siRNA
aagacccttgggaacaacatgct

SEQ ID NO: 11362 - DNA, 23 bp, Artificial Sequence
  Description of Artificial Sequence: Synthetic oligonucleotide
  X-linked inhibitor of apoptosis (XIAP) siRNA
agacccttgggaacaacatgcta

SEQ ID NO: 11363 - DNA, 23 bp, Artificial Sequence
  Description of Artificial Sequence: Synthetic oligonucleotide
  X-linked inhibitor of apoptosis (XIAP) siRNA
gacccttgggaacaacatgctaa

SEQ ID NO: 11364 - DNA, 23 bp, Artificial Sequence
  Description of Artificial Sequence: Synthetic oligonucleotide
  X-linked inhibitor of apoptosis (XIAP) siRNA
acccttgggaacaacatgctaaa

SEQ ID NO: 11365 - DNA, 23 bp, Artificial Sequence
  Description of Artificial Sequence: Synthetic oligonucleotide
  X-linked inhibitor of apoptosis (XIAP) siRNA
cccttgggaacaacatgctaaat

SEQ ID NO: 11366 - DNA, 23 bp, Artificial Sequence
  Description of Artificial Sequence: Synthetic oligonucleotide
  X-linked inhibitor of apoptosis (XIAP) siRNA
ccttgggaacaacatgctaaatg

SEQ ID NO: 11367 - DNA, 23 bp, Artificial Sequence
  Description of Artificial Sequence: Synthetic oligonucleotide
  X-linked inhibitor of apoptosis (XIAP) siRNA
cttgggaacaacatgctaaatgg

SEQ ID NO: 11368 - DNA, 23 bp, Artificial Sequence
  Description of Artificial Sequence: Synthetic oligonucleotide
  X-linked inhibitor of apoptosis (XIAP) siRNA
ttgggaacaacatgctaaatggt

SEQ ID NO: 11369 - DNA, 23 bp, Artificial Sequence
  Description of Artificial Sequence: Synthetic oligonucleotide
  X-linked inhibitor of apoptosis (XIAP) siRNA
tgggaacaacatgctaaatggta

SEQ ID NO: 11370 - DNA, 23 bp, Artificial Sequence
  Description of Artificial Sequence: Synthetic oligonucleotide
  X-linked inhibitor of apoptosis (XIAP) siRNA
gggaacaacatgctaaatggtat

SEQ ID NO: 11371 - DNA, 23 bp, Artificial Sequence
  Description of Artificial Sequence: Synthetic oligonucleotide
  X-linked inhibitor of apoptosis (XIAP) siRNA
ggaacaacatgctaaatggtatc

SEQ ID NO: 11372 - DNA, 23 bp, Artificial Sequence
  Description of Artificial Sequence: Synthetic oligonucleotide
  X-linked inhibitor of apoptosis (XIAP) siRNA
gaacaacatgctaaatggtatcc

SEQ ID NO: 11373 - DNA, 23 bp, Artificial Sequence
  Description of Artificial Sequence: Synthetic oligonucleotide
  X-linked inhibitor of apoptosis (XIAP) siRNA
aacaacatgctaaatggtatcca

SEQ ID NO: 11374 - DNA, 23 bp, Artificial Sequence
  Description of Artificial Sequence: Synthetic oligonucleotide
  X-linked inhibitor of apoptosis (XIAP) siRNA
acaacatgctaaatggtatccag

SEQ ID NO: 11375 - DNA, 23 bp, Artificial Sequence
  Description of Artificial Sequence: Synthetic oligonucleotide
  X-linked inhibitor of apoptosis (XIAP) siRNA
caacatgctaaatggtatccagg

SEQ ID NO: 11376 - DNA, 23 bp, Artificial Sequence
  Description of Artificial Sequence: Synthetic oligonucleotide
  X-linked inhibitor of apoptosis (XIAP) siRNA
aacatgctaaatggtatccaggg

SEQ ID NO: 11377 - DNA, 23 bp, Artificial Sequence
  Description of Artificial Sequence: Synthetic oligonucleotide
  X-linked inhibitor of apoptosis (XIAP) siRNA
acatgctaaatggtatccagggt

SEQ ID NO: 11378 - DNA, 23 bp, Artificial Sequence
  Description of Artificial Sequence: Synthetic oligonucleotide
  X-linked inhibitor of apoptosis (XIAP) siRNA
catgctaaatggtatccagggtg

SEQ ID NO: 11379 - DNA, 23 bp, Artificial Sequence
  Description of Artificial Sequence: Synthetic oligonucleotide
  X-linked inhibitor of apoptosis (XIAP) siRNA
atgctaaatggtatccagggtgc

SEQ ID NO: 11380 - DNA, 23 bp, Artificial Sequence
  Description of Artificial Sequence: Synthetic oligonucleotide
  X-linked inhibitor of apoptosis (XIAP) siRNA
tgctaaatggtatccagggtgca

SEQ ID NO: 11381 - DNA, 23 bp, Artificial Sequence
  Description of Artificial Sequence: Synthetic oligonucleotide
  X-linked inhibitor of apoptosis (XIAP) siRNA
gctaaatggtatccagggtgcaa

SEQ ID NO: 11382 - DNA, 23 bp, Artificial Sequence
  Description of Artificial Sequence: Synthetic oligonucleotide
  X-linked inhibitor of apoptosis (XIAP) siRNA
ctaaatggtatccagggtgcaaa

SEQ ID NO: 11383 - DNA, 23 bp, Artificial Sequence
  Description of Artificial Sequence: Synthetic oligonucleotide
  X-linked inhibitor of apoptosis (XIAP) siRNA
taaatggtatccagggtgcaaat

SEQ ID NO: 11384 - DNA, 23 bp, Artificial Sequence
  Description of Artificial Sequence: Synthetic oligonucleotide
  X-linked inhibitor of apoptosis (XIAP) siRNA
aaatggtatccagggtgcaaata

SEQ ID NO: 11385 - DNA, 23 bp, Artificial Sequence
  Description of Artificial Sequence: Synthetic oligonucleotide
  X-linked inhibitor of apoptosis (XIAP) siRNA
aatggtatccagggtgcaaatat

SEQ ID NO: 11386 - DNA, 23 bp, Artificial Sequence
  Description of Artificial Sequence: Synthetic oligonucleotide
  X-linked inhibitor of apoptosis (XIAP) siRNA
atggtatccagggtgcaaatatc

SEQ ID NO: 11387 - DNA, 23 bp, Artificial Sequence
  Description of Artificial Sequence: Synthetic oligonucleotide
  X-linked inhibitor of apoptosis (XIAP) siRNA
tggtatccagggtgcaaatatct

SEQ ID NO: 11388 - DNA, 23 bp, Artificial Sequence
  Description of Artificial Sequence: Synthetic oligonucleotide
  X-linked inhibitor of apoptosis (XIAP) siRNA
ggtatccagggtgcaaatatctg

SEQ ID NO: 11389 - DNA, 23 bp, Artificial Sequence
  Description of Artificial Sequence: Synthetic oligonucleotide
  X-linked inhibitor of apoptosis (XIAP) siRNA
gtatccagggtgcaaatatctgt

SEQ ID NO: 11390 - DNA, 23 bp, Artificial Sequence
  Description of Artificial Sequence: Synthetic oligonucleotide
  X-linked inhibitor of apoptosis (XIAP) siRNA
tatccagggtgcaaatatctgtt

SEQ ID NO: 11391 - DNA, 23 bp, Artificial Sequence
  Description of Artificial Sequence: Synthetic oligonucleotide
  X-linked inhibitor of apoptosis (XIAP) siRNA
atccagggtgcaaatatctgtta

SEQ ID NO: 11392 - DNA, 23 bp, Artificial Sequence
  Description of Artificial Sequence: Synthetic oligonucleotide
  X-linked inhibitor of apoptosis (XIAP) siRNA
tccagggtgcaaatatctgttag

SEQ ID NO: 11393 - DNA, 23 bp, Artificial Sequence
  Description of Artificial Sequence: Synthetic oligonucleotide
  X-linked inhibitor of apoptosis (XIAP) siRNA
ccagggtgcaaatatctgttaga

SEQ ID NO: 11394 - DNA, 23 bp, Artificial Sequence
  Description of Artificial Sequence: Synthetic oligonucleotide
  X-linked inhibitor of apoptosis (XIAP) siRNA
cagggtgcaaatatctgttagaa

SEQ ID NO: 11395 - DNA, 23 bp, Artificial Sequence
  Description of Artificial Sequence: Synthetic oligonucleotide
  X-linked inhibitor of apoptosis (XIAP) siRNA
agggtgcaaatatctgttagaac

SEQ ID NO: 11396 - DNA, 23 bp, Artificial Sequence
  Description of Artificial Sequence: Synthetic oligonucleotide
  X-linked inhibitor of apoptosis (XIAP) siRNA
gggtgcaaatatctgttagaaca

SEQ ID NO: 11397 - DNA, 23 bp, Artificial Sequence
  Description of Artificial Sequence: Synthetic oligonucleotide
  X-linked inhibitor of apoptosis (XIAP) siRNA
ggtgcaaatatctgttagaacag

SEQ ID NO: 11398 - DNA, 23 bp, Artificial Sequence
  Description of Artificial Sequence: Synthetic oligonucleotide
  X-linked inhibitor of apoptosis (XIAP) siRNA
gtgcaaatatctgttagaacaga

SEQ ID NO: 11399 - DNA, 23 bp, Artificial Sequence
  Description of Artificial Sequence: Synthetic oligonucleotide
  X-linked inhibitor of apoptosis (XIAP) siRNA
tgcaaatatctgttagaacagaa

SEQ ID NO: 11400 - DNA, 23 bp, Artificial Sequence
  Description of Artificial Sequence: Synthetic oligonucleotide
  X-linked inhibitor of apoptosis (XIAP) siRNA
gcaaatatctgttagaacagaag

SEQ ID NO: 11401 - DNA, 23 bp, Artificial Sequence
  Description of Artificial Sequence: Synthetic oligonucleotide
  X-linked inhibitor of apoptosis (XIAP) siRNA
caaatatctgttagaacagaagg

SEQ ID NO: 11402 - DNA, 23 bp, Artificial Sequence
  Description of Artificial Sequence: Synthetic oligonucleotide
  X-linked inhibitor of apoptosis (XIAP) siRNA
aaatatctgttagaacagaaggg

SEQ ID NO: 11403 - DNA, 23 bp, Artificial Sequence
  Description of Artificial Sequence: Synthetic oligonucleotide
  X-linked inhibitor of apoptosis (XIAP) siRNA
aatatctgttagaacagaaggga

SEQ ID NO: 11404 - DNA, 23 bp, Artificial Sequence
  Description of Artificial Sequence: Synthetic oligonucleotide
  X-linked inhibitor of apoptosis (XIAP) siRNA
atatctgttagaacagaagggac

SEQ ID NO: 11405 - DNA, 23 bp, Artificial Sequence
  Description of Artificial Sequence: Synthetic oligonucleotide
  X-linked inhibitor of apoptosis (XIAP) siRNA
tatctgttagaacagaagggaca

SEQ ID NO: 11406 - DNA, 23 bp, Artificial Sequence
  Description of Artificial Sequence: Synthetic oligonucleotide
  X-linked inhibitor of apoptosis (XIAP) siRNA
atctgttagaacagaagggacaa

SEQ ID NO: 11407 - DNA, 23 bp, Artificial Sequence
  Description of Artificial Sequence: Synthetic oligonucleotide
  X-linked inhibitor of apoptosis (XIAP) siRNA
tctgttagaacagaagggacaag

SEQ ID NO: 11408 - DNA, 23 bp, Artificial Sequence
  Description of Artificial Sequence: Synthetic oligonucleotide
  X-linked inhibitor of apoptosis (XIAP) siRNA
ctgttagaacagaagggacaaga

SEQ ID NO: 11409 - DNA, 23 bp, Artificial Sequence
  Description of Artificial Sequence: Synthetic oligonucleotide
  X-linked inhibitor of apoptosis (XIAP) siRNA
tgttagaacagaagggacaagaa

SEQ ID NO: 11410 - DNA, 23 bp, Artificial Sequence
  Description of Artificial Sequence: Synthetic oligonucleotide
  X-linked inhibitor of apoptosis (XIAP) siRNA
gttagaacagaagggacaagaat

SEQ ID NO: 11411 - DNA, 23 bp, Artificial Sequence
  Description of Artificial Sequence: Synthetic oligonucleotide
  X-linked inhibitor of apoptosis (XIAP) siRNA
ttagaacagaagggacaagaata

SEQ ID NO: 11412 - DNA, 23 bp, Artificial Sequence
  Description of Artificial Sequence: Synthetic oligonucleotide
  X-linked inhibitor of apoptosis (XIAP) siRNA
tagaacagaagggacaagaatat

SEQ ID NO: 11413 - DNA, 23 bp, Artificial Sequence
  Description of Artificial Sequence: Synthetic oligonucleotide
  X-linked inhibitor of apoptosis (XIAP) siRNA
agaacagaagggacaagaatata

SEQ ID NO: 11414 - DNA, 23 bp, Artificial Sequence
  Description of Artificial Sequence: Synthetic oligonucleotide
  X-linked inhibitor of apoptosis (XIAP) siRNA
gaacagaagggacaagaatatat

SEQ ID NO: 11415 - DNA, 23 bp, Artificial Sequence
  Description of Artificial Sequence: Synthetic oligonucleotide
  X-linked inhibitor of apoptosis (XIAP) siRNA
aacagaagggacaagaatatata

SEQ ID NO: 11416 - DNA, 23 bp, Artificial Sequence
  Description of Artificial Sequence: Synthetic oligonucleotide
  X-linked inhibitor of apoptosis (XIAP) siRNA
acagaagggacaagaatatataa

SEQ ID NO: 11417 - DNA, 23 bp, Artificial Sequence
  Description of Artificial Sequence: Synthetic oligonucleotide
  X-linked inhibitor of apoptosis (XIAP) siRNA
cagaagggacaagaatatataaa

SEQ ID NO: 11418 - DNA, 23 bp, Artificial Sequence
  Description of Artificial Sequence: Synthetic oligonucleotide
  X-linked inhibitor of apoptosis (XIAP) siRNA
agaagggacaagaatatataaac

SEQ ID NO: 11419 - DNA, 23 bp, Artificial Sequence
  Description of Artificial Sequence: Synthetic oligonucleotide
  X-linked inhibitor of apoptosis (XIAP) siRNA
gaagggacaagaatatataaaca

SEQ ID NO: 11420 - DNA, 23 bp, Artificial Sequence
  Description of Artificial Sequence: Synthetic oligonucleotide
  X-linked inhibitor of apoptosis (XIAP) siRNA
aagggacaagaatatataaacaa

SEQ ID NO: 11421 - DNA, 23 bp, Artificial Sequence
  Description of Artificial Sequence: Synthetic oligonucleotide
  X-linked inhibitor of apoptosis (XIAP) siRNA
agggacaagaatatataaacaat

SEQ ID NO: 11422 - DNA, 23 bp, Artificial Sequence
  Description of Artificial Sequence: Synthetic oligonucleotide
  X-linked inhibitor of apoptosis (XIAP) siRNA
gggacaagaatatataaacaata

SEQ ID NO: 11423 - DNA, 23 bp, Artificial Sequence
  Description of Artificial Sequence: Synthetic oligonucleotide
  X-linked inhibitor of apoptosis (XIAP) siRNA
ggacaagaatatataaacaatat

SEQ ID NO: 11424 - DNA, 23 bp, Artificial Sequence
  Description of Artificial Sequence: Synthetic oligonucleotide
  X-linked inhibitor of apoptosis (XIAP) siRNA
gacaagaatatataaacaatatt

SEQ ID NO: 11425 - DNA, 23 bp, Artificial Sequence
  Description of Artificial Sequence: Synthetic oligonucleotide
  X-linked inhibitor of apoptosis (XIAP) siRNA
acaagaatatataaacaatattc

SEQ ID NO: 11426 - DNA, 23 bp, Artificial Sequence
  Description of Artificial Sequence: Synthetic oligonucleotide
  X-linked inhibitor of apoptosis (XIAP) siRNA
caagaatatataaacaatattca

SEQ ID NO: 11427 - DNA, 23 bp, Artificial Sequence
  Description of Artificial Sequence: Synthetic oligonucleotide
  X-linked inhibitor of apoptosis (XIAP) siRNA
aagaatatataaacaatattcat

SEQ ID NO: 11428 - DNA, 23 bp, Artificial Sequence
  Description of Artificial Sequence: Synthetic oligonucleotide
  X-linked inhibitor of apoptosis (XIAP) siRNA
agaatatataaacaatattcatt

SEQ ID NO: 11429 - DNA, 23 bp, Artificial Sequence
  Description of Artificial Sequence: Synthetic oligonucleotide
  X-linked inhibitor of apoptosis (XIAP) siRNA
gaatatataaacaatattcattt

SEQ ID NO: 11430 - DNA, 23 bp, Artificial Sequence
  Description of Artificial Sequence: Synthetic oligonucleotide
  X-linked inhibitor of apoptosis (XIAP) siRNA
aatatataaacaatattcattta

SEQ ID NO: 11431 - DNA, 23 bp, Artificial Sequence
  Description of Artificial Sequence: Synthetic oligonucleotide
  X-linked inhibitor of apoptosis (XIAP) siRNA
atatataaacaatattcatttaa

SEQ ID NO: 11432 - DNA, 23 bp, Artificial Sequence
  Description of Artificial Sequence: Synthetic oligonucleotide
  X-linked inhibitor of apoptosis (XIAP) siRNA
tatataaacaatattcatttaac

SEQ ID NO: 11433 - DNA, 23 bp, Artificial Sequence
  Description of Artificial Sequence: Synthetic oligonucleotide
  X-linked inhibitor of apoptosis (XIAP) siRNA
atataaacaatattcatttaact

SEQ ID NO: 11434 - DNA, 23 bp, Artificial Sequence
  Description of Artificial Sequence: Synthetic oligonucleotide
  X-linked inhibitor of apoptosis (XIAP) siRNA
tataaacaatattcatttaactc

SEQ ID NO: 11435 - DNA, 23 bp, Artificial Sequence
  Description of Artificial Sequence: Synthetic oligonucleotide
  X-linked inhibitor of apoptosis (XIAP) siRNA
ataaacaatattcatttaactca

SEQ ID NO: 11436 - DNA, 23 bp, Artificial Sequence
  Description of Artificial Sequence: Synthetic oligonucleotide
  X-linked inhibitor of apoptosis (XIAP) siRNA
taaacaatattcatttaactcat

SEQ ID NO: 11437 - DNA, 23 bp, Artificial Sequence
  Description of Artificial Sequence: Synthetic oligonucleotide
  X-linked inhibitor of apoptosis (XIAP) siRNA
aaacaatattcatttaactcatt

SEQ ID NO: 11438 - DNA, 23 bp, Artificial Sequence
  Description of Artificial Sequence: Synthetic oligonucleotide
  X-linked inhibitor of apoptosis (XIAP) siRNA
aacaatattcatttaactcattc

SEQ ID NO: 11439 - DNA, 23 bp, Artificial Sequence
  Description of Artificial Sequence: Synthetic oligonucleotide
  X-linked inhibitor of apoptosis (XIAP) siRNA
acaatattcatttaactcattca

SEQ ID NO: 11440 - DNA, 23 bp, Artificial Sequence
  Description of Artificial Sequence: Synthetic oligonucleotide
  X-linked inhibitor of apoptosis (XIAP) siRNA
caatattcatttaactcattcac

SEQ ID NO: 11441 - DNA, 23 bp, Artificial Sequence
  Description of Artificial Sequence: Synthetic oligonucleotide
  X-linked inhibitor of apoptosis (XIAP) siRNA
aatattcatttaactcattcact

SEQ ID NO: 11442 - DNA, 23 bp, Artificial Sequence
  Description of Artificial Sequence: Synthetic oligonucleotide
  X-linked inhibitor of apoptosis (XIAP) siRNA
atattcatttaactcattcactt

SEQ ID NO: 11443 - DNA, 23 bp, Artificial Sequence
  Description of Artificial Sequence: Synthetic oligonucleotide
  X-linked inhibitor of apoptosis (XIAP) siRNA
tattcatttaactcattcacttg

SEQ ID NO: 11444 - DNA, 23 bp, Artificial Sequence
  Description of Artificial Sequence: Synthetic oligonucleotide
  X-linked inhibitor of apoptosis (XIAP) siRNA
attcatttaactcattcacttga

SEQ ID NO: 11445 - DNA, 23 bp, Artificial Sequence
  Description of Artificial Sequence: Synthetic oligonucleotide
  X-linked inhibitor of apoptosis (XIAP) siRNA
ttcatttaactcattcacttgag

SEQ ID NO: 11446 - DNA, 23 bp, Artificial Sequence
  Description of Artificial Sequence: Synthetic oligonucleotide
  X-linked inhibitor of apoptosis (XIAP) siRNA
tcatttaactcattcacttgagg

SEQ ID NO: 11447 - DNA, 23 bp, Artificial Sequence
  Description of Artificial Sequence: Synthetic oligonucleotide
  X-linked inhibitor of apoptosis (XIAP) siRNA
catttaactcattcacttgagga

SEQ ID NO: 11448 - DNA, 23 bp, Artificial Sequence
  Description of Artificial Sequence: Synthetic oligonucleotide
  X-linked inhibitor of apoptosis (XIAP) siRNA
atttaactcattcacttgaggag

SEQ ID NO: 11449 - DNA, 23 bp, Artificial Sequence
  Description of Artificial Sequence: Synthetic oligonucleotide
  X-linked inhibitor of apoptosis (XIAP) siRNA
tttaactcattcacttgaggagt

SEQ ID NO: 11450 - DNA, 23 bp, Artificial Sequence
  Description of Artificial Sequence: Synthetic oligonucleotide
  X-linked inhibitor of apoptosis (XIAP) siRNA
ttaactcattcacttgaggagtg

SEQ ID NO: 11451 - DNA, 23 bp, Artificial Sequence
  Description of Artificial Sequence: Synthetic oligonucleotide
  X-linked inhibitor of apoptosis (XIAP) siRNA
taactcattcacttgaggagtgt

SEQ ID NO: 11452 - DNA, 23 bp, Artificial Sequence
  Description of Artificial Sequence: Synthetic oligonucleotide
  X-linked inhibitor of apoptosis (XIAP) siRNA
aactcattcacttgaggagtgtc

SEQ ID NO: 11453 - DNA, 23 bp, Artificial Sequence
  Description of Artificial Sequence: Synthetic oligonucleotide
  X-linked inhibitor of apoptosis (XIAP) siRNA
actcattcacttgaggagtgtct

SEQ ID NO: 11454 - DNA, 23 bp, Artificial Sequence
  Description of Artificial Sequence: Synthetic oligonucleotide
  X-linked inhibitor of apoptosis (XIAP) siRNA
ctcattcacttgaggagtgtctg

SEQ ID NO: 11455 - DNA, 23 bp, Artificial Sequence
  Description of Artificial Sequence: Synthetic oligonucleotide
  X-linked inhibitor of apoptosis (XIAP) siRNA
tcattcacttgaggagtgtctgg

SEQ ID NO: 11456 - DNA, 23 bp, Artificial Sequence
  Description of Artificial Sequence: Synthetic oligonucleotide
  X-linked inhibitor of apoptosis (XIAP) siRNA
cattcacttgaggagtgtctggt

SEQ ID NO: 11457 - DNA, 23 bp, Artificial Sequence
  Description of Artificial Sequence: Synthetic oligonucleotide
  X-linked inhibitor of apoptosis (XIAP) siRNA
attcacttgaggagtgtctggta

SEQ ID NO: 11458 - DNA, 23 bp, Artificial Sequence
  Description of Artificial Sequence: Synthetic oligonucleotide
  X-linked inhibitor of apoptosis (XIAP) siRNA
ttcacttgaggagtgtctggtaa

SEQ ID NO: 11459 - DNA, 23 bp, Artificial Sequence
  Description of Artificial Sequence: Synthetic oligonucleotide
  X-linked inhibitor of apoptosis (XIAP) siRNA
tcacttgaggagtgtctggtaag

SEQ ID NO: 11460 - DNA, 23 bp, Artificial Sequence
  Description of Artificial Sequence: Synthetic oligonucleotide
  X-linked inhibitor of apoptosis (XIAP) siRNA
cacttgaggagtgtctggtaaga

SEQ ID NO: 11461 - DNA, 23 bp, Artificial Sequence
  Description of Artificial Sequence: Synthetic oligonucleotide
  X-linked inhibitor of apoptosis (XIAP) siRNA
acttgaggagtgtctggtaagaa

SEQ ID NO: 11462 - DNA, 23 bp, Artificial Sequence
  Description of Artificial Sequence: Synthetic oligonucleotide
  X-linked inhibitor of apoptosis (XIAP) siRNA
cttgaggagtgtctggtaagaac

SEQ ID NO: 11463 - DNA, 23 bp, Artificial Sequence
  Description of Artificial Sequence: Synthetic oligonucleotide
  X-linked inhibitor of apoptosis (XIAP) siRNA
ttgaggagtgtctggtaagaact

SEQ ID NO: 11464 - DNA, 23 bp, Artificial Sequence
  Description of Artificial Sequence: Synthetic oligonucleotide
  X-linked inhibitor of apoptosis (XIAP) siRNA
tgaggagtgtctggtaagaacta

SEQ ID NO: 11465 - DNA, 23 bp, Artificial Sequence
  Description of Artificial Sequence: Synthetic oligonucleotide
  X-linked inhibitor of apoptosis (XIAP) siRNA
gaggagtgtctggtaagaactac

SEQ ID NO: 11466 - DNA, 23 bp, Artificial Sequence
  Description of Artificial Sequence: Synthetic oligonucleotide
  X-linked inhibitor of apoptosis (XIAP) siRNA
aggagtgtctggtaagaactact

SEQ ID NO: 11467 - DNA, 23 bp, Artificial Sequence
  Description of Artificial Sequence: Synthetic oligonucleotide
  X-linked inhibitor of apoptosis (XIAP) siRNA
ggagtgtctggtaagaactactg

SEQ ID NO: 11468 - DNA, 23 bp, Artificial Sequence
  Description of Artificial Sequence: Synthetic oligonucleotide
  X-linked inhibitor of apoptosis (XIAP) siRNA
gagtgtctggtaagaactactga

SEQ ID NO: 11469 - DNA, 23 bp, Artificial Sequence
  Description of Artificial Sequence: Synthetic oligonucleotide
  X-linked inhibitor of apoptosis (XIAP) siRNA
agtgtctggtaagaactactgag

SEQ ID NO: 11470 - DNA, 23 bp, Artificial Sequence
  Description of Artificial Sequence: Synthetic oligonucleotide
  X-linked inhibitor of apoptosis (XIAP) siRNA
gtgtctggtaagaactactgaga

SEQ ID NO: 11471 - DNA, 23 bp, Artificial Sequence
  Description of Artificial Sequence: Synthetic oligonucleotide
  X-linked inhibitor of apoptosis (XIAP) siRNA
tgtctggtaagaactactgagaa

SEQ ID NO: 11472 - DNA, 23 bp, Artificial Sequence
  Description of Artificial Sequence: Synthetic oligonucleotide
  X-linked inhibitor of apoptosis (XIAP) siRNA
gtctggtaagaactactgagaaa

SEQ ID NO: 11473 - DNA, 23 bp, Artificial Sequence
  Description of Artificial Sequence: Synthetic oligonucleotide
  X-linked inhibitor of apoptosis (XIAP) siRNA
tctggtaagaactactgagaaaa

SEQ ID NO: 11474 - DNA, 23 bp, Artificial Sequence
  Description of Artificial Sequence: Synthetic oligonucleotide
  X-linked inhibitor of apoptosis (XIAP) siRNA
ctggtaagaactactgagaaaac

SEQ ID NO: 11475 - DNA, 23 bp, Artificial Sequence
  Description of Artificial Sequence: Synthetic oligonucleotide
  X-linked inhibitor of apoptosis (XIAP) siRNA
tggtaagaactactgagaaaaca

SEQ ID NO: 11476 - DNA, 23 bp, Artificial Sequence
  Description of Artificial Sequence: Synthetic oligonucleotide
  X-linked inhibitor of apoptosis (XIAP) siRNA
ggtaagaactactgagaaaacac

SEQ ID NO: 11477 - DNA, 23 bp, Artificial Sequence
  Description of Artificial Sequence: Synthetic oligonucleotide
  X-linked inhibitor of apoptosis (XIAP) siRNA
gtaagaactactgagaaaacacc

SEQ ID NO: 11478 - DNA, 23 bp, Artificial Sequence
  Description of Artificial Sequence: Synthetic oligonucleotide
  X-linked inhibitor of apoptosis (XIAP) siRNA
taagaactactgagaaaacacca

SEQ ID NO: 11479 - DNA, 23 bp, Artificial Sequence
  Description of Artificial Sequence: Synthetic oligonucleotide
  X-linked inhibitor of apoptosis (XIAP) siRNA
aagaactactgagaaaacaccat

SEQ ID NO: 11480 - DNA, 23 bp, Artificial Sequence
  Description of Artificial Sequence: Synthetic oligonucleotide
  X-linked inhibitor of apoptosis (XIAP) siRNA
agaactactgagaaaacaccatc

SEQ ID NO: 11481 - DNA, 23 bp, Artificial Sequence
  Description of Artificial Sequence: Synthetic oligonucleotide
  X-linked inhibitor of apoptosis (XIAP) siRNA
gaactactgagaaaacaccatca

SEQ ID NO: 11482 - DNA, 23 bp, Artificial Sequence
  Description of Artificial Sequence: Synthetic oligonucleotide
  X-linked inhibitor of apoptosis (XIAP) siRNA
aactactgagaaaacaccatcac

SEQ ID NO: 11483 - DNA, 23 bp, Artificial Sequence
  Description of Artificial Sequence: Synthetic oligonucleotide
  X-linked inhibitor of apoptosis (XIAP) siRNA
actactgagaaaacaccatcact

SEQ ID NO: 11484 - DNA, 23 bp, Artificial Sequence
  Description of Artificial Sequence: Synthetic oligonucleotide
  X-linked inhibitor of apoptosis (XIAP) siRNA
ctactgagaaaacaccatcacta

SEQ ID NO: 11485 - DNA, 23 bp, Artificial Sequence
  Description of Artificial Sequence: Synthetic oligonucleotide
  X-linked inhibitor of apoptosis (XIAP) siRNA
tactgagaaaacaccatcactaa

SEQ ID NO: 11486 - DNA, 23 bp, Artificial Sequence
  Description of Artificial Sequence: Synthetic oligonucleotide
  X-linked inhibitor of apoptosis (XIAP) siRNA
actgagaaaacaccatcactaac

SEQ ID NO: 11487 - DNA, 23 bp, Artificial Sequence
  Description of Artificial Sequence: Synthetic oligonucleotide
  X-linked inhibitor of apoptosis (XIAP) siRNA
ctgagaaaacaccatcactaact

SEQ ID NO: 11488 - DNA, 23 bp, Artificial Sequence
  Description of Artificial Sequence: Synthetic oligonucleotide
  X-linked inhibitor of apoptosis (XIAP) siRNA
tgagaaaacaccatcactaacta

SEQ ID NO: 11489 - DNA, 23 bp, Artificial Sequence
  Description of Artificial Sequence: Synthetic oligonucleotide
  X-linked inhibitor of apoptosis (XIAP) siRNA
gagaaaacaccatcactaactag

SEQ ID NO: 11490 - DNA, 23 bp, Artificial Sequence
  Description of Artificial Sequence: Synthetic oligonucleotide
  X-linked inhibitor of apoptosis (XIAP) siRNA
agaaaacaccatcactaactaga

SEQ ID NO: 11491 - DNA, 23 bp, Artificial Sequence
  Description of Artificial Sequence: Synthetic oligonucleotide
  X-linked inhibitor of apoptosis (XIAP) siRNA
gaaaacaccatcactaactagaa

SEQ ID NO: 11492 - DNA, 23 bp, Artificial Sequence
  Description of Artificial Sequence: Synthetic oligonucleotide
  X-linked inhibitor of apoptosis (XIAP) siRNA
aaaacaccatcactaactagaag

SEQ ID NO: 11493 - DNA, 23 bp, Artificial Sequence
  Description of Artificial Sequence: Synthetic oligonucleotide
  X-linked inhibitor of apoptosis (XIAP) siRNA
aaacaccatcactaactagaaga

SEQ ID NO: 11494 - DNA, 23 bp, Artificial Sequence
  Description of Artificial Sequence: Synthetic oligonucleotide
  X-linked inhibitor of apoptosis (XIAP) siRNA
aacaccatcactaactagaagaa

SEQ ID NO: 11495 - DNA, 23 bp, Artificial Sequence
  Description of Artificial Sequence: Synthetic oligonucleotide
  X-linked inhibitor of apoptosis (XIAP) siRNA
acaccatcactaactagaagaat

SEQ ID NO: 11496 - DNA, 23 bp, Artificial Sequence
  Description of Artificial Sequence: Synthetic oligonucleotide
  X-linked inhibitor of apoptosis (XIAP) siRNA
caccatcactaactagaagaatt

SEQ ID NO: 11497 - DNA, 23 bp, Artificial Sequence
  Description of Artificial Sequence: Synthetic oligonucleotide
  X-linked inhibitor of apoptosis (XIAP) siRNA
accatcactaactagaagaattg

SEQ ID NO: 11498 - DNA, 23 bp, Artificial Sequence
  Description of Artificial Sequence: Synthetic oligonucleotide
  X-linked inhibitor of apoptosis (XIAP) siRNA
ccatcactaactagaagaattga

SEQ ID NO: 11499 - DNA, 23 bp, Artificial Sequence
  Description of Artificial Sequence: Synthetic oligonucleotide
  X-linked inhibitor of apoptosis (XIAP) siRNA
catcactaactagaagaattgat

SEQ ID NO: 11500 - DNA, 23 bp, Artificial Sequence
  Description of Artificial Sequence: Synthetic oligonucleotide
  X-linked inhibitor of apoptosis (XIAP) siRNA
atcactaactagaagaattgatg

SEQ ID NO: 11501 - DNA, 23 bp, Artificial Sequence
  Description of Artificial Sequence: Synthetic oligonucleotide
  X-linked inhibitor of apoptosis (XIAP) siRNA
tcactaactagaagaattgatga

SEQ ID NO: 11502 - DNA, 23 bp, Artificial Sequence
  Description of Artificial Sequence: Synthetic oligonucleotide
  X-linked inhibitor of apoptosis (XIAP) siRNA
cactaactagaagaattgatgat

SEQ ID NO: 11503 - DNA, 23 bp, Artificial Sequence
  Description of Artificial Sequence: Synthetic oligonucleotide
  X-linked inhibitor of apoptosis (XIAP) siRNA
actaactagaagaattgatgata

SEQ ID NO: 11504 - DNA, 23 bp, Artificial Sequence
  Description of Artificial Sequence: Synthetic oligonucleotide
  X-linked inhibitor of apoptosis (XIAP) siRNA
ctaactagaagaattgatgatac

SEQ ID NO: 11505 - DNA, 23 bp, Artificial Sequence
  Description of Artificial Sequence: Synthetic oligonucleotide
  X-linked inhibitor of apoptosis (XIAP) siRNA
taactagaagaattgatgatacc

SEQ ID NO: 11506 - DNA, 23 bp, Artificial Sequence
  Description of Artificial Sequence: Synthetic oligonucleotide
  X-linked inhibitor of apoptosis (XIAP) siRNA
aactagaagaattgatgatacca

SEQ ID NO: 11507 - DNA, 23 bp, Artificial Sequence
  Description of Artificial Sequence: Synthetic oligonucleotide
  X-linked inhibitor of apoptosis (XIAP) siRNA
actagaagaattgatgataccat

SEQ ID NO: 11508 - DNA, 23 bp, Artificial Sequence
  Description of Artificial Sequence: Synthetic oligonucleotide
  X-linked inhibitor of apoptosis (XIAP) siRNA
ctagaagaattgatgataccatc

SEQ ID NO: 11509 - DNA, 23 bp, Artificial Sequence
  Description of Artificial Sequence: Synthetic oligonucleotide
  X-linked inhibitor of apoptosis (XIAP) siRNA
tagaagaattgatgataccatct

SEQ ID NO: 11510 - DNA, 23 bp, Artificial Sequence
  Description of Artificial Sequence: Synthetic oligonucleotide
  X-linked inhibitor of apoptosis (XIAP) siRNA
agaagaattgatgataccatctt

SEQ ID NO: 11511 - DNA, 23 bp, Artificial Sequence
  Description of Artificial Sequence: Synthetic oligonucleotide
  X-linked inhibitor of apoptosis (XIAP) siRNA
gaagaattgatgataccatcttc

SEQ ID NO: 11512 - DNA, 23 bp, Artificial Sequence
  Description of Artificial Sequence: Synthetic oligonucleotide
  X-linked inhibitor of apoptosis (XIAP) siRNA
aagaattgatgataccatcttcc

SEQ ID NO: 11513 - DNA, 23 bp, Artificial Sequence
  Description of Artificial Sequence: Synthetic oligonucleotide
  X-linked inhibitor of apoptosis (XIAP) siRNA
agaattgatgataccatcttcca

SEQ ID NO: 11514 - DNA, 23 bp, Artificial Sequence
  Description of Artificial Sequence: Synthetic oligonucleotide
  X-linked inhibitor of apoptosis (XIAP) siRNA
gaattgatgataccatcttccaa

SEQ ID NO: 11515 - DNA, 23 bp, Artificial Sequence
  Description of Artificial Sequence: Synthetic oligonucleotide
  X-linked inhibitor of apoptosis (XIAP) siRNA
aattgatgataccatcttccaaa

SEQ ID NO: 11516 - DNA, 23 bp, Artificial Sequence
  Description of Artificial Sequence: Synthetic oligonucleotide
  X-linked inhibitor of apoptosis (XIAP) siRNA
attgatgataccatcttccaaaa

SEQ ID NO: 11517 - DNA, 23 bp, Artificial Sequence
  Description of Artificial Sequence: Synthetic oligonucleotide
  X-linked inhibitor of apoptosis (XIAP) siRNA
ttgatgataccatcttccaaaat

SEQ ID NO: 11518 - DNA, 23 bp, Artificial Sequence
  Description of Artificial Sequence: Synthetic oligonucleotide
  X-linked inhibitor of apoptosis (XIAP) siRNA
tgatgataccatcttccaaaatc

SEQ ID NO: 11519 - DNA, 23 bp, Artificial Sequence
  Description of Artificial Sequence: Synthetic oligonucleotide
  X-linked inhibitor of apoptosis (XIAP) siRNA
gatgataccatcttccaaaatcc

SEQ ID NO: 11520 - DNA, 23 bp, Artificial Sequence
  Description of Artificial Sequence: Synthetic oligonucleotide
  X-linked inhibitor of apoptosis (XIAP) siRNA
atgataccatcttccaaaatcct

SEQ ID NO: 11521 - DNA, 23 bp, Artificial Sequence
  Description of Artificial Sequence: Synthetic oligonucleotide
  X-linked inhibitor of apoptosis (XIAP) siRNA
tgataccatcttccaaaatccta

SEQ ID NO: 11522 - DNA, 23 bp, Artificial Sequence
  Description of Artificial Sequence: Synthetic oligonucleotide
  X-linked inhibitor of apoptosis (XIAP) siRNA
gataccatcttccaaaatcctat

SEQ ID NO: 11523 - DNA, 23 bp, Artificial Sequence
  Description of Artificial Sequence: Synthetic oligonucleotide
  X-linked inhibitor of apoptosis (XIAP) siRNA
ataccatcttccaaaatcctatg

SEQ ID NO: 11524 - DNA, 23 bp, Artificial Sequence
  Description of Artificial Sequence: Synthetic oligonucleotide
  X-linked inhibitor of apoptosis (XIAP) siRNA
taccatcttccaaaatcctatgg

SEQ ID NO: 11525 - DNA, 23 bp, Artificial Sequence
  Description of Artificial Sequence: Synthetic oligonucleotide
  X-linked inhibitor of apoptosis (XIAP) siRNA
accatcttccaaaatcctatggt

SEQ ID NO: 11526 - DNA, 23 bp, Artificial Sequence
  Description of Artificial Sequence: Synthetic oligonucleotide
  X-linked inhibitor of apoptosis (XIAP) siRNA
ccatcttccaaaatcctatggta

SEQ ID NO: 11527 - DNA, 23 bp, Artificial Sequence
  Description of Artificial Sequence: Synthetic oligonucleotide
  X-linked inhibitor of apoptosis (XIAP) siRNA
catcttccaaaatcctatggtac

SEQ ID NO: 11528 - DNA, 23 bp, Artificial Sequence
  Description of Artificial Sequence: Synthetic oligonucleotide
  X-linked inhibitor of apoptosis (XIAP) siRNA
atcttccaaaatcctatggtaca

SEQ ID NO: 11529 - DNA, 23 bp, Artificial Sequence
  Description of Artificial Sequence: Synthetic oligonucleotide
  X-linked inhibitor of apoptosis (XIAP) siRNA
tcttccaaaatcctatggtacaa

SEQ ID NO: 11530 - DNA, 23 bp, Artificial Sequence
  Description of Artificial Sequence: Synthetic oligonucleotide
  X-linked inhibitor of apoptosis (XIAP) siRNA
cttccaaaatcctatggtacaag

SEQ ID NO: 11531 - DNA, 23 bp, Artificial Sequence
  Description of Artificial Sequence: Synthetic oligonucleotide
  X-linked inhibitor of apoptosis (XIAP) siRNA
ttccaaaatcctatggtacaaga

SEQ ID NO: 11532 - DNA, 23 bp, Artificial Sequence
  Description of Artificial Sequence: Synthetic oligonucleotide
  X-linked inhibitor of apoptosis (XIAP) siRNA
tccaaaatcctatggtacaagaa

SEQ ID NO: 11533 - DNA, 23 bp, Artificial Sequence
  Description of Artificial Sequence: Synthetic oligonucleotide
  X-linked inhibitor of apoptosis (XIAP) siRNA
ccaaaatcctatggtacaagaag

SEQ ID NO: 11534 - DNA, 23 bp, Artificial Sequence
  Description of Artificial Sequence: Synthetic oligonucleotide
  X-linked inhibitor of apoptosis (XIAP) siRNA
caaaatcctatggtacaagaagc

SEQ ID NO: 11535 - DNA, 23 bp, Artificial Sequence
  Description of Artificial Sequence: Synthetic oligonucleotide
  X-linked inhibitor of apoptosis (XIAP) siRNA
aaaatcctatggtacaagaagct

SEQ ID NO: 11536 - DNA, 23 bp, Artificial Sequence
  Description of Artificial Sequence: Synthetic oligonucleotide
  X-linked inhibitor of apoptosis (XIAP) siRNA
aaatcctatggtacaagaagcta

SEQ ID NO: 11537 - DNA, 23 bp, Artificial Sequence
  Description of Artificial Sequence: Synthetic oligonucleotide
  X-linked inhibitor of apoptosis (XIAP) siRNA
aatcctatggtacaagaagctat

SEQ ID NO: 11538 - DNA, 23 bp, Artificial Sequence
  Description of Artificial Sequence: Synthetic oligonucleotide
  X-linked inhibitor of apoptosis (XIAP) siRNA
atcctatggtacaagaagctata

SEQ ID NO: 11539 - DNA, 23 bp, Artificial Sequence
  Description of Artificial Sequence: Synthetic oligonucleotide
  X-linked inhibitor of apoptosis (XIAP) siRNA
tcctatggtacaagaagctatac

SEQ ID NO: 11540 - DNA, 23 bp, Artificial Sequence
  Description of Artificial Sequence: Synthetic oligonucleotide
  X-linked inhibitor of apoptosis (XIAP) siRNA
cctatggtacaagaagctatacg

SEQ ID NO: 11541 - DNA, 23 bp, Artificial Sequence
  Description of Artificial Sequence: Synthetic oligonucleotide
  X-linked inhibitor of apoptosis (XIAP) siRNA
ctatggtacaagaagctatacga

SEQ ID NO: 11542 - DNA, 23 bp, Artificial Sequence
  Description of Artificial Sequence: Synthetic oligonucleotide
  X-linked inhibitor of apoptosis (XIAP) siRNA
tatggtacaagaagctatacgaa

SEQ ID NO: 11543 - DNA, 23 bp, Artificial Sequence
  Description of Artificial Sequence: Synthetic oligonucleotide
  X-linked inhibitor of apoptosis (XIAP) siRNA
atggtacaagaagctatacgaat

SEQ ID NO: 11544 - DNA, 23 bp, Artificial Sequence
  Description of Artificial Sequence: Synthetic oligonucleotide
  X-linked inhibitor of apoptosis (XIAP) siRNA
tggtacaagaagctatacgaatg

SEQ ID NO: 11545 - DNA, 23 bp, Artificial Sequence
  Description of Artificial Sequence: Synthetic oligonucleotide
  X-linked inhibitor of apoptosis (XIAP) siRNA
ggtacaagaagctatacgaatgg

SEQ ID NO: 11546 - DNA, 23 bp, Artificial Sequence
  Description of Artificial Sequence: Synthetic oligonucleotide
  X-linked inhibitor of apoptosis (XIAP) siRNA
gtacaagaagctatacgaatggg

SEQ ID NO: 11547 - DNA, 23 bp, Artificial Sequence
  Description of Artificial Sequence: Synthetic oligonucleotide
  X-linked inhibitor of apoptosis (XIAP) siRNA
tacaagaagctatacgaatgggg

SEQ ID NO: 11548 - DNA, 23 bp, Artificial Sequence
  Description of Artificial Sequence: Synthetic oligonucleotide
  X-linked inhibitor of apoptosis (XIAP) siRNA
acaagaagctatacgaatggggt

SEQ ID NO: 11549 - DNA, 23 bp, Artificial Sequence
  Description of Artificial Sequence: Synthetic oligonucleotide
  X-linked inhibitor of apoptosis (XIAP) siRNA
caagaagctatacgaatggggtt

SEQ ID NO: 11550 - DNA, 23 bp, Artificial Sequence
  Description of Artificial Sequence: Synthetic oligonucleotide
  X-linked inhibitor of apoptosis (XIAP) siRNA
aagaagctatacgaatggggttc

SEQ ID NO: 11551 - DNA, 23 bp, Artificial Sequence
  Description of Artificial Sequence: Synthetic oligonucleotide
  X-linked inhibitor of apoptosis (XIAP) siRNA
agaagctatacgaatggggttca

SEQ ID NO: 11552 - DNA, 23 bp, Artificial Sequence
  Description of Artificial Sequence: Synthetic oligonucleotide
  X-linked inhibitor of apoptosis (XIAP) siRNA
gaagctatacgaatggggttcag

SEQ ID NO: 11553 - DNA, 23 bp, Artificial Sequence
  Description of Artificial Sequence: Synthetic oligonucleotide
  X-linked inhibitor of apoptosis (XIAP) siRNA
aagctatacgaatggggttcagt

SEQ ID NO: 11554 - DNA, 23 bp, Artificial Sequence
  Description of Artificial Sequence: Synthetic oligonucleotide
  X-linked inhibitor of apoptosis (XIAP) siRNA
agctatacgaatggggttcagtt

SEQ ID NO: 11555 - DNA, 23 bp, Artificial Sequence
  Description of Artificial Sequence: Synthetic oligonucleotide
  X-linked inhibitor of apoptosis (XIAP) siRNA
gctatacgaatggggttcagttt

SEQ ID NO: 11556 - DNA, 23 bp, Artificial Sequence
  Description of Artificial Sequence: Synthetic oligonucleotide
  X-linked inhibitor of apoptosis (XIAP) siRNA
ctatacgaatggggttcagtttc

SEQ ID NO: 11557 - DNA, 23 bp, Artificial Sequence
  Description of Artificial Sequence: Synthetic oligonucleotide
  X-linked inhibitor of apoptosis (XIAP) siRNA
tatacgaatggggttcagtttca

SEQ ID NO: 11558 - DNA, 23 bp, Artificial Sequence
  Description of Artificial Sequence: Synthetic oligonucleotide
  X-linked inhibitor of apoptosis (XIAP) siRNA
atacgaatggggttcagtttcaa

SEQ ID NO: 11559 - DNA, 23 bp, Artificial Sequence
  Description of Artificial Sequence: Synthetic oligonucleotide
  X-linked inhibitor of apoptosis (XIAP) siRNA
tacgaatggggttcagtttcaag

SEQ ID NO: 11560 - DNA, 23 bp, Artificial Sequence
  Description of Artificial Sequence: Synthetic oligonucleotide
  X-linked inhibitor of apoptosis (XIAP) siRNA
acgaatggggttcagtttcaagg

SEQ ID NO: 11561 - DNA, 23 bp, Artificial Sequence
  Description of Artificial Sequence: Synthetic oligonucleotide
  X-linked inhibitor of apoptosis (XIAP) siRNA
cgaatggggttcagtttcaagga

SEQ ID NO: 11562 - DNA, 23 bp, Artificial Sequence
  Description of Artificial Sequence: Synthetic oligonucleotide
  X-linked inhibitor of apoptosis (XIAP) siRNA
gaatggggttcagtttcaaggac

SEQ ID NO: 11563 - DNA, 23 bp, Artificial Sequence
  Description of Artificial Sequence: Synthetic oligonucleotide
  X-linked inhibitor of apoptosis (XIAP) siRNA
aatggggttcagtttcaaggaca

SEQ ID NO: 11564 - DNA, 23 bp, Artificial Sequence
  Description of Artificial Sequence: Synthetic oligonucleotide
  X-linked inhibitor of apoptosis (XIAP) siRNA
atggggttcagtttcaaggacat

SEQ ID NO: 11565 - DNA, 23 bp, Artificial Sequence
  Description of Artificial Sequence: Synthetic oligonucleotide
  X-linked inhibitor of apoptosis (XIAP) siRNA
tggggttcagtttcaaggacatt

SEQ ID NO: 11566 - DNA, 23 bp, Artificial Sequence
  Description of Artificial Sequence: Synthetic oligonucleotide
  X-linked inhibitor of apoptosis (XIAP) siRNA
ggggttcagtttcaaggacatta

SEQ ID NO: 11567 - DNA, 23 bp, Artificial Sequence
  Description of Artificial Sequence: Synthetic oligonucleotide
  X-linked inhibitor of apoptosis (XIAP) siRNA
gggttcagtttcaaggacattaa

SEQ ID NO: 11568 - DNA, 23 bp, Artificial Sequence
  Description of Artificial Sequence: Synthetic oligonucleotide
  X-linked inhibitor of apoptosis (XIAP) siRNA
ggttcagtttcaaggacattaag

SEQ ID NO: 11569 - DNA, 23 bp, Artificial Sequence
  Description of Artificial Sequence: Synthetic oligonucleotide
  X-linked inhibitor of apoptosis (XIAP) siRNA
gttcagtttcaaggacattaaga

SEQ ID NO: 11570 - DNA, 23 bp, Artificial Sequence
  Description of Artificial Sequence: Synthetic oligonucleotide
  X-linked inhibitor of apoptosis (XIAP) siRNA
ttcagtttcaaggacattaagaa

SEQ ID NO: 11571 - DNA, 23 bp, Artificial Sequence
  Description of Artificial Sequence: Synthetic oligonucleotide
  X-linked inhibitor of apoptosis (XIAP) siRNA
tcagtttcaaggacattaagaaa

SEQ ID NO: 11572 - DNA, 23 bp, Artificial Sequence
  Description of Artificial Sequence: Synthetic oligonucleotide
  X-linked inhibitor of apoptosis (XIAP) siRNA
cagtttcaaggacattaagaaaa

SEQ ID NO: 11573 - DNA, 23 bp, Artificial Sequence
  Description of Artificial Sequence: Synthetic oligonucleotide
  X-linked inhibitor of apoptosis (XIAP) siRNA
agtttcaaggacattaagaaaat

SEQ ID NO: 11574 - DNA, 23 bp, Artificial Sequence
  Description of Artificial Sequence: Synthetic oligonucleotide
  X-linked inhibitor of apoptosis (XIAP) siRNA
gtttcaaggacattaagaaaata

SEQ ID NO: 11575 - DNA, 23 bp, Artificial Sequence
  Description of Artificial Sequence: Synthetic oligonucleotide
  X-linked inhibitor of apoptosis (XIAP) siRNA
tttcaaggacattaagaaaataa

SEQ ID NO: 11576 - DNA, 23 bp, Artificial Sequence
  Description of Artificial Sequence: Synthetic oligonucleotide
  X-linked inhibitor of apoptosis (XIAP) siRNA
ttcaaggacattaagaaaataat

SEQ ID NO: 11577 - DNA, 23 bp, Artificial Sequence
  Description of Artificial Sequence: Synthetic oligonucleotide
  X-linked inhibitor of apoptosis (XIAP) siRNA
tcaaggacattaagaaaataatg

SEQ ID NO: 11578 - DNA, 23 bp, Artificial Sequence
  Description of Artificial Sequence: Synthetic oligonucleotide
  X-linked inhibitor of apoptosis (XIAP) siRNA
caaggacattaagaaaataatgg

SEQ ID NO: 11579 - DNA, 23 bp, Artificial Sequence
  Description of Artificial Sequence: Synthetic oligonucleotide
  X-linked inhibitor of apoptosis (XIAP) siRNA
aaggacattaagaaaataatgga

SEQ ID NO: 11580 - DNA, 23 bp, Artificial Sequence
  Description of Artificial Sequence: Synthetic oligonucleotide
  X-linked inhibitor of apoptosis (XIAP) siRNA
aggacattaagaaaataatggag

SEQ ID NO: 11581 - DNA, 23 bp, Artificial Sequence
  Description of Artificial Sequence: Synthetic oligonucleotide
  X-linked inhibitor of apoptosis (XIAP) siRNA
ggacattaagaaaataatggagg

SEQ ID NO: 11582 - DNA, 23 bp, Artificial Sequence
  Description of Artificial Sequence: Synthetic oligonucleotide
  X-linked inhibitor of apoptosis (XIAP) siRNA
gacattaagaaaataatggagga

SEQ ID NO: 11583 - DNA, 23 bp, Artificial Sequence
  Description of Artificial Sequence: Synthetic oligonucleotide
  X-linked inhibitor of apoptosis (XIAP) siRNA
acattaagaaaataatggaggaa

SEQ ID NO: 11584 - DNA, 23 bp, Artificial Sequence
  Description of Artificial Sequence: Synthetic oligonucleotide
  X-linked inhibitor of apoptosis (XIAP) siRNA
cattaagaaaataatggaggaaa

SEQ ID NO: 11585 - DNA, 23 bp, Artificial Sequence
  Description of Artificial Sequence: Synthetic oligonucleotide
  X-linked inhibitor of apoptosis (XIAP) siRNA
attaagaaaataatggaggaaaa

SEQ ID NO: 11586 - DNA, 23 bp, Artificial Sequence
  Description of Artificial Sequence: Synthetic oligonucleotide
  X-linked inhibitor of apoptosis (XIAP) siRNA
ttaagaaaataatggaggaaaaa

SEQ ID NO: 11587 - DNA, 23 bp, Artificial Sequence
  Description of Artificial Sequence: Synthetic oligonucleotide
  X-linked inhibitor of apoptosis (XIAP) siRNA
taagaaaataatggaggaaaaaa

SEQ ID NO: 11588 - DNA, 23 bp, Artificial Sequence
  Description of Artificial Sequence: Synthetic oligonucleotide
  X-linked inhibitor of apoptosis (XIAP) siRNA
aagaaaataatggaggaaaaaat

SEQ ID NO: 11589 - DNA, 23 bp, Artificial Sequence
  Description of Artificial Sequence: Synthetic oligonucleotide
  X-linked inhibitor of apoptosis (XIAP) siRNA
agaaaataatggaggaaaaaatt

SEQ ID NO: 11590 - DNA, 23 bp, Artificial Sequence
  Description of Artificial Sequence: Synthetic oligonucleotide
  X-linked inhibitor of apoptosis (XIAP) siRNA
gaaaataatggaggaaaaaattc

SEQ ID NO: 11591 - DNA, 23 bp, Artificial Sequence
  Description of Artificial Sequence: Synthetic oligonucleotide
  X-linked inhibitor of apoptosis (XIAP) siRNA
aaaataatggaggaaaaaattca

SEQ ID NO: 11592 - DNA, 23 bp, Artificial Sequence
  Description of Artificial Sequence: Synthetic oligonucleotide
  X-linked inhibitor of apoptosis (XIAP) siRNA
aaataatggaggaaaaaattcag

SEQ ID NO: 11593 - DNA, 23 bp, Artificial Sequence
  Description of Artificial Sequence: Synthetic oligonucleotide
  X-linked inhibitor of apoptosis (XIAP) siRNA
aataatggaggaaaaaattcaga

SEQ ID NO: 11594 - DNA, 23 bp, Artificial Sequence
  Description of Artificial Sequence: Synthetic oligonucleotide
  X-linked inhibitor of apoptosis (XIAP) siRNA
ataatggaggaaaaaattcagat

SEQ ID NO: 11595 - DNA, 23 bp, Artificial Sequence
  Description of Artificial Sequence: Synthetic oligonucleotide
  X-linked inhibitor of apoptosis (XIAP) siRNA
taatggaggaaaaaattcagata

SEQ ID NO: 11596 - DNA, 23 bp, Artificial Sequence
  Description of Artificial Sequence: Synthetic oligonucleotide
  X-linked inhibitor of apoptosis (XIAP) siRNA
aatggaggaaaaaattcagatat

SEQ ID NO: 11597 - DNA, 23 bp, Artificial Sequence
  Description of Artificial Sequence: Synthetic oligonucleotide
  X-linked inhibitor of apoptosis (XIAP) siRNA
atggaggaaaaaattcagatatc

SEQ ID NO: 11598 - DNA, 23 bp, Artificial Sequence
  Description of Artificial Sequence: Synthetic oligonucleotide
  X-linked inhibitor of apoptosis (XIAP) siRNA
tggaggaaaaaattcagatatct

SEQ ID NO: 11599 - DNA, 23 bp, Artificial Sequence
  Description of Artificial Sequence: Synthetic oligonucleotide
  X-linked inhibitor of apoptosis (XIAP) siRNA
ggaggaaaaaattcagatatctg

SEQ ID NO: 11600 - DNA, 23 bp, Artificial Sequence
  Description of Artificial Sequence: Synthetic oligonucleotide
  X-linked inhibitor of apoptosis (XIAP) siRNA
gaggaaaaaattcagatatctgg

SEQ ID NO: 11601 - DNA, 23 bp, Artificial Sequence
  Description of Artificial Sequence: Synthetic oligonucleotide
  X-linked inhibitor of apoptosis (XIAP) siRNA
aggaaaaaattcagatatctggg

SEQ ID NO: 11602 - DNA, 23 bp, Artificial Sequence
  Description of Artificial Sequence: Synthetic oligonucleotide
  X-linked inhibitor of apoptosis (XIAP) siRNA
ggaaaaaattcagatatctggga

SEQ ID NO: 11603 - DNA, 23 bp, Artificial Sequence
  Description of Artificial Sequence: Synthetic oligonucleotide
  X-linked inhibitor of apoptosis (XIAP) siRNA
gaaaaaattcagatatctgggag

SEQ ID NO: 11604 - DNA, 23 bp, Artificial Sequence
  Description of Artificial Sequence: Synthetic oligonucleotide
  X-linked inhibitor of apoptosis (XIAP) siRNA
aaaaaattcagatatctgggagc

SEQ ID NO: 11605 - DNA, 23 bp, Artificial Sequence
  Description of Artificial Sequence: Synthetic oligonucleotide
  X-linked inhibitor of apoptosis (XIAP) siRNA
aaaaattcagatatctgggagca

SEQ ID NO: 11606 - DNA, 23 bp, Artificial Sequence
  Description of Artificial Sequence: Synthetic oligonucleotide
  X-linked inhibitor of apoptosis (XIAP) siRNA
aaaattcagatatctgggagcaa

SEQ ID NO: 11607 - DNA, 23 bp, Artificial Sequence
  Description of Artificial Sequence: Synthetic oligonucleotide
  X-linked inhibitor of apoptosis (XIAP) siRNA
aaattcagatatctgggagcaac

SEQ ID NO: 11608 - DNA, 23 bp, Artificial Sequence
  Description of Artificial Sequence: Synthetic oligonucleotide
  X-linked inhibitor of apoptosis (XIAP) siRNA
aattcagatatctgggagcaact

SEQ ID NO: 11609 - DNA, 23 bp, Artificial Sequence
  Description of Artificial Sequence: Synthetic oligonucleotide
  X-linked inhibitor of apoptosis (XIAP) siRNA
attcagatatctgggagcaacta

SEQ ID NO: 11610 - DNA, 23 bp, Artificial Sequence
  Description of Artificial Sequence: Synthetic oligonucleotide
  X-linked inhibitor of apoptosis (XIAP) siRNA
ttcagatatctgggagcaactat

SEQ ID NO: 11611 - DNA, 23 bp, Artificial Sequence
  Description of Artificial Sequence: Synthetic oligonucleotide
  X-linked inhibitor of apoptosis (XIAP) siRNA
tcagatatctgggagcaactata

SEQ ID NO: 11612 - DNA, 23 bp, Artificial Sequence
  Description of Artificial Sequence: Synthetic oligonucleotide
  X-linked inhibitor of apoptosis (XIAP) siRNA
cagatatctgggagcaactataa

SEQ ID NO: 11613 - DNA, 23 bp, Artificial Sequence
  Description of Artificial Sequence: Synthetic oligonucleotide
  X-linked inhibitor of apoptosis (XIAP) siRNA
agatatctgggagcaactataaa

SEQ ID NO: 11614 - DNA, 23 bp, Artificial Sequence
  Description of Artificial Sequence: Synthetic oligonucleotide
  X-linked inhibitor of apoptosis (XIAP) siRNA
gatatctgggagcaactataaat

SEQ ID NO: 11615 - DNA, 23 bp, Artificial Sequence
  Description of Artificial Sequence: Synthetic oligonucleotide
  X-linked inhibitor of apoptosis (XIAP) siRNA
atatctgggagcaactataaatc

SEQ ID NO: 11616 - DNA, 23 bp, Artificial Sequence
  Description of Artificial Sequence: Synthetic oligonucleotide
  X-linked inhibitor of apoptosis (XIAP) siRNA
tatctgggagcaactataaatca

SEQ ID NO: 11617 - DNA, 23 bp, Artificial Sequence
  Description of Artificial Sequence: Synthetic oligonucleotide
  X-linked inhibitor of apoptosis (XIAP) siRNA
atctgggagcaactataaatcac

SEQ ID NO: 11618 - DNA, 23 bp, Artificial Sequence
  Description of Artificial Sequence: Synthetic oligonucleotide
  X-linked inhibitor of apoptosis (XIAP) siRNA
tctgggagcaactataaatcact

SEQ ID NO: 11619 - DNA, 23 bp, Artificial Sequence
  Description of Artificial Sequence: Synthetic oligonucleotide
  X-linked inhibitor of apoptosis (XIAP) siRNA
ctgggagcaactataaatcactt

SEQ ID NO: 11620 - DNA, 23 bp, Artificial Sequence
  Description of Artificial Sequence: Synthetic oligonucleotide
  X-linked inhibitor of apoptosis (XIAP) siRNA
tgggagcaactataaatcacttg

SEQ ID NO: 11621 - DNA, 23 bp, Artificial Sequence
  Description of Artificial Sequence: Synthetic oligonucleotide
  X-linked inhibitor of apoptosis (XIAP) siRNA
gggagcaactataaatcacttga

SEQ ID NO: 11622 - DNA, 23 bp, Artificial Sequence
  Description of Artificial Sequence: Synthetic oligonucleotide
  X-linked inhibitor of apoptosis (XIAP) siRNA
ggagcaactataaatcacttgag

SEQ ID NO: 11623 - DNA, 23 bp, Artificial Sequence
  Description of Artificial Sequence: Synthetic oligonucleotide
  X-linked inhibitor of apoptosis (XIAP) siRNA
gagcaactataaatcacttgagg

SEQ ID NO: 11624 - DNA, 23 bp, Artificial Sequence
  Description of Artificial Sequence: Synthetic oligonucleotide
  X-linked inhibitor of apoptosis (XIAP) siRNA
agcaactataaatcacttgaggt

SEQ ID NO: 11625 - DNA, 23 bp, Artificial Sequence
  Description of Artificial Sequence: Synthetic oligonucleotide
  X-linked inhibitor of apoptosis (XIAP) siRNA
gcaactataaatcacttgaggtt

SEQ ID NO: 11626 - DNA, 23 bp, Artificial Sequence
  Description of Artificial Sequence: Synthetic oligonucleotide
  X-linked inhibitor of apoptosis (XIAP) siRNA
caactataaatcacttgaggttc

SEQ ID NO: 11627 - DNA, 23 bp, Artificial Sequence
  Description of Artificial Sequence: Synthetic oligonucleotide
  X-linked inhibitor of apoptosis (XIAP) siRNA
aactataaatcacttgaggttct

SEQ ID NO: 11628 - DNA, 23 bp, Artificial Sequence
  Description of Artificial Sequence: Synthetic oligonucleotide
  X-linked inhibitor of apoptosis (XIAP) siRNA
actataaatcacttgaggttctg

SEQ ID NO: 11629 - DNA, 23 bp, Artificial Sequence
  Description of Artificial Sequence: Synthetic oligonucleotide
  X-linked inhibitor of apoptosis (XIAP) siRNA
ctataaatcacttgaggttctgg

SEQ ID NO: 11630 - DNA, 23 bp, Artificial Sequence
  Description of Artificial Sequence: Synthetic oligonucleotide
  X-linked inhibitor of apoptosis (XIAP) siRNA
tataaatcacttgaggttctggt

SEQ ID NO: 11631 - DNA, 23 bp, Artificial Sequence
  Description of Artificial Sequence: Synthetic oligonucleotide
  X-linked inhibitor of apoptosis (XIAP) siRNA
ataaatcacttgaggttctggtt

SEQ ID NO: 11632 - DNA, 23 bp, Artificial Sequence
  Description of Artificial Sequence: Synthetic oligonucleotide
  X-linked inhibitor of apoptosis (XIAP) siRNA
taaatcacttgaggttctggttg

SEQ ID NO: 11633 - DNA, 23 bp, Artificial Sequence
  Description of Artificial Sequence: Synthetic oligonucleotide
  X-linked inhibitor of apoptosis (XIAP) siRNA
aaatcacttgaggttctggttgc

SEQ ID NO: 11634 - DNA, 23 bp, Artificial Sequence
  Description of Artificial Sequence: Synthetic oligonucleotide
  X-linked inhibitor of apoptosis (XIAP) siRNA
aatcacttgaggttctggttgca

SEQ ID NO: 11635 - DNA, 23 bp, Artificial Sequence
  Description of Artificial Sequence: Synthetic oligonucleotide
  X-linked inhibitor of apoptosis (XIAP) siRNA
atcacttgaggttctggttgcag

SEQ ID NO: 11636 - DNA, 23 bp, Artificial Sequence
  Description of Artificial Sequence: Synthetic oligonucleotide
  X-linked inhibitor of apoptosis (XIAP) siRNA
tcacttgaggttctggttgcaga

SEQ ID NO: 11637 - DNA, 23 bp, Artificial Sequence
  Description of Artificial Sequence: Synthetic oligonucleotide
  X-linked inhibitor of apoptosis (XIAP) siRNA
cacttgaggttctggttgcagat

SEQ ID NO: 11638 - DNA, 23 bp, Artificial Sequence
  Description of Artificial Sequence: Synthetic oligonucleotide
  X-linked inhibitor of apoptosis (XIAP) siRNA
acttgaggttctggttgcagatc

SEQ ID NO: 11639 - DNA, 23 bp, Artificial Sequence
  Description of Artificial Sequence: Synthetic oligonucleotide
  X-linked inhibitor of apoptosis (XIAP) siRNA
cttgaggttctggttgcagatct

SEQ ID NO: 11640 - DNA, 23 bp, Artificial Sequence
  Description of Artificial Sequence: Synthetic oligonucleotide
  X-linked inhibitor of apoptosis (XIAP) siRNA
ttgaggttctggttgcagatcta

SEQ ID NO: 11641 - DNA, 23 bp, Artificial Sequence
  Description of Artificial Sequence: Synthetic oligonucleotide
  X-linked inhibitor of apoptosis (XIAP) siRNA
tgaggttctggttgcagatctag

SEQ ID NO: 11642 - DNA, 23 bp, Artificial Sequence
  Description of Artificial Sequence: Synthetic oligonucleotide
  X-linked inhibitor of apoptosis (XIAP) siRNA
gaggttctggttgcagatctagt

SEQ ID NO: 11643 - DNA, 23 bp, Artificial Sequence
  Description of Artificial Sequence: Synthetic oligonucleotide
  X-linked inhibitor of apoptosis (XIAP) siRNA
aggttctggttgcagatctagtg

SEQ ID NO: 11644 - DNA, 23 bp, Artificial Sequence
  Description of Artificial Sequence: Synthetic oligonucleotide
  X-linked inhibitor of apoptosis (XIAP) siRNA
ggttctggttgcagatctagtga

SEQ ID NO: 11645 - DNA, 23 bp, Artificial Sequence
  Description of Artificial Sequence: Synthetic oligonucleotide
  X-linked inhibitor of apoptosis (XIAP) siRNA
gttctggttgcagatctagtgaa

SEQ ID NO: 11646 - DNA, 23 bp, Artificial Sequence
  Description of Artificial Sequence: Synthetic oligonucleotide
  X-linked inhibitor of apoptosis (XIAP) siRNA
ttctggttgcagatctagtgaat

SEQ ID NO: 11647 - DNA, 23 bp, Artificial Sequence
  Description of Artificial Sequence: Synthetic oligonucleotide
  X-linked inhibitor of apoptosis (XIAP) siRNA
tctggttgcagatctagtgaatg

SEQ ID NO: 11648 - DNA, 23 bp, Artificial Sequence
  Description of Artificial Sequence: Synthetic oligonucleotide
  X-linked inhibitor of apoptosis (XIAP) siRNA
ctggttgcagatctagtgaatgc

SEQ ID NO: 11649 - DNA, 23 bp, Artificial Sequence
  Description of Artificial Sequence: Synthetic oligonucleotide
  X-linked inhibitor of apoptosis (XIAP) siRNA
tggttgcagatctagtgaatgct

SEQ ID NO: 11650 - DNA, 23 bp, Artificial Sequence
  Description of Artificial Sequence: Synthetic oligonucleotide
  X-linked inhibitor of apoptosis (XIAP) siRNA
ggttgcagatctagtgaatgctc

SEQ ID NO: 11651 - DNA, 23 bp, Artificial Sequence
  Description of Artificial Sequence: Synthetic oligonucleotide
  X-linked inhibitor of apoptosis (XIAP) siRNA
gttgcagatctagtgaatgctca

SEQ ID NO: 11652 - DNA, 23 bp, Artificial Sequence
  Description of Artificial Sequence: Synthetic oligonucleotide
  X-linked inhibitor of apoptosis (XIAP) siRNA
ttgcagatctagtgaatgctcag

SEQ ID NO: 11653 - DNA, 23 bp, Artificial Sequence
  Description of Artificial Sequence: Synthetic oligonucleotide
  X-linked inhibitor of apoptosis (XIAP) siRNA
tgcagatctagtgaatgctcaga

SEQ ID NO: 11654 - DNA, 23 bp, Artificial Sequence
  Description of Artificial Sequence: Synthetic oligonucleotide
  X-linked inhibitor of apoptosis (XIAP) siRNA
gcagatctagtgaatgctcagaa

SEQ ID NO: 11655 - DNA, 23 bp, Artificial Sequence
  Description of Artificial Sequence: Synthetic oligonucleotide
  X-linked inhibitor of apoptosis (XIAP) siRNA
cagatctagtgaatgctcagaaa

SEQ ID NO: 11656 - DNA, 23 bp, Artificial Sequence
  Description of Artificial Sequence: Synthetic oligonucleotide
  X-linked inhibitor of apoptosis (XIAP) siRNA
agatctagtgaatgctcagaaag

SEQ ID NO: 11657 - DNA, 23 bp, Artificial Sequence
  Description of Artificial Sequence: Synthetic oligonucleotide
  X-linked inhibitor of apoptosis (XIAP) siRNA
gatctagtgaatgctcagaaaga

SEQ ID NO: 11658 - DNA, 23 bp, Artificial Sequence
  Description of Artificial Sequence: Synthetic oligonucleotide
  X-linked inhibitor of apoptosis (XIAP) siRNA
atctagtgaatgctcagaaagac

SEQ ID NO: 11659 - DNA, 23 bp, Artificial Sequence
  Description of Artificial Sequence: Synthetic oligonucleotide
  X-linked inhibitor of apoptosis (XIAP) siRNA
tctagtgaatgctcagaaagaca

SEQ ID NO: 11660 - DNA, 23 bp, Artificial Sequence
  Description of Artificial Sequence: Synthetic oligonucleotide
  X-linked inhibitor of apoptosis (XIAP) siRNA
ctagtgaatgctcagaaagacag

SEQ ID NO: 11661 - DNA, 23 bp, Artificial Sequence
  Description of Artificial Sequence: Synthetic oligonucleotide
  X-linked inhibitor of apoptosis (XIAP) siRNA
tagtgaatgctcagaaagacagt

SEQ ID NO: 11662 - DNA, 23 bp, Artificial Sequence
  Description of Artificial Sequence: Synthetic oligonucleotide
  X-linked inhibitor of apoptosis (XIAP) siRNA
agtgaatgctcagaaagacagta

SEQ ID NO: 11663 - DNA, 23 bp, Artificial Sequence
  Description of Artificial Sequence: Synthetic oligonucleotide
  X-linked inhibitor of apoptosis (XIAP) siRNA
gtgaatgctcagaaagacagtat

SEQ ID NO: 11664 - DNA, 23 bp, Artificial Sequence
  Description of Artificial Sequence: Synthetic oligonucleotide
  X-linked inhibitor of apoptosis (XIAP) siRNA
tgaatgctcagaaagacagtatg

SEQ ID NO: 11665 - DNA, 23 bp, Artificial Sequence
  Description of Artificial Sequence: Synthetic oligonucleotide
  X-linked inhibitor of apoptosis (XIAP) siRNA
gaatgctcagaaagacagtatgc

SEQ ID NO: 11666 - DNA, 23 bp, Artificial Sequence
  Description of Artificial Sequence: Synthetic oligonucleotide
  X-linked inhibitor of apoptosis (XIAP) siRNA
aatgctcagaaagacagtatgca

SEQ ID NO: 11667 - DNA, 23 bp, Artificial Sequence
  Description of Artificial Sequence: Synthetic oligonucleotide
  X-linked inhibitor of apoptosis (XIAP) siRNA
atgctcagaaagacagtatgcaa

SEQ ID NO: 11668 - DNA, 23 bp, Artificial Sequence
  Description of Artificial Sequence: Synthetic oligonucleotide
  X-linked inhibitor of apoptosis (XIAP) siRNA
tgctcagaaagacagtatgcaag

SEQ ID NO: 11669 - DNA, 23 bp, Artificial Sequence
  Description of Artificial Sequence: Synthetic oligonucleotide
  X-linked inhibitor of apoptosis (XIAP) siRNA
gctcagaaagacagtatgcaaga

SEQ ID NO: 11670 - DNA, 23 bp, Artificial Sequence
  Description of Artificial Sequence: Synthetic oligonucleotide
  X-linked inhibitor of apoptosis (XIAP) siRNA
ctcagaaagacagtatgcaagat

SEQ ID NO: 11671 - DNA, 23 bp, Artificial Sequence
  Description of Artificial Sequence: Synthetic oligonucleotide
  X-linked inhibitor of apoptosis (XIAP) siRNA
tcagaaagacagtatgcaagatg

SEQ ID NO: 11672 - DNA, 23 bp, Artificial Sequence
  Description of Artificial Sequence: Synthetic oligonucleotide
  X-linked inhibitor of apoptosis (XIAP) siRNA
cagaaagacagtatgcaagatga

SEQ ID NO: 11673 - DNA, 23 bp, Artificial Sequence
  Description of Artificial Sequence: Synthetic oligonucleotide
  X-linked inhibitor of apoptosis (XIAP) siRNA
agaaagacagtatgcaagatgag

SEQ ID NO: 11674 - DNA, 23 bp, Artificial Sequence
  Description of Artificial Sequence: Synthetic oligonucleotide
  X-linked inhibitor of apoptosis (XIAP) siRNA
gaaagacagtatgcaagatgagt

SEQ ID NO: 11675 - DNA, 23 bp, Artificial Sequence
  Description of Artificial Sequence: Synthetic oligonucleotide
  X-linked inhibitor of apoptosis (XIAP) siRNA
aaagacagtatgcaagatgagtc

SEQ ID NO: 11676 - DNA, 23 bp, Artificial Sequence
  Description of Artificial Sequence: Synthetic oligonucleotide
  X-linked inhibitor of apoptosis (XIAP) siRNA
aagacagtatgcaagatgagtca

SEQ ID NO: 11677 - DNA, 23 bp, Artificial Sequence
  Description of Artificial Sequence: Synthetic oligonucleotide
  X-linked inhibitor of apoptosis (XIAP) siRNA
agacagtatgcaagatgagtcaa

SEQ ID NO: 11678 - DNA, 23 bp, Artificial Sequence
  Description of Artificial Sequence: Synthetic oligonucleotide
  X-linked inhibitor of apoptosis (XIAP) siRNA
gacagtatgcaagatgagtcaag

SEQ ID NO: 11679 - DNA, 23 bp, Artificial Sequence
  Description of Artificial Sequence: Synthetic oligonucleotide
  X-linked inhibitor of apoptosis (XIAP) siRNA
acagtatgcaagatgagtcaagt

SEQ ID NO: 11680 - DNA, 23 bp, Artificial Sequence
  Description of Artificial Sequence: Synthetic oligonucleotide
  X-linked inhibitor of apoptosis (XIAP) siRNA
cagtatgcaagatgagtcaagtc

SEQ ID NO: 11681 - DNA, 23 bp, Artificial Sequence
  Description of Artificial Sequence: Synthetic oligonucleotide
  X-linked inhibitor of apoptosis (XIAP) siRNA
agtatgcaagatgagtcaagtca

SEQ ID NO: 11682 - DNA, 23 bp, Artificial Sequence
  Description of Artificial Sequence: Synthetic oligonucleotide
  X-linked inhibitor of apoptosis (XIAP) siRNA
gtatgcaagatgagtcaagtcag

SEQ ID NO: 11683 - DNA, 23 bp, Artificial Sequence
  Description of Artificial Sequence: Synthetic oligonucleotide
  X-linked inhibitor of apoptosis (XIAP) siRNA
tatgcaagatgagtcaagtcaga

SEQ ID NO: 11684 - DNA, 23 bp, Artificial Sequence
  Description of Artificial Sequence: Synthetic oligonucleotide
  X-linked inhibitor of apoptosis (XIAP) siRNA
atgcaagatgagtcaagtcagac

SEQ ID NO: 11685 - DNA, 23 bp, Artificial Sequence
  Description of Artificial Sequence: Synthetic oligonucleotide
  X-linked inhibitor of apoptosis (XIAP) siRNA
tgcaagatgagtcaagtcagact

SEQ ID NO: 11686 - DNA, 23 bp, Artificial Sequence
  Description of Artificial Sequence: Synthetic oligonucleotide
  X-linked inhibitor of apoptosis (XIAP) siRNA
gcaagatgagtcaagtcagactt

SEQ ID NO: 11687 - DNA, 23 bp, Artificial Sequence
  Description of Artificial Sequence: Synthetic oligonucleotide
  X-linked inhibitor of apoptosis (XIAP) siRNA
caagatgagtcaagtcagacttc

SEQ ID NO: 11688 - DNA, 23 bp, Artificial Sequence
  Description of Artificial Sequence: Synthetic oligonucleotide
  X-linked inhibitor of apoptosis (XIAP) siRNA
aagatgagtcaagtcagacttca

SEQ ID NO: 11689 - DNA, 23 bp, Artificial Sequence
  Description of Artificial Sequence: Synthetic oligonucleotide
  X-linked inhibitor of apoptosis (XIAP) siRNA
agatgagtcaagtcagacttcat

SEQ ID NO: 11690 - DNA, 23 bp, Artificial Sequence
  Description of Artificial Sequence: Synthetic oligonucleotide
  X-linked inhibitor of apoptosis (XIAP) siRNA
gatgagtcaagtcagacttcatt

SEQ ID NO: 11691 - DNA, 23 bp, Artificial Sequence
  Description of Artificial Sequence: Synthetic oligonucleotide
  X-linked inhibitor of apoptosis (XIAP) siRNA
atgagtcaagtcagacttcatta

SEQ ID NO: 11692 - DNA, 23 bp, Artificial Sequence
  Description of Artificial Sequence: Synthetic oligonucleotide
  X-linked inhibitor of apoptosis (XIAP) siRNA
tgagtcaagtcagacttcattac

SEQ ID NO: 11693 - DNA, 23 bp, Artificial Sequence
  Description of Artificial Sequence: Synthetic oligonucleotide
  X-linked inhibitor of apoptosis (XIAP) siRNA
gagtcaagtcagacttcattaca

SEQ ID NO: 11694 - DNA, 23 bp, Artificial Sequence
  Description of Artificial Sequence: Synthetic oligonucleotide
  X-linked inhibitor of apoptosis (XIAP) siRNA
agtcaagtcagacttcattacag

SEQ ID NO: 11695 - DNA, 23 bp, Artificial Sequence
  Description of Artificial Sequence: Synthetic oligonucleotide
  X-linked inhibitor of apoptosis (XIAP) siRNA
gtcaagtcagacttcattacaga

SEQ ID NO: 11696 - DNA, 23 bp, Artificial Sequence
  Description of Artificial Sequence: Synthetic oligonucleotide
  X-linked inhibitor of apoptosis (XIAP) siRNA
tcaagtcagacttcattacagaa

SEQ ID NO: 11697 - DNA, 23 bp, Artificial Sequence
  Description of Artificial Sequence: Synthetic oligonucleotide
  X-linked inhibitor of apoptosis (XIAP) siRNA
caagtcagacttcattacagaaa

SEQ ID NO: 11698 - DNA, 23 bp, Artificial Sequence
  Description of Artificial Sequence: Synthetic oligonucleotide
  X-linked inhibitor of apoptosis (XIAP) siRNA
aagtcagacttcattacagaaag

SEQ ID NO: 11699 - DNA, 23 bp, Artificial Sequence
  Description of Artificial Sequence: Synthetic oligonucleotide
  X-linked inhibitor of apoptosis (XIAP) siRNA
agtcagacttcattacagaaaga

SEQ ID NO: 11700 - DNA, 23 bp, Artificial Sequence
  Description of Artificial Sequence: Synthetic oligonucleotide
  X-linked inhibitor of apoptosis (XIAP) siRNA
gtcagacttcattacagaaagag

SEQ ID NO: 11701 - DNA, 23 bp, Artificial Sequence
  Description of Artificial Sequence: Synthetic oligonucleotide
  X-linked inhibitor of apoptosis (XIAP) siRNA
tcagacttcattacagaaagaga

SEQ ID NO: 11702 - DNA, 23 bp, Artificial Sequence
  Description of Artificial Sequence: Synthetic oligonucleotide
  X-linked inhibitor of apoptosis (XIAP) siRNA
cagacttcattacagaaagagat

SEQ ID NO: 11703 - DNA, 23 bp, Artificial Sequence
  Description of Artificial Sequence: Synthetic oligonucleotide
  X-linked inhibitor of apoptosis (XIAP) siRNA
agacttcattacagaaagagatt

SEQ ID NO: 11704 - DNA, 23 bp, Artificial Sequence
  Description of Artificial Sequence: Synthetic oligonucleotide
  X-linked inhibitor of apoptosis (XIAP) siRNA
gacttcattacagaaagagatta

SEQ ID NO: 11705 - DNA, 23 bp, Artificial Sequence
  Description of Artificial Sequence: Synthetic oligonucleotide
  X-linked inhibitor of apoptosis (XIAP) siRNA
acttcattacagaaagagattag

SEQ ID NO: 11706 - DNA, 23 bp, Artificial Sequence
  Description of Artificial Sequence: Synthetic oligonucleotide
  X-linked inhibitor of apoptosis (XIAP) siRNA
cttcattacagaaagagattagt

SEQ ID NO: 11707 - DNA, 23 bp, Artificial Sequence
  Description of Artificial Sequence: Synthetic oligonucleotide
  X-linked inhibitor of apoptosis (XIAP) siRNA
ttcattacagaaagagattagta

SEQ ID NO: 11708 - DNA, 23 bp, Artificial Sequence
  Description of Artificial Sequence: Synthetic oligonucleotide
  X-linked inhibitor of apoptosis (XIAP) siRNA
tcattacagaaagagattagtac

SEQ ID NO: 11709 - DNA, 23 bp, Artificial Sequence
  Description of Artificial Sequence: Synthetic oligonucleotide
  X-linked inhibitor of apoptosis (XIAP) siRNA
cattacagaaagagattagtact

SEQ ID NO: 11710 - DNA, 23 bp, Artificial Sequence
  Description of Artificial Sequence: Synthetic oligonucleotide
  X-linked inhibitor of apoptosis (XIAP) siRNA
attacagaaagagattagtactg

SEQ ID NO: 11711 - DNA, 23 bp, Artificial Sequence
  Description of Artificial Sequence: Synthetic oligonucleotide
  X-linked inhibitor of apoptosis (XIAP) siRNA
ttacagaaagagattagtactga

SEQ ID NO: 11712 - DNA, 23 bp, Artificial Sequence
  Description of Artificial Sequence: Synthetic oligonucleotide
  X-linked inhibitor of apoptosis (XIAP) siRNA
tacagaaagagattagtactgaa

SEQ ID NO: 11713 - DNA, 23 bp, Artificial Sequence
  Description of Artificial Sequence: Synthetic oligonucleotide
  X-linked inhibitor of apoptosis (XIAP) siRNA
acagaaagagattagtactgaag

SEQ ID NO: 11714 - DNA, 23 bp, Artificial Sequence
  Description of Artificial Sequence: Synthetic oligonucleotide
  X-linked inhibitor of apoptosis (XIAP) siRNA
cagaaagagattagtactgaaga

SEQ ID NO: 11715 - DNA, 23 bp, Artificial Sequence
  Description of Artificial Sequence: Synthetic oligonucleotide
  X-linked inhibitor of apoptosis (XIAP) siRNA
agaaagagattagtactgaagag

SEQ ID NO: 11716 - DNA, 23 bp, Artificial Sequence
  Description of Artificial Sequence: Synthetic oligonucleotide
  X-linked inhibitor of apoptosis (XIAP) siRNA
gaaagagattagtactgaagagc

SEQ ID NO: 11717 - DNA, 23 bp, Artificial Sequence
  Description of Artificial Sequence: Synthetic oligonucleotide
  X-linked inhibitor of apoptosis (XIAP) siRNA
aaagagattagtactgaagagca

SEQ ID NO: 11718 - DNA, 23 bp, Artificial Sequence
  Description of Artificial Sequence: Synthetic oligonucleotide
  X-linked inhibitor of apoptosis (XIAP) siRNA
aagagattagtactgaagagcag

SEQ ID NO: 11719 - DNA, 23 bp, Artificial Sequence
  Description of Artificial Sequence: Synthetic oligonucleotide
  X-linked inhibitor of apoptosis (XIAP) siRNA
agagattagtactgaagagcagc

SEQ ID NO: 11720 - DNA, 23 bp, Artificial Sequence
  Description of Artificial Sequence: Synthetic oligonucleotide
  X-linked inhibitor of apoptosis (XIAP) siRNA
gagattagtactgaagagcagct

SEQ ID NO: 11721 - DNA, 23 bp, Artificial Sequence
  Description of Artificial Sequence: Synthetic oligonucleotide
  X-linked inhibitor of apoptosis (XIAP) siRNA
agattagtactgaagagcagcta

SEQ ID NO: 11722 - DNA, 23 bp, Artificial Sequence
  Description of Artificial Sequence: Synthetic oligonucleotide
  X-linked inhibitor of apoptosis (XIAP) siRNA
gattagtactgaagagcagctaa

SEQ ID NO: 11723 - DNA, 23 bp, Artificial Sequence
  Description of Artificial Sequence: Synthetic oligonucleotide
  X-linked inhibitor of apoptosis (XIAP) siRNA
attagtactgaagagcagctaag

SEQ ID NO: 11724 - DNA, 23 bp, Artificial Sequence
  Description of Artificial Sequence: Synthetic oligonucleotide
  X-linked inhibitor of apoptosis (XIAP) siRNA
ttagtactgaagagcagctaagg

SEQ ID NO: 11725 - DNA, 23 bp, Artificial Sequence
  Description of Artificial Sequence: Synthetic oligonucleotide
  X-linked inhibitor of apoptosis (XIAP) siRNA
tagtactgaagagcagctaaggc

SEQ ID NO: 11726 - DNA, 23 bp, Artificial Sequence
  Description of Artificial Sequence: Synthetic oligonucleotide
  X-linked inhibitor of apoptosis (XIAP) siRNA
agtactgaagagcagctaaggcg

SEQ ID NO: 11727 - DNA, 23 bp, Artificial Sequence
  Description of Artificial Sequence: Synthetic oligonucleotide
  X-linked inhibitor of apoptosis (XIAP) siRNA
gtactgaagagcagctaaggcgc

SEQ ID NO: 11728 - DNA, 23 bp, Artificial Sequence
  Description of Artificial Sequence: Synthetic oligonucleotide
  X-linked inhibitor of apoptosis (XIAP) siRNA
tactgaagagcagctaaggcgcc

SEQ ID NO: 11729 - DNA, 23 bp, Artificial Sequence
  Description of Artificial Sequence: Synthetic oligonucleotide
  X-linked inhibitor of apoptosis (XIAP) siRNA
actgaagagcagctaaggcgcct

SEQ ID NO: 11730 - DNA, 23 bp, Artificial Sequence
  Description of Artificial Sequence: Synthetic oligonucleotide
  X-linked inhibitor of apoptosis (XIAP) siRNA
ctgaagagcagctaaggcgcctg

SEQ ID NO: 11731 - DNA, 23 bp, Artificial Sequence
  Description of Artificial Sequence: Synthetic oligonucleotide
  X-linked inhibitor of apoptosis (XIAP) siRNA
tgaagagcagctaaggcgcctgc

SEQ ID NO: 11732 - DNA, 23 bp, Artificial Sequence
  Description of Artificial Sequence: Synthetic oligonucleotide
  X-linked inhibitor of apoptosis (XIAP) siRNA
gaagagcagctaaggcgcctgca

SEQ ID NO: 11733 - DNA, 23 bp, Artificial Sequence
  Description of Artificial Sequence: Synthetic oligonucleotide
  X-linked inhibitor of apoptosis (XIAP) siRNA
aagagcagctaaggcgcctgcaa

SEQ ID NO: 11734 - DNA, 23 bp, Artificial Sequence
  Description of Artificial Sequence: Synthetic oligonucleotide
  X-linked inhibitor of apoptosis (XIAP) siRNA
agagcagctaaggcgcctgcaag

SEQ ID NO: 11735 - DNA, 23 bp, Artificial Sequence
  Description of Artificial Sequence: Synthetic oligonucleotide
  X-linked inhibitor of apoptosis (XIAP) siRNA
gagcagctaaggcgcctgcaaga

SEQ ID NO: 11736 - DNA, 23 bp, Artificial Sequence
  Description of Artificial Sequence: Synthetic oligonucleotide
  X-linked inhibitor of apoptosis (XIAP) siRNA
agcagctaaggcgcctgcaagag

SEQ ID NO: 11737 - DNA, 23 bp, Artificial Sequence
  Description of Artificial Sequence: Synthetic oligonucleotide
  X-linked inhibitor of apoptosis (XIAP) siRNA
gcagctaaggcgcctgcaagagg

SEQ ID NO: 11738 - DNA, 23 bp, Artificial Sequence
  Description of Artificial Sequence: Synthetic oligonucleotide
  X-linked inhibitor of apoptosis (XIAP) siRNA
cagctaaggcgcctgcaagagga

SEQ ID NO: 11739 - DNA, 23 bp, Artificial Sequence
  Description of Artificial Sequence: Synthetic oligonucleotide
  X-linked inhibitor of apoptosis (XIAP) siRNA
agctaaggcgcctgcaagaggag

SEQ ID NO: 11740 - DNA, 23 bp, Artificial Sequence
  Description of Artificial Sequence: Synthetic oligonucleotide
  X-linked inhibitor of apoptosis (XIAP) siRNA
gctaaggcgcctgcaagaggaga

SEQ ID NO: 11741 - DNA, 23 bp, Artificial Sequence
  Description of Artificial Sequence: Synthetic oligonucleotide
  X-linked inhibitor of apoptosis (XIAP) siRNA
ctaaggcgcctgcaagaggagaa

SEQ ID NO: 11742 - DNA, 23 bp, Artificial Sequence
  Description of Artificial Sequence: Synthetic oligonucleotide
  X-linked inhibitor of apoptosis (XIAP) siRNA
taaggcgcctgcaagaggagaag

SEQ ID NO: 11743 - DNA, 23 bp, Artificial Sequence
  Description of Artificial Sequence: Synthetic oligonucleotide
  X-linked inhibitor of apoptosis (XIAP) siRNA
aaggcgcctgcaagaggagaagc

SEQ ID NO: 11744 - DNA, 23 bp, Artificial Sequence
  Description of Artificial Sequence: Synthetic oligonucleotide
  X-linked inhibitor of apoptosis (XIAP) siRNA
aggcgcctgcaagaggagaagct

SEQ ID NO: 11745 - DNA, 23 bp, Artificial Sequence
  Description of Artificial Sequence: Synthetic oligonucleotide
  X-linked inhibitor of apoptosis (XIAP) siRNA
ggcgcctgcaagaggagaagctt

SEQ ID NO: 11746 - DNA, 23 bp, Artificial Sequence
  Description of Artificial Sequence: Synthetic oligonucleotide
  X-linked inhibitor of apoptosis (XIAP) siRNA
gcgcctgcaagaggagaagcttt

SEQ ID NO: 11747 - DNA, 23 bp, Artificial Sequence
  Description of Artificial Sequence: Synthetic oligonucleotide
  X-linked inhibitor of apoptosis (XIAP) siRNA
cgcctgcaagaggagaagctttg

SEQ ID NO: 11748 - DNA, 23 bp, Artificial Sequence
  Description of Artificial Sequence: Synthetic oligonucleotide
  X-linked inhibitor of apoptosis (XIAP) siRNA
gcctgcaagaggagaagctttgc

SEQ ID NO: 11749 - DNA, 23 bp, Artificial Sequence
  Description of Artificial Sequence: Synthetic oligonucleotide
  X-linked inhibitor of apoptosis (XIAP) siRNA
cctgcaagaggagaagctttgca

SEQ ID NO: 11750 - DNA, 23 bp, Artificial Sequence
  Description of Artificial Sequence: Synthetic oligonucleotide
  X-linked inhibitor of apoptosis (XIAP) siRNA
ctgcaagaggagaagctttgcaa

SEQ ID NO: 11751 - DNA, 23 bp, Artificial Sequence
  Description of Artificial Sequence: Synthetic oligonucleotide
  X-linked inhibitor of apoptosis (XIAP) siRNA
tgcaagaggagaagctttgcaaa

SEQ ID NO: 11752 - DNA, 23 bp, Artificial Sequence
  Description of Artificial Sequence: Synthetic oligonucleotide
  X-linked inhibitor of apoptosis (XIAP) siRNA
gcaagaggagaagctttgcaaaa

SEQ ID NO: 11753 - DNA, 23 bp, Artificial Sequence
  Description of Artificial Sequence: Synthetic oligonucleotide
  X-linked inhibitor of apoptosis (XIAP) siRNA
caagaggagaagctttgcaaaat

SEQ ID NO: 11754 - DNA, 23 bp, Artificial Sequence
  Description of Artificial Sequence: Synthetic oligonucleotide
  X-linked inhibitor of apoptosis (XIAP) siRNA
aagaggagaagctttgcaaaatc

SEQ ID NO: 11755 - DNA, 23 bp, Artificial Sequence
  Description of Artificial Sequence: Synthetic oligonucleotide
  X-linked inhibitor of apoptosis (XIAP) siRNA
agaggagaagctttgcaaaatct

SEQ ID NO: 11756 - DNA, 23 bp, Artificial Sequence
  Description of Artificial Sequence: Synthetic oligonucleotide
  X-linked inhibitor of apoptosis (XIAP) siRNA
gaggagaagctttgcaaaatctg

SEQ ID NO: 11757 - DNA, 23 bp, Artificial Sequence
  Description of Artificial Sequence: Synthetic oligonucleotide
  X-linked inhibitor of apoptosis (XIAP) siRNA
aggagaagctttgcaaaatctgt

SEQ ID NO: 11758 - DNA, 23 bp, Artificial Sequence
  Description of Artificial Sequence: Synthetic oligonucleotide
  X-linked inhibitor of apoptosis (XIAP) siRNA
ggagaagctttgcaaaatctgta

SEQ ID NO: 11759 - DNA, 23 bp, Artificial Sequence
  Description of Artificial Sequence: Synthetic oligonucleotide
  X-linked inhibitor of apoptosis (XIAP) siRNA
gagaagctttgcaaaatctgtat

SEQ ID NO: 11760 - DNA, 23 bp, Artificial Sequence
  Description of Artificial Sequence: Synthetic oligonucleotide
  X-linked inhibitor of apoptosis (XIAP) siRNA
agaagctttgcaaaatctgtatg

SEQ ID NO: 11761 - DNA, 23 bp, Artificial Sequence
  Description of Artificial Sequence: Synthetic oligonucleotide
  X-linked inhibitor of apoptosis (XIAP) siRNA
gaagctttgcaaaatctgtatgg

SEQ ID NO: 11762 - DNA, 23 bp, Artificial Sequence
  Description of Artificial Sequence: Synthetic oligonucleotide
  X-linked inhibitor of apoptosis (XIAP) siRNA
aagctttgcaaaatctgtatgga

SEQ ID NO: 11763 - DNA, 23 bp, Artificial Sequence
  Description of Artificial Sequence: Synthetic oligonucleotide
  X-linked inhibitor of apoptosis (XIAP) siRNA
agctttgcaaaatctgtatggat

SEQ ID NO: 11764 - DNA, 23 bp, Artificial Sequence
  Description of Artificial Sequence: Synthetic oligonucleotide
  X-linked inhibitor of apoptosis (XIAP) siRNA
gctttgcaaaatctgtatggata

SEQ ID NO: 11765 - DNA, 23 bp, Artificial Sequence
  Description of Artificial Sequence: Synthetic oligonucleotide
  X-linked inhibitor of apoptosis (XIAP) siRNA
ctttgcaaaatctgtatggatag

SEQ ID NO: 11766 - DNA, 23 bp, Artificial Sequence
  Description of Artificial Sequence: Synthetic oligonucleotide
  X-linked inhibitor of apoptosis (XIAP) siRNA
tttgcaaaatctgtatggataga

SEQ ID NO: 11767 - DNA, 23 bp, Artificial Sequence
  Description of Artificial Sequence: Synthetic oligonucleotide
  X-linked inhibitor of apoptosis (XIAP) siRNA
ttgcaaaatctgtatggatagaa

SEQ ID NO: 11768 - DNA, 23 bp, Artificial Sequence
  Description of Artificial Sequence: Synthetic oligonucleotide
  X-linked inhibitor of apoptosis (XIAP) siRNA
tgcaaaatctgtatggatagaaa

SEQ ID NO: 11769 - DNA, 23 bp, Artificial Sequence
  Description of Artificial Sequence: Synthetic oligonucleotide
  X-linked inhibitor of apoptosis (XIAP) siRNA
gcaaaatctgtatggatagaaat

SEQ ID NO: 11770 - DNA, 23 bp, Artificial Sequence
  Description of Artificial Sequence: Synthetic oligonucleotide
  X-linked inhibitor of apoptosis (XIAP) siRNA
caaaatctgtatggatagaaata

SEQ ID NO: 11771 - DNA, 23 bp, Artificial Sequence
  Description of Artificial Sequence: Synthetic oligonucleotide
  X-linked inhibitor of apoptosis (XIAP) siRNA
aaaatctgtatggatagaaatat

SEQ ID NO: 11772 - DNA, 23 bp, Artificial Sequence
  Description of Artificial Sequence: Synthetic oligonucleotide
  X-linked inhibitor of apoptosis (XIAP) siRNA
aaatctgtatggatagaaatatt

SEQ ID NO: 11773 - DNA, 23 bp, Artificial Sequence
  Description of Artificial Sequence: Synthetic oligonucleotide
  X-linked inhibitor of apoptosis (XIAP) siRNA
aatctgtatggatagaaatattg

SEQ ID NO: 11774 - DNA, 23 bp, Artificial Sequence
  Description of Artificial Sequence: Synthetic oligonucleotide
  X-linked inhibitor of apoptosis (XIAP) siRNA
atctgtatggatagaaatattgc

SEQ ID NO: 11775 - DNA, 23 bp, Artificial Sequence
  Description of Artificial Sequence: Synthetic oligonucleotide
  X-linked inhibitor of apoptosis (XIAP) siRNA
tctgtatggatagaaatattgct

SEQ ID NO: 11776 - DNA, 23 bp, Artificial Sequence
  Description of Artificial Sequence: Synthetic oligonucleotide
  X-linked inhibitor of apoptosis (XIAP) siRNA
ctgtatggatagaaatattgcta

SEQ ID NO: 11777 - DNA, 23 bp, Artificial Sequence
  Description of Artificial Sequence: Synthetic oligonucleotide
  X-linked inhibitor of apoptosis (XIAP) siRNA
tgtatggatagaaatattgctat

SEQ ID NO: 11778 - DNA, 23 bp, Artificial Sequence
  Description of Artificial Sequence: Synthetic oligonucleotide
  X-linked inhibitor of apoptosis (XIAP) siRNA
gtatggatagaaatattgctatc

SEQ ID NO: 11779 - DNA, 23 bp, Artificial Sequence
  Description of Artificial Sequence: Synthetic oligonucleotide
  X-linked inhibitor of apoptosis (XIAP) siRNA
tatggatagaaatattgctatcg

SEQ ID NO: 11780 - DNA, 23 bp, Artificial Sequence
  Description of Artificial Sequence: Synthetic oligonucleotide
  X-linked inhibitor of apoptosis (XIAP) siRNA
atggatagaaatattgctatcgt

SEQ ID NO: 11781 - DNA, 23 bp, Artificial Sequence
  Description of Artificial Sequence: Synthetic oligonucleotide
  X-linked inhibitor of apoptosis (XIAP) siRNA
tggatagaaatattgctatcgtt

SEQ ID NO: 11782 - DNA, 23 bp, Artificial Sequence
  Description of Artificial Sequence: Synthetic oligonucleotide
  X-linked inhibitor of apoptosis (XIAP) siRNA
ggatagaaatattgctatcgttt

SEQ ID NO: 11783 - DNA, 23 bp, Artificial Sequence
  Description of Artificial Sequence: Synthetic oligonucleotide
  X-linked inhibitor of apoptosis (XIAP) siRNA
gatagaaatattgctatcgtttt

SEQ ID NO: 11784 - DNA, 23 bp, Artificial Sequence
  Description of Artificial Sequence: Synthetic oligonucleotide
  X-linked inhibitor of apoptosis (XIAP) siRNA
atagaaatattgctatcgttttt

SEQ ID NO: 11785 - DNA, 23 bp, Artificial Sequence
  Description of Artificial Sequence: Synthetic oligonucleotide
  X-linked inhibitor of apoptosis (XIAP) siRNA
tagaaatattgctatcgtttttg

SEQ ID NO: 11786 - DNA, 23 bp, Artificial Sequence
  Description of Artificial Sequence: Synthetic oligonucleotide
  X-linked inhibitor of apoptosis (XIAP) siRNA
agaaatattgctatcgtttttgt

SEQ ID NO: 11787 - DNA, 23 bp, Artificial Sequence
  Description of Artificial Sequence: Synthetic oligonucleotide
  X-linked inhibitor of apoptosis (XIAP) siRNA
gaaatattgctatcgtttttgtt

SEQ ID NO: 11788 - DNA, 23 bp, Artificial Sequence
  Description of Artificial Sequence: Synthetic oligonucleotide
  X-linked inhibitor of apoptosis (XIAP) siRNA
aaatattgctatcgtttttgttc

SEQ ID NO: 11789 - DNA, 23 bp, Artificial Sequence
  Description of Artificial Sequence: Synthetic oligonucleotide
  X-linked inhibitor of apoptosis (XIAP) siRNA
aatattgctatcgtttttgttcc

SEQ ID NO: 11790 - DNA, 23 bp, Artificial Sequence
  Description of Artificial Sequence: Synthetic oligonucleotide
  X-linked inhibitor of apoptosis (XIAP) siRNA
atattgctatcgtttttgttcct

SEQ ID NO: 11791 - DNA, 23 bp, Artificial Sequence
  Description of Artificial Sequence: Synthetic oligonucleotide
  X-linked inhibitor of apoptosis (XIAP) siRNA
tattgctatcgtttttgttcctt

SEQ ID NO: 11792 - DNA, 23 bp, Artificial Sequence
  Description of Artificial Sequence: Synthetic oligonucleotide
  X-linked inhibitor of apoptosis (XIAP) siRNA
attgctatcgtttttgttccttg

SEQ ID NO: 11793 - DNA, 23 bp, Artificial Sequence
  Description of Artificial Sequence: Synthetic oligonucleotide
  X-linked inhibitor of apoptosis (XIAP) siRNA
ttgctatcgtttttgttccttgt

SEQ ID NO: 11794 - DNA, 23 bp, Artificial Sequence
  Description of Artificial Sequence: Synthetic oligonucleotide
  X-linked inhibitor of apoptosis (XIAP) siRNA
tgctatcgtttttgttccttgtg

SEQ ID NO: 11795 - DNA, 23 bp, Artificial Sequence
  Description of Artificial Sequence: Synthetic oligonucleotide
  X-linked inhibitor of apoptosis (XIAP) siRNA
gctatcgtttttgttccttgtgg

SEQ ID NO: 11796 - DNA, 23 bp, Artificial Sequence
  Description of Artificial Sequence: Synthetic oligonucleotide
  X-linked inhibitor of apoptosis (XIAP) siRNA
ctatcgtttttgttccttgtgga

SEQ ID NO: 11797 - DNA, 23 bp, Artificial Sequence
  Description of Artificial Sequence: Synthetic oligonucleotide
  X-linked inhibitor of apoptosis (XIAP) siRNA
tatcgtttttgttccttgtggac

SEQ ID NO: 11798 - DNA, 23 bp, Artificial Sequence
  Description of Artificial Sequence: Synthetic oligonucleotide
  X-linked inhibitor of apoptosis (XIAP) siRNA
atcgtttttgttccttgtggaca

SEQ ID NO: 11799 - DNA, 23 bp, Artificial Sequence
  Description of Artificial Sequence: Synthetic oligonucleotide
  X-linked inhibitor of apoptosis (XIAP) siRNA
tcgtttttgttccttgtggacat

SEQ ID NO: 11800 - DNA, 23 bp, Artificial Sequence
  Description of Artificial Sequence: Synthetic oligonucleotide
  X-linked inhibitor of apoptosis (XIAP) siRNA
cgtttttgttccttgtggacatc

SEQ ID NO: 11801 - DNA, 23 bp, Artificial Sequence
  Description of Artificial Sequence: Synthetic oligonucleotide
  X-linked inhibitor of apoptosis (XIAP) siRNA
gtttttgttccttgtggacatct

SEQ ID NO: 11802 - DNA, 23 bp, Artificial Sequence
  Description of Artificial Sequence: Synthetic oligonucleotide
  X-linked inhibitor of apoptosis (XIAP) siRNA
tttttgttccttgtggacatcta

SEQ ID NO: 11803 - DNA, 23 bp, Artificial Sequence
  Description of Artificial Sequence: Synthetic oligonucleotide
  X-linked inhibitor of apoptosis (XIAP) siRNA
ttttgttccttgtggacatctag

SEQ ID NO: 11804 - DNA, 23 bp, Artificial Sequence
  Description of Artificial Sequence: Synthetic oligonucleotide
  X-linked inhibitor of apoptosis (XIAP) siRNA
tttgttccttgtggacatctagt

SEQ ID NO: 11805 - DNA, 23 bp, Artificial Sequence
  Description of Artificial Sequence: Synthetic oligonucleotide
  X-linked inhibitor of apoptosis (XIAP) siRNA
ttgttccttgtggacatctagtc

SEQ ID NO: 11806 - DNA, 23 bp, Artificial Sequence
  Description of Artificial Sequence: Synthetic oligonucleotide
  X-linked inhibitor of apoptosis (XIAP) siRNA
tgttccttgtggacatctagtca

SEQ ID NO: 11807 - DNA, 23 bp, Artificial Sequence
  Description of Artificial Sequence: Synthetic oligonucleotide
  X-linked inhibitor of apoptosis (XIAP) siRNA
gttccttgtggacatctagtcac

SEQ ID NO: 11808 - DNA, 23 bp, Artificial Sequence
  Description of Artificial Sequence: Synthetic oligonucleotide
  X-linked inhibitor of apoptosis (XIAP) siRNA
ttccttgtggacatctagtcact

SEQ ID NO: 11809 - DNA, 23 bp, Artificial Sequence
  Description of Artificial Sequence: Synthetic oligonucleotide
  X-linked inhibitor of apoptosis (XIAP) siRNA
tccttgtggacatctagtcactt

SEQ ID NO: 11810 - DNA, 23 bp, Artificial Sequence
  Description of Artificial Sequence: Synthetic oligonucleotide
  X-linked inhibitor of apoptosis (XIAP) siRNA
ccttgtggacatctagtcacttg

SEQ ID NO: 11811 - DNA, 23 bp, Artificial Sequence
  Description of Artificial Sequence: Synthetic oligonucleotide
  X-linked inhibitor of apoptosis (XIAP) siRNA
cttgtggacatctagtcacttgt

SEQ ID NO: 11812 - DNA, 23 bp, Artificial Sequence
  Description of Artificial Sequence: Synthetic oligonucleotide
  X-linked inhibitor of apoptosis (XIAP) siRNA
ttgtggacatctagtcacttgta

SEQ ID NO: 11813 - DNA, 23 bp, Artificial Sequence
  Description of Artificial Sequence: Synthetic oligonucleotide
  X-linked inhibitor of apoptosis (XIAP) siRNA
tgtggacatctagtcacttgtaa

SEQ ID NO: 11814 - DNA, 23 bp, Artificial Sequence
  Description of Artificial Sequence: Synthetic oligonucleotide
  X-linked inhibitor of apoptosis (XIAP) siRNA
gtggacatctagtcacttgtaaa

SEQ ID NO: 11815 - DNA, 23 bp, Artificial Sequence
  Description of Artificial Sequence: Synthetic oligonucleotide
  X-linked inhibitor of apoptosis (XIAP) siRNA
tggacatctagtcacttgtaaac

SEQ ID NO: 11816 - DNA, 23 bp, Artificial Sequence
  Description of Artificial Sequence: Synthetic oligonucleotide
  X-linked inhibitor of apoptosis (XIAP) siRNA
ggacatctagtcacttgtaaaca

SEQ ID NO: 11817 - DNA, 23 bp, Artificial Sequence
  Description of Artificial Sequence: Synthetic oligonucleotide
  X-linked inhibitor of apoptosis (XIAP) siRNA
gacatctagtcacttgtaaacaa

SEQ ID NO: 11818 - DNA, 23 bp, Artificial Sequence
  Description of Artificial Sequence: Synthetic oligonucleotide
  X-linked inhibitor of apoptosis (XIAP) siRNA
acatctagtcacttgtaaacaat

SEQ ID NO: 11819 - DNA, 23 bp, Artificial Sequence
  Description of Artificial Sequence: Synthetic oligonucleotide
  X-linked inhibitor of apoptosis (XIAP) siRNA
catctagtcacttgtaaacaatg

SEQ ID NO: 11820 - DNA, 23 bp, Artificial Sequence
  Description of Artificial Sequence: Synthetic oligonucleotide
  X-linked inhibitor of apoptosis (XIAP) siRNA
atctagtcacttgtaaacaatgt

SEQ ID NO: 11821 - DNA, 23 bp, Artificial Sequence
  Description of Artificial Sequence: Synthetic oligonucleotide
  X-linked inhibitor of apoptosis (XIAP) siRNA
tctagtcacttgtaaacaatgtg

SEQ ID NO: 11822 - DNA, 23 bp, Artificial Sequence
  Description of Artificial Sequence: Synthetic oligonucleotide
  X-linked inhibitor of apoptosis (XIAP) siRNA
ctagtcacttgtaaacaatgtgc

SEQ ID NO: 11823 - DNA, 23 bp, Artificial Sequence
  Description of Artificial Sequence: Synthetic oligonucleotide
  X-linked inhibitor of apoptosis (XIAP) siRNA
tagtcacttgtaaacaatgtgct

SEQ ID NO: 11824 - DNA, 23 bp, Artificial Sequence
  Description of Artificial Sequence: Synthetic oligonucleotide
  X-linked inhibitor of apoptosis (XIAP) siRNA
agtcacttgtaaacaatgtgctg

SEQ ID NO: 11825 - DNA, 23 bp, Artificial Sequence
  Description of Artificial Sequence: Synthetic oligonucleotide
  X-linked inhibitor of apoptosis (XIAP) siRNA
gtcacttgtaaacaatgtgctga

SEQ ID NO: 11826 - DNA, 23 bp, Artificial Sequence
  Description of Artificial Sequence: Synthetic oligonucleotide
  X-linked inhibitor of apoptosis (XIAP) siRNA
tcacttgtaaacaatgtgctgaa

SEQ ID NO: 11827 - DNA, 23 bp, Artificial Sequence
  Description of Artificial Sequence: Synthetic oligonucleotide
  X-linked inhibitor of apoptosis (XIAP) siRNA
cacttgtaaacaatgtgctgaag

SEQ ID NO: 11828 - DNA, 23 bp, Artificial Sequence
  Description of Artificial Sequence: Synthetic oligonucleotide
  X-linked inhibitor of apoptosis (XIAP) siRNA
acttgtaaacaatgtgctgaagc

SEQ ID NO: 11829 - DNA, 23 bp, Artificial Sequence
  Description of Artificial Sequence: Synthetic oligonucleotide
  X-linked inhibitor of apoptosis (XIAP) siRNA
cttgtaaacaatgtgctgaagca

SEQ ID NO: 11830 - DNA, 23 bp, Artificial Sequence
  Description of Artificial Sequence: Synthetic oligonucleotide
  X-linked inhibitor of apoptosis (XIAP) siRNA
ttgtaaacaatgtgctgaagcag

SEQ ID NO: 11831 - DNA, 23 bp, Artificial Sequence
  Description of Artificial Sequence: Synthetic oligonucleotide
  X-linked inhibitor of apoptosis (XIAP) siRNA
tgtaaacaatgtgctgaagcagt

SEQ ID NO: 11832 - DNA, 23 bp, Artificial Sequence
  Description of Artificial Sequence: Synthetic oligonucleotide
  X-linked inhibitor of apoptosis (XIAP) siRNA
gtaaacaatgtgctgaagcagtt

SEQ ID NO: 11833 - DNA, 23 bp, Artificial Sequence
  Description of Artificial Sequence: Synthetic oligonucleotide
  X-linked inhibitor of apoptosis (XIAP) siRNA
taaacaatgtgctgaagcagttg

SEQ ID NO: 11834 - DNA, 23 bp, Artificial Sequence
  Description of Artificial Sequence: Synthetic oligonucleotide
  X-linked inhibitor of apoptosis (XIAP) siRNA
aaacaatgtgctgaagcagttga

SEQ ID NO: 11835 - DNA, 23 bp, Artificial Sequence
  Description of Artificial Sequence: Synthetic oligonucleotide
  X-linked inhibitor of apoptosis (XIAP) siRNA
aacaatgtgctgaagcagttgac

SEQ ID NO: 11836 - DNA, 23 bp, Artificial Sequence
  Description of Artificial Sequence: Synthetic oligonucleotide
  X-linked inhibitor of apoptosis (XIAP) siRNA
acaatgtgctgaagcagttgaca

SEQ ID NO: 11837 - DNA, 23 bp, Artificial Sequence
  Description of Artificial Sequence: Synthetic oligonucleotide
  X-linked inhibitor of apoptosis (XIAP) siRNA
caatgtgctgaagcagttgacaa

SEQ ID NO: 11838 - DNA, 23 bp, Artificial Sequence
  Description of Artificial Sequence: Synthetic oligonucleotide
  X-linked inhibitor of apoptosis (XIAP) siRNA
aatgtgctgaagcagttgacaag

SEQ ID NO: 11839 - DNA, 23 bp, Artificial Sequence
  Description of Artificial Sequence: Synthetic oligonucleotide
  X-linked inhibitor of apoptosis (XIAP) siRNA
atgtgctgaagcagttgacaagt

SEQ ID NO: 11840 - DNA, 23 bp, Artificial Sequence
  Description of Artificial Sequence: Synthetic oligonucleotide
  X-linked inhibitor of apoptosis (XIAP) siRNA
tgtgctgaagcagttgacaagtg

SEQ ID NO: 11841 - DNA, 23 bp, Artificial Sequence
  Description of Artificial Sequence: Synthetic oligonucleotide
  X-linked inhibitor of apoptosis (XIAP) siRNA
gtgctgaagcagttgacaagtgt

SEQ ID NO: 11842 - DNA, 23 bp, Artificial Sequence
  Description of Artificial Sequence: Synthetic oligonucleotide
  X-linked inhibitor of apoptosis (XIAP) siRNA
tgctgaagcagttgacaagtgtc

SEQ ID NO: 11843 - DNA, 23 bp, Artificial Sequence
  Description of Artificial Sequence: Synthetic oligonucleotide
  X-linked inhibitor of apoptosis (XIAP) siRNA
gctgaagcagttgacaagtgtcc

SEQ ID NO: 11844 - DNA, 23 bp, Artificial Sequence
  Description of Artificial Sequence: Synthetic oligonucleotide
  X-linked inhibitor of apoptosis (XIAP) siRNA
ctgaagcagttgacaagtgtccc

SEQ ID NO: 11845 - DNA, 23 bp, Artificial Sequence
  Description of Artificial Sequence: Synthetic oligonucleotide
  X-linked inhibitor of apoptosis (XIAP) siRNA
tgaagcagttgacaagtgtccca

SEQ ID NO: 11846 - DNA, 23 bp, Artificial Sequence
  Description of Artificial Sequence: Synthetic oligonucleotide
  X-linked inhibitor of apoptosis (XIAP) siRNA
gaagcagttgacaagtgtcccat

SEQ ID NO: 11847 - DNA, 23 bp, Artificial Sequence
  Description of Artificial Sequence: Synthetic oligonucleotide
  X-linked inhibitor of apoptosis (XIAP) siRNA
aagcagttgacaagtgtcccatg

SEQ ID NO: 11848 - DNA, 23 bp, Artificial Sequence
  Description of Artificial Sequence: Synthetic oligonucleotide
  X-linked inhibitor of apoptosis (XIAP) siRNA
agcagttgacaagtgtcccatgt

SEQ ID NO: 11849 - DNA, 23 bp, Artificial Sequence
  Description of Artificial Sequence: Synthetic oligonucleotide
  X-linked inhibitor of apoptosis (XIAP) siRNA
gcagttgacaagtgtcccatgtg

SEQ ID NO: 11850 - DNA, 23 bp, Artificial Sequence
  Description of Artificial Sequence: Synthetic oligonucleotide
  X-linked inhibitor of apoptosis (XIAP) siRNA
cagttgacaagtgtcccatgtgc

SEQ ID NO: 11851 - DNA, 23 bp, Artificial Sequence
  Description of Artificial Sequence: Synthetic oligonucleotide
  X-linked inhibitor of apoptosis (XIAP) siRNA
agttgacaagtgtcccatgtgct

SEQ ID NO: 11852 - DNA, 23 bp, Artificial Sequence
  Description of Artificial Sequence: Synthetic oligonucleotide
  X-linked inhibitor of apoptosis (XIAP) siRNA
gttgacaagtgtcccatgtgcta

SEQ ID NO: 11853 - DNA, 23 bp, Artificial Sequence
  Description of Artificial Sequence: Synthetic oligonucleotide
  X-linked inhibitor of apoptosis (XIAP) siRNA
ttgacaagtgtcccatgtgctac

SEQ ID NO: 11854 - DNA, 23 bp, Artificial Sequence
  Description of Artificial Sequence: Synthetic oligonucleotide
  X-linked inhibitor of apoptosis (XIAP) siRNA
tgacaagtgtcccatgtgctaca

SEQ ID NO: 11855 - DNA, 23 bp, Artificial Sequence
  Description of Artificial Sequence: Synthetic oligonucleotide
  X-linked inhibitor of apoptosis (XIAP) siRNA
gacaagtgtcccatgtgctacac

SEQ ID NO: 11856 - DNA, 23 bp, Artificial Sequence
  Description of Artificial Sequence: Synthetic oligonucleotide
  X-linked inhibitor of apoptosis (XIAP) siRNA
acaagtgtcccatgtgctacaca

SEQ ID NO: 11857 - DNA, 23 bp, Artificial Sequence
  Description of Artificial Sequence: Synthetic oligonucleotide
  X-linked inhibitor of apoptosis (XIAP) siRNA
caagtgtcccatgtgctacacag

SEQ ID NO: 11858 - DNA, 23 bp, Artificial Sequence
  Description of Artificial Sequence: Synthetic oligonucleotide
  X-linked inhibitor of apoptosis (XIAP) siRNA
aagtgtcccatgtgctacacagt

SEQ ID NO: 11859 - DNA, 23 bp, Artificial Sequence
  Description of Artificial Sequence: Synthetic oligonucleotide
  X-linked inhibitor of apoptosis (XIAP) siRNA
agtgtcccatgtgctacacagtc

SEQ ID NO: 11860 - DNA, 23 bp, Artificial Sequence
  Description of Artificial Sequence: Synthetic oligonucleotide
  X-linked inhibitor of apoptosis (XIAP) siRNA
gtgtcccatgtgctacacagtca

SEQ ID NO: 11861 - DNA, 23 bp, Artificial Sequence
  Description of Artificial Sequence: Synthetic oligonucleotide
  X-linked inhibitor of apoptosis (XIAP) siRNA
tgtcccatgtgctacacagtcat

SEQ ID NO: 11862 - DNA, 23 bp, Artificial Sequence
  Description of Artificial Sequence: Synthetic oligonucleotide
  X-linked inhibitor of apoptosis (XIAP) siRNA
gtcccatgtgctacacagtcatt

SEQ ID NO: 11863 - DNA, 23 bp, Artificial Sequence
  Description of Artificial Sequence: Synthetic oligonucleotide
  X-linked inhibitor of apoptosis (XIAP) siRNA
tcccatgtgctacacagtcatta

SEQ ID NO: 11864 - DNA, 23 bp, Artificial Sequence
  Description of Artificial Sequence: Synthetic oligonucleotide
  X-linked inhibitor of apoptosis (XIAP) siRNA
cccatgtgctacacagtcattac

SEQ ID NO: 11865 - DNA, 23 bp, Artificial Sequence
  Description of Artificial Sequence: Synthetic oligonucleotide
  X-linked inhibitor of apoptosis (XIAP) siRNA
ccatgtgctacacagtcattact

SEQ ID NO: 11866 - DNA, 23 bp, Artificial Sequence
  Description of Artificial Sequence: Synthetic oligonucleotide
  X-linked inhibitor of apoptosis (XIAP) siRNA
catgtgctacacagtcattactt

SEQ ID NO: 11867 - DNA, 23 bp, Artificial Sequence
  Description of Artificial Sequence: Synthetic oligonucleotide
  X-linked inhibitor of apoptosis (XIAP) siRNA
atgtgctacacagtcattacttt

SEQ ID NO: 11868 - DNA, 23 bp, Artificial Sequence
  Description of Artificial Sequence: Synthetic oligonucleotide
  X-linked inhibitor of apoptosis (XIAP) siRNA
tgtgctacacagtcattactttc

SEQ ID NO: 11869 - DNA, 23 bp, Artificial Sequence
  Description of Artificial Sequence: Synthetic oligonucleotide
  X-linked inhibitor of apoptosis (XIAP) siRNA
gtgctacacagtcattactttca

SEQ ID NO: 11870 - DNA, 23 bp, Artificial Sequence
  Description of Artificial Sequence: Synthetic oligonucleotide
  X-linked inhibitor of apoptosis (XIAP) siRNA
tgctacacagtcattactttcaa

SEQ ID NO: 11871 - DNA, 23 bp, Artificial Sequence
  Description of Artificial Sequence: Synthetic oligonucleotide
  X-linked inhibitor of apoptosis (XIAP) siRNA
gctacacagtcattactttcaag

SEQ ID NO: 11872 - DNA, 23 bp, Artificial Sequence
  Description of Artificial Sequence: Synthetic oligonucleotide
  X-linked inhibitor of apoptosis (XIAP) siRNA
ctacacagtcattactttcaagc

SEQ ID NO: 11873 - DNA, 23 bp, Artificial Sequence
  Description of Artificial Sequence: Synthetic oligonucleotide
  X-linked inhibitor of apoptosis (XIAP) siRNA
tacacagtcattactttcaagca

SEQ ID NO: 11874 - DNA, 23 bp, Artificial Sequence
  Description of Artificial Sequence: Synthetic oligonucleotide
  X-linked inhibitor of apoptosis (XIAP) siRNA
acacagtcattactttcaagcaa

SEQ ID NO: 11875 - DNA, 23 bp, Artificial Sequence
  Description of Artificial Sequence: Synthetic oligonucleotide
  X-linked inhibitor of apoptosis (XIAP) siRNA
cacagtcattactttcaagcaaa

SEQ ID NO: 11876 - DNA, 23 bp, Artificial Sequence
  Description of Artificial Sequence: Synthetic oligonucleotide
  X-linked inhibitor of apoptosis (XIAP) siRNA
acagtcattactttcaagcaaaa

SEQ ID NO: 11877 - DNA, 23 bp, Artificial Sequence
  Description of Artificial Sequence: Synthetic oligonucleotide
  X-linked inhibitor of apoptosis (XIAP) siRNA
cagtcattactttcaagcaaaaa

SEQ ID NO: 11878 - DNA, 23 bp, Artificial Sequence
  Description of Artificial Sequence: Synthetic oligonucleotide
  X-linked inhibitor of apoptosis (XIAP) siRNA
agtcattactttcaagcaaaaaa

SEQ ID NO: 11879 - DNA, 23 bp, Artificial Sequence
  Description of Artificial Sequence: Synthetic oligonucleotide
  X-linked inhibitor of apoptosis (XIAP) siRNA
gtcattactttcaagcaaaaaat

SEQ ID NO: 11880 - DNA, 23 bp, Artificial Sequence
  Description of Artificial Sequence: Synthetic oligonucleotide
  X-linked inhibitor of apoptosis (XIAP) siRNA
tcattactttcaagcaaaaaatt

SEQ ID NO: 11881 - DNA, 23 bp, Artificial Sequence
  Description of Artificial Sequence: Synthetic oligonucleotide
  X-linked inhibitor of apoptosis (XIAP) siRNA
cattactttcaagcaaaaaattt

SEQ ID NO: 11882 - DNA, 23 bp, Artificial Sequence
  Description of Artificial Sequence: Synthetic oligonucleotide
  X-linked inhibitor of apoptosis (XIAP) siRNA
attactttcaagcaaaaaatttt

SEQ ID NO: 11883 - DNA, 23 bp, Artificial Sequence
  Description of Artificial Sequence: Synthetic oligonucleotide
  X-linked inhibitor of apoptosis (XIAP) siRNA
ttactttcaagcaaaaaattttt

SEQ ID NO: 11884 - DNA, 23 bp, Artificial Sequence
  Description of Artificial Sequence: Synthetic oligonucleotide
  X-linked inhibitor of apoptosis (XIAP) siRNA
tactttcaagcaaaaaattttta

SEQ ID NO: 11885 - DNA, 23 bp, Artificial Sequence
  Description of Artificial Sequence: Synthetic oligonucleotide
  X-linked inhibitor of apoptosis (XIAP) siRNA
actttcaagcaaaaaatttttat

SEQ ID NO: 11886 - DNA, 23 bp, Artificial Sequence
  Description of Artificial Sequence: Synthetic oligonucleotide
  X-linked inhibitor of apoptosis (XIAP) siRNA
ctttcaagcaaaaaatttttatg

SEQ ID NO: 11887 - DNA, 23 bp, Artificial Sequence
  Description of Artificial Sequence: Synthetic oligonucleotide
  X-linked inhibitor of apoptosis (XIAP) siRNA
tttcaagcaaaaaatttttatgt

SEQ ID NO: 11888 - DNA, 23 bp, Artificial Sequence
  Description of Artificial Sequence: Synthetic oligonucleotide
  X-linked inhibitor of apoptosis (XIAP) siRNA
ttcaagcaaaaaatttttatgtc

SEQ ID NO: 11889 - DNA, 23 bp, Artificial Sequence
  Description of Artificial Sequence: Synthetic oligonucleotide
  X-linked inhibitor of apoptosis (XIAP) siRNA
tcaagcaaaaaatttttatgtct

SEQ ID NO: 11890 - DNA, 23 bp, Artificial Sequence
  Description of Artificial Sequence: Synthetic oligonucleotide
  X-linked inhibitor of apoptosis (XIAP) siRNA
caagcaaaaaatttttatgtctt

SEQ ID NO: 11891 - DNA, 23 bp, Artificial Sequence
  Description of Artificial Sequence: Synthetic oligonucleotide
  X-linked inhibitor of apoptosis (XIAP) siRNA
aagcaaaaaatttttatgtctta

SEQ ID NO: 11892 - DNA, 23 bp, Artificial Sequence
  Description of Artificial Sequence: Synthetic oligonucleotide
  X-linked inhibitor of apoptosis (XIAP) siRNA
tctaactctatagtaggcatgtt

SEQ ID NO: 11893 - DNA, 23 bp, Artificial Sequence
  Description of Artificial Sequence: Synthetic oligonucleotide
  X-linked inhibitor of apoptosis (XIAP) siRNA
ctaactctatagtaggcatgtta

SEQ ID NO: 11894 - DNA, 23 bp, Artificial Sequence
  Description of Artificial Sequence: Synthetic oligonucleotide
  X-linked inhibitor of apoptosis (XIAP) siRNA
taactctatagtaggcatgttat

SEQ ID NO: 11895 - DNA, 23 bp, Artificial Sequence
  Description of Artificial Sequence: Synthetic oligonucleotide
  X-linked inhibitor of apoptosis (XIAP) siRNA
aactctatagtaggcatgttatg

SEQ ID NO: 11896 - DNA, 23 bp, Artificial Sequence
  Description of Artificial Sequence: Synthetic oligonucleotide
  X-linked inhibitor of apoptosis (XIAP) siRNA
actctatagtaggcatgttatgt

SEQ ID NO: 11897 - DNA, 23 bp, Artificial Sequence
  Description of Artificial Sequence: Synthetic oligonucleotide
  X-linked inhibitor of apoptosis (XIAP) siRNA
ctctatagtaggcatgttatgtt

SEQ ID NO: 11898 - DNA, 23 bp, Artificial Sequence
  Description of Artificial Sequence: Synthetic oligonucleotide
  X-linked inhibitor of apoptosis (XIAP) siRNA
tctatagtaggcatgttatgttg

SEQ ID NO: 11899 - DNA, 23 bp, Artificial Sequence
  Description of Artificial Sequence: Synthetic oligonucleotide
  X-linked inhibitor of apoptosis (XIAP) siRNA
ctatagtaggcatgttatgttgt

SEQ ID NO: 11900 - DNA, 23 bp, Artificial Sequence
  Description of Artificial Sequence: Synthetic oligonucleotide
  X-linked inhibitor of apoptosis (XIAP) siRNA
tatagtaggcatgttatgttgtt

SEQ ID NO: 11901 - DNA, 23 bp, Artificial Sequence
  Description of Artificial Sequence: Synthetic oligonucleotide
  X-linked inhibitor of apoptosis (XIAP) siRNA
atagtaggcatgttatgttgttc

SEQ ID NO: 11902 - DNA, 23 bp, Artificial Sequence
  Description of Artificial Sequence: Synthetic oligonucleotide
  X-linked inhibitor of apoptosis (XIAP) siRNA
tagtaggcatgttatgttgttct

SEQ ID NO: 11903 - DNA, 23 bp, Artificial Sequence
  Description of Artificial Sequence: Synthetic oligonucleotide
  X-linked inhibitor of apoptosis (XIAP) siRNA
agtaggcatgttatgttgttctt

SEQ ID NO: 11904 - DNA, 23 bp, Artificial Sequence
  Description of Artificial Sequence: Synthetic oligonucleotide
  X-linked inhibitor of apoptosis (XIAP) siRNA
gtaggcatgttatgttgttctta

SEQ ID NO: 11905 - DNA, 23 bp, Artificial Sequence
  Description of Artificial Sequence: Synthetic oligonucleotide
  X-linked inhibitor of apoptosis (XIAP) siRNA
taggcatgttatgttgttcttat

SEQ ID NO: 11906 - DNA, 23 bp, Artificial Sequence
  Description of Artificial Sequence: Synthetic oligonucleotide
  X-linked inhibitor of apoptosis (XIAP) siRNA
aggcatgttatgttgttcttatt

SEQ ID NO: 11907 - DNA, 23 bp, Artificial Sequence
  Description of Artificial Sequence: Synthetic oligonucleotide
  X-linked inhibitor of apoptosis (XIAP) siRNA
ggcatgttatgttgttcttatta

SEQ ID NO: 11908 - DNA, 23 bp, Artificial Sequence
  Description of Artificial Sequence: Synthetic oligonucleotide
  X-linked inhibitor of apoptosis (XIAP) siRNA
gcatgttatgttgttcttattac

SEQ ID NO: 11909 - DNA, 23 bp, Artificial Sequence
  Description of Artificial Sequence: Synthetic oligonucleotide
  X-linked inhibitor of apoptosis (XIAP) siRNA
catgttatgttgttcttattacc

SEQ ID NO: 11910 - DNA, 23 bp, Artificial Sequence
  Description of Artificial Sequence: Synthetic oligonucleotide
  X-linked inhibitor of apoptosis (XIAP) siRNA
atgttatgttgttcttattaccc

SEQ ID NO: 11911 - DNA, 23 bp, Artificial Sequence
  Description of Artificial Sequence: Synthetic oligonucleotide
  X-linked inhibitor of apoptosis (XIAP) siRNA
tgttatgttgttcttattaccct

SEQ ID NO: 11912 - DNA, 23 bp, Artificial Sequence
  Description of Artificial Sequence: Synthetic oligonucleotide
  X-linked inhibitor of apoptosis (XIAP) siRNA
gttatgttgttcttattaccctg

SEQ ID NO: 11913 - DNA, 23 bp, Artificial Sequence
  Description of Artificial Sequence: Synthetic oligonucleotide
  X-linked inhibitor of apoptosis (XIAP) siRNA
ttatgttgttcttattaccctga

SEQ ID NO: 11914 - DNA, 23 bp, Artificial Sequence
  Description of Artificial Sequence: Synthetic oligonucleotide
  X-linked inhibitor of apoptosis (XIAP) siRNA
tatgttgttcttattaccctgat

SEQ ID NO: 11915 - DNA, 23 bp, Artificial Sequence
  Description of Artificial Sequence: Synthetic oligonucleotide
  X-linked inhibitor of apoptosis (XIAP) siRNA
atgttgttcttattaccctgatt

SEQ ID NO: 11916 - DNA, 23 bp, Artificial Sequence
  Description of Artificial Sequence: Synthetic oligonucleotide
  X-linked inhibitor of apoptosis (XIAP) siRNA
tgttgttcttattaccctgattg

SEQ ID NO: 11917 - DNA, 23 bp, Artificial Sequence
  Description of Artificial Sequence: Synthetic oligonucleotide
  X-linked inhibitor of apoptosis (XIAP) siRNA
gttgttcttattaccctgattga

SEQ ID NO: 11918 - DNA, 23 bp, Artificial Sequence
  Description of Artificial Sequence: Synthetic oligonucleotide
  X-linked inhibitor of apoptosis (XIAP) siRNA
ttgttcttattaccctgattgaa

SEQ ID NO: 11919 - DNA, 23 bp, Artificial Sequence
  Description of Artificial Sequence: Synthetic oligonucleotide
  X-linked inhibitor of apoptosis (XIAP) siRNA
tgttcttattaccctgattgaat

SEQ ID NO: 11920 - DNA, 23 bp, Artificial Sequence
  Description of Artificial Sequence: Synthetic oligonucleotide
  X-linked inhibitor of apoptosis (XIAP) siRNA
gttcttattaccctgattgaatg

SEQ ID NO: 11921 - DNA, 23 bp, Artificial Sequence
  Description of Artificial Sequence: Synthetic oligonucleotide
  X-linked inhibitor of apoptosis (XIAP) siRNA
ttcttattaccctgattgaatgt

SEQ ID NO: 11922 - DNA, 23 bp, Artificial Sequence
  Description of Artificial Sequence: Synthetic oligonucleotide
  X-linked inhibitor of apoptosis (XIAP) siRNA
tcttattaccctgattgaatgtg

SEQ ID NO: 11923 - DNA, 23 bp, Artificial Sequence
  Description of Artificial Sequence: Synthetic oligonucleotide
  X-linked inhibitor of apoptosis (XIAP) siRNA
cttattaccctgattgaatgtgt

SEQ ID NO: 11924 - DNA, 23 bp, Artificial Sequence
  Description of Artificial Sequence: Synthetic oligonucleotide
  X-linked inhibitor of apoptosis (XIAP) siRNA
ttattaccctgattgaatgtgtg

SEQ ID NO: 11925 - DNA, 23 bp, Artificial Sequence
  Description of Artificial Sequence: Synthetic oligonucleotide
  X-linked inhibitor of apoptosis (XIAP) siRNA
tattaccctgattgaatgtgtga

SEQ ID NO: 11926 - DNA, 23 bp, Artificial Sequence
  Description of Artificial Sequence: Synthetic oligonucleotide
  X-linked inhibitor of apoptosis (XIAP) siRNA
attaccctgattgaatgtgtgat

SEQ ID NO: 11927 - DNA, 23 bp, Artificial Sequence
  Description of Artificial Sequence: Synthetic oligonucleotide
  X-linked inhibitor of apoptosis (XIAP) siRNA
ttaccctgattgaatgtgtgatg

SEQ ID NO: 11928 - DNA, 23 bp, Artificial Sequence
  Description of Artificial Sequence: Synthetic oligonucleotide
  X-linked inhibitor of apoptosis (XIAP) siRNA
taccctgattgaatgtgtgatgt

SEQ ID NO: 11929 - DNA, 23 bp, Artificial Sequence
  Description of Artificial Sequence: Synthetic oligonucleotide
  X-linked inhibitor of apoptosis (XIAP) siRNA
accctgattgaatgtgtgatgtg

SEQ ID NO: 11930 - DNA, 23 bp, Artificial Sequence
  Description of Artificial Sequence: Synthetic oligonucleotide
  X-linked inhibitor of apoptosis (XIAP) siRNA
ccctgattgaatgtgtgatgtga

SEQ ID NO: 11931 - DNA, 23 bp, Artificial Sequence
  Description of Artificial Sequence: Synthetic oligonucleotide
  X-linked inhibitor of apoptosis (XIAP) siRNA
cctgattgaatgtgtgatgtgaa

SEQ ID NO: 11932 - DNA, 23 bp, Artificial Sequence
  Description of Artificial Sequence: Synthetic oligonucleotide
  X-linked inhibitor of apoptosis (XIAP) siRNA
ctgattgaatgtgtgatgtgaac

SEQ ID NO: 11933 - DNA, 23 bp, Artificial Sequence
  Description of Artificial Sequence: Synthetic oligonucleotide
  X-linked inhibitor of apoptosis (XIAP) siRNA
tgattgaatgtgtgatgtgaact

SEQ ID NO: 11934 - DNA, 23 bp, Artificial Sequence
  Description of Artificial Sequence: Synthetic oligonucleotide
  X-linked inhibitor of apoptosis (XIAP) siRNA
gattgaatgtgtgatgtgaactg

SEQ ID NO: 11935 - DNA, 23 bp, Artificial Sequence
  Description of Artificial Sequence: Synthetic oligonucleotide
  X-linked inhibitor of apoptosis (XIAP) siRNA
attgaatgtgtgatgtgaactga

SEQ ID NO: 11936 - DNA, 23 bp, Artificial Sequence
  Description of Artificial Sequence: Synthetic oligonucleotide
  X-linked inhibitor of apoptosis (XIAP) siRNA
ttgaatgtgtgatgtgaactgac

SEQ ID NO: 11937 - DNA, 23 bp, Artificial Sequence
  Description of Artificial Sequence: Synthetic oligonucleotide
  X-linked inhibitor of apoptosis (XIAP) siRNA
tgaatgtgtgatgtgaactgact

SEQ ID NO: 11938 - DNA, 23 bp, Artificial Sequence
  Description of Artificial Sequence: Synthetic oligonucleotide
  X-linked inhibitor of apoptosis (XIAP) siRNA
gaatgtgtgatgtgaactgactt

SEQ ID NO: 11939 - DNA, 23 bp, Artificial Sequence
  Description of Artificial Sequence: Synthetic oligonucleotide
  X-linked inhibitor of apoptosis (XIAP) siRNA
aatgtgtgatgtgaactgacttt

SEQ ID NO: 11940 - DNA, 23 bp, Artificial Sequence
  Description of Artificial Sequence: Synthetic oligonucleotide
  X-linked inhibitor of apoptosis (XIAP) siRNA
atgtgtgatgtgaactgacttta

SEQ ID NO: 11941 - DNA, 23 bp, Artificial Sequence
  Description of Artificial Sequence: Synthetic oligonucleotide
  X-linked inhibitor of apoptosis (XIAP) siRNA
tgtgtgatgtgaactgactttaa

SEQ ID NO: 11942 - DNA, 23 bp, Artificial Sequence
  Description of Artificial Sequence: Synthetic oligonucleotide
  X-linked inhibitor of apoptosis (XIAP) siRNA
gtgtgatgtgaactgactttaag

SEQ ID NO: 11943 - DNA, 23 bp, Artificial Sequence
  Description of Artificial Sequence: Synthetic oligonucleotide
  X-linked inhibitor of apoptosis (XIAP) siRNA
tgtgatgtgaactgactttaagt

SEQ ID NO: 11944 - DNA, 23 bp, Artificial Sequence
  Description of Artificial Sequence: Synthetic oligonucleotide
  X-linked inhibitor of apoptosis (XIAP) siRNA
gtgatgtgaactgactttaagta

SEQ ID NO: 11945 - DNA, 23 bp, Artificial Sequence
  Description of Artificial Sequence: Synthetic oligonucleotide
  X-linked inhibitor of apoptosis (XIAP) siRNA
tgatgtgaactgactttaagtaa

SEQ ID NO: 11946 - DNA, 23 bp, Artificial Sequence
  Description of Artificial Sequence: Synthetic oligonucleotide
  X-linked inhibitor of apoptosis (XIAP) siRNA
gatgtgaactgactttaagtaat

SEQ ID NO: 11947 - DNA, 23 bp, Artificial Sequence
  Description of Artificial Sequence: Synthetic oligonucleotide
  X-linked inhibitor of apoptosis (XIAP) siRNA
atgtgaactgactttaagtaatc

SEQ ID NO: 11948 - DNA, 23 bp, Artificial Sequence
  Description of Artificial Sequence: Synthetic oligonucleotide
  X-linked inhibitor of apoptosis (XIAP) siRNA
tgtgaactgactttaagtaatca

SEQ ID NO: 11949 - DNA, 23 bp, Artificial Sequence
  Description of Artificial Sequence: Synthetic oligonucleotide
  X-linked inhibitor of apoptosis (XIAP) siRNA
gtgaactgactttaagtaatcag

SEQ ID NO: 11950 - DNA, 23 bp, Artificial Sequence
  Description of Artificial Sequence: Synthetic oligonucleotide
  X-linked inhibitor of apoptosis (XIAP) siRNA
tgaactgactttaagtaatcagg

SEQ ID NO: 11951 - DNA, 23 bp, Artificial Sequence
  Description of Artificial Sequence: Synthetic oligonucleotide
  X-linked inhibitor of apoptosis (XIAP) siRNA
gaactgactttaagtaatcagga

SEQ ID NO: 11952 - DNA, 23 bp, Artificial Sequence
  Description of Artificial Sequence: Synthetic oligonucleotide
  X-linked inhibitor of apoptosis (XIAP) siRNA
aactgactttaagtaatcaggat

SEQ ID NO: 11953 - DNA, 23 bp, Artificial Sequence
  Description of Artificial Sequence: Synthetic oligonucleotide
  X-linked inhibitor of apoptosis (XIAP) siRNA
actgactttaagtaatcaggatt

SEQ ID NO: 11954 - DNA, 23 bp, Artificial Sequence
  Description of Artificial Sequence: Synthetic oligonucleotide
  X-linked inhibitor of apoptosis (XIAP) siRNA
ctgactttaagtaatcaggattg

SEQ ID NO: 11955 - DNA, 23 bp, Artificial Sequence
  Description of Artificial Sequence: Synthetic oligonucleotide
  X-linked inhibitor of apoptosis (XIAP) siRNA
tgactttaagtaatcaggattga

SEQ ID NO: 11956 - DNA, 23 bp, Artificial Sequence
  Description of Artificial Sequence: Synthetic oligonucleotide
  X-linked inhibitor of apoptosis (XIAP) siRNA
gactttaagtaatcaggattgaa

SEQ ID NO: 11957 - DNA, 23 bp, Artificial Sequence
  Description of Artificial Sequence: Synthetic oligonucleotide
  X-linked inhibitor of apoptosis (XIAP) siRNA
actttaagtaatcaggattgaat

SEQ ID NO: 11958 - DNA, 23 bp, Artificial Sequence
  Description of Artificial Sequence: Synthetic oligonucleotide
  X-linked inhibitor of apoptosis (XIAP) siRNA
ctttaagtaatcaggattgaatt

SEQ ID NO: 11959 - DNA, 23 bp, Artificial Sequence
  Description of Artificial Sequence: Synthetic oligonucleotide
  X-linked inhibitor of apoptosis (XIAP) siRNA
tttaagtaatcaggattgaattc

SEQ ID NO: 11960 - DNA, 23 bp, Artificial Sequence
  Description of Artificial Sequence: Synthetic oligonucleotide
  X-linked inhibitor of apoptosis (XIAP) siRNA
ttaagtaatcaggattgaattcc

SEQ ID NO: 11961 - DNA, 23 bp, Artificial Sequence
  Description of Artificial Sequence: Synthetic oligonucleotide
  X-linked inhibitor of apoptosis (XIAP) siRNA
taagtaatcaggattgaattcca

SEQ ID NO: 11962 - DNA, 23 bp, Artificial Sequence
  Description of Artificial Sequence: Synthetic oligonucleotide
  X-linked inhibitor of apoptosis (XIAP) siRNA
aagtaatcaggattgaattccat

SEQ ID NO: 11963 - DNA, 23 bp, Artificial Sequence
  Description of Artificial Sequence: Synthetic oligonucleotide
  X-linked inhibitor of apoptosis (XIAP) siRNA
agtaatcaggattgaattccatt

SEQ ID NO: 11964 - DNA, 23 bp, Artificial Sequence
  Description of Artificial Sequence: Synthetic oligonucleotide
  X-linked inhibitor of apoptosis (XIAP) siRNA
gtaatcaggattgaattccatta

SEQ ID NO: 11965 - DNA, 23 bp, Artificial Sequence
  Description of Artificial Sequence: Synthetic oligonucleotide
  X-linked inhibitor of apoptosis (XIAP) siRNA
taatcaggattgaattccattag

SEQ ID NO: 11966 - DNA, 23 bp, Artificial Sequence
  Description of Artificial Sequence: Synthetic oligonucleotide
  X-linked inhibitor of apoptosis (XIAP) siRNA
aatcaggattgaattccattagc

SEQ ID NO: 11967 - DNA, 23 bp, Artificial Sequence
  Description of Artificial Sequence: Synthetic oligonucleotide
  X-linked inhibitor of apoptosis (XIAP) siRNA
atcaggattgaattccattagca

SEQ ID NO: 11968 - DNA, 23 bp, Artificial Sequence
  Description of Artificial Sequence: Synthetic oligonucleotide
  X-linked inhibitor of apoptosis (XIAP) siRNA
tcaggattgaattccattagcat

SEQ ID NO: 11969 - DNA, 23 bp, Artificial Sequence
  Description of Artificial Sequence: Synthetic oligonucleotide
  X-linked inhibitor of apoptosis (XIAP) siRNA
caggattgaattccattagcatt

SEQ ID NO: 11970 - DNA, 23 bp, Artificial Sequence
  Description of Artificial Sequence: Synthetic oligonucleotide
  X-linked inhibitor of apoptosis (XIAP) siRNA
aggattgaattccattagcattt

SEQ ID NO: 11971 - DNA, 23 bp, Artificial Sequence
  Description of Artificial Sequence: Synthetic oligonucleotide
  X-linked inhibitor of apoptosis (XIAP) siRNA
ggattgaattccattagcatttg

SEQ ID NO: 11972 - DNA, 23 bp, Artificial Sequence
  Description of Artificial Sequence: Synthetic oligonucleotide
  X-linked inhibitor of apoptosis (XIAP) siRNA
gattgaattccattagcatttgc

SEQ ID NO: 11973 - DNA, 23 bp, Artificial Sequence
  Description of Artificial Sequence: Synthetic oligonucleotide
  X-linked inhibitor of apoptosis (XIAP) siRNA
attgaattccattagcatttgct

SEQ ID NO: 11974 - DNA, 23 bp, Artificial Sequence
  Description of Artificial Sequence: Synthetic oligonucleotide
  X-linked inhibitor of apoptosis (XIAP) siRNA
ttgaattccattagcatttgcta

SEQ ID NO: 11975 - DNA, 23 bp, Artificial Sequence
  Description of Artificial Sequence: Synthetic oligonucleotide
  X-linked inhibitor of apoptosis (XIAP) siRNA
tgaattccattagcatttgctac

SEQ ID NO: 11976 - DNA, 23 bp, Artificial Sequence
  Description of Artificial Sequence: Synthetic oligonucleotide
  X-linked inhibitor of apoptosis (XIAP) siRNA
gaattccattagcatttgctacc

SEQ ID NO: 11977 - DNA, 23 bp, Artificial Sequence
  Description of Artificial Sequence: Synthetic oligonucleotide
  X-linked inhibitor of apoptosis (XIAP) siRNA
aattccattagcatttgctacca

SEQ ID NO: 11978 - DNA, 23 bp, Artificial Sequence
  Description of Artificial Sequence: Synthetic oligonucleotide
  X-linked inhibitor of apoptosis (XIAP) siRNA
attccattagcatttgctaccaa

SEQ ID NO: 11979 - DNA, 23 bp, Artificial Sequence
  Description of Artificial Sequence: Synthetic oligonucleotide
  X-linked inhibitor of apoptosis (XIAP) siRNA
ttccattagcatttgctaccaag

SEQ ID NO: 11980 - DNA, 23 bp, Artificial Sequence
  Description of Artificial Sequence: Synthetic oligonucleotide
  X-linked inhibitor of apoptosis (XIAP) siRNA
tccattagcatttgctaccaagt

SEQ ID NO: 11981 - DNA, 23 bp, Artificial Sequence
  Description of Artificial Sequence: Synthetic oligonucleotide
  X-linked inhibitor of apoptosis (XIAP) siRNA
ccattagcatttgctaccaagta

SEQ ID NO: 11982 - DNA, 23 bp, Artificial Sequence
  Description of Artificial Sequence: Synthetic oligonucleotide
  X-linked inhibitor of apoptosis (XIAP) siRNA
cattagcatttgctaccaagtag

SEQ ID NO: 11983 - DNA, 23 bp, Artificial Sequence
  Description of Artificial Sequence: Synthetic oligonucleotide
  X-linked inhibitor of apoptosis (XIAP) siRNA
attagcatttgctaccaagtagg

SEQ ID NO: 11984 - DNA, 23 bp, Artificial Sequence
  Description of Artificial Sequence: Synthetic oligonucleotide
  X-linked inhibitor of apoptosis (XIAP) siRNA
ttagcatttgctaccaagtagga

SEQ ID NO: 11985 - DNA, 23 bp, Artificial Sequence
  Description of Artificial Sequence: Synthetic oligonucleotide
  X-linked inhibitor of apoptosis (XIAP) siRNA
tagcatttgctaccaagtaggaa

SEQ ID NO: 11986 - DNA, 23 bp, Artificial Sequence
  Description of Artificial Sequence: Synthetic oligonucleotide
  X-linked inhibitor of apoptosis (XIAP) siRNA
agcatttgctaccaagtaggaaa

SEQ ID NO: 11987 - DNA, 23 bp, Artificial Sequence
  Description of Artificial Sequence: Synthetic oligonucleotide
  X-linked inhibitor of apoptosis (XIAP) siRNA
gcatttgctaccaagtaggaaaa

SEQ ID NO: 11988 - DNA, 23 bp, Artificial Sequence
  Description of Artificial Sequence: Synthetic oligonucleotide
  X-linked inhibitor of apoptosis (XIAP) siRNA
catttgctaccaagtaggaaaaa

SEQ ID NO: 11989 - DNA, 23 bp, Artificial Sequence
  Description of Artificial Sequence: Synthetic oligonucleotide
  X-linked inhibitor of apoptosis (XIAP) siRNA
atttgctaccaagtaggaaaaaa

SEQ ID NO: 11990 - DNA, 23 bp, Artificial Sequence
  Description of Artificial Sequence: Synthetic oligonucleotide
  X-linked inhibitor of apoptosis (XIAP) siRNA
tttgctaccaagtaggaaaaaaa

SEQ ID NO: 11991 - DNA, 23 bp, Artificial Sequence
  Description of Artificial Sequence: Synthetic oligonucleotide
  X-linked inhibitor of apoptosis (XIAP) siRNA
ttgctaccaagtaggaaaaaaaa

SEQ ID NO: 11992 - DNA, 23 bp, Artificial Sequence
  Description of Artificial Sequence: Synthetic oligonucleotide
  X-linked inhibitor of apoptosis (XIAP) siRNA
tgctaccaagtaggaaaaaaaat

SEQ ID NO: 11993 - DNA, 23 bp, Artificial Sequence
  Description of Artificial Sequence: Synthetic oligonucleotide
  X-linked inhibitor of apoptosis (XIAP) siRNA
gctaccaagtaggaaaaaaaatg

SEQ ID NO: 11994 - DNA, 23 bp, Artificial Sequence
  Description of Artificial Sequence: Synthetic oligonucleotide
  X-linked inhibitor of apoptosis (XIAP) siRNA
ctaccaagtaggaaaaaaaatgt

SEQ ID NO: 11995 - DNA, 23 bp, Artificial Sequence
  Description of Artificial Sequence: Synthetic oligonucleotide
  X-linked inhibitor of apoptosis (XIAP) siRNA
taccaagtaggaaaaaaaatgta

SEQ ID NO: 11996 - DNA, 23 bp, Artificial Sequence
  Description of Artificial Sequence: Synthetic oligonucleotide
  X-linked inhibitor of apoptosis (XIAP) siRNA
accaagtaggaaaaaaaatgtac

SEQ ID NO: 11997 - DNA, 23 bp, Artificial Sequence
  Description of Artificial Sequence: Synthetic oligonucleotide
  X-linked inhibitor of apoptosis (XIAP) siRNA
ccaagtaggaaaaaaaatgtaca

SEQ ID NO: 11998 - DNA, 23 bp, Artificial Sequence
  Description of Artificial Sequence: Synthetic oligonucleotide
  X-linked inhibitor of apoptosis (XIAP) siRNA
caagtaggaaaaaaaatgtacat

SEQ ID NO: 11999 - DNA, 23 bp, Artificial Sequence
  Description of Artificial Sequence: Synthetic oligonucleotide
  X-linked inhibitor of apoptosis (XIAP) siRNA
aagtaggaaaaaaaatgtacatg

SEQ ID NO: 12000 - DNA, 23 bp, Artificial Sequence
  Description of Artificial Sequence: Synthetic oligonucleotide
  X-linked inhibitor of apoptosis (XIAP) siRNA
agtaggaaaaaaaatgtacatgg

SEQ ID NO: 12001 - DNA, 23 bp, Artificial Sequence
  Description of Artificial Sequence: Synthetic oligonucleotide
  X-linked inhibitor of apoptosis (XIAP) siRNA
gtaggaaaaaaaatgtacatggc

SEQ ID NO: 12002 - DNA, 23 bp, Artificial Sequence
  Description of Artificial Sequence: Synthetic oligonucleotide
  X-linked inhibitor of apoptosis (XIAP) siRNA
taggaaaaaaaatgtacatggca

SEQ ID NO: 12003 - DNA, 23 bp, Artificial Sequence
  Description of Artificial Sequence: Synthetic oligonucleotide
  X-linked inhibitor of apoptosis (XIAP) siRNA
aggaaaaaaaatgtacatggcag

SEQ ID NO: 12004 - DNA, 23 bp, Artificial Sequence
  Description of Artificial Sequence: Synthetic oligonucleotide
  X-linked inhibitor of apoptosis (XIAP) siRNA
ggaaaaaaaatgtacatggcagt

SEQ ID NO: 12005 - DNA, 23 bp, Artificial Sequence
  Description of Artificial Sequence: Synthetic oligonucleotide
  X-linked inhibitor of apoptosis (XIAP) siRNA
gaaaaaaaatgtacatggcagtg

SEQ ID NO: 12006 - DNA, 23 bp, Artificial Sequence
  Description of Artificial Sequence: Synthetic oligonucleotide
  X-linked inhibitor of apoptosis (XIAP) siRNA
aaaaaaaatgtacatggcagtgt

SEQ ID NO: 12007 - DNA, 23 bp, Artificial Sequence
  Description of Artificial Sequence: Synthetic oligonucleotide
  X-linked inhibitor of apoptosis (XIAP) siRNA
aaaaaaatgtacatggcagtgtt

SEQ ID NO: 12008 - DNA, 23 bp, Artificial Sequence
  Description of Artificial Sequence: Synthetic oligonucleotide
  X-linked inhibitor of apoptosis (XIAP) siRNA
aaaaaatgtacatggcagtgttt

SEQ ID NO: 12009 - DNA, 23 bp, Artificial Sequence
  Description of Artificial Sequence: Synthetic oligonucleotide
  X-linked inhibitor of apoptosis (XIAP) siRNA
aaaaatgtacatggcagtgtttt

SEQ ID NO: 12010 - DNA, 23 bp, Artificial Sequence
  Description of Artificial Sequence: Synthetic oligonucleotide
  X-linked inhibitor of apoptosis (XIAP) siRNA
aaaatgtacatggcagtgtttta

SEQ ID NO: 12011 - DNA, 23 bp, Artificial Sequence
  Description of Artificial Sequence: Synthetic oligonucleotide
  X-linked inhibitor of apoptosis (XIAP) siRNA
aaatgtacatggcagtgttttag

SEQ ID NO: 12012 - DNA, 23 bp, Artificial Sequence
  Description of Artificial Sequence: Synthetic oligonucleotide
  X-linked inhibitor of apoptosis (XIAP) siRNA
aatgtacatggcagtgttttagt

SEQ ID NO: 12013 - DNA, 23 bp, Artificial Sequence
  Description of Artificial Sequence: Synthetic oligonucleotide
  X-linked inhibitor of apoptosis (XIAP) siRNA
atgtacatggcagtgttttagtt

SEQ ID NO: 12014 - DNA, 23 bp, Artificial Sequence
  Description of Artificial Sequence: Synthetic oligonucleotide
  X-linked inhibitor of apoptosis (XIAP) siRNA
tgtacatggcagtgttttagttg

SEQ ID NO: 12015 - DNA, 23 bp, Artificial Sequence
  Description of Artificial Sequence: Synthetic oligonucleotide
  X-linked inhibitor of apoptosis (XIAP) siRNA
gtacatggcagtgttttagttgg

SEQ ID NO: 12016 - DNA, 23 bp, Artificial Sequence
  Description of Artificial Sequence: Synthetic oligonucleotide
  X-linked inhibitor of apoptosis (XIAP) siRNA
tacatggcagtgttttagttggc

SEQ ID NO: 12017 - DNA, 23 bp, Artificial Sequence
  Description of Artificial Sequence: Synthetic oligonucleotide
  X-linked inhibitor of apoptosis (XIAP) siRNA
acatggcagtgttttagttggca

SEQ ID NO: 12018 - DNA, 23 bp, Artificial Sequence
  Description of Artificial Sequence: Synthetic oligonucleotide
  X-linked inhibitor of apoptosis (XIAP) siRNA
catggcagtgttttagttggcaa

SEQ ID NO: 12019 - DNA, 23 bp, Artificial Sequence
  Description of Artificial Sequence: Synthetic oligonucleotide
  X-linked inhibitor of apoptosis (XIAP) siRNA
atggcagtgttttagttggcaat

SEQ ID NO: 12020 - DNA, 23 bp, Artificial Sequence
  Description of Artificial Sequence: Synthetic oligonucleotide
  X-linked inhibitor of apoptosis (XIAP) siRNA
tggcagtgttttagttggcaata

SEQ ID NO: 12021 - DNA, 23 bp, Artificial Sequence
  Description of Artificial Sequence: Synthetic oligonucleotide
  X-linked inhibitor of apoptosis (XIAP) siRNA
ggcagtgttttagttggcaatat

SEQ ID NO: 12022 - DNA, 23 bp, Artificial Sequence
  Description of Artificial Sequence: Synthetic oligonucleotide
  X-linked inhibitor of apoptosis (XIAP) siRNA
gcagtgttttagttggcaatata

SEQ ID NO: 12023 - DNA, 23 bp, Artificial Sequence
  Description of Artificial Sequence: Synthetic oligonucleotide
  X-linked inhibitor of apoptosis (XIAP) siRNA
cagtgttttagttggcaatataa

SEQ ID NO: 12024 - DNA, 23 bp, Artificial Sequence
  Description of Artificial Sequence: Synthetic oligonucleotide
  X-linked inhibitor of apoptosis (XIAP) siRNA
agtgttttagttggcaatataat

SEQ ID NO: 12025 - DNA, 23 bp, Artificial Sequence
  Description of Artificial Sequence: Synthetic oligonucleotide
  X-linked inhibitor of apoptosis (XIAP) siRNA
gtgttttagttggcaatataatc

SEQ ID NO: 12026 - DNA, 23 bp, Artificial Sequence
  Description of Artificial Sequence: Synthetic oligonucleotide
  X-linked inhibitor of apoptosis (XIAP) siRNA
tgttttagttggcaatataatct

SEQ ID NO: 12027 - DNA, 23 bp, Artificial Sequence
  Description of Artificial Sequence: Synthetic oligonucleotide
  X-linked inhibitor of apoptosis (XIAP) siRNA
gttttagttggcaatataatctt

SEQ ID NO: 12028 - DNA, 23 bp, Artificial Sequence
  Description of Artificial Sequence: Synthetic oligonucleotide
  X-linked inhibitor of apoptosis (XIAP) siRNA
ttttagttggcaatataatcttt

SEQ ID NO: 12029 - DNA, 23 bp, Artificial Sequence
  Description of Artificial Sequence: Synthetic oligonucleotide
  X-linked inhibitor of apoptosis (XIAP) siRNA
tttagttggcaatataatctttg

SEQ ID NO: 12030 - DNA, 23 bp, Artificial Sequence
  Description of Artificial Sequence: Synthetic oligonucleotide
  X-linked inhibitor of apoptosis (XIAP) siRNA
ttagttggcaatataatctttga

SEQ ID NO: 12031 - DNA, 23 bp, Artificial Sequence
  Description of Artificial Sequence: Synthetic oligonucleotide
  X-linked inhibitor of apoptosis (XIAP) siRNA
tagttggcaatataatctttgaa

SEQ ID NO: 12032 - DNA, 23 bp, Artificial Sequence
  Description of Artificial Sequence: Synthetic oligonucleotide
  X-linked inhibitor of apoptosis (XIAP) siRNA
agttggcaatataatctttgaat

SEQ ID NO: 12033 - DNA, 23 bp, Artificial Sequence
  Description of Artificial Sequence: Synthetic oligonucleotide
  X-linked inhibitor of apoptosis (XIAP) siRNA
gttggcaatataatctttgaatt

SEQ ID NO: 12034 - DNA, 23 bp, Artificial Sequence
  Description of Artificial Sequence: Synthetic oligonucleotide
  X-linked inhibitor of apoptosis (XIAP) siRNA
ttggcaatataatctttgaattt

SEQ ID NO: 12035 - DNA, 23 bp, Artificial Sequence
  Description of Artificial Sequence: Synthetic oligonucleotide
  X-linked inhibitor of apoptosis (XIAP) siRNA
tggcaatataatctttgaatttc

SEQ ID NO: 12036 - DNA, 23 bp, Artificial Sequence
  Description of Artificial Sequence: Synthetic oligonucleotide
  X-linked inhibitor of apoptosis (XIAP) siRNA
ggcaatataatctttgaatttct

SEQ ID NO: 12037 - DNA, 23 bp, Artificial Sequence
  Description of Artificial Sequence: Synthetic oligonucleotide
  X-linked inhibitor of apoptosis (XIAP) siRNA
gcaatataatctttgaatttctt

SEQ ID NO: 12038 - DNA, 23 bp, Artificial Sequence
  Description of Artificial Sequence: Synthetic oligonucleotide
  X-linked inhibitor of apoptosis (XIAP) siRNA
caatataatctttgaatttcttg

SEQ ID NO: 12039 - DNA, 23 bp, Artificial Sequence
  Description of Artificial Sequence: Synthetic oligonucleotide
  X-linked inhibitor of apoptosis (XIAP) siRNA
aatataatctttgaatttcttga

SEQ ID NO: 12040 - DNA, 23 bp, Artificial Sequence
  Description of Artificial Sequence: Synthetic oligonucleotide
  X-linked inhibitor of apoptosis (XIAP) siRNA
atataatctttgaatttcttgat

SEQ ID NO: 12041 - DNA, 23 bp, Artificial Sequence
  Description of Artificial Sequence: Synthetic oligonucleotide
  X-linked inhibitor of apoptosis (XIAP) siRNA
tataatctttgaatttcttgatt

SEQ ID NO: 12042 - DNA, 23 bp, Artificial Sequence
  Description of Artificial Sequence: Synthetic oligonucleotide
  X-linked inhibitor of apoptosis (XIAP) siRNA
ataatctttgaatttcttgattt

SEQ ID NO: 12043 - DNA, 23 bp, Artificial Sequence
  Description of Artificial Sequence: Synthetic oligonucleotide
  X-linked inhibitor of apoptosis (XIAP) siRNA
taatctttgaatttcttgatttt

SEQ ID NO: 12044 - DNA, 23 bp, Artificial Sequence
  Description of Artificial Sequence: Synthetic oligonucleotide
  X-linked inhibitor of apoptosis (XIAP) siRNA
aatctttgaatttcttgattttt

SEQ ID NO: 12045 - DNA, 23 bp, Artificial Sequence
  Description of Artificial Sequence: Synthetic oligonucleotide
  X-linked inhibitor of apoptosis (XIAP) siRNA
atctttgaatttcttgatttttc

SEQ ID NO: 12046 - DNA, 23 bp, Artificial Sequence
  Description of Artificial Sequence: Synthetic oligonucleotide
  X-linked inhibitor of apoptosis (XIAP) siRNA
tctttgaatttcttgatttttca

SEQ ID NO: 12047 - DNA, 23 bp, Artificial Sequence
  Description of Artificial Sequence: Synthetic oligonucleotide
  X-linked inhibitor of apoptosis (XIAP) siRNA
ctttgaatttcttgatttttcag

SEQ ID NO: 12048 - DNA, 23 bp, Artificial Sequence
  Description of Artificial Sequence: Synthetic oligonucleotide
  X-linked inhibitor of apoptosis (XIAP) siRNA
tttgaatttcttgatttttcagg

SEQ ID NO: 12049 - DNA, 23 bp, Artificial Sequence
  Description of Artificial Sequence: Synthetic oligonucleotide
  X-linked inhibitor of apoptosis (XIAP) siRNA
ttgaatttcttgatttttcaggg

SEQ ID NO: 12050 - DNA, 23 bp, Artificial Sequence
  Description of Artificial Sequence: Synthetic oligonucleotide
  X-linked inhibitor of apoptosis (XIAP) siRNA
tgaatttcttgatttttcagggt

SEQ ID NO: 12051 - DNA, 23 bp, Artificial Sequence
  Description of Artificial Sequence: Synthetic oligonucleotide
  X-linked inhibitor of apoptosis (XIAP) siRNA
gaatttcttgatttttcagggta

SEQ ID NO: 12052 - DNA, 23 bp, Artificial Sequence
  Description of Artificial Sequence: Synthetic oligonucleotide
  X-linked inhibitor of apoptosis (XIAP) siRNA
aatttcttgatttttcagggtat

SEQ ID NO: 12053 - DNA, 23 bp, Artificial Sequence
  Description of Artificial Sequence: Synthetic oligonucleotide
  X-linked inhibitor of apoptosis (XIAP) siRNA
atttcttgatttttcagggtatt

SEQ ID NO: 12054 - DNA, 23 bp, Artificial Sequence
  Description of Artificial Sequence: Synthetic oligonucleotide
  X-linked inhibitor of apoptosis (XIAP) siRNA
tttcttgatttttcagggtatta

SEQ ID NO: 12055 - DNA, 23 bp, Artificial Sequence
  Description of Artificial Sequence: Synthetic oligonucleotide
  X-linked inhibitor of apoptosis (XIAP) siRNA
ttcttgatttttcagggtattag

SEQ ID NO: 12056 - DNA, 23 bp, Artificial Sequence
  Description of Artificial Sequence: Synthetic oligonucleotide
  X-linked inhibitor of apoptosis (XIAP) siRNA
tcttgatttttcagggtattagc

SEQ ID NO: 12057 - DNA, 23 bp, Artificial Sequence
  Description of Artificial Sequence: Synthetic oligonucleotide
  X-linked inhibitor of apoptosis (XIAP) siRNA
cttgatttttcagggtattagct

SEQ ID NO: 12058 - DNA, 23 bp, Artificial Sequence
  Description of Artificial Sequence: Synthetic oligonucleotide
  X-linked inhibitor of apoptosis (XIAP) siRNA
ttgatttttcagggtattagctg

SEQ ID NO: 12059 - DNA, 23 bp, Artificial Sequence
  Description of Artificial Sequence: Synthetic oligonucleotide
  X-linked inhibitor of apoptosis (XIAP) siRNA
tgatttttcagggtattagctgt

SEQ ID NO: 12060 - DNA, 23 bp, Artificial Sequence
  Description of Artificial Sequence: Synthetic oligonucleotide
  X-linked inhibitor of apoptosis (XIAP) siRNA
gatttttcagggtattagctgta

SEQ ID NO: 12061 - DNA, 23 bp, Artificial Sequence
  Description of Artificial Sequence: Synthetic oligonucleotide
  X-linked inhibitor of apoptosis (XIAP) siRNA
atttttcagggtattagctgtat

SEQ ID NO: 12062 - DNA, 23 bp, Artificial Sequence
  Description of Artificial Sequence: Synthetic oligonucleotide
  X-linked inhibitor of apoptosis (XIAP) siRNA
tttttcagggtattagctgtatt

SEQ ID NO: 12063 - DNA, 23 bp, Artificial Sequence
  Description of Artificial Sequence: Synthetic oligonucleotide
  X-linked inhibitor of apoptosis (XIAP) siRNA
ttttcagggtattagctgtatta

SEQ ID NO: 12064 - DNA, 23 bp, Artificial Sequence
  Description of Artificial Sequence: Synthetic oligonucleotide
  X-linked inhibitor of apoptosis (XIAP) siRNA
tttcagggtattagctgtattat

SEQ ID NO: 12065 - DNA, 23 bp, Artificial Sequence
  Description of Artificial Sequence: Synthetic oligonucleotide
  X-linked inhibitor of apoptosis (XIAP) siRNA
ttcagggtattagctgtattatc

SEQ ID NO: 12066 - DNA, 23 bp, Artificial Sequence
  Description of Artificial Sequence: Synthetic oligonucleotide
  X-linked inhibitor of apoptosis (XIAP) siRNA
tcagggtattagctgtattatcc

SEQ ID NO: 12067 - DNA, 23 bp, Artificial Sequence
  Description of Artificial Sequence: Synthetic oligonucleotide
  X-linked inhibitor of apoptosis (XIAP) siRNA
cagggtattagctgtattatcca

SEQ ID NO: 12068 - DNA, 23 bp, Artificial Sequence
  Description of Artificial Sequence: Synthetic oligonucleotide
  X-linked inhibitor of apoptosis (XIAP) siRNA
agggtattagctgtattatccat

SEQ ID NO: 12069 - DNA, 23 bp, Artificial Sequence
  Description of Artificial Sequence: Synthetic oligonucleotide
  X-linked inhibitor of apoptosis (XIAP) siRNA
gggtattagctgtattatccatt

SEQ ID NO: 12070 - DNA, 23 bp, Artificial Sequence
  Description of Artificial Sequence: Synthetic oligonucleotide
  X-linked inhibitor of apoptosis (XIAP) siRNA
ggtattagctgtattatccattt

SEQ ID NO: 12071 - DNA, 23 bp, Artificial Sequence
  Description of Artificial Sequence: Synthetic oligonucleotide
  X-linked inhibitor of apoptosis (XIAP) siRNA
gtattagctgtattatccatttt

SEQ ID NO: 12072 - DNA, 23 bp, Artificial Sequence
  Description of Artificial Sequence: Synthetic oligonucleotide
  X-linked inhibitor of apoptosis (XIAP) siRNA
tattagctgtattatccattttt

SEQ ID NO: 12073 - DNA, 23 bp, Artificial Sequence
  Description of Artificial Sequence: Synthetic oligonucleotide
  X-linked inhibitor of apoptosis (XIAP) siRNA
attagctgtattatccatttttt

SEQ ID NO: 12074 - DNA, 23 bp, Artificial Sequence
  Description of Artificial Sequence: Synthetic oligonucleotide
  X-linked inhibitor of apoptosis (XIAP) siRNA
ttagctgtattatccattttttt

SEQ ID NO: 12075 - DNA, 23 bp, Artificial Sequence
  Description of Artificial Sequence: Synthetic oligonucleotide
  X-linked inhibitor of apoptosis (XIAP) siRNA
tagctgtattatccatttttttt

SEQ ID NO: 12076 - DNA, 23 bp, Artificial Sequence
  Description of Artificial Sequence: Synthetic oligonucleotide
  X-linked inhibitor of apoptosis (XIAP) siRNA
agctgtattatccatttttttta

SEQ ID NO: 12077 - DNA, 23 bp, Artificial Sequence
  Description of Artificial Sequence: Synthetic oligonucleotide
  X-linked inhibitor of apoptosis (XIAP) siRNA
gctgtattatccattttttttac

SEQ ID NO: 12078 - DNA, 23 bp, Artificial Sequence
  Description of Artificial Sequence: Synthetic oligonucleotide
  X-linked inhibitor of apoptosis (XIAP) siRNA
ctgtattatccattttttttact

SEQ ID NO: 12079 - DNA, 23 bp, Artificial Sequence
  Description of Artificial Sequence: Synthetic oligonucleotide
  X-linked inhibitor of apoptosis (XIAP) siRNA
tgtattatccattttttttactg

SEQ ID NO: 12080 - DNA, 23 bp, Artificial Sequence
  Description of Artificial Sequence: Synthetic oligonucleotide
  X-linked inhibitor of apoptosis (XIAP) siRNA
gtattatccattttttttactgt

SEQ ID NO: 12081 - DNA, 23 bp, Artificial Sequence
  Description of Artificial Sequence: Synthetic oligonucleotide
  X-linked inhibitor of apoptosis (XIAP) siRNA
tattatccattttttttactgtt

SEQ ID NO: 12082 - DNA, 23 bp, Artificial Sequence
  Description of Artificial Sequence: Synthetic oligonucleotide
  X-linked inhibitor of apoptosis (XIAP) siRNA
attatccattttttttactgtta

SEQ ID NO: 12083 - DNA, 23 bp, Artificial Sequence
  Description of Artificial Sequence: Synthetic oligonucleotide
  X-linked inhibitor of apoptosis (XIAP) siRNA
ttatccattttttttactgttat

SEQ ID NO: 12084 - DNA, 23 bp, Artificial Sequence
  Description of Artificial Sequence: Synthetic oligonucleotide
  X-linked inhibitor of apoptosis (XIAP) siRNA
tatccattttttttactgttatt

SEQ ID NO: 12085 - DNA, 23 bp, Artificial Sequence
  Description of Artificial Sequence: Synthetic oligonucleotide
  X-linked inhibitor of apoptosis (XIAP) siRNA
atccattttttttactgttattt

SEQ ID NO: 12086 - DNA, 23 bp, Artificial Sequence
  Description of Artificial Sequence: Synthetic oligonucleotide
  X-linked inhibitor of apoptosis (XIAP) siRNA
tccattttttttactgttattta

SEQ ID NO: 12087 - DNA, 23 bp, Artificial Sequence
  Description of Artificial Sequence: Synthetic oligonucleotide
  X-linked inhibitor of apoptosis (XIAP) siRNA
ccattttttttactgttatttaa

SEQ ID NO: 12088 - DNA, 23 bp, Artificial Sequence
  Description of Artificial Sequence: Synthetic oligonucleotide
  X-linked inhibitor of apoptosis (XIAP) siRNA
cattttttttactgttatttaat

SEQ ID NO: 12089 - DNA, 23 bp, Artificial Sequence
  Description of Artificial Sequence: Synthetic oligonucleotide
  X-linked inhibitor of apoptosis (XIAP) siRNA
attttttttactgttatttaatt

SEQ ID NO: 12090 - DNA, 23 bp, Artificial Sequence
  Description of Artificial Sequence: Synthetic oligonucleotide
  X-linked inhibitor of apoptosis (XIAP) siRNA
ttttttttactgttatttaattg

SEQ ID NO: 12091 - DNA, 23 bp, Artificial Sequence
  Description of Artificial Sequence: Synthetic oligonucleotide
  X-linked inhibitor of apoptosis (XIAP) siRNA
tttttttactgttatttaattga

SEQ ID NO: 12092 - DNA, 23 bp, Artificial Sequence
  Description of Artificial Sequence: Synthetic oligonucleotide
  X-linked inhibitor of apoptosis (XIAP) siRNA
ttttttactgttatttaattgaa

SEQ ID NO: 12093 - DNA, 23 bp, Artificial Sequence
  Description of Artificial Sequence: Synthetic oligonucleotide
  X-linked inhibitor of apoptosis (XIAP) siRNA
tttttactgttatttaattgaaa

SEQ ID NO: 12094 - DNA, 23 bp, Artificial Sequence
  Description of Artificial Sequence: Synthetic oligonucleotide
  X-linked inhibitor of apoptosis (XIAP) siRNA
ttttactgttatttaattgaaac

SEQ ID NO: 12095 - DNA, 23 bp, Artificial Sequence
  Description of Artificial Sequence: Synthetic oligonucleotide
  X-linked inhibitor of apoptosis (XIAP) siRNA
tttactgttatttaattgaaacc

SEQ ID NO: 12096 - DNA, 23 bp, Artificial Sequence
  Description of Artificial Sequence: Synthetic oligonucleotide
  X-linked inhibitor of apoptosis (XIAP) siRNA
ttactgttatttaattgaaacca

SEQ ID NO: 12097 - DNA, 23 bp, Artificial Sequence
  Description of Artificial Sequence: Synthetic oligonucleotide
  X-linked inhibitor of apoptosis (XIAP) siRNA
tactgttatttaattgaaaccat

SEQ ID NO: 12098 - DNA, 23 bp, Artificial Sequence
  Description of Artificial Sequence: Synthetic oligonucleotide
  X-linked inhibitor of apoptosis (XIAP) siRNA
actgttatttaattgaaaccata

SEQ ID NO: 12099 - DNA, 23 bp, Artificial Sequence
  Description of Artificial Sequence: Synthetic oligonucleotide
  X-linked inhibitor of apoptosis (XIAP) siRNA
ctgttatttaattgaaaccatag

SEQ ID NO: 12100 - DNA, 23 bp, Artificial Sequence
  Description of Artificial Sequence: Synthetic oligonucleotide
  X-linked inhibitor of apoptosis (XIAP) siRNA
tgttatttaattgaaaccataga

SEQ ID NO: 12101 - DNA, 23 bp, Artificial Sequence
  Description of Artificial Sequence: Synthetic oligonucleotide
  X-linked inhibitor of apoptosis (XIAP) siRNA
gttatttaattgaaaccatagac

SEQ ID NO: 12102 - DNA, 23 bp, Artificial Sequence
  Description of Artificial Sequence: Synthetic oligonucleotide
  X-linked inhibitor of apoptosis (XIAP) siRNA
ttatttaattgaaaccatagact

SEQ ID NO: 12103 - DNA, 23 bp, Artificial Sequence
  Description of Artificial Sequence: Synthetic oligonucleotide
  X-linked inhibitor of apoptosis (XIAP) siRNA
tatttaattgaaaccatagacta

SEQ ID NO: 12104 - DNA, 23 bp, Artificial Sequence
  Description of Artificial Sequence: Synthetic oligonucleotide
  X-linked inhibitor of apoptosis (XIAP) siRNA
atttaattgaaaccatagactaa

SEQ ID NO: 12105 - DNA, 23 bp, Artificial Sequence
  Description of Artificial Sequence: Synthetic oligonucleotide
  X-linked inhibitor of apoptosis (XIAP) siRNA
tttaattgaaaccatagactaag

SEQ ID NO: 12106 - DNA, 23 bp, Artificial Sequence
  Description of Artificial Sequence: Synthetic oligonucleotide
  X-linked inhibitor of apoptosis (XIAP) siRNA
ttaattgaaaccatagactaaga

SEQ ID NO: 12107 - DNA, 23 bp, Artificial Sequence
  Description of Artificial Sequence: Synthetic oligonucleotide
  X-linked inhibitor of apoptosis (XIAP) siRNA
taattgaaaccatagactaagaa

SEQ ID NO: 12108 - DNA, 23 bp, Artificial Sequence
  Description of Artificial Sequence: Synthetic oligonucleotide
  X-linked inhibitor of apoptosis (XIAP) siRNA
aattgaaaccatagactaagaat

SEQ ID NO: 12109 - DNA, 23 bp, Artificial Sequence
  Description of Artificial Sequence: Synthetic oligonucleotide
  X-linked inhibitor of apoptosis (XIAP) siRNA
attgaaaccatagactaagaata

SEQ ID NO: 12110 - DNA, 23 bp, Artificial Sequence
  Description of Artificial Sequence: Synthetic oligonucleotide
  X-linked inhibitor of apoptosis (XIAP) siRNA
ttgaaaccatagactaagaataa

SEQ ID NO: 12111 - DNA, 23 bp, Artificial Sequence
  Description of Artificial Sequence: Synthetic oligonucleotide
  X-linked inhibitor of apoptosis (XIAP) siRNA
tgaaaccatagactaagaataag

SEQ ID NO: 12112 - DNA, 23 bp, Artificial Sequence
  Description of Artificial Sequence: Synthetic oligonucleotide
  X-linked inhibitor of apoptosis (XIAP) siRNA
gaaaccatagactaagaataaga

SEQ ID NO: 12113 - DNA, 23 bp, Artificial Sequence
  Description of Artificial Sequence: Synthetic oligonucleotide
  X-linked inhibitor of apoptosis (XIAP) siRNA
aaaccatagactaagaataagaa

SEQ ID NO: 12114 - DNA, 23 bp, Artificial Sequence
  Description of Artificial Sequence: Synthetic oligonucleotide
  X-linked inhibitor of apoptosis (XIAP) siRNA
aaccatagactaagaataagaag

SEQ ID NO: 12115 - DNA, 23 bp, Artificial Sequence
  Description of Artificial Sequence: Synthetic oligonucleotide
  X-linked inhibitor of apoptosis (XIAP) siRNA
accatagactaagaataagaagc

SEQ ID NO: 12116 - DNA, 23 bp, Artificial Sequence
  Description of Artificial Sequence: Synthetic oligonucleotide
  X-linked inhibitor of apoptosis (XIAP) siRNA
ccatagactaagaataagaagca

SEQ ID NO: 12117 - DNA, 23 bp, Artificial Sequence
  Description of Artificial Sequence: Synthetic oligonucleotide
  X-linked inhibitor of apoptosis (XIAP) siRNA
catagactaagaataagaagcat

SEQ ID NO: 12118 - DNA, 23 bp, Artificial Sequence
  Description of Artificial Sequence: Synthetic oligonucleotide
  X-linked inhibitor of apoptosis (XIAP) siRNA
atagactaagaataagaagcatc

SEQ ID NO: 12119 - DNA, 23 bp, Artificial Sequence
  Description of Artificial Sequence: Synthetic oligonucleotide
  X-linked inhibitor of apoptosis (XIAP) siRNA
tagactaagaataagaagcatca

SEQ ID NO: 12120 - DNA, 23 bp, Artificial Sequence
  Description of Artificial Sequence: Synthetic oligonucleotide
  X-linked inhibitor of apoptosis (XIAP) siRNA
agactaagaataagaagcatcat

SEQ ID NO: 12121 - DNA, 23 bp, Artificial Sequence
  Description of Artificial Sequence: Synthetic oligonucleotide
  X-linked inhibitor of apoptosis (XIAP) siRNA
gactaagaataagaagcatcata

SEQ ID NO: 12122 - DNA, 23 bp, Artificial Sequence
  Description of Artificial Sequence: Synthetic oligonucleotide
  X-linked inhibitor of apoptosis (XIAP) siRNA
actaagaataagaagcatcatac

SEQ ID NO: 12123 - DNA, 23 bp, Artificial Sequence
  Description of Artificial Sequence: Synthetic oligonucleotide
  X-linked inhibitor of apoptosis (XIAP) siRNA
ctaagaataagaagcatcatact

SEQ ID NO: 12124 - DNA, 23 bp, Artificial Sequence
  Description of Artificial Sequence: Synthetic oligonucleotide
  X-linked inhibitor of apoptosis (XIAP) siRNA
taagaataagaagcatcatacta

SEQ ID NO: 12125 - DNA, 23 bp, Artificial Sequence
  Description of Artificial Sequence: Synthetic oligonucleotide
  X-linked inhibitor of apoptosis (XIAP) siRNA
aagaataagaagcatcatactat

SEQ ID NO: 12126 - DNA, 23 bp, Artificial Sequence
  Description of Artificial Sequence: Synthetic oligonucleotide
  X-linked inhibitor of apoptosis (XIAP) siRNA
agaataagaagcatcatactata

SEQ ID NO: 12127 - DNA, 23 bp, Artificial Sequence
  Description of Artificial Sequence: Synthetic oligonucleotide
  X-linked inhibitor of apoptosis (XIAP) siRNA
gaataagaagcatcatactataa

SEQ ID NO: 12128 - DNA, 23 bp, Artificial Sequence
  Description of Artificial Sequence: Synthetic oligonucleotide
  X-linked inhibitor of apoptosis (XIAP) siRNA
aataagaagcatcatactataac

SEQ ID NO: 12129 - DNA, 23 bp, Artificial Sequence
  Description of Artificial Sequence: Synthetic oligonucleotide
  X-linked inhibitor of apoptosis (XIAP) siRNA
ataagaagcatcatactataact

SEQ ID NO: 12130 - DNA, 23 bp, Artificial Sequence
  Description of Artificial Sequence: Synthetic oligonucleotide
  X-linked inhibitor of apoptosis (XIAP) siRNA
taagaagcatcatactataactg

SEQ ID NO: 12131 - DNA, 23 bp, Artificial Sequence
  Description of Artificial Sequence: Synthetic oligonucleotide
  X-linked inhibitor of apoptosis (XIAP) siRNA
aagaagcatcatactataactga

SEQ ID NO: 12132 - DNA, 23 bp, Artificial Sequence
  Description of Artificial Sequence: Synthetic oligonucleotide
  X-linked inhibitor of apoptosis (XIAP) siRNA
agaagcatcatactataactgaa

SEQ ID NO: 12133 - DNA, 23 bp, Artificial Sequence
  Description of Artificial Sequence: Synthetic oligonucleotide
  X-linked inhibitor of apoptosis (XIAP) siRNA
gaagcatcatactataactgaac

SEQ ID NO: 12134 - DNA, 23 bp, Artificial Sequence
  Description of Artificial Sequence: Synthetic oligonucleotide
  X-linked inhibitor of apoptosis (XIAP) siRNA
aagcatcatactataactgaaca

SEQ ID NO: 12135 - DNA, 23 bp, Artificial Sequence
  Description of Artificial Sequence: Synthetic oligonucleotide
  X-linked inhibitor of apoptosis (XIAP) siRNA
agcatcatactataactgaacac

SEQ ID NO: 12136 - DNA, 23 bp, Artificial Sequence
  Description of Artificial Sequence: Synthetic oligonucleotide
  X-linked inhibitor of apoptosis (XIAP) siRNA
gcatcatactataactgaacaca

SEQ ID NO: 12137 - DNA, 23 bp, Artificial Sequence
  Description of Artificial Sequence: Synthetic oligonucleotide
  X-linked inhibitor of apoptosis (XIAP) siRNA
catcatactataactgaacacaa

SEQ ID NO: 12138 - DNA, 23 bp, Artificial Sequence
  Description of Artificial Sequence: Synthetic oligonucleotide
  X-linked inhibitor of apoptosis (XIAP) siRNA
atcatactataactgaacacaat

SEQ ID NO: 12139 - DNA, 23 bp, Artificial Sequence
  Description of Artificial Sequence: Synthetic oligonucleotide
  X-linked inhibitor of apoptosis (XIAP) siRNA
tcatactataactgaacacaatg

SEQ ID NO: 12140 - DNA, 23 bp, Artificial Sequence
  Description of Artificial Sequence: Synthetic oligonucleotide
  X-linked inhibitor of apoptosis (XIAP) siRNA
catactataactgaacacaatgt

SEQ ID NO: 12141 - DNA, 23 bp, Artificial Sequence
  Description of Artificial Sequence: Synthetic oligonucleotide
  X-linked inhibitor of apoptosis (XIAP) siRNA
atactataactgaacacaatgtg

SEQ ID NO: 12142 - DNA, 23 bp, Artificial Sequence
  Description of Artificial Sequence: Synthetic oligonucleotide
  X-linked inhibitor of apoptosis (XIAP) siRNA
tactataactgaacacaatgtgt

SEQ ID NO: 12143 - DNA, 23 bp, Artificial Sequence
  Description of Artificial Sequence: Synthetic oligonucleotide
  X-linked inhibitor of apoptosis (XIAP) siRNA
actataactgaacacaatgtgta

SEQ ID NO: 12144 - DNA, 23 bp, Artificial Sequence
  Description of Artificial Sequence: Synthetic oligonucleotide
  X-linked inhibitor of apoptosis (XIAP) siRNA
ctataactgaacacaatgtgtat

SEQ ID NO: 12145 - DNA, 23 bp, Artificial Sequence
  Description of Artificial Sequence: Synthetic oligonucleotide
  X-linked inhibitor of apoptosis (XIAP) siRNA
tataactgaacacaatgtgtatt

SEQ ID NO: 12146 - DNA, 23 bp, Artificial Sequence
  Description of Artificial Sequence: Synthetic oligonucleotide
  X-linked inhibitor of apoptosis (XIAP) siRNA
ataactgaacacaatgtgtattc

SEQ ID NO: 12147 - DNA, 23 bp, Artificial Sequence
  Description of Artificial Sequence: Synthetic oligonucleotide
  X-linked inhibitor of apoptosis (XIAP) siRNA
taactgaacacaatgtgtattca

SEQ ID NO: 12148 - DNA, 23 bp, Artificial Sequence
  Description of Artificial Sequence: Synthetic oligonucleotide
  X-linked inhibitor of apoptosis (XIAP) siRNA
aactgaacacaatgtgtattcat

SEQ ID NO: 12149 - DNA, 23 bp, Artificial Sequence
  Description of Artificial Sequence: Synthetic oligonucleotide
  X-linked inhibitor of apoptosis (XIAP) siRNA
actgaacacaatgtgtattcata

SEQ ID NO: 12150 - DNA, 23 bp, Artificial Sequence
  Description of Artificial Sequence: Synthetic oligonucleotide
  X-linked inhibitor of apoptosis (XIAP) siRNA
ctgaacacaatgtgtattcatag

SEQ ID NO: 12151 - DNA, 23 bp, Artificial Sequence
  Description of Artificial Sequence: Synthetic oligonucleotide
  X-linked inhibitor of apoptosis (XIAP) siRNA
tgaacacaatgtgtattcatagt

SEQ ID NO: 12152 - DNA, 23 bp, Artificial Sequence
  Description of Artificial Sequence: Synthetic oligonucleotide
  X-linked inhibitor of apoptosis (XIAP) siRNA
gaacacaatgtgtattcatagta

SEQ ID NO: 12153 - DNA, 23 bp, Artificial Sequence
  Description of Artificial Sequence: Synthetic oligonucleotide
  X-linked inhibitor of apoptosis (XIAP) siRNA
aacacaatgtgtattcatagtat

SEQ ID NO: 12154 - DNA, 23 bp, Artificial Sequence
  Description of Artificial Sequence: Synthetic oligonucleotide
  X-linked inhibitor of apoptosis (XIAP) siRNA
acacaatgtgtattcatagtata

SEQ ID NO: 12155 - DNA, 23 bp, Artificial Sequence
  Description of Artificial Sequence: Synthetic oligonucleotide
  X-linked inhibitor of apoptosis (XIAP) siRNA
cacaatgtgtattcatagtatac

SEQ ID NO: 12156 - DNA, 23 bp, Artificial Sequence
  Description of Artificial Sequence: Synthetic oligonucleotide
  X-linked inhibitor of apoptosis (XIAP) siRNA
acaatgtgtattcatagtatact

SEQ ID NO: 12157 - DNA, 23 bp, Artificial Sequence
  Description of Artificial Sequence: Synthetic oligonucleotide
  X-linked inhibitor of apoptosis (XIAP) siRNA
caatgtgtattcatagtatactg

SEQ ID NO: 12158 - DNA, 23 bp, Artificial Sequence
  Description of Artificial Sequence: Synthetic oligonucleotide
  X-linked inhibitor of apoptosis (XIAP) siRNA
aatgtgtattcatagtatactga

SEQ ID NO: 12159 - DNA, 23 bp, Artificial Sequence
  Description of Artificial Sequence: Synthetic oligonucleotide
  X-linked inhibitor of apoptosis (XIAP) siRNA
atgtgtattcatagtatactgat

SEQ ID NO: 12160 - DNA, 23 bp, Artificial Sequence
  Description of Artificial Sequence: Synthetic oligonucleotide
  X-linked inhibitor of apoptosis (XIAP) siRNA
tgtgtattcatagtatactgatt

SEQ ID NO: 12161 - DNA, 23 bp, Artificial Sequence
  Description of Artificial Sequence: Synthetic oligonucleotide
  X-linked inhibitor of apoptosis (XIAP) siRNA
gtgtattcatagtatactgattt

SEQ ID NO: 12162 - DNA, 23 bp, Artificial Sequence
  Description of Artificial Sequence: Synthetic oligonucleotide
  X-linked inhibitor of apoptosis (XIAP) siRNA
tgtattcatagtatactgattta

SEQ ID NO: 12163 - DNA, 23 bp, Artificial Sequence
  Description of Artificial Sequence: Synthetic oligonucleotide
  X-linked inhibitor of apoptosis (XIAP) siRNA
gtattcatagtatactgatttaa

SEQ ID NO: 12164 - DNA, 23 bp, Artificial Sequence
  Description of Artificial Sequence: Synthetic oligonucleotide
  X-linked inhibitor of apoptosis (XIAP) siRNA
tattcatagtatactgatttaat

SEQ ID NO: 12165 - DNA, 23 bp, Artificial Sequence
  Description of Artificial Sequence: Synthetic oligonucleotide
  X-linked inhibitor of apoptosis (XIAP) siRNA
attcatagtatactgatttaatt

SEQ ID NO: 12166 - DNA, 23 bp, Artificial Sequence
  Description of Artificial Sequence: Synthetic oligonucleotide
  X-linked inhibitor of apoptosis (XIAP) siRNA
ttcatagtatactgatttaattt

SEQ ID NO: 12167 - DNA, 23 bp, Artificial Sequence
  Description of Artificial Sequence: Synthetic oligonucleotide
  X-linked inhibitor of apoptosis (XIAP) siRNA
tcatagtatactgatttaatttc

SEQ ID NO: 12168 - DNA, 23 bp, Artificial Sequence
  Description of Artificial Sequence: Synthetic oligonucleotide
  X-linked inhibitor of apoptosis (XIAP) siRNA
catagtatactgatttaatttct

SEQ ID NO: 12169 - DNA, 23 bp, Artificial Sequence
  Description of Artificial Sequence: Synthetic oligonucleotide
  X-linked inhibitor of apoptosis (XIAP) siRNA
atagtatactgatttaatttcta

SEQ ID NO: 12170 - DNA, 23 bp, Artificial Sequence
  Description of Artificial Sequence: Synthetic oligonucleotide
  X-linked inhibitor of apoptosis (XIAP) siRNA
tagtatactgatttaatttctaa

SEQ ID NO: 12171 - DNA, 23 bp, Artificial Sequence
  Description of Artificial Sequence: Synthetic oligonucleotide
  X-linked inhibitor of apoptosis (XIAP) siRNA
agtatactgatttaatttctaag

SEQ ID NO: 12172 - DNA, 23 bp, Artificial Sequence
  Description of Artificial Sequence: Synthetic oligonucleotide
  X-linked inhibitor of apoptosis (XIAP) siRNA
gtatactgatttaatttctaagt

SEQ ID NO: 12173 - DNA, 23 bp, Artificial Sequence
  Description of Artificial Sequence: Synthetic oligonucleotide
  X-linked inhibitor of apoptosis (XIAP) siRNA
tatactgatttaatttctaagtg

SEQ ID NO: 12174 - DNA, 23 bp, Artificial Sequence
  Description of Artificial Sequence: Synthetic oligonucleotide
  X-linked inhibitor of apoptosis (XIAP) siRNA
atactgatttaatttctaagtgt

SEQ ID NO: 12175 - DNA, 23 bp, Artificial Sequence
  Description of Artificial Sequence: Synthetic oligonucleotide
  X-linked inhibitor of apoptosis (XIAP) siRNA
tactgatttaatttctaagtgta

SEQ ID NO: 12176 - DNA, 23 bp, Artificial Sequence
  Description of Artificial Sequence: Synthetic oligonucleotide
  X-linked inhibitor of apoptosis (XIAP) siRNA
actgatttaatttctaagtgtaa

SEQ ID NO: 12177 - DNA, 23 bp, Artificial Sequence
  Description of Artificial Sequence: Synthetic oligonucleotide
  X-linked inhibitor of apoptosis (XIAP) siRNA
ctgatttaatttctaagtgtaag

SEQ ID NO: 12178 - DNA, 23 bp, Artificial Sequence
  Description of Artificial Sequence: Synthetic oligonucleotide
  X-linked inhibitor of apoptosis (XIAP) siRNA
tgatttaatttctaagtgtaagt

SEQ ID NO: 12179 - DNA, 23 bp, Artificial Sequence
  Description of Artificial Sequence: Synthetic oligonucleotide
  X-linked inhibitor of apoptosis (XIAP) siRNA
gatttaatttctaagtgtaagtg

SEQ ID NO: 12180 - DNA, 23 bp, Artificial Sequence
  Description of Artificial Sequence: Synthetic oligonucleotide
  X-linked inhibitor of apoptosis (XIAP) siRNA
atttaatttctaagtgtaagtga

SEQ ID NO: 12181 - DNA, 23 bp, Artificial Sequence
  Description of Artificial Sequence: Synthetic oligonucleotide
  X-linked inhibitor of apoptosis (XIAP) siRNA
tttaatttctaagtgtaagtgaa

SEQ ID NO: 12182 - DNA, 23 bp, Artificial Sequence
  Description of Artificial Sequence: Synthetic oligonucleotide
  X-linked inhibitor of apoptosis (XIAP) siRNA
ttaatttctaagtgtaagtgaat

SEQ ID NO: 12183 - DNA, 23 bp, Artificial Sequence
  Description of Artificial Sequence: Synthetic oligonucleotide
  X-linked inhibitor of apoptosis (XIAP) siRNA
taatttctaagtgtaagtgaatt

SEQ ID NO: 12184 - DNA, 23 bp, Artificial Sequence
  Description of Artificial Sequence: Synthetic oligonucleotide
  X-linked inhibitor of apoptosis (XIAP) siRNA
aatttctaagtgtaagtgaatta

SEQ ID NO: 12185 - DNA, 23 bp, Artificial Sequence
  Description of Artificial Sequence: Synthetic oligonucleotide
  X-linked inhibitor of apoptosis (XIAP) siRNA
atttctaagtgtaagtgaattaa

SEQ ID NO: 12186 - DNA, 23 bp, Artificial Sequence
  Description of Artificial Sequence: Synthetic oligonucleotide
  X-linked inhibitor of apoptosis (XIAP) siRNA
tttctaagtgtaagtgaattaat

SEQ ID NO: 12187 - DNA, 23 bp, Artificial Sequence
  Description of Artificial Sequence: Synthetic oligonucleotide
  X-linked inhibitor of apoptosis (XIAP) siRNA
ttctaagtgtaagtgaattaatc

SEQ ID NO: 12188 - DNA, 23 bp, Artificial Sequence
  Description of Artificial Sequence: Synthetic oligonucleotide
  X-linked inhibitor of apoptosis (XIAP) siRNA
tctaagtgtaagtgaattaatca

SEQ ID NO: 12189 - DNA, 23 bp, Artificial Sequence
  Description of Artificial Sequence: Synthetic oligonucleotide
  X-linked inhibitor of apoptosis (XIAP) siRNA
ctaagtgtaagtgaattaatcat

SEQ ID NO: 12190 - DNA, 23 bp, Artificial Sequence
  Description of Artificial Sequence: Synthetic oligonucleotide
  X-linked inhibitor of apoptosis (XIAP) siRNA
taagtgtaagtgaattaatcatc

SEQ ID NO: 12191 - DNA, 23 bp, Artificial Sequence
  Description of Artificial Sequence: Synthetic oligonucleotide
  X-linked inhibitor of apoptosis (XIAP) siRNA
aagtgtaagtgaattaatcatct

SEQ ID NO: 12192 - DNA, 23 bp, Artificial Sequence
  Description of Artificial Sequence: Synthetic oligonucleotide
  X-linked inhibitor of apoptosis (XIAP) siRNA
agtgtaagtgaattaatcatctg

SEQ ID NO: 12193 - DNA, 23 bp, Artificial Sequence
  Description of Artificial Sequence: Synthetic oligonucleotide
  X-linked inhibitor of apoptosis (XIAP) siRNA
gtgtaagtgaattaatcatctgg

SEQ ID NO: 12194 - DNA, 23 bp, Artificial Sequence
  Description of Artificial Sequence: Synthetic oligonucleotide
  X-linked inhibitor of apoptosis (XIAP) siRNA
tgtaagtgaattaatcatctgga

SEQ ID NO: 12195 - DNA, 23 bp, Artificial Sequence
  Description of Artificial Sequence: Synthetic oligonucleotide
  X-linked inhibitor of apoptosis (XIAP) siRNA
gtaagtgaattaatcatctggat

SEQ ID NO: 12196 - DNA, 23 bp, Artificial Sequence
  Description of Artificial Sequence: Synthetic oligonucleotide
  X-linked inhibitor of apoptosis (XIAP) siRNA
taagtgaattaatcatctggatt

SEQ ID NO: 12197 - DNA, 23 bp, Artificial Sequence
  Description of Artificial Sequence: Synthetic oligonucleotide
  X-linked inhibitor of apoptosis (XIAP) siRNA
aagtgaattaatcatctggattt

SEQ ID NO: 12198 - DNA, 23 bp, Artificial Sequence
  Description of Artificial Sequence: Synthetic oligonucleotide
  X-linked inhibitor of apoptosis (XIAP) siRNA
agtgaattaatcatctggatttt

SEQ ID NO: 12199 - DNA, 23 bp, Artificial Sequence
  Description of Artificial Sequence: Synthetic oligonucleotide
  X-linked inhibitor of apoptosis (XIAP) siRNA
gtgaattaatcatctggattttt

SEQ ID NO: 12200 - DNA, 23 bp, Artificial Sequence
  Description of Artificial Sequence: Synthetic oligonucleotide
  X-linked inhibitor of apoptosis (XIAP) siRNA
tgaattaatcatctggatttttt

SEQ ID NO: 12201 - DNA, 23 bp, Artificial Sequence
  Description of Artificial Sequence: Synthetic oligonucleotide
  X-linked inhibitor of apoptosis (XIAP) siRNA
gaattaatcatctggatttttta

SEQ ID NO: 12202 - DNA, 23 bp, Artificial Sequence
  Description of Artificial Sequence: Synthetic oligonucleotide
  X-linked inhibitor of apoptosis (XIAP) siRNA
aattaatcatctggattttttat

SEQ ID NO: 12203 - DNA, 23 bp, Artificial Sequence
  Description of Artificial Sequence: Synthetic oligonucleotide
  X-linked inhibitor of apoptosis (XIAP) siRNA
attaatcatctggattttttatt

SEQ ID NO: 12204 - DNA, 23 bp, Artificial Sequence
  Description of Artificial Sequence: Synthetic oligonucleotide
  X-linked inhibitor of apoptosis (XIAP) siRNA
ttaatcatctggattttttattc

SEQ ID NO: 12205 - DNA, 23 bp, Artificial Sequence
  Description of Artificial Sequence: Synthetic oligonucleotide
  X-linked inhibitor of apoptosis (XIAP) siRNA
taatcatctggattttttattct

SEQ ID NO: 12206 - DNA, 23 bp, Artificial Sequence
  Description of Artificial Sequence: Synthetic oligonucleotide
  X-linked inhibitor of apoptosis (XIAP) siRNA
aatcatctggattttttattctt

SEQ ID NO: 12207 - DNA, 23 bp, Artificial Sequence
  Description of Artificial Sequence: Synthetic oligonucleotide
  X-linked inhibitor of apoptosis (XIAP) siRNA
atcatctggattttttattcttt

SEQ ID NO: 12208 - DNA, 23 bp, Artificial Sequence
  Description of Artificial Sequence: Synthetic oligonucleotide
  X-linked inhibitor of apoptosis (XIAP) siRNA
tcatctggattttttattctttt

SEQ ID NO: 12209 - DNA, 23 bp, Artificial Sequence
  Description of Artificial Sequence: Synthetic oligonucleotide
  X-linked inhibitor of apoptosis (XIAP) siRNA
catctggattttttattcttttc

SEQ ID NO: 12210 - DNA, 23 bp, Artificial Sequence
  Description of Artificial Sequence: Synthetic oligonucleotide
  X-linked inhibitor of apoptosis (XIAP) siRNA
atctggattttttattcttttca

SEQ ID NO: 12211 - DNA, 23 bp, Artificial Sequence
  Description of Artificial Sequence: Synthetic oligonucleotide
  X-linked inhibitor of apoptosis (XIAP) siRNA
tctggattttttattcttttcag

SEQ ID NO: 12212 - DNA, 23 bp, Artificial Sequence
  Description of Artificial Sequence: Synthetic oligonucleotide
  X-linked inhibitor of apoptosis (XIAP) siRNA
ctggattttttattcttttcaga

SEQ ID NO: 12213 - DNA, 23 bp, Artificial Sequence
  Description of Artificial Sequence: Synthetic oligonucleotide
  X-linked inhibitor of apoptosis (XIAP) siRNA
tggattttttattcttttcagat

SEQ ID NO: 12214 - DNA, 23 bp, Artificial Sequence
  Description of Artificial Sequence: Synthetic oligonucleotide
  X-linked inhibitor of apoptosis (XIAP) siRNA
ggattttttattcttttcagata

SEQ ID NO: 12215 - DNA, 23 bp, Artificial Sequence
  Description of Artificial Sequence: Synthetic oligonucleotide
  X-linked inhibitor of apoptosis (XIAP) siRNA
gattttttattcttttcagatag

SEQ ID NO: 12216 - DNA, 23 bp, Artificial Sequence
  Description of Artificial Sequence: Synthetic oligonucleotide
  X-linked inhibitor of apoptosis (XIAP) siRNA
attttttattcttttcagatagg

SEQ ID NO: 12217 - DNA, 23 bp, Artificial Sequence
  Description of Artificial Sequence: Synthetic oligonucleotide
  X-linked inhibitor of apoptosis (XIAP) siRNA
ttttttattcttttcagataggc

SEQ ID NO: 12218 - DNA, 23 bp, Artificial Sequence
  Description of Artificial Sequence: Synthetic oligonucleotide
  X-linked inhibitor of apoptosis (XIAP) siRNA
tttttattcttttcagataggct

SEQ ID NO: 12219 - DNA, 23 bp, Artificial Sequence
  Description of Artificial Sequence: Synthetic oligonucleotide
  X-linked inhibitor of apoptosis (XIAP) siRNA
ttttattcttttcagataggctt

SEQ ID NO: 12220 - DNA, 23 bp, Artificial Sequence
  Description of Artificial Sequence: Synthetic oligonucleotide
  X-linked inhibitor of apoptosis (XIAP) siRNA
tttattcttttcagataggctta

SEQ ID NO: 12221 - DNA, 23 bp, Artificial Sequence
  Description of Artificial Sequence: Synthetic oligonucleotide
  X-linked inhibitor of apoptosis (XIAP) siRNA
ttattcttttcagataggcttaa

SEQ ID NO: 12222 - DNA, 23 bp, Artificial Sequence
  Description of Artificial Sequence: Synthetic oligonucleotide
  X-linked inhibitor of apoptosis (XIAP) siRNA
tattcttttcagataggcttaac

SEQ ID NO: 12223 - DNA, 23 bp, Artificial Sequence
  Description of Artificial Sequence: Synthetic oligonucleotide
  X-linked inhibitor of apoptosis (XIAP) siRNA
attcttttcagataggcttaaca

SEQ ID NO: 12224 - DNA, 23 bp, Artificial Sequence
  Description of Artificial Sequence: Synthetic oligonucleotide
  X-linked inhibitor of apoptosis (XIAP) siRNA
ttcttttcagataggcttaacaa

SEQ ID NO: 12225 - DNA, 23 bp, Artificial Sequence
  Description of Artificial Sequence: Synthetic oligonucleotide
  X-linked inhibitor of apoptosis (XIAP) siRNA
tcttttcagataggcttaacaaa

SEQ ID NO: 12226 - DNA, 23 bp, Artificial Sequence
  Description of Artificial Sequence: Synthetic oligonucleotide
  X-linked inhibitor of apoptosis (XIAP) siRNA
cttttcagataggcttaacaaat

SEQ ID NO: 12227 - DNA, 23 bp, Artificial Sequence
  Description of Artificial Sequence: Synthetic oligonucleotide
  X-linked inhibitor of apoptosis (XIAP) siRNA
ttttcagataggcttaacaaatg

SEQ ID NO: 12228 - DNA, 23 bp, Artificial Sequence
  Description of Artificial Sequence: Synthetic oligonucleotide
  X-linked inhibitor of apoptosis (XIAP) siRNA
tttcagataggcttaacaaatgg

SEQ ID NO: 12229 - DNA, 23 bp, Artificial Sequence
  Description of Artificial Sequence: Synthetic oligonucleotide
  X-linked inhibitor of apoptosis (XIAP) siRNA
ttcagataggcttaacaaatgga

SEQ ID NO: 12230 - DNA, 23 bp, Artificial Sequence
  Description of Artificial Sequence: Synthetic oligonucleotide
  X-linked inhibitor of apoptosis (XIAP) siRNA
tcagataggcttaacaaatggag

SEQ ID NO: 12231 - DNA, 23 bp, Artificial Sequence
  Description of Artificial Sequence: Synthetic oligonucleotide
  X-linked inhibitor of apoptosis (XIAP) siRNA
cagataggcttaacaaatggagc

SEQ ID NO: 12232 - DNA, 23 bp, Artificial Sequence
  Description of Artificial Sequence: Synthetic oligonucleotide
  X-linked inhibitor of apoptosis (XIAP) siRNA
agataggcttaacaaatggagct

SEQ ID NO: 12233 - DNA, 23 bp, Artificial Sequence
  Description of Artificial Sequence: Synthetic oligonucleotide
  X-linked inhibitor of apoptosis (XIAP) siRNA
gataggcttaacaaatggagctt

SEQ ID NO: 12234 - DNA, 23 bp, Artificial Sequence
  Description of Artificial Sequence: Synthetic oligonucleotide
  X-linked inhibitor of apoptosis (XIAP) siRNA
ataggcttaacaaatggagcttt

SEQ ID NO: 12235 - DNA, 23 bp, Artificial Sequence
  Description of Artificial Sequence: Synthetic oligonucleotide
  X-linked inhibitor of apoptosis (XIAP) siRNA
taggcttaacaaatggagctttc

SEQ ID NO: 12236 - DNA, 23 bp, Artificial Sequence
  Description of Artificial Sequence: Synthetic oligonucleotide
  X-linked inhibitor of apoptosis (XIAP) siRNA
aggcttaacaaatggagctttct

SEQ ID NO: 12237 - DNA, 23 bp, Artificial Sequence
  Description of Artificial Sequence: Synthetic oligonucleotide
  X-linked inhibitor of apoptosis (XIAP) siRNA
ggcttaacaaatggagctttctg

SEQ ID NO: 12238 - DNA, 23 bp, Artificial Sequence
  Description of Artificial Sequence: Synthetic oligonucleotide
  X-linked inhibitor of apoptosis (XIAP) siRNA
gcttaacaaatggagctttctgt

SEQ ID NO: 12239 - DNA, 23 bp, Artificial Sequence
  Description of Artificial Sequence: Synthetic oligonucleotide
  X-linked inhibitor of apoptosis (XIAP) siRNA
cttaacaaatggagctttctgta

SEQ ID NO: 12240 - DNA, 23 bp, Artificial Sequence
  Description of Artificial Sequence: Synthetic oligonucleotide
  X-linked inhibitor of apoptosis (XIAP) siRNA
ttaacaaatggagctttctgtat

SEQ ID NO: 12241 - DNA, 23 bp, Artificial Sequence
  Description of Artificial Sequence: Synthetic oligonucleotide
  X-linked inhibitor of apoptosis (XIAP) siRNA
taacaaatggagctttctgtata

SEQ ID NO: 12242 - DNA, 23 bp, Artificial Sequence
  Description of Artificial Sequence: Synthetic oligonucleotide
  X-linked inhibitor of apoptosis (XIAP) siRNA
aacaaatggagctttctgtatat

SEQ ID NO: 12243 - DNA, 23 bp, Artificial Sequence
  Description of Artificial Sequence: Synthetic oligonucleotide
  X-linked inhibitor of apoptosis (XIAP) siRNA
acaaatggagctttctgtatata

SEQ ID NO: 12244 - DNA, 23 bp, Artificial Sequence
  Description of Artificial Sequence: Synthetic oligonucleotide
  X-linked inhibitor of apoptosis (XIAP) siRNA
caaatggagctttctgtatataa

SEQ ID NO: 12245 - DNA, 23 bp, Artificial Sequence
  Description of Artificial Sequence: Synthetic oligonucleotide
  X-linked inhibitor of apoptosis (XIAP) siRNA
aaatggagctttctgtatataaa

SEQ ID NO: 12246 - DNA, 23 bp, Artificial Sequence
  Description of Artificial Sequence: Synthetic oligonucleotide
  X-linked inhibitor of apoptosis (XIAP) siRNA
aatggagctttctgtatataaat

SEQ ID NO: 12247 - DNA, 23 bp, Artificial Sequence
  Description of Artificial Sequence: Synthetic oligonucleotide
  X-linked inhibitor of apoptosis (XIAP) siRNA
atggagctttctgtatataaatg

SEQ ID NO: 12248 - DNA, 23 bp, Artificial Sequence
  Description of Artificial Sequence: Synthetic oligonucleotide
  X-linked inhibitor of apoptosis (XIAP) siRNA
tggagctttctgtatataaatgt

SEQ ID NO: 12249 - DNA, 23 bp, Artificial Sequence
  Description of Artificial Sequence: Synthetic oligonucleotide
  X-linked inhibitor of apoptosis (XIAP) siRNA
ggagctttctgtatataaatgtg

SEQ ID NO: 12250 - DNA, 23 bp, Artificial Sequence
  Description of Artificial Sequence: Synthetic oligonucleotide
  X-linked inhibitor of apoptosis (XIAP) siRNA
gagctttctgtatataaatgtgg

SEQ ID NO: 12251 - DNA, 23 bp, Artificial Sequence
  Description of Artificial Sequence: Synthetic oligonucleotide
  X-linked inhibitor of apoptosis (XIAP) siRNA
agctttctgtatataaatgtgga

SEQ ID NO: 12252 - DNA, 23 bp, Artificial Sequence
  Description of Artificial Sequence: Synthetic oligonucleotide
  X-linked inhibitor of apoptosis (XIAP) siRNA
gctttctgtatataaatgtggag

SEQ ID NO: 12253 - DNA, 23 bp, Artificial Sequence
  Description of Artificial Sequence: Synthetic oligonucleotide
  X-linked inhibitor of apoptosis (XIAP) siRNA
ctttctgtatataaatgtggaga

SEQ ID NO: 12254 - DNA, 23 bp, Artificial Sequence
  Description of Artificial Sequence: Synthetic oligonucleotide
  X-linked inhibitor of apoptosis (XIAP) siRNA
tttctgtatataaatgtggagat

SEQ ID NO: 12255 - DNA, 23 bp, Artificial Sequence
  Description of Artificial Sequence: Synthetic oligonucleotide
  X-linked inhibitor of apoptosis (XIAP) siRNA
ttctgtatataaatgtggagatt

SEQ ID NO: 12256 - DNA, 23 bp, Artificial Sequence
  Description of Artificial Sequence: Synthetic oligonucleotide
  X-linked inhibitor of apoptosis (XIAP) siRNA
tctgtatataaatgtggagatta

SEQ ID NO: 12257 - DNA, 23 bp, Artificial Sequence
  Description of Artificial Sequence: Synthetic oligonucleotide
  X-linked inhibitor of apoptosis (XIAP) siRNA
ctgtatataaatgtggagattag

SEQ ID NO: 12258 - DNA, 23 bp, Artificial Sequence
  Description of Artificial Sequence: Synthetic oligonucleotide
  X-linked inhibitor of apoptosis (XIAP) siRNA
tgtatataaatgtggagattaga

SEQ ID NO: 12259 - DNA, 23 bp, Artificial Sequence
  Description of Artificial Sequence: Synthetic oligonucleotide
  X-linked inhibitor of apoptosis (XIAP) siRNA
gtatataaatgtggagattagag

SEQ ID NO: 12260 - DNA, 23 bp, Artificial Sequence
  Description of Artificial Sequence: Synthetic oligonucleotide
  X-linked inhibitor of apoptosis (XIAP) siRNA
tatataaatgtggagattagagt

SEQ ID NO: 12261 - DNA, 23 bp, Artificial Sequence
  Description of Artificial Sequence: Synthetic oligonucleotide
  X-linked inhibitor of apoptosis (XIAP) siRNA
atataaatgtggagattagagtt

SEQ ID NO: 12262 - DNA, 23 bp, Artificial Sequence
  Description of Artificial Sequence: Synthetic oligonucleotide
  X-linked inhibitor of apoptosis (XIAP) siRNA
tataaatgtggagattagagtta

SEQ ID NO: 12263 - DNA, 23 bp, Artificial Sequence
  Description of Artificial Sequence: Synthetic oligonucleotide
  X-linked inhibitor of apoptosis (XIAP) siRNA
ataaatgtggagattagagttaa

SEQ ID NO: 12264 - DNA, 23 bp, Artificial Sequence
  Description of Artificial Sequence: Synthetic oligonucleotide
  X-linked inhibitor of apoptosis (XIAP) siRNA
taaatgtggagattagagttaat

SEQ ID NO: 12265 - DNA, 23 bp, Artificial Sequence
  Description of Artificial Sequence: Synthetic oligonucleotide
  X-linked inhibitor of apoptosis (XIAP) siRNA
aaatgtggagattagagttaatc

SEQ ID NO: 12266 - DNA, 23 bp, Artificial Sequence
  Description of Artificial Sequence: Synthetic oligonucleotide
  X-linked inhibitor of apoptosis (XIAP) siRNA
aatgtggagattagagttaatct

SEQ ID NO: 12267 - DNA, 23 bp, Artificial Sequence
  Description of Artificial Sequence: Synthetic oligonucleotide
  X-linked inhibitor of apoptosis (XIAP) siRNA
atgtggagattagagttaatctc

SEQ ID NO: 12268 - DNA, 23 bp, Artificial Sequence
  Description of Artificial Sequence: Synthetic oligonucleotide
  X-linked inhibitor of apoptosis (XIAP) siRNA
tgtggagattagagttaatctcc

SEQ ID NO: 12269 - DNA, 23 bp, Artificial Sequence
  Description of Artificial Sequence: Synthetic oligonucleotide
  X-linked inhibitor of apoptosis (XIAP) siRNA
gtggagattagagttaatctccc

SEQ ID NO: 12270 - DNA, 23 bp, Artificial Sequence
  Description of Artificial Sequence: Synthetic oligonucleotide
  X-linked inhibitor of apoptosis (XIAP) siRNA
tggagattagagttaatctcccc

SEQ ID NO: 12271 - DNA, 23 bp, Artificial Sequence
  Description of Artificial Sequence: Synthetic oligonucleotide
  X-linked inhibitor of apoptosis (XIAP) siRNA
ggagattagagttaatctcccca

SEQ ID NO: 12272 - DNA, 23 bp, Artificial Sequence
  Description of Artificial Sequence: Synthetic oligonucleotide
  X-linked inhibitor of apoptosis (XIAP) siRNA
gagattagagttaatctccccaa

SEQ ID NO: 12273 - DNA, 23 bp, Artificial Sequence
  Description of Artificial Sequence: Synthetic oligonucleotide
  X-linked inhibitor of apoptosis (XIAP) siRNA
agattagagttaatctccccaat

SEQ ID NO: 12274 - DNA, 23 bp, Artificial Sequence
  Description of Artificial Sequence: Synthetic oligonucleotide
  X-linked inhibitor of apoptosis (XIAP) siRNA
gattagagttaatctccccaatc

SEQ ID NO: 12275 - DNA, 23 bp, Artificial Sequence
  Description of Artificial Sequence: Synthetic oligonucleotide
  X-linked inhibitor of apoptosis (XIAP) siRNA
attagagttaatctccccaatca

SEQ ID NO: 12276 - DNA, 23 bp, Artificial Sequence
  Description of Artificial Sequence: Synthetic oligonucleotide
  X-linked inhibitor of apoptosis (XIAP) siRNA
ttagagttaatctccccaatcac

SEQ ID NO: 12277 - DNA, 23 bp, Artificial Sequence
  Description of Artificial Sequence: Synthetic oligonucleotide
  X-linked inhibitor of apoptosis (XIAP) siRNA
tagagttaatctccccaatcaca

SEQ ID NO: 12278 - DNA, 23 bp, Artificial Sequence
  Description of Artificial Sequence: Synthetic oligonucleotide
  X-linked inhibitor of apoptosis (XIAP) siRNA
agagttaatctccccaatcacat

SEQ ID NO: 12279 - DNA, 23 bp, Artificial Sequence
  Description of Artificial Sequence: Synthetic oligonucleotide
  X-linked inhibitor of apoptosis (XIAP) siRNA
gagttaatctccccaatcacata

SEQ ID NO: 12280 - DNA, 23 bp, Artificial Sequence
  Description of Artificial Sequence: Synthetic oligonucleotide
  X-linked inhibitor of apoptosis (XIAP) siRNA
agttaatctccccaatcacataa

SEQ ID NO: 12281 - DNA, 23 bp, Artificial Sequence
  Description of Artificial Sequence: Synthetic oligonucleotide
  X-linked inhibitor of apoptosis (XIAP) siRNA
gttaatctccccaatcacataat

SEQ ID NO: 12282 - DNA, 23 bp, Artificial Sequence
  Description of Artificial Sequence: Synthetic oligonucleotide
  X-linked inhibitor of apoptosis (XIAP) siRNA
ttaatctccccaatcacataatt

SEQ ID NO: 12283 - DNA, 23 bp, Artificial Sequence
  Description of Artificial Sequence: Synthetic oligonucleotide
  X-linked inhibitor of apoptosis (XIAP) siRNA
taatctccccaatcacataattt

SEQ ID NO: 12284 - DNA, 23 bp, Artificial Sequence
  Description of Artificial Sequence: Synthetic oligonucleotide
  X-linked inhibitor of apoptosis (XIAP) siRNA
aatctccccaatcacataatttg

SEQ ID NO: 12285 - DNA, 23 bp, Artificial Sequence
  Description of Artificial Sequence: Synthetic oligonucleotide
  X-linked inhibitor of apoptosis (XIAP) siRNA
atctccccaatcacataatttgt

SEQ ID NO: 12286 - DNA, 23 bp, Artificial Sequence
  Description of Artificial Sequence: Synthetic oligonucleotide
  X-linked inhibitor of apoptosis (XIAP) siRNA
tctccccaatcacataatttgtt

SEQ ID NO: 12287 - DNA, 23 bp, Artificial Sequence
  Description of Artificial Sequence: Synthetic oligonucleotide
  X-linked inhibitor of apoptosis (XIAP) siRNA
ctccccaatcacataatttgttt

SEQ ID NO: 12288 - DNA, 23 bp, Artificial Sequence
  Description of Artificial Sequence: Synthetic oligonucleotide
  X-linked inhibitor of apoptosis (XIAP) siRNA
tccccaatcacataatttgtttt

SEQ ID NO: 12289 - DNA, 23 bp, Artificial Sequence
  Description of Artificial Sequence: Synthetic oligonucleotide
  X-linked inhibitor of apoptosis (XIAP) siRNA
ccccaatcacataatttgttttg

SEQ ID NO: 12290 - DNA, 23 bp, Artificial Sequence
  Description of Artificial Sequence: Synthetic oligonucleotide
  X-linked inhibitor of apoptosis (XIAP) siRNA
cccaatcacataatttgttttgt

SEQ ID NO: 12291 - DNA, 23 bp, Artificial Sequence
  Description of Artificial Sequence: Synthetic oligonucleotide
  X-linked inhibitor of apoptosis (XIAP) siRNA
ccaatcacataatttgttttgtg

SEQ ID NO: 12292 - DNA, 23 bp, Artificial Sequence
  Description of Artificial Sequence: Synthetic oligonucleotide
  X-linked inhibitor of apoptosis (XIAP) siRNA
caatcacataatttgttttgtgt

SEQ ID NO: 12293 - DNA, 23 bp, Artificial Sequence
  Description of Artificial Sequence: Synthetic oligonucleotide
  X-linked inhibitor of apoptosis (XIAP) siRNA
aatcacataatttgttttgtgtg

SEQ ID NO: 12294 - DNA, 23 bp, Artificial Sequence
  Description of Artificial Sequence: Synthetic oligonucleotide
  X-linked inhibitor of apoptosis (XIAP) siRNA
atcacataatttgttttgtgtga

SEQ ID NO: 12295 - DNA, 23 bp, Artificial Sequence
  Description of Artificial Sequence: Synthetic oligonucleotide
  X-linked inhibitor of apoptosis (XIAP) siRNA
tcacataatttgttttgtgtgaa

SEQ ID NO: 12296 - DNA, 23 bp, Artificial Sequence
  Description of Artificial Sequence: Synthetic oligonucleotide
  X-linked inhibitor of apoptosis (XIAP) siRNA
cacataatttgttttgtgtgaaa

SEQ ID NO: 12297 - DNA, 23 bp, Artificial Sequence
  Description of Artificial Sequence: Synthetic oligonucleotide
  X-linked inhibitor of apoptosis (XIAP) siRNA
acataatttgttttgtgtgaaaa

SEQ ID NO: 12298 - DNA, 23 bp, Artificial Sequence
  Description of Artificial Sequence: Synthetic oligonucleotide
  X-linked inhibitor of apoptosis (XIAP) siRNA
cataatttgttttgtgtgaaaaa

SEQ ID NO: 12299 - DNA, 23 bp, Artificial Sequence
  Description of Artificial Sequence: Synthetic oligonucleotide
  X-linked inhibitor of apoptosis (XIAP) siRNA
ataatttgttttgtgtgaaaaag

SEQ ID NO: 12300 - DNA, 23 bp, Artificial Sequence
  Description of Artificial Sequence: Synthetic oligonucleotide
  X-linked inhibitor of apoptosis (XIAP) siRNA
taatttgttttgtgtgaaaaagg

SEQ ID NO: 12301 - DNA, 23 bp, Artificial Sequence
  Description of Artificial Sequence: Synthetic oligonucleotide
  X-linked inhibitor of apoptosis (XIAP) siRNA
aatttgttttgtgtgaaaaagga

SEQ ID NO: 12302 - DNA, 23 bp, Artificial Sequence
  Description of Artificial Sequence: Synthetic oligonucleotide
  X-linked inhibitor of apoptosis (XIAP) siRNA
atttgttttgtgtgaaaaaggaa

SEQ ID NO: 12303 - DNA, 23 bp, Artificial Sequence
  Description of Artificial Sequence: Synthetic oligonucleotide
  X-linked inhibitor of apoptosis (XIAP) siRNA
tttgttttgtgtgaaaaaggaat

SEQ ID NO: 12304 - DNA, 23 bp, Artificial Sequence
  Description of Artificial Sequence: Synthetic oligonucleotide
  X-linked inhibitor of apoptosis (XIAP) siRNA
ttgttttgtgtgaaaaaggaata

SEQ ID NO: 12305 - DNA, 23 bp, Artificial Sequence
  Description of Artificial Sequence: Synthetic oligonucleotide
  X-linked inhibitor of apoptosis (XIAP) siRNA
tgttttgtgtgaaaaaggaataa

SEQ ID NO: 12306 - DNA, 23 bp, Artificial Sequence
  Description of Artificial Sequence: Synthetic oligonucleotide
  X-linked inhibitor of apoptosis (XIAP) siRNA
gttttgtgtgaaaaaggaataaa

SEQ ID NO: 12307 - DNA, 23 bp, Artificial Sequence
  Description of Artificial Sequence: Synthetic oligonucleotide
  X-linked inhibitor of apoptosis (XIAP) siRNA
ttttgtgtgaaaaaggaataaat

SEQ ID NO: 12308 - DNA, 23 bp, Artificial Sequence
  Description of Artificial Sequence: Synthetic oligonucleotide
  X-linked inhibitor of apoptosis (XIAP) siRNA
tttgtgtgaaaaaggaataaatt

SEQ ID NO: 12309 - DNA, 23 bp, Artificial Sequence
  Description of Artificial Sequence: Synthetic oligonucleotide
  X-linked inhibitor of apoptosis (XIAP) siRNA
ttgtgtgaaaaaggaataaattg

SEQ ID NO: 12310 - DNA, 23 bp, Artificial Sequence
  Description of Artificial Sequence: Synthetic oligonucleotide
  X-linked inhibitor of apoptosis (XIAP) siRNA
tgtgtgaaaaaggaataaattgt

SEQ ID NO: 12311 - DNA, 23 bp, Artificial Sequence
  Description of Artificial Sequence: Synthetic oligonucleotide
  X-linked inhibitor of apoptosis (XIAP) siRNA
gtgtgaaaaaggaataaattgtt

SEQ ID NO: 12312 - DNA, 23 bp, Artificial Sequence
  Description of Artificial Sequence: Synthetic oligonucleotide
  X-linked inhibitor of apoptosis (XIAP) siRNA
tgtgaaaaaggaataaattgttc

SEQ ID NO: 12313 - DNA, 23 bp, Artificial Sequence
  Description of Artificial Sequence: Synthetic oligonucleotide
  X-linked inhibitor of apoptosis (XIAP) siRNA
gtgaaaaaggaataaattgttcc

SEQ ID NO: 12314 - DNA, 23 bp, Artificial Sequence
  Description of Artificial Sequence: Synthetic oligonucleotide
  X-linked inhibitor of apoptosis (XIAP) siRNA
tgaaaaaggaataaattgttcca

SEQ ID NO: 12315 - DNA, 23 bp, Artificial Sequence
  Description of Artificial Sequence: Synthetic oligonucleotide
  X-linked inhibitor of apoptosis (XIAP) siRNA
gaaaaaggaataaattgttccat

SEQ ID NO: 12316 - DNA, 23 bp, Artificial Sequence
  Description of Artificial Sequence: Synthetic oligonucleotide
  X-linked inhibitor of apoptosis (XIAP) siRNA
aaaaaggaataaattgttccatg

SEQ ID NO: 12317 - DNA, 23 bp, Artificial Sequence
  Description of Artificial Sequence: Synthetic oligonucleotide
  X-linked inhibitor of apoptosis (XIAP) siRNA
aaaaggaataaattgttccatgc

SEQ ID NO: 12318 - DNA, 23 bp, Artificial Sequence
  Description of Artificial Sequence: Synthetic oligonucleotide
  X-linked inhibitor of apoptosis (XIAP) siRNA
aaaggaataaattgttccatgct

SEQ ID NO: 12319 - DNA, 23 bp, Artificial Sequence
  Description of Artificial Sequence: Synthetic oligonucleotide
  X-linked inhibitor of apoptosis (XIAP) siRNA
aaggaataaattgttccatgctg

SEQ ID NO: 12320 - DNA, 23 bp, Artificial Sequence
  Description of Artificial Sequence: Synthetic oligonucleotide
  X-linked inhibitor of apoptosis (XIAP) siRNA
aggaataaattgttccatgctgg

SEQ ID NO: 12321 - DNA, 23 bp, Artificial Sequence
  Description of Artificial Sequence: Synthetic oligonucleotide
  X-linked inhibitor of apoptosis (XIAP) siRNA
ggaataaattgttccatgctggt

SEQ ID NO: 12322 - DNA, 23 bp, Artificial Sequence
  Description of Artificial Sequence: Synthetic oligonucleotide
  X-linked inhibitor of apoptosis (XIAP) siRNA
gaataaattgttccatgctggtg

SEQ ID NO: 12323 - DNA, 23 bp, Artificial Sequence
  Description of Artificial Sequence: Synthetic oligonucleotide
  X-linked inhibitor of apoptosis (XIAP) siRNA
aataaattgttccatgctggtgg

SEQ ID NO: 12324 - DNA, 23 bp, Artificial Sequence
  Description of Artificial Sequence: Synthetic oligonucleotide
  X-linked inhibitor of apoptosis (XIAP) siRNA
ataaattgttccatgctggtgga

SEQ ID NO: 12325 - DNA, 23 bp, Artificial Sequence
  Description of Artificial Sequence: Synthetic oligonucleotide
  X-linked inhibitor of apoptosis (XIAP) siRNA
taaattgttccatgctggtggaa

SEQ ID NO: 12326 - DNA, 23 bp, Artificial Sequence
  Description of Artificial Sequence: Synthetic oligonucleotide
  X-linked inhibitor of apoptosis (XIAP) siRNA
aaattgttccatgctggtggaaa

SEQ ID NO: 12327 - DNA, 23 bp, Artificial Sequence
  Description of Artificial Sequence: Synthetic oligonucleotide
  X-linked inhibitor of apoptosis (XIAP) siRNA
aattgttccatgctggtggaaag

SEQ ID NO: 12328 - DNA, 23 bp, Artificial Sequence
  Description of Artificial Sequence: Synthetic oligonucleotide
  X-linked inhibitor of apoptosis (XIAP) siRNA
attgttccatgctggtggaaaga

SEQ ID NO: 12329 - DNA, 23 bp, Artificial Sequence
  Description of Artificial Sequence: Synthetic oligonucleotide
  X-linked inhibitor of apoptosis (XIAP) siRNA
ttgttccatgctggtggaaagat

SEQ ID NO: 12330 - DNA, 23 bp, Artificial Sequence
  Description of Artificial Sequence: Synthetic oligonucleotide
  X-linked inhibitor of apoptosis (XIAP) siRNA
tgttccatgctggtggaaagata

SEQ ID NO: 12331 - DNA, 23 bp, Artificial Sequence
  Description of Artificial Sequence: Synthetic oligonucleotide
  X-linked inhibitor of apoptosis (XIAP) siRNA
gttccatgctggtggaaagatag

SEQ ID NO: 12332 - DNA, 23 bp, Artificial Sequence
  Description of Artificial Sequence: Synthetic oligonucleotide
  X-linked inhibitor of apoptosis (XIAP) siRNA
ttccatgctggtggaaagataga

SEQ ID NO: 12333 - DNA, 23 bp, Artificial Sequence
  Description of Artificial Sequence: Synthetic oligonucleotide
  X-linked inhibitor of apoptosis (XIAP) siRNA
tccatgctggtggaaagatagag

SEQ ID NO: 12334 - DNA, 23 bp, Artificial Sequence
  Description of Artificial Sequence: Synthetic oligonucleotide
  X-linked inhibitor of apoptosis (XIAP) siRNA
ccatgctggtggaaagatagaga

SEQ ID NO: 12335 - DNA, 23 bp, Artificial Sequence
  Description of Artificial Sequence: Synthetic oligonucleotide
  X-linked inhibitor of apoptosis (XIAP) siRNA
catgctggtggaaagatagagat

SEQ ID NO: 12336 - DNA, 23 bp, Artificial Sequence
  Description of Artificial Sequence: Synthetic oligonucleotide
  X-linked inhibitor of apoptosis (XIAP) siRNA
atgctggtggaaagatagagatt

SEQ ID NO: 12337 - DNA, 23 bp, Artificial Sequence
  Description of Artificial Sequence: Synthetic oligonucleotide
  X-linked inhibitor of apoptosis (XIAP) siRNA
tgctggtggaaagatagagattg

SEQ ID NO: 12338 - DNA, 23 bp, Artificial Sequence
  Description of Artificial Sequence: Synthetic oligonucleotide
  X-linked inhibitor of apoptosis (XIAP) siRNA
gctggtggaaagatagagattgt

SEQ ID NO: 12339 - DNA, 23 bp, Artificial Sequence
  Description of Artificial Sequence: Synthetic oligonucleotide
  X-linked inhibitor of apoptosis (XIAP) siRNA
ctggtggaaagatagagattgtt

SEQ ID NO: 12340 - DNA, 23 bp, Artificial Sequence
  Description of Artificial Sequence: Synthetic oligonucleotide
  X-linked inhibitor of apoptosis (XIAP) siRNA
tggtggaaagatagagattgttt

SEQ ID NO: 12341 - DNA, 23 bp, Artificial Sequence
  Description of Artificial Sequence: Synthetic oligonucleotide
  X-linked inhibitor of apoptosis (XIAP) siRNA
ggtggaaagatagagattgtttt

SEQ ID NO: 12342 - DNA, 23 bp, Artificial Sequence
  Description of Artificial Sequence: Synthetic oligonucleotide
  X-linked inhibitor of apoptosis (XIAP) siRNA
gtggaaagatagagattgttttt

SEQ ID NO: 12343 - DNA, 23 bp, Artificial Sequence
  Description of Artificial Sequence: Synthetic oligonucleotide
  X-linked inhibitor of apoptosis (XIAP) siRNA
tggaaagatagagattgttttta

SEQ ID NO: 12344 - DNA, 23 bp, Artificial Sequence
  Description of Artificial Sequence: Synthetic oligonucleotide
  X-linked inhibitor of apoptosis (XIAP) siRNA
ggaaagatagagattgtttttag

SEQ ID NO: 12345 - DNA, 23 bp, Artificial Sequence
  Description of Artificial Sequence: Synthetic oligonucleotide
  X-linked inhibitor of apoptosis (XIAP) siRNA
gaaagatagagattgtttttaga

SEQ ID NO: 12346 - DNA, 23 bp, Artificial Sequence
  Description of Artificial Sequence: Synthetic oligonucleotide
  X-linked inhibitor of apoptosis (XIAP) siRNA
aaagatagagattgtttttagag

SEQ ID NO: 12347 - DNA, 23 bp, Artificial Sequence
  Description of Artificial Sequence: Synthetic oligonucleotide
  X-linked inhibitor of apoptosis (XIAP) siRNA
aagatagagattgtttttagagg

SEQ ID NO: 12348 - DNA, 23 bp, Artificial Sequence
  Description of Artificial Sequence: Synthetic oligonucleotide
  X-linked inhibitor of apoptosis (XIAP) siRNA
agatagagattgtttttagaggt

SEQ ID NO: 12349 - DNA, 23 bp, Artificial Sequence
  Description of Artificial Sequence: Synthetic oligonucleotide
  X-linked inhibitor of apoptosis (XIAP) siRNA
gatagagattgtttttagaggtt

SEQ ID NO: 12350 - DNA, 23 bp, Artificial Sequence
  Description of Artificial Sequence: Synthetic oligonucleotide
  X-linked inhibitor of apoptosis (XIAP) siRNA
atagagattgtttttagaggttg

SEQ ID NO: 12351 - DNA, 23 bp, Artificial Sequence
  Description of Artificial Sequence: Synthetic oligonucleotide
  X-linked inhibitor of apoptosis (XIAP) siRNA
tagagattgtttttagaggttgg

SEQ ID NO: 12352 - DNA, 23 bp, Artificial Sequence
  Description of Artificial Sequence: Synthetic oligonucleotide
  X-linked inhibitor of apoptosis (XIAP) siRNA
agagattgtttttagaggttggt

SEQ ID NO: 12353 - DNA, 23 bp, Artificial Sequence
  Description of Artificial Sequence: Synthetic oligonucleotide
  X-linked inhibitor of apoptosis (XIAP) siRNA
gagattgtttttagaggttggtt

SEQ ID NO: 12354 - DNA, 23 bp, Artificial Sequence
  Description of Artificial Sequence: Synthetic oligonucleotide
  X-linked inhibitor of apoptosis (XIAP) siRNA
agattgtttttagaggttggttg

SEQ ID NO: 12355 - DNA, 23 bp, Artificial Sequence
  Description of Artificial Sequence: Synthetic oligonucleotide
  X-linked inhibitor of apoptosis (XIAP) siRNA
gattgtttttagaggttggttgt

SEQ ID NO: 12356 - DNA, 23 bp, Artificial Sequence
  Description of Artificial Sequence: Synthetic oligonucleotide
  X-linked inhibitor of apoptosis (XIAP) siRNA
attgtttttagaggttggttgtt

SEQ ID NO: 12357 - DNA, 23 bp, Artificial Sequence
  Description of Artificial Sequence: Synthetic oligonucleotide
  X-linked inhibitor of apoptosis (XIAP) siRNA
ttgtttttagaggttggttgttg

SEQ ID NO: 12358 - DNA, 23 bp, Artificial Sequence
  Description of Artificial Sequence: Synthetic oligonucleotide
  X-linked inhibitor of apoptosis (XIAP) siRNA
tgtttttagaggttggttgttgt

SEQ ID NO: 12359 - DNA, 23 bp, Artificial Sequence
  Description of Artificial Sequence: Synthetic oligonucleotide
  X-linked inhibitor of apoptosis (XIAP) siRNA
gtttttagaggttggttgttgtg

SEQ ID NO: 12360 - DNA, 23 bp, Artificial Sequence
  Description of Artificial Sequence: Synthetic oligonucleotide
  X-linked inhibitor of apoptosis (XIAP) siRNA
tttttagaggttggttgttgtgt

SEQ ID NO: 12361 - DNA, 23 bp, Artificial Sequence
  Description of Artificial Sequence: Synthetic oligonucleotide
  X-linked inhibitor of apoptosis (XIAP) siRNA
ttttagaggttggttgttgtgtt

SEQ ID NO: 12362 - DNA, 23 bp, Artificial Sequence
  Description of Artificial Sequence: Synthetic oligonucleotide
  X-linked inhibitor of apoptosis (XIAP) siRNA
tttagaggttggttgttgtgttt

SEQ ID NO: 12363 - DNA, 23 bp, Artificial Sequence
  Description of Artificial Sequence: Synthetic oligonucleotide
  X-linked inhibitor of apoptosis (XIAP) siRNA
ttagaggttggttgttgtgtttt

SEQ ID NO: 12364 - DNA, 23 bp, Artificial Sequence
  Description of Artificial Sequence: Synthetic oligonucleotide
  X-linked inhibitor of apoptosis (XIAP) siRNA
tagaggttggttgttgtgtttta

SEQ ID NO: 12365 - DNA, 23 bp, Artificial Sequence
  Description of Artificial Sequence: Synthetic oligonucleotide
  X-linked inhibitor of apoptosis (XIAP) siRNA
agaggttggttgttgtgttttag

SEQ ID NO: 12366 - DNA, 23 bp, Artificial Sequence
  Description of Artificial Sequence: Synthetic oligonucleotide
  X-linked inhibitor of apoptosis (XIAP) siRNA
gaggttggttgttgtgttttagg

SEQ ID NO: 12367 - DNA, 23 bp, Artificial Sequence
  Description of Artificial Sequence: Synthetic oligonucleotide
  X-linked inhibitor of apoptosis (XIAP) siRNA
aggttggttgttgtgttttagga

SEQ ID NO: 12368 - DNA, 23 bp, Artificial Sequence
  Description of Artificial Sequence: Synthetic oligonucleotide
  X-linked inhibitor of apoptosis (XIAP) siRNA
ggttggttgttgtgttttaggat

SEQ ID NO: 12369 - DNA, 23 bp, Artificial Sequence
  Description of Artificial Sequence: Synthetic oligonucleotide
  X-linked inhibitor of apoptosis (XIAP) siRNA
gttggttgttgtgttttaggatt

SEQ ID NO: 12370 - DNA, 23 bp, Artificial Sequence
  Description of Artificial Sequence: Synthetic oligonucleotide
  X-linked inhibitor of apoptosis (XIAP) siRNA
ttggttgttgtgttttaggattc

SEQ ID NO: 12371 - DNA, 23 bp, Artificial Sequence
  Description of Artificial Sequence: Synthetic oligonucleotide
  X-linked inhibitor of apoptosis (XIAP) siRNA
tggttgttgtgttttaggattct

SEQ ID NO: 12372 - DNA, 23 bp, Artificial Sequence
  Description of Artificial Sequence: Synthetic oligonucleotide
  X-linked inhibitor of apoptosis (XIAP) siRNA
ggttgttgtgttttaggattctg

SEQ ID NO: 12373 - DNA, 23 bp, Artificial Sequence
  Description of Artificial Sequence: Synthetic oligonucleotide
  X-linked inhibitor of apoptosis (XIAP) siRNA
gttgttgtgttttaggattctgt

SEQ ID NO: 12374 - DNA, 23 bp, Artificial Sequence
  Description of Artificial Sequence: Synthetic oligonucleotide
  X-linked inhibitor of apoptosis (XIAP) siRNA
ttgttgtgttttaggattctgtc

SEQ ID NO: 12375 - DNA, 23 bp, Artificial Sequence
  Description of Artificial Sequence: Synthetic oligonucleotide
  X-linked inhibitor of apoptosis (XIAP) siRNA
tgttgtgttttaggattctgtcc

SEQ ID NO: 12376 - DNA, 23 bp, Artificial Sequence
  Description of Artificial Sequence: Synthetic oligonucleotide
  X-linked inhibitor of apoptosis (XIAP) siRNA
gttgtgttttaggattctgtcca

SEQ ID NO: 12377 - DNA, 23 bp, Artificial Sequence
  Description of Artificial Sequence: Synthetic oligonucleotide
  X-linked inhibitor of apoptosis (XIAP) siRNA
ttgtgttttaggattctgtccat

SEQ ID NO: 12378 - DNA, 23 bp, Artificial Sequence
  Description of Artificial Sequence: Synthetic oligonucleotide
  X-linked inhibitor of apoptosis (XIAP) siRNA
tgtgttttaggattctgtccatt

SEQ ID NO: 12379 - DNA, 23 bp, Artificial Sequence
  Description of Artificial Sequence: Synthetic oligonucleotide
  X-linked inhibitor of apoptosis (XIAP) siRNA
gtgttttaggattctgtccattt

SEQ ID NO: 12380 - DNA, 23 bp, Artificial Sequence
  Description of Artificial Sequence: Synthetic oligonucleotide
  X-linked inhibitor of apoptosis (XIAP) siRNA
tgttttaggattctgtccatttt

SEQ ID NO: 12381 - DNA, 23 bp, Artificial Sequence
  Description of Artificial Sequence: Synthetic oligonucleotide
  X-linked inhibitor of apoptosis (XIAP) siRNA
gttttaggattctgtccattttc

SEQ ID NO: 12382 - DNA, 23 bp, Artificial Sequence
  Description of Artificial Sequence: Synthetic oligonucleotide
  X-linked inhibitor of apoptosis (XIAP) siRNA
ttttaggattctgtccattttct

SEQ ID NO: 12383 - DNA, 23 bp, Artificial Sequence
  Description of Artificial Sequence: Synthetic oligonucleotide
  X-linked inhibitor of apoptosis (XIAP) siRNA
tttaggattctgtccattttctt

SEQ ID NO: 12384 - DNA, 23 bp, Artificial Sequence
  Description of Artificial Sequence: Synthetic oligonucleotide
  X-linked inhibitor of apoptosis (XIAP) siRNA
ttaggattctgtccattttcttt

SEQ ID NO: 12385 - DNA, 23 bp, Artificial Sequence
  Description of Artificial Sequence: Synthetic oligonucleotide
  X-linked inhibitor of apoptosis (XIAP) siRNA
taggattctgtccattttctttt

SEQ ID NO: 12386 - DNA, 23 bp, Artificial Sequence
  Description of Artificial Sequence: Synthetic oligonucleotide
  X-linked inhibitor of apoptosis (XIAP) siRNA
aggattctgtccattttctttta

SEQ ID NO: 12387 - DNA, 23 bp, Artificial Sequence
  Description of Artificial Sequence: Synthetic oligonucleotide
  X-linked inhibitor of apoptosis (XIAP) siRNA
ggattctgtccattttcttttaa

SEQ ID NO: 12388 - DNA, 23 bp, Artificial Sequence
  Description of Artificial Sequence: Synthetic oligonucleotide
  X-linked inhibitor of apoptosis (XIAP) siRNA
gattctgtccattttcttttaaa

SEQ ID NO: 12389 - DNA, 23 bp, Artificial Sequence
  Description of Artificial Sequence: Synthetic oligonucleotide
  X-linked inhibitor of apoptosis (XIAP) siRNA
attctgtccattttcttttaaag

SEQ ID NO: 12390 - DNA, 23 bp, Artificial Sequence
  Description of Artificial Sequence: Synthetic oligonucleotide
  X-linked inhibitor of apoptosis (XIAP) siRNA
ttctgtccattttcttttaaagt

SEQ ID NO: 12391 - DNA, 23 bp, Artificial Sequence
  Description of Artificial Sequence: Synthetic oligonucleotide
  X-linked inhibitor of apoptosis (XIAP) siRNA
tctgtccattttcttttaaagtt

SEQ ID NO: 12392 - DNA, 23 bp, Artificial Sequence
  Description of Artificial Sequence: Synthetic oligonucleotide
  X-linked inhibitor of apoptosis (XIAP) siRNA
ctgtccattttcttttaaagtta

SEQ ID NO: 12393 - DNA, 23 bp, Artificial Sequence
  Description of Artificial Sequence: Synthetic oligonucleotide
  X-linked inhibitor of apoptosis (XIAP) siRNA
tgtccattttcttttaaagttat

SEQ ID NO: 12394 - DNA, 23 bp, Artificial Sequence
  Description of Artificial Sequence: Synthetic oligonucleotide
  X-linked inhibitor of apoptosis (XIAP) siRNA
gtccattttcttttaaagttata

SEQ ID NO: 12395 - DNA, 23 bp, Artificial Sequence
  Description of Artificial Sequence: Synthetic oligonucleotide
  X-linked inhibitor of apoptosis (XIAP) siRNA
tccattttcttttaaagttataa

SEQ ID NO: 12396 - DNA, 23 bp, Artificial Sequence
  Description of Artificial Sequence: Synthetic oligonucleotide
  X-linked inhibitor of apoptosis (XIAP) siRNA
ccattttcttttaaagttataaa

SEQ ID NO: 12397 - DNA, 23 bp, Artificial Sequence
  Description of Artificial Sequence: Synthetic oligonucleotide
  X-linked inhibitor of apoptosis (XIAP) siRNA
cattttcttttaaagttataaac

SEQ ID NO: 12398 - DNA, 23 bp, Artificial Sequence
  Description of Artificial Sequence: Synthetic oligonucleotide
  X-linked inhibitor of apoptosis (XIAP) siRNA
attttcttttaaagttataaaca

SEQ ID NO: 12399 - DNA, 23 bp, Artificial Sequence
  Description of Artificial Sequence: Synthetic oligonucleotide
  X-linked inhibitor of apoptosis (XIAP) siRNA
ttttcttttaaagttataaacac

SEQ ID NO: 12400 - DNA, 23 bp, Artificial Sequence
  Description of Artificial Sequence: Synthetic oligonucleotide
  X-linked inhibitor of apoptosis (XIAP) siRNA
tttcttttaaagttataaacacg

SEQ ID NO: 12401 - DNA, 23 bp, Artificial Sequence
  Description of Artificial Sequence: Synthetic oligonucleotide
  X-linked inhibitor of apoptosis (XIAP) siRNA
ttcttttaaagttataaacacgt

SEQ ID NO: 12402 - DNA, 23 bp, Artificial Sequence
  Description of Artificial Sequence: Synthetic oligonucleotide
  X-linked inhibitor of apoptosis (XIAP) siRNA
tcttttaaagttataaacacgta

SEQ ID NO: 12403 - DNA, 23 bp, Artificial Sequence
  Description of Artificial Sequence: Synthetic oligonucleotide
  X-linked inhibitor of apoptosis (XIAP) siRNA
cttttaaagttataaacacgtac

SEQ ID NO: 12404 - DNA, 23 bp, Artificial Sequence
  Description of Artificial Sequence: Synthetic oligonucleotide
  X-linked inhibitor of apoptosis (XIAP) siRNA
ttttaaagttataaacacgtact

SEQ ID NO: 12405 - DNA, 23 bp, Artificial Sequence
  Description of Artificial Sequence: Synthetic oligonucleotide
  X-linked inhibitor of apoptosis (XIAP) siRNA
tttaaagttataaacacgtactt

SEQ ID NO: 12406 - DNA, 23 bp, Artificial Sequence
  Description of Artificial Sequence: Synthetic oligonucleotide
  X-linked inhibitor of apoptosis (XIAP) siRNA
ttaaagttataaacacgtacttg

SEQ ID NO: 12407 - DNA, 23 bp, Artificial Sequence
  Description of Artificial Sequence: Synthetic oligonucleotide
  X-linked inhibitor of apoptosis (XIAP) siRNA
taaagttataaacacgtacttgt

SEQ ID NO: 12408 - DNA, 23 bp, Artificial Sequence
  Description of Artificial Sequence: Synthetic oligonucleotide
  X-linked inhibitor of apoptosis (XIAP) siRNA
aaagttataaacacgtacttgtg

SEQ ID NO: 12409 - DNA, 23 bp, Artificial Sequence
  Description of Artificial Sequence: Synthetic oligonucleotide
  X-linked inhibitor of apoptosis (XIAP) siRNA
aagttataaacacgtacttgtgc

SEQ ID NO: 12410 - DNA, 23 bp, Artificial Sequence
  Description of Artificial Sequence: Synthetic oligonucleotide
  X-linked inhibitor of apoptosis (XIAP) siRNA
agttataaacacgtacttgtgcg

SEQ ID NO: 12411 - DNA, 23 bp, Artificial Sequence
  Description of Artificial Sequence: Synthetic oligonucleotide
  X-linked inhibitor of apoptosis (XIAP) siRNA
gttataaacacgtacttgtgcga

SEQ ID NO: 12412 - DNA, 23 bp, Artificial Sequence
  Description of Artificial Sequence: Synthetic oligonucleotide
  X-linked inhibitor of apoptosis (XIAP) siRNA
ttataaacacgtacttgtgcgaa

SEQ ID NO: 12413 - DNA, 23 bp, Artificial Sequence
  Description of Artificial Sequence: Synthetic oligonucleotide
  X-linked inhibitor of apoptosis (XIAP) siRNA
tataaacacgtacttgtgcgaat

SEQ ID NO: 12414 - DNA, 23 bp, Artificial Sequence
  Description of Artificial Sequence: Synthetic oligonucleotide
  X-linked inhibitor of apoptosis (XIAP) siRNA
ataaacacgtacttgtgcgaatt

SEQ ID NO: 12415 - DNA, 23 bp, Artificial Sequence
  Description of Artificial Sequence: Synthetic oligonucleotide
  X-linked inhibitor of apoptosis (XIAP) siRNA
taaacacgtacttgtgcgaatta

SEQ ID NO: 12416 - DNA, 23 bp, Artificial Sequence
  Description of Artificial Sequence: Synthetic oligonucleotide
  X-linked inhibitor of apoptosis (XIAP) siRNA
aaacacgtacttgtgcgaattat

SEQ ID NO: 12417 - DNA, 23 bp, Artificial Sequence
  Description of Artificial Sequence: Synthetic oligonucleotide
  X-linked inhibitor of apoptosis (XIAP) siRNA
aacacgtacttgtgcgaattatt

SEQ ID NO: 12418 - DNA, 23 bp, Artificial Sequence
  Description of Artificial Sequence: Synthetic oligonucleotide
  X-linked inhibitor of apoptosis (XIAP) siRNA
acacgtacttgtgcgaattattt

SEQ ID NO: 12419 - DNA, 23 bp, Artificial Sequence
  Description of Artificial Sequence: Synthetic oligonucleotide
  X-linked inhibitor of apoptosis (XIAP) siRNA
cacgtacttgtgcgaattatttt

SEQ ID NO: 12420 - DNA, 23 bp, Artificial Sequence
  Description of Artificial Sequence: Synthetic oligonucleotide
  X-linked inhibitor of apoptosis (XIAP) siRNA
acgtacttgtgcgaattattttt

SEQ ID NO: 12421 - DNA, 23 bp, Artificial Sequence
  Description of Artificial Sequence: Synthetic oligonucleotide
  X-linked inhibitor of apoptosis (XIAP) siRNA
cgtacttgtgcgaattatttttt

SEQ ID NO: 12422 - DNA, 23 bp, Artificial Sequence
  Description of Artificial Sequence: Synthetic oligonucleotide
  X-linked inhibitor of apoptosis (XIAP) siRNA
gtacttgtgcgaattattttttt

SEQ ID NO: 12423 - DNA, 23 bp, Artificial Sequence
  Description of Artificial Sequence: Synthetic oligonucleotide
  X-linked inhibitor of apoptosis (XIAP) siRNA
tacttgtgcgaattattttttta

SEQ ID NO: 12424 - DNA, 23 bp, Artificial Sequence
  Description of Artificial Sequence: Synthetic oligonucleotide
  X-linked inhibitor of apoptosis (XIAP) siRNA
acttgtgcgaattatttttttaa

SEQ ID NO: 12425 - DNA, 23 bp, Artificial Sequence
  Description of Artificial Sequence: Synthetic oligonucleotide
  X-linked inhibitor of apoptosis (XIAP) siRNA
cttgtgcgaattatttttttaaa

SEQ ID NO: 12426 - DNA, 23 bp, Artificial Sequence
  Description of Artificial Sequence: Synthetic oligonucleotide
  X-linked inhibitor of apoptosis (XIAP) siRNA
ttgtgcgaattatttttttaaag

SEQ ID NO: 12427 - DNA, 23 bp, Artificial Sequence
  Description of Artificial Sequence: Synthetic oligonucleotide
  X-linked inhibitor of apoptosis (XIAP) siRNA
tgtgcgaattatttttttaaagt

SEQ ID NO: 12428 - DNA, 23 bp, Artificial Sequence
  Description of Artificial Sequence: Synthetic oligonucleotide
  X-linked inhibitor of apoptosis (XIAP) siRNA
gtgcgaattatttttttaaagtg

SEQ ID NO: 12429 - DNA, 23 bp, Artificial Sequence
  Description of Artificial Sequence: Synthetic oligonucleotide
  X-linked inhibitor of apoptosis (XIAP) siRNA
tgcgaattatttttttaaagtga

SEQ ID NO: 12430 - DNA, 23 bp, Artificial Sequence
  Description of Artificial Sequence: Synthetic oligonucleotide
  X-linked inhibitor of apoptosis (XIAP) siRNA
gcgaattatttttttaaagtgat

SEQ ID NO: 12431 - DNA, 23 bp, Artificial Sequence
  Description of Artificial Sequence: Synthetic oligonucleotide
  X-linked inhibitor of apoptosis (XIAP) siRNA
cgaattatttttttaaagtgatt

SEQ ID NO: 12432 - DNA, 23 bp, Artificial Sequence
  Description of Artificial Sequence: Synthetic oligonucleotide
  X-linked inhibitor of apoptosis (XIAP) siRNA
gaattatttttttaaagtgattt

SEQ ID NO: 12433 - DNA, 23 bp, Artificial Sequence
  Description of Artificial Sequence: Synthetic oligonucleotide
  X-linked inhibitor of apoptosis (XIAP) siRNA
aattatttttttaaagtgatttg

SEQ ID NO: 12434 - DNA, 23 bp, Artificial Sequence
  Description of Artificial Sequence: Synthetic oligonucleotide
  X-linked inhibitor of apoptosis (XIAP) siRNA
attatttttttaaagtgatttgc

SEQ ID NO: 12435 - DNA, 23 bp, Artificial Sequence
  Description of Artificial Sequence: Synthetic oligonucleotide
  X-linked inhibitor of apoptosis (XIAP) siRNA
ttatttttttaaagtgatttgcc

SEQ ID NO: 12436 - DNA, 23 bp, Artificial Sequence
  Description of Artificial Sequence: Synthetic oligonucleotide
  X-linked inhibitor of apoptosis (XIAP) siRNA
tatttttttaaagtgatttgcca

SEQ ID NO: 12437 - DNA, 23 bp, Artificial Sequence
  Description of Artificial Sequence: Synthetic oligonucleotide
  X-linked inhibitor of apoptosis (XIAP) siRNA
atttttttaaagtgatttgccat

SEQ ID NO: 12438 - DNA, 23 bp, Artificial Sequence
  Description of Artificial Sequence: Synthetic oligonucleotide
  X-linked inhibitor of apoptosis (XIAP) siRNA
tttttttaaagtgatttgccatt

SEQ ID NO: 12439 - DNA, 23 bp, Artificial Sequence
  Description of Artificial Sequence: Synthetic oligonucleotide
  X-linked inhibitor of apoptosis (XIAP) siRNA
ttttttaaagtgatttgccattt

SEQ ID NO: 12440 - DNA, 23 bp, Artificial Sequence
  Description of Artificial Sequence: Synthetic oligonucleotide
  X-linked inhibitor of apoptosis (XIAP) siRNA
tttttaaagtgatttgccatttt

SEQ ID NO: 12441 - DNA, 23 bp, Artificial Sequence
  Description of Artificial Sequence: Synthetic oligonucleotide
  X-linked inhibitor of apoptosis (XIAP) siRNA
ttttaaagtgatttgccattttt

SEQ ID NO: 12442 - DNA, 23 bp, Artificial Sequence
  Description of Artificial Sequence: Synthetic oligonucleotide
  X-linked inhibitor of apoptosis (XIAP) siRNA
tttaaagtgatttgccatttttg

SEQ ID NO: 12443 - DNA, 23 bp, Artificial Sequence
  Description of Artificial Sequence: Synthetic oligonucleotide
  X-linked inhibitor of apoptosis (XIAP) siRNA
ttaaagtgatttgccatttttga

SEQ ID NO: 12444 - DNA, 23 bp, Artificial Sequence
  Description of Artificial Sequence: Synthetic oligonucleotide
  X-linked inhibitor of apoptosis (XIAP) siRNA
taaagtgatttgccatttttgaa

SEQ ID NO: 12445 - DNA, 23 bp, Artificial Sequence
  Description of Artificial Sequence: Synthetic oligonucleotide
  X-linked inhibitor of apoptosis (XIAP) siRNA
aaagtgatttgccatttttgaaa

SEQ ID NO: 12446 - DNA, 23 bp, Artificial Sequence
  Description of Artificial Sequence: Synthetic oligonucleotide
  X-linked inhibitor of apoptosis (XIAP) siRNA
aagtgatttgccatttttgaaag

SEQ ID NO: 12447 - DNA, 23 bp, Artificial Sequence
  Description of Artificial Sequence: Synthetic oligonucleotide
  X-linked inhibitor of apoptosis (XIAP) siRNA
agtgatttgccatttttgaaagc

SEQ ID NO: 12448 - DNA, 23 bp, Artificial Sequence
  Description of Artificial Sequence: Synthetic oligonucleotide
  X-linked inhibitor of apoptosis (XIAP) siRNA
gtgatttgccatttttgaaagcg

SEQ ID NO: 12449 - DNA, 23 bp, Artificial Sequence
  Description of Artificial Sequence: Synthetic oligonucleotide
  X-linked inhibitor of apoptosis (XIAP) siRNA
tgatttgccatttttgaaagcgt

SEQ ID NO: 12450 - DNA, 23 bp, Artificial Sequence
  Description of Artificial Sequence: Synthetic oligonucleotide
  X-linked inhibitor of apoptosis (XIAP) siRNA
gatttgccatttttgaaagcgta

SEQ ID NO: 12451 - DNA, 23 bp, Artificial Sequence
  Description of Artificial Sequence: Synthetic oligonucleotide
  X-linked inhibitor of apoptosis (XIAP) siRNA
atttgccatttttgaaagcgtat

SEQ ID NO: 12452 - DNA, 23 bp, Artificial Sequence
  Description of Artificial Sequence: Synthetic oligonucleotide
  X-linked inhibitor of apoptosis (XIAP) siRNA
tttgccatttttgaaagcgtatt

SEQ ID NO: 12453 - DNA, 23 bp, Artificial Sequence
  Description of Artificial Sequence: Synthetic oligonucleotide
  X-linked inhibitor of apoptosis (XIAP) siRNA
ttgccatttttgaaagcgtattt

SEQ ID NO: 12454 - DNA, 23 bp, Artificial Sequence
  Description of Artificial Sequence: Synthetic oligonucleotide
  X-linked inhibitor of apoptosis (XIAP) siRNA
tgccatttttgaaagcgtattta

SEQ ID NO: 12455 - DNA, 23 bp, Artificial Sequence
  Description of Artificial Sequence: Synthetic oligonucleotide
  X-linked inhibitor of apoptosis (XIAP) siRNA
gccatttttgaaagcgtatttaa

SEQ ID NO: 12456 - DNA, 23 bp, Artificial Sequence
  Description of Artificial Sequence: Synthetic oligonucleotide
  X-linked inhibitor of apoptosis (XIAP) siRNA
ccatttttgaaagcgtatttaat

SEQ ID NO: 12457 - DNA, 23 bp, Artificial Sequence
  Description of Artificial Sequence: Synthetic oligonucleotide
  X-linked inhibitor of apoptosis (XIAP) siRNA
catttttgaaagcgtatttaatg

SEQ ID NO: 12458 - DNA, 23 bp, Artificial Sequence
  Description of Artificial Sequence: Synthetic oligonucleotide
  X-linked inhibitor of apoptosis (XIAP) siRNA
atttttgaaagcgtatttaatga

SEQ ID NO: 12459 - DNA, 23 bp, Artificial Sequence
  Description of Artificial Sequence: Synthetic oligonucleotide
  X-linked inhibitor of apoptosis (XIAP) siRNA
tttttgaaagcgtatttaatgat

SEQ ID NO: 12460 - DNA, 23 bp, Artificial Sequence
  Description of Artificial Sequence: Synthetic oligonucleotide
  X-linked inhibitor of apoptosis (XIAP) siRNA
ttttgaaagcgtatttaatgata

SEQ ID NO: 12461 - DNA, 23 bp, Artificial Sequence
  Description of Artificial Sequence: Synthetic oligonucleotide
  X-linked inhibitor of apoptosis (XIAP) siRNA
tttgaaagcgtatttaatgatag

SEQ ID NO: 12462 - DNA, 23 bp, Artificial Sequence
  Description of Artificial Sequence: Synthetic oligonucleotide
  X-linked inhibitor of apoptosis (XIAP) siRNA
ttgaaagcgtatttaatgataga

SEQ ID NO: 12463 - DNA, 23 bp, Artificial Sequence
  Description of Artificial Sequence: Synthetic oligonucleotide
  X-linked inhibitor of apoptosis (XIAP) siRNA
tgaaagcgtatttaatgatagaa

SEQ ID NO: 12464 - DNA, 23 bp, Artificial Sequence
  Description of Artificial Sequence: Synthetic oligonucleotide
  X-linked inhibitor of apoptosis (XIAP) siRNA
gaaagcgtatttaatgatagaat

SEQ ID NO: 12465 - DNA, 23 bp, Artificial Sequence
  Description of Artificial Sequence: Synthetic oligonucleotide
  X-linked inhibitor of apoptosis (XIAP) siRNA
aaagcgtatttaatgatagaata

SEQ ID NO: 12466 - DNA, 23 bp, Artificial Sequence
  Description of Artificial Sequence: Synthetic oligonucleotide
  X-linked inhibitor of apoptosis (XIAP) siRNA
aagcgtatttaatgatagaatac

SEQ ID NO: 12467 - DNA, 23 bp, Artificial Sequence
  Description of Artificial Sequence: Synthetic oligonucleotide
  X-linked inhibitor of apoptosis (XIAP) siRNA
agcgtatttaatgatagaatact

SEQ ID NO: 12468 - DNA, 23 bp, Artificial Sequence
  Description of Artificial Sequence: Synthetic oligonucleotide
  X-linked inhibitor of apoptosis (XIAP) siRNA
gcgtatttaatgatagaatacta

SEQ ID NO: 12469 - DNA, 23 bp, Artificial Sequence
  Description of Artificial Sequence: Synthetic oligonucleotide
  X-linked inhibitor of apoptosis (XIAP) siRNA
cgtatttaatgatagaatactat

SEQ ID NO: 12470 - DNA, 23 bp, Artificial Sequence
  Description of Artificial Sequence: Synthetic oligonucleotide
  X-linked inhibitor of apoptosis (XIAP) siRNA
gtatttaatgatagaatactatc

SEQ ID NO: 12471 - DNA, 23 bp, Artificial Sequence
  Description of Artificial Sequence: Synthetic oligonucleotide
  X-linked inhibitor of apoptosis (XIAP) siRNA
tatttaatgatagaatactatcg

SEQ ID NO: 12472 - DNA, 23 bp, Artificial Sequence
  Description of Artificial Sequence: Synthetic oligonucleotide
  X-linked inhibitor of apoptosis (XIAP) siRNA
atttaatgatagaatactatcga

SEQ ID NO: 12473 - DNA, 23 bp, Artificial Sequence
  Description of Artificial Sequence: Synthetic oligonucleotide
  X-linked inhibitor of apoptosis (XIAP) siRNA
tttaatgatagaatactatcgag

SEQ ID NO: 12474 - DNA, 23 bp, Artificial Sequence
  Description of Artificial Sequence: Synthetic oligonucleotide
  X-linked inhibitor of apoptosis (XIAP) siRNA
ttaatgatagaatactatcgagc

SEQ ID NO: 12475 - DNA, 23 bp, Artificial Sequence
  Description of Artificial Sequence: Synthetic oligonucleotide
  X-linked inhibitor of apoptosis (XIAP) siRNA
taatgatagaatactatcgagcc

SEQ ID NO: 12476 - DNA, 23 bp, Artificial Sequence
  Description of Artificial Sequence: Synthetic oligonucleotide
  X-linked inhibitor of apoptosis (XIAP) siRNA
aatgatagaatactatcgagcca

SEQ ID NO: 12477 - DNA, 23 bp, Artificial Sequence
  Description of Artificial Sequence: Synthetic oligonucleotide
  X-linked inhibitor of apoptosis (XIAP) siRNA
atgatagaatactatcgagccaa

SEQ ID NO: 12478 - DNA, 23 bp, Artificial Sequence
  Description of Artificial Sequence: Synthetic oligonucleotide
  X-linked inhibitor of apoptosis (XIAP) siRNA
tgatagaatactatcgagccaac

SEQ ID NO: 12479 - DNA, 23 bp, Artificial Sequence
  Description of Artificial Sequence: Synthetic oligonucleotide
  X-linked inhibitor of apoptosis (XIAP) siRNA
gatagaatactatcgagccaaca

SEQ ID NO: 12480 - DNA, 23 bp, Artificial Sequence
  Description of Artificial Sequence: Synthetic oligonucleotide
  X-linked inhibitor of apoptosis (XIAP) siRNA
atagaatactatcgagccaacat

SEQ ID NO: 12481 - DNA, 23 bp, Artificial Sequence
  Description of Artificial Sequence: Synthetic oligonucleotide
  X-linked inhibitor of apoptosis (XIAP) siRNA
tagaatactatcgagccaacatg

SEQ ID NO: 12482 - DNA, 23 bp, Artificial Sequence
  Description of Artificial Sequence: Synthetic oligonucleotide
  X-linked inhibitor of apoptosis (XIAP) siRNA
agaatactatcgagccaacatgt

SEQ ID NO: 12483 - DNA, 23 bp, Artificial Sequence
  Description of Artificial Sequence: Synthetic oligonucleotide
  X-linked inhibitor of apoptosis (XIAP) siRNA
gaatactatcgagccaacatgta

SEQ ID NO: 12484 - DNA, 23 bp, Artificial Sequence
  Description of Artificial Sequence: Synthetic oligonucleotide
  X-linked inhibitor of apoptosis (XIAP) siRNA
aatactatcgagccaacatgtac

SEQ ID NO: 12485 - DNA, 23 bp, Artificial Sequence
  Description of Artificial Sequence: Synthetic oligonucleotide
  X-linked inhibitor of apoptosis (XIAP) siRNA
atactatcgagccaacatgtact

SEQ ID NO: 12486 - DNA, 23 bp, Artificial Sequence
  Description of Artificial Sequence: Synthetic oligonucleotide
  X-linked inhibitor of apoptosis (XIAP) siRNA
tactatcgagccaacatgtactg

SEQ ID NO: 12487 - DNA, 23 bp, Artificial Sequence
  Description of Artificial Sequence: Synthetic oligonucleotide
  X-linked inhibitor of apoptosis (XIAP) siRNA
actatcgagccaacatgtactga

SEQ ID NO: 12488 - DNA, 23 bp, Artificial Sequence
  Description of Artificial Sequence: Synthetic oligonucleotide
  X-linked inhibitor of apoptosis (XIAP) siRNA
ctatcgagccaacatgtactgac

SEQ ID NO: 12489 - DNA, 23 bp, Artificial Sequence
  Description of Artificial Sequence: Synthetic oligonucleotide
  X-linked inhibitor of apoptosis (XIAP) siRNA
tatcgagccaacatgtactgaca

SEQ ID NO: 12490 - DNA, 23 bp, Artificial Sequence
  Description of Artificial Sequence: Synthetic oligonucleotide
  X-linked inhibitor of apoptosis (XIAP) siRNA
atcgagccaacatgtactgacat

SEQ ID NO: 12491 - DNA, 23 bp, Artificial Sequence
  Description of Artificial Sequence: Synthetic oligonucleotide
  X-linked inhibitor of apoptosis (XIAP) siRNA
tcgagccaacatgtactgacatg

SEQ ID NO: 12492 - DNA, 23 bp, Artificial Sequence
  Description of Artificial Sequence: Synthetic oligonucleotide
  X-linked inhibitor of apoptosis (XIAP) siRNA
cgagccaacatgtactgacatgg

SEQ ID NO: 12493 - DNA, 23 bp, Artificial Sequence
  Description of Artificial Sequence: Synthetic oligonucleotide
  X-linked inhibitor of apoptosis (XIAP) siRNA
gagccaacatgtactgacatgga

SEQ ID NO: 12494 - DNA, 23 bp, Artificial Sequence
  Description of Artificial Sequence: Synthetic oligonucleotide
  X-linked inhibitor of apoptosis (XIAP) siRNA
agccaacatgtactgacatggaa

SEQ ID NO: 12495 - DNA, 23 bp, Artificial Sequence
  Description of Artificial Sequence: Synthetic oligonucleotide
  X-linked inhibitor of apoptosis (XIAP) siRNA
gccaacatgtactgacatggaaa

SEQ ID NO: 12496 - DNA, 23 bp, Artificial Sequence
  Description of Artificial Sequence: Synthetic oligonucleotide
  X-linked inhibitor of apoptosis (XIAP) siRNA
ccaacatgtactgacatggaaag

SEQ ID NO: 12497 - DNA, 23 bp, Artificial Sequence
  Description of Artificial Sequence: Synthetic oligonucleotide
  X-linked inhibitor of apoptosis (XIAP) siRNA
caacatgtactgacatggaaaga

SEQ ID NO: 12498 - DNA, 23 bp, Artificial Sequence
  Description of Artificial Sequence: Synthetic oligonucleotide
  X-linked inhibitor of apoptosis (XIAP) siRNA
aacatgtactgacatggaaagat

SEQ ID NO: 12499 - DNA, 23 bp, Artificial Sequence
  Description of Artificial Sequence: Synthetic oligonucleotide
  X-linked inhibitor of apoptosis (XIAP) siRNA
acatgtactgacatggaaagatg

SEQ ID NO: 12500 - DNA, 23 bp, Artificial Sequence
  Description of Artificial Sequence: Synthetic oligonucleotide
  X-linked inhibitor of apoptosis (XIAP) siRNA
catgtactgacatggaaagatgt

SEQ ID NO: 12501 - DNA, 23 bp, Artificial Sequence
  Description of Artificial Sequence: Synthetic oligonucleotide
  X-linked inhibitor of apoptosis (XIAP) siRNA
atgtactgacatggaaagatgtc

SEQ ID NO: 12502 - DNA, 23 bp, Artificial Sequence
  Description of Artificial Sequence: Synthetic oligonucleotide
  X-linked inhibitor of apoptosis (XIAP) siRNA
tgtactgacatggaaagatgtca

SEQ ID NO: 12503 - DNA, 23 bp, Artificial Sequence
  Description of Artificial Sequence: Synthetic oligonucleotide
  X-linked inhibitor of apoptosis (XIAP) siRNA
gtactgacatggaaagatgtcaa

SEQ ID NO: 12504 - DNA, 23 bp, Artificial Sequence
  Description of Artificial Sequence: Synthetic oligonucleotide
  X-linked inhibitor of apoptosis (XIAP) siRNA
tactgacatggaaagatgtcaaa

SEQ ID NO: 12505 - DNA, 23 bp, Artificial Sequence
  Description of Artificial Sequence: Synthetic oligonucleotide
  X-linked inhibitor of apoptosis (XIAP) siRNA
actgacatggaaagatgtcaaag

SEQ ID NO: 12506 - DNA, 23 bp, Artificial Sequence
  Description of Artificial Sequence: Synthetic oligonucleotide
  X-linked inhibitor of apoptosis (XIAP) siRNA
ctgacatggaaagatgtcaaaga

SEQ ID NO: 12507 - DNA, 23 bp, Artificial Sequence
  Description of Artificial Sequence: Synthetic oligonucleotide
  X-linked inhibitor of apoptosis (XIAP) siRNA
tgacatggaaagatgtcaaagat

SEQ ID NO: 12508 - DNA, 23 bp, Artificial Sequence
  Description of Artificial Sequence: Synthetic oligonucleotide
  X-linked inhibitor of apoptosis (XIAP) siRNA
gacatggaaagatgtcaaagata

SEQ ID NO: 12509 - DNA, 23 bp, Artificial Sequence
  Description of Artificial Sequence: Synthetic oligonucleotide
  X-linked inhibitor of apoptosis (XIAP) siRNA
acatggaaagatgtcaaagatat

SEQ ID NO: 12510 - DNA, 23 bp, Artificial Sequence
  Description of Artificial Sequence: Synthetic oligonucleotide
  X-linked inhibitor of apoptosis (XIAP) siRNA
catggaaagatgtcaaagatatg

SEQ ID NO: 12511 - DNA, 23 bp, Artificial Sequence
  Description of Artificial Sequence: Synthetic oligonucleotide
  X-linked inhibitor of apoptosis (XIAP) siRNA
atggaaagatgtcaaagatatgt

SEQ ID NO: 12512 - DNA, 23 bp, Artificial Sequence
  Description of Artificial Sequence: Synthetic oligonucleotide
  X-linked inhibitor of apoptosis (XIAP) siRNA
tggaaagatgtcaaagatatgtt

SEQ ID NO: 12513 - DNA, 23 bp, Artificial Sequence
  Description of Artificial Sequence: Synthetic oligonucleotide
  X-linked inhibitor of apoptosis (XIAP) siRNA
ggaaagatgtcaaagatatgtta

SEQ ID NO: 12514 - DNA, 23 bp, Artificial Sequence
  Description of Artificial Sequence: Synthetic oligonucleotide
  X-linked inhibitor of apoptosis (XIAP) siRNA
gaaagatgtcaaagatatgttaa

SEQ ID NO: 12515 - DNA, 23 bp, Artificial Sequence
  Description of Artificial Sequence: Synthetic oligonucleotide
  X-linked inhibitor of apoptosis (XIAP) siRNA
aaagatgtcaaagatatgttaag

SEQ ID NO: 12516 - DNA, 23 bp, Artificial Sequence
  Description of Artificial Sequence: Synthetic oligonucleotide
  X-linked inhibitor of apoptosis (XIAP) siRNA
aagatgtcaaagatatgttaagt

SEQ ID NO: 12517 - DNA, 23 bp, Artificial Sequence
  Description of Artificial Sequence: Synthetic oligonucleotide
  X-linked inhibitor of apoptosis (XIAP) siRNA
agatgtcaaagatatgttaagtg

SEQ ID NO: 12518 - DNA, 23 bp, Artificial Sequence
  Description of Artificial Sequence: Synthetic oligonucleotide
  X-linked inhibitor of apoptosis (XIAP) siRNA
gatgtcaaagatatgttaagtgt

SEQ ID NO: 12519 - DNA, 23 bp, Artificial Sequence
  Description of Artificial Sequence: Synthetic oligonucleotide
  X-linked inhibitor of apoptosis (XIAP) siRNA
atgtcaaagatatgttaagtgta

SEQ ID NO: 12520 - DNA, 23 bp, Artificial Sequence
  Description of Artificial Sequence: Synthetic oligonucleotide
  X-linked inhibitor of apoptosis (XIAP) siRNA
tgtcaaagatatgttaagtgtaa

SEQ ID NO: 12521 - DNA, 23 bp, Artificial Sequence
  Description of Artificial Sequence: Synthetic oligonucleotide
  X-linked inhibitor of apoptosis (XIAP) siRNA
gtcaaagatatgttaagtgtaaa

SEQ ID NO: 12522 - DNA, 23 bp, Artificial Sequence
  Description of Artificial Sequence: Synthetic oligonucleotide
  X-linked inhibitor of apoptosis (XIAP) siRNA
tcaaagatatgttaagtgtaaaa

SEQ ID NO: 12523 - DNA, 23 bp, Artificial Sequence
  Description of Artificial Sequence: Synthetic oligonucleotide
  X-linked inhibitor of apoptosis (XIAP) siRNA
caaagatatgttaagtgtaaaat

SEQ ID NO: 12524 - DNA, 23 bp, Artificial Sequence
  Description of Artificial Sequence: Synthetic oligonucleotide
  X-linked inhibitor of apoptosis (XIAP) siRNA
aaagatatgttaagtgtaaaatg

SEQ ID NO: 12525 - DNA, 23 bp, Artificial Sequence
  Description of Artificial Sequence: Synthetic oligonucleotide
  X-linked inhibitor of apoptosis (XIAP) siRNA
aagatatgttaagtgtaaaatgc

SEQ ID NO: 12526 - DNA, 23 bp, Artificial Sequence
  Description of Artificial Sequence: Synthetic oligonucleotide
  X-linked inhibitor of apoptosis (XIAP) siRNA
agatatgttaagtgtaaaatgca

SEQ ID NO: 12527 - DNA, 23 bp, Artificial Sequence
  Description of Artificial Sequence: Synthetic oligonucleotide
  X-linked inhibitor of apoptosis (XIAP) siRNA
gatatgttaagtgtaaaatgcaa

SEQ ID NO: 12528 - DNA, 23 bp, Artificial Sequence
  Description of Artificial Sequence: Synthetic oligonucleotide
  X-linked inhibitor of apoptosis (XIAP) siRNA
atatgttaagtgtaaaatgcaag

SEQ ID NO: 12529 - DNA, 23 bp, Artificial Sequence
  Description of Artificial Sequence: Synthetic oligonucleotide
  X-linked inhibitor of apoptosis (XIAP) siRNA
tatgttaagtgtaaaatgcaagt

SEQ ID NO: 12530 - DNA, 23 bp, Artificial Sequence
  Description of Artificial Sequence: Synthetic oligonucleotide
  X-linked inhibitor of apoptosis (XIAP) siRNA
atgttaagtgtaaaatgcaagtg

SEQ ID NO: 12531 - DNA, 23 bp, Artificial Sequence
  Description of Artificial Sequence: Synthetic oligonucleotide
  X-linked inhibitor of apoptosis (XIAP) siRNA
tgttaagtgtaaaatgcaagtgg

SEQ ID NO: 12532 - DNA, 23 bp, Artificial Sequence
  Description of Artificial Sequence: Synthetic oligonucleotide
  X-linked inhibitor of apoptosis (XIAP) siRNA
gttaagtgtaaaatgcaagtggc

SEQ ID NO: 12533 - DNA, 23 bp, Artificial Sequence
  Description of Artificial Sequence: Synthetic oligonucleotide
  X-linked inhibitor of apoptosis (XIAP) siRNA
ttaagtgtaaaatgcaagtggca

SEQ ID NO: 12534 - DNA, 23 bp, Artificial Sequence
  Description of Artificial Sequence: Synthetic oligonucleotide
  X-linked inhibitor of apoptosis (XIAP) siRNA
taagtgtaaaatgcaagtggcaa

SEQ ID NO: 12535 - DNA, 23 bp, Artificial Sequence
  Description of Artificial Sequence: Synthetic oligonucleotide
  X-linked inhibitor of apoptosis (XIAP) siRNA
aagtgtaaaatgcaagtggcaaa

SEQ ID NO: 12536 - DNA, 23 bp, Artificial Sequence
  Description of Artificial Sequence: Synthetic oligonucleotide
  X-linked inhibitor of apoptosis (XIAP) siRNA
agtgtaaaatgcaagtggcaaaa

SEQ ID NO: 12537 - DNA, 23 bp, Artificial Sequence
  Description of Artificial Sequence: Synthetic oligonucleotide
  X-linked inhibitor of apoptosis (XIAP) siRNA
gtgtaaaatgcaagtggcaaaac

SEQ ID NO: 12538 - DNA, 23 bp, Artificial Sequence
  Description of Artificial Sequence: Synthetic oligonucleotide
  X-linked inhibitor of apoptosis (XIAP) siRNA
tgtaaaatgcaagtggcaaaaca

SEQ ID NO: 12539 - DNA, 23 bp, Artificial Sequence
  Description of Artificial Sequence: Synthetic oligonucleotide
  X-linked inhibitor of apoptosis (XIAP) siRNA
gtaaaatgcaagtggcaaaacac

SEQ ID NO: 12540 - DNA, 23 bp, Artificial Sequence
  Description of Artificial Sequence: Synthetic oligonucleotide
  X-linked inhibitor of apoptosis (XIAP) siRNA
taaaatgcaagtggcaaaacact

SEQ ID NO: 12541 - DNA, 23 bp, Artificial Sequence
  Description of Artificial Sequence: Synthetic oligonucleotide
  X-linked inhibitor of apoptosis (XIAP) siRNA
aaaatgcaagtggcaaaacacta

SEQ ID NO: 12542 - DNA, 23 bp, Artificial Sequence
  Description of Artificial Sequence: Synthetic oligonucleotide
  X-linked inhibitor of apoptosis (XIAP) siRNA
aaatgcaagtggcaaaacactat

SEQ ID NO: 12543 - DNA, 23 bp, Artificial Sequence
  Description of Artificial Sequence: Synthetic oligonucleotide
  X-linked inhibitor of apoptosis (XIAP) siRNA
aatgcaagtggcaaaacactatg

SEQ ID NO: 12544 - DNA, 23 bp, Artificial Sequence
  Description of Artificial Sequence: Synthetic oligonucleotide
  X-linked inhibitor of apoptosis (XIAP) siRNA
atgcaagtggcaaaacactatgt

SEQ ID NO: 12545 - DNA, 23 bp, Artificial Sequence
  Description of Artificial Sequence: Synthetic oligonucleotide
  X-linked inhibitor of apoptosis (XIAP) siRNA
tgcaagtggcaaaacactatgta

SEQ ID NO: 12546 - DNA, 23 bp, Artificial Sequence
  Description of Artificial Sequence: Synthetic oligonucleotide
  X-linked inhibitor of apoptosis (XIAP) siRNA
gcaagtggcaaaacactatgtat

SEQ ID NO: 12547 - DNA, 23 bp, Artificial Sequence
  Description of Artificial Sequence: Synthetic oligonucleotide
  X-linked inhibitor of apoptosis (XIAP) siRNA
caagtggcaaaacactatgtata

SEQ ID NO: 12548 - DNA, 23 bp, Artificial Sequence
  Description of Artificial Sequence: Synthetic oligonucleotide
  X-linked inhibitor of apoptosis (XIAP) siRNA
aagtggcaaaacactatgtatag

SEQ ID NO: 12549 - DNA, 23 bp, Artificial Sequence
  Description of Artificial Sequence: Synthetic oligonucleotide
  X-linked inhibitor of apoptosis (XIAP) siRNA
agtggcaaaacactatgtatagt

SEQ ID NO: 12550 - DNA, 23 bp, Artificial Sequence
  Description of Artificial Sequence: Synthetic oligonucleotide
  X-linked inhibitor of apoptosis (XIAP) siRNA
gtggcaaaacactatgtatagtc

SEQ ID NO: 12551 - DNA, 23 bp, Artificial Sequence
  Description of Artificial Sequence: Synthetic oligonucleotide
  X-linked inhibitor of apoptosis (XIAP) siRNA
tggcaaaacactatgtatagtct

SEQ ID NO: 12552 - DNA, 23 bp, Artificial Sequence
  Description of Artificial Sequence: Synthetic oligonucleotide
  X-linked inhibitor of apoptosis (XIAP) siRNA
ggcaaaacactatgtatagtctg

SEQ ID NO: 12553 - DNA, 23 bp, Artificial Sequence
  Description of Artificial Sequence: Synthetic oligonucleotide
  X-linked inhibitor of apoptosis (XIAP) siRNA
gcaaaacactatgtatagtctga

SEQ ID NO: 12554 - DNA, 23 bp, Artificial Sequence
  Description of Artificial Sequence: Synthetic oligonucleotide
  X-linked inhibitor of apoptosis (XIAP) siRNA
caaaacactatgtatagtctgag

SEQ ID NO: 12555 - DNA, 23 bp, Artificial Sequence
  Description of Artificial Sequence: Synthetic oligonucleotide
  X-linked inhibitor of apoptosis (XIAP) siRNA
aaaacactatgtatagtctgagc

SEQ ID NO: 12556 - DNA, 23 bp, Artificial Sequence
  Description of Artificial Sequence: Synthetic oligonucleotide
  X-linked inhibitor of apoptosis (XIAP) siRNA
aaacactatgtatagtctgagcc

SEQ ID NO: 12557 - DNA, 23 bp, Artificial Sequence
  Description of Artificial Sequence: Synthetic oligonucleotide
  X-linked inhibitor of apoptosis (XIAP) siRNA
aacactatgtatagtctgagcca

SEQ ID NO: 12558 - DNA, 23 bp, Artificial Sequence
  Description of Artificial Sequence: Synthetic oligonucleotide
  X-linked inhibitor of apoptosis (XIAP) siRNA
acactatgtatagtctgagccag

SEQ ID NO: 12559 - DNA, 23 bp, Artificial Sequence
  Description of Artificial Sequence: Synthetic oligonucleotide
  X-linked inhibitor of apoptosis (XIAP) siRNA
cactatgtatagtctgagccaga

SEQ ID NO: 12560 - DNA, 23 bp, Artificial Sequence
  Description of Artificial Sequence: Synthetic oligonucleotide
  X-linked inhibitor of apoptosis (XIAP) siRNA
actatgtatagtctgagccagat

SEQ ID NO: 12561 - DNA, 23 bp, Artificial Sequence
  Description of Artificial Sequence: Synthetic oligonucleotide
  X-linked inhibitor of apoptosis (XIAP) siRNA
ctatgtatagtctgagccagatc

SEQ ID NO: 12562 - DNA, 23 bp, Artificial Sequence
  Description of Artificial Sequence: Synthetic oligonucleotide
  X-linked inhibitor of apoptosis (XIAP) siRNA
tatgtatagtctgagccagatca

SEQ ID NO: 12563 - DNA, 23 bp, Artificial Sequence
  Description of Artificial Sequence: Synthetic oligonucleotide
  X-linked inhibitor of apoptosis (XIAP) siRNA
atgtatagtctgagccagatcaa

SEQ ID NO: 12564 - DNA, 23 bp, Artificial Sequence
  Description of Artificial Sequence: Synthetic oligonucleotide
  X-linked inhibitor of apoptosis (XIAP) siRNA
tgtatagtctgagccagatcaaa

SEQ ID NO: 12565 - DNA, 23 bp, Artificial Sequence
  Description of Artificial Sequence: Synthetic oligonucleotide
  X-linked inhibitor of apoptosis (XIAP) siRNA
gtatagtctgagccagatcaaag

SEQ ID NO: 12566 - DNA, 23 bp, Artificial Sequence
  Description of Artificial Sequence: Synthetic oligonucleotide
  X-linked inhibitor of apoptosis (XIAP) siRNA
tatagtctgagccagatcaaagt

SEQ ID NO: 12567 - DNA, 23 bp, Artificial Sequence
  Description of Artificial Sequence: Synthetic oligonucleotide
  X-linked inhibitor of apoptosis (XIAP) siRNA
atagtctgagccagatcaaagta

SEQ ID NO: 12568 - DNA, 23 bp, Artificial Sequence
  Description of Artificial Sequence: Synthetic oligonucleotide
  X-linked inhibitor of apoptosis (XIAP) siRNA
tagtctgagccagatcaaagtat

SEQ ID NO: 12569 - DNA, 23 bp, Artificial Sequence
  Description of Artificial Sequence: Synthetic oligonucleotide
  X-linked inhibitor of apoptosis (XIAP) siRNA
agtctgagccagatcaaagtatg

SEQ ID NO: 12570 - DNA, 23 bp, Artificial Sequence
  Description of Artificial Sequence: Synthetic oligonucleotide
  X-linked inhibitor of apoptosis (XIAP) siRNA
gtctgagccagatcaaagtatgt

SEQ ID NO: 12571 - DNA, 23 bp, Artificial Sequence
  Description of Artificial Sequence: Synthetic oligonucleotide
  X-linked inhibitor of apoptosis (XIAP) siRNA
tctgagccagatcaaagtatgta

SEQ ID NO: 12572 - DNA, 23 bp, Artificial Sequence
  Description of Artificial Sequence: Synthetic oligonucleotide
  X-linked inhibitor of apoptosis (XIAP) siRNA
ctgagccagatcaaagtatgtat

SEQ ID NO: 12573 - DNA, 23 bp, Artificial Sequence
  Description of Artificial Sequence: Synthetic oligonucleotide
  X-linked inhibitor of apoptosis (XIAP) siRNA
tgagccagatcaaagtatgtatg

SEQ ID NO: 12574 - DNA, 23 bp, Artificial Sequence
  Description of Artificial Sequence: Synthetic oligonucleotide
  X-linked inhibitor of apoptosis (XIAP) siRNA
gagccagatcaaagtatgtatgt

SEQ ID NO: 12575 - DNA, 23 bp, Artificial Sequence
  Description of Artificial Sequence: Synthetic oligonucleotide
  X-linked inhibitor of apoptosis (XIAP) siRNA
agccagatcaaagtatgtatgtt

SEQ ID NO: 12576 - DNA, 23 bp, Artificial Sequence
  Description of Artificial Sequence: Synthetic oligonucleotide
  X-linked inhibitor of apoptosis (XIAP) siRNA
gccagatcaaagtatgtatgttt

SEQ ID NO: 12577 - DNA, 23 bp, Artificial Sequence
  Description of Artificial Sequence: Synthetic oligonucleotide
  X-linked inhibitor of apoptosis (XIAP) siRNA
ccagatcaaagtatgtatgtttt

SEQ ID NO: 12578 - DNA, 23 bp, Artificial Sequence
  Description of Artificial Sequence: Synthetic oligonucleotide
  X-linked inhibitor of apoptosis (XIAP) siRNA
cagatcaaagtatgtatgttttt

SEQ ID NO: 12579 - DNA, 23 bp, Artificial Sequence
  Description of Artificial Sequence: Synthetic oligonucleotide
  X-linked inhibitor of apoptosis (XIAP) siRNA
agatcaaagtatgtatgttttta

SEQ ID NO: 12580 - DNA, 23 bp, Artificial Sequence
  Description of Artificial Sequence: Synthetic oligonucleotide
  X-linked inhibitor of apoptosis (XIAP) siRNA
gatcaaagtatgtatgtttttaa

SEQ ID NO: 12581 - DNA, 23 bp, Artificial Sequence
  Description of Artificial Sequence: Synthetic oligonucleotide
  X-linked inhibitor of apoptosis (XIAP) siRNA
atcaaagtatgtatgtttttaat

SEQ ID NO: 12582 - DNA, 23 bp, Artificial Sequence
  Description of Artificial Sequence: Synthetic oligonucleotide
  X-linked inhibitor of apoptosis (XIAP) siRNA
tcaaagtatgtatgtttttaata

SEQ ID NO: 12583 - DNA, 23 bp, Artificial Sequence
  Description of Artificial Sequence: Synthetic oligonucleotide
  X-linked inhibitor of apoptosis (XIAP) siRNA
caaagtatgtatgtttttaatat

SEQ ID NO: 12584 - DNA, 23 bp, Artificial Sequence
  Description of Artificial Sequence: Synthetic oligonucleotide
  X-linked inhibitor of apoptosis (XIAP) siRNA
aaagtatgtatgtttttaatatg

SEQ ID NO: 12585 - DNA, 23 bp, Artificial Sequence
  Description of Artificial Sequence: Synthetic oligonucleotide
  X-linked inhibitor of apoptosis (XIAP) siRNA
aagtatgtatgtttttaatatgc

SEQ ID NO: 12586 - DNA, 23 bp, Artificial Sequence
  Description of Artificial Sequence: Synthetic oligonucleotide
  X-linked inhibitor of apoptosis (XIAP) siRNA
agtatgtatgtttttaatatgca

SEQ ID NO: 12587 - DNA, 23 bp, Artificial Sequence
  Description of Artificial Sequence: Synthetic oligonucleotide
  X-linked inhibitor of apoptosis (XIAP) siRNA
gtatgtatgtttttaatatgcat

SEQ ID NO: 12588 - DNA, 23 bp, Artificial Sequence
  Description of Artificial Sequence: Synthetic oligonucleotide
  X-linked inhibitor of apoptosis (XIAP) siRNA
tatgtatgtttttaatatgcata

SEQ ID NO: 12589 - DNA, 23 bp, Artificial Sequence
  Description of Artificial Sequence: Synthetic oligonucleotide
  X-linked inhibitor of apoptosis (XIAP) siRNA
atgtatgtttttaatatgcatag

SEQ ID NO: 12590 - DNA, 23 bp, Artificial Sequence
  Description of Artificial Sequence: Synthetic oligonucleotide
  X-linked inhibitor of apoptosis (XIAP) siRNA
tgtatgtttttaatatgcataga

SEQ ID NO: 12591 - DNA, 23 bp, Artificial Sequence
  Description of Artificial Sequence: Synthetic oligonucleotide
  X-linked inhibitor of apoptosis (XIAP) siRNA
gtatgtttttaatatgcatagaa

SEQ ID NO: 12592 - DNA, 23 bp, Artificial Sequence
  Description of Artificial Sequence: Synthetic oligonucleotide
  X-linked inhibitor of apoptosis (XIAP) siRNA
tatgtttttaatatgcatagaac

SEQ ID NO: 12593 - DNA, 23 bp, Artificial Sequence
  Description of Artificial Sequence: Synthetic oligonucleotide
  X-linked inhibitor of apoptosis (XIAP) siRNA
atgtttttaatatgcatagaaca

SEQ ID NO: 12594 - DNA, 23 bp, Artificial Sequence
  Description of Artificial Sequence: Synthetic oligonucleotide
  X-linked inhibitor of apoptosis (XIAP) siRNA
tgtttttaatatgcatagaacaa

SEQ ID NO: 12595 - DNA, 23 bp, Artificial Sequence
  Description of Artificial Sequence: Synthetic oligonucleotide
  X-linked inhibitor of apoptosis (XIAP) siRNA
gtttttaatatgcatagaacaaa

SEQ ID NO: 12596 - DNA, 23 bp, Artificial Sequence
  Description of Artificial Sequence: Synthetic oligonucleotide
  X-linked inhibitor of apoptosis (XIAP) siRNA
tttttaatatgcatagaacaaaa

SEQ ID NO: 12597 - DNA, 23 bp, Artificial Sequence
  Description of Artificial Sequence: Synthetic oligonucleotide
  X-linked inhibitor of apoptosis (XIAP) siRNA
ttttaatatgcatagaacaaaag

SEQ ID NO: 12598 - DNA, 23 bp, Artificial Sequence
  Description of Artificial Sequence: Synthetic oligonucleotide
  X-linked inhibitor of apoptosis (XIAP) siRNA
tttaatatgcatagaacaaaaga

SEQ ID NO: 12599 - DNA, 23 bp, Artificial Sequence
  Description of Artificial Sequence: Synthetic oligonucleotide
  X-linked inhibitor of apoptosis (XIAP) siRNA
ttaatatgcatagaacaaaagat

SEQ ID NO: 12600 - DNA, 23 bp, Artificial Sequence
  Description of Artificial Sequence: Synthetic oligonucleotide
  X-linked inhibitor of apoptosis (XIAP) siRNA
taatatgcatagaacaaaagatt

SEQ ID NO: 12601 - DNA, 23 bp, Artificial Sequence
  Description of Artificial Sequence: Synthetic oligonucleotide
  X-linked inhibitor of apoptosis (XIAP) siRNA
aatatgcatagaacaaaagattt

SEQ ID NO: 12602 - DNA, 23 bp, Artificial Sequence
  Description of Artificial Sequence: Synthetic oligonucleotide
  X-linked inhibitor of apoptosis (XIAP) siRNA
atatgcatagaacaaaagatttg

SEQ ID NO: 12603 - DNA, 23 bp, Artificial Sequence
  Description of Artificial Sequence: Synthetic oligonucleotide
  X-linked inhibitor of apoptosis (XIAP) siRNA
tatgcatagaacaaaagatttgg

SEQ ID NO: 12604 - DNA, 23 bp, Artificial Sequence
  Description of Artificial Sequence: Synthetic oligonucleotide
  X-linked inhibitor of apoptosis (XIAP) siRNA
atgcatagaacaaaagatttgga

SEQ ID NO: 12605 - DNA, 23 bp, Artificial Sequence
  Description of Artificial Sequence: Synthetic oligonucleotide
  X-linked inhibitor of apoptosis (XIAP) siRNA
tgcatagaacaaaagatttggaa

SEQ ID NO: 12606 - DNA, 23 bp, Artificial Sequence
  Description of Artificial Sequence: Synthetic oligonucleotide
  X-linked inhibitor of apoptosis (XIAP) siRNA
gcatagaacaaaagatttggaaa

SEQ ID NO: 12607 - DNA, 23 bp, Artificial Sequence
  Description of Artificial Sequence: Synthetic oligonucleotide
  X-linked inhibitor of apoptosis (XIAP) siRNA
catagaacaaaagatttggaaag

SEQ ID NO: 12608 - DNA, 23 bp, Artificial Sequence
  Description of Artificial Sequence: Synthetic oligonucleotide
  X-linked inhibitor of apoptosis (XIAP) siRNA
atagaacaaaagatttggaaaga

SEQ ID NO: 12609 - DNA, 23 bp, Artificial Sequence
  Description of Artificial Sequence: Synthetic oligonucleotide
  X-linked inhibitor of apoptosis (XIAP) siRNA
tagaacaaaagatttggaaagat

SEQ ID NO: 12610 - DNA, 23 bp, Artificial Sequence
  Description of Artificial Sequence: Synthetic oligonucleotide
  X-linked inhibitor of apoptosis (XIAP) siRNA
agaacaaaagatttggaaagata

SEQ ID NO: 12611 - DNA, 23 bp, Artificial Sequence
  Description of Artificial Sequence: Synthetic oligonucleotide
  X-linked inhibitor of apoptosis (XIAP) siRNA
gaacaaaagatttggaaagatat

SEQ ID NO: 12612 - DNA, 23 bp, Artificial Sequence
  Description of Artificial Sequence: Synthetic oligonucleotide
  X-linked inhibitor of apoptosis (XIAP) siRNA
aacaaaagatttggaaagatata

SEQ ID NO: 12613 - DNA, 23 bp, Artificial Sequence
  Description of Artificial Sequence: Synthetic oligonucleotide
  X-linked inhibitor of apoptosis (XIAP) siRNA
acaaaagatttggaaagatatac

SEQ ID NO: 12614 - DNA, 23 bp, Artificial Sequence
  Description of Artificial Sequence: Synthetic oligonucleotide
  X-linked inhibitor of apoptosis (XIAP) siRNA
caaaagatttggaaagatataca

SEQ ID NO: 12615 - DNA, 23 bp, Artificial Sequence
  Description of Artificial Sequence: Synthetic oligonucleotide
  X-linked inhibitor of apoptosis (XIAP) siRNA
aaaagatttggaaagatatacac

SEQ ID NO: 12616 - DNA, 23 bp, Artificial Sequence
  Description of Artificial Sequence: Synthetic oligonucleotide
  X-linked inhibitor of apoptosis (XIAP) siRNA
aaagatttggaaagatatacacc

SEQ ID NO: 12617 - DNA, 23 bp, Artificial Sequence
  Description of Artificial Sequence: Synthetic oligonucleotide
  X-linked inhibitor of apoptosis (XIAP) siRNA
aagatttggaaagatatacacca

SEQ ID NO: 12618 - DNA, 23 bp, Artificial Sequence
  Description of Artificial Sequence: Synthetic oligonucleotide
  X-linked inhibitor of apoptosis (XIAP) siRNA
agatttggaaagatatacaccaa

SEQ ID NO: 12619 - DNA, 23 bp, Artificial Sequence
  Description of Artificial Sequence: Synthetic oligonucleotide
  X-linked inhibitor of apoptosis (XIAP) siRNA
gatttggaaagatatacaccaaa

SEQ ID NO: 12620 - DNA, 23 bp, Artificial Sequence
  Description of Artificial Sequence: Synthetic oligonucleotide
  X-linked inhibitor of apoptosis (XIAP) siRNA
atttggaaagatatacaccaaac

SEQ ID NO: 12621 - DNA, 23 bp, Artificial Sequence
  Description of Artificial Sequence: Synthetic oligonucleotide
  X-linked inhibitor of apoptosis (XIAP) siRNA
tttggaaagatatacaccaaact

SEQ ID NO: 12622 - DNA, 23 bp, Artificial Sequence
  Description of Artificial Sequence: Synthetic oligonucleotide
  X-linked inhibitor of apoptosis (XIAP) siRNA
ttggaaagatatacaccaaactg

SEQ ID NO: 12623 - DNA, 23 bp, Artificial Sequence
  Description of Artificial Sequence: Synthetic oligonucleotide
  X-linked inhibitor of apoptosis (XIAP) siRNA
tggaaagatatacaccaaactgt

SEQ ID NO: 12624 - DNA, 23 bp, Artificial Sequence
  Description of Artificial Sequence: Synthetic oligonucleotide
  X-linked inhibitor of apoptosis (XIAP) siRNA
ggaaagatatacaccaaactgtt

SEQ ID NO: 12625 - DNA, 23 bp, Artificial Sequence
  Description of Artificial Sequence: Synthetic oligonucleotide
  X-linked inhibitor of apoptosis (XIAP) siRNA
gaaagatatacaccaaactgtta

SEQ ID NO: 12626 - DNA, 23 bp, Artificial Sequence
  Description of Artificial Sequence: Synthetic oligonucleotide
  X-linked inhibitor of apoptosis (XIAP) siRNA
aaagatatacaccaaactgttaa

SEQ ID NO: 12627 - DNA, 23 bp, Artificial Sequence
  Description of Artificial Sequence: Synthetic oligonucleotide
  X-linked inhibitor of apoptosis (XIAP) siRNA
aagatatacaccaaactgttaaa

SEQ ID NO: 12628 - DNA, 23 bp, Artificial Sequence
  Description of Artificial Sequence: Synthetic oligonucleotide
  X-linked inhibitor of apoptosis (XIAP) siRNA
agatatacaccaaactgttaaat

SEQ ID NO: 12629 - DNA, 23 bp, Artificial Sequence
  Description of Artificial Sequence: Synthetic oligonucleotide
  X-linked inhibitor of apoptosis (XIAP) siRNA
gatatacaccaaactgttaaatg

SEQ ID NO: 12630 - DNA, 23 bp, Artificial Sequence
  Description of Artificial Sequence: Synthetic oligonucleotide
  X-linked inhibitor of apoptosis (XIAP) siRNA
atatacaccaaactgttaaatgt

SEQ ID NO: 12631 - DNA, 23 bp, Artificial Sequence
  Description of Artificial Sequence: Synthetic oligonucleotide
  X-linked inhibitor of apoptosis (XIAP) siRNA
tatacaccaaactgttaaatgtg

SEQ ID NO: 12632 - DNA, 23 bp, Artificial Sequence
  Description of Artificial Sequence: Synthetic oligonucleotide
  X-linked inhibitor of apoptosis (XIAP) siRNA
atacaccaaactgttaaatgtgg

SEQ ID NO: 12633 - DNA, 23 bp, Artificial Sequence
  Description of Artificial Sequence: Synthetic oligonucleotide
  X-linked inhibitor of apoptosis (XIAP) siRNA
tacaccaaactgttaaatgtggt

SEQ ID NO: 12634 - DNA, 23 bp, Artificial Sequence
  Description of Artificial Sequence: Synthetic oligonucleotide
  X-linked inhibitor of apoptosis (XIAP) siRNA
acaccaaactgttaaatgtggtt

SEQ ID NO: 12635 - DNA, 23 bp, Artificial Sequence
  Description of Artificial Sequence: Synthetic oligonucleotide
  X-linked inhibitor of apoptosis (XIAP) siRNA
caccaaactgttaaatgtggttt

SEQ ID NO: 12636 - DNA, 23 bp, Artificial Sequence
  Description of Artificial Sequence: Synthetic oligonucleotide
  X-linked inhibitor of apoptosis (XIAP) siRNA
accaaactgttaaatgtggtttc

SEQ ID NO: 12637 - DNA, 23 bp, Artificial Sequence
  Description of Artificial Sequence: Synthetic oligonucleotide
  X-linked inhibitor of apoptosis (XIAP) siRNA
ccaaactgttaaatgtggtttct

SEQ ID NO: 12638 - DNA, 23 bp, Artificial Sequence
  Description of Artificial Sequence: Synthetic oligonucleotide
  X-linked inhibitor of apoptosis (XIAP) siRNA
caaactgttaaatgtggtttctc

SEQ ID NO: 12639 - DNA, 23 bp, Artificial Sequence
  Description of Artificial Sequence: Synthetic oligonucleotide
  X-linked inhibitor of apoptosis (XIAP) siRNA
aaactgttaaatgtggtttctct

SEQ ID NO: 12640 - DNA, 23 bp, Artificial Sequence
  Description of Artificial Sequence: Synthetic oligonucleotide
  X-linked inhibitor of apoptosis (XIAP) siRNA
aactgttaaatgtggtttctctt

SEQ ID NO: 12641 - DNA, 23 bp, Artificial Sequence
  Description of Artificial Sequence: Synthetic oligonucleotide
  X-linked inhibitor of apoptosis (XIAP) siRNA
actgttaaatgtggtttctcttc

SEQ ID NO: 12642 - DNA, 23 bp, Artificial Sequence
  Description of Artificial Sequence: Synthetic oligonucleotide
  X-linked inhibitor of apoptosis (XIAP) siRNA
ctgttaaatgtggtttctcttcg

SEQ ID NO: 12643 - DNA, 23 bp, Artificial Sequence
  Description of Artificial Sequence: Synthetic oligonucleotide
  X-linked inhibitor of apoptosis (XIAP) siRNA
tgttaaatgtggtttctcttcgg

SEQ ID NO: 12644 - DNA, 23 bp, Artificial Sequence
  Description of Artificial Sequence: Synthetic oligonucleotide
  X-linked inhibitor of apoptosis (XIAP) siRNA
gttaaatgtggtttctcttcggg

SEQ ID NO: 12645 - DNA, 23 bp, Artificial Sequence
  Description of Artificial Sequence: Synthetic oligonucleotide
  X-linked inhibitor of apoptosis (XIAP) siRNA
ttaaatgtggtttctcttcgggg

SEQ ID NO: 12646 - DNA, 23 bp, Artificial Sequence
  Description of Artificial Sequence: Synthetic oligonucleotide
  X-linked inhibitor of apoptosis (XIAP) siRNA
taaatgtggtttctcttcgggga

SEQ ID NO: 12647 - DNA, 23 bp, Artificial Sequence
  Description of Artificial Sequence: Synthetic oligonucleotide
  X-linked inhibitor of apoptosis (XIAP) siRNA
aaatgtggtttctcttcggggag

SEQ ID NO: 12648 - DNA, 23 bp, Artificial Sequence
  Description of Artificial Sequence: Synthetic oligonucleotide
  X-linked inhibitor of apoptosis (XIAP) siRNA
aatgtggtttctcttcggggagg

SEQ ID NO: 12649 - DNA, 23 bp, Artificial Sequence
  Description of Artificial Sequence: Synthetic oligonucleotide
  X-linked inhibitor of apoptosis (XIAP) siRNA
atgtggtttctcttcggggaggg

SEQ ID NO: 12650 - DNA, 23 bp, Artificial Sequence
  Description of Artificial Sequence: Synthetic oligonucleotide
  X-linked inhibitor of apoptosis (XIAP) siRNA
tgtggtttctcttcggggagggg

SEQ ID NO: 12651 - DNA, 23 bp, Artificial Sequence
  Description of Artificial Sequence: Synthetic oligonucleotide
  X-linked inhibitor of apoptosis (XIAP) siRNA
gtggtttctcttcggggaggggg

SEQ ID NO: 12652 - DNA, 23 bp, Artificial Sequence
  Description of Artificial Sequence: Synthetic oligonucleotide
  X-linked inhibitor of apoptosis (XIAP) siRNA
tggtttctcttcggggagggggg

SEQ ID NO: 12653 - DNA, 23 bp, Artificial Sequence
  Description of Artificial Sequence: Synthetic oligonucleotide
  X-linked inhibitor of apoptosis (XIAP) siRNA
ggtttctcttcggggaggggggg

SEQ ID NO: 12654 - DNA, 23 bp, Artificial Sequence
  Description of Artificial Sequence: Synthetic oligonucleotide
  X-linked inhibitor of apoptosis (XIAP) siRNA
gtttctcttcggggaggggggga

SEQ ID NO: 12655 - DNA, 23 bp, Artificial Sequence
  Description of Artificial Sequence: Synthetic oligonucleotide
  X-linked inhibitor of apoptosis (XIAP) siRNA
tttctcttcggggagggggggat

SEQ ID NO: 12656 - DNA, 23 bp, Artificial Sequence
  Description of Artificial Sequence: Synthetic oligonucleotide
  X-linked inhibitor of apoptosis (XIAP) siRNA
ttctcttcggggagggggggatt

SEQ ID NO: 12657 - DNA, 23 bp, Artificial Sequence
  Description of Artificial Sequence: Synthetic oligonucleotide
  X-linked inhibitor of apoptosis (XIAP) siRNA
tctcttcggggagggggggattg

SEQ ID NO: 12658 - DNA, 23 bp, Artificial Sequence
  Description of Artificial Sequence: Synthetic oligonucleotide
  X-linked inhibitor of apoptosis (XIAP) siRNA
ctcttcggggagggggggattgg

SEQ ID NO: 12659 - DNA, 23 bp, Artificial Sequence
  Description of Artificial Sequence: Synthetic oligonucleotide
  X-linked inhibitor of apoptosis (XIAP) siRNA
tcttcggggagggggggattggg

SEQ ID NO: 12660 - DNA, 23 bp, Artificial Sequence
  Description of Artificial Sequence: Synthetic oligonucleotide
  X-linked inhibitor of apoptosis (XIAP) siRNA
cttcggggagggggggattgggg

SEQ ID NO: 12661 - DNA, 23 bp, Artificial Sequence
  Description of Artificial Sequence: Synthetic oligonucleotide
  X-linked inhibitor of apoptosis (XIAP) siRNA
ttcggggagggggggattggggg

SEQ ID NO: 12662 - DNA, 23 bp, Artificial Sequence
  Description of Artificial Sequence: Synthetic oligonucleotide
  X-linked inhibitor of apoptosis (XIAP) siRNA
tcggggagggggggattggggga

SEQ ID NO: 12663 - DNA, 23 bp, Artificial Sequence
  Description of Artificial Sequence: Synthetic oligonucleotide
  X-linked inhibitor of apoptosis (XIAP) siRNA
cggggagggggggattgggggag

SEQ ID NO: 12664 - DNA, 23 bp, Artificial Sequence
  Description of Artificial Sequence: Synthetic oligonucleotide
  X-linked inhibitor of apoptosis (XIAP) siRNA
ggggagggggggattgggggagg

SEQ ID NO: 12665 - DNA, 23 bp, Artificial Sequence
  Description of Artificial Sequence: Synthetic oligonucleotide
  X-linked inhibitor of apoptosis (XIAP) siRNA
gggagggggggattgggggaggg

SEQ ID NO: 12666 - DNA, 23 bp, Artificial Sequence
  Description of Artificial Sequence: Synthetic oligonucleotide
  X-linked inhibitor of apoptosis (XIAP) siRNA
ggagggggggattgggggagggg

SEQ ID NO: 12667 - DNA, 23 bp, Artificial Sequence
  Description of Artificial Sequence: Synthetic oligonucleotide
  X-linked inhibitor of apoptosis (XIAP) siRNA
gagggggggattgggggaggggc

SEQ ID NO: 12668 - DNA, 23 bp, Artificial Sequence
  Description of Artificial Sequence: Synthetic oligonucleotide
  X-linked inhibitor of apoptosis (XIAP) siRNA
agggggggattgggggaggggcc

SEQ ID NO: 12669 - DNA, 23 bp, Artificial Sequence
  Description of Artificial Sequence: Synthetic oligonucleotide
  X-linked inhibitor of apoptosis (XIAP) siRNA
gggggggattgggggaggggccc

SEQ ID NO: 12670 - DNA, 23 bp, Artificial Sequence
  Description of Artificial Sequence: Synthetic oligonucleotide
  X-linked inhibitor of apoptosis (XIAP) siRNA
ggggggattgggggaggggcccc

SEQ ID NO: 12671 - DNA, 23 bp, Artificial Sequence
  Description of Artificial Sequence: Synthetic oligonucleotide
  X-linked inhibitor of apoptosis (XIAP) siRNA
gggggattgggggaggggcccca

SEQ ID NO: 12672 - DNA, 23 bp, Artificial Sequence
  Description of Artificial Sequence: Synthetic oligonucleotide
  X-linked inhibitor of apoptosis (XIAP) siRNA
ggggattgggggaggggccccag

SEQ ID NO: 12673 - DNA, 23 bp, Artificial Sequence
  Description of Artificial Sequence: Synthetic oligonucleotide
  X-linked inhibitor of apoptosis (XIAP) siRNA
gggattgggggaggggccccaga

SEQ ID NO: 12674 - DNA, 23 bp, Artificial Sequence
  Description of Artificial Sequence: Synthetic oligonucleotide
  X-linked inhibitor of apoptosis (XIAP) siRNA
ggattgggggaggggccccagag

SEQ ID NO: 12675 - DNA, 23 bp, Artificial Sequence
  Description of Artificial Sequence: Synthetic oligonucleotide
  X-linked inhibitor of apoptosis (XIAP) siRNA
gattgggggaggggccccagagg

SEQ ID NO: 12676 - DNA, 23 bp, Artificial Sequence
  Description of Artificial Sequence: Synthetic oligonucleotide
  X-linked inhibitor of apoptosis (XIAP) siRNA
attgggggaggggccccagaggg

SEQ ID NO: 12677 - DNA, 23 bp, Artificial Sequence
  Description of Artificial Sequence: Synthetic oligonucleotide
  X-linked inhibitor of apoptosis (XIAP) siRNA
ttgggggaggggccccagagggg

SEQ ID NO: 12678 - DNA, 23 bp, Artificial Sequence
  Description of Artificial Sequence: Synthetic oligonucleotide
  X-linked inhibitor of apoptosis (XIAP) siRNA
tgggggaggggccccagaggggt

SEQ ID NO: 12679 - DNA, 23 bp, Artificial Sequence
  Description of Artificial Sequence: Synthetic oligonucleotide
  X-linked inhibitor of apoptosis (XIAP) siRNA
gggggaggggccccagaggggtt

SEQ ID NO: 12680 - DNA, 23 bp, Artificial Sequence
  Description of Artificial Sequence: Synthetic oligonucleotide
  X-linked inhibitor of apoptosis (XIAP) siRNA
ggggaggggccccagaggggttt

SEQ ID NO: 12681 - DNA, 23 bp, Artificial Sequence
  Description of Artificial Sequence: Synthetic oligonucleotide
  X-linked inhibitor of apoptosis (XIAP) siRNA
gggaggggccccagaggggtttt

SEQ ID NO: 12682 - DNA, 23 bp, Artificial Sequence
  Description of Artificial Sequence: Synthetic oligonucleotide
  X-linked inhibitor of apoptosis (XIAP) siRNA
ggaggggccccagaggggtttta

SEQ ID NO: 12683 - DNA, 23 bp, Artificial Sequence
  Description of Artificial Sequence: Synthetic oligonucleotide
  X-linked inhibitor of apoptosis (XIAP) siRNA
gaggggccccagaggggttttat

SEQ ID NO: 12684 - DNA, 23 bp, Artificial Sequence
  Description of Artificial Sequence: Synthetic oligonucleotide
  X-linked inhibitor of apoptosis (XIAP) siRNA
aggggccccagaggggttttata

SEQ ID NO: 12685 - DNA, 23 bp, Artificial Sequence
  Description of Artificial Sequence: Synthetic oligonucleotide
  X-linked inhibitor of apoptosis (XIAP) siRNA
ggggccccagaggggttttatag

SEQ ID NO: 12686 - DNA, 23 bp, Artificial Sequence
  Description of Artificial Sequence: Synthetic oligonucleotide
  X-linked inhibitor of apoptosis (XIAP) siRNA
gggccccagaggggttttatagg

SEQ ID NO: 12687 - DNA, 23 bp, Artificial Sequence
  Description of Artificial Sequence: Synthetic oligonucleotide
  X-linked inhibitor of apoptosis (XIAP) siRNA
ggccccagaggggttttataggg

SEQ ID NO: 12688 - DNA, 23 bp, Artificial Sequence
  Description of Artificial Sequence: Synthetic oligonucleotide
  X-linked inhibitor of apoptosis (XIAP) siRNA
gccccagaggggttttatagggg

SEQ ID NO: 12689 - DNA, 23 bp, Artificial Sequence
  Description of Artificial Sequence: Synthetic oligonucleotide
  X-linked inhibitor of apoptosis (XIAP) siRNA
ccccagaggggttttataggggc

SEQ ID NO: 12690 - DNA, 23 bp, Artificial Sequence
  Description of Artificial Sequence: Synthetic oligonucleotide
  X-linked inhibitor of apoptosis (XIAP) siRNA
cccagaggggttttataggggcc

SEQ ID NO: 12691 - DNA, 23 bp, Artificial Sequence
  Description of Artificial Sequence: Synthetic oligonucleotide
  X-linked inhibitor of apoptosis (XIAP) siRNA
ccagaggggttttataggggcct

SEQ ID NO: 12692 - DNA, 23 bp, Artificial Sequence
  Description of Artificial Sequence: Synthetic oligonucleotide
  X-linked inhibitor of apoptosis (XIAP) siRNA
cagaggggttttataggggcctt

SEQ ID NO: 12693 - DNA, 23 bp, Artificial Sequence
  Description of Artificial Sequence: Synthetic oligonucleotide
  X-linked inhibitor of apoptosis (XIAP) siRNA
agaggggttttataggggccttt

SEQ ID NO: 12694 - DNA, 23 bp, Artificial Sequence
  Description of Artificial Sequence: Synthetic oligonucleotide
  X-linked inhibitor of apoptosis (XIAP) siRNA
gaggggttttataggggcctttt

SEQ ID NO: 12695 - DNA, 23 bp, Artificial Sequence
  Description of Artificial Sequence: Synthetic oligonucleotide
  X-linked inhibitor of apoptosis (XIAP) siRNA
aggggttttataggggccttttc

SEQ ID NO: 12696 - DNA, 23 bp, Artificial Sequence
  Description of Artificial Sequence: Synthetic oligonucleotide
  X-linked inhibitor of apoptosis (XIAP) siRNA
ggggttttataggggccttttca

SEQ ID NO: 12697 - DNA, 23 bp, Artificial Sequence
  Description of Artificial Sequence: Synthetic oligonucleotide
  X-linked inhibitor of apoptosis (XIAP) siRNA
gggttttataggggccttttcac

SEQ ID NO: 12698 - DNA, 23 bp, Artificial Sequence
  Description of Artificial Sequence: Synthetic oligonucleotide
  X-linked inhibitor of apoptosis (XIAP) siRNA
ggttttataggggccttttcact

SEQ ID NO: 12699 - DNA, 23 bp, Artificial Sequence
  Description of Artificial Sequence: Synthetic oligonucleotide
  X-linked inhibitor of apoptosis (XIAP) siRNA
gttttataggggccttttcactt

SEQ ID NO: 12700 - DNA, 23 bp, Artificial Sequence
  Description of Artificial Sequence: Synthetic oligonucleotide
  X-linked inhibitor of apoptosis (XIAP) siRNA
ttttataggggccttttcacttt

SEQ ID NO: 12701 - DNA, 23 bp, Artificial Sequence
  Description of Artificial Sequence: Synthetic oligonucleotide
  X-linked inhibitor of apoptosis (XIAP) siRNA
tttataggggccttttcactttc

SEQ ID NO: 12702 - DNA, 23 bp, Artificial Sequence
  Description of Artificial Sequence: Synthetic oligonucleotide
  X-linked inhibitor of apoptosis (XIAP) siRNA
ttataggggccttttcactttct

SEQ ID NO: 12703 - DNA, 23 bp, Artificial Sequence
  Description of Artificial Sequence: Synthetic oligonucleotide
  X-linked inhibitor of apoptosis (XIAP) siRNA
tataggggccttttcactttcta

SEQ ID NO: 12704 - DNA, 23 bp, Artificial Sequence
  Description of Artificial Sequence: Synthetic oligonucleotide
  X-linked inhibitor of apoptosis (XIAP) siRNA
ataggggccttttcactttctac

SEQ ID NO: 12705 - DNA, 23 bp, Artificial Sequence
  Description of Artificial Sequence: Synthetic oligonucleotide
  X-linked inhibitor of apoptosis (XIAP) siRNA
taggggccttttcactttctact

SEQ ID NO: 12706 - DNA, 23 bp, Artificial Sequence
  Description of Artificial Sequence: Synthetic oligonucleotide
  X-linked inhibitor of apoptosis (XIAP) siRNA
aggggccttttcactttctactt

SEQ ID NO: 12707 - DNA, 23 bp, Artificial Sequence
  Description of Artificial Sequence: Synthetic oligonucleotide
  X-linked inhibitor of apoptosis (XIAP) siRNA
ggggccttttcactttctacttt

SEQ ID NO: 12708 - DNA, 23 bp, Artificial Sequence
  Description of Artificial Sequence: Synthetic oligonucleotide
  X-linked inhibitor of apoptosis (XIAP) siRNA
gggccttttcactttctactttt

SEQ ID NO: 12709 - DNA, 23 bp, Artificial Sequence
  Description of Artificial Sequence: Synthetic oligonucleotide
  X-linked inhibitor of apoptosis (XIAP) siRNA
ggccttttcactttctacttttt

SEQ ID NO: 12710 - DNA, 23 bp, Artificial Sequence
  Description of Artificial Sequence: Synthetic oligonucleotide
  X-linked inhibitor of apoptosis (XIAP) siRNA
gccttttcactttctactttttt

SEQ ID NO: 12711 - DNA, 23 bp, Artificial Sequence
  Description of Artificial Sequence: Synthetic oligonucleotide
  X-linked inhibitor of apoptosis (XIAP) siRNA
ccttttcactttctacttttttc

SEQ ID NO: 12712 - DNA, 23 bp, Artificial Sequence
  Description of Artificial Sequence: Synthetic oligonucleotide
  X-linked inhibitor of apoptosis (XIAP) siRNA
cttttcactttctacttttttca

SEQ ID NO: 12713 - DNA, 23 bp, Artificial Sequence
  Description of Artificial Sequence: Synthetic oligonucleotide
  X-linked inhibitor of apoptosis (XIAP) siRNA
ttttcactttctacttttttcat

SEQ ID NO: 12714 - DNA, 23 bp, Artificial Sequence
  Description of Artificial Sequence: Synthetic oligonucleotide
  X-linked inhibitor of apoptosis (XIAP) siRNA
tttcactttctacttttttcatt

SEQ ID NO: 12715 - DNA, 23 bp, Artificial Sequence
  Description of Artificial Sequence: Synthetic oligonucleotide
  X-linked inhibitor of apoptosis (XIAP) siRNA
ttcactttctacttttttcattt

SEQ ID NO: 12716 - DNA, 23 bp, Artificial Sequence
  Description of Artificial Sequence: Synthetic oligonucleotide
  X-linked inhibitor of apoptosis (XIAP) siRNA
tcactttctacttttttcatttt

SEQ ID NO: 12717 - DNA, 23 bp, Artificial Sequence
  Description of Artificial Sequence: Synthetic oligonucleotide
  X-linked inhibitor of apoptosis (XIAP) siRNA
cactttctacttttttcattttg

SEQ ID NO: 12718 - DNA, 23 bp, Artificial Sequence
  Description of Artificial Sequence: Synthetic oligonucleotide
  X-linked inhibitor of apoptosis (XIAP) siRNA
actttctacttttttcattttgt

SEQ ID NO: 12719 - DNA, 23 bp, Artificial Sequence
  Description of Artificial Sequence: Synthetic oligonucleotide
  X-linked inhibitor of apoptosis (XIAP) siRNA
ctttctacttttttcattttgtt

SEQ ID NO: 12720 - DNA, 23 bp, Artificial Sequence
  Description of Artificial Sequence: Synthetic oligonucleotide
  X-linked inhibitor of apoptosis (XIAP) siRNA
tttctacttttttcattttgttc

SEQ ID NO: 12721 - DNA, 23 bp, Artificial Sequence
  Description of Artificial Sequence: Synthetic oligonucleotide
  X-linked inhibitor of apoptosis (XIAP) siRNA
ttctacttttttcattttgttct

SEQ ID NO: 12722 - DNA, 23 bp, Artificial Sequence
  Description of Artificial Sequence: Synthetic oligonucleotide
  X-linked inhibitor of apoptosis (XIAP) siRNA
tctacttttttcattttgttctg

SEQ ID NO: 12723 - DNA, 23 bp, Artificial Sequence
  Description of Artificial Sequence: Synthetic oligonucleotide
  X-linked inhibitor of apoptosis (XIAP) siRNA
ctacttttttcattttgttctgt

SEQ ID NO: 12724 - DNA, 23 bp, Artificial Sequence
  Description of Artificial Sequence: Synthetic oligonucleotide
  X-linked inhibitor of apoptosis (XIAP) siRNA
tacttttttcattttgttctgtt

SEQ ID NO: 12725 - DNA, 23 bp, Artificial Sequence
  Description of Artificial Sequence: Synthetic oligonucleotide
  X-linked inhibitor of apoptosis (XIAP) siRNA
acttttttcattttgttctgttc

SEQ ID NO: 12726 - DNA, 23 bp, Artificial Sequence
  Description of Artificial Sequence: Synthetic oligonucleotide
  X-linked inhibitor of apoptosis (XIAP) siRNA
cttttttcattttgttctgttcg

SEQ ID NO: 12727 - DNA, 23 bp, Artificial Sequence
  Description of Artificial Sequence: Synthetic oligonucleotide
  X-linked inhibitor of apoptosis (XIAP) siRNA
ttttttcattttgttctgttcga

SEQ ID NO: 12728 - DNA, 23 bp, Artificial Sequence
  Description of Artificial Sequence: Synthetic oligonucleotide
  X-linked inhibitor of apoptosis (XIAP) siRNA
tttttcattttgttctgttcgaa

SEQ ID NO: 12729 - DNA, 23 bp, Artificial Sequence
  Description of Artificial Sequence: Synthetic oligonucleotide
  X-linked inhibitor of apoptosis (XIAP) siRNA
ttttcattttgttctgttcgaat

SEQ ID NO: 12730 - DNA, 23 bp, Artificial Sequence
  Description of Artificial Sequence: Synthetic oligonucleotide
  X-linked inhibitor of apoptosis (XIAP) siRNA
tttcattttgttctgttcgaatt

SEQ ID NO: 12731 - DNA, 23 bp, Artificial Sequence
  Description of Artificial Sequence: Synthetic oligonucleotide
  X-linked inhibitor of apoptosis (XIAP) siRNA
ttcattttgttctgttcgaattt

SEQ ID NO: 12732 - DNA, 23 bp, Artificial Sequence
  Description of Artificial Sequence: Synthetic oligonucleotide
  X-linked inhibitor of apoptosis (XIAP) siRNA
tcattttgttctgttcgaatttt

SEQ ID NO: 12733 - DNA, 23 bp, Artificial Sequence
  Description of Artificial Sequence: Synthetic oligonucleotide
  X-linked inhibitor of apoptosis (XIAP) siRNA
cattttgttctgttcgaattttt

SEQ ID NO: 12734 - DNA, 23 bp, Artificial Sequence
  Description of Artificial Sequence: Synthetic oligonucleotide
  X-linked inhibitor of apoptosis (XIAP) siRNA
attttgttctgttcgaatttttt

SEQ ID NO: 12735 - DNA, 23 bp, Artificial Sequence
  Description of Artificial Sequence: Synthetic oligonucleotide
  X-linked inhibitor of apoptosis (XIAP) siRNA
ttttgttctgttcgaatttttta

SEQ ID NO: 12736 - DNA, 23 bp, Artificial Sequence
  Description of Artificial Sequence: Synthetic oligonucleotide
  X-linked inhibitor of apoptosis (XIAP) siRNA
tttgttctgttcgaattttttat

SEQ ID NO: 12737 - DNA, 23 bp, Artificial Sequence
  Description of Artificial Sequence: Synthetic oligonucleotide
  X-linked inhibitor of apoptosis (XIAP) siRNA
ttgttctgttcgaattttttata

SEQ ID NO: 12738 - DNA, 23 bp, Artificial Sequence
  Description of Artificial Sequence: Synthetic oligonucleotide
  X-linked inhibitor of apoptosis (XIAP) siRNA
tgttctgttcgaattttttataa

SEQ ID NO: 12739 - DNA, 23 bp, Artificial Sequence
  Description of Artificial Sequence: Synthetic oligonucleotide
  X-linked inhibitor of apoptosis (XIAP) siRNA
gttctgttcgaattttttataag

SEQ ID NO: 12740 - DNA, 23 bp, Artificial Sequence
  Description of Artificial Sequence: Synthetic oligonucleotide
  X-linked inhibitor of apoptosis (XIAP) siRNA
ttctgttcgaattttttataagt

SEQ ID NO: 12741 - DNA, 23 bp, Artificial Sequence
  Description of Artificial Sequence: Synthetic oligonucleotide
  X-linked inhibitor of apoptosis (XIAP) siRNA
tctgttcgaattttttataagta

SEQ ID NO: 12742 - DNA, 23 bp, Artificial Sequence
  Description of Artificial Sequence: Synthetic oligonucleotide
  X-linked inhibitor of apoptosis (XIAP) siRNA
ctgttcgaattttttataagtat

SEQ ID NO: 12743 - DNA, 23 bp, Artificial Sequence
  Description of Artificial Sequence: Synthetic oligonucleotide
  X-linked inhibitor of apoptosis (XIAP) siRNA
tgttcgaattttttataagtatg

SEQ ID NO: 12744 - DNA, 23 bp, Artificial Sequence
  Description of Artificial Sequence: Synthetic oligonucleotide
  X-linked inhibitor of apoptosis (XIAP) siRNA
gttcgaattttttataagtatgt

SEQ ID NO: 12745 - DNA, 23 bp, Artificial Sequence
  Description of Artificial Sequence: Synthetic oligonucleotide
  X-linked inhibitor of apoptosis (XIAP) siRNA
ttcgaattttttataagtatgta

SEQ ID NO: 12746 - DNA, 23 bp, Artificial Sequence
  Description of Artificial Sequence: Synthetic oligonucleotide
  X-linked inhibitor of apoptosis (XIAP) siRNA
tcgaattttttataagtatgtat

SEQ ID NO: 12747 - DNA, 23 bp, Artificial Sequence
  Description of Artificial Sequence: Synthetic oligonucleotide
  X-linked inhibitor of apoptosis (XIAP) siRNA
cgaattttttataagtatgtatt

SEQ ID NO: 12748 - DNA, 23 bp, Artificial Sequence
  Description of Artificial Sequence: Synthetic oligonucleotide
  X-linked inhibitor of apoptosis (XIAP) siRNA
gaattttttataagtatgtatta

SEQ ID NO: 12749 - DNA, 23 bp, Artificial Sequence
  Description of Artificial Sequence: Synthetic oligonucleotide
  X-linked inhibitor of apoptosis (XIAP) siRNA
aattttttataagtatgtattac

SEQ ID NO: 12750 - DNA, 23 bp, Artificial Sequence
  Description of Artificial Sequence: Synthetic oligonucleotide
  X-linked inhibitor of apoptosis (XIAP) siRNA
attttttataagtatgtattact

SEQ ID NO: 12751 - DNA, 23 bp, Artificial Sequence
  Description of Artificial Sequence: Synthetic oligonucleotide
  X-linked inhibitor of apoptosis (XIAP) siRNA
ttttttataagtatgtattactt

SEQ ID NO: 12752 - DNA, 23 bp, Artificial Sequence
  Description of Artificial Sequence: Synthetic oligonucleotide
  X-linked inhibitor of apoptosis (XIAP) siRNA
tttttataagtatgtattacttt

SEQ ID NO: 12753 - DNA, 23 bp, Artificial Sequence
  Description of Artificial Sequence: Synthetic oligonucleotide
  X-linked inhibitor of apoptosis (XIAP) siRNA
ttttataagtatgtattactttt

SEQ ID NO: 12754 - DNA, 23 bp, Artificial Sequence
  Description of Artificial Sequence: Synthetic oligonucleotide
  X-linked inhibitor of apoptosis (XIAP) siRNA
tttataagtatgtattacttttg

SEQ ID NO: 12755 - DNA, 23 bp, Artificial Sequence
  Description of Artificial Sequence: Synthetic oligonucleotide
  X-linked inhibitor of apoptosis (XIAP) siRNA
ttataagtatgtattacttttgt

SEQ ID NO: 12756 - DNA, 23 bp, Artificial Sequence
  Description of Artificial Sequence: Synthetic oligonucleotide
  X-linked inhibitor of apoptosis (XIAP) siRNA
tataagtatgtattacttttgta

SEQ ID NO: 12757 - DNA, 23 bp, Artificial Sequence
  Description of Artificial Sequence: Synthetic oligonucleotide
  X-linked inhibitor of apoptosis (XIAP) siRNA
ataagtatgtattacttttgtaa

SEQ ID NO: 12758 - DNA, 23 bp, Artificial Sequence
  Description of Artificial Sequence: Synthetic oligonucleotide
  X-linked inhibitor of apoptosis (XIAP) siRNA
taagtatgtattacttttgtaat

SEQ ID NO: 12759 - DNA, 23 bp, Artificial Sequence
  Description of Artificial Sequence: Synthetic oligonucleotide
  X-linked inhibitor of apoptosis (XIAP) siRNA
aagtatgtattacttttgtaatc

SEQ ID NO: 12760 - DNA, 23 bp, Artificial Sequence
  Description of Artificial Sequence: Synthetic oligonucleotide
  X-linked inhibitor of apoptosis (XIAP) siRNA
agtatgtattacttttgtaatca

SEQ ID NO: 12761 - DNA, 23 bp, Artificial Sequence
  Description of Artificial Sequence: Synthetic oligonucleotide
  X-linked inhibitor of apoptosis (XIAP) siRNA
gtatgtattacttttgtaatcag

SEQ ID NO: 12762 - DNA, 23 bp, Artificial Sequence
  Description of Artificial Sequence: Synthetic oligonucleotide
  X-linked inhibitor of apoptosis (XIAP) siRNA
tatgtattacttttgtaatcaga

SEQ ID NO: 12763 - DNA, 23 bp, Artificial Sequence
  Description of Artificial Sequence: Synthetic oligonucleotide
  X-linked inhibitor of apoptosis (XIAP) siRNA
atgtattacttttgtaatcagaa

SEQ ID NO: 12764 - DNA, 23 bp, Artificial Sequence
  Description of Artificial Sequence: Synthetic oligonucleotide
  X-linked inhibitor of apoptosis (XIAP) siRNA
tgtattacttttgtaatcagaat

SEQ ID NO: 12765 - DNA, 23 bp, Artificial Sequence
  Description of Artificial Sequence: Synthetic oligonucleotide
  X-linked inhibitor of apoptosis (XIAP) siRNA
gtattacttttgtaatcagaatt

SEQ ID NO: 12766 - DNA, 23 bp, Artificial Sequence
  Description of Artificial Sequence: Synthetic oligonucleotide
  X-linked inhibitor of apoptosis (XIAP) siRNA
tattacttttgtaatcagaattt

SEQ ID NO: 12767 - DNA, 23 bp, Artificial Sequence
  Description of Artificial Sequence: Synthetic oligonucleotide
  X-linked inhibitor of apoptosis (XIAP) siRNA
attacttttgtaatcagaatttt

SEQ ID NO: 12768 - DNA, 23 bp, Artificial Sequence
  Description of Artificial Sequence: Synthetic oligonucleotide
  X-linked inhibitor of apoptosis (XIAP) siRNA
ttacttttgtaatcagaattttt

SEQ ID NO: 12769 - DNA, 23 bp, Artificial Sequence
  Description of Artificial Sequence: Synthetic oligonucleotide
  X-linked inhibitor of apoptosis (XIAP) siRNA
tacttttgtaatcagaattttta

SEQ ID NO: 12770 - DNA, 23 bp, Artificial Sequence
  Description of Artificial Sequence: Synthetic oligonucleotide
  X-linked inhibitor of apoptosis (XIAP) siRNA
acttttgtaatcagaatttttag

SEQ ID NO: 12771 - DNA, 23 bp, Artificial Sequence
  Description of Artificial Sequence: Synthetic oligonucleotide
  X-linked inhibitor of apoptosis (XIAP) siRNA
cttttgtaatcagaatttttaga

SEQ ID NO: 12772 - DNA, 23 bp, Artificial Sequence
  Description of Artificial Sequence: Synthetic oligonucleotide
  X-linked inhibitor of apoptosis (XIAP) siRNA
ttttgtaatcagaatttttagaa

SEQ ID NO: 12773 - DNA, 23 bp, Artificial Sequence
  Description of Artificial Sequence: Synthetic oligonucleotide
  X-linked inhibitor of apoptosis (XIAP) siRNA
tttgtaatcagaatttttagaaa

SEQ ID NO: 12774 - DNA, 23 bp, Artificial Sequence
  Description of Artificial Sequence: Synthetic oligonucleotide
  X-linked inhibitor of apoptosis (XIAP) siRNA
ttgtaatcagaatttttagaaag

SEQ ID NO: 12775 - DNA, 23 bp, Artificial Sequence
  Description of Artificial Sequence: Synthetic oligonucleotide
  X-linked inhibitor of apoptosis (XIAP) siRNA
tgtaatcagaatttttagaaagt

SEQ ID NO: 12776 - DNA, 23 bp, Artificial Sequence
  Description of Artificial Sequence: Synthetic oligonucleotide
  X-linked inhibitor of apoptosis (XIAP) siRNA
gtaatcagaatttttagaaagta

SEQ ID NO: 12777 - DNA, 23 bp, Artificial Sequence
  Description of Artificial Sequence: Synthetic oligonucleotide
  X-linked inhibitor of apoptosis (XIAP) siRNA
taatcagaatttttagaaagtat

SEQ ID NO: 12778 - DNA, 23 bp, Artificial Sequence
  Description of Artificial Sequence: Synthetic oligonucleotide
  X-linked inhibitor of apoptosis (XIAP) siRNA
aatcagaatttttagaaagtatt

SEQ ID NO: 12779 - DNA, 23 bp, Artificial Sequence
  Description of Artificial Sequence: Synthetic oligonucleotide
  X-linked inhibitor of apoptosis (XIAP) siRNA
atcagaatttttagaaagtattt

SEQ ID NO: 12780 - DNA, 23 bp, Artificial Sequence
  Description of Artificial Sequence: Synthetic oligonucleotide
  X-linked inhibitor of apoptosis (XIAP) siRNA
tcagaatttttagaaagtatttt

SEQ ID NO: 12781 - DNA, 23 bp, Artificial Sequence
  Description of Artificial Sequence: Synthetic oligonucleotide
  X-linked inhibitor of apoptosis (XIAP) siRNA
cagaatttttagaaagtattttg

SEQ ID NO: 12782 - DNA, 23 bp, Artificial Sequence
  Description of Artificial Sequence: Synthetic oligonucleotide
  X-linked inhibitor of apoptosis (XIAP) siRNA
agaatttttagaaagtattttgc

SEQ ID NO: 12783 - DNA, 23 bp, Artificial Sequence
  Description of Artificial Sequence: Synthetic oligonucleotide
  X-linked inhibitor of apoptosis (XIAP) siRNA
gaatttttagaaagtattttgct

SEQ ID NO: 12784 - DNA, 23 bp, Artificial Sequence
  Description of Artificial Sequence: Synthetic oligonucleotide
  X-linked inhibitor of apoptosis (XIAP) siRNA
aatttttagaaagtattttgctg

SEQ ID NO: 12785 - DNA, 23 bp, Artificial Sequence
  Description of Artificial Sequence: Synthetic oligonucleotide
  X-linked inhibitor of apoptosis (XIAP) siRNA
atttttagaaagtattttgctga

SEQ ID NO: 12786 - DNA, 23 bp, Artificial Sequence
  Description of Artificial Sequence: Synthetic oligonucleotide
  X-linked inhibitor of apoptosis (XIAP) siRNA
tttttagaaagtattttgctgat

SEQ ID NO: 12787 - DNA, 23 bp, Artificial Sequence
  Description of Artificial Sequence: Synthetic oligonucleotide
  X-linked inhibitor of apoptosis (XIAP) siRNA
ttttagaaagtattttgctgatt

SEQ ID NO: 12788 - DNA, 23 bp, Artificial Sequence
  Description of Artificial Sequence: Synthetic oligonucleotide
  X-linked inhibitor of apoptosis (XIAP) siRNA
tttagaaagtattttgctgattt

SEQ ID NO: 12789 - DNA, 23 bp, Artificial Sequence
  Description of Artificial Sequence: Synthetic oligonucleotide
  X-linked inhibitor of apoptosis (XIAP) siRNA
ttagaaagtattttgctgattta

SEQ ID NO: 12790 - DNA, 23 bp, Artificial Sequence
  Description of Artificial Sequence: Synthetic oligonucleotide
  X-linked inhibitor of apoptosis (XIAP) siRNA
tagaaagtattttgctgatttaa

SEQ ID NO: 12791 - DNA, 23 bp, Artificial Sequence
  Description of Artificial Sequence: Synthetic oligonucleotide
  X-linked inhibitor of apoptosis (XIAP) siRNA
agaaagtattttgctgatttaaa

SEQ ID NO: 12792 - DNA, 23 bp, Artificial Sequence
  Description of Artificial Sequence: Synthetic oligonucleotide
  X-linked inhibitor of apoptosis (XIAP) siRNA
gaaagtattttgctgatttaaag

SEQ ID NO: 12793 - DNA, 23 bp, Artificial Sequence
  Description of Artificial Sequence: Synthetic oligonucleotide
  X-linked inhibitor of apoptosis (XIAP) siRNA
aaagtattttgctgatttaaagg

SEQ ID NO: 12794 - DNA, 23 bp, Artificial Sequence
  Description of Artificial Sequence: Synthetic oligonucleotide
  X-linked inhibitor of apoptosis (XIAP) siRNA
aagtattttgctgatttaaaggc

SEQ ID NO: 12795 - DNA, 23 bp, Artificial Sequence
  Description of Artificial Sequence: Synthetic oligonucleotide
  X-linked inhibitor of apoptosis (XIAP) siRNA
agtattttgctgatttaaaggct

SEQ ID NO: 12796 - DNA, 23 bp, Artificial Sequence
  Description of Artificial Sequence: Synthetic oligonucleotide
  X-linked inhibitor of apoptosis (XIAP) siRNA
gtattttgctgatttaaaggctt

SEQ ID NO: 12797 - DNA, 23 bp, Artificial Sequence
  Description of Artificial Sequence: Synthetic oligonucleotide
  X-linked inhibitor of apoptosis (XIAP) siRNA
tattttgctgatttaaaggctta

SEQ ID NO: 12798 - DNA, 23 bp, Artificial Sequence
  Description of Artificial Sequence: Synthetic oligonucleotide
  X-linked inhibitor of apoptosis (XIAP) siRNA
attttgctgatttaaaggcttag

SEQ ID NO: 12799 - DNA, 23 bp, Artificial Sequence
  Description of Artificial Sequence: Synthetic oligonucleotide
  X-linked inhibitor of apoptosis (XIAP) siRNA
ttttgctgatttaaaggcttagg

SEQ ID NO: 12800 - DNA, 23 bp, Artificial Sequence
  Description of Artificial Sequence: Synthetic oligonucleotide
  X-linked inhibitor of apoptosis (XIAP) siRNA
tttgctgatttaaaggcttaggc

SEQ ID NO: 12801 - DNA, 23 bp, Artificial Sequence
  Description of Artificial Sequence: Synthetic oligonucleotide
  X-linked inhibitor of apoptosis (XIAP) siRNA
ttgctgatttaaaggcttaggca

SEQ ID NO: 12802 - DNA, 23 bp, Artificial Sequence
  Description of Artificial Sequence: Synthetic oligonucleotide
  X-linked inhibitor of apoptosis (XIAP) siRNA
tgctgatttaaaggcttaggcat

SEQ ID NO: 12803 - DNA, 23 bp, Artificial Sequence
  Description of Artificial Sequence: Synthetic oligonucleotide
  X-linked inhibitor of apoptosis (XIAP) siRNA
gctgatttaaaggcttaggcatg

SEQ ID NO: 12804 - DNA, 23 bp, Artificial Sequence
  Description of Artificial Sequence: Synthetic oligonucleotide
  X-linked inhibitor of apoptosis (XIAP) siRNA
ctgatttaaaggcttaggcatgt

SEQ ID NO: 12805 - DNA, 23 bp, Artificial Sequence
  Description of Artificial Sequence: Synthetic oligonucleotide
  X-linked inhibitor of apoptosis (XIAP) siRNA
tgatttaaaggcttaggcatgtt

SEQ ID NO: 12806 - DNA, 23 bp, Artificial Sequence
  Description of Artificial Sequence: Synthetic oligonucleotide
  X-linked inhibitor of apoptosis (XIAP) siRNA
gatttaaaggcttaggcatgttc

SEQ ID NO: 12807 - DNA, 23 bp, Artificial Sequence
  Description of Artificial Sequence: Synthetic oligonucleotide
  X-linked inhibitor of apoptosis (XIAP) siRNA
atttaaaggcttaggcatgttca

SEQ ID NO: 12808 - DNA, 23 bp, Artificial Sequence
  Description of Artificial Sequence: Synthetic oligonucleotide
  X-linked inhibitor of apoptosis (XIAP) siRNA
tttaaaggcttaggcatgttcaa

SEQ ID NO: 12809 - DNA, 23 bp, Artificial Sequence
  Description of Artificial Sequence: Synthetic oligonucleotide
  X-linked inhibitor of apoptosis (XIAP) siRNA
ttaaaggcttaggcatgttcaaa

SEQ ID NO: 12810 - DNA, 23 bp, Artificial Sequence
  Description of Artificial Sequence: Synthetic oligonucleotide
  X-linked inhibitor of apoptosis (XIAP) siRNA
taaaggcttaggcatgttcaaac

SEQ ID NO: 12811 - DNA, 23 bp, Artificial Sequence
  Description of Artificial Sequence: Synthetic oligonucleotide
  X-linked inhibitor of apoptosis (XIAP) siRNA
aaaggcttaggcatgttcaaacg

SEQ ID NO: 12812 - DNA, 23 bp, Artificial Sequence
  Description of Artificial Sequence: Synthetic oligonucleotide
  X-linked inhibitor of apoptosis (XIAP) siRNA
aaggcttaggcatgttcaaacgc

SEQ ID NO: 12813 - DNA, 23 bp, Artificial Sequence
  Description of Artificial Sequence: Synthetic oligonucleotide
  X-linked inhibitor of apoptosis (XIAP) siRNA
aggcttaggcatgttcaaacgcc

SEQ ID NO: 12814 - DNA, 23 bp, Artificial Sequence
  Description of Artificial Sequence: Synthetic oligonucleotide
  X-linked inhibitor of apoptosis (XIAP) siRNA
ggcttaggcatgttcaaacgcct

SEQ ID NO: 12815 - DNA, 23 bp, Artificial Sequence
  Description of Artificial Sequence: Synthetic oligonucleotide
  X-linked inhibitor of apoptosis (XIAP) siRNA
gcttaggcatgttcaaacgcctg

SEQ ID NO: 12816 - DNA, 23 bp, Artificial Sequence
  Description of Artificial Sequence: Synthetic oligonucleotide
  X-linked inhibitor of apoptosis (XIAP) siRNA
cttaggcatgttcaaacgcctgc

SEQ ID NO: 12817 - DNA, 23 bp, Artificial Sequence
  Description of Artificial Sequence: Synthetic oligonucleotide
  X-linked inhibitor of apoptosis (XIAP) siRNA
ttaggcatgttcaaacgcctgca

SEQ ID NO: 12818 - DNA, 23 bp, Artificial Sequence
  Description of Artificial Sequence: Synthetic oligonucleotide
  X-linked inhibitor of apoptosis (XIAP) siRNA
taggcatgttcaaacgcctgcaa

SEQ ID NO: 12819 - DNA, 23 bp, Artificial Sequence
  Description of Artificial Sequence: Synthetic oligonucleotide
  X-linked inhibitor of apoptosis (XIAP) siRNA
aggcatgttcaaacgcctgcaaa

SEQ ID NO: 12820 - DNA, 23 bp, Artificial Sequence
  Description of Artificial Sequence: Synthetic oligonucleotide
  X-linked inhibitor of apoptosis (XIAP) siRNA
ggcatgttcaaacgcctgcaaaa

SEQ ID NO: 12821 - DNA, 23 bp, Artificial Sequence
  Description of Artificial Sequence: Synthetic oligonucleotide
  X-linked inhibitor of apoptosis (XIAP) siRNA
gcatgttcaaacgcctgcaaaac

SEQ ID NO: 12822 - DNA, 23 bp, Artificial Sequence
  Description of Artificial Sequence: Synthetic oligonucleotide
  X-linked inhibitor of apoptosis (XIAP) siRNA
catgttcaaacgcctgcaaaact

SEQ ID NO: 12823 - DNA, 23 bp, Artificial Sequence
  Description of Artificial Sequence: Synthetic oligonucleotide
  X-linked inhibitor of apoptosis (XIAP) siRNA
atgttcaaacgcctgcaaaacta

SEQ ID NO: 12824 - DNA, 23 bp, Artificial Sequence
  Description of Artificial Sequence: Synthetic oligonucleotide
  X-linked inhibitor of apoptosis (XIAP) siRNA
tgttcaaacgcctgcaaaactac

SEQ ID NO: 12825 - DNA, 23 bp, Artificial Sequence
  Description of Artificial Sequence: Synthetic oligonucleotide
  X-linked inhibitor of apoptosis (XIAP) siRNA
gttcaaacgcctgcaaaactact

SEQ ID NO: 12826 - DNA, 23 bp, Artificial Sequence
  Description of Artificial Sequence: Synthetic oligonucleotide
  X-linked inhibitor of apoptosis (XIAP) siRNA
ttcaaacgcctgcaaaactactt

SEQ ID NO: 12827 - DNA, 23 bp, Artificial Sequence
  Description of Artificial Sequence: Synthetic oligonucleotide
  X-linked inhibitor of apoptosis (XIAP) siRNA
tcaaacgcctgcaaaactactta

SEQ ID NO: 12828 - DNA, 23 bp, Artificial Sequence
  Description of Artificial Sequence: Synthetic oligonucleotide
  X-linked inhibitor of apoptosis (XIAP) siRNA
caaacgcctgcaaaactacttat

SEQ ID NO: 12829 - DNA, 23 bp, Artificial Sequence
  Description of Artificial Sequence: Synthetic oligonucleotide
  X-linked inhibitor of apoptosis (XIAP) siRNA
aaacgcctgcaaaactacttatc

SEQ ID NO: 12830 - DNA, 23 bp, Artificial Sequence
  Description of Artificial Sequence: Synthetic oligonucleotide
  X-linked inhibitor of apoptosis (XIAP) siRNA
aacgcctgcaaaactacttatca

SEQ ID NO: 12831 - DNA, 23 bp, Artificial Sequence
  Description of Artificial Sequence: Synthetic oligonucleotide
  X-linked inhibitor of apoptosis (XIAP) siRNA
acgcctgcaaaactacttatcac

SEQ ID NO: 12832 - DNA, 23 bp, Artificial Sequence
  Description of Artificial Sequence: Synthetic oligonucleotide
  X-linked inhibitor of apoptosis (XIAP) siRNA
cgcctgcaaaactacttatcact

SEQ ID NO: 12833 - DNA, 23 bp, Artificial Sequence
  Description of Artificial Sequence: Synthetic oligonucleotide
  X-linked inhibitor of apoptosis (XIAP) siRNA
gcctgcaaaactacttatcactc

SEQ ID NO: 12834 - DNA, 23 bp, Artificial Sequence
  Description of Artificial Sequence: Synthetic oligonucleotide
  X-linked inhibitor of apoptosis (XIAP) siRNA
cctgcaaaactacttatcactca

SEQ ID NO: 12835 - DNA, 23 bp, Artificial Sequence
  Description of Artificial Sequence: Synthetic oligonucleotide
  X-linked inhibitor of apoptosis (XIAP) siRNA
ctgcaaaactacttatcactcag

SEQ ID NO: 12836 - DNA, 23 bp, Artificial Sequence
  Description of Artificial Sequence: Synthetic oligonucleotide
  X-linked inhibitor of apoptosis (XIAP) siRNA
tgcaaaactacttatcactcagc

SEQ ID NO: 12837 - DNA, 23 bp, Artificial Sequence
  Description of Artificial Sequence: Synthetic oligonucleotide
  X-linked inhibitor of apoptosis (XIAP) siRNA
gcaaaactacttatcactcagct

SEQ ID NO: 12838 - DNA, 23 bp, Artificial Sequence
  Description of Artificial Sequence: Synthetic oligonucleotide
  X-linked inhibitor of apoptosis (XIAP) siRNA
caaaactacttatcactcagctt

SEQ ID NO: 12839 - DNA, 23 bp, Artificial Sequence
  Description of Artificial Sequence: Synthetic oligonucleotide
  X-linked inhibitor of apoptosis (XIAP) siRNA
aaaactacttatcactcagcttt

SEQ ID NO: 12840 - DNA, 23 bp, Artificial Sequence
  Description of Artificial Sequence: Synthetic oligonucleotide
  X-linked inhibitor of apoptosis (XIAP) siRNA
aaactacttatcactcagcttta

SEQ ID NO: 12841 - DNA, 23 bp, Artificial Sequence
  Description of Artificial Sequence: Synthetic oligonucleotide
  X-linked inhibitor of apoptosis (XIAP) siRNA
aactacttatcactcagctttag

SEQ ID NO: 12842 - DNA, 23 bp, Artificial Sequence
  Description of Artificial Sequence: Synthetic oligonucleotide
  X-linked inhibitor of apoptosis (XIAP) siRNA
actacttatcactcagctttagt

SEQ ID NO: 12843 - DNA, 23 bp, Artificial Sequence
  Description of Artificial Sequence: Synthetic oligonucleotide
  X-linked inhibitor of apoptosis (XIAP) siRNA
ctacttatcactcagctttagtt

SEQ ID NO: 12844 - DNA, 23 bp, Artificial Sequence
  Description of Artificial Sequence: Synthetic oligonucleotide
  X-linked inhibitor of apoptosis (XIAP) siRNA
tacttatcactcagctttagttt

SEQ ID NO: 12845 - DNA, 23 bp, Artificial Sequence
  Description of Artificial Sequence: Synthetic oligonucleotide
  X-linked inhibitor of apoptosis (XIAP) siRNA
acttatcactcagctttagtttt

SEQ ID NO: 12846 - DNA, 23 bp, Artificial Sequence
  Description of Artificial Sequence: Synthetic oligonucleotide
  X-linked inhibitor of apoptosis (XIAP) siRNA
cttatcactcagctttagttttt

SEQ ID NO: 12847 - DNA, 23 bp, Artificial Sequence
  Description of Artificial Sequence: Synthetic oligonucleotide
  X-linked inhibitor of apoptosis (XIAP) siRNA
ttatcactcagctttagtttttc

SEQ ID NO: 12848 - DNA, 23 bp, Artificial Sequence
  Description of Artificial Sequence: Synthetic oligonucleotide
  X-linked inhibitor of apoptosis (XIAP) siRNA
tatcactcagctttagtttttct

SEQ ID NO: 12849 - DNA, 23 bp, Artificial Sequence
  Description of Artificial Sequence: Synthetic oligonucleotide
  X-linked inhibitor of apoptosis (XIAP) siRNA
atcactcagctttagtttttcta

SEQ ID NO: 12850 - DNA, 23 bp, Artificial Sequence
  Description of Artificial Sequence: Synthetic oligonucleotide
  X-linked inhibitor of apoptosis (XIAP) siRNA
tcactcagctttagtttttctaa

SEQ ID NO: 12851 - DNA, 23 bp, Artificial Sequence
  Description of Artificial Sequence: Synthetic oligonucleotide
  X-linked inhibitor of apoptosis (XIAP) siRNA
cactcagctttagtttttctaat

SEQ ID NO: 12852 - DNA, 23 bp, Artificial Sequence
  Description of Artificial Sequence: Synthetic oligonucleotide
  X-linked inhibitor of apoptosis (XIAP) siRNA
actcagctttagtttttctaatc

SEQ ID NO: 12853 - DNA, 23 bp, Artificial Sequence
  Description of Artificial Sequence: Synthetic oligonucleotide
  X-linked inhibitor of apoptosis (XIAP) siRNA
ctcagctttagtttttctaatcc

SEQ ID NO: 12854 - DNA, 23 bp, Artificial Sequence
  Description of Artificial Sequence: Synthetic oligonucleotide
  X-linked inhibitor of apoptosis (XIAP) siRNA
tcagctttagtttttctaatcca

SEQ ID NO: 12855 - DNA, 23 bp, Artificial Sequence
  Description of Artificial Sequence: Synthetic oligonucleotide
  X-linked inhibitor of apoptosis (XIAP) siRNA
cagctttagtttttctaatccaa

SEQ ID NO: 12856 - DNA, 23 bp, Artificial Sequence
  Description of Artificial Sequence: Synthetic oligonucleotide
  X-linked inhibitor of apoptosis (XIAP) siRNA
agctttagtttttctaatccaag

SEQ ID NO: 12857 - DNA, 23 bp, Artificial Sequence
  Description of Artificial Sequence: Synthetic oligonucleotide
  X-linked inhibitor of apoptosis (XIAP) siRNA
gctttagtttttctaatccaaga

SEQ ID NO: 12858 - DNA, 23 bp, Artificial Sequence
  Description of Artificial Sequence: Synthetic oligonucleotide
  X-linked inhibitor of apoptosis (XIAP) siRNA
ctttagtttttctaatccaagaa

SEQ ID NO: 12859 - DNA, 23 bp, Artificial Sequence
  Description of Artificial Sequence: Synthetic oligonucleotide
  X-linked inhibitor of apoptosis (XIAP) siRNA
tttagtttttctaatccaagaag

SEQ ID NO: 12860 - DNA, 23 bp, Artificial Sequence
  Description of Artificial Sequence: Synthetic oligonucleotide
  X-linked inhibitor of apoptosis (XIAP) siRNA
ttagtttttctaatccaagaagg

SEQ ID NO: 12861 - DNA, 23 bp, Artificial Sequence
  Description of Artificial Sequence: Synthetic oligonucleotide
  X-linked inhibitor of apoptosis (XIAP) siRNA
tagtttttctaatccaagaaggc

SEQ ID NO: 12862 - DNA, 23 bp, Artificial Sequence
  Description of Artificial Sequence: Synthetic oligonucleotide
  X-linked inhibitor of apoptosis (XIAP) siRNA
agtttttctaatccaagaaggca

SEQ ID NO: 12863 - DNA, 23 bp, Artificial Sequence
  Description of Artificial Sequence: Synthetic oligonucleotide
  X-linked inhibitor of apoptosis (XIAP) siRNA
gtttttctaatccaagaaggcag

SEQ ID NO: 12864 - DNA, 23 bp, Artificial Sequence
  Description of Artificial Sequence: Synthetic oligonucleotide
  X-linked inhibitor of apoptosis (XIAP) siRNA
tttttctaatccaagaaggcagg

SEQ ID NO: 12865 - DNA, 23 bp, Artificial Sequence
  Description of Artificial Sequence: Synthetic oligonucleotide
  X-linked inhibitor of apoptosis (XIAP) siRNA
ttttctaatccaagaaggcaggg

SEQ ID NO: 12866 - DNA, 23 bp, Artificial Sequence
  Description of Artificial Sequence: Synthetic oligonucleotide
  X-linked inhibitor of apoptosis (XIAP) siRNA
tttctaatccaagaaggcagggc

SEQ ID NO: 12867 - DNA, 23 bp, Artificial Sequence
  Description of Artificial Sequence: Synthetic oligonucleotide
  X-linked inhibitor of apoptosis (XIAP) siRNA
ttctaatccaagaaggcagggca

SEQ ID NO: 12868 - DNA, 23 bp, Artificial Sequence
  Description of Artificial Sequence: Synthetic oligonucleotide
  X-linked inhibitor of apoptosis (XIAP) siRNA
tctaatccaagaaggcagggcag

SEQ ID NO: 12869 - DNA, 23 bp, Artificial Sequence
  Description of Artificial Sequence: Synthetic oligonucleotide
  X-linked inhibitor of apoptosis (XIAP) siRNA
ctaatccaagaaggcagggcagt

SEQ ID NO: 12870 - DNA, 23 bp, Artificial Sequence
  Description of Artificial Sequence: Synthetic oligonucleotide
  X-linked inhibitor of apoptosis (XIAP) siRNA
taatccaagaaggcagggcagtt

SEQ ID NO: 12871 - DNA, 23 bp, Artificial Sequence
  Description of Artificial Sequence: Synthetic oligonucleotide
  X-linked inhibitor of apoptosis (XIAP) siRNA
aatccaagaaggcagggcagtta

SEQ ID NO: 12872 - DNA, 23 bp, Artificial Sequence
  Description of Artificial Sequence: Synthetic oligonucleotide
  X-linked inhibitor of apoptosis (XIAP) siRNA
atccaagaaggcagggcagttaa

SEQ ID NO: 12873 - DNA, 23 bp, Artificial Sequence
  Description of Artificial Sequence: Synthetic oligonucleotide
  X-linked inhibitor of apoptosis (XIAP) siRNA
tccaagaaggcagggcagttaac

SEQ ID NO: 12874 - DNA, 23 bp, Artificial Sequence
  Description of Artificial Sequence: Synthetic oligonucleotide
  X-linked inhibitor of apoptosis (XIAP) siRNA
ccaagaaggcagggcagttaacc

SEQ ID NO: 12875 - DNA, 23 bp, Artificial Sequence
  Description of Artificial Sequence: Synthetic oligonucleotide
  X-linked inhibitor of apoptosis (XIAP) siRNA
caagaaggcagggcagttaacct

SEQ ID NO: 12876 - DNA, 23 bp, Artificial Sequence
  Description of Artificial Sequence: Synthetic oligonucleotide
  X-linked inhibitor of apoptosis (XIAP) siRNA
aagaaggcagggcagttaacctt

SEQ ID NO: 12877 - DNA, 23 bp, Artificial Sequence
  Description of Artificial Sequence: Synthetic oligonucleotide
  X-linked inhibitor of apoptosis (XIAP) siRNA
agaaggcagggcagttaaccttt

SEQ ID NO: 12878 - DNA, 23 bp, Artificial Sequence
  Description of Artificial Sequence: Synthetic oligonucleotide
  X-linked inhibitor of apoptosis (XIAP) siRNA
gaaggcagggcagttaacctttt

SEQ ID NO: 12879 - DNA, 23 bp, Artificial Sequence
  Description of Artificial Sequence: Synthetic oligonucleotide
  X-linked inhibitor of apoptosis (XIAP) siRNA
aaggcagggcagttaaccttttt

SEQ ID NO: 12880 - DNA, 23 bp, Artificial Sequence
  Description of Artificial Sequence: Synthetic oligonucleotide
  X-linked inhibitor of apoptosis (XIAP) siRNA
aggcagggcagttaacctttttg

SEQ ID NO: 12881 - DNA, 23 bp, Artificial Sequence
  Description of Artificial Sequence: Synthetic oligonucleotide
  X-linked inhibitor of apoptosis (XIAP) siRNA
ggcagggcagttaacctttttgg

SEQ ID NO: 12882 - DNA, 23 bp, Artificial Sequence
  Description of Artificial Sequence: Synthetic oligonucleotide
  X-linked inhibitor of apoptosis (XIAP) siRNA
gcagggcagttaacctttttggt

SEQ ID NO: 12883 - DNA, 23 bp, Artificial Sequence
  Description of Artificial Sequence: Synthetic oligonucleotide
  X-linked inhibitor of apoptosis (XIAP) siRNA
cagggcagttaacctttttggtg

SEQ ID NO: 12884 - DNA, 23 bp, Artificial Sequence
  Description of Artificial Sequence: Synthetic oligonucleotide
  X-linked inhibitor of apoptosis (XIAP) siRNA
agggcagttaacctttttggtgc

SEQ ID NO: 12885 - DNA, 23 bp, Artificial Sequence
  Description of Artificial Sequence: Synthetic oligonucleotide
  X-linked inhibitor of apoptosis (XIAP) siRNA
gggcagttaacctttttggtgcc

SEQ ID NO: 12886 - DNA, 23 bp, Artificial Sequence
  Description of Artificial Sequence: Synthetic oligonucleotide
  X-linked inhibitor of apoptosis (XIAP) siRNA
ggcagttaacctttttggtgcca

SEQ ID NO: 12887 - DNA, 23 bp, Artificial Sequence
  Description of Artificial Sequence: Synthetic oligonucleotide
  X-linked inhibitor of apoptosis (XIAP) siRNA
gcagttaacctttttggtgccaa

SEQ ID NO: 12888 - DNA, 23 bp, Artificial Sequence
  Description of Artificial Sequence: Synthetic oligonucleotide
  X-linked inhibitor of apoptosis (XIAP) siRNA
cagttaacctttttggtgccaat

SEQ ID NO: 12889 - DNA, 23 bp, Artificial Sequence
  Description of Artificial Sequence: Synthetic oligonucleotide
  X-linked inhibitor of apoptosis (XIAP) siRNA
agttaacctttttggtgccaatg

SEQ ID NO: 12890 - DNA, 23 bp, Artificial Sequence
  Description of Artificial Sequence: Synthetic oligonucleotide
  X-linked inhibitor of apoptosis (XIAP) siRNA
gttaacctttttggtgccaatgt

SEQ ID NO: 12891 - DNA, 23 bp, Artificial Sequence
  Description of Artificial Sequence: Synthetic oligonucleotide
  X-linked inhibitor of apoptosis (XIAP) siRNA
ttaacctttttggtgccaatgtg

SEQ ID NO: 12892 - DNA, 23 bp, Artificial Sequence
  Description of Artificial Sequence: Synthetic oligonucleotide
  X-linked inhibitor of apoptosis (XIAP) siRNA
taacctttttggtgccaatgtga

SEQ ID NO: 12893 - DNA, 23 bp, Artificial Sequence
  Description of Artificial Sequence: Synthetic oligonucleotide
  X-linked inhibitor of apoptosis (XIAP) siRNA
aacctttttggtgccaatgtgaa

SEQ ID NO: 12894 - DNA, 23 bp, Artificial Sequence
  Description of Artificial Sequence: Synthetic oligonucleotide
  X-linked inhibitor of apoptosis (XIAP) siRNA
acctttttggtgccaatgtgaaa

SEQ ID NO: 12895 - DNA, 23 bp, Artificial Sequence
  Description of Artificial Sequence: Synthetic oligonucleotide
  X-linked inhibitor of apoptosis (XIAP) siRNA
cctttttggtgccaatgtgaaat

SEQ ID NO: 12896 - DNA, 23 bp, Artificial Sequence
  Description of Artificial Sequence: Synthetic oligonucleotide
  X-linked inhibitor of apoptosis (XIAP) siRNA
ctttttggtgccaatgtgaaatg

SEQ ID NO: 12897 - DNA, 23 bp, Artificial Sequence
  Description of Artificial Sequence: Synthetic oligonucleotide
  X-linked inhibitor of apoptosis (XIAP) siRNA
tttttggtgccaatgtgaaatgt

SEQ ID NO: 12898 - DNA, 23 bp, Artificial Sequence
  Description of Artificial Sequence: Synthetic oligonucleotide
  X-linked inhibitor of apoptosis (XIAP) siRNA
ttttggtgccaatgtgaaatgta

SEQ ID NO: 12899 - DNA, 23 bp, Artificial Sequence
  Description of Artificial Sequence: Synthetic oligonucleotide
  X-linked inhibitor of apoptosis (XIAP) siRNA
tttggtgccaatgtgaaatgtaa

SEQ ID NO: 12900 - DNA, 23 bp, Artificial Sequence
  Description of Artificial Sequence: Synthetic oligonucleotide
  X-linked inhibitor of apoptosis (XIAP) siRNA
ttggtgccaatgtgaaatgtaaa

SEQ ID NO: 12901 - DNA, 23 bp, Artificial Sequence
  Description of Artificial Sequence: Synthetic oligonucleotide
  X-linked inhibitor of apoptosis (XIAP) siRNA
tggtgccaatgtgaaatgtaaat

SEQ ID NO: 12902 - DNA, 23 bp, Artificial Sequence
  Description of Artificial Sequence: Synthetic oligonucleotide
  X-linked inhibitor of apoptosis (XIAP) siRNA
ggtgccaatgtgaaatgtaaatg

SEQ ID NO: 12903 - DNA, 23 bp, Artificial Sequence
  Description of Artificial Sequence: Synthetic oligonucleotide
  X-linked inhibitor of apoptosis (XIAP) siRNA
gtgccaatgtgaaatgtaaatga

SEQ ID NO: 12904 - DNA, 23 bp, Artificial Sequence
  Description of Artificial Sequence: Synthetic oligonucleotide
  X-linked inhibitor of apoptosis (XIAP) siRNA
tgccaatgtgaaatgtaaatgat

SEQ ID NO: 12905 - DNA, 23 bp, Artificial Sequence
  Description of Artificial Sequence: Synthetic oligonucleotide
  X-linked inhibitor of apoptosis (XIAP) siRNA
gccaatgtgaaatgtaaatgatt

SEQ ID NO: 12906 - DNA, 23 bp, Artificial Sequence
  Description of Artificial Sequence: Synthetic oligonucleotide
  X-linked inhibitor of apoptosis (XIAP) siRNA
ccaatgtgaaatgtaaatgattt

SEQ ID NO: 12907 - DNA, 23 bp, Artificial Sequence
  Description of Artificial Sequence: Synthetic oligonucleotide
  X-linked inhibitor of apoptosis (XIAP) siRNA
caatgtgaaatgtaaatgatttt

SEQ ID NO: 12908 - DNA, 23 bp, Artificial Sequence
  Description of Artificial Sequence: Synthetic oligonucleotide
  X-linked inhibitor of apoptosis (XIAP) siRNA
aatgtgaaatgtaaatgatttta

SEQ ID NO: 12909 - DNA, 23 bp, Artificial Sequence
  Description of Artificial Sequence: Synthetic oligonucleotide
  X-linked inhibitor of apoptosis (XIAP) siRNA
atgtgaaatgtaaatgattttat

SEQ ID NO: 12910 - DNA, 23 bp, Artificial Sequence
  Description of Artificial Sequence: Synthetic oligonucleotide
  X-linked inhibitor of apoptosis (XIAP) siRNA
tgtgaaatgtaaatgattttatg

SEQ ID NO: 12911 - DNA, 23 bp, Artificial Sequence
  Description of Artificial Sequence: Synthetic oligonucleotide
  X-linked inhibitor of apoptosis (XIAP) siRNA
gtgaaatgtaaatgattttatgt

SEQ ID NO: 12912 - DNA, 23 bp, Artificial Sequence
  Description of Artificial Sequence: Synthetic oligonucleotide
  X-linked inhibitor of apoptosis (XIAP) siRNA
tgaaatgtaaatgattttatgtt

SEQ ID NO: 12913 - DNA, 23 bp, Artificial Sequence
  Description of Artificial Sequence: Synthetic oligonucleotide
  X-linked inhibitor of apoptosis (XIAP) siRNA
gaaatgtaaatgattttatgttt

SEQ ID NO: 12914 - DNA, 23 bp, Artificial Sequence
  Description of Artificial Sequence: Synthetic oligonucleotide
  X-linked inhibitor of apoptosis (XIAP) siRNA
aaatgtaaatgattttatgtttt

SEQ ID NO: 12915 - DNA, 23 bp, Artificial Sequence
  Description of Artificial Sequence: Synthetic oligonucleotide
  X-linked inhibitor of apoptosis (XIAP) siRNA
aatgtaaatgattttatgttttt

SEQ ID NO: 12916 - DNA, 23 bp, Artificial Sequence
  Description of Artificial Sequence: Synthetic oligonucleotide
  X-linked inhibitor of apoptosis (XIAP) siRNA
atgtaaatgattttatgtttttc

SEQ ID NO: 12917 - DNA, 23 bp, Artificial Sequence
  Description of Artificial Sequence: Synthetic oligonucleotide
  X-linked inhibitor of apoptosis (XIAP) siRNA
tgtaaatgattttatgtttttcc

SEQ ID NO: 12918 - DNA, 23 bp, Artificial Sequence
  Description of Artificial Sequence: Synthetic oligonucleotide
  X-linked inhibitor of apoptosis (XIAP) siRNA
gtaaatgattttatgtttttcct

SEQ ID NO: 12919 - DNA, 23 bp, Artificial Sequence
  Description of Artificial Sequence: Synthetic oligonucleotide
  X-linked inhibitor of apoptosis (XIAP) siRNA
taaatgattttatgtttttcctg

SEQ ID NO: 12920 - DNA, 23 bp, Artificial Sequence
  Description of Artificial Sequence: Synthetic oligonucleotide
  X-linked inhibitor of apoptosis (XIAP) siRNA
aaatgattttatgtttttcctgc

SEQ ID NO: 12921 - DNA, 23 bp, Artificial Sequence
  Description of Artificial Sequence: Synthetic oligonucleotide
  X-linked inhibitor of apoptosis (XIAP) siRNA
aatgattttatgtttttcctgct

SEQ ID NO: 12922 - DNA, 23 bp, Artificial Sequence
  Description of Artificial Sequence: Synthetic oligonucleotide
  X-linked inhibitor of apoptosis (XIAP) siRNA
atgattttatgtttttcctgctt

SEQ ID NO: 12923 - DNA, 23 bp, Artificial Sequence
  Description of Artificial Sequence: Synthetic oligonucleotide
  X-linked inhibitor of apoptosis (XIAP) siRNA
tgattttatgtttttcctgcttt

SEQ ID NO: 12924 - DNA, 23 bp, Artificial Sequence
  Description of Artificial Sequence: Synthetic oligonucleotide
  X-linked inhibitor of apoptosis (XIAP) siRNA
gattttatgtttttcctgctttg

SEQ ID NO: 12925 - DNA, 23 bp, Artificial Sequence
  Description of Artificial Sequence: Synthetic oligonucleotide
  X-linked inhibitor of apoptosis (XIAP) siRNA
attttatgtttttcctgctttgt

SEQ ID NO: 12926 - DNA, 23 bp, Artificial Sequence
  Description of Artificial Sequence: Synthetic oligonucleotide
  X-linked inhibitor of apoptosis (XIAP) siRNA
ttttatgtttttcctgctttgtg

SEQ ID NO: 12927 - DNA, 23 bp, Artificial Sequence
  Description of Artificial Sequence: Synthetic oligonucleotide
  X-linked inhibitor of apoptosis (XIAP) siRNA
tttatgtttttcctgctttgtgg

SEQ ID NO: 12928 - DNA, 23 bp, Artificial Sequence
  Description of Artificial Sequence: Synthetic oligonucleotide
  X-linked inhibitor of apoptosis (XIAP) siRNA
ttatgtttttcctgctttgtgga

SEQ ID NO: 12929 - DNA, 23 bp, Artificial Sequence
  Description of Artificial Sequence: Synthetic oligonucleotide
  X-linked inhibitor of apoptosis (XIAP) siRNA
tatgtttttcctgctttgtggat

SEQ ID NO: 12930 - DNA, 23 bp, Artificial Sequence
  Description of Artificial Sequence: Synthetic oligonucleotide
  X-linked inhibitor of apoptosis (XIAP) siRNA
atgtttttcctgctttgtggatg

SEQ ID NO: 12931 - DNA, 23 bp, Artificial Sequence
  Description of Artificial Sequence: Synthetic oligonucleotide
  X-linked inhibitor of apoptosis (XIAP) siRNA
tgtttttcctgctttgtggatga

SEQ ID NO: 12932 - DNA, 23 bp, Artificial Sequence
  Description of Artificial Sequence: Synthetic oligonucleotide
  X-linked inhibitor of apoptosis (XIAP) siRNA
gtttttcctgctttgtggatgaa

SEQ ID NO: 12933 - DNA, 23 bp, Artificial Sequence
  Description of Artificial Sequence: Synthetic oligonucleotide
  X-linked inhibitor of apoptosis (XIAP) siRNA
tttttcctgctttgtggatgaaa

SEQ ID NO: 12934 - DNA, 23 bp, Artificial Sequence
  Description of Artificial Sequence: Synthetic oligonucleotide
  X-linked inhibitor of apoptosis (XIAP) siRNA
ttttcctgctttgtggatgaaaa

SEQ ID NO: 12935 - DNA, 23 bp, Artificial Sequence
  Description of Artificial Sequence: Synthetic oligonucleotide
  X-linked inhibitor of apoptosis (XIAP) siRNA
tttcctgctttgtggatgaaaaa

SEQ ID NO: 12936 - DNA, 23 bp, Artificial Sequence
  Description of Artificial Sequence: Synthetic oligonucleotide
  X-linked inhibitor of apoptosis (XIAP) siRNA
ttcctgctttgtggatgaaaaat

SEQ ID NO: 12937 - DNA, 23 bp, Artificial Sequence
  Description of Artificial Sequence: Synthetic oligonucleotide
  X-linked inhibitor of apoptosis (XIAP) siRNA
tcctgctttgtggatgaaaaata

SEQ ID NO: 12938 - DNA, 23 bp, Artificial Sequence
  Description of Artificial Sequence: Synthetic oligonucleotide
  X-linked inhibitor of apoptosis (XIAP) siRNA
cctgctttgtggatgaaaaatat

SEQ ID NO: 12939 - DNA, 23 bp, Artificial Sequence
  Description of Artificial Sequence: Synthetic oligonucleotide
  X-linked inhibitor of apoptosis (XIAP) siRNA
ctgctttgtggatgaaaaatatt

SEQ ID NO: 12940 - DNA, 23 bp, Artificial Sequence
  Description of Artificial Sequence: Synthetic oligonucleotide
  X-linked inhibitor of apoptosis (XIAP) siRNA
tgctttgtggatgaaaaatattt

SEQ ID NO: 12941 - DNA, 23 bp, Artificial Sequence
  Description of Artificial Sequence: Synthetic oligonucleotide
  X-linked inhibitor of apoptosis (XIAP) siRNA
gctttgtggatgaaaaatatttc

SEQ ID NO: 12942 - DNA, 23 bp, Artificial Sequence
  Description of Artificial Sequence: Synthetic oligonucleotide
  X-linked inhibitor of apoptosis (XIAP) siRNA
ctttgtggatgaaaaatatttct

SEQ ID NO: 12943 - DNA, 23 bp, Artificial Sequence
  Description of Artificial Sequence: Synthetic oligonucleotide
  X-linked inhibitor of apoptosis (XIAP) siRNA
tttgtggatgaaaaatatttctg

SEQ ID NO: 12944 - DNA, 23 bp, Artificial Sequence
  Description of Artificial Sequence: Synthetic oligonucleotide
  X-linked inhibitor of apoptosis (XIAP) siRNA
ttgtggatgaaaaatatttctga

SEQ ID NO: 12945 - DNA, 23 bp, Artificial Sequence
  Description of Artificial Sequence: Synthetic oligonucleotide
  X-linked inhibitor of apoptosis (XIAP) siRNA
tgtggatgaaaaatatttctgag

SEQ ID NO: 12946 - DNA, 23 bp, Artificial Sequence
  Description of Artificial Sequence: Synthetic oligonucleotide
  X-linked inhibitor of apoptosis (XIAP) siRNA
gtggatgaaaaatatttctgagt

SEQ ID NO: 12947 - DNA, 23 bp, Artificial Sequence
  Description of Artificial Sequence: Synthetic oligonucleotide
  X-linked inhibitor of apoptosis (XIAP) siRNA
tggatgaaaaatatttctgagtg

SEQ ID NO: 12948 - DNA, 23 bp, Artificial Sequence
  Description of Artificial Sequence: Synthetic oligonucleotide
  X-linked inhibitor of apoptosis (XIAP) siRNA
ggatgaaaaatatttctgagtgg

SEQ ID NO: 12949 - DNA, 23 bp, Artificial Sequence
  Description of Artificial Sequence: Synthetic oligonucleotide
  X-linked inhibitor of apoptosis (XIAP) siRNA
gatgaaaaatatttctgagtggt

SEQ ID NO: 12950 - DNA, 23 bp, Artificial Sequence
  Description of Artificial Sequence: Synthetic oligonucleotide
  X-linked inhibitor of apoptosis (XIAP) siRNA
atgaaaaatatttctgagtggta

SEQ ID NO: 12951 - DNA, 23 bp, Artificial Sequence
  Description of Artificial Sequence: Synthetic oligonucleotide
  X-linked inhibitor of apoptosis (XIAP) siRNA
tgaaaaatatttctgagtggtag

SEQ ID NO: 12952 - DNA, 23 bp, Artificial Sequence
  Description of Artificial Sequence: Synthetic oligonucleotide
  X-linked inhibitor of apoptosis (XIAP) siRNA
gaaaaatatttctgagtggtagt

SEQ ID NO: 12953 - DNA, 23 bp, Artificial Sequence
  Description of Artificial Sequence: Synthetic oligonucleotide
  X-linked inhibitor of apoptosis (XIAP) siRNA
aaaaatatttctgagtggtagtt

SEQ ID NO: 12954 - DNA, 23 bp, Artificial Sequence
  Description of Artificial Sequence: Synthetic oligonucleotide
  X-linked inhibitor of apoptosis (XIAP) siRNA
aaaatatttctgagtggtagttt

SEQ ID NO: 12955 - DNA, 23 bp, Artificial Sequence
  Description of Artificial Sequence: Synthetic oligonucleotide
  X-linked inhibitor of apoptosis (XIAP) siRNA
aaatatttctgagtggtagtttt

SEQ ID NO: 12956 - DNA, 23 bp, Artificial Sequence
  Description of Artificial Sequence: Synthetic oligonucleotide
  X-linked inhibitor of apoptosis (XIAP) siRNA
aatatttctgagtggtagttttt

SEQ ID NO: 12957 - DNA, 23 bp, Artificial Sequence
  Description of Artificial Sequence: Synthetic oligonucleotide
  X-linked inhibitor of apoptosis (XIAP) siRNA
atatttctgagtggtagtttttt

SEQ ID NO: 12958 - DNA, 23 bp, Artificial Sequence
  Description of Artificial Sequence: Synthetic oligonucleotide
  X-linked inhibitor of apoptosis (XIAP) siRNA
tatttctgagtggtagttttttg

SEQ ID NO: 12959 - DNA, 23 bp, Artificial Sequence
  Description of Artificial Sequence: Synthetic oligonucleotide
  X-linked inhibitor of apoptosis (XIAP) siRNA
atttctgagtggtagttttttga

SEQ ID NO: 12960 - DNA, 23 bp, Artificial Sequence
  Description of Artificial Sequence: Synthetic oligonucleotide
  X-linked inhibitor of apoptosis (XIAP) siRNA
tttctgagtggtagttttttgac

SEQ ID NO: 12961 - DNA, 23 bp, Artificial Sequence
  Description of Artificial Sequence: Synthetic oligonucleotide
  X-linked inhibitor of apoptosis (XIAP) siRNA
ttctgagtggtagttttttgaca

SEQ ID NO: 12962 - DNA, 23 bp, Artificial Sequence
  Description of Artificial Sequence: Synthetic oligonucleotide
  X-linked inhibitor of apoptosis (XIAP) siRNA
tctgagtggtagttttttgacag

SEQ ID NO: 12963 - DNA, 23 bp, Artificial Sequence
  Description of Artificial Sequence: Synthetic oligonucleotide
  X-linked inhibitor of apoptosis (XIAP) siRNA
ctgagtggtagttttttgacagg

SEQ ID NO: 12964 - DNA, 23 bp, Artificial Sequence
  Description of Artificial Sequence: Synthetic oligonucleotide
  X-linked inhibitor of apoptosis (XIAP) siRNA
tgagtggtagttttttgacaggt

SEQ ID NO: 12965 - DNA, 23 bp, Artificial Sequence
  Description of Artificial Sequence: Synthetic oligonucleotide
  X-linked inhibitor of apoptosis (XIAP) siRNA
gagtggtagttttttgacaggta

SEQ ID NO: 12966 - DNA, 23 bp, Artificial Sequence
  Description of Artificial Sequence: Synthetic oligonucleotide
  X-linked inhibitor of apoptosis (XIAP) siRNA
agtggtagttttttgacaggtag

SEQ ID NO: 12967 - DNA, 23 bp, Artificial Sequence
  Description of Artificial Sequence: Synthetic oligonucleotide
  X-linked inhibitor of apoptosis (XIAP) siRNA
gtggtagttttttgacaggtaga

SEQ ID NO: 12968 - DNA, 23 bp, Artificial Sequence
  Description of Artificial Sequence: Synthetic oligonucleotide
  X-linked inhibitor of apoptosis (XIAP) siRNA
tggtagttttttgacaggtagac

SEQ ID NO: 12969 - DNA, 23 bp, Artificial Sequence
  Description of Artificial Sequence: Synthetic oligonucleotide
  X-linked inhibitor of apoptosis (XIAP) siRNA
ggtagttttttgacaggtagacc

SEQ ID NO: 12970 - DNA, 23 bp, Artificial Sequence
  Description of Artificial Sequence: Synthetic oligonucleotide
  X-linked inhibitor of apoptosis (XIAP) siRNA
gtagttttttgacaggtagacca

SEQ ID NO: 12971 - DNA, 23 bp, Artificial Sequence
  Description of Artificial Sequence: Synthetic oligonucleotide
  X-linked inhibitor of apoptosis (XIAP) siRNA
tagttttttgacaggtagaccat

SEQ ID NO: 12972 - DNA, 23 bp, Artificial Sequence
  Description of Artificial Sequence: Synthetic oligonucleotide
  X-linked inhibitor of apoptosis (XIAP) siRNA
agttttttgacaggtagaccatg

SEQ ID NO: 12973 - DNA, 23 bp, Artificial Sequence
  Description of Artificial Sequence: Synthetic oligonucleotide
  X-linked inhibitor of apoptosis (XIAP) siRNA
gttttttgacaggtagaccatgt

SEQ ID NO: 12974 - DNA, 23 bp, Artificial Sequence
  Description of Artificial Sequence: Synthetic oligonucleotide
  X-linked inhibitor of apoptosis (XIAP) siRNA
ttttttgacaggtagaccatgtc

SEQ ID NO: 12975 - DNA, 23 bp, Artificial Sequence
  Description of Artificial Sequence: Synthetic oligonucleotide
  X-linked inhibitor of apoptosis (XIAP) siRNA
tttttgacaggtagaccatgtct

SEQ ID NO: 12976 - DNA, 23 bp, Artificial Sequence
  Description of Artificial Sequence: Synthetic oligonucleotide
  X-linked inhibitor of apoptosis (XIAP) siRNA
ttttgacaggtagaccatgtctt

SEQ ID NO: 12977 - DNA, 23 bp, Artificial Sequence
  Description of Artificial Sequence: Synthetic oligonucleotide
  X-linked inhibitor of apoptosis (XIAP) siRNA
tttgacaggtagaccatgtctta

SEQ ID NO: 12978 - DNA, 23 bp, Artificial Sequence
  Description of Artificial Sequence: Synthetic oligonucleotide
  X-linked inhibitor of apoptosis (XIAP) siRNA
ttgacaggtagaccatgtcttat

SEQ ID NO: 12979 - DNA, 23 bp, Artificial Sequence
  Description of Artificial Sequence: Synthetic oligonucleotide
  X-linked inhibitor of apoptosis (XIAP) siRNA
tgacaggtagaccatgtcttatc

SEQ ID NO: 12980 - DNA, 23 bp, Artificial Sequence
  Description of Artificial Sequence: Synthetic oligonucleotide
  X-linked inhibitor of apoptosis (XIAP) siRNA
gacaggtagaccatgtcttatct

SEQ ID NO: 12981 - DNA, 23 bp, Artificial Sequence
  Description of Artificial Sequence: Synthetic oligonucleotide
  X-linked inhibitor of apoptosis (XIAP) siRNA
acaggtagaccatgtcttatctt

SEQ ID NO: 12982 - DNA, 23 bp, Artificial Sequence
  Description of Artificial Sequence: Synthetic oligonucleotide
  X-linked inhibitor of apoptosis (XIAP) siRNA
caggtagaccatgtcttatcttg

SEQ ID NO: 12983 - DNA, 23 bp, Artificial Sequence
  Description of Artificial Sequence: Synthetic oligonucleotide
  X-linked inhibitor of apoptosis (XIAP) siRNA
aggtagaccatgtcttatcttgt

SEQ ID NO: 12984 - DNA, 23 bp, Artificial Sequence
  Description of Artificial Sequence: Synthetic oligonucleotide
  X-linked inhibitor of apoptosis (XIAP) siRNA
ggtagaccatgtcttatcttgtt

SEQ ID NO: 12985 - DNA, 23 bp, Artificial Sequence
  Description of Artificial Sequence: Synthetic oligonucleotide
  X-linked inhibitor of apoptosis (XIAP) siRNA
gtagaccatgtcttatcttgttt

SEQ ID NO: 12986 - DNA, 23 bp, Artificial Sequence
  Description of Artificial Sequence: Synthetic oligonucleotide
  X-linked inhibitor of apoptosis (XIAP) siRNA
tagaccatgtcttatcttgtttc

SEQ ID NO: 12987 - DNA, 23 bp, Artificial Sequence
  Description of Artificial Sequence: Synthetic oligonucleotide
  X-linked inhibitor of apoptosis (XIAP) siRNA
agaccatgtcttatcttgtttca

SEQ ID NO: 12988 - DNA, 23 bp, Artificial Sequence
  Description of Artificial Sequence: Synthetic oligonucleotide
  X-linked inhibitor of apoptosis (XIAP) siRNA
gaccatgtcttatcttgtttcaa

SEQ ID NO: 12989 - DNA, 23 bp, Artificial Sequence
  Description of Artificial Sequence: Synthetic oligonucleotide
  X-linked inhibitor of apoptosis (XIAP) siRNA
accatgtcttatcttgtttcaaa

SEQ ID NO: 12990 - DNA, 23 bp, Artificial Sequence
  Description of Artificial Sequence: Synthetic oligonucleotide
  X-linked inhibitor of apoptosis (XIAP) siRNA
ccatgtcttatcttgtttcaaaa

SEQ ID NO: 12991 - DNA, 23 bp, Artificial Sequence
  Description of Artificial Sequence: Synthetic oligonucleotide
  X-linked inhibitor of apoptosis (XIAP) siRNA
catgtcttatcttgtttcaaaat

SEQ ID NO: 12992 - DNA, 23 bp, Artificial Sequence
  Description of Artificial Sequence: Synthetic oligonucleotide
  X-linked inhibitor of apoptosis (XIAP) siRNA
atgtcttatcttgtttcaaaata

SEQ ID NO: 12993 - DNA, 23 bp, Artificial Sequence
  Description of Artificial Sequence: Synthetic oligonucleotide
  X-linked inhibitor of apoptosis (XIAP) siRNA
tgtcttatcttgtttcaaaataa

SEQ ID NO: 12994 - DNA, 23 bp, Artificial Sequence
  Description of Artificial Sequence: Synthetic oligonucleotide
  X-linked inhibitor of apoptosis (XIAP) siRNA
gtcttatcttgtttcaaaataag

SEQ ID NO: 12995 - DNA, 23 bp, Artificial Sequence
  Description of Artificial Sequence: Synthetic oligonucleotide
  X-linked inhibitor of apoptosis (XIAP) siRNA
tcttatcttgtttcaaaataagt

SEQ ID NO: 12996 - DNA, 23 bp, Artificial Sequence
  Description of Artificial Sequence: Synthetic oligonucleotide
  X-linked inhibitor of apoptosis (XIAP) siRNA
cttatcttgtttcaaaataagta

SEQ ID NO: 12997 - DNA, 23 bp, Artificial Sequence
  Description of Artificial Sequence: Synthetic oligonucleotide
  X-linked inhibitor of apoptosis (XIAP) siRNA
ttatcttgtttcaaaataagtat

SEQ ID NO: 12998 - DNA, 23 bp, Artificial Sequence
  Description of Artificial Sequence: Synthetic oligonucleotide
  X-linked inhibitor of apoptosis (XIAP) siRNA
tatcttgtttcaaaataagtatt

SEQ ID NO: 12999 - DNA, 23 bp, Artificial Sequence
  Description of Artificial Sequence: Synthetic oligonucleotide
  X-linked inhibitor of apoptosis (XIAP) siRNA
atcttgtttcaaaataagtattt

SEQ ID NO: 13000 - DNA, 23 bp, Artificial Sequence
  Description of Artificial Sequence: Synthetic oligonucleotide
  X-linked inhibitor of apoptosis (XIAP) siRNA
tcttgtttcaaaataagtatttc

SEQ ID NO: 13001 - DNA, 23 bp, Artificial Sequence
  Description of Artificial Sequence: Synthetic oligonucleotide
  X-linked inhibitor of apoptosis (XIAP) siRNA
cttgtttcaaaataagtatttct

SEQ ID NO: 13002 - DNA, 23 bp, Artificial Sequence
  Description of Artificial Sequence: Synthetic oligonucleotide
  X-linked inhibitor of apoptosis (XIAP) siRNA
ttgtttcaaaataagtatttctg

SEQ ID NO: 13003 - DNA, 23 bp, Artificial Sequence
  Description of Artificial Sequence: Synthetic oligonucleotide
  X-linked inhibitor of apoptosis (XIAP) siRNA
tgtttcaaaataagtatttctga

SEQ ID NO: 13004 - DNA, 23 bp, Artificial Sequence
  Description of Artificial Sequence: Synthetic oligonucleotide
  X-linked inhibitor of apoptosis (XIAP) siRNA
gtttcaaaataagtatttctgat

SEQ ID NO: 13005 - DNA, 23 bp, Artificial Sequence
  Description of Artificial Sequence: Synthetic oligonucleotide
  X-linked inhibitor of apoptosis (XIAP) siRNA
tttcaaaataagtatttctgatt

SEQ ID NO: 13006 - DNA, 23 bp, Artificial Sequence
  Description of Artificial Sequence: Synthetic oligonucleotide
  X-linked inhibitor of apoptosis (XIAP) siRNA
ttcaaaataagtatttctgattt

SEQ ID NO: 13007 - DNA, 23 bp, Artificial Sequence
  Description of Artificial Sequence: Synthetic oligonucleotide
  X-linked inhibitor of apoptosis (XIAP) siRNA
tcaaaataagtatttctgatttt

SEQ ID NO: 13008 - DNA, 23 bp, Artificial Sequence
  Description of Artificial Sequence: Synthetic oligonucleotide
  X-linked inhibitor of apoptosis (XIAP) siRNA
caaaataagtatttctgattttg

SEQ ID NO: 13009 - DNA, 23 bp, Artificial Sequence
  Description of Artificial Sequence: Synthetic oligonucleotide
  X-linked inhibitor of apoptosis (XIAP) siRNA
aaaataagtatttctgattttgt

SEQ ID NO: 13010 - DNA, 23 bp, Artificial Sequence
  Description of Artificial Sequence: Synthetic oligonucleotide
  X-linked inhibitor of apoptosis (XIAP) siRNA
aaataagtatttctgattttgta

SEQ ID NO: 13011 - DNA, 23 bp, Artificial Sequence
  Description of Artificial Sequence: Synthetic oligonucleotide
  X-linked inhibitor of apoptosis (XIAP) siRNA
aataagtatttctgattttgtaa

SEQ ID NO: 13012 - DNA, 23 bp, Artificial Sequence
  Description of Artificial Sequence: Synthetic oligonucleotide
  X-linked inhibitor of apoptosis (XIAP) siRNA
ataagtatttctgattttgtaaa

SEQ ID NO: 13013 - DNA, 23 bp, Artificial Sequence
  Description of Artificial Sequence: Synthetic oligonucleotide
  X-linked inhibitor of apoptosis (XIAP) siRNA
taagtatttctgattttgtaaaa

SEQ ID NO: 13014 - DNA, 23 bp, Artificial Sequence
  Description of Artificial Sequence: Synthetic oligonucleotide
  X-linked inhibitor of apoptosis (XIAP) siRNA
aagtatttctgattttgtaaaat

SEQ ID NO: 13015 - DNA, 23 bp, Artificial Sequence
  Description of Artificial Sequence: Synthetic oligonucleotide
  X-linked inhibitor of apoptosis (XIAP) siRNA
agtatttctgattttgtaaaatg

SEQ ID NO: 13016 - DNA, 23 bp, Artificial Sequence
  Description of Artificial Sequence: Synthetic oligonucleotide
  X-linked inhibitor of apoptosis (XIAP) siRNA
gtatttctgattttgtaaaatga

SEQ ID NO: 13017 - DNA, 23 bp, Artificial Sequence
  Description of Artificial Sequence: Synthetic oligonucleotide
  X-linked inhibitor of apoptosis (XIAP) siRNA
tatttctgattttgtaaaatgaa

SEQ ID NO: 13018 - DNA, 23 bp, Artificial Sequence
  Description of Artificial Sequence: Synthetic oligonucleotide
  X-linked inhibitor of apoptosis (XIAP) siRNA
atttctgattttgtaaaatgaaa

SEQ ID NO: 13019 - DNA, 23 bp, Artificial Sequence
  Description of Artificial Sequence: Synthetic oligonucleotide
  X-linked inhibitor of apoptosis (XIAP) siRNA
tttctgattttgtaaaatgaaat

SEQ ID NO: 13020 - DNA, 23 bp, Artificial Sequence
  Description of Artificial Sequence: Synthetic oligonucleotide
  X-linked inhibitor of apoptosis (XIAP) siRNA
ttctgattttgtaaaatgaaata

SEQ ID NO: 13021 - DNA, 23 bp, Artificial Sequence
  Description of Artificial Sequence: Synthetic oligonucleotide
  X-linked inhibitor of apoptosis (XIAP) siRNA
tctgattttgtaaaatgaaatat

SEQ ID NO: 13022 - DNA, 23 bp, Artificial Sequence
  Description of Artificial Sequence: Synthetic oligonucleotide
  X-linked inhibitor of apoptosis (XIAP) siRNA
ctgattttgtaaaatgaaatata

SEQ ID NO: 13023 - DNA, 23 bp, Artificial Sequence
  Description of Artificial Sequence: Synthetic oligonucleotide
  X-linked inhibitor of apoptosis (XIAP) siRNA
tgattttgtaaaatgaaatataa

SEQ ID NO: 13024 - DNA, 23 bp, Artificial Sequence
  Description of Artificial Sequence: Synthetic oligonucleotide
  X-linked inhibitor of apoptosis (XIAP) siRNA
gattttgtaaaatgaaatataaa

SEQ ID NO: 13025 - DNA, 23 bp, Artificial Sequence
  Description of Artificial Sequence: Synthetic oligonucleotide
  X-linked inhibitor of apoptosis (XIAP) siRNA
attttgtaaaatgaaatataaaa

SEQ ID NO: 13026 - DNA, 23 bp, Artificial Sequence
  Description of Artificial Sequence: Synthetic oligonucleotide
  X-linked inhibitor of apoptosis (XIAP) siRNA
ttttgtaaaatgaaatataaaat

SEQ ID NO: 13027 - DNA, 23 bp, Artificial Sequence
  Description of Artificial Sequence: Synthetic oligonucleotide
  X-linked inhibitor of apoptosis (XIAP) siRNA
tttgtaaaatgaaatataaaata

SEQ ID NO: 13028 - DNA, 23 bp, Artificial Sequence
  Description of Artificial Sequence: Synthetic oligonucleotide
  X-linked inhibitor of apoptosis (XIAP) siRNA
ttgtaaaatgaaatataaaatat

SEQ ID NO: 13029 - DNA, 23 bp, Artificial Sequence
  Description of Artificial Sequence: Synthetic oligonucleotide
  X-linked inhibitor of apoptosis (XIAP) siRNA
tgtaaaatgaaatataaaatatg

SEQ ID NO: 13030 - DNA, 23 bp, Artificial Sequence
  Description of Artificial Sequence: Synthetic oligonucleotide
  X-linked inhibitor of apoptosis (XIAP) siRNA
gtaaaatgaaatataaaatatgt

SEQ ID NO: 13031 - DNA, 23 bp, Artificial Sequence
  Description of Artificial Sequence: Synthetic oligonucleotide
  X-linked inhibitor of apoptosis (XIAP) siRNA
taaaatgaaatataaaatatgtc

SEQ ID NO: 13032 - DNA, 23 bp, Artificial Sequence
  Description of Artificial Sequence: Synthetic oligonucleotide
  X-linked inhibitor of apoptosis (XIAP) siRNA
aaaatgaaatataaaatatgtct

SEQ ID NO: 13033 - DNA, 23 bp, Artificial Sequence
  Description of Artificial Sequence: Synthetic oligonucleotide
  X-linked inhibitor of apoptosis (XIAP) siRNA
aaatgaaatataaaatatgtctc

SEQ ID NO: 13034 - DNA, 23 bp, Artificial Sequence
  Description of Artificial Sequence: Synthetic oligonucleotide
  X-linked inhibitor of apoptosis (XIAP) siRNA
aatgaaatataaaatatgtctca

SEQ ID NO: 13035 - DNA, 23 bp, Artificial Sequence
  Description of Artificial Sequence: Synthetic oligonucleotide
  X-linked inhibitor of apoptosis (XIAP) siRNA
atgaaatataaaatatgtctcag

SEQ ID NO: 13036 - DNA, 23 bp, Artificial Sequence
  Description of Artificial Sequence: Synthetic oligonucleotide
  X-linked inhibitor of apoptosis (XIAP) siRNA
tgaaatataaaatatgtctcaga

SEQ ID NO: 13037 - DNA, 23 bp, Artificial Sequence
  Description of Artificial Sequence: Synthetic oligonucleotide
  X-linked inhibitor of apoptosis (XIAP) siRNA
gaaatataaaatatgtctcagat

SEQ ID NO: 13038 - DNA, 23 bp, Artificial Sequence
  Description of Artificial Sequence: Synthetic oligonucleotide
  X-linked inhibitor of apoptosis (XIAP) siRNA
aaatataaaatatgtctcagatc

SEQ ID NO: 13039 - DNA, 23 bp, Artificial Sequence
  Description of Artificial Sequence: Synthetic oligonucleotide
  X-linked inhibitor of apoptosis (XIAP) siRNA
aatataaaatatgtctcagatct

SEQ ID NO: 13040 - DNA, 23 bp, Artificial Sequence
  Description of Artificial Sequence: Synthetic oligonucleotide
  X-linked inhibitor of apoptosis (XIAP) siRNA
atataaaatatgtctcagatctt

SEQ ID NO: 13041 - DNA, 23 bp, Artificial Sequence
  Description of Artificial Sequence: Synthetic oligonucleotide
  X-linked inhibitor of apoptosis (XIAP) siRNA
tataaaatatgtctcagatcttc

SEQ ID NO: 13042 - DNA, 23 bp, Artificial Sequence
  Description of Artificial Sequence: Synthetic oligonucleotide
  X-linked inhibitor of apoptosis (XIAP) siRNA
ataaaatatgtctcagatcttcc

SEQ ID NO: 13043 - DNA, 23 bp, Artificial Sequence
  Description of Artificial Sequence: Synthetic oligonucleotide
  X-linked inhibitor of apoptosis (XIAP) siRNA
taaaatatgtctcagatcttcca

SEQ ID NO: 13044 - DNA, 23 bp, Artificial Sequence
  Description of Artificial Sequence: Synthetic oligonucleotide
  X-linked inhibitor of apoptosis (XIAP) siRNA
aaaatatgtctcagatcttccaa

SEQ ID NO: 13045 - DNA, 23 bp, Artificial Sequence
  Description of Artificial Sequence: Synthetic oligonucleotide
  X-linked inhibitor of apoptosis (XIAP) siRNA
aaatatgtctcagatcttccaat

SEQ ID NO: 13046 - DNA, 23 bp, Artificial Sequence
  Description of Artificial Sequence: Synthetic oligonucleotide
  X-linked inhibitor of apoptosis (XIAP) siRNA
aatatgtctcagatcttccaatt

SEQ ID NO: 13047 - DNA, 23 bp, Artificial Sequence
  Description of Artificial Sequence: Synthetic oligonucleotide
  X-linked inhibitor of apoptosis (XIAP) siRNA
atatgtctcagatcttccaatta

SEQ ID NO: 13048 - DNA, 23 bp, Artificial Sequence
  Description of Artificial Sequence: Synthetic oligonucleotide
  X-linked inhibitor of apoptosis (XIAP) siRNA
tatgtctcagatcttccaattaa

SEQ ID NO: 13049 - DNA, 23 bp, Artificial Sequence
  Description of Artificial Sequence: Synthetic oligonucleotide
  X-linked inhibitor of apoptosis (XIAP) siRNA
atgtctcagatcttccaattaat

SEQ ID NO: 13050 - DNA, 23 bp, Artificial Sequence
  Description of Artificial Sequence: Synthetic oligonucleotide
  X-linked inhibitor of apoptosis (XIAP) siRNA
tgtctcagatcttccaattaatt

SEQ ID NO: 13051 - DNA, 23 bp, Artificial Sequence
  Description of Artificial Sequence: Synthetic oligonucleotide
  X-linked inhibitor of apoptosis (XIAP) siRNA
gtctcagatcttccaattaatta

SEQ ID NO: 13052 - DNA, 23 bp, Artificial Sequence
  Description of Artificial Sequence: Synthetic oligonucleotide
  X-linked inhibitor of apoptosis (XIAP) siRNA
tctcagatcttccaattaattag

SEQ ID NO: 13053 - DNA, 23 bp, Artificial Sequence
  Description of Artificial Sequence: Synthetic oligonucleotide
  X-linked inhibitor of apoptosis (XIAP) siRNA
ctcagatcttccaattaattagt

SEQ ID NO: 13054 - DNA, 23 bp, Artificial Sequence
  Description of Artificial Sequence: Synthetic oligonucleotide
  X-linked inhibitor of apoptosis (XIAP) siRNA
tcagatcttccaattaattagta

SEQ ID NO: 13055 - DNA, 23 bp, Artificial Sequence
  Description of Artificial Sequence: Synthetic oligonucleotide
  X-linked inhibitor of apoptosis (XIAP) siRNA
cagatcttccaattaattagtaa

SEQ ID NO: 13056 - DNA, 23 bp, Artificial Sequence
  Description of Artificial Sequence: Synthetic oligonucleotide
  X-linked inhibitor of apoptosis (XIAP) siRNA
agatcttccaattaattagtaag

SEQ ID NO: 13057 - DNA, 23 bp, Artificial Sequence
  Description of Artificial Sequence: Synthetic oligonucleotide
  X-linked inhibitor of apoptosis (XIAP) siRNA
gatcttccaattaattagtaagg

SEQ ID NO: 13058 - DNA, 23 bp, Artificial Sequence
  Description of Artificial Sequence: Synthetic oligonucleotide
  X-linked inhibitor of apoptosis (XIAP) siRNA
atcttccaattaattagtaagga

SEQ ID NO: 13059 - DNA, 23 bp, Artificial Sequence
  Description of Artificial Sequence: Synthetic oligonucleotide
  X-linked inhibitor of apoptosis (XIAP) siRNA
tcttccaattaattagtaaggat

SEQ ID NO: 13060 - DNA, 23 bp, Artificial Sequence
  Description of Artificial Sequence: Synthetic oligonucleotide
  X-linked inhibitor of apoptosis (XIAP) siRNA
cttccaattaattagtaaggatt

SEQ ID NO: 13061 - DNA, 23 bp, Artificial Sequence
  Description of Artificial Sequence: Synthetic oligonucleotide
  X-linked inhibitor of apoptosis (XIAP) siRNA
ttccaattaattagtaaggattc

SEQ ID NO: 13062 - DNA, 23 bp, Artificial Sequence
  Description of Artificial Sequence: Synthetic oligonucleotide
  X-linked inhibitor of apoptosis (XIAP) siRNA
tccaattaattagtaaggattca

SEQ ID NO: 13063 - DNA, 23 bp, Artificial Sequence
  Description of Artificial Sequence: Synthetic oligonucleotide
  X-linked inhibitor of apoptosis (XIAP) siRNA
ccaattaattagtaaggattcat

SEQ ID NO: 13064 - DNA, 23 bp, Artificial Sequence
  Description of Artificial Sequence: Synthetic oligonucleotide
  X-linked inhibitor of apoptosis (XIAP) siRNA
caattaattagtaaggattcatc

SEQ ID NO: 13065 - DNA, 23 bp, Artificial Sequence
  Description of Artificial Sequence: Synthetic oligonucleotide
  X-linked inhibitor of apoptosis (XIAP) siRNA
aattaattagtaaggattcatcc

SEQ ID NO: 13066 - DNA, 23 bp, Artificial Sequence
  Description of Artificial Sequence: Synthetic oligonucleotide
  X-linked inhibitor of apoptosis (XIAP) siRNA
attaattagtaaggattcatcct

SEQ ID NO: 13067 - DNA, 23 bp, Artificial Sequence
  Description of Artificial Sequence: Synthetic oligonucleotide
  X-linked inhibitor of apoptosis (XIAP) siRNA
ttaattagtaaggattcatcctt

SEQ ID NO: 13068 - DNA, 23 bp, Artificial Sequence
  Description of Artificial Sequence: Synthetic oligonucleotide
  X-linked inhibitor of apoptosis (XIAP) siRNA
taattagtaaggattcatcctta

SEQ ID NO: 13069 - DNA, 23 bp, Artificial Sequence
  Description of Artificial Sequence: Synthetic oligonucleotide
  X-linked inhibitor of apoptosis (XIAP) siRNA
aattagtaaggattcatccttaa

SEQ ID NO: 13070 - DNA, 23 bp, Artificial Sequence
  Description of Artificial Sequence: Synthetic oligonucleotide
  X-linked inhibitor of apoptosis (XIAP) siRNA
attagtaaggattcatccttaat

SEQ ID NO: 13071 - DNA, 23 bp, Artificial Sequence
  Description of Artificial Sequence: Synthetic oligonucleotide
  X-linked inhibitor of apoptosis (XIAP) siRNA
ttagtaaggattcatccttaatc

SEQ ID NO: 13072 - DNA, 23 bp, Artificial Sequence
  Description of Artificial Sequence: Synthetic oligonucleotide
  X-linked inhibitor of apoptosis (XIAP) siRNA
tagtaaggattcatccttaatcc

SEQ ID NO: 13073 - DNA, 23 bp, Artificial Sequence
  Description of Artificial Sequence: Synthetic oligonucleotide
  X-linked inhibitor of apoptosis (XIAP) siRNA
agtaaggattcatccttaatcct

SEQ ID NO: 13074 - DNA, 23 bp, Artificial Sequence
  Description of Artificial Sequence: Synthetic oligonucleotide
  X-linked inhibitor of apoptosis (XIAP) siRNA
gtaaggattcatccttaatcctt

SEQ ID NO: 13075 - DNA, 23 bp, Artificial Sequence
  Description of Artificial Sequence: Synthetic oligonucleotide
  X-linked inhibitor of apoptosis (XIAP) siRNA
taaggattcatccttaatccttg

SEQ ID NO: 13076 - DNA, 23 bp, Artificial Sequence
  Description of Artificial Sequence: Synthetic oligonucleotide
  X-linked inhibitor of apoptosis (XIAP) siRNA
aaggattcatccttaatccttgc

SEQ ID NO: 13077 - DNA, 23 bp, Artificial Sequence
  Description of Artificial Sequence: Synthetic oligonucleotide
  X-linked inhibitor of apoptosis (XIAP) siRNA
aggattcatccttaatccttgct

SEQ ID NO: 13078 - DNA, 23 bp, Artificial Sequence
  Description of Artificial Sequence: Synthetic oligonucleotide
  X-linked inhibitor of apoptosis (XIAP) siRNA
ggattcatccttaatccttgcta

SEQ ID NO: 13079 - DNA, 23 bp, Artificial Sequence
  Description of Artificial Sequence: Synthetic oligonucleotide
  X-linked inhibitor of apoptosis (XIAP) siRNA
gattcatccttaatccttgctag

SEQ ID NO: 13080 - DNA, 23 bp, Artificial Sequence
  Description of Artificial Sequence: Synthetic oligonucleotide
  X-linked inhibitor of apoptosis (XIAP) siRNA
attcatccttaatccttgctagt

SEQ ID NO: 13081 - DNA, 23 bp, Artificial Sequence
  Description of Artificial Sequence: Synthetic oligonucleotide
  X-linked inhibitor of apoptosis (XIAP) siRNA
ttcatccttaatccttgctagtt

SEQ ID NO: 13082 - DNA, 23 bp, Artificial Sequence
  Description of Artificial Sequence: Synthetic oligonucleotide
  X-linked inhibitor of apoptosis (XIAP) siRNA
tcatccttaatccttgctagttt

SEQ ID NO: 13083 - DNA, 23 bp, Artificial Sequence
  Description of Artificial Sequence: Synthetic oligonucleotide
  X-linked inhibitor of apoptosis (XIAP) siRNA
catccttaatccttgctagttta

SEQ ID NO: 13084 - DNA, 23 bp, Artificial Sequence
  Description of Artificial Sequence: Synthetic oligonucleotide
  X-linked inhibitor of apoptosis (XIAP) siRNA
atccttaatccttgctagtttaa

SEQ ID NO: 13085 - DNA, 23 bp, Artificial Sequence
  Description of Artificial Sequence: Synthetic oligonucleotide
  X-linked inhibitor of apoptosis (XIAP) siRNA
tccttaatccttgctagtttaag

SEQ ID NO: 13086 - DNA, 23 bp, Artificial Sequence
  Description of Artificial Sequence: Synthetic oligonucleotide
  X-linked inhibitor of apoptosis (XIAP) siRNA
ccttaatccttgctagtttaagc

SEQ ID NO: 13087 - DNA, 23 bp, Artificial Sequence
  Description of Artificial Sequence: Synthetic oligonucleotide
  X-linked inhibitor of apoptosis (XIAP) siRNA
cttaatccttgctagtttaagcc

SEQ ID NO: 13088 - DNA, 23 bp, Artificial Sequence
  Description of Artificial Sequence: Synthetic oligonucleotide
  X-linked inhibitor of apoptosis (XIAP) siRNA
ttaatccttgctagtttaagcct

SEQ ID NO: 13089 - DNA, 23 bp, Artificial Sequence
  Description of Artificial Sequence: Synthetic oligonucleotide
  X-linked inhibitor of apoptosis (XIAP) siRNA
taatccttgctagtttaagcctg

SEQ ID NO: 13090 - DNA, 23 bp, Artificial Sequence
  Description of Artificial Sequence: Synthetic oligonucleotide
  X-linked inhibitor of apoptosis (XIAP) siRNA
aatccttgctagtttaagcctgc

SEQ ID NO: 13091 - DNA, 23 bp, Artificial Sequence
  Description of Artificial Sequence: Synthetic oligonucleotide
  X-linked inhibitor of apoptosis (XIAP) siRNA
atccttgctagtttaagcctgcc

SEQ ID NO: 13092 - DNA, 23 bp, Artificial Sequence
  Description of Artificial Sequence: Synthetic oligonucleotide
  X-linked inhibitor of apoptosis (XIAP) siRNA
tccttgctagtttaagcctgcct

SEQ ID NO: 13093 - DNA, 23 bp, Artificial Sequence
  Description of Artificial Sequence: Synthetic oligonucleotide
  X-linked inhibitor of apoptosis (XIAP) siRNA
ccttgctagtttaagcctgccta

SEQ ID NO: 13094 - DNA, 23 bp, Artificial Sequence
  Description of Artificial Sequence: Synthetic oligonucleotide
  X-linked inhibitor of apoptosis (XIAP) siRNA
cttgctagtttaagcctgcctaa

SEQ ID NO: 13095 - DNA, 23 bp, Artificial Sequence
  Description of Artificial Sequence: Synthetic oligonucleotide
  X-linked inhibitor of apoptosis (XIAP) siRNA
ttgctagtttaagcctgcctaag

SEQ ID NO: 13096 - DNA, 23 bp, Artificial Sequence
  Description of Artificial Sequence: Synthetic oligonucleotide
  X-linked inhibitor of apoptosis (XIAP) siRNA
tgctagtttaagcctgcctaagt

SEQ ID NO: 13097 - DNA, 23 bp, Artificial Sequence
  Description of Artificial Sequence: Synthetic oligonucleotide
  X-linked inhibitor of apoptosis (XIAP) siRNA
gctagtttaagcctgcctaagtc

SEQ ID NO: 13098 - DNA, 23 bp, Artificial Sequence
  Description of Artificial Sequence: Synthetic oligonucleotide
  X-linked inhibitor of apoptosis (XIAP) siRNA
ctagtttaagcctgcctaagtca

SEQ ID NO: 13099 - DNA, 23 bp, Artificial Sequence
  Description of Artificial Sequence: Synthetic oligonucleotide
  X-linked inhibitor of apoptosis (XIAP) siRNA
tagtttaagcctgcctaagtcac

SEQ ID NO: 13100 - DNA, 23 bp, Artificial Sequence
  Description of Artificial Sequence: Synthetic oligonucleotide
  X-linked inhibitor of apoptosis (XIAP) siRNA
agtttaagcctgcctaagtcact

SEQ ID NO: 13101 - DNA, 23 bp, Artificial Sequence
  Description of Artificial Sequence: Synthetic oligonucleotide
  X-linked inhibitor of apoptosis (XIAP) siRNA
gtttaagcctgcctaagtcactt

SEQ ID NO: 13102 - DNA, 23 bp, Artificial Sequence
  Description of Artificial Sequence: Synthetic oligonucleotide
  X-linked inhibitor of apoptosis (XIAP) siRNA
tttaagcctgcctaagtcacttt

SEQ ID NO: 13103 - DNA, 23 bp, Artificial Sequence
  Description of Artificial Sequence: Synthetic oligonucleotide
  X-linked inhibitor of apoptosis (XIAP) siRNA
ttaagcctgcctaagtcacttta

SEQ ID NO: 13104 - DNA, 23 bp, Artificial Sequence
  Description of Artificial Sequence: Synthetic oligonucleotide
  X-linked inhibitor of apoptosis (XIAP) siRNA
taagcctgcctaagtcactttac

SEQ ID NO: 13105 - DNA, 23 bp, Artificial Sequence
  Description of Artificial Sequence: Synthetic oligonucleotide
  X-linked inhibitor of apoptosis (XIAP) siRNA
aagcctgcctaagtcactttact

SEQ ID NO: 13106 - DNA, 23 bp, Artificial Sequence
  Description of Artificial Sequence: Synthetic oligonucleotide
  X-linked inhibitor of apoptosis (XIAP) siRNA
agcctgcctaagtcactttacta

SEQ ID NO: 13107 - DNA, 23 bp, Artificial Sequence
  Description of Artificial Sequence: Synthetic oligonucleotide
  X-linked inhibitor of apoptosis (XIAP) siRNA
gcctgcctaagtcactttactaa

SEQ ID NO: 13108 - DNA, 23 bp, Artificial Sequence
  Description of Artificial Sequence: Synthetic oligonucleotide
  X-linked inhibitor of apoptosis (XIAP) siRNA
cctgcctaagtcactttactaaa

SEQ ID NO: 13109 - DNA, 23 bp, Artificial Sequence
  Description of Artificial Sequence: Synthetic oligonucleotide
  X-linked inhibitor of apoptosis (XIAP) siRNA
ctgcctaagtcactttactaaaa

SEQ ID NO: 13110 - DNA, 23 bp, Artificial Sequence
  Description of Artificial Sequence: Synthetic oligonucleotide
  X-linked inhibitor of apoptosis (XIAP) siRNA
tgcctaagtcactttactaaaag

SEQ ID NO: 13111 - DNA, 23 bp, Artificial Sequence
  Description of Artificial Sequence: Synthetic oligonucleotide
  X-linked inhibitor of apoptosis (XIAP) siRNA
gcctaagtcactttactaaaaga

SEQ ID NO: 13112 - DNA, 23 bp, Artificial Sequence
  Description of Artificial Sequence: Synthetic oligonucleotide
  X-linked inhibitor of apoptosis (XIAP) siRNA
cctaagtcactttactaaaagat

SEQ ID NO: 13113 - DNA, 23 bp, Artificial Sequence
  Description of Artificial Sequence: Synthetic oligonucleotide
  X-linked inhibitor of apoptosis (XIAP) siRNA
ctaagtcactttactaaaagatc

SEQ ID NO: 13114 - DNA, 23 bp, Artificial Sequence
  Description of Artificial Sequence: Synthetic oligonucleotide
  X-linked inhibitor of apoptosis (XIAP) siRNA
taagtcactttactaaaagatct

SEQ ID NO: 13115 - DNA, 23 bp, Artificial Sequence
  Description of Artificial Sequence: Synthetic oligonucleotide
  X-linked inhibitor of apoptosis (XIAP) siRNA
aagtcactttactaaaagatctt

SEQ ID NO: 13116 - DNA, 23 bp, Artificial Sequence
  Description of Artificial Sequence: Synthetic oligonucleotide
  X-linked inhibitor of apoptosis (XIAP) siRNA
agtcactttactaaaagatcttt

SEQ ID NO: 13117 - DNA, 23 bp, Artificial Sequence
  Description of Artificial Sequence: Synthetic oligonucleotide
  X-linked inhibitor of apoptosis (XIAP) siRNA
gtcactttactaaaagatctttg

SEQ ID NO: 13118 - DNA, 23 bp, Artificial Sequence
  Description of Artificial Sequence: Synthetic oligonucleotide
  X-linked inhibitor of apoptosis (XIAP) siRNA
tcactttactaaaagatctttgt

SEQ ID NO: 13119 - DNA, 23 bp, Artificial Sequence
  Description of Artificial Sequence: Synthetic oligonucleotide
  X-linked inhibitor of apoptosis (XIAP) siRNA
cactttactaaaagatctttgtt

SEQ ID NO: 13120 - DNA, 23 bp, Artificial Sequence
  Description of Artificial Sequence: Synthetic oligonucleotide
  X-linked inhibitor of apoptosis (XIAP) siRNA
actttactaaaagatctttgtta

SEQ ID NO: 13121 - DNA, 23 bp, Artificial Sequence
  Description of Artificial Sequence: Synthetic oligonucleotide
  X-linked inhibitor of apoptosis (XIAP) siRNA
ctttactaaaagatctttgttaa

SEQ ID NO: 13122 - DNA, 23 bp, Artificial Sequence
  Description of Artificial Sequence: Synthetic oligonucleotide
  X-linked inhibitor of apoptosis (XIAP) siRNA
tttactaaaagatctttgttaac

SEQ ID NO: 13123 - DNA, 23 bp, Artificial Sequence
  Description of Artificial Sequence: Synthetic oligonucleotide
  X-linked inhibitor of apoptosis (XIAP) siRNA
ttactaaaagatctttgttaact

SEQ ID NO: 13124 - DNA, 23 bp, Artificial Sequence
  Description of Artificial Sequence: Synthetic oligonucleotide
  X-linked inhibitor of apoptosis (XIAP) siRNA
tactaaaagatctttgttaactc

SEQ ID NO: 13125 - DNA, 23 bp, Artificial Sequence
  Description of Artificial Sequence: Synthetic oligonucleotide
  X-linked inhibitor of apoptosis (XIAP) siRNA
actaaaagatctttgttaactca

SEQ ID NO: 13126 - DNA, 23 bp, Artificial Sequence
  Description of Artificial Sequence: Synthetic oligonucleotide
  X-linked inhibitor of apoptosis (XIAP) siRNA
ctaaaagatctttgttaactcag

SEQ ID NO: 13127 - DNA, 23 bp, Artificial Sequence
  Description of Artificial Sequence: Synthetic oligonucleotide
  X-linked inhibitor of apoptosis (XIAP) siRNA
taaaagatctttgttaactcagt

SEQ ID NO: 13128 - DNA, 23 bp, Artificial Sequence
  Description of Artificial Sequence: Synthetic oligonucleotide
  X-linked inhibitor of apoptosis (XIAP) siRNA
aaaagatctttgttaactcagta

SEQ ID NO: 13129 - DNA, 23 bp, Artificial Sequence
  Description of Artificial Sequence: Synthetic oligonucleotide
  X-linked inhibitor of apoptosis (XIAP) siRNA
aaagatctttgttaactcagtat

SEQ ID NO: 13130 - DNA, 23 bp, Artificial Sequence
  Description of Artificial Sequence: Synthetic oligonucleotide
  X-linked inhibitor of apoptosis (XIAP) siRNA
aagatctttgttaactcagtatt

SEQ ID NO: 13131 - DNA, 23 bp, Artificial Sequence
  Description of Artificial Sequence: Synthetic oligonucleotide
  X-linked inhibitor of apoptosis (XIAP) siRNA
agatctttgttaactcagtattt

SEQ ID NO: 13132 - DNA, 23 bp, Artificial Sequence
  Description of Artificial Sequence: Synthetic oligonucleotide
  X-linked inhibitor of apoptosis (XIAP) siRNA
gatctttgttaactcagtatttt

SEQ ID NO: 13133 - DNA, 23 bp, Artificial Sequence
  Description of Artificial Sequence: Synthetic oligonucleotide
  X-linked inhibitor of apoptosis (XIAP) siRNA
atctttgttaactcagtatttta

SEQ ID NO: 13134 - DNA, 23 bp, Artificial Sequence
  Description of Artificial Sequence: Synthetic oligonucleotide
  X-linked inhibitor of apoptosis (XIAP) siRNA
tctttgttaactcagtattttaa

SEQ ID NO: 13135 - DNA, 23 bp, Artificial Sequence
  Description of Artificial Sequence: Synthetic oligonucleotide
  X-linked inhibitor of apoptosis (XIAP) siRNA
ctttgttaactcagtattttaaa

SEQ ID NO: 13136 - DNA, 23 bp, Artificial Sequence
  Description of Artificial Sequence: Synthetic oligonucleotide
  X-linked inhibitor of apoptosis (XIAP) siRNA
tttgttaactcagtattttaaac

SEQ ID NO: 13137 - DNA, 23 bp, Artificial Sequence
  Description of Artificial Sequence: Synthetic oligonucleotide
  X-linked inhibitor of apoptosis (XIAP) siRNA
ttgttaactcagtattttaaaca

SEQ ID NO: 13138 - DNA, 23 bp, Artificial Sequence
  Description of Artificial Sequence: Synthetic oligonucleotide
  X-linked inhibitor of apoptosis (XIAP) siRNA
tgttaactcagtattttaaacat

SEQ ID NO: 13139 - DNA, 23 bp, Artificial Sequence
  Description of Artificial Sequence: Synthetic oligonucleotide
  X-linked inhibitor of apoptosis (XIAP) siRNA
gttaactcagtattttaaacatc

SEQ ID NO: 13140 - DNA, 23 bp, Artificial Sequence
  Description of Artificial Sequence: Synthetic oligonucleotide
  X-linked inhibitor of apoptosis (XIAP) siRNA
ttaactcagtattttaaacatct

SEQ ID NO: 13141 - DNA, 23 bp, Artificial Sequence
  Description of Artificial Sequence: Synthetic oligonucleotide
  X-linked inhibitor of apoptosis (XIAP) siRNA
taactcagtattttaaacatctg

SEQ ID NO: 13142 - DNA, 23 bp, Artificial Sequence
  Description of Artificial Sequence: Synthetic oligonucleotide
  X-linked inhibitor of apoptosis (XIAP) siRNA
aactcagtattttaaacatctgt

SEQ ID NO: 13143 - DNA, 23 bp, Artificial Sequence
  Description of Artificial Sequence: Synthetic oligonucleotide
  X-linked inhibitor of apoptosis (XIAP) siRNA
actcagtattttaaacatctgtc

SEQ ID NO: 13144 - DNA, 23 bp, Artificial Sequence
  Description of Artificial Sequence: Synthetic oligonucleotide
  X-linked inhibitor of apoptosis (XIAP) siRNA
ctcagtattttaaacatctgtca

SEQ ID NO: 13145 - DNA, 23 bp, Artificial Sequence
  Description of Artificial Sequence: Synthetic oligonucleotide
  X-linked inhibitor of apoptosis (XIAP) siRNA
tcagtattttaaacatctgtcag

SEQ ID NO: 13146 - DNA, 23 bp, Artificial Sequence
  Description of Artificial Sequence: Synthetic oligonucleotide
  X-linked inhibitor of apoptosis (XIAP) siRNA
cagtattttaaacatctgtcagc

SEQ ID NO: 13147 - DNA, 23 bp, Artificial Sequence
  Description of Artificial Sequence: Synthetic oligonucleotide
  X-linked inhibitor of apoptosis (XIAP) siRNA
agtattttaaacatctgtcagct

SEQ ID NO: 13148 - DNA, 23 bp, Artificial Sequence
  Description of Artificial Sequence: Synthetic oligonucleotide
  X-linked inhibitor of apoptosis (XIAP) siRNA
gtattttaaacatctgtcagctt

SEQ ID NO: 13149 - DNA, 23 bp, Artificial Sequence
  Description of Artificial Sequence: Synthetic oligonucleotide
  X-linked inhibitor of apoptosis (XIAP) siRNA
tattttaaacatctgtcagctta

SEQ ID NO: 13150 - DNA, 23 bp, Artificial Sequence
  Description of Artificial Sequence: Synthetic oligonucleotide
  X-linked inhibitor of apoptosis (XIAP) siRNA
attttaaacatctgtcagcttat

SEQ ID NO: 13151 - DNA, 23 bp, Artificial Sequence
  Description of Artificial Sequence: Synthetic oligonucleotide
  X-linked inhibitor of apoptosis (XIAP) siRNA
ttttaaacatctgtcagcttatg

SEQ ID NO: 13152 - DNA, 23 bp, Artificial Sequence
  Description of Artificial Sequence: Synthetic oligonucleotide
  X-linked inhibitor of apoptosis (XIAP) siRNA
tttaaacatctgtcagcttatgt

SEQ ID NO: 13153 - DNA, 23 bp, Artificial Sequence
  Description of Artificial Sequence: Synthetic oligonucleotide
  X-linked inhibitor of apoptosis (XIAP) siRNA
ttaaacatctgtcagcttatgta

SEQ ID NO: 13154 - DNA, 23 bp, Artificial Sequence
  Description of Artificial Sequence: Synthetic oligonucleotide
  X-linked inhibitor of apoptosis (XIAP) siRNA
taaacatctgtcagcttatgtag

SEQ ID NO: 13155 - DNA, 23 bp, Artificial Sequence
  Description of Artificial Sequence: Synthetic oligonucleotide
  X-linked inhibitor of apoptosis (XIAP) siRNA
aaacatctgtcagcttatgtagg

SEQ ID NO: 13156 - DNA, 23 bp, Artificial Sequence
  Description of Artificial Sequence: Synthetic oligonucleotide
  X-linked inhibitor of apoptosis (XIAP) siRNA
aacatctgtcagcttatgtaggt

SEQ ID NO: 13157 - DNA, 23 bp, Artificial Sequence
  Description of Artificial Sequence: Synthetic oligonucleotide
  X-linked inhibitor of apoptosis (XIAP) siRNA
acatctgtcagcttatgtaggta

SEQ ID NO: 13158 - DNA, 23 bp, Artificial Sequence
  Description of Artificial Sequence: Synthetic oligonucleotide
  X-linked inhibitor of apoptosis (XIAP) siRNA
catctgtcagcttatgtaggtaa

SEQ ID NO: 13159 - DNA, 23 bp, Artificial Sequence
  Description of Artificial Sequence: Synthetic oligonucleotide
  X-linked inhibitor of apoptosis (XIAP) siRNA
atctgtcagcttatgtaggtaaa

SEQ ID NO: 13160 - DNA, 23 bp, Artificial Sequence
  Description of Artificial Sequence: Synthetic oligonucleotide
  X-linked inhibitor of apoptosis (XIAP) siRNA
tctgtcagcttatgtaggtaaaa

SEQ ID NO: 13161 - DNA, 23 bp, Artificial Sequence
  Description of Artificial Sequence: Synthetic oligonucleotide
  X-linked inhibitor of apoptosis (XIAP) siRNA
ctgtcagcttatgtaggtaaaag

SEQ ID NO: 13162 - DNA, 23 bp, Artificial Sequence
  Description of Artificial Sequence: Synthetic oligonucleotide
  X-linked inhibitor of apoptosis (XIAP) siRNA
tgtcagcttatgtaggtaaaagt

SEQ ID NO: 13163 - DNA, 23 bp, Artificial Sequence
  Description of Artificial Sequence: Synthetic oligonucleotide
  X-linked inhibitor of apoptosis (XIAP) siRNA
gtcagcttatgtaggtaaaagta

SEQ ID NO: 13164 - DNA, 23 bp, Artificial Sequence
  Description of Artificial Sequence: Synthetic oligonucleotide
  X-linked inhibitor of apoptosis (XIAP) siRNA
tcagcttatgtaggtaaaagtag

SEQ ID NO: 13165 - DNA, 23 bp, Artificial Sequence
  Description of Artificial Sequence: Synthetic oligonucleotide
  X-linked inhibitor of apoptosis (XIAP) siRNA
cagcttatgtaggtaaaagtaga

SEQ ID NO: 13166 - DNA, 23 bp, Artificial Sequence
  Description of Artificial Sequence: Synthetic oligonucleotide
  X-linked inhibitor of apoptosis (XIAP) siRNA
agcttatgtaggtaaaagtagaa

SEQ ID NO: 13167 - DNA, 23 bp, Artificial Sequence
  Description of Artificial Sequence: Synthetic oligonucleotide
  X-linked inhibitor of apoptosis (XIAP) siRNA
gcttatgtaggtaaaagtagaag

SEQ ID NO: 13168 - DNA, 23 bp, Artificial Sequence
  Description of Artificial Sequence: Synthetic oligonucleotide
  X-linked inhibitor of apoptosis (XIAP) siRNA
cttatgtaggtaaaagtagaagc

SEQ ID NO: 13169 - DNA, 23 bp, Artificial Sequence
  Description of Artificial Sequence: Synthetic oligonucleotide
  X-linked inhibitor of apoptosis (XIAP) siRNA
ttatgtaggtaaaagtagaagca

SEQ ID NO: 13170 - DNA, 23 bp, Artificial Sequence
  Description of Artificial Sequence: Synthetic oligonucleotide
  X-linked inhibitor of apoptosis (XIAP) siRNA
tatgtaggtaaaagtagaagcat

SEQ ID NO: 13171 - DNA, 23 bp, Artificial Sequence
  Description of Artificial Sequence: Synthetic oligonucleotide
  X-linked inhibitor of apoptosis (XIAP) siRNA
atgtaggtaaaagtagaagcatg

SEQ ID NO: 13172 - DNA, 23 bp, Artificial Sequence
  Description of Artificial Sequence: Synthetic oligonucleotide
  X-linked inhibitor of apoptosis (XIAP) siRNA
tgtaggtaaaagtagaagcatgt

SEQ ID NO: 13173 - DNA, 23 bp, Artificial Sequence
  Description of Artificial Sequence: Synthetic oligonucleotide
  X-linked inhibitor of apoptosis (XIAP) siRNA
gtaggtaaaagtagaagcatgtt

SEQ ID NO: 13174 - DNA, 23 bp, Artificial Sequence
  Description of Artificial Sequence: Synthetic oligonucleotide
  X-linked inhibitor of apoptosis (XIAP) siRNA
taggtaaaagtagaagcatgttt

SEQ ID NO: 13175 - DNA, 23 bp, Artificial Sequence
  Description of Artificial Sequence: Synthetic oligonucleotide
  X-linked inhibitor of apoptosis (XIAP) siRNA
aggtaaaagtagaagcatgtttg

SEQ ID NO: 13176 - DNA, 23 bp, Artificial Sequence
  Description of Artificial Sequence: Synthetic oligonucleotide
  X-linked inhibitor of apoptosis (XIAP) siRNA
ggtaaaagtagaagcatgtttgt

SEQ ID NO: 13177 - DNA, 23 bp, Artificial Sequence
  Description of Artificial Sequence: Synthetic oligonucleotide
  X-linked inhibitor of apoptosis (XIAP) siRNA
gtaaaagtagaagcatgtttgta

SEQ ID NO: 13178 - DNA, 23 bp, Artificial Sequence
  Description of Artificial Sequence: Synthetic oligonucleotide
  X-linked inhibitor of apoptosis (XIAP) siRNA
taaaagtagaagcatgtttgtac

SEQ ID NO: 13179 - DNA, 23 bp, Artificial Sequence
  Description of Artificial Sequence: Synthetic oligonucleotide
  X-linked inhibitor of apoptosis (XIAP) siRNA
aaaagtagaagcatgtttgtaca

SEQ ID NO: 13180 - DNA, 23 bp, Artificial Sequence
  Description of Artificial Sequence: Synthetic oligonucleotide
  X-linked inhibitor of apoptosis (XIAP) siRNA
aaagtagaagcatgtttgtacac

SEQ ID NO: 13181 - DNA, 23 bp, Artificial Sequence
  Description of Artificial Sequence: Synthetic oligonucleotide
  X-linked inhibitor of apoptosis (XIAP) siRNA
aagtagaagcatgtttgtacact

SEQ ID NO: 13182 - DNA, 23 bp, Artificial Sequence
  Description of Artificial Sequence: Synthetic oligonucleotide
  X-linked inhibitor of apoptosis (XIAP) siRNA
agtagaagcatgtttgtacactg

SEQ ID NO: 13183 - DNA, 23 bp, Artificial Sequence
  Description of Artificial Sequence: Synthetic oligonucleotide
  X-linked inhibitor of apoptosis (XIAP) siRNA
gtagaagcatgtttgtacactgc

SEQ ID NO: 13184 - DNA, 23 bp, Artificial Sequence
  Description of Artificial Sequence: Synthetic oligonucleotide
  X-linked inhibitor of apoptosis (XIAP) siRNA
tagaagcatgtttgtacactgct

SEQ ID NO: 13185 - DNA, 23 bp, Artificial Sequence
  Description of Artificial Sequence: Synthetic oligonucleotide
  X-linked inhibitor of apoptosis (XIAP) siRNA
agaagcatgtttgtacactgctt

SEQ ID NO: 13186 - DNA, 23 bp, Artificial Sequence
  Description of Artificial Sequence: Synthetic oligonucleotide
  X-linked inhibitor of apoptosis (XIAP) siRNA
gaagcatgtttgtacactgcttg

SEQ ID NO: 13187 - DNA, 23 bp, Artificial Sequence
  Description of Artificial Sequence: Synthetic oligonucleotide
  X-linked inhibitor of apoptosis (XIAP) siRNA
aagcatgtttgtacactgcttgt

SEQ ID NO: 13188 - DNA, 23 bp, Artificial Sequence
  Description of Artificial Sequence: Synthetic oligonucleotide
  X-linked inhibitor of apoptosis (XIAP) siRNA
agcatgtttgtacactgcttgta

SEQ ID NO: 13189 - DNA, 23 bp, Artificial Sequence
  Description of Artificial Sequence: Synthetic oligonucleotide
  X-linked inhibitor of apoptosis (XIAP) siRNA
gcatgtttgtacactgcttgtag

SEQ ID NO: 13190 - DNA, 23 bp, Artificial Sequence
  Description of Artificial Sequence: Synthetic oligonucleotide
  X-linked inhibitor of apoptosis (XIAP) siRNA
catgtttgtacactgcttgtagt

SEQ ID NO: 13191 - DNA, 23 bp, Artificial Sequence
  Description of Artificial Sequence: Synthetic oligonucleotide
  X-linked inhibitor of apoptosis (XIAP) siRNA
atgtttgtacactgcttgtagtt

SEQ ID NO: 13192 - DNA, 23 bp, Artificial Sequence
  Description of Artificial Sequence: Synthetic oligonucleotide
  X-linked inhibitor of apoptosis (XIAP) siRNA
tgtttgtacactgcttgtagtta

SEQ ID NO: 13193 - DNA, 23 bp, Artificial Sequence
  Description of Artificial Sequence: Synthetic oligonucleotide
  X-linked inhibitor of apoptosis (XIAP) siRNA
gtttgtacactgcttgtagttat

SEQ ID NO: 13194 - DNA, 23 bp, Artificial Sequence
  Description of Artificial Sequence: Synthetic oligonucleotide
  X-linked inhibitor of apoptosis (XIAP) siRNA
tttgtacactgcttgtagttata

SEQ ID NO: 13195 - DNA, 23 bp, Artificial Sequence
  Description of Artificial Sequence: Synthetic oligonucleotide
  X-linked inhibitor of apoptosis (XIAP) siRNA
ttgtacactgcttgtagttatag

SEQ ID NO: 13196 - DNA, 23 bp, Artificial Sequence
  Description of Artificial Sequence: Synthetic oligonucleotide
  X-linked inhibitor of apoptosis (XIAP) siRNA
tgtacactgcttgtagttatagt

SEQ ID NO: 13197 - DNA, 23 bp, Artificial Sequence
  Description of Artificial Sequence: Synthetic oligonucleotide
  X-linked inhibitor of apoptosis (XIAP) siRNA
gtacactgcttgtagttatagtg

SEQ ID NO: 13198 - DNA, 23 bp, Artificial Sequence
  Description of Artificial Sequence: Synthetic oligonucleotide
  X-linked inhibitor of apoptosis (XIAP) siRNA
tacactgcttgtagttatagtga

SEQ ID NO: 13199 - DNA, 23 bp, Artificial Sequence
  Description of Artificial Sequence: Synthetic oligonucleotide
  X-linked inhibitor of apoptosis (XIAP) siRNA
acactgcttgtagttatagtgac

SEQ ID NO: 13200 - DNA, 23 bp, Artificial Sequence
  Description of Artificial Sequence: Synthetic oligonucleotide
  X-linked inhibitor of apoptosis (XIAP) siRNA
cactgcttgtagttatagtgaca

SEQ ID NO: 13201 - DNA, 23 bp, Artificial Sequence
  Description of Artificial Sequence: Synthetic oligonucleotide
  X-linked inhibitor of apoptosis (XIAP) siRNA
actgcttgtagttatagtgacag

SEQ ID NO: 13202 - DNA, 23 bp, Artificial Sequence
  Description of Artificial Sequence: Synthetic oligonucleotide
  X-linked inhibitor of apoptosis (XIAP) siRNA
ctgcttgtagttatagtgacagc

SEQ ID NO: 13203 - DNA, 23 bp, Artificial Sequence
  Description of Artificial Sequence: Synthetic oligonucleotide
  X-linked inhibitor of apoptosis (XIAP) siRNA
tgcttgtagttatagtgacagct

SEQ ID NO: 13204 - DNA, 23 bp, Artificial Sequence
  Description of Artificial Sequence: Synthetic oligonucleotide
  X-linked inhibitor of apoptosis (XIAP) siRNA
gcttgtagttatagtgacagctt

SEQ ID NO: 13205 - DNA, 23 bp, Artificial Sequence
  Description of Artificial Sequence: Synthetic oligonucleotide
  X-linked inhibitor of apoptosis (XIAP) siRNA
cttgtagttatagtgacagcttt

SEQ ID NO: 13206 - DNA, 23 bp, Artificial Sequence
  Description of Artificial Sequence: Synthetic oligonucleotide
  X-linked inhibitor of apoptosis (XIAP) siRNA
ttgtagttatagtgacagctttc

SEQ ID NO: 13207 - DNA, 23 bp, Artificial Sequence
  Description of Artificial Sequence: Synthetic oligonucleotide
  X-linked inhibitor of apoptosis (XIAP) siRNA
tgtagttatagtgacagctttcc

SEQ ID NO: 13208 - DNA, 23 bp, Artificial Sequence
  Description of Artificial Sequence: Synthetic oligonucleotide
  X-linked inhibitor of apoptosis (XIAP) siRNA
gtagttatagtgacagctttcca

SEQ ID NO: 13209 - DNA, 23 bp, Artificial Sequence
  Description of Artificial Sequence: Synthetic oligonucleotide
  X-linked inhibitor of apoptosis (XIAP) siRNA
tagttatagtgacagctttccat

SEQ ID NO: 13210 - DNA, 23 bp, Artificial Sequence
  Description of Artificial Sequence: Synthetic oligonucleotide
  X-linked inhibitor of apoptosis (XIAP) siRNA
agttatagtgacagctttccatg

SEQ ID NO: 13211 - DNA, 23 bp, Artificial Sequence
  Description of Artificial Sequence: Synthetic oligonucleotide
  X-linked inhibitor of apoptosis (XIAP) siRNA
gttatagtgacagctttccatgt

SEQ ID NO: 13212 - DNA, 23 bp, Artificial Sequence
  Description of Artificial Sequence: Synthetic oligonucleotide
  X-linked inhibitor of apoptosis (XIAP) siRNA
ttatagtgacagctttccatgtt

SEQ ID NO: 13213 - DNA, 23 bp, Artificial Sequence
  Description of Artificial Sequence: Synthetic oligonucleotide
  X-linked inhibitor of apoptosis (XIAP) siRNA
tatagtgacagctttccatgttg

SEQ ID NO: 13214 - DNA, 23 bp, Artificial Sequence
  Description of Artificial Sequence: Synthetic oligonucleotide
  X-linked inhibitor of apoptosis (XIAP) siRNA
atagtgacagctttccatgttga

SEQ ID NO: 13215 - DNA, 23 bp, Artificial Sequence
  Description of Artificial Sequence: Synthetic oligonucleotide
  X-linked inhibitor of apoptosis (XIAP) siRNA
tagtgacagctttccatgttgag

SEQ ID NO: 13216 - DNA, 23 bp, Artificial Sequence
  Description of Artificial Sequence: Synthetic oligonucleotide
  X-linked inhibitor of apoptosis (XIAP) siRNA
agtgacagctttccatgttgaga

SEQ ID NO: 13217 - DNA, 23 bp, Artificial Sequence
  Description of Artificial Sequence: Synthetic oligonucleotide
  X-linked inhibitor of apoptosis (XIAP) siRNA
gtgacagctttccatgttgagat

SEQ ID NO: 13218 - DNA, 23 bp, Artificial Sequence
  Description of Artificial Sequence: Synthetic oligonucleotide
  X-linked inhibitor of apoptosis (XIAP) siRNA
tgacagctttccatgttgagatt

SEQ ID NO: 13219 - DNA, 23 bp, Artificial Sequence
  Description of Artificial Sequence: Synthetic oligonucleotide
  X-linked inhibitor of apoptosis (XIAP) siRNA
gacagctttccatgttgagattc

SEQ ID NO: 13220 - DNA, 23 bp, Artificial Sequence
  Description of Artificial Sequence: Synthetic oligonucleotide
  X-linked inhibitor of apoptosis (XIAP) siRNA
acagctttccatgttgagattct

SEQ ID NO: 13221 - DNA, 23 bp, Artificial Sequence
  Description of Artificial Sequence: Synthetic oligonucleotide
  X-linked inhibitor of apoptosis (XIAP) siRNA
cagctttccatgttgagattctc

SEQ ID NO: 13222 - DNA, 23 bp, Artificial Sequence
  Description of Artificial Sequence: Synthetic oligonucleotide
  X-linked inhibitor of apoptosis (XIAP) siRNA
agctttccatgttgagattctca

SEQ ID NO: 13223 - DNA, 23 bp, Artificial Sequence
  Description of Artificial Sequence: Synthetic oligonucleotide
  X-linked inhibitor of apoptosis (XIAP) siRNA
gctttccatgttgagattctcat

SEQ ID NO: 13224 - DNA, 23 bp, Artificial Sequence
  Description of Artificial Sequence: Synthetic oligonucleotide
  X-linked inhibitor of apoptosis (XIAP) siRNA
ctttccatgttgagattctcata

SEQ ID NO: 13225 - DNA, 23 bp, Artificial Sequence
  Description of Artificial Sequence: Synthetic oligonucleotide
  X-linked inhibitor of apoptosis (XIAP) siRNA
tttccatgttgagattctcatat

SEQ ID NO: 13226 - DNA, 23 bp, Artificial Sequence
  Description of Artificial Sequence: Synthetic oligonucleotide
  X-linked inhibitor of apoptosis (XIAP) siRNA
ttccatgttgagattctcatatc

SEQ ID NO: 13227 - DNA, 23 bp, Artificial Sequence
  Description of Artificial Sequence: Synthetic oligonucleotide
  X-linked inhibitor of apoptosis (XIAP) siRNA
tccatgttgagattctcatatca

SEQ ID NO: 13228 - DNA, 23 bp, Artificial Sequence
  Description of Artificial Sequence: Synthetic oligonucleotide
  X-linked inhibitor of apoptosis (XIAP) siRNA
ccatgttgagattctcatatcat

SEQ ID NO: 13229 - DNA, 23 bp, Artificial Sequence
  Description of Artificial Sequence: Synthetic oligonucleotide
  X-linked inhibitor of apoptosis (XIAP) siRNA
catgttgagattctcatatcatc

SEQ ID NO: 13230 - DNA, 23 bp, Artificial Sequence
  Description of Artificial Sequence: Synthetic oligonucleotide
  X-linked inhibitor of apoptosis (XIAP) siRNA
atgttgagattctcatatcatct

SEQ ID NO: 13231 - DNA, 23 bp, Artificial Sequence
  Description of Artificial Sequence: Synthetic oligonucleotide
  X-linked inhibitor of apoptosis (XIAP) siRNA
tgttgagattctcatatcatctt

SEQ ID NO: 13232 - DNA, 23 bp, Artificial Sequence
  Description of Artificial Sequence: Synthetic oligonucleotide
  X-linked inhibitor of apoptosis (XIAP) siRNA
gttgagattctcatatcatcttg

SEQ ID NO: 13233 - DNA, 23 bp, Artificial Sequence
  Description of Artificial Sequence: Synthetic oligonucleotide
  X-linked inhibitor of apoptosis (XIAP) siRNA
ttgagattctcatatcatcttgt

SEQ ID NO: 13234 - DNA, 23 bp, Artificial Sequence
  Description of Artificial Sequence: Synthetic oligonucleotide
  X-linked inhibitor of apoptosis (XIAP) siRNA
tgagattctcatatcatcttgta

SEQ ID NO: 13235 - DNA, 23 bp, Artificial Sequence
  Description of Artificial Sequence: Synthetic oligonucleotide
  X-linked inhibitor of apoptosis (XIAP) siRNA
gagattctcatatcatcttgtat

SEQ ID NO: 13236 - DNA, 23 bp, Artificial Sequence
  Description of Artificial Sequence: Synthetic oligonucleotide
  X-linked inhibitor of apoptosis (XIAP) siRNA
agattctcatatcatcttgtatc

SEQ ID NO: 13237 - DNA, 23 bp, Artificial Sequence
  Description of Artificial Sequence: Synthetic oligonucleotide
  X-linked inhibitor of apoptosis (XIAP) siRNA
gattctcatatcatcttgtatct

SEQ ID NO: 13238 - DNA, 23 bp, Artificial Sequence
  Description of Artificial Sequence: Synthetic oligonucleotide
  X-linked inhibitor of apoptosis (XIAP) siRNA
attctcatatcatcttgtatctt

SEQ ID NO: 13239 - DNA, 23 bp, Artificial Sequence
  Description of Artificial Sequence: Synthetic oligonucleotide
  X-linked inhibitor of apoptosis (XIAP) siRNA
ttctcatatcatcttgtatctta

SEQ ID NO: 13240 - DNA, 23 bp, Artificial Sequence
  Description of Artificial Sequence: Synthetic oligonucleotide
  X-linked inhibitor of apoptosis (XIAP) siRNA
tctcatatcatcttgtatcttaa

SEQ ID NO: 13241 - DNA, 23 bp, Artificial Sequence
  Description of Artificial Sequence: Synthetic oligonucleotide
  X-linked inhibitor of apoptosis (XIAP) siRNA
ctcatatcatcttgtatcttaaa

SEQ ID NO: 13242 - DNA, 23 bp, Artificial Sequence
  Description of Artificial Sequence: Synthetic oligonucleotide
  X-linked inhibitor of apoptosis (XIAP) siRNA
tcatatcatcttgtatcttaaag

SEQ ID NO: 13243 - DNA, 23 bp, Artificial Sequence
  Description of Artificial Sequence: Synthetic oligonucleotide
  X-linked inhibitor of apoptosis (XIAP) siRNA
catatcatcttgtatcttaaagt

SEQ ID NO: 13244 - DNA, 23 bp, Artificial Sequence
  Description of Artificial Sequence: Synthetic oligonucleotide
  X-linked inhibitor of apoptosis (XIAP) siRNA
atatcatcttgtatcttaaagtt

SEQ ID NO: 13245 - DNA, 23 bp, Artificial Sequence
  Description of Artificial Sequence: Synthetic oligonucleotide
  X-linked inhibitor of apoptosis (XIAP) siRNA
tatcatcttgtatcttaaagttt

SEQ ID NO: 13246 - DNA, 23 bp, Artificial Sequence
  Description of Artificial Sequence: Synthetic oligonucleotide
  X-linked inhibitor of apoptosis (XIAP) siRNA
atcatcttgtatcttaaagtttc

SEQ ID NO: 13247 - DNA, 23 bp, Artificial Sequence
  Description of Artificial Sequence: Synthetic oligonucleotide
  X-linked inhibitor of apoptosis (XIAP) siRNA
tcatcttgtatcttaaagtttca

SEQ ID NO: 13248 - DNA, 23 bp, Artificial Sequence
  Description of Artificial Sequence: Synthetic oligonucleotide
  X-linked inhibitor of apoptosis (XIAP) siRNA
catcttgtatcttaaagtttcat

SEQ ID NO: 13249 - DNA, 23 bp, Artificial Sequence
  Description of Artificial Sequence: Synthetic oligonucleotide
  X-linked inhibitor of apoptosis (XIAP) siRNA
atcttgtatcttaaagtttcatg

SEQ ID NO: 13250 - DNA, 23 bp, Artificial Sequence
  Description of Artificial Sequence: Synthetic oligonucleotide
  X-linked inhibitor of apoptosis (XIAP) siRNA
tcttgtatcttaaagtttcatgt

SEQ ID NO: 13251 - DNA, 23 bp, Artificial Sequence
  Description of Artificial Sequence: Synthetic oligonucleotide
  X-linked inhibitor of apoptosis (XIAP) siRNA
cttgtatcttaaagtttcatgtg

SEQ ID NO: 13252 - DNA, 23 bp, Artificial Sequence
  Description of Artificial Sequence: Synthetic oligonucleotide
  X-linked inhibitor of apoptosis (XIAP) siRNA
ttgtatcttaaagtttcatgtga

SEQ ID NO: 13253 - DNA, 23 bp, Artificial Sequence
  Description of Artificial Sequence: Synthetic oligonucleotide
  X-linked inhibitor of apoptosis (XIAP) siRNA
tgtatcttaaagtttcatgtgag

SEQ ID NO: 13254 - DNA, 23 bp, Artificial Sequence
  Description of Artificial Sequence: Synthetic oligonucleotide
  X-linked inhibitor of apoptosis (XIAP) siRNA
gtatcttaaagtttcatgtgagt

SEQ ID NO: 13255 - DNA, 23 bp, Artificial Sequence
  Description of Artificial Sequence: Synthetic oligonucleotide
  X-linked inhibitor of apoptosis (XIAP) siRNA
tatcttaaagtttcatgtgagtt

SEQ ID NO: 13256 - DNA, 23 bp, Artificial Sequence
  Description of Artificial Sequence: Synthetic oligonucleotide
  X-linked inhibitor of apoptosis (XIAP) siRNA
atcttaaagtttcatgtgagttt

SEQ ID NO: 13257 - DNA, 23 bp, Artificial Sequence
  Description of Artificial Sequence: Synthetic oligonucleotide
  X-linked inhibitor of apoptosis (XIAP) siRNA
tcttaaagtttcatgtgagtttt

SEQ ID NO: 13258 - DNA, 23 bp, Artificial Sequence
  Description of Artificial Sequence: Synthetic oligonucleotide
  X-linked inhibitor of apoptosis (XIAP) siRNA
cttaaagtttcatgtgagttttt

SEQ ID NO: 13259 - DNA, 23 bp, Artificial Sequence
  Description of Artificial Sequence: Synthetic oligonucleotide
  X-linked inhibitor of apoptosis (XIAP) siRNA
ttaaagtttcatgtgagttttta

SEQ ID NO: 13260 - DNA, 23 bp, Artificial Sequence
  Description of Artificial Sequence: Synthetic oligonucleotide
  X-linked inhibitor of apoptosis (XIAP) siRNA
taaagtttcatgtgagtttttac

SEQ ID NO: 13261 - DNA, 23 bp, Artificial Sequence
  Description of Artificial Sequence: Synthetic oligonucleotide
  X-linked inhibitor of apoptosis (XIAP) siRNA
aaagtttcatgtgagtttttacc

SEQ ID NO: 13262 - DNA, 23 bp, Artificial Sequence
  Description of Artificial Sequence: Synthetic oligonucleotide
  X-linked inhibitor of apoptosis (XIAP) siRNA
aagtttcatgtgagtttttaccg

SEQ ID NO: 13263 - DNA, 23 bp, Artificial Sequence
  Description of Artificial Sequence: Synthetic oligonucleotide
  X-linked inhibitor of apoptosis (XIAP) siRNA
agtttcatgtgagtttttaccgt

SEQ ID NO: 13264 - DNA, 23 bp, Artificial Sequence
  Description of Artificial Sequence: Synthetic oligonucleotide
  X-linked inhibitor of apoptosis (XIAP) siRNA
gtttcatgtgagtttttaccgtt

SEQ ID NO: 13265 - DNA, 23 bp, Artificial Sequence
  Description of Artificial Sequence: Synthetic oligonucleotide
  X-linked inhibitor of apoptosis (XIAP) siRNA
tttcatgtgagtttttaccgtta

SEQ ID NO: 13266 - DNA, 23 bp, Artificial Sequence
  Description of Artificial Sequence: Synthetic oligonucleotide
  X-linked inhibitor of apoptosis (XIAP) siRNA
ttcatgtgagtttttaccgttag

SEQ ID NO: 13267 - DNA, 23 bp, Artificial Sequence
  Description of Artificial Sequence: Synthetic oligonucleotide
  X-linked inhibitor of apoptosis (XIAP) siRNA
tcatgtgagtttttaccgttagg

SEQ ID NO: 13268 - DNA, 23 bp, Artificial Sequence
  Description of Artificial Sequence: Synthetic oligonucleotide
  X-linked inhibitor of apoptosis (XIAP) siRNA
catgtgagtttttaccgttagga

SEQ ID NO: 13269 - DNA, 23 bp, Artificial Sequence
  Description of Artificial Sequence: Synthetic oligonucleotide
  X-linked inhibitor of apoptosis (XIAP) siRNA
atgtgagtttttaccgttaggat

SEQ ID NO: 13270 - DNA, 23 bp, Artificial Sequence
  Description of Artificial Sequence: Synthetic oligonucleotide
  X-linked inhibitor of apoptosis (XIAP) siRNA
tgtgagtttttaccgttaggatg

SEQ ID NO: 13271 - DNA, 23 bp, Artificial Sequence
  Description of Artificial Sequence: Synthetic oligonucleotide
  X-linked inhibitor of apoptosis (XIAP) siRNA
gtgagtttttaccgttaggatga

SEQ ID NO: 13272 - DNA, 23 bp, Artificial Sequence
  Description of Artificial Sequence: Synthetic oligonucleotide
  X-linked inhibitor of apoptosis (XIAP) siRNA
tgagtttttaccgttaggatgat

SEQ ID NO: 13273 - DNA, 23 bp, Artificial Sequence
  Description of Artificial Sequence: Synthetic oligonucleotide
  X-linked inhibitor of apoptosis (XIAP) siRNA
gagtttttaccgttaggatgatt

SEQ ID NO: 13274 - DNA, 23 bp, Artificial Sequence
  Description of Artificial Sequence: Synthetic oligonucleotide
  X-linked inhibitor of apoptosis (XIAP) siRNA
agtttttaccgttaggatgatta

SEQ ID NO: 13275 - DNA, 23 bp, Artificial Sequence
  Description of Artificial Sequence: Synthetic oligonucleotide
  X-linked inhibitor of apoptosis (XIAP) siRNA
gtttttaccgttaggatgattaa

SEQ ID NO: 13276 - DNA, 23 bp, Artificial Sequence
  Description of Artificial Sequence: Synthetic oligonucleotide
  X-linked inhibitor of apoptosis (XIAP) siRNA
tttttaccgttaggatgattaag

SEQ ID NO: 13277 - DNA, 23 bp, Artificial Sequence
  Description of Artificial Sequence: Synthetic oligonucleotide
  X-linked inhibitor of apoptosis (XIAP) siRNA
ttttaccgttaggatgattaaga

SEQ ID NO: 13278 - DNA, 23 bp, Artificial Sequence
  Description of Artificial Sequence: Synthetic oligonucleotide
  X-linked inhibitor of apoptosis (XIAP) siRNA
tttaccgttaggatgattaagat

SEQ ID NO: 13279 - DNA, 23 bp, Artificial Sequence
  Description of Artificial Sequence: Synthetic oligonucleotide
  X-linked inhibitor of apoptosis (XIAP) siRNA
ttaccgttaggatgattaagatg

SEQ ID NO: 13280 - DNA, 23 bp, Artificial Sequence
  Description of Artificial Sequence: Synthetic oligonucleotide
  X-linked inhibitor of apoptosis (XIAP) siRNA
taccgttaggatgattaagatgt

SEQ ID NO: 13281 - DNA, 23 bp, Artificial Sequence
  Description of Artificial Sequence: Synthetic oligonucleotide
  X-linked inhibitor of apoptosis (XIAP) siRNA
accgttaggatgattaagatgta

SEQ ID NO: 13282 - DNA, 23 bp, Artificial Sequence
  Description of Artificial Sequence: Synthetic oligonucleotide
  X-linked inhibitor of apoptosis (XIAP) siRNA
ccgttaggatgattaagatgtat

SEQ ID NO: 13283 - DNA, 23 bp, Artificial Sequence
  Description of Artificial Sequence: Synthetic oligonucleotide
  X-linked inhibitor of apoptosis (XIAP) siRNA
cgttaggatgattaagatgtata

SEQ ID NO: 13284 - DNA, 23 bp, Artificial Sequence
  Description of Artificial Sequence: Synthetic oligonucleotide
  X-linked inhibitor of apoptosis (XIAP) siRNA
gttaggatgattaagatgtatat

SEQ ID NO: 13285 - DNA, 23 bp, Artificial Sequence
  Description of Artificial Sequence: Synthetic oligonucleotide
  X-linked inhibitor of apoptosis (XIAP) siRNA
ttaggatgattaagatgtatata

SEQ ID NO: 13286 - DNA, 23 bp, Artificial Sequence
  Description of Artificial Sequence: Synthetic oligonucleotide
  X-linked inhibitor of apoptosis (XIAP) siRNA
taggatgattaagatgtatatag

SEQ ID NO: 13287 - DNA, 23 bp, Artificial Sequence
  Description of Artificial Sequence: Synthetic oligonucleotide
  X-linked inhibitor of apoptosis (XIAP) siRNA
aggatgattaagatgtatatagg

SEQ ID NO: 13288 - DNA, 23 bp, Artificial Sequence
  Description of Artificial Sequence: Synthetic oligonucleotide
  X-linked inhibitor of apoptosis (XIAP) siRNA
ggatgattaagatgtatatagga

SEQ ID NO: 13289 - DNA, 23 bp, Artificial Sequence
  Description of Artificial Sequence: Synthetic oligonucleotide
  X-linked inhibitor of apoptosis (XIAP) siRNA
gatgattaagatgtatataggac

SEQ ID NO: 13290 - DNA, 23 bp, Artificial Sequence
  Description of Artificial Sequence: Synthetic oligonucleotide
  X-linked inhibitor of apoptosis (XIAP) siRNA
atgattaagatgtatataggaca

SEQ ID NO: 13291 - DNA, 23 bp, Artificial Sequence
  Description of Artificial Sequence: Synthetic oligonucleotide
  X-linked inhibitor of apoptosis (XIAP) siRNA
tgattaagatgtatataggacaa

SEQ ID NO: 13292 - DNA, 23 bp, Artificial Sequence
  Description of Artificial Sequence: Synthetic oligonucleotide
  X-linked inhibitor of apoptosis (XIAP) siRNA
gattaagatgtatataggacaaa

SEQ ID NO: 13293 - DNA, 23 bp, Artificial Sequence
  Description of Artificial Sequence: Synthetic oligonucleotide
  X-linked inhibitor of apoptosis (XIAP) siRNA
attaagatgtatataggacaaaa

SEQ ID NO: 13294 - DNA, 23 bp, Artificial Sequence
  Description of Artificial Sequence: Synthetic oligonucleotide
  X-linked inhibitor of apoptosis (XIAP) siRNA
ttaagatgtatataggacaaaat

SEQ ID NO: 13295 - DNA, 23 bp, Artificial Sequence
  Description of Artificial Sequence: Synthetic oligonucleotide
  X-linked inhibitor of apoptosis (XIAP) siRNA
taagatgtatataggacaaaatg

SEQ ID NO: 13296 - DNA, 23 bp, Artificial Sequence
  Description of Artificial Sequence: Synthetic oligonucleotide
  X-linked inhibitor of apoptosis (XIAP) siRNA
aagatgtatataggacaaaatgt

SEQ ID NO: 13297 - DNA, 23 bp, Artificial Sequence
  Description of Artificial Sequence: Synthetic oligonucleotide
  X-linked inhibitor of apoptosis (XIAP) siRNA
agatgtatataggacaaaatgtt

SEQ ID NO: 13298 - DNA, 23 bp, Artificial Sequence
  Description of Artificial Sequence: Synthetic oligonucleotide
  X-linked inhibitor of apoptosis (XIAP) siRNA
gatgtatataggacaaaatgtta

SEQ ID NO: 13299 - DNA, 23 bp, Artificial Sequence
  Description of Artificial Sequence: Synthetic oligonucleotide
  X-linked inhibitor of apoptosis (XIAP) siRNA
atgtatataggacaaaatgttaa

SEQ ID NO: 13300 - DNA, 23 bp, Artificial Sequence
  Description of Artificial Sequence: Synthetic oligonucleotide
  X-linked inhibitor of apoptosis (XIAP) siRNA
tgtatataggacaaaatgttaag

SEQ ID NO: 13301 - DNA, 23 bp, Artificial Sequence
  Description of Artificial Sequence: Synthetic oligonucleotide
  X-linked inhibitor of apoptosis (XIAP) siRNA
gtatataggacaaaatgttaagt

SEQ ID NO: 13302 - DNA, 23 bp, Artificial Sequence
  Description of Artificial Sequence: Synthetic oligonucleotide
  X-linked inhibitor of apoptosis (XIAP) siRNA
tatataggacaaaatgttaagtc

SEQ ID NO: 13303 - DNA, 23 bp, Artificial Sequence
  Description of Artificial Sequence: Synthetic oligonucleotide
  X-linked inhibitor of apoptosis (XIAP) siRNA
atataggacaaaatgttaagtct

SEQ ID NO: 13304 - DNA, 23 bp, Artificial Sequence
  Description of Artificial Sequence: Synthetic oligonucleotide
  X-linked inhibitor of apoptosis (XIAP) siRNA
tataggacaaaatgttaagtctt

SEQ ID NO: 13305 - DNA, 23 bp, Artificial Sequence
  Description of Artificial Sequence: Synthetic oligonucleotide
  X-linked inhibitor of apoptosis (XIAP) siRNA
ataggacaaaatgttaagtcttt

SEQ ID NO: 13306 - DNA, 23 bp, Artificial Sequence
  Description of Artificial Sequence: Synthetic oligonucleotide
  X-linked inhibitor of apoptosis (XIAP) siRNA
taggacaaaatgttaagtctttc

SEQ ID NO: 13307 - DNA, 23 bp, Artificial Sequence
  Description of Artificial Sequence: Synthetic oligonucleotide
  X-linked inhibitor of apoptosis (XIAP) siRNA
aggacaaaatgttaagtctttcc

SEQ ID NO: 13308 - DNA, 23 bp, Artificial Sequence
  Description of Artificial Sequence: Synthetic oligonucleotide
  X-linked inhibitor of apoptosis (XIAP) siRNA
ggacaaaatgttaagtctttcct

SEQ ID NO: 13309 - DNA, 23 bp, Artificial Sequence
  Description of Artificial Sequence: Synthetic oligonucleotide
  X-linked inhibitor of apoptosis (XIAP) siRNA
gacaaaatgttaagtctttcctc

SEQ ID NO: 13310 - DNA, 23 bp, Artificial Sequence
  Description of Artificial Sequence: Synthetic oligonucleotide
  X-linked inhibitor of apoptosis (XIAP) siRNA
acaaaatgttaagtctttcctct

SEQ ID NO: 13311 - DNA, 23 bp, Artificial Sequence
  Description of Artificial Sequence: Synthetic oligonucleotide
  X-linked inhibitor of apoptosis (XIAP) siRNA
caaaatgttaagtctttcctcta

SEQ ID NO: 13312 - DNA, 23 bp, Artificial Sequence
  Description of Artificial Sequence: Synthetic oligonucleotide
  X-linked inhibitor of apoptosis (XIAP) siRNA
aaaatgttaagtctttcctctac

SEQ ID NO: 13313 - DNA, 23 bp, Artificial Sequence
  Description of Artificial Sequence: Synthetic oligonucleotide
  X-linked inhibitor of apoptosis (XIAP) siRNA
aaatgttaagtctttcctctacc

SEQ ID NO: 13314 - DNA, 23 bp, Artificial Sequence
  Description of Artificial Sequence: Synthetic oligonucleotide
  X-linked inhibitor of apoptosis (XIAP) siRNA
aatgttaagtctttcctctacct

SEQ ID NO: 13315 - DNA, 23 bp, Artificial Sequence
  Description of Artificial Sequence: Synthetic oligonucleotide
  X-linked inhibitor of apoptosis (XIAP) siRNA
atgttaagtctttcctctaccta

SEQ ID NO: 13316 - DNA, 23 bp, Artificial Sequence
  Description of Artificial Sequence: Synthetic oligonucleotide
  X-linked inhibitor of apoptosis (XIAP) siRNA
tgttaagtctttcctctacctac

SEQ ID NO: 13317 - DNA, 23 bp, Artificial Sequence
  Description of Artificial Sequence: Synthetic oligonucleotide
  X-linked inhibitor of apoptosis (XIAP) siRNA
gttaagtctttcctctacctaca

SEQ ID NO: 13318 - DNA, 23 bp, Artificial Sequence
  Description of Artificial Sequence: Synthetic oligonucleotide
  X-linked inhibitor of apoptosis (XIAP) siRNA
ttaagtctttcctctacctacat

SEQ ID NO: 13319 - DNA, 23 bp, Artificial Sequence
  Description of Artificial Sequence: Synthetic oligonucleotide
  X-linked inhibitor of apoptosis (XIAP) siRNA
taagtctttcctctacctacatt

SEQ ID NO: 13320 - DNA, 23 bp, Artificial Sequence
  Description of Artificial Sequence: Synthetic oligonucleotide
  X-linked inhibitor of apoptosis (XIAP) siRNA
aagtctttcctctacctacattt

SEQ ID NO: 13321 - DNA, 23 bp, Artificial Sequence
  Description of Artificial Sequence: Synthetic oligonucleotide
  X-linked inhibitor of apoptosis (XIAP) siRNA
agtctttcctctacctacatttg

SEQ ID NO: 13322 - DNA, 23 bp, Artificial Sequence
  Description of Artificial Sequence: Synthetic oligonucleotide
  X-linked inhibitor of apoptosis (XIAP) siRNA
gtctttcctctacctacatttgt

SEQ ID NO: 13323 - DNA, 23 bp, Artificial Sequence
  Description of Artificial Sequence: Synthetic oligonucleotide
  X-linked inhibitor of apoptosis (XIAP) siRNA
tctttcctctacctacatttgtt

SEQ ID NO: 13324 - DNA, 23 bp, Artificial Sequence
  Description of Artificial Sequence: Synthetic oligonucleotide
  X-linked inhibitor of apoptosis (XIAP) siRNA
ctttcctctacctacatttgttt

SEQ ID NO: 13325 - DNA, 23 bp, Artificial Sequence
  Description of Artificial Sequence: Synthetic oligonucleotide
  X-linked inhibitor of apoptosis (XIAP) siRNA
tttcctctacctacatttgtttt

SEQ ID NO: 13326 - DNA, 23 bp, Artificial Sequence
  Description of Artificial Sequence: Synthetic oligonucleotide
  X-linked inhibitor of apoptosis (XIAP) siRNA
ttcctctacctacatttgttttc

SEQ ID NO: 13327 - DNA, 23 bp, Artificial Sequence
  Description of Artificial Sequence: Synthetic oligonucleotide
  X-linked inhibitor of apoptosis (XIAP) siRNA
tcctctacctacatttgttttct

SEQ ID NO: 13328 - DNA, 23 bp, Artificial Sequence
  Description of Artificial Sequence: Synthetic oligonucleotide
  X-linked inhibitor of apoptosis (XIAP) siRNA
cctctacctacatttgttttctt

SEQ ID NO: 13329 - DNA, 23 bp, Artificial Sequence
  Description of Artificial Sequence: Synthetic oligonucleotide
  X-linked inhibitor of apoptosis (XIAP) siRNA
ctctacctacatttgttttcttg

SEQ ID NO: 13330 - DNA, 23 bp, Artificial Sequence
  Description of Artificial Sequence: Synthetic oligonucleotide
  X-linked inhibitor of apoptosis (XIAP) siRNA
tctacctacatttgttttcttgg

SEQ ID NO: 13331 - DNA, 23 bp, Artificial Sequence
  Description of Artificial Sequence: Synthetic oligonucleotide
  X-linked inhibitor of apoptosis (XIAP) siRNA
ctacctacatttgttttcttggc

SEQ ID NO: 13332 - DNA, 23 bp, Artificial Sequence
  Description of Artificial Sequence: Synthetic oligonucleotide
  X-linked inhibitor of apoptosis (XIAP) siRNA
tacctacatttgttttcttggct

SEQ ID NO: 13333 - DNA, 23 bp, Artificial Sequence
  Description of Artificial Sequence: Synthetic oligonucleotide
  X-linked inhibitor of apoptosis (XIAP) siRNA
acctacatttgttttcttggcta

SEQ ID NO: 13334 - DNA, 23 bp, Artificial Sequence
  Description of Artificial Sequence: Synthetic oligonucleotide
  X-linked inhibitor of apoptosis (XIAP) siRNA
cctacatttgttttcttggctag

SEQ ID NO: 13335 - DNA, 23 bp, Artificial Sequence
  Description of Artificial Sequence: Synthetic oligonucleotide
  X-linked inhibitor of apoptosis (XIAP) siRNA
ctacatttgttttcttggctagt

SEQ ID NO: 13336 - DNA, 23 bp, Artificial Sequence
  Description of Artificial Sequence: Synthetic oligonucleotide
  X-linked inhibitor of apoptosis (XIAP) siRNA
tacatttgttttcttggctagta

SEQ ID NO: 13337 - DNA, 23 bp, Artificial Sequence
  Description of Artificial Sequence: Synthetic oligonucleotide
  X-linked inhibitor of apoptosis (XIAP) siRNA
acatttgttttcttggctagtaa

SEQ ID NO: 13338 - DNA, 23 bp, Artificial Sequence
  Description of Artificial Sequence: Synthetic oligonucleotide
  X-linked inhibitor of apoptosis (XIAP) siRNA
catttgttttcttggctagtaat

SEQ ID NO: 13339 - DNA, 23 bp, Artificial Sequence
  Description of Artificial Sequence: Synthetic oligonucleotide
  X-linked inhibitor of apoptosis (XIAP) siRNA
atttgttttcttggctagtaata

SEQ ID NO: 13340 - DNA, 23 bp, Artificial Sequence
  Description of Artificial Sequence: Synthetic oligonucleotide
  X-linked inhibitor of apoptosis (XIAP) siRNA
tttgttttcttggctagtaatag

SEQ ID NO: 13341 - DNA, 23 bp, Artificial Sequence
  Description of Artificial Sequence: Synthetic oligonucleotide
  X-linked inhibitor of apoptosis (XIAP) siRNA
ttgttttcttggctagtaatagt

SEQ ID NO: 13342 - DNA, 23 bp, Artificial Sequence
  Description of Artificial Sequence: Synthetic oligonucleotide
  X-linked inhibitor of apoptosis (XIAP) siRNA
tgttttcttggctagtaatagta

SEQ ID NO: 13343 - DNA, 23 bp, Artificial Sequence
  Description of Artificial Sequence: Synthetic oligonucleotide
  X-linked inhibitor of apoptosis (XIAP) siRNA
gttttcttggctagtaatagtag

SEQ ID NO: 13344 - DNA, 23 bp, Artificial Sequence
  Description of Artificial Sequence: Synthetic oligonucleotide
  X-linked inhibitor of apoptosis (XIAP) siRNA
ttttcttggctagtaatagtagt

SEQ ID NO: 13345 - DNA, 23 bp, Artificial Sequence
  Description of Artificial Sequence: Synthetic oligonucleotide
  X-linked inhibitor of apoptosis (XIAP) siRNA
tttcttggctagtaatagtagta

SEQ ID NO: 13346 - DNA, 23 bp, Artificial Sequence
  Description of Artificial Sequence: Synthetic oligonucleotide
  X-linked inhibitor of apoptosis (XIAP) siRNA
ttcttggctagtaatagtagtag

SEQ ID NO: 13347 - DNA, 23 bp, Artificial Sequence
  Description of Artificial Sequence: Synthetic oligonucleotide
  X-linked inhibitor of apoptosis (XIAP) siRNA
tcttggctagtaatagtagtaga

SEQ ID NO: 13348 - DNA, 23 bp, Artificial Sequence
  Description of Artificial Sequence: Synthetic oligonucleotide
  X-linked inhibitor of apoptosis (XIAP) siRNA
cttggctagtaatagtagtagat

SEQ ID NO: 13349 - DNA, 23 bp, Artificial Sequence
  Description of Artificial Sequence: Synthetic oligonucleotide
  X-linked inhibitor of apoptosis (XIAP) siRNA
ttggctagtaatagtagtagata

SEQ ID NO: 13350 - DNA, 23 bp, Artificial Sequence
  Description of Artificial Sequence: Synthetic oligonucleotide
  X-linked inhibitor of apoptosis (XIAP) siRNA
tggctagtaatagtagtagatac

SEQ ID NO: 13351 - DNA, 23 bp, Artificial Sequence
  Description of Artificial Sequence: Synthetic oligonucleotide
  X-linked inhibitor of apoptosis (XIAP) siRNA
ggctagtaatagtagtagatact

SEQ ID NO: 13352 - DNA, 23 bp, Artificial Sequence
  Description of Artificial Sequence: Synthetic oligonucleotide
  X-linked inhibitor of apoptosis (XIAP) siRNA
gctagtaatagtagtagatactt

SEQ ID NO: 13353 - DNA, 23 bp, Artificial Sequence
  Description of Artificial Sequence: Synthetic oligonucleotide
  X-linked inhibitor of apoptosis (XIAP) siRNA
ctagtaatagtagtagatacttc

SEQ ID NO: 13354 - DNA, 23 bp, Artificial Sequence
  Description of Artificial Sequence: Synthetic oligonucleotide
  X-linked inhibitor of apoptosis (XIAP) siRNA
tagtaatagtagtagatacttct

SEQ ID NO: 13355 - DNA, 23 bp, Artificial Sequence
  Description of Artificial Sequence: Synthetic oligonucleotide
  X-linked inhibitor of apoptosis (XIAP) siRNA
agtaatagtagtagatacttctg

SEQ ID NO: 13356 - DNA, 23 bp, Artificial Sequence
  Description of Artificial Sequence: Synthetic oligonucleotide
  X-linked inhibitor of apoptosis (XIAP) siRNA
gtaatagtagtagatacttctga

SEQ ID NO: 13357 - DNA, 23 bp, Artificial Sequence
  Description of Artificial Sequence: Synthetic oligonucleotide
  X-linked inhibitor of apoptosis (XIAP) siRNA
taatagtagtagatacttctgaa

SEQ ID NO: 13358 - DNA, 23 bp, Artificial Sequence
  Description of Artificial Sequence: Synthetic oligonucleotide
  X-linked inhibitor of apoptosis (XIAP) siRNA
aatagtagtagatacttctgaaa

SEQ ID NO: 13359 - DNA, 23 bp, Artificial Sequence
  Description of Artificial Sequence: Synthetic oligonucleotide
  X-linked inhibitor of apoptosis (XIAP) siRNA
atagtagtagatacttctgaaat

SEQ ID NO: 13360 - DNA, 23 bp, Artificial Sequence
  Description of Artificial Sequence: Synthetic oligonucleotide
  X-linked inhibitor of apoptosis (XIAP) siRNA
tagtagtagatacttctgaaata

SEQ ID NO: 13361 - DNA, 23 bp, Artificial Sequence
  Description of Artificial Sequence: Synthetic oligonucleotide
  X-linked inhibitor of apoptosis (XIAP) siRNA
agtagtagatacttctgaaataa

SEQ ID NO: 13362 - DNA, 23 bp, Artificial Sequence
  Description of Artificial Sequence: Synthetic oligonucleotide
  X-linked inhibitor of apoptosis (XIAP) siRNA
gtagtagatacttctgaaataaa

SEQ ID NO: 13363 - DNA, 23 bp, Artificial Sequence
  Description of Artificial Sequence: Synthetic oligonucleotide
  X-linked inhibitor of apoptosis (XIAP) siRNA
tagtagatacttctgaaataaat

SEQ ID NO: 13364 - DNA, 23 bp, Artificial Sequence
  Description of Artificial Sequence: Synthetic oligonucleotide
  X-linked inhibitor of apoptosis (XIAP) siRNA
agtagatacttctgaaataaatg

SEQ ID NO: 13365 - DNA, 23 bp, Artificial Sequence
  Description of Artificial Sequence: Synthetic oligonucleotide
  X-linked inhibitor of apoptosis (XIAP) siRNA
gtagatacttctgaaataaatgt

SEQ ID NO: 13366 - DNA, 23 bp, Artificial Sequence
  Description of Artificial Sequence: Synthetic oligonucleotide
  X-linked inhibitor of apoptosis (XIAP) siRNA
tagatacttctgaaataaatgtt

SEQ ID NO: 13367 - DNA, 23 bp, Artificial Sequence
  Description of Artificial Sequence: Synthetic oligonucleotide
  X-linked inhibitor of apoptosis (XIAP) siRNA
agatacttctgaaataaatgttc

SEQ ID NO: 13368 - DNA, 23 bp, Artificial Sequence
  Description of Artificial Sequence: Synthetic oligonucleotide
  X-linked inhibitor of apoptosis (XIAP) siRNA
gatacttctgaaataaatgttct

SEQ ID NO: 13369 - DNA, 23 bp, Artificial Sequence
  Description of Artificial Sequence: Synthetic oligonucleotide
  X-linked inhibitor of apoptosis (XIAP) siRNA
atacttctgaaataaatgttctc

SEQ ID NO: 13370 - DNA, 23 bp, Artificial Sequence
  Description of Artificial Sequence: Synthetic oligonucleotide
  X-linked inhibitor of apoptosis (XIAP) siRNA
tacttctgaaataaatgttctct

SEQ ID NO: 13371 - DNA, 23 bp, Artificial Sequence
  Description of Artificial Sequence: Synthetic oligonucleotide
  X-linked inhibitor of apoptosis (XIAP) siRNA
acttctgaaataaatgttctctc

SEQ ID NO: 13372 - DNA, 23 bp, Artificial Sequence
  Description of Artificial Sequence: Synthetic oligonucleotide
  X-linked inhibitor of apoptosis (XIAP) siRNA
cttctgaaataaatgttctctca

SEQ ID NO: 13373 - DNA, 23 bp, Artificial Sequence
  Description of Artificial Sequence: Synthetic oligonucleotide
  X-linked inhibitor of apoptosis (XIAP) siRNA
ttctgaaataaatgttctctcaa

SEQ ID NO: 13374 - DNA, 23 bp, Artificial Sequence
  Description of Artificial Sequence: Synthetic oligonucleotide
  X-linked inhibitor of apoptosis (XIAP) siRNA
tctgaaataaatgttctctcaag

SEQ ID NO: 13375 - DNA, 23 bp, Artificial Sequence
  Description of Artificial Sequence: Synthetic oligonucleotide
  X-linked inhibitor of apoptosis (XIAP) siRNA
ctgaaataaatgttctctcaaga

SEQ ID NO: 13376 - DNA, 23 bp, Artificial Sequence
  Description of Artificial Sequence: Synthetic oligonucleotide
  X-linked inhibitor of apoptosis (XIAP) siRNA
tgaaataaatgttctctcaagat

SEQ ID NO: 13377 - DNA, 23 bp, Artificial Sequence
  Description of Artificial Sequence: Synthetic oligonucleotide
  X-linked inhibitor of apoptosis (XIAP) siRNA
gaaataaatgttctctcaagatc

SEQ ID NO: 13378 - DNA, 23 bp, Artificial Sequence
  Description of Artificial Sequence: Synthetic oligonucleotide
  X-linked inhibitor of apoptosis (XIAP) siRNA
aaataaatgttctctcaagatcc

SEQ ID NO: 13379 - DNA, 23 bp, Artificial Sequence
  Description of Artificial Sequence: Synthetic oligonucleotide
  X-linked inhibitor of apoptosis (XIAP) siRNA
aataaatgttctctcaagatcct

SEQ ID NO: 13380 - DNA, 23 bp, Artificial Sequence
  Description of Artificial Sequence: Synthetic oligonucleotide
  X-linked inhibitor of apoptosis (XIAP) siRNA
ataaatgttctctcaagatcctt

SEQ ID NO: 13381 - DNA, 23 bp, Artificial Sequence
  Description of Artificial Sequence: Synthetic oligonucleotide
  X-linked inhibitor of apoptosis (XIAP) siRNA
taaatgttctctcaagatcctta

SEQ ID NO: 13382 - DNA, 23 bp, Artificial Sequence
  Description of Artificial Sequence: Synthetic oligonucleotide
  X-linked inhibitor of apoptosis (XIAP) siRNA
aaatgttctctcaagatccttaa

SEQ ID NO: 13383 - DNA, 23 bp, Artificial Sequence
  Description of Artificial Sequence: Synthetic oligonucleotide
  X-linked inhibitor of apoptosis (XIAP) siRNA
aatgttctctcaagatccttaaa

SEQ ID NO: 13384 - DNA, 23 bp, Artificial Sequence
  Description of Artificial Sequence: Synthetic oligonucleotide
  X-linked inhibitor of apoptosis (XIAP) siRNA
atgttctctcaagatccttaaaa

SEQ ID NO: 13385 - DNA, 23 bp, Artificial Sequence
  Description of Artificial Sequence: Synthetic oligonucleotide
  X-linked inhibitor of apoptosis (XIAP) siRNA
tgttctctcaagatccttaaaac

SEQ ID NO: 13386 - DNA, 23 bp, Artificial Sequence
  Description of Artificial Sequence: Synthetic oligonucleotide
  X-linked inhibitor of apoptosis (XIAP) siRNA
gttctctcaagatccttaaaacc

SEQ ID NO: 13387 - DNA, 23 bp, Artificial Sequence
  Description of Artificial Sequence: Synthetic oligonucleotide
  X-linked inhibitor of apoptosis (XIAP) siRNA
ttctctcaagatccttaaaacct

SEQ ID NO: 13388 - DNA, 23 bp, Artificial Sequence
  Description of Artificial Sequence: Synthetic oligonucleotide
  X-linked inhibitor of apoptosis (XIAP) siRNA
tctctcaagatccttaaaacctc

SEQ ID NO: 13389 - DNA, 23 bp, Artificial Sequence
  Description of Artificial Sequence: Synthetic oligonucleotide
  X-linked inhibitor of apoptosis (XIAP) siRNA
ctctcaagatccttaaaacctct

SEQ ID NO: 13390 - DNA, 23 bp, Artificial Sequence
  Description of Artificial Sequence: Synthetic oligonucleotide
  X-linked inhibitor of apoptosis (XIAP) siRNA
tctcaagatccttaaaacctctt

SEQ ID NO: 13391 - DNA, 23 bp, Artificial Sequence
  Description of Artificial Sequence: Synthetic oligonucleotide
  X-linked inhibitor of apoptosis (XIAP) siRNA
ctcaagatccttaaaacctcttg

SEQ ID NO: 13392 - DNA, 23 bp, Artificial Sequence
  Description of Artificial Sequence: Synthetic oligonucleotide
  X-linked inhibitor of apoptosis (XIAP) siRNA
tcaagatccttaaaacctcttgg

SEQ ID NO: 13393 - DNA, 23 bp, Artificial Sequence
  Description of Artificial Sequence: Synthetic oligonucleotide
  X-linked inhibitor of apoptosis (XIAP) siRNA
caagatccttaaaacctcttgga

SEQ ID NO: 13394 - DNA, 23 bp, Artificial Sequence
  Description of Artificial Sequence: Synthetic oligonucleotide
  X-linked inhibitor of apoptosis (XIAP) siRNA
aagatccttaaaacctcttggaa

SEQ ID NO: 13395 - DNA, 23 bp, Artificial Sequence
  Description of Artificial Sequence: Synthetic oligonucleotide
  X-linked inhibitor of apoptosis (XIAP) siRNA
agatccttaaaacctcttggaaa

SEQ ID NO: 13396 - DNA, 23 bp, Artificial Sequence
  Description of Artificial Sequence: Synthetic oligonucleotide
  X-linked inhibitor of apoptosis (XIAP) siRNA
gatccttaaaacctcttggaaat

SEQ ID NO: 13397 - DNA, 23 bp, Artificial Sequence
  Description of Artificial Sequence: Synthetic oligonucleotide
  X-linked inhibitor of apoptosis (XIAP) siRNA
atccttaaaacctcttggaaatt

SEQ ID NO: 13398 - DNA, 23 bp, Artificial Sequence
  Description of Artificial Sequence: Synthetic oligonucleotide
  X-linked inhibitor of apoptosis (XIAP) siRNA
tccttaaaacctcttggaaatta

SEQ ID NO: 13399 - DNA, 23 bp, Artificial Sequence
  Description of Artificial Sequence: Synthetic oligonucleotide
  X-linked inhibitor of apoptosis (XIAP) siRNA
ccttaaaacctcttggaaattat

SEQ ID NO: 13400 - DNA, 23 bp, Artificial Sequence
  Description of Artificial Sequence: Synthetic oligonucleotide
  X-linked inhibitor of apoptosis (XIAP) siRNA
cttaaaacctcttggaaattata

SEQ ID NO: 13401 - DNA, 23 bp, Artificial Sequence
  Description of Artificial Sequence: Synthetic oligonucleotide
  X-linked inhibitor of apoptosis (XIAP) siRNA
ttaaaacctcttggaaattataa

SEQ ID NO: 13402 - DNA, 23 bp, Artificial Sequence
  Description of Artificial Sequence: Synthetic oligonucleotide
  X-linked inhibitor of apoptosis (XIAP) siRNA
taaaacctcttggaaattataaa

SEQ ID NO: 13403 - DNA, 23 bp, Artificial Sequence
  Description of Artificial Sequence: Synthetic oligonucleotide
  X-linked inhibitor of apoptosis (XIAP) siRNA
aaaacctcttggaaattataaaa

SEQ ID NO: 13404 - DNA, 23 bp, Artificial Sequence
  Description of Artificial Sequence: Synthetic oligonucleotide
  X-linked inhibitor of apoptosis (XIAP) siRNA
aaacctcttggaaattataaaaa

SEQ ID NO: 13405 - DNA, 23 bp, Artificial Sequence
  Description of Artificial Sequence: Synthetic oligonucleotide
  X-linked inhibitor of apoptosis (XIAP) siRNA
aacctcttggaaattataaaaat

SEQ ID NO: 13406 - DNA, 23 bp, Artificial Sequence
  Description of Artificial Sequence: Synthetic oligonucleotide
  X-linked inhibitor of apoptosis (XIAP) siRNA
acctcttggaaattataaaaata

SEQ ID NO: 13407 - DNA, 23 bp, Artificial Sequence
  Description of Artificial Sequence: Synthetic oligonucleotide
  X-linked inhibitor of apoptosis (XIAP) siRNA
cctcttggaaattataaaaatat

SEQ ID NO: 13408 - DNA, 23 bp, Artificial Sequence
  Description of Artificial Sequence: Synthetic oligonucleotide
  X-linked inhibitor of apoptosis (XIAP) siRNA
ctcttggaaattataaaaatatt

SEQ ID NO: 13409 - DNA, 23 bp, Artificial Sequence
  Description of Artificial Sequence: Synthetic oligonucleotide
  X-linked inhibitor of apoptosis (XIAP) siRNA
tcttggaaattataaaaatattg

SEQ ID NO: 13410 - DNA, 23 bp, Artificial Sequence
  Description of Artificial Sequence: Synthetic oligonucleotide
  X-linked inhibitor of apoptosis (XIAP) siRNA
cttggaaattataaaaatattgg

SEQ ID NO: 13411 - DNA, 23 bp, Artificial Sequence
  Description of Artificial Sequence: Synthetic oligonucleotide
  X-linked inhibitor of apoptosis (XIAP) siRNA
ttggaaattataaaaatattggc

SEQ ID NO: 13412 - DNA, 23 bp, Artificial Sequence
  Description of Artificial Sequence: Synthetic oligonucleotide
  X-linked inhibitor of apoptosis (XIAP) siRNA
tggaaattataaaaatattggca

SEQ ID NO: 13413 - DNA, 23 bp, Artificial Sequence
  Description of Artificial Sequence: Synthetic oligonucleotide
  X-linked inhibitor of apoptosis (XIAP) siRNA
ggaaattataaaaatattggcaa

SEQ ID NO: 13414 - DNA, 23 bp, Artificial Sequence
  Description of Artificial Sequence: Synthetic oligonucleotide
  X-linked inhibitor of apoptosis (XIAP) siRNA
gaaattataaaaatattggcaag

SEQ ID NO: 13415 - DNA, 23 bp, Artificial Sequence
  Description of Artificial Sequence: Synthetic oligonucleotide
  X-linked inhibitor of apoptosis (XIAP) siRNA
aaattataaaaatattggcaaga

SEQ ID NO: 13416 - DNA, 23 bp, Artificial Sequence
  Description of Artificial Sequence: Synthetic oligonucleotide
  X-linked inhibitor of apoptosis (XIAP) siRNA
aattataaaaatattggcaagaa

SEQ ID NO: 13417 - DNA, 23 bp, Artificial Sequence
  Description of Artificial Sequence: Synthetic oligonucleotide
  X-linked inhibitor of apoptosis (XIAP) siRNA
attataaaaatattggcaagaaa

SEQ ID NO: 13418 - DNA, 23 bp, Artificial Sequence
  Description of Artificial Sequence: Synthetic oligonucleotide
  X-linked inhibitor of apoptosis (XIAP) siRNA
ttataaaaatattggcaagaaaa

SEQ ID NO: 13419 - DNA, 23 bp, Artificial Sequence
  Description of Artificial Sequence: Synthetic oligonucleotide
  X-linked inhibitor of apoptosis (XIAP) siRNA
tataaaaatattggcaagaaaag

SEQ ID NO: 13420 - DNA, 23 bp, Artificial Sequence
  Description of Artificial Sequence: Synthetic oligonucleotide
  X-linked inhibitor of apoptosis (XIAP) siRNA
ataaaaatattggcaagaaaaga

SEQ ID NO: 13421 - DNA, 23 bp, Artificial Sequence
  Description of Artificial Sequence: Synthetic oligonucleotide
  X-linked inhibitor of apoptosis (XIAP) siRNA
taaaaatattggcaagaaaagaa

SEQ ID NO: 13422 - DNA, 23 bp, Artificial Sequence
  Description of Artificial Sequence: Synthetic oligonucleotide
  X-linked inhibitor of apoptosis (XIAP) siRNA
aaaaatattggcaagaaaagaag

SEQ ID NO: 13423 - DNA, 23 bp, Artificial Sequence
  Description of Artificial Sequence: Synthetic oligonucleotide
  X-linked inhibitor of apoptosis (XIAP) siRNA
aaaatattggcaagaaaagaaga

SEQ ID NO: 13424 - DNA, 23 bp, Artificial Sequence
  Description of Artificial Sequence: Synthetic oligonucleotide
  X-linked inhibitor of apoptosis (XIAP) siRNA
aaatattggcaagaaaagaagaa

SEQ ID NO: 13425 - DNA, 23 bp, Artificial Sequence
  Description of Artificial Sequence: Synthetic oligonucleotide
  X-linked inhibitor of apoptosis (XIAP) siRNA
aatattggcaagaaaagaagaat

SEQ ID NO: 13426 - DNA, 23 bp, Artificial Sequence
  Description of Artificial Sequence: Synthetic oligonucleotide
  X-linked inhibitor of apoptosis (XIAP) siRNA
atattggcaagaaaagaagaata

SEQ ID NO: 13427 - DNA, 23 bp, Artificial Sequence
  Description of Artificial Sequence: Synthetic oligonucleotide
  X-linked inhibitor of apoptosis (XIAP) siRNA
tattggcaagaaaagaagaatag

SEQ ID NO: 13428 - DNA, 23 bp, Artificial Sequence
  Description of Artificial Sequence: Synthetic oligonucleotide
  X-linked inhibitor of apoptosis (XIAP) siRNA
attggcaagaaaagaagaatagt

SEQ ID NO: 13429 - DNA, 23 bp, Artificial Sequence
  Description of Artificial Sequence: Synthetic oligonucleotide
  X-linked inhibitor of apoptosis (XIAP) siRNA
ttggcaagaaaagaagaatagtt

SEQ ID NO: 13430 - DNA, 23 bp, Artificial Sequence
  Description of Artificial Sequence: Synthetic oligonucleotide
  X-linked inhibitor of apoptosis (XIAP) siRNA
tggcaagaaaagaagaatagttg

SEQ ID NO: 13431 - DNA, 23 bp, Artificial Sequence
  Description of Artificial Sequence: Synthetic oligonucleotide
  X-linked inhibitor of apoptosis (XIAP) siRNA
ggcaagaaaagaagaatagttgt

SEQ ID NO: 13432 - DNA, 23 bp, Artificial Sequence
  Description of Artificial Sequence: Synthetic oligonucleotide
  X-linked inhibitor of apoptosis (XIAP) siRNA
gcaagaaaagaagaatagttgtt

SEQ ID NO: 13433 - DNA, 23 bp, Artificial Sequence
  Description of Artificial Sequence: Synthetic oligonucleotide
  X-linked inhibitor of apoptosis (XIAP) siRNA
caagaaaagaagaatagttgttt

SEQ ID NO: 13434 - DNA, 23 bp, Artificial Sequence
  Description of Artificial Sequence: Synthetic oligonucleotide
  X-linked inhibitor of apoptosis (XIAP) siRNA
aagaaaagaagaatagttgttta

SEQ ID NO: 13435 - DNA, 23 bp, Artificial Sequence
  Description of Artificial Sequence: Synthetic oligonucleotide
  X-linked inhibitor of apoptosis (XIAP) siRNA
agaaaagaagaatagttgtttaa

SEQ ID NO: 13436 - DNA, 23 bp, Artificial Sequence
  Description of Artificial Sequence: Synthetic oligonucleotide
  X-linked inhibitor of apoptosis (XIAP) siRNA
gaaaagaagaatagttgtttaaa

SEQ ID NO: 13437 - DNA, 23 bp, Artificial Sequence
  Description of Artificial Sequence: Synthetic oligonucleotide
  X-linked inhibitor of apoptosis (XIAP) siRNA
aaaagaagaatagttgtttaaat

SEQ ID NO: 13438 - DNA, 23 bp, Artificial Sequence
  Description of Artificial Sequence: Synthetic oligonucleotide
  X-linked inhibitor of apoptosis (XIAP) siRNA
aaagaagaatagttgtttaaata

SEQ ID NO: 13439 - DNA, 23 bp, Artificial Sequence
  Description of Artificial Sequence: Synthetic oligonucleotide
  X-linked inhibitor of apoptosis (XIAP) siRNA
aagaagaatagttgtttaaatat

SEQ ID NO: 13440 - DNA, 23 bp, Artificial Sequence
  Description of Artificial Sequence: Synthetic oligonucleotide
  X-linked inhibitor of apoptosis (XIAP) siRNA
agaagaatagttgtttaaatatt

SEQ ID NO: 13441 - DNA, 23 bp, Artificial Sequence
  Description of Artificial Sequence: Synthetic oligonucleotide
  X-linked inhibitor of apoptosis (XIAP) siRNA
gaagaatagttgtttaaatattt

SEQ ID NO: 13442 - DNA, 23 bp, Artificial Sequence
  Description of Artificial Sequence: Synthetic oligonucleotide
  X-linked inhibitor of apoptosis (XIAP) siRNA
aagaatagttgtttaaatatttt

SEQ ID NO: 13443 - DNA, 23 bp, Artificial Sequence
  Description of Artificial Sequence: Synthetic oligonucleotide
  X-linked inhibitor of apoptosis (XIAP) siRNA
agaatagttgtttaaatattttt

SEQ ID NO: 13444 - DNA, 23 bp, Artificial Sequence
  Description of Artificial Sequence: Synthetic oligonucleotide
  X-linked inhibitor of apoptosis (XIAP) siRNA
gaatagttgtttaaatatttttt

SEQ ID NO: 13445 - DNA, 23 bp, Artificial Sequence
  Description of Artificial Sequence: Synthetic oligonucleotide
  X-linked inhibitor of apoptosis (XIAP) siRNA
aatagttgtttaaatatttttta

SEQ ID NO: 13446 - DNA, 23 bp, Artificial Sequence
  Description of Artificial Sequence: Synthetic oligonucleotide
  X-linked inhibitor of apoptosis (XIAP) siRNA
atagttgtttaaatattttttaa

SEQ ID NO: 13447 - DNA, 23 bp, Artificial Sequence
  Description of Artificial Sequence: Synthetic oligonucleotide
  X-linked inhibitor of apoptosis (XIAP) siRNA
tagttgtttaaatattttttaaa

SEQ ID NO: 13448 - DNA, 23 bp, Artificial Sequence
  Description of Artificial Sequence: Synthetic oligonucleotide
  X-linked inhibitor of apoptosis (XIAP) siRNA
agttgtttaaatattttttaaaa

SEQ ID NO: 13449 - DNA, 23 bp, Artificial Sequence
  Description of Artificial Sequence: Synthetic oligonucleotide
  X-linked inhibitor of apoptosis (XIAP) siRNA
gttgtttaaatattttttaaaaa

SEQ ID NO: 13450 - DNA, 23 bp, Artificial Sequence
  Description of Artificial Sequence: Synthetic oligonucleotide
  X-linked inhibitor of apoptosis (XIAP) siRNA
ttgtttaaatattttttaaaaaa

SEQ ID NO: 13451 - DNA, 23 bp, Artificial Sequence
  Description of Artificial Sequence: Synthetic oligonucleotide
  X-linked inhibitor of apoptosis (XIAP) siRNA
tgtttaaatattttttaaaaaac

SEQ ID NO: 13452 - DNA, 23 bp, Artificial Sequence
  Description of Artificial Sequence: Synthetic oligonucleotide
  X-linked inhibitor of apoptosis (XIAP) siRNA
gtttaaatattttttaaaaaaca

SEQ ID NO: 13453 - DNA, 23 bp, Artificial Sequence
  Description of Artificial Sequence: Synthetic oligonucleotide
  X-linked inhibitor of apoptosis (XIAP) siRNA
tttaaatattttttaaaaaacac

SEQ ID NO: 13454 - DNA, 23 bp, Artificial Sequence
  Description of Artificial Sequence: Synthetic oligonucleotide
  X-linked inhibitor of apoptosis (XIAP) siRNA
ttaaatattttttaaaaaacact

SEQ ID NO: 13455 - DNA, 23 bp, Artificial Sequence
  Description of Artificial Sequence: Synthetic oligonucleotide
  X-linked inhibitor of apoptosis (XIAP) siRNA
taaatattttttaaaaaacactt

SEQ ID NO: 13456 - DNA, 23 bp, Artificial Sequence
  Description of Artificial Sequence: Synthetic oligonucleotide
  X-linked inhibitor of apoptosis (XIAP) siRNA
aaatattttttaaaaaacacttg

SEQ ID NO: 13457 - DNA, 23 bp, Artificial Sequence
  Description of Artificial Sequence: Synthetic oligonucleotide
  X-linked inhibitor of apoptosis (XIAP) siRNA
aatattttttaaaaaacacttga

SEQ ID NO: 13458 - DNA, 23 bp, Artificial Sequence
  Description of Artificial Sequence: Synthetic oligonucleotide
  X-linked inhibitor of apoptosis (XIAP) siRNA
atattttttaaaaaacacttgaa

SEQ ID NO: 13459 - DNA, 23 bp, Artificial Sequence
  Description of Artificial Sequence: Synthetic oligonucleotide
  X-linked inhibitor of apoptosis (XIAP) siRNA
tattttttaaaaaacacttgaat

SEQ ID NO: 13460 - DNA, 23 bp, Artificial Sequence
  Description of Artificial Sequence: Synthetic oligonucleotide
  X-linked inhibitor of apoptosis (XIAP) siRNA
attttttaaaaaacacttgaata

SEQ ID NO: 13461 - DNA, 23 bp, Artificial Sequence
  Description of Artificial Sequence: Synthetic oligonucleotide
  X-linked inhibitor of apoptosis (XIAP) siRNA
ttttttaaaaaacacttgaataa

SEQ ID NO: 13462 - DNA, 23 bp, Artificial Sequence
  Description of Artificial Sequence: Synthetic oligonucleotide
  X-linked inhibitor of apoptosis (XIAP) siRNA
tttttaaaaaacacttgaataag

SEQ ID NO: 13463 - DNA, 23 bp, Artificial Sequence
  Description of Artificial Sequence: Synthetic oligonucleotide
  X-linked inhibitor of apoptosis (XIAP) siRNA
ttttaaaaaacacttgaataaga

SEQ ID NO: 13464 - DNA, 23 bp, Artificial Sequence
  Description of Artificial Sequence: Synthetic oligonucleotide
  X-linked inhibitor of apoptosis (XIAP) siRNA
tttaaaaaacacttgaataagaa

SEQ ID NO: 13465 - DNA, 23 bp, Artificial Sequence
  Description of Artificial Sequence: Synthetic oligonucleotide
  X-linked inhibitor of apoptosis (XIAP) siRNA
ttaaaaaacacttgaataagaat

SEQ ID NO: 13466 - DNA, 23 bp, Artificial Sequence
  Description of Artificial Sequence: Synthetic oligonucleotide
  X-linked inhibitor of apoptosis (XIAP) siRNA
taaaaaacacttgaataagaatc

SEQ ID NO: 13467 - DNA, 23 bp, Artificial Sequence
  Description of Artificial Sequence: Synthetic oligonucleotide
  X-linked inhibitor of apoptosis (XIAP) siRNA
aaaaaacacttgaataagaatca

SEQ ID NO: 13468 - DNA, 23 bp, Artificial Sequence
  Description of Artificial Sequence: Synthetic oligonucleotide
  X-linked inhibitor of apoptosis (XIAP) siRNA
aaaaacacttgaataagaatcag

SEQ ID NO: 13469 - DNA, 23 bp, Artificial Sequence
  Description of Artificial Sequence: Synthetic oligonucleotide
  X-linked inhibitor of apoptosis (XIAP) siRNA
aaaacacttgaataagaatcagt

SEQ ID NO: 13470 - DNA, 23 bp, Artificial Sequence
  Description of Artificial Sequence: Synthetic oligonucleotide
  X-linked inhibitor of apoptosis (XIAP) siRNA
aaacacttgaataagaatcagta

SEQ ID NO: 13471 - DNA, 23 bp, Artificial Sequence
  Description of Artificial Sequence: Synthetic oligonucleotide
  X-linked inhibitor of apoptosis (XIAP) siRNA
aacacttgaataagaatcagtag

SEQ ID NO: 13472 - DNA, 23 bp, Artificial Sequence
  Description of Artificial Sequence: Synthetic oligonucleotide
  X-linked inhibitor of apoptosis (XIAP) siRNA
acacttgaataagaatcagtagg

SEQ ID NO: 13473 - DNA, 23 bp, Artificial Sequence
  Description of Artificial Sequence: Synthetic oligonucleotide
  X-linked inhibitor of apoptosis (XIAP) siRNA
cacttgaataagaatcagtaggg

SEQ ID NO: 13474 - DNA, 23 bp, Artificial Sequence
  Description of Artificial Sequence: Synthetic oligonucleotide
  X-linked inhibitor of apoptosis (XIAP) siRNA
acttgaataagaatcagtagggt

SEQ ID NO: 13475 - DNA, 23 bp, Artificial Sequence
  Description of Artificial Sequence: Synthetic oligonucleotide
  X-linked inhibitor of apoptosis (XIAP) siRNA
cttgaataagaatcagtagggta

SEQ ID NO: 13476 - DNA, 23 bp, Artificial Sequence
  Description of Artificial Sequence: Synthetic oligonucleotide
  X-linked inhibitor of apoptosis (XIAP) siRNA
ttgaataagaatcagtagggtat

SEQ ID NO: 13477 - DNA, 23 bp, Artificial Sequence
  Description of Artificial Sequence: Synthetic oligonucleotide
  X-linked inhibitor of apoptosis (XIAP) siRNA
tgaataagaatcagtagggtata

SEQ ID NO: 13478 - DNA, 23 bp, Artificial Sequence
  Description of Artificial Sequence: Synthetic oligonucleotide
  X-linked inhibitor of apoptosis (XIAP) siRNA
gaataagaatcagtagggtataa

SEQ ID NO: 13479 - DNA, 23 bp, Artificial Sequence
  Description of Artificial Sequence: Synthetic oligonucleotide
  X-linked inhibitor of apoptosis (XIAP) siRNA
aataagaatcagtagggtataaa

SEQ ID NO: 13480 - DNA, 23 bp, Artificial Sequence
  Description of Artificial Sequence: Synthetic oligonucleotide
  X-linked inhibitor of apoptosis (XIAP) siRNA
ataagaatcagtagggtataaac

SEQ ID NO: 13481 - DNA, 23 bp, Artificial Sequence
  Description of Artificial Sequence: Synthetic oligonucleotide
  X-linked inhibitor of apoptosis (XIAP) siRNA
taagaatcagtagggtataaact

SEQ ID NO: 13482 - DNA, 23 bp, Artificial Sequence
  Description of Artificial Sequence: Synthetic oligonucleotide
  X-linked inhibitor of apoptosis (XIAP) siRNA
aagaatcagtagggtataaacta

SEQ ID NO: 13483 - DNA, 23 bp, Artificial Sequence
  Description of Artificial Sequence: Synthetic oligonucleotide
  X-linked inhibitor of apoptosis (XIAP) siRNA
agaatcagtagggtataaactag

SEQ ID NO: 13484 - DNA, 23 bp, Artificial Sequence
  Description of Artificial Sequence: Synthetic oligonucleotide
  X-linked inhibitor of apoptosis (XIAP) siRNA
gaatcagtagggtataaactaga

SEQ ID NO: 13485 - DNA, 23 bp, Artificial Sequence
  Description of Artificial Sequence: Synthetic oligonucleotide
  X-linked inhibitor of apoptosis (XIAP) siRNA
aatcagtagggtataaactagaa

SEQ ID NO: 13486 - DNA, 23 bp, Artificial Sequence
  Description of Artificial Sequence: Synthetic oligonucleotide
  X-linked inhibitor of apoptosis (XIAP) siRNA
atcagtagggtataaactagaag

SEQ ID NO: 13487 - DNA, 23 bp, Artificial Sequence
  Description of Artificial Sequence: Synthetic oligonucleotide
  X-linked inhibitor of apoptosis (XIAP) siRNA
tcagtagggtataaactagaagt

SEQ ID NO: 13488 - DNA, 23 bp, Artificial Sequence
  Description of Artificial Sequence: Synthetic oligonucleotide
  X-linked inhibitor of apoptosis (XIAP) siRNA
cagtagggtataaactagaagtt

SEQ ID NO: 13489 - DNA, 23 bp, Artificial Sequence
  Description of Artificial Sequence: Synthetic oligonucleotide
  X-linked inhibitor of apoptosis (XIAP) siRNA
agtagggtataaactagaagttt

SEQ ID NO: 13490 - DNA, 23 bp, Artificial Sequence
  Description of Artificial Sequence: Synthetic oligonucleotide
  X-linked inhibitor of apoptosis (XIAP) siRNA
gtagggtataaactagaagttta

SEQ ID NO: 13491 - DNA, 23 bp, Artificial Sequence
  Description of Artificial Sequence: Synthetic oligonucleotide
  X-linked inhibitor of apoptosis (XIAP) siRNA
tagggtataaactagaagtttaa

SEQ ID NO: 13492 - DNA, 23 bp, Artificial Sequence
  Description of Artificial Sequence: Synthetic oligonucleotide
  X-linked inhibitor of apoptosis (XIAP) siRNA
agggtataaactagaagtttaaa

SEQ ID NO: 13493 - DNA, 23 bp, Artificial Sequence
  Description of Artificial Sequence: Synthetic oligonucleotide
  X-linked inhibitor of apoptosis (XIAP) siRNA
gggtataaactagaagtttaaaa

SEQ ID NO: 13494 - DNA, 23 bp, Artificial Sequence
  Description of Artificial Sequence: Synthetic oligonucleotide
  X-linked inhibitor of apoptosis (XIAP) siRNA
ggtataaactagaagtttaaaaa

SEQ ID NO: 13495 - DNA, 23 bp, Artificial Sequence
  Description of Artificial Sequence: Synthetic oligonucleotide
  X-linked inhibitor of apoptosis (XIAP) siRNA
gtataaactagaagtttaaaaat

SEQ ID NO: 13496 - DNA, 23 bp, Artificial Sequence
  Description of Artificial Sequence: Synthetic oligonucleotide
  X-linked inhibitor of apoptosis (XIAP) siRNA
tataaactagaagtttaaaaatg

SEQ ID NO: 13497 - DNA, 23 bp, Artificial Sequence
  Description of Artificial Sequence: Synthetic oligonucleotide
  X-linked inhibitor of apoptosis (XIAP) siRNA
ataaactagaagtttaaaaatgc

SEQ ID NO: 13498 - DNA, 23 bp, Artificial Sequence
  Description of Artificial Sequence: Synthetic oligonucleotide
  X-linked inhibitor of apoptosis (XIAP) siRNA
taaactagaagtttaaaaatgct

SEQ ID NO: 13499 - DNA, 23 bp, Artificial Sequence
  Description of Artificial Sequence: Synthetic oligonucleotide
  X-linked inhibitor of apoptosis (XIAP) siRNA
aaactagaagtttaaaaatgctt

SEQ ID NO: 13500 - DNA, 23 bp, Artificial Sequence
  Description of Artificial Sequence: Synthetic oligonucleotide
  X-linked inhibitor of apoptosis (XIAP) siRNA
aactagaagtttaaaaatgcttc

SEQ ID NO: 13501 - DNA, 23 bp, Artificial Sequence
  Description of Artificial Sequence: Synthetic oligonucleotide
  X-linked inhibitor of apoptosis (XIAP) siRNA
actagaagtttaaaaatgcttca

SEQ ID NO: 13502 - DNA, 23 bp, Artificial Sequence
  Description of Artificial Sequence: Synthetic oligonucleotide
  X-linked inhibitor of apoptosis (XIAP) siRNA
ctagaagtttaaaaatgcttcat

SEQ ID NO: 13503 - DNA, 23 bp, Artificial Sequence
  Description of Artificial Sequence: Synthetic oligonucleotide
  X-linked inhibitor of apoptosis (XIAP) siRNA
tagaagtttaaaaatgcttcata

SEQ ID NO: 13504 - DNA, 23 bp, Artificial Sequence
  Description of Artificial Sequence: Synthetic oligonucleotide
  X-linked inhibitor of apoptosis (XIAP) siRNA
agaagtttaaaaatgcttcatag

SEQ ID NO: 13505 - DNA, 23 bp, Artificial Sequence
  Description of Artificial Sequence: Synthetic oligonucleotide
  X-linked inhibitor of apoptosis (XIAP) siRNA
gaagtttaaaaatgcttcataga

SEQ ID NO: 13506 - DNA, 23 bp, Artificial Sequence
  Description of Artificial Sequence: Synthetic oligonucleotide
  X-linked inhibitor of apoptosis (XIAP) siRNA
aagtttaaaaatgcttcatagaa

SEQ ID NO: 13507 - DNA, 23 bp, Artificial Sequence
  Description of Artificial Sequence: Synthetic oligonucleotide
  X-linked inhibitor of apoptosis (XIAP) siRNA
agtttaaaaatgcttcatagaac

SEQ ID NO: 13508 - DNA, 23 bp, Artificial Sequence
  Description of Artificial Sequence: Synthetic oligonucleotide
  X-linked inhibitor of apoptosis (XIAP) siRNA
gtttaaaaatgcttcatagaacg

SEQ ID NO: 13509 - DNA, 23 bp, Artificial Sequence
  Description of Artificial Sequence: Synthetic oligonucleotide
  X-linked inhibitor of apoptosis (XIAP) siRNA
tttaaaaatgcttcatagaacgt

SEQ ID NO: 13510 - DNA, 23 bp, Artificial Sequence
  Description of Artificial Sequence: Synthetic oligonucleotide
  X-linked inhibitor of apoptosis (XIAP) siRNA
ttaaaaatgcttcatagaacgtc

SEQ ID NO: 13511 - DNA, 23 bp, Artificial Sequence
  Description of Artificial Sequence: Synthetic oligonucleotide
  X-linked inhibitor of apoptosis (XIAP) siRNA
taaaaatgcttcatagaacgtcc

SEQ ID NO: 13512 - DNA, 23 bp, Artificial Sequence
  Description of Artificial Sequence: Synthetic oligonucleotide
  X-linked inhibitor of apoptosis (XIAP) siRNA
aaaaatgcttcatagaacgtcca

SEQ ID NO: 13513 - DNA, 23 bp, Artificial Sequence
  Description of Artificial Sequence: Synthetic oligonucleotide
  X-linked inhibitor of apoptosis (XIAP) siRNA
aaaatgcttcatagaacgtccag

SEQ ID NO: 13514 - DNA, 23 bp, Artificial Sequence
  Description of Artificial Sequence: Synthetic oligonucleotide
  X-linked inhibitor of apoptosis (XIAP) siRNA
aaatgcttcatagaacgtccagg

SEQ ID NO: 13515 - DNA, 23 bp, Artificial Sequence
  Description of Artificial Sequence: Synthetic oligonucleotide
  X-linked inhibitor of apoptosis (XIAP) siRNA
aatgcttcatagaacgtccaggg

SEQ ID NO: 13516 - DNA, 23 bp, Artificial Sequence
  Description of Artificial Sequence: Synthetic oligonucleotide
  X-linked inhibitor of apoptosis (XIAP) siRNA
atgcttcatagaacgtccagggt

SEQ ID NO: 13517 - DNA, 23 bp, Artificial Sequence
  Description of Artificial Sequence: Synthetic oligonucleotide
  X-linked inhibitor of apoptosis (XIAP) siRNA
tgcttcatagaacgtccagggtt

SEQ ID NO: 13518 - DNA, 23 bp, Artificial Sequence
  Description of Artificial Sequence: Synthetic oligonucleotide
  X-linked inhibitor of apoptosis (XIAP) siRNA
gcttcatagaacgtccagggttt

SEQ ID NO: 13519 - DNA, 23 bp, Artificial Sequence
  Description of Artificial Sequence: Synthetic oligonucleotide
  X-linked inhibitor of apoptosis (XIAP) siRNA
cttcatagaacgtccagggttta

SEQ ID NO: 13520 - DNA, 23 bp, Artificial Sequence
  Description of Artificial Sequence: Synthetic oligonucleotide
  X-linked inhibitor of apoptosis (XIAP) siRNA
ttcatagaacgtccagggtttac

SEQ ID NO: 13521 - DNA, 23 bp, Artificial Sequence
  Description of Artificial Sequence: Synthetic oligonucleotide
  X-linked inhibitor of apoptosis (XIAP) siRNA
tcatagaacgtccagggtttaca

SEQ ID NO: 13522 - DNA, 23 bp, Artificial Sequence
  Description of Artificial Sequence: Synthetic oligonucleotide
  X-linked inhibitor of apoptosis (XIAP) siRNA
catagaacgtccagggtttacat

SEQ ID NO: 13523 - DNA, 23 bp, Artificial Sequence
  Description of Artificial Sequence: Synthetic oligonucleotide
  X-linked inhibitor of apoptosis (XIAP) siRNA
atagaacgtccagggtttacatt

SEQ ID NO: 13524 - DNA, 23 bp, Artificial Sequence
  Description of Artificial Sequence: Synthetic oligonucleotide
  X-linked inhibitor of apoptosis (XIAP) siRNA
tagaacgtccagggtttacatta

SEQ ID NO: 13525 - DNA, 23 bp, Artificial Sequence
  Description of Artificial Sequence: Synthetic oligonucleotide
  X-linked inhibitor of apoptosis (XIAP) siRNA
agaacgtccagggtttacattac

SEQ ID NO: 13526 - DNA, 23 bp, Artificial Sequence
  Description of Artificial Sequence: Synthetic oligonucleotide
  X-linked inhibitor of apoptosis (XIAP) siRNA
gaacgtccagggtttacattaca

SEQ ID NO: 13527 - DNA, 23 bp, Artificial Sequence
  Description of Artificial Sequence: Synthetic oligonucleotide
  X-linked inhibitor of apoptosis (XIAP) siRNA
aacgtccagggtttacattacaa

SEQ ID NO: 13528 - DNA, 23 bp, Artificial Sequence
  Description of Artificial Sequence: Synthetic oligonucleotide
  X-linked inhibitor of apoptosis (XIAP) siRNA
acgtccagggtttacattacaag

SEQ ID NO: 13529 - DNA, 23 bp, Artificial Sequence
  Description of Artificial Sequence: Synthetic oligonucleotide
  X-linked inhibitor of apoptosis (XIAP) siRNA
cgtccagggtttacattacaaga

SEQ ID NO: 13530 - DNA, 23 bp, Artificial Sequence
  Description of Artificial Sequence: Synthetic oligonucleotide
  X-linked inhibitor of apoptosis (XIAP) siRNA
gtccagggtttacattacaagat

SEQ ID NO: 13531 - DNA, 23 bp, Artificial Sequence
  Description of Artificial Sequence: Synthetic oligonucleotide
  X-linked inhibitor of apoptosis (XIAP) siRNA
tccagggtttacattacaagatt

SEQ ID NO: 13532 - DNA, 23 bp, Artificial Sequence
  Description of Artificial Sequence: Synthetic oligonucleotide
  X-linked inhibitor of apoptosis (XIAP) siRNA
ccagggtttacattacaagattc

SEQ ID NO: 13533 - DNA, 23 bp, Artificial Sequence
  Description of Artificial Sequence: Synthetic oligonucleotide
  X-linked inhibitor of apoptosis (XIAP) siRNA
cagggtttacattacaagattct

SEQ ID NO: 13534 - DNA, 23 bp, Artificial Sequence
  Description of Artificial Sequence: Synthetic oligonucleotide
  X-linked inhibitor of apoptosis (XIAP) siRNA
agggtttacattacaagattctc

SEQ ID NO: 13535 - DNA, 23 bp, Artificial Sequence
  Description of Artificial Sequence: Synthetic oligonucleotide
  X-linked inhibitor of apoptosis (XIAP) siRNA
gggtttacattacaagattctca

SEQ ID NO: 13536 - DNA, 23 bp, Artificial Sequence
  Description of Artificial Sequence: Synthetic oligonucleotide
  X-linked inhibitor of apoptosis (XIAP) siRNA
ggtttacattacaagattctcac

SEQ ID NO: 13537 - DNA, 23 bp, Artificial Sequence
  Description of Artificial Sequence: Synthetic oligonucleotide
  X-linked inhibitor of apoptosis (XIAP) siRNA
gtttacattacaagattctcaca

SEQ ID NO: 13538 - DNA, 23 bp, Artificial Sequence
  Description of Artificial Sequence: Synthetic oligonucleotide
  X-linked inhibitor of apoptosis (XIAP) siRNA
tttacattacaagattctcacaa

SEQ ID NO: 13539 - DNA, 23 bp, Artificial Sequence
  Description of Artificial Sequence: Synthetic oligonucleotide
  X-linked inhibitor of apoptosis (XIAP) siRNA
ttacattacaagattctcacaac

SEQ ID NO: 13540 - DNA, 23 bp, Artificial Sequence
  Description of Artificial Sequence: Synthetic oligonucleotide
  X-linked inhibitor of apoptosis (XIAP) siRNA
tacattacaagattctcacaaca

SEQ ID NO: 13541 - DNA, 23 bp, Artificial Sequence
  Description of Artificial Sequence: Synthetic oligonucleotide
  X-linked inhibitor of apoptosis (XIAP) siRNA
acattacaagattctcacaacaa

SEQ ID NO: 13542 - DNA, 23 bp, Artificial Sequence
  Description of Artificial Sequence: Synthetic oligonucleotide
  X-linked inhibitor of apoptosis (XIAP) siRNA
cattacaagattctcacaacaaa

SEQ ID NO: 13543 - DNA, 23 bp, Artificial Sequence
  Description of Artificial Sequence: Synthetic oligonucleotide
  X-linked inhibitor of apoptosis (XIAP) siRNA
attacaagattctcacaacaaac

SEQ ID NO: 13544 - DNA, 23 bp, Artificial Sequence
  Description of Artificial Sequence: Synthetic oligonucleotide
  X-linked inhibitor of apoptosis (XIAP) siRNA
ttacaagattctcacaacaaacc

SEQ ID NO: 13545 - DNA, 23 bp, Artificial Sequence
  Description of Artificial Sequence: Synthetic oligonucleotide
  X-linked inhibitor of apoptosis (XIAP) siRNA
tacaagattctcacaacaaacct

SEQ ID NO: 13546 - DNA, 23 bp, Artificial Sequence
  Description of Artificial Sequence: Synthetic oligonucleotide
  X-linked inhibitor of apoptosis (XIAP) siRNA
acaagattctcacaacaaaccta

SEQ ID NO: 13547 - DNA, 23 bp, Artificial Sequence
  Description of Artificial Sequence: Synthetic oligonucleotide
  X-linked inhibitor of apoptosis (XIAP) siRNA
caagattctcacaacaaacctat

SEQ ID NO: 13548 - DNA, 23 bp, Artificial Sequence
  Description of Artificial Sequence: Synthetic oligonucleotide
  X-linked inhibitor of apoptosis (XIAP) siRNA
aagattctcacaacaaacctatt

SEQ ID NO: 13549 - DNA, 23 bp, Artificial Sequence
  Description of Artificial Sequence: Synthetic oligonucleotide
  X-linked inhibitor of apoptosis (XIAP) siRNA
agattctcacaacaaacctattg

SEQ ID NO: 13550 - DNA, 23 bp, Artificial Sequence
  Description of Artificial Sequence: Synthetic oligonucleotide
  X-linked inhibitor of apoptosis (XIAP) siRNA
gattctcacaacaaacctattgt

SEQ ID NO: 13551 - DNA, 23 bp, Artificial Sequence
  Description of Artificial Sequence: Synthetic oligonucleotide
  X-linked inhibitor of apoptosis (XIAP) siRNA
attctcacaacaaacctattgta

SEQ ID NO: 13552 - DNA, 23 bp, Artificial Sequence
  Description of Artificial Sequence: Synthetic oligonucleotide
  X-linked inhibitor of apoptosis (XIAP) siRNA
ttctcacaacaaacctattgtag

SEQ ID NO: 13553 - DNA, 23 bp, Artificial Sequence
  Description of Artificial Sequence: Synthetic oligonucleotide
  X-linked inhibitor of apoptosis (XIAP) siRNA
tctcacaacaaacctattgtaga

SEQ ID NO: 13554 - DNA, 23 bp, Artificial Sequence
  Description of Artificial Sequence: Synthetic oligonucleotide
  X-linked inhibitor of apoptosis (XIAP) siRNA
ctcacaacaaacctattgtagag

SEQ ID NO: 13555 - DNA, 23 bp, Artificial Sequence
  Description of Artificial Sequence: Synthetic oligonucleotide
  X-linked inhibitor of apoptosis (XIAP) siRNA
tcacaacaaacctattgtagagg

SEQ ID NO: 13556 - DNA, 23 bp, Artificial Sequence
  Description of Artificial Sequence: Synthetic oligonucleotide
  X-linked inhibitor of apoptosis (XIAP) siRNA
cacaacaaacctattgtagaggt

SEQ ID NO: 13557 - DNA, 23 bp, Artificial Sequence
  Description of Artificial Sequence: Synthetic oligonucleotide
  X-linked inhibitor of apoptosis (XIAP) siRNA
acaacaaacctattgtagaggtg

SEQ ID NO: 13558 - DNA, 23 bp, Artificial Sequence
  Description of Artificial Sequence: Synthetic oligonucleotide
  X-linked inhibitor of apoptosis (XIAP) siRNA
caacaaacctattgtagaggtga

SEQ ID NO: 13559 - DNA, 23 bp, Artificial Sequence
  Description of Artificial Sequence: Synthetic oligonucleotide
  X-linked inhibitor of apoptosis (XIAP) siRNA
aacaaacctattgtagaggtgag

SEQ ID NO: 13560 - DNA, 23 bp, Artificial Sequence
  Description of Artificial Sequence: Synthetic oligonucleotide
  X-linked inhibitor of apoptosis (XIAP) siRNA
acaaacctattgtagaggtgagt

SEQ ID NO: 13561 - DNA, 23 bp, Artificial Sequence
  Description of Artificial Sequence: Synthetic oligonucleotide
  X-linked inhibitor of apoptosis (XIAP) siRNA
caaacctattgtagaggtgagta

SEQ ID NO: 13562 - DNA, 23 bp, Artificial Sequence
  Description of Artificial Sequence: Synthetic oligonucleotide
  X-linked inhibitor of apoptosis (XIAP) siRNA
aaacctattgtagaggtgagtaa

SEQ ID NO: 13563 - DNA, 23 bp, Artificial Sequence
  Description of Artificial Sequence: Synthetic oligonucleotide
  X-linked inhibitor of apoptosis (XIAP) siRNA
aacctattgtagaggtgagtaag

SEQ ID NO: 13564 - DNA, 23 bp, Artificial Sequence
  Description of Artificial Sequence: Synthetic oligonucleotide
  X-linked inhibitor of apoptosis (XIAP) siRNA
acctattgtagaggtgagtaagg

SEQ ID NO: 13565 - DNA, 23 bp, Artificial Sequence
  Description of Artificial Sequence: Synthetic oligonucleotide
  X-linked inhibitor of apoptosis (XIAP) siRNA
cctattgtagaggtgagtaaggc

SEQ ID NO: 13566 - DNA, 23 bp, Artificial Sequence
  Description of Artificial Sequence: Synthetic oligonucleotide
  X-linked inhibitor of apoptosis (XIAP) siRNA
ctattgtagaggtgagtaaggca

SEQ ID NO: 13567 - DNA, 23 bp, Artificial Sequence
  Description of Artificial Sequence: Synthetic oligonucleotide
  X-linked inhibitor of apoptosis (XIAP) siRNA
tattgtagaggtgagtaaggcat

SEQ ID NO: 13568 - DNA, 23 bp, Artificial Sequence
  Description of Artificial Sequence: Synthetic oligonucleotide
  X-linked inhibitor of apoptosis (XIAP) siRNA
attgtagaggtgagtaaggcatg

SEQ ID NO: 13569 - DNA, 23 bp, Artificial Sequence
  Description of Artificial Sequence: Synthetic oligonucleotide
  X-linked inhibitor of apoptosis (XIAP) siRNA
ttgtagaggtgagtaaggcatgt

SEQ ID NO: 13570 - DNA, 23 bp, Artificial Sequence
  Description of Artificial Sequence: Synthetic oligonucleotide
  X-linked inhibitor of apoptosis (XIAP) siRNA
tgtagaggtgagtaaggcatgtt

SEQ ID NO: 13571 - DNA, 23 bp, Artificial Sequence
  Description of Artificial Sequence: Synthetic oligonucleotide
  X-linked inhibitor of apoptosis (XIAP) siRNA
gtagaggtgagtaaggcatgtta

SEQ ID NO: 13572 - DNA, 23 bp, Artificial Sequence
  Description of Artificial Sequence: Synthetic oligonucleotide
  X-linked inhibitor of apoptosis (XIAP) siRNA
tagaggtgagtaaggcatgttac

SEQ ID NO: 13573 - DNA, 23 bp, Artificial Sequence
  Description of Artificial Sequence: Synthetic oligonucleotide
  X-linked inhibitor of apoptosis (XIAP) siRNA
agaggtgagtaaggcatgttact

SEQ ID NO: 13574 - DNA, 23 bp, Artificial Sequence
  Description of Artificial Sequence: Synthetic oligonucleotide
  X-linked inhibitor of apoptosis (XIAP) siRNA
gaggtgagtaaggcatgttacta

SEQ ID NO: 13575 - DNA, 23 bp, Artificial Sequence
  Description of Artificial Sequence: Synthetic oligonucleotide
  X-linked inhibitor of apoptosis (XIAP) siRNA
aggtgagtaaggcatgttactac

SEQ ID NO: 13576 - DNA, 23 bp, Artificial Sequence
  Description of Artificial Sequence: Synthetic oligonucleotide
  X-linked inhibitor of apoptosis (XIAP) siRNA
ggtgagtaaggcatgttactaca

SEQ ID NO: 13577 - DNA, 23 bp, Artificial Sequence
  Description of Artificial Sequence: Synthetic oligonucleotide
  X-linked inhibitor of apoptosis (XIAP) siRNA
gtgagtaaggcatgttactacag

SEQ ID NO: 13578 - DNA, 23 bp, Artificial Sequence
  Description of Artificial Sequence: Synthetic oligonucleotide
  X-linked inhibitor of apoptosis (XIAP) siRNA
tgagtaaggcatgttactacaga

SEQ ID NO: 13579 - DNA, 23 bp, Artificial Sequence
  Description of Artificial Sequence: Synthetic oligonucleotide
  X-linked inhibitor of apoptosis (XIAP) siRNA
gagtaaggcatgttactacagag

SEQ ID NO: 13580 - DNA, 23 bp, Artificial Sequence
  Description of Artificial Sequence: Synthetic oligonucleotide
  X-linked inhibitor of apoptosis (XIAP) siRNA
agtaaggcatgttactacagagg

SEQ ID NO: 13581 - DNA, 23 bp, Artificial Sequence
  Description of Artificial Sequence: Synthetic oligonucleotide
  X-linked inhibitor of apoptosis (XIAP) siRNA
gtaaggcatgttactacagagga

SEQ ID NO: 13582 - DNA, 23 bp, Artificial Sequence
  Description of Artificial Sequence: Synthetic oligonucleotide
  X-linked inhibitor of apoptosis (XIAP) siRNA
taaggcatgttactacagaggaa

SEQ ID NO: 13583 - DNA, 23 bp, Artificial Sequence
  Description of Artificial Sequence: Synthetic oligonucleotide
  X-linked inhibitor of apoptosis (XIAP) siRNA
aaggcatgttactacagaggaaa

SEQ ID NO: 13584 - DNA, 23 bp, Artificial Sequence
  Description of Artificial Sequence: Synthetic oligonucleotide
  X-linked inhibitor of apoptosis (XIAP) siRNA
aggcatgttactacagaggaaag

SEQ ID NO: 13585 - DNA, 23 bp, Artificial Sequence
  Description of Artificial Sequence: Synthetic oligonucleotide
  X-linked inhibitor of apoptosis (XIAP) siRNA
ggcatgttactacagaggaaagt

SEQ ID NO: 13586 - DNA, 23 bp, Artificial Sequence
  Description of Artificial Sequence: Synthetic oligonucleotide
  X-linked inhibitor of apoptosis (XIAP) siRNA
gcatgttactacagaggaaagtt

SEQ ID NO: 13587 - DNA, 23 bp, Artificial Sequence
  Description of Artificial Sequence: Synthetic oligonucleotide
  X-linked inhibitor of apoptosis (XIAP) siRNA
catgttactacagaggaaagttt

SEQ ID NO: 13588 - DNA, 23 bp, Artificial Sequence
  Description of Artificial Sequence: Synthetic oligonucleotide
  X-linked inhibitor of apoptosis (XIAP) siRNA
atgttactacagaggaaagtttg

SEQ ID NO: 13589 - DNA, 23 bp, Artificial Sequence
  Description of Artificial Sequence: Synthetic oligonucleotide
  X-linked inhibitor of apoptosis (XIAP) siRNA
tgttactacagaggaaagtttga

SEQ ID NO: 13590 - DNA, 23 bp, Artificial Sequence
  Description of Artificial Sequence: Synthetic oligonucleotide
  X-linked inhibitor of apoptosis (XIAP) siRNA
gttactacagaggaaagtttgag

SEQ ID NO: 13591 - DNA, 23 bp, Artificial Sequence
  Description of Artificial Sequence: Synthetic oligonucleotide
  X-linked inhibitor of apoptosis (XIAP) siRNA
ttactacagaggaaagtttgaga

SEQ ID NO: 13592 - DNA, 23 bp, Artificial Sequence
  Description of Artificial Sequence: Synthetic oligonucleotide
  X-linked inhibitor of apoptosis (XIAP) siRNA
tactacagaggaaagtttgagag

SEQ ID NO: 13593 - DNA, 23 bp, Artificial Sequence
  Description of Artificial Sequence: Synthetic oligonucleotide
  X-linked inhibitor of apoptosis (XIAP) siRNA
actacagaggaaagtttgagagt

SEQ ID NO: 13594 - DNA, 23 bp, Artificial Sequence
  Description of Artificial Sequence: Synthetic oligonucleotide
  X-linked inhibitor of apoptosis (XIAP) siRNA
ctacagaggaaagtttgagagta

SEQ ID NO: 13595 - DNA, 23 bp, Artificial Sequence
  Description of Artificial Sequence: Synthetic oligonucleotide
  X-linked inhibitor of apoptosis (XIAP) siRNA
tacagaggaaagtttgagagtaa

SEQ ID NO: 13596 - DNA, 23 bp, Artificial Sequence
  Description of Artificial Sequence: Synthetic oligonucleotide
  X-linked inhibitor of apoptosis (XIAP) siRNA
acagaggaaagtttgagagtaaa

SEQ ID NO: 13597 - DNA, 23 bp, Artificial Sequence
  Description of Artificial Sequence: Synthetic oligonucleotide
  X-linked inhibitor of apoptosis (XIAP) siRNA
cagaggaaagtttgagagtaaaa

SEQ ID NO: 13598 - DNA, 23 bp, Artificial Sequence
  Description of Artificial Sequence: Synthetic oligonucleotide
  X-linked inhibitor of apoptosis (XIAP) siRNA
agaggaaagtttgagagtaaaac

SEQ ID NO: 13599 - DNA, 23 bp, Artificial Sequence
  Description of Artificial Sequence: Synthetic oligonucleotide
  X-linked inhibitor of apoptosis (XIAP) siRNA
gaggaaagtttgagagtaaaact

SEQ ID NO: 13600 - DNA, 23 bp, Artificial Sequence
  Description of Artificial Sequence: Synthetic oligonucleotide
  X-linked inhibitor of apoptosis (XIAP) siRNA
aggaaagtttgagagtaaaactg

SEQ ID NO: 13601 - DNA, 23 bp, Artificial Sequence
  Description of Artificial Sequence: Synthetic oligonucleotide
  X-linked inhibitor of apoptosis (XIAP) siRNA
ggaaagtttgagagtaaaactgt

SEQ ID NO: 13602 - DNA, 23 bp, Artificial Sequence
  Description of Artificial Sequence: Synthetic oligonucleotide
  X-linked inhibitor of apoptosis (XIAP) siRNA
gaaagtttgagagtaaaactgta

SEQ ID NO: 13603 - DNA, 23 bp, Artificial Sequence
  Description of Artificial Sequence: Synthetic oligonucleotide
  X-linked inhibitor of apoptosis (XIAP) siRNA
aaagtttgagagtaaaactgtaa

SEQ ID NO: 13604 - DNA, 23 bp, Artificial Sequence
  Description of Artificial Sequence: Synthetic oligonucleotide
  X-linked inhibitor of apoptosis (XIAP) siRNA
aagtttgagagtaaaactgtaaa

SEQ ID NO: 13605 - DNA, 23 bp, Artificial Sequence
  Description of Artificial Sequence: Synthetic oligonucleotide
  X-linked inhibitor of apoptosis (XIAP) siRNA
agtttgagagtaaaactgtaaaa

SEQ ID NO: 13606 - DNA, 23 bp, Artificial Sequence
  Description of Artificial Sequence: Synthetic oligonucleotide
  X-linked inhibitor of apoptosis (XIAP) siRNA
gtttgagagtaaaactgtaaaaa

SEQ ID NO: 13607 - DNA, 23 bp, Artificial Sequence
  Description of Artificial Sequence: Synthetic oligonucleotide
  X-linked inhibitor of apoptosis (XIAP) siRNA
tttgagagtaaaactgtaaaaaa

SEQ ID NO: 13608 - DNA, 23 bp, Artificial Sequence
  Description of Artificial Sequence: Synthetic oligonucleotide
  X-linked inhibitor of apoptosis (XIAP) siRNA
ttgagagtaaaactgtaaaaaat

SEQ ID NO: 13609 - DNA, 23 bp, Artificial Sequence
  Description of Artificial Sequence: Synthetic oligonucleotide
  X-linked inhibitor of apoptosis (XIAP) siRNA
tgagagtaaaactgtaaaaaatt

SEQ ID NO: 13610 - DNA, 23 bp, Artificial Sequence
  Description of Artificial Sequence: Synthetic oligonucleotide
  X-linked inhibitor of apoptosis (XIAP) siRNA
gagagtaaaactgtaaaaaatta

SEQ ID NO: 13611 - DNA, 23 bp, Artificial Sequence
  Description of Artificial Sequence: Synthetic oligonucleotide
  X-linked inhibitor of apoptosis (XIAP) siRNA
agagtaaaactgtaaaaaattat

SEQ ID NO: 13612 - DNA, 23 bp, Artificial Sequence
  Description of Artificial Sequence: Synthetic oligonucleotide
  X-linked inhibitor of apoptosis (XIAP) siRNA
gagtaaaactgtaaaaaattata

SEQ ID NO: 13613 - DNA, 23 bp, Artificial Sequence
  Description of Artificial Sequence: Synthetic oligonucleotide
  X-linked inhibitor of apoptosis (XIAP) siRNA
agtaaaactgtaaaaaattatat

SEQ ID NO: 13614 - DNA, 23 bp, Artificial Sequence
  Description of Artificial Sequence: Synthetic oligonucleotide
  X-linked inhibitor of apoptosis (XIAP) siRNA
gtaaaactgtaaaaaattatatt

SEQ ID NO: 13615 - DNA, 23 bp, Artificial Sequence
  Description of Artificial Sequence: Synthetic oligonucleotide
  X-linked inhibitor of apoptosis (XIAP) siRNA
taaaactgtaaaaaattatattt

SEQ ID NO: 13616 - DNA, 23 bp, Artificial Sequence
  Description of Artificial Sequence: Synthetic oligonucleotide
  X-linked inhibitor of apoptosis (XIAP) siRNA
aaaactgtaaaaaattatatttt

SEQ ID NO: 13617 - DNA, 23 bp, Artificial Sequence
  Description of Artificial Sequence: Synthetic oligonucleotide
  X-linked inhibitor of apoptosis (XIAP) siRNA
aaactgtaaaaaattatattttt

SEQ ID NO: 13618 - DNA, 23 bp, Artificial Sequence
  Description of Artificial Sequence: Synthetic oligonucleotide
  X-linked inhibitor of apoptosis (XIAP) siRNA
aactgtaaaaaattatatttttg

SEQ ID NO: 13619 - DNA, 23 bp, Artificial Sequence
  Description of Artificial Sequence: Synthetic oligonucleotide
  X-linked inhibitor of apoptosis (XIAP) siRNA
actgtaaaaaattatatttttgt

SEQ ID NO: 13620 - DNA, 23 bp, Artificial Sequence
  Description of Artificial Sequence: Synthetic oligonucleotide
  X-linked inhibitor of apoptosis (XIAP) siRNA
ctgtaaaaaattatatttttgtt

SEQ ID NO: 13621 - DNA, 23 bp, Artificial Sequence
  Description of Artificial Sequence: Synthetic oligonucleotide
  X-linked inhibitor of apoptosis (XIAP) siRNA
tgtaaaaaattatatttttgttg

SEQ ID NO: 13622 - DNA, 23 bp, Artificial Sequence
  Description of Artificial Sequence: Synthetic oligonucleotide
  X-linked inhibitor of apoptosis (XIAP) siRNA
gtaaaaaattatatttttgttgt

SEQ ID NO: 13623 - DNA, 23 bp, Artificial Sequence
  Description of Artificial Sequence: Synthetic oligonucleotide
  X-linked inhibitor of apoptosis (XIAP) siRNA
taaaaaattatatttttgttgta

SEQ ID NO: 13624 - DNA, 23 bp, Artificial Sequence
  Description of Artificial Sequence: Synthetic oligonucleotide
  X-linked inhibitor of apoptosis (XIAP) siRNA
aaaaaattatatttttgttgtac

SEQ ID NO: 13625 - DNA, 23 bp, Artificial Sequence
  Description of Artificial Sequence: Synthetic oligonucleotide
  X-linked inhibitor of apoptosis (XIAP) siRNA
aaaaattatatttttgttgtact

SEQ ID NO: 13626 - DNA, 23 bp, Artificial Sequence
  Description of Artificial Sequence: Synthetic oligonucleotide
  X-linked inhibitor of apoptosis (XIAP) siRNA
aaaattatatttttgttgtactt

SEQ ID NO: 13627 - DNA, 23 bp, Artificial Sequence
  Description of Artificial Sequence: Synthetic oligonucleotide
  X-linked inhibitor of apoptosis (XIAP) siRNA
aaattatatttttgttgtacttt

SEQ ID NO: 13628 - DNA, 23 bp, Artificial Sequence
  Description of Artificial Sequence: Synthetic oligonucleotide
  X-linked inhibitor of apoptosis (XIAP) siRNA
aattatatttttgttgtactttc

SEQ ID NO: 13629 - DNA, 23 bp, Artificial Sequence
  Description of Artificial Sequence: Synthetic oligonucleotide
  X-linked inhibitor of apoptosis (XIAP) siRNA
attatatttttgttgtactttct

SEQ ID NO: 13630 - DNA, 23 bp, Artificial Sequence
  Description of Artificial Sequence: Synthetic oligonucleotide
  X-linked inhibitor of apoptosis (XIAP) siRNA
ttatatttttgttgtactttcta

SEQ ID NO: 13631 - DNA, 23 bp, Artificial Sequence
  Description of Artificial Sequence: Synthetic oligonucleotide
  X-linked inhibitor of apoptosis (XIAP) siRNA
tatatttttgttgtactttctaa

SEQ ID NO: 13632 - DNA, 23 bp, Artificial Sequence
  Description of Artificial Sequence: Synthetic oligonucleotide
  X-linked inhibitor of apoptosis (XIAP) siRNA
atatttttgttgtactttctaag

SEQ ID NO: 13633 - DNA, 23 bp, Artificial Sequence
  Description of Artificial Sequence: Synthetic oligonucleotide
  X-linked inhibitor of apoptosis (XIAP) siRNA
tatttttgttgtactttctaaga

SEQ ID NO: 13634 - DNA, 23 bp, Artificial Sequence
  Description of Artificial Sequence: Synthetic oligonucleotide
  X-linked inhibitor of apoptosis (XIAP) siRNA
atttttgttgtactttctaagag

SEQ ID NO: 13635 - DNA, 23 bp, Artificial Sequence
  Description of Artificial Sequence: Synthetic oligonucleotide
  X-linked inhibitor of apoptosis (XIAP) siRNA
tttttgttgtactttctaagaga

SEQ ID NO: 13636 - DNA, 23 bp, Artificial Sequence
  Description of Artificial Sequence: Synthetic oligonucleotide
  X-linked inhibitor of apoptosis (XIAP) siRNA
ttttgttgtactttctaagagaa

SEQ ID NO: 13637 - DNA, 23 bp, Artificial Sequence
  Description of Artificial Sequence: Synthetic oligonucleotide
  X-linked inhibitor of apoptosis (XIAP) siRNA
tttgttgtactttctaagagaaa

SEQ ID NO: 13638 - DNA, 23 bp, Artificial Sequence
  Description of Artificial Sequence: Synthetic oligonucleotide
  X-linked inhibitor of apoptosis (XIAP) siRNA
ttgttgtactttctaagagaaag

SEQ ID NO: 13639 - DNA, 23 bp, Artificial Sequence
  Description of Artificial Sequence: Synthetic oligonucleotide
  X-linked inhibitor of apoptosis (XIAP) siRNA
tgttgtactttctaagagaaaga

SEQ ID NO: 13640 - DNA, 23 bp, Artificial Sequence
  Description of Artificial Sequence: Synthetic oligonucleotide
  X-linked inhibitor of apoptosis (XIAP) siRNA
gttgtactttctaagagaaagag

SEQ ID NO: 13641 - DNA, 23 bp, Artificial Sequence
  Description of Artificial Sequence: Synthetic oligonucleotide
  X-linked inhibitor of apoptosis (XIAP) siRNA
ttgtactttctaagagaaagagt

SEQ ID NO: 13642 - DNA, 23 bp, Artificial Sequence
  Description of Artificial Sequence: Synthetic oligonucleotide
  X-linked inhibitor of apoptosis (XIAP) siRNA
tgtactttctaagagaaagagta

SEQ ID NO: 13643 - DNA, 23 bp, Artificial Sequence
  Description of Artificial Sequence: Synthetic oligonucleotide
  X-linked inhibitor of apoptosis (XIAP) siRNA
gtactttctaagagaaagagtat

SEQ ID NO: 13644 - DNA, 23 bp, Artificial Sequence
  Description of Artificial Sequence: Synthetic oligonucleotide
  X-linked inhibitor of apoptosis (XIAP) siRNA
tactttctaagagaaagagtatt

SEQ ID NO: 13645 - DNA, 23 bp, Artificial Sequence
  Description of Artificial Sequence: Synthetic oligonucleotide
  X-linked inhibitor of apoptosis (XIAP) siRNA
actttctaagagaaagagtattg

SEQ ID NO: 13646 - DNA, 23 bp, Artificial Sequence
  Description of Artificial Sequence: Synthetic oligonucleotide
  X-linked inhibitor of apoptosis (XIAP) siRNA
ctttctaagagaaagagtattgt

SEQ ID NO: 13647 - DNA, 23 bp, Artificial Sequence
  Description of Artificial Sequence: Synthetic oligonucleotide
  X-linked inhibitor of apoptosis (XIAP) siRNA
tttctaagagaaagagtattgtt

SEQ ID NO: 13648 - DNA, 23 bp, Artificial Sequence
  Description of Artificial Sequence: Synthetic oligonucleotide
  X-linked inhibitor of apoptosis (XIAP) siRNA
ttctaagagaaagagtattgtta

SEQ ID NO: 13649 - DNA, 23 bp, Artificial Sequence
  Description of Artificial Sequence: Synthetic oligonucleotide
  X-linked inhibitor of apoptosis (XIAP) siRNA
tctaagagaaagagtattgttat

SEQ ID NO: 13650 - DNA, 23 bp, Artificial Sequence
  Description of Artificial Sequence: Synthetic oligonucleotide
  X-linked inhibitor of apoptosis (XIAP) siRNA
ctaagagaaagagtattgttatg

SEQ ID NO: 13651 - DNA, 23 bp, Artificial Sequence
  Description of Artificial Sequence: Synthetic oligonucleotide
  X-linked inhibitor of apoptosis (XIAP) siRNA
taagagaaagagtattgttatgt

SEQ ID NO: 13652 - DNA, 23 bp, Artificial Sequence
  Description of Artificial Sequence: Synthetic oligonucleotide
  X-linked inhibitor of apoptosis (XIAP) siRNA
aagagaaagagtattgttatgtt

SEQ ID NO: 13653 - DNA, 23 bp, Artificial Sequence
  Description of Artificial Sequence: Synthetic oligonucleotide
  X-linked inhibitor of apoptosis (XIAP) siRNA
agagaaagagtattgttatgttc

SEQ ID NO: 13654 - DNA, 23 bp, Artificial Sequence
  Description of Artificial Sequence: Synthetic oligonucleotide
  X-linked inhibitor of apoptosis (XIAP) siRNA
gagaaagagtattgttatgttct

SEQ ID NO: 13655 - DNA, 23 bp, Artificial Sequence
  Description of Artificial Sequence: Synthetic oligonucleotide
  X-linked inhibitor of apoptosis (XIAP) siRNA
agaaagagtattgttatgttctc

SEQ ID NO: 13656 - DNA, 23 bp, Artificial Sequence
  Description of Artificial Sequence: Synthetic oligonucleotide
  X-linked inhibitor of apoptosis (XIAP) siRNA
gaaagagtattgttatgttctcc

SEQ ID NO: 13657 - DNA, 23 bp, Artificial Sequence
  Description of Artificial Sequence: Synthetic oligonucleotide
  X-linked inhibitor of apoptosis (XIAP) siRNA
aaagagtattgttatgttctcct

SEQ ID NO: 13658 - DNA, 23 bp, Artificial Sequence
  Description of Artificial Sequence: Synthetic oligonucleotide
  X-linked inhibitor of apoptosis (XIAP) siRNA
aagagtattgttatgttctccta

SEQ ID NO: 13659 - DNA, 23 bp, Artificial Sequence
  Description of Artificial Sequence: Synthetic oligonucleotide
  X-linked inhibitor of apoptosis (XIAP) siRNA
agagtattgttatgttctcctaa

SEQ ID NO: 13660 - DNA, 23 bp, Artificial Sequence
  Description of Artificial Sequence: Synthetic oligonucleotide
  X-linked inhibitor of apoptosis (XIAP) siRNA
gagtattgttatgttctcctaac

SEQ ID NO: 13661 - DNA, 23 bp, Artificial Sequence
  Description of Artificial Sequence: Synthetic oligonucleotide
  X-linked inhibitor of apoptosis (XIAP) siRNA
agtattgttatgttctcctaact

SEQ ID NO: 13662 - DNA, 23 bp, Artificial Sequence
  Description of Artificial Sequence: Synthetic oligonucleotide
  X-linked inhibitor of apoptosis (XIAP) siRNA
gtattgttatgttctcctaactt

SEQ ID NO: 13663 - DNA, 23 bp, Artificial Sequence
  Description of Artificial Sequence: Synthetic oligonucleotide
  X-linked inhibitor of apoptosis (XIAP) siRNA
tattgttatgttctcctaacttc

SEQ ID NO: 13664 - DNA, 23 bp, Artificial Sequence
  Description of Artificial Sequence: Synthetic oligonucleotide
  X-linked inhibitor of apoptosis (XIAP) siRNA
attgttatgttctcctaacttct

SEQ ID NO: 13665 - DNA, 23 bp, Artificial Sequence
  Description of Artificial Sequence: Synthetic oligonucleotide
  X-linked inhibitor of apoptosis (XIAP) siRNA
ttgttatgttctcctaacttctg

SEQ ID NO: 13666 - DNA, 23 bp, Artificial Sequence
  Description of Artificial Sequence: Synthetic oligonucleotide
  X-linked inhibitor of apoptosis (XIAP) siRNA
tgttatgttctcctaacttctgt

SEQ ID NO: 13667 - DNA, 23 bp, Artificial Sequence
  Description of Artificial Sequence: Synthetic oligonucleotide
  X-linked inhibitor of apoptosis (XIAP) siRNA
gttatgttctcctaacttctgtt

SEQ ID NO: 13668 - DNA, 23 bp, Artificial Sequence
  Description of Artificial Sequence: Synthetic oligonucleotide
  X-linked inhibitor of apoptosis (XIAP) siRNA
ttatgttctcctaacttctgttg

SEQ ID NO: 13669 - DNA, 23 bp, Artificial Sequence
  Description of Artificial Sequence: Synthetic oligonucleotide
  X-linked inhibitor of apoptosis (XIAP) siRNA
tatgttctcctaacttctgttga

SEQ ID NO: 13670 - DNA, 23 bp, Artificial Sequence
  Description of Artificial Sequence: Synthetic oligonucleotide
  X-linked inhibitor of apoptosis (XIAP) siRNA
atgttctcctaacttctgttgat

SEQ ID NO: 13671 - DNA, 23 bp, Artificial Sequence
  Description of Artificial Sequence: Synthetic oligonucleotide
  X-linked inhibitor of apoptosis (XIAP) siRNA
tgttctcctaacttctgttgatt

SEQ ID NO: 13672 - DNA, 23 bp, Artificial Sequence
  Description of Artificial Sequence: Synthetic oligonucleotide
  X-linked inhibitor of apoptosis (XIAP) siRNA
gttctcctaacttctgttgatta

SEQ ID NO: 13673 - DNA, 23 bp, Artificial Sequence
  Description of Artificial Sequence: Synthetic oligonucleotide
  X-linked inhibitor of apoptosis (XIAP) siRNA
ttctcctaacttctgttgattac

SEQ ID NO: 13674 - DNA, 23 bp, Artificial Sequence
  Description of Artificial Sequence: Synthetic oligonucleotide
  X-linked inhibitor of apoptosis (XIAP) siRNA
tctcctaacttctgttgattact

SEQ ID NO: 13675 - DNA, 23 bp, Artificial Sequence
  Description of Artificial Sequence: Synthetic oligonucleotide
  X-linked inhibitor of apoptosis (XIAP) siRNA
ctcctaacttctgttgattacta

SEQ ID NO: 13676 - DNA, 23 bp, Artificial Sequence
  Description of Artificial Sequence: Synthetic oligonucleotide
  X-linked inhibitor of apoptosis (XIAP) siRNA
tcctaacttctgttgattactac

SEQ ID NO: 13677 - DNA, 23 bp, Artificial Sequence
  Description of Artificial Sequence: Synthetic oligonucleotide
  X-linked inhibitor of apoptosis (XIAP) siRNA
cctaacttctgttgattactact

SEQ ID NO: 13678 - DNA, 23 bp, Artificial Sequence
  Description of Artificial Sequence: Synthetic oligonucleotide
  X-linked inhibitor of apoptosis (XIAP) siRNA
ctaacttctgttgattactactt

SEQ ID NO: 13679 - DNA, 23 bp, Artificial Sequence
  Description of Artificial Sequence: Synthetic oligonucleotide
  X-linked inhibitor of apoptosis (XIAP) siRNA
taacttctgttgattactacttt

SEQ ID NO: 13680 - DNA, 23 bp, Artificial Sequence
  Description of Artificial Sequence: Synthetic oligonucleotide
  X-linked inhibitor of apoptosis (XIAP) siRNA
aacttctgttgattactacttta

SEQ ID NO: 13681 - DNA, 23 bp, Artificial Sequence
  Description of Artificial Sequence: Synthetic oligonucleotide
  X-linked inhibitor of apoptosis (XIAP) siRNA
acttctgttgattactactttaa

SEQ ID NO: 13682 - DNA, 23 bp, Artificial Sequence
  Description of Artificial Sequence: Synthetic oligonucleotide
  X-linked inhibitor of apoptosis (XIAP) siRNA
cttctgttgattactactttaag

SEQ ID NO: 13683 - DNA, 23 bp, Artificial Sequence
  Description of Artificial Sequence: Synthetic oligonucleotide
  X-linked inhibitor of apoptosis (XIAP) siRNA
ttctgttgattactactttaagt

SEQ ID NO: 13684 - DNA, 23 bp, Artificial Sequence
  Description of Artificial Sequence: Synthetic oligonucleotide
  X-linked inhibitor of apoptosis (XIAP) siRNA
tctgttgattactactttaagtg

SEQ ID NO: 13685 - DNA, 23 bp, Artificial Sequence
  Description of Artificial Sequence: Synthetic oligonucleotide
  X-linked inhibitor of apoptosis (XIAP) siRNA
ctgttgattactactttaagtga

SEQ ID NO: 13686 - DNA, 23 bp, Artificial Sequence
  Description of Artificial Sequence: Synthetic oligonucleotide
  X-linked inhibitor of apoptosis (XIAP) siRNA
tgttgattactactttaagtgat

SEQ ID NO: 13687 - DNA, 23 bp, Artificial Sequence
  Description of Artificial Sequence: Synthetic oligonucleotide
  X-linked inhibitor of apoptosis (XIAP) siRNA
gttgattactactttaagtgata

SEQ ID NO: 13688 - DNA, 23 bp, Artificial Sequence
  Description of Artificial Sequence: Synthetic oligonucleotide
  X-linked inhibitor of apoptosis (XIAP) siRNA
ttgattactactttaagtgatat

SEQ ID NO: 13689 - DNA, 23 bp, Artificial Sequence
  Description of Artificial Sequence: Synthetic oligonucleotide
  X-linked inhibitor of apoptosis (XIAP) siRNA
tgattactactttaagtgatatt

SEQ ID NO: 13690 - DNA, 23 bp, Artificial Sequence
  Description of Artificial Sequence: Synthetic oligonucleotide
  X-linked inhibitor of apoptosis (XIAP) siRNA
gattactactttaagtgatattc

SEQ ID NO: 13691 - DNA, 23 bp, Artificial Sequence
  Description of Artificial Sequence: Synthetic oligonucleotide
  X-linked inhibitor of apoptosis (XIAP) siRNA
attactactttaagtgatattca

SEQ ID NO: 13692 - DNA, 23 bp, Artificial Sequence
  Description of Artificial Sequence: Synthetic oligonucleotide
  X-linked inhibitor of apoptosis (XIAP) siRNA
ttactactttaagtgatattcat

SEQ ID NO: 13693 - DNA, 23 bp, Artificial Sequence
  Description of Artificial Sequence: Synthetic oligonucleotide
  X-linked inhibitor of apoptosis (XIAP) siRNA
tactactttaagtgatattcatt

SEQ ID NO: 13694 - DNA, 23 bp, Artificial Sequence
  Description of Artificial Sequence: Synthetic oligonucleotide
  X-linked inhibitor of apoptosis (XIAP) siRNA
actactttaagtgatattcattt

SEQ ID NO: 13695 - DNA, 23 bp, Artificial Sequence
  Description of Artificial Sequence: Synthetic oligonucleotide
  X-linked inhibitor of apoptosis (XIAP) siRNA
ctactttaagtgatattcattta

SEQ ID NO: 13696 - DNA, 23 bp, Artificial Sequence
  Description of Artificial Sequence: Synthetic oligonucleotide
  X-linked inhibitor of apoptosis (XIAP) siRNA
tactttaagtgatattcatttaa

SEQ ID NO: 13697 - DNA, 23 bp, Artificial Sequence
  Description of Artificial Sequence: Synthetic oligonucleotide
  X-linked inhibitor of apoptosis (XIAP) siRNA
actttaagtgatattcatttaaa

SEQ ID NO: 13698 - DNA, 23 bp, Artificial Sequence
  Description of Artificial Sequence: Synthetic oligonucleotide
  X-linked inhibitor of apoptosis (XIAP) siRNA
ctttaagtgatattcatttaaaa

SEQ ID NO: 13699 - DNA, 23 bp, Artificial Sequence
  Description of Artificial Sequence: Synthetic oligonucleotide
  X-linked inhibitor of apoptosis (XIAP) siRNA
tttaagtgatattcatttaaaac

SEQ ID NO: 13700 - DNA, 23 bp, Artificial Sequence
  Description of Artificial Sequence: Synthetic oligonucleotide
  X-linked inhibitor of apoptosis (XIAP) siRNA
ttaagtgatattcatttaaaaca

SEQ ID NO: 13701 - DNA, 23 bp, Artificial Sequence
  Description of Artificial Sequence: Synthetic oligonucleotide
  X-linked inhibitor of apoptosis (XIAP) siRNA
taagtgatattcatttaaaacat

SEQ ID NO: 13702 - DNA, 23 bp, Artificial Sequence
  Description of Artificial Sequence: Synthetic oligonucleotide
  X-linked inhibitor of apoptosis (XIAP) siRNA
aagtgatattcatttaaaacatt

SEQ ID NO: 13703 - DNA, 23 bp, Artificial Sequence
  Description of Artificial Sequence: Synthetic oligonucleotide
  X-linked inhibitor of apoptosis (XIAP) siRNA
agtgatattcatttaaaacattg

SEQ ID NO: 13704 - DNA, 23 bp, Artificial Sequence
  Description of Artificial Sequence: Synthetic oligonucleotide
  X-linked inhibitor of apoptosis (XIAP) siRNA
gtgatattcatttaaaacattgc

SEQ ID NO: 13705 - DNA, 23 bp, Artificial Sequence
  Description of Artificial Sequence: Synthetic oligonucleotide
  X-linked inhibitor of apoptosis (XIAP) siRNA
tgatattcatttaaaacattgca

SEQ ID NO: 13706 - DNA, 23 bp, Artificial Sequence
  Description of Artificial Sequence: Synthetic oligonucleotide
  X-linked inhibitor of apoptosis (XIAP) siRNA
gatattcatttaaaacattgcaa

SEQ ID NO: 13707 - DNA, 23 bp, Artificial Sequence
  Description of Artificial Sequence: Synthetic oligonucleotide
  X-linked inhibitor of apoptosis (XIAP) siRNA
atattcatttaaaacattgcaaa

SEQ ID NO: 13708 - DNA, 23 bp, Artificial Sequence
  Description of Artificial Sequence: Synthetic oligonucleotide
  X-linked inhibitor of apoptosis (XIAP) siRNA
tattcatttaaaacattgcaaat

SEQ ID NO: 13709 - DNA, 23 bp, Artificial Sequence
  Description of Artificial Sequence: Synthetic oligonucleotide
  X-linked inhibitor of apoptosis (XIAP) siRNA
attcatttaaaacattgcaaatt

SEQ ID NO: 13710 - DNA, 23 bp, Artificial Sequence
  Description of Artificial Sequence: Synthetic oligonucleotide
  X-linked inhibitor of apoptosis (XIAP) siRNA
ttcatttaaaacattgcaaattt

SEQ ID NO: 13711 - DNA, 23 bp, Artificial Sequence
  Description of Artificial Sequence: Synthetic oligonucleotide
  X-linked inhibitor of apoptosis (XIAP) siRNA
tcatttaaaacattgcaaattta

SEQ ID NO: 13712 - DNA, 23 bp, Artificial Sequence
  Description of Artificial Sequence: Synthetic oligonucleotide
  X-linked inhibitor of apoptosis (XIAP) siRNA
catttaaaacattgcaaatttat

SEQ ID NO: 13713 - DNA, 23 bp, Artificial Sequence
  Description of Artificial Sequence: Synthetic oligonucleotide
  X-linked inhibitor of apoptosis (XIAP) siRNA
atttaaaacattgcaaatttatt

SEQ ID NO: 13714 - DNA, 23 bp, Artificial Sequence
  Description of Artificial Sequence: Synthetic oligonucleotide
  X-linked inhibitor of apoptosis (XIAP) siRNA
tttaaaacattgcaaatttattt

SEQ ID NO: 13715 - DNA, 23 bp, Artificial Sequence
  Description of Artificial Sequence: Synthetic oligonucleotide
  X-linked inhibitor of apoptosis (XIAP) siRNA
ttaaaacattgcaaatttatttt

SEQ ID NO: 13716 - DNA, 23 bp, Artificial Sequence
  Description of Artificial Sequence: Synthetic oligonucleotide
  X-linked inhibitor of apoptosis (XIAP) siRNA
taaaacattgcaaatttatttta

SEQ ID NO: 13717 - DNA, 23 bp, Artificial Sequence
  Description of Artificial Sequence: Synthetic oligonucleotide
  X-linked inhibitor of apoptosis (XIAP) siRNA
aaaacattgcaaatttattttat

SEQ ID NO: 13718 - DNA, 23 bp, Artificial Sequence
  Description of Artificial Sequence: Synthetic oligonucleotide
  X-linked inhibitor of apoptosis (XIAP) siRNA
aaacattgcaaatttattttatt

SEQ ID NO: 13719 - DNA, 23 bp, Artificial Sequence
  Description of Artificial Sequence: Synthetic oligonucleotide
  X-linked inhibitor of apoptosis (XIAP) siRNA
aacattgcaaatttattttattt

SEQ ID NO: 13720 - DNA, 23 bp, Artificial Sequence
  Description of Artificial Sequence: Synthetic oligonucleotide
  X-linked inhibitor of apoptosis (XIAP) siRNA
acattgcaaatttattttattta

SEQ ID NO: 13721 - DNA, 23 bp, Artificial Sequence
  Description of Artificial Sequence: Synthetic oligonucleotide
  X-linked inhibitor of apoptosis (XIAP) siRNA
cattgcaaatttattttatttat

SEQ ID NO: 13722 - DNA, 23 bp, Artificial Sequence
  Description of Artificial Sequence: Synthetic oligonucleotide
  X-linked inhibitor of apoptosis (XIAP) siRNA
attgcaaatttattttatttatt

SEQ ID NO: 13723 - DNA, 23 bp, Artificial Sequence
  Description of Artificial Sequence: Synthetic oligonucleotide
  X-linked inhibitor of apoptosis (XIAP) siRNA
ttgcaaatttattttatttattt

SEQ ID NO: 13724 - DNA, 23 bp, Artificial Sequence
  Description of Artificial Sequence: Synthetic oligonucleotide
  X-linked inhibitor of apoptosis (XIAP) siRNA
tgcaaatttattttatttattta

SEQ ID NO: 13725 - DNA, 23 bp, Artificial Sequence
  Description of Artificial Sequence: Synthetic oligonucleotide
  X-linked inhibitor of apoptosis (XIAP) siRNA
gcaaatttattttatttatttaa

SEQ ID NO: 13726 - DNA, 23 bp, Artificial Sequence
  Description of Artificial Sequence: Synthetic oligonucleotide
  X-linked inhibitor of apoptosis (XIAP) siRNA
caaatttattttatttatttaat

SEQ ID NO: 13727 - DNA, 23 bp, Artificial Sequence
  Description of Artificial Sequence: Synthetic oligonucleotide
  X-linked inhibitor of apoptosis (XIAP) siRNA
aaatttattttatttatttaatt

SEQ ID NO: 13728 - DNA, 23 bp, Artificial Sequence
  Description of Artificial Sequence: Synthetic oligonucleotide
  X-linked inhibitor of apoptosis (XIAP) siRNA
aatttattttatttatttaattt

SEQ ID NO: 13729 - DNA, 23 bp, Artificial Sequence
  Description of Artificial Sequence: Synthetic oligonucleotide
  X-linked inhibitor of apoptosis (XIAP) siRNA
atttattttatttatttaatttt

SEQ ID NO: 13730 - DNA, 23 bp, Artificial Sequence
  Description of Artificial Sequence: Synthetic oligonucleotide
  X-linked inhibitor of apoptosis (XIAP) siRNA
tttattttatttatttaattttc

SEQ ID NO: 13731 - DNA, 23 bp, Artificial Sequence
  Description of Artificial Sequence: Synthetic oligonucleotide
  X-linked inhibitor of apoptosis (XIAP) siRNA
ttattttatttatttaattttct

SEQ ID NO: 13732 - DNA, 23 bp, Artificial Sequence
  Description of Artificial Sequence: Synthetic oligonucleotide
  X-linked inhibitor of apoptosis (XIAP) siRNA
tattttatttatttaattttctt

SEQ ID NO: 13733 - DNA, 23 bp, Artificial Sequence
  Description of Artificial Sequence: Synthetic oligonucleotide
  X-linked inhibitor of apoptosis (XIAP) siRNA
attttatttatttaattttcttt

SEQ ID NO: 13734 - DNA, 23 bp, Artificial Sequence
  Description of Artificial Sequence: Synthetic oligonucleotide
  X-linked inhibitor of apoptosis (XIAP) siRNA
ttttatttatttaattttctttt

SEQ ID NO: 13735 - DNA, 23 bp, Artificial Sequence
  Description of Artificial Sequence: Synthetic oligonucleotide
  X-linked inhibitor of apoptosis (XIAP) siRNA
tttatttatttaattttcttttt

SEQ ID NO: 13736 - DNA, 23 bp, Artificial Sequence
  Description of Artificial Sequence: Synthetic oligonucleotide
  X-linked inhibitor of apoptosis (XIAP) siRNA
ttatttatttaattttctttttg

SEQ ID NO: 13737 - DNA, 23 bp, Artificial Sequence
  Description of Artificial Sequence: Synthetic oligonucleotide
  X-linked inhibitor of apoptosis (XIAP) siRNA
tatttatttaattttctttttga

SEQ ID NO: 13738 - DNA, 23 bp, Artificial Sequence
  Description of Artificial Sequence: Synthetic oligonucleotide
  X-linked inhibitor of apoptosis (XIAP) siRNA
atttatttaattttctttttgag

SEQ ID NO: 13739 - DNA, 23 bp, Artificial Sequence
  Description of Artificial Sequence: Synthetic oligonucleotide
  X-linked inhibitor of apoptosis (XIAP) siRNA
tttatttaattttctttttgaga

SEQ ID NO: 13740 - DNA, 23 bp, Artificial Sequence
  Description of Artificial Sequence: Synthetic oligonucleotide
  X-linked inhibitor of apoptosis (XIAP) siRNA
ttatttaattttctttttgagat

SEQ ID NO: 13741 - DNA, 23 bp, Artificial Sequence
  Description of Artificial Sequence: Synthetic oligonucleotide
  X-linked inhibitor of apoptosis (XIAP) siRNA
tatttaattttctttttgagatg

SEQ ID NO: 13742 - DNA, 23 bp, Artificial Sequence
  Description of Artificial Sequence: Synthetic oligonucleotide
  X-linked inhibitor of apoptosis (XIAP) siRNA
atttaattttctttttgagatgg

SEQ ID NO: 13743 - DNA, 23 bp, Artificial Sequence
  Description of Artificial Sequence: Synthetic oligonucleotide
  X-linked inhibitor of apoptosis (XIAP) siRNA
tttaattttctttttgagatgga

SEQ ID NO: 13744 - DNA, 23 bp, Artificial Sequence
  Description of Artificial Sequence: Synthetic oligonucleotide
  X-linked inhibitor of apoptosis (XIAP) siRNA
ttaattttctttttgagatggag

SEQ ID NO: 13745 - DNA, 23 bp, Artificial Sequence
  Description of Artificial Sequence: Synthetic oligonucleotide
  X-linked inhibitor of apoptosis (XIAP) siRNA
taattttctttttgagatggagt

SEQ ID NO: 13746 - DNA, 23 bp, Artificial Sequence
  Description of Artificial Sequence: Synthetic oligonucleotide
  X-linked inhibitor of apoptosis (XIAP) siRNA
aattttctttttgagatggagtc

SEQ ID NO: 13747 - DNA, 23 bp, Artificial Sequence
  Description of Artificial Sequence: Synthetic oligonucleotide
  X-linked inhibitor of apoptosis (XIAP) siRNA
attttctttttgagatggagtct

SEQ ID NO: 13748 - DNA, 23 bp, Artificial Sequence
  Description of Artificial Sequence: Synthetic oligonucleotide
  X-linked inhibitor of apoptosis (XIAP) siRNA
ttttctttttgagatggagtctt

SEQ ID NO: 13749 - DNA, 23 bp, Artificial Sequence
  Description of Artificial Sequence: Synthetic oligonucleotide
  X-linked inhibitor of apoptosis (XIAP) siRNA
tttctttttgagatggagtcttg

SEQ ID NO: 13750 - DNA, 23 bp, Artificial Sequence
  Description of Artificial Sequence: Synthetic oligonucleotide
  X-linked inhibitor of apoptosis (XIAP) siRNA
ttctttttgagatggagtcttgc

SEQ ID NO: 13751 - DNA, 23 bp, Artificial Sequence
  Description of Artificial Sequence: Synthetic oligonucleotide
  X-linked inhibitor of apoptosis (XIAP) siRNA
tctttttgagatggagtcttgct

SEQ ID NO: 13752 - DNA, 23 bp, Artificial Sequence
  Description of Artificial Sequence: Synthetic oligonucleotide
  X-linked inhibitor of apoptosis (XIAP) siRNA
ctttttgagatggagtcttgctt

SEQ ID NO: 13753 - DNA, 23 bp, Artificial Sequence
  Description of Artificial Sequence: Synthetic oligonucleotide
  X-linked inhibitor of apoptosis (XIAP) siRNA
tttttgagatggagtcttgcttg

SEQ ID NO: 13754 - DNA, 23 bp, Artificial Sequence
  Description of Artificial Sequence: Synthetic oligonucleotide
  X-linked inhibitor of apoptosis (XIAP) siRNA
ttttgagatggagtcttgcttgt

SEQ ID NO: 13755 - DNA, 23 bp, Artificial Sequence
  Description of Artificial Sequence: Synthetic oligonucleotide
  X-linked inhibitor of apoptosis (XIAP) siRNA
tttgagatggagtcttgcttgtc

SEQ ID NO: 13756 - DNA, 23 bp, Artificial Sequence
  Description of Artificial Sequence: Synthetic oligonucleotide
  X-linked inhibitor of apoptosis (XIAP) siRNA
ttgagatggagtcttgcttgtca

SEQ ID NO: 13757 - DNA, 23 bp, Artificial Sequence
  Description of Artificial Sequence: Synthetic oligonucleotide
  X-linked inhibitor of apoptosis (XIAP) siRNA
tgagatggagtcttgcttgtcac

SEQ ID NO: 13758 - DNA, 23 bp, Artificial Sequence
  Description of Artificial Sequence: Synthetic oligonucleotide
  X-linked inhibitor of apoptosis (XIAP) siRNA
gagatggagtcttgcttgtcacc

SEQ ID NO: 13759 - DNA, 23 bp, Artificial Sequence
  Description of Artificial Sequence: Synthetic oligonucleotide
  X-linked inhibitor of apoptosis (XIAP) siRNA
agatggagtcttgcttgtcaccc

SEQ ID NO: 13760 - DNA, 23 bp, Artificial Sequence
  Description of Artificial Sequence: Synthetic oligonucleotide
  X-linked inhibitor of apoptosis (XIAP) siRNA
gatggagtcttgcttgtcaccca

SEQ ID NO: 13761 - DNA, 23 bp, Artificial Sequence
  Description of Artificial Sequence: Synthetic oligonucleotide
  X-linked inhibitor of apoptosis (XIAP) siRNA
atggagtcttgcttgtcacccag

SEQ ID NO: 13762 - DNA, 23 bp, Artificial Sequence
  Description of Artificial Sequence: Synthetic oligonucleotide
  X-linked inhibitor of apoptosis (XIAP) siRNA
tggagtcttgcttgtcacccagg

SEQ ID NO: 13763 - DNA, 23 bp, Artificial Sequence
  Description of Artificial Sequence: Synthetic oligonucleotide
  X-linked inhibitor of apoptosis (XIAP) siRNA
ggagtcttgcttgtcacccaggc

SEQ ID NO: 13764 - DNA, 23 bp, Artificial Sequence
  Description of Artificial Sequence: Synthetic oligonucleotide
  X-linked inhibitor of apoptosis (XIAP) siRNA
gagtcttgcttgtcacccaggct

SEQ ID NO: 13765 - DNA, 23 bp, Artificial Sequence
  Description of Artificial Sequence: Synthetic oligonucleotide
  X-linked inhibitor of apoptosis (XIAP) siRNA
agtcttgcttgtcacccaggctg

SEQ ID NO: 13766 - DNA, 23 bp, Artificial Sequence
  Description of Artificial Sequence: Synthetic oligonucleotide
  X-linked inhibitor of apoptosis (XIAP) siRNA
gtcttgcttgtcacccaggctgg

SEQ ID NO: 13767 - DNA, 23 bp, Artificial Sequence
  Description of Artificial Sequence: Synthetic oligonucleotide
  X-linked inhibitor of apoptosis (XIAP) siRNA
tcttgcttgtcacccaggctgga

SEQ ID NO: 13768 - DNA, 23 bp, Artificial Sequence
  Description of Artificial Sequence: Synthetic oligonucleotide
  X-linked inhibitor of apoptosis (XIAP) siRNA
cttgcttgtcacccaggctggag

SEQ ID NO: 13769 - DNA, 23 bp, Artificial Sequence
  Description of Artificial Sequence: Synthetic oligonucleotide
  X-linked inhibitor of apoptosis (XIAP) siRNA
ttgcttgtcacccaggctggagt

SEQ ID NO: 13770 - DNA, 23 bp, Artificial Sequence
  Description of Artificial Sequence: Synthetic oligonucleotide
  X-linked inhibitor of apoptosis (XIAP) siRNA
tgcttgtcacccaggctggagtg

SEQ ID NO: 13771 - DNA, 23 bp, Artificial Sequence
  Description of Artificial Sequence: Synthetic oligonucleotide
  X-linked inhibitor of apoptosis (XIAP) siRNA
gcttgtcacccaggctggagtgc

SEQ ID NO: 13772 - DNA, 23 bp, Artificial Sequence
  Description of Artificial Sequence: Synthetic oligonucleotide
  X-linked inhibitor of apoptosis (XIAP) siRNA
cttgtcacccaggctggagtgca

SEQ ID NO: 13773 - DNA, 23 bp, Artificial Sequence
  Description of Artificial Sequence: Synthetic oligonucleotide
  X-linked inhibitor of apoptosis (XIAP) siRNA
ttgtcacccaggctggagtgcag

SEQ ID NO: 13774 - DNA, 23 bp, Artificial Sequence
  Description of Artificial Sequence: Synthetic oligonucleotide
  X-linked inhibitor of apoptosis (XIAP) siRNA
tgtcacccaggctggagtgcagt

SEQ ID NO: 13775 - DNA, 23 bp, Artificial Sequence
  Description of Artificial Sequence: Synthetic oligonucleotide
  X-linked inhibitor of apoptosis (XIAP) siRNA
gtcacccaggctggagtgcagtg

SEQ ID NO: 13776 - DNA, 23 bp, Artificial Sequence
  Description of Artificial Sequence: Synthetic oligonucleotide
  X-linked inhibitor of apoptosis (XIAP) siRNA
tcacccaggctggagtgcagtgg

SEQ ID NO: 13777 - DNA, 23 bp, Artificial Sequence
  Description of Artificial Sequence: Synthetic oligonucleotide
  X-linked inhibitor of apoptosis (XIAP) siRNA
cacccaggctggagtgcagtgga

SEQ ID NO: 13778 - DNA, 23 bp, Artificial Sequence
  Description of Artificial Sequence: Synthetic oligonucleotide
  X-linked inhibitor of apoptosis (XIAP) siRNA
acccaggctggagtgcagtggag

SEQ ID NO: 13779 - DNA, 23 bp, Artificial Sequence
  Description of Artificial Sequence: Synthetic oligonucleotide
  X-linked inhibitor of apoptosis (XIAP) siRNA
cccaggctggagtgcagtggagt

SEQ ID NO: 13780 - DNA, 23 bp, Artificial Sequence
  Description of Artificial Sequence: Synthetic oligonucleotide
  X-linked inhibitor of apoptosis (XIAP) siRNA
ccaggctggagtgcagtggagtg

SEQ ID NO: 13781 - DNA, 23 bp, Artificial Sequence
  Description of Artificial Sequence: Synthetic oligonucleotide
  X-linked inhibitor of apoptosis (XIAP) siRNA
caggctggagtgcagtggagtga

SEQ ID NO: 13782 - DNA, 23 bp, Artificial Sequence
  Description of Artificial Sequence: Synthetic oligonucleotide
  X-linked inhibitor of apoptosis (XIAP) siRNA
aggctggagtgcagtggagtgat

SEQ ID NO: 13783 - DNA, 23 bp, Artificial Sequence
  Description of Artificial Sequence: Synthetic oligonucleotide
  X-linked inhibitor of apoptosis (XIAP) siRNA
ggctggagtgcagtggagtgatc

SEQ ID NO: 13784 - DNA, 23 bp, Artificial Sequence
  Description of Artificial Sequence: Synthetic oligonucleotide
  X-linked inhibitor of apoptosis (XIAP) siRNA
gctggagtgcagtggagtgatct

SEQ ID NO: 13785 - DNA, 23 bp, Artificial Sequence
  Description of Artificial Sequence: Synthetic oligonucleotide
  X-linked inhibitor of apoptosis (XIAP) siRNA
ctggagtgcagtggagtgatctc

SEQ ID NO: 13786 - DNA, 23 bp, Artificial Sequence
  Description of Artificial Sequence: Synthetic oligonucleotide
  X-linked inhibitor of apoptosis (XIAP) siRNA
tggagtgcagtggagtgatctct

SEQ ID NO: 13787 - DNA, 23 bp, Artificial Sequence
  Description of Artificial Sequence: Synthetic oligonucleotide
  X-linked inhibitor of apoptosis (XIAP) siRNA
ggagtgcagtggagtgatctctg

SEQ ID NO: 13788 - DNA, 23 bp, Artificial Sequence
  Description of Artificial Sequence: Synthetic oligonucleotide
  X-linked inhibitor of apoptosis (XIAP) siRNA
gagtgcagtggagtgatctctgc

SEQ ID NO: 13789 - DNA, 23 bp, Artificial Sequence
  Description of Artificial Sequence: Synthetic oligonucleotide
  X-linked inhibitor of apoptosis (XIAP) siRNA
agtgcagtggagtgatctctgct

SEQ ID NO: 13790 - DNA, 23 bp, Artificial Sequence
  Description of Artificial Sequence: Synthetic oligonucleotide
  X-linked inhibitor of apoptosis (XIAP) siRNA
gtgcagtggagtgatctctgctc

SEQ ID NO: 13791 - DNA, 23 bp, Artificial Sequence
  Description of Artificial Sequence: Synthetic oligonucleotide
  X-linked inhibitor of apoptosis (XIAP) siRNA
tgcagtggagtgatctctgctca

SEQ ID NO: 13792 - DNA, 23 bp, Artificial Sequence
  Description of Artificial Sequence: Synthetic oligonucleotide
  X-linked inhibitor of apoptosis (XIAP) siRNA
gcagtggagtgatctctgctcac

SEQ ID NO: 13793 - DNA, 23 bp, Artificial Sequence
  Description of Artificial Sequence: Synthetic oligonucleotide
  X-linked inhibitor of apoptosis (XIAP) siRNA
cagtggagtgatctctgctcact

SEQ ID NO: 13794 - DNA, 23 bp, Artificial Sequence
  Description of Artificial Sequence: Synthetic oligonucleotide
  X-linked inhibitor of apoptosis (XIAP) siRNA
agtggagtgatctctgctcactg

SEQ ID NO: 13795 - DNA, 23 bp, Artificial Sequence
  Description of Artificial Sequence: Synthetic oligonucleotide
  X-linked inhibitor of apoptosis (XIAP) siRNA
gtggagtgatctctgctcactgc

SEQ ID NO: 13796 - DNA, 23 bp, Artificial Sequence
  Description of Artificial Sequence: Synthetic oligonucleotide
  X-linked inhibitor of apoptosis (XIAP) siRNA
tggagtgatctctgctcactgca

SEQ ID NO: 13797 - DNA, 23 bp, Artificial Sequence
  Description of Artificial Sequence: Synthetic oligonucleotide
  X-linked inhibitor of apoptosis (XIAP) siRNA
ggagtgatctctgctcactgcaa

SEQ ID NO: 13798 - DNA, 23 bp, Artificial Sequence
  Description of Artificial Sequence: Synthetic oligonucleotide
  X-linked inhibitor of apoptosis (XIAP) siRNA
gagtgatctctgctcactgcaac

SEQ ID NO: 13799 - DNA, 23 bp, Artificial Sequence
  Description of Artificial Sequence: Synthetic oligonucleotide
  X-linked inhibitor of apoptosis (XIAP) siRNA
agtgatctctgctcactgcaacc

SEQ ID NO: 13800 - DNA, 23 bp, Artificial Sequence
  Description of Artificial Sequence: Synthetic oligonucleotide
  X-linked inhibitor of apoptosis (XIAP) siRNA
gtgatctctgctcactgcaacct

SEQ ID NO: 13801 - DNA, 23 bp, Artificial Sequence
  Description of Artificial Sequence: Synthetic oligonucleotide
  X-linked inhibitor of apoptosis (XIAP) siRNA
tgatctctgctcactgcaacctc

SEQ ID NO: 13802 - DNA, 23 bp, Artificial Sequence
  Description of Artificial Sequence: Synthetic oligonucleotide
  X-linked inhibitor of apoptosis (XIAP) siRNA
gatctctgctcactgcaacctcc

SEQ ID NO: 13803 - DNA, 23 bp, Artificial Sequence
  Description of Artificial Sequence: Synthetic oligonucleotide
  X-linked inhibitor of apoptosis (XIAP) siRNA
atctctgctcactgcaacctccg

SEQ ID NO: 13804 - DNA, 23 bp, Artificial Sequence
  Description of Artificial Sequence: Synthetic oligonucleotide
  X-linked inhibitor of apoptosis (XIAP) siRNA
tctctgctcactgcaacctccgc

SEQ ID NO: 13805 - DNA, 23 bp, Artificial Sequence
  Description of Artificial Sequence: Synthetic oligonucleotide
  X-linked inhibitor of apoptosis (XIAP) siRNA
ctctgctcactgcaacctccgcc

SEQ ID NO: 13806 - DNA, 23 bp, Artificial Sequence
  Description of Artificial Sequence: Synthetic oligonucleotide
  X-linked inhibitor of apoptosis (XIAP) siRNA
tctgctcactgcaacctccgcct

SEQ ID NO: 13807 - DNA, 23 bp, Artificial Sequence
  Description of Artificial Sequence: Synthetic oligonucleotide
  X-linked inhibitor of apoptosis (XIAP) siRNA
ctgctcactgcaacctccgcctt

SEQ ID NO: 13808 - DNA, 23 bp, Artificial Sequence
  Description of Artificial Sequence: Synthetic oligonucleotide
  X-linked inhibitor of apoptosis (XIAP) siRNA
tgctcactgcaacctccgccttc

SEQ ID NO: 13809 - DNA, 23 bp, Artificial Sequence
  Description of Artificial Sequence: Synthetic oligonucleotide
  X-linked inhibitor of apoptosis (XIAP) siRNA
gctcactgcaacctccgccttct

SEQ ID NO: 13810 - DNA, 23 bp, Artificial Sequence
  Description of Artificial Sequence: Synthetic oligonucleotide
  X-linked inhibitor of apoptosis (XIAP) siRNA
ctcactgcaacctccgccttctg

SEQ ID NO: 13811 - DNA, 23 bp, Artificial Sequence
  Description of Artificial Sequence: Synthetic oligonucleotide
  X-linked inhibitor of apoptosis (XIAP) siRNA
tcactgcaacctccgccttctgg

SEQ ID NO: 13812 - DNA, 23 bp, Artificial Sequence
  Description of Artificial Sequence: Synthetic oligonucleotide
  X-linked inhibitor of apoptosis (XIAP) siRNA
cactgcaacctccgccttctggg

SEQ ID NO: 13813 - DNA, 23 bp, Artificial Sequence
  Description of Artificial Sequence: Synthetic oligonucleotide
  X-linked inhibitor of apoptosis (XIAP) siRNA
actgcaacctccgccttctgggt

SEQ ID NO: 13814 - DNA, 23 bp, Artificial Sequence
  Description of Artificial Sequence: Synthetic oligonucleotide
  X-linked inhibitor of apoptosis (XIAP) siRNA
ctgcaacctccgccttctgggtt

SEQ ID NO: 13815 - DNA, 23 bp, Artificial Sequence
  Description of Artificial Sequence: Synthetic oligonucleotide
  X-linked inhibitor of apoptosis (XIAP) siRNA
tgcaacctccgccttctgggttc

SEQ ID NO: 13816 - DNA, 23 bp, Artificial Sequence
  Description of Artificial Sequence: Synthetic oligonucleotide
  X-linked inhibitor of apoptosis (XIAP) siRNA
gcaacctccgccttctgggttca

SEQ ID NO: 13817 - DNA, 23 bp, Artificial Sequence
  Description of Artificial Sequence: Synthetic oligonucleotide
  X-linked inhibitor of apoptosis (XIAP) siRNA
caacctccgccttctgggttcaa

SEQ ID NO: 13818 - DNA, 23 bp, Artificial Sequence
  Description of Artificial Sequence: Synthetic oligonucleotide
  X-linked inhibitor of apoptosis (XIAP) siRNA
aacctccgccttctgggttcaag

SEQ ID NO: 13819 - DNA, 23 bp, Artificial Sequence
  Description of Artificial Sequence: Synthetic oligonucleotide
  X-linked inhibitor of apoptosis (XIAP) siRNA
acctccgccttctgggttcaagc

SEQ ID NO: 13820 - DNA, 23 bp, Artificial Sequence
  Description of Artificial Sequence: Synthetic oligonucleotide
  X-linked inhibitor of apoptosis (XIAP) siRNA
cctccgccttctgggttcaagcg

SEQ ID NO: 13821 - DNA, 23 bp, Artificial Sequence
  Description of Artificial Sequence: Synthetic oligonucleotide
  X-linked inhibitor of apoptosis (XIAP) siRNA
ctccgccttctgggttcaagcga

SEQ ID NO: 13822 - DNA, 23 bp, Artificial Sequence
  Description of Artificial Sequence: Synthetic oligonucleotide
  X-linked inhibitor of apoptosis (XIAP) siRNA
tccgccttctgggttcaagcgat

SEQ ID NO: 13823 - DNA, 23 bp, Artificial Sequence
  Description of Artificial Sequence: Synthetic oligonucleotide
  X-linked inhibitor of apoptosis (XIAP) siRNA
ccgccttctgggttcaagcgatt

SEQ ID NO: 13824 - DNA, 23 bp, Artificial Sequence
  Description of Artificial Sequence: Synthetic oligonucleotide
  X-linked inhibitor of apoptosis (XIAP) siRNA
cgccttctgggttcaagcgattc

SEQ ID NO: 13825 - DNA, 23 bp, Artificial Sequence
  Description of Artificial Sequence: Synthetic oligonucleotide
  X-linked inhibitor of apoptosis (XIAP) siRNA
gccttctgggttcaagcgattct

SEQ ID NO: 13826 - DNA, 23 bp, Artificial Sequence
  Description of Artificial Sequence: Synthetic oligonucleotide
  X-linked inhibitor of apoptosis (XIAP) siRNA
ccttctgggttcaagcgattctc

SEQ ID NO: 13827 - DNA, 23 bp, Artificial Sequence
  Description of Artificial Sequence: Synthetic oligonucleotide
  X-linked inhibitor of apoptosis (XIAP) siRNA
cttctgggttcaagcgattctcg

SEQ ID NO: 13828 - DNA, 23 bp, Artificial Sequence
  Description of Artificial Sequence: Synthetic oligonucleotide
  X-linked inhibitor of apoptosis (XIAP) siRNA
ttctgggttcaagcgattctcgt

SEQ ID NO: 13829 - DNA, 23 bp, Artificial Sequence
  Description of Artificial Sequence: Synthetic oligonucleotide
  X-linked inhibitor of apoptosis (XIAP) siRNA
tctgggttcaagcgattctcgtg

SEQ ID NO: 13830 - DNA, 23 bp, Artificial Sequence
  Description of Artificial Sequence: Synthetic oligonucleotide
  X-linked inhibitor of apoptosis (XIAP) siRNA
ctgggttcaagcgattctcgtgc

SEQ ID NO: 13831 - DNA, 23 bp, Artificial Sequence
  Description of Artificial Sequence: Synthetic oligonucleotide
  X-linked inhibitor of apoptosis (XIAP) siRNA
tgggttcaagcgattctcgtgcc

SEQ ID NO: 13832 - DNA, 23 bp, Artificial Sequence
  Description of Artificial Sequence: Synthetic oligonucleotide
  X-linked inhibitor of apoptosis (XIAP) siRNA
gggttcaagcgattctcgtgcct

SEQ ID NO: 13833 - DNA, 23 bp, Artificial Sequence
  Description of Artificial Sequence: Synthetic oligonucleotide
  X-linked inhibitor of apoptosis (XIAP) siRNA
ggttcaagcgattctcgtgcctc

SEQ ID NO: 13834 - DNA, 23 bp, Artificial Sequence
  Description of Artificial Sequence: Synthetic oligonucleotide
  X-linked inhibitor of apoptosis (XIAP) siRNA
gttcaagcgattctcgtgcctca

SEQ ID NO: 13835 - DNA, 23 bp, Artificial Sequence
  Description of Artificial Sequence: Synthetic oligonucleotide
  X-linked inhibitor of apoptosis (XIAP) siRNA
ttcaagcgattctcgtgcctcag

SEQ ID NO: 13836 - DNA, 23 bp, Artificial Sequence
  Description of Artificial Sequence: Synthetic oligonucleotide
  X-linked inhibitor of apoptosis (XIAP) siRNA
tcaagcgattctcgtgcctcagc

SEQ ID NO: 13837 - DNA, 23 bp, Artificial Sequence
  Description of Artificial Sequence: Synthetic oligonucleotide
  X-linked inhibitor of apoptosis (XIAP) siRNA
caagcgattctcgtgcctcagct

SEQ ID NO: 13838 - DNA, 23 bp, Artificial Sequence
  Description of Artificial Sequence: Synthetic oligonucleotide
  X-linked inhibitor of apoptosis (XIAP) siRNA
aagcgattctcgtgcctcagctt

SEQ ID NO: 13839 - DNA, 23 bp, Artificial Sequence
  Description of Artificial Sequence: Synthetic oligonucleotide
  X-linked inhibitor of apoptosis (XIAP) siRNA
agcgattctcgtgcctcagcttc

SEQ ID NO: 13840 - DNA, 23 bp, Artificial Sequence
  Description of Artificial Sequence: Synthetic oligonucleotide
  X-linked inhibitor of apoptosis (XIAP) siRNA
gcgattctcgtgcctcagcttcc

SEQ ID NO: 13841 - DNA, 23 bp, Artificial Sequence
  Description of Artificial Sequence: Synthetic oligonucleotide
  X-linked inhibitor of apoptosis (XIAP) siRNA
cgattctcgtgcctcagcttcct

SEQ ID NO: 13842 - DNA, 23 bp, Artificial Sequence
  Description of Artificial Sequence: Synthetic oligonucleotide
  X-linked inhibitor of apoptosis (XIAP) siRNA
gattctcgtgcctcagcttcctg

SEQ ID NO: 13843 - DNA, 23 bp, Artificial Sequence
  Description of Artificial Sequence: Synthetic oligonucleotide
  X-linked inhibitor of apoptosis (XIAP) siRNA
attctcgtgcctcagcttcctga

SEQ ID NO: 13844 - DNA, 23 bp, Artificial Sequence
  Description of Artificial Sequence: Synthetic oligonucleotide
  X-linked inhibitor of apoptosis (XIAP) siRNA
ttctcgtgcctcagcttcctgag

SEQ ID NO: 13845 - DNA, 23 bp, Artificial Sequence
  Description of Artificial Sequence: Synthetic oligonucleotide
  X-linked inhibitor of apoptosis (XIAP) siRNA
tctcgtgcctcagcttcctgagt

SEQ ID NO: 13846 - DNA, 23 bp, Artificial Sequence
  Description of Artificial Sequence: Synthetic oligonucleotide
  X-linked inhibitor of apoptosis (XIAP) siRNA
ctcgtgcctcagcttcctgagta

SEQ ID NO: 13847 - DNA, 23 bp, Artificial Sequence
  Description of Artificial Sequence: Synthetic oligonucleotide
  X-linked inhibitor of apoptosis (XIAP) siRNA
tcgtgcctcagcttcctgagtag

SEQ ID NO: 13848 - DNA, 23 bp, Artificial Sequence
  Description of Artificial Sequence: Synthetic oligonucleotide
  X-linked inhibitor of apoptosis (XIAP) siRNA
cgtgcctcagcttcctgagtagc

SEQ ID NO: 13849 - DNA, 23 bp, Artificial Sequence
  Description of Artificial Sequence: Synthetic oligonucleotide
  X-linked inhibitor of apoptosis (XIAP) siRNA
gtgcctcagcttcctgagtagct

SEQ ID NO: 13850 - DNA, 23 bp, Artificial Sequence
  Description of Artificial Sequence: Synthetic oligonucleotide
  X-linked inhibitor of apoptosis (XIAP) siRNA
tgcctcagcttcctgagtagctg

SEQ ID NO: 13851 - DNA, 23 bp, Artificial Sequence
  Description of Artificial Sequence: Synthetic oligonucleotide
  X-linked inhibitor of apoptosis (XIAP) siRNA
gcctcagcttcctgagtagctgg

SEQ ID NO: 13852 - DNA, 23 bp, Artificial Sequence
  Description of Artificial Sequence: Synthetic oligonucleotide
  X-linked inhibitor of apoptosis (XIAP) siRNA
cctcagcttcctgagtagctgga

SEQ ID NO: 13853 - DNA, 23 bp, Artificial Sequence
  Description of Artificial Sequence: Synthetic oligonucleotide
  X-linked inhibitor of apoptosis (XIAP) siRNA
ctcagcttcctgagtagctggaa

SEQ ID NO: 13854 - DNA, 23 bp, Artificial Sequence
  Description of Artificial Sequence: Synthetic oligonucleotide
  X-linked inhibitor of apoptosis (XIAP) siRNA
tcagcttcctgagtagctggaat

SEQ ID NO: 13855 - DNA, 23 bp, Artificial Sequence
  Description of Artificial Sequence: Synthetic oligonucleotide
  X-linked inhibitor of apoptosis (XIAP) siRNA
cagcttcctgagtagctggaatt

SEQ ID NO: 13856 - DNA, 23 bp, Artificial Sequence
  Description of Artificial Sequence: Synthetic oligonucleotide
  X-linked inhibitor of apoptosis (XIAP) siRNA
agcttcctgagtagctggaatta

SEQ ID NO: 13857 - DNA, 23 bp, Artificial Sequence
  Description of Artificial Sequence: Synthetic oligonucleotide
  X-linked inhibitor of apoptosis (XIAP) siRNA
gcttcctgagtagctggaattac

SEQ ID NO: 13858 - DNA, 23 bp, Artificial Sequence
  Description of Artificial Sequence: Synthetic oligonucleotide
  X-linked inhibitor of apoptosis (XIAP) siRNA
cttcctgagtagctggaattaca

SEQ ID NO: 13859 - DNA, 23 bp, Artificial Sequence
  Description of Artificial Sequence: Synthetic oligonucleotide
  X-linked inhibitor of apoptosis (XIAP) siRNA
ttcctgagtagctggaattacag

SEQ ID NO: 13860 - DNA, 23 bp, Artificial Sequence
  Description of Artificial Sequence: Synthetic oligonucleotide
  X-linked inhibitor of apoptosis (XIAP) siRNA
tcctgagtagctggaattacagg

SEQ ID NO: 13861 - DNA, 23 bp, Artificial Sequence
  Description of Artificial Sequence: Synthetic oligonucleotide
  X-linked inhibitor of apoptosis (XIAP) siRNA
cctgagtagctggaattacaggc

SEQ ID NO: 13862 - DNA, 23 bp, Artificial Sequence
  Description of Artificial Sequence: Synthetic oligonucleotide
  X-linked inhibitor of apoptosis (XIAP) siRNA
ctgagtagctggaattacaggca

SEQ ID NO: 13863 - DNA, 23 bp, Artificial Sequence
  Description of Artificial Sequence: Synthetic oligonucleotide
  X-linked inhibitor of apoptosis (XIAP) siRNA
tgagtagctggaattacaggcag

SEQ ID NO: 13864 - DNA, 23 bp, Artificial Sequence
  Description of Artificial Sequence: Synthetic oligonucleotide
  X-linked inhibitor of apoptosis (XIAP) siRNA
gagtagctggaattacaggcagg

SEQ ID NO: 13865 - DNA, 23 bp, Artificial Sequence
  Description of Artificial Sequence: Synthetic oligonucleotide
  X-linked inhibitor of apoptosis (XIAP) siRNA
agtagctggaattacaggcaggt

SEQ ID NO: 13866 - DNA, 23 bp, Artificial Sequence
  Description of Artificial Sequence: Synthetic oligonucleotide
  X-linked inhibitor of apoptosis (XIAP) siRNA
gtagctggaattacaggcaggtg

SEQ ID NO: 13867 - DNA, 23 bp, Artificial Sequence
  Description of Artificial Sequence: Synthetic oligonucleotide
  X-linked inhibitor of apoptosis (XIAP) siRNA
tagctggaattacaggcaggtgc

SEQ ID NO: 13868 - DNA, 23 bp, Artificial Sequence
  Description of Artificial Sequence: Synthetic oligonucleotide
  X-linked inhibitor of apoptosis (XIAP) siRNA
agctggaattacaggcaggtgcc

SEQ ID NO: 13869 - DNA, 23 bp, Artificial Sequence
  Description of Artificial Sequence: Synthetic oligonucleotide
  X-linked inhibitor of apoptosis (XIAP) siRNA
gctggaattacaggcaggtgcca

SEQ ID NO: 13870 - DNA, 23 bp, Artificial Sequence
  Description of Artificial Sequence: Synthetic oligonucleotide
  X-linked inhibitor of apoptosis (XIAP) siRNA
ctggaattacaggcaggtgccac

SEQ ID NO: 13871 - DNA, 23 bp, Artificial Sequence
  Description of Artificial Sequence: Synthetic oligonucleotide
  X-linked inhibitor of apoptosis (XIAP) siRNA
tggaattacaggcaggtgccacc

SEQ ID NO: 13872 - DNA, 23 bp, Artificial Sequence
  Description of Artificial Sequence: Synthetic oligonucleotide
  X-linked inhibitor of apoptosis (XIAP) siRNA
ggaattacaggcaggtgccacca

SEQ ID NO: 13873 - DNA, 23 bp, Artificial Sequence
  Description of Artificial Sequence: Synthetic oligonucleotide
  X-linked inhibitor of apoptosis (XIAP) siRNA
gaattacaggcaggtgccaccat

SEQ ID NO: 13874 - DNA, 23 bp, Artificial Sequence
  Description of Artificial Sequence: Synthetic oligonucleotide
  X-linked inhibitor of apoptosis (XIAP) siRNA
aattacaggcaggtgccaccatg

SEQ ID NO: 13875 - DNA, 23 bp, Artificial Sequence
  Description of Artificial Sequence: Synthetic oligonucleotide
  X-linked inhibitor of apoptosis (XIAP) siRNA
attacaggcaggtgccaccatgc

SEQ ID NO: 13876 - DNA, 23 bp, Artificial Sequence
  Description of Artificial Sequence: Synthetic oligonucleotide
  X-linked inhibitor of apoptosis (XIAP) siRNA
ttacaggcaggtgccaccatgcc

SEQ ID NO: 13877 - DNA, 23 bp, Artificial Sequence
  Description of Artificial Sequence: Synthetic oligonucleotide
  X-linked inhibitor of apoptosis (XIAP) siRNA
tacaggcaggtgccaccatgccc

SEQ ID NO: 13878 - DNA, 23 bp, Artificial Sequence
  Description of Artificial Sequence: Synthetic oligonucleotide
  X-linked inhibitor of apoptosis (XIAP) siRNA
acaggcaggtgccaccatgcccg

SEQ ID NO: 13879 - DNA, 23 bp, Artificial Sequence
  Description of Artificial Sequence: Synthetic oligonucleotide
  X-linked inhibitor of apoptosis (XIAP) siRNA
caggcaggtgccaccatgcccga

SEQ ID NO: 13880 - DNA, 23 bp, Artificial Sequence
  Description of Artificial Sequence: Synthetic oligonucleotide
  X-linked inhibitor of apoptosis (XIAP) siRNA
aggcaggtgccaccatgcccgac

SEQ ID NO: 13881 - DNA, 23 bp, Artificial Sequence
  Description of Artificial Sequence: Synthetic oligonucleotide
  X-linked inhibitor of apoptosis (XIAP) siRNA
ggcaggtgccaccatgcccgact

SEQ ID NO: 13882 - DNA, 23 bp, Artificial Sequence
  Description of Artificial Sequence: Synthetic oligonucleotide
  X-linked inhibitor of apoptosis (XIAP) siRNA
gcaggtgccaccatgcccgacta

SEQ ID NO: 13883 - DNA, 23 bp, Artificial Sequence
  Description of Artificial Sequence: Synthetic oligonucleotide
  X-linked inhibitor of apoptosis (XIAP) siRNA
caggtgccaccatgcccgactaa

SEQ ID NO: 13884 - DNA, 23 bp, Artificial Sequence
  Description of Artificial Sequence: Synthetic oligonucleotide
  X-linked inhibitor of apoptosis (XIAP) siRNA
aggtgccaccatgcccgactaat

SEQ ID NO: 13885 - DNA, 23 bp, Artificial Sequence
  Description of Artificial Sequence: Synthetic oligonucleotide
  X-linked inhibitor of apoptosis (XIAP) siRNA
ggtgccaccatgcccgactaatt

SEQ ID NO: 13886 - DNA, 23 bp, Artificial Sequence
  Description of Artificial Sequence: Synthetic oligonucleotide
  X-linked inhibitor of apoptosis (XIAP) siRNA
gtgccaccatgcccgactaattt

SEQ ID NO: 13887 - DNA, 23 bp, Artificial Sequence
  Description of Artificial Sequence: Synthetic oligonucleotide
  X-linked inhibitor of apoptosis (XIAP) siRNA
tgccaccatgcccgactaatttt

SEQ ID NO: 13888 - DNA, 23 bp, Artificial Sequence
  Description of Artificial Sequence: Synthetic oligonucleotide
  X-linked inhibitor of apoptosis (XIAP) siRNA
gccaccatgcccgactaattttt

SEQ ID NO: 13889 - DNA, 23 bp, Artificial Sequence
  Description of Artificial Sequence: Synthetic oligonucleotide
  X-linked inhibitor of apoptosis (XIAP) siRNA
ccaccatgcccgactaatttttt

SEQ ID NO: 13890 - DNA, 23 bp, Artificial Sequence
  Description of Artificial Sequence: Synthetic oligonucleotide
  X-linked inhibitor of apoptosis (XIAP) siRNA
caccatgcccgactaattttttt

SEQ ID NO: 13891 - DNA, 23 bp, Artificial Sequence
  Description of Artificial Sequence: Synthetic oligonucleotide
  X-linked inhibitor of apoptosis (XIAP) siRNA
accatgcccgactaatttttttt

SEQ ID NO: 13892 - DNA, 23 bp, Artificial Sequence
  Description of Artificial Sequence: Synthetic oligonucleotide
  X-linked inhibitor of apoptosis (XIAP) siRNA
ttttttttatttttagtagagac

SEQ ID NO: 13893 - DNA, 23 bp, Artificial Sequence
  Description of Artificial Sequence: Synthetic oligonucleotide
  X-linked inhibitor of apoptosis (XIAP) siRNA
tttttttatttttagtagagacg

SEQ ID NO: 13894 - DNA, 23 bp, Artificial Sequence
  Description of Artificial Sequence: Synthetic oligonucleotide
  X-linked inhibitor of apoptosis (XIAP) siRNA
ttttttatttttagtagagacgg

SEQ ID NO: 13895 - DNA, 23 bp, Artificial Sequence
  Description of Artificial Sequence: Synthetic oligonucleotide
  X-linked inhibitor of apoptosis (XIAP) siRNA
tttttatttttagtagagacggg

SEQ ID NO: 13896 - DNA, 23 bp, Artificial Sequence
  Description of Artificial Sequence: Synthetic oligonucleotide
  X-linked inhibitor of apoptosis (XIAP) siRNA
ttttatttttagtagagacgggg

SEQ ID NO: 13897 - DNA, 23 bp, Artificial Sequence
  Description of Artificial Sequence: Synthetic oligonucleotide
  X-linked inhibitor of apoptosis (XIAP) siRNA
tttatttttagtagagacggggt

SEQ ID NO: 13898 - DNA, 23 bp, Artificial Sequence
  Description of Artificial Sequence: Synthetic oligonucleotide
  X-linked inhibitor of apoptosis (XIAP) siRNA
ttatttttagtagagacggggtt

SEQ ID NO: 13899 - DNA, 23 bp, Artificial Sequence
  Description of Artificial Sequence: Synthetic oligonucleotide
  X-linked inhibitor of apoptosis (XIAP) siRNA
tatttttagtagagacggggttt

SEQ ID NO: 13900 - DNA, 23 bp, Artificial Sequence
  Description of Artificial Sequence: Synthetic oligonucleotide
  X-linked inhibitor of apoptosis (XIAP) siRNA
atttttagtagagacggggtttc

SEQ ID NO: 13901 - DNA, 23 bp, Artificial Sequence
  Description of Artificial Sequence: Synthetic oligonucleotide
  X-linked inhibitor of apoptosis (XIAP) siRNA
tttttagtagagacggggtttca

SEQ ID NO: 13902 - DNA, 23 bp, Artificial Sequence
  Description of Artificial Sequence: Synthetic oligonucleotide
  X-linked inhibitor of apoptosis (XIAP) siRNA
ttttagtagagacggggtttcac

SEQ ID NO: 13903 - DNA, 23 bp, Artificial Sequence
  Description of Artificial Sequence: Synthetic oligonucleotide
  X-linked inhibitor of apoptosis (XIAP) siRNA
tttagtagagacggggtttcacc

SEQ ID NO: 13904 - DNA, 23 bp, Artificial Sequence
  Description of Artificial Sequence: Synthetic oligonucleotide
  X-linked inhibitor of apoptosis (XIAP) siRNA
ttagtagagacggggtttcacca

SEQ ID NO: 13905 - DNA, 23 bp, Artificial Sequence
  Description of Artificial Sequence: Synthetic oligonucleotide
  X-linked inhibitor of apoptosis (XIAP) siRNA
tagtagagacggggtttcaccat

SEQ ID NO: 13906 - DNA, 23 bp, Artificial Sequence
  Description of Artificial Sequence: Synthetic oligonucleotide
  X-linked inhibitor of apoptosis (XIAP) siRNA
agtagagacggggtttcaccatg

SEQ ID NO: 13907 - DNA, 23 bp, Artificial Sequence
  Description of Artificial Sequence: Synthetic oligonucleotide
  X-linked inhibitor of apoptosis (XIAP) siRNA
gtagagacggggtttcaccatgt

SEQ ID NO: 13908 - DNA, 23 bp, Artificial Sequence
  Description of Artificial Sequence: Synthetic oligonucleotide
  X-linked inhibitor of apoptosis (XIAP) siRNA
tagagacggggtttcaccatgtt

SEQ ID NO: 13909 - DNA, 23 bp, Artificial Sequence
  Description of Artificial Sequence: Synthetic oligonucleotide
  X-linked inhibitor of apoptosis (XIAP) siRNA
agagacggggtttcaccatgttg

SEQ ID NO: 13910 - DNA, 23 bp, Artificial Sequence
  Description of Artificial Sequence: Synthetic oligonucleotide
  X-linked inhibitor of apoptosis (XIAP) siRNA
gagacggggtttcaccatgttgg

SEQ ID NO: 13911 - DNA, 23 bp, Artificial Sequence
  Description of Artificial Sequence: Synthetic oligonucleotide
  X-linked inhibitor of apoptosis (XIAP) siRNA
agacggggtttcaccatgttggc

SEQ ID NO: 13912 - DNA, 23 bp, Artificial Sequence
  Description of Artificial Sequence: Synthetic oligonucleotide
  X-linked inhibitor of apoptosis (XIAP) siRNA
gacggggtttcaccatgttggcc

SEQ ID NO: 13913 - DNA, 23 bp, Artificial Sequence
  Description of Artificial Sequence: Synthetic oligonucleotide
  X-linked inhibitor of apoptosis (XIAP) siRNA
acggggtttcaccatgttggcca

SEQ ID NO: 13914 - DNA, 23 bp, Artificial Sequence
  Description of Artificial Sequence: Synthetic oligonucleotide
  X-linked inhibitor of apoptosis (XIAP) siRNA
cggggtttcaccatgttggccag

SEQ ID NO: 13915 - DNA, 23 bp, Artificial Sequence
  Description of Artificial Sequence: Synthetic oligonucleotide
  X-linked inhibitor of apoptosis (XIAP) siRNA
ggggtttcaccatgttggccagg

SEQ ID NO: 13916 - DNA, 23 bp, Artificial Sequence
  Description of Artificial Sequence: Synthetic oligonucleotide
  X-linked inhibitor of apoptosis (XIAP) siRNA
gggtttcaccatgttggccaggc

SEQ ID NO: 13917 - DNA, 23 bp, Artificial Sequence
  Description of Artificial Sequence: Synthetic oligonucleotide
  X-linked inhibitor of apoptosis (XIAP) siRNA
ggtttcaccatgttggccaggct

SEQ ID NO: 13918 - DNA, 23 bp, Artificial Sequence
  Description of Artificial Sequence: Synthetic oligonucleotide
  X-linked inhibitor of apoptosis (XIAP) siRNA
gtttcaccatgttggccaggctg

SEQ ID NO: 13919 - DNA, 23 bp, Artificial Sequence
  Description of Artificial Sequence: Synthetic oligonucleotide
  X-linked inhibitor of apoptosis (XIAP) siRNA
tttcaccatgttggccaggctgg

SEQ ID NO: 13920 - DNA, 23 bp, Artificial Sequence
  Description of Artificial Sequence: Synthetic oligonucleotide
  X-linked inhibitor of apoptosis (XIAP) siRNA
ttcaccatgttggccaggctggt

SEQ ID NO: 13921 - DNA, 23 bp, Artificial Sequence
  Description of Artificial Sequence: Synthetic oligonucleotide
  X-linked inhibitor of apoptosis (XIAP) siRNA
tcaccatgttggccaggctggta

SEQ ID NO: 13922 - DNA, 23 bp, Artificial Sequence
  Description of Artificial Sequence: Synthetic oligonucleotide
  X-linked inhibitor of apoptosis (XIAP) siRNA
caccatgttggccaggctggtat

SEQ ID NO: 13923 - DNA, 23 bp, Artificial Sequence
  Description of Artificial Sequence: Synthetic oligonucleotide
  X-linked inhibitor of apoptosis (XIAP) siRNA
accatgttggccaggctggtatc

SEQ ID NO: 13924 - DNA, 23 bp, Artificial Sequence
  Description of Artificial Sequence: Synthetic oligonucleotide
  X-linked inhibitor of apoptosis (XIAP) siRNA
ccatgttggccaggctggtatca

SEQ ID NO: 13925 - DNA, 23 bp, Artificial Sequence
  Description of Artificial Sequence: Synthetic oligonucleotide
  X-linked inhibitor of apoptosis (XIAP) siRNA
catgttggccaggctggtatcaa

SEQ ID NO: 13926 - DNA, 23 bp, Artificial Sequence
  Description of Artificial Sequence: Synthetic oligonucleotide
  X-linked inhibitor of apoptosis (XIAP) siRNA
atgttggccaggctggtatcaaa

SEQ ID NO: 13927 - DNA, 23 bp, Artificial Sequence
  Description of Artificial Sequence: Synthetic oligonucleotide
  X-linked inhibitor of apoptosis (XIAP) siRNA
tgttggccaggctggtatcaaac

SEQ ID NO: 13928 - DNA, 23 bp, Artificial Sequence
  Description of Artificial Sequence: Synthetic oligonucleotide
  X-linked inhibitor of apoptosis (XIAP) siRNA
gttggccaggctggtatcaaact

SEQ ID NO: 13929 - DNA, 23 bp, Artificial Sequence
  Description of Artificial Sequence: Synthetic oligonucleotide
  X-linked inhibitor of apoptosis (XIAP) siRNA
ttggccaggctggtatcaaactc

SEQ ID NO: 13930 - DNA, 23 bp, Artificial Sequence
  Description of Artificial Sequence: Synthetic oligonucleotide
  X-linked inhibitor of apoptosis (XIAP) siRNA
tggccaggctggtatcaaactcc

SEQ ID NO: 13931 - DNA, 23 bp, Artificial Sequence
  Description of Artificial Sequence: Synthetic oligonucleotide
  X-linked inhibitor of apoptosis (XIAP) siRNA
ggccaggctggtatcaaactcct

SEQ ID NO: 13932 - DNA, 23 bp, Artificial Sequence
  Description of Artificial Sequence: Synthetic oligonucleotide
  X-linked inhibitor of apoptosis (XIAP) siRNA
gccaggctggtatcaaactcctg

SEQ ID NO: 13933 - DNA, 23 bp, Artificial Sequence
  Description of Artificial Sequence: Synthetic oligonucleotide
  X-linked inhibitor of apoptosis (XIAP) siRNA
ccaggctggtatcaaactcctga

SEQ ID NO: 13934 - DNA, 23 bp, Artificial Sequence
  Description of Artificial Sequence: Synthetic oligonucleotide
  X-linked inhibitor of apoptosis (XIAP) siRNA
caggctggtatcaaactcctgac

SEQ ID NO: 13935 - DNA, 23 bp, Artificial Sequence
  Description of Artificial Sequence: Synthetic oligonucleotide
  X-linked inhibitor of apoptosis (XIAP) siRNA
aggctggtatcaaactcctgacc

SEQ ID NO: 13936 - DNA, 23 bp, Artificial Sequence
  Description of Artificial Sequence: Synthetic oligonucleotide
  X-linked inhibitor of apoptosis (XIAP) siRNA
ggctggtatcaaactcctgacct

SEQ ID NO: 13937 - DNA, 23 bp, Artificial Sequence
  Description of Artificial Sequence: Synthetic oligonucleotide
  X-linked inhibitor of apoptosis (XIAP) siRNA
gctggtatcaaactcctgacctc

SEQ ID NO: 13938 - DNA, 23 bp, Artificial Sequence
  Description of Artificial Sequence: Synthetic oligonucleotide
  X-linked inhibitor of apoptosis (XIAP) siRNA
ctggtatcaaactcctgacctca

SEQ ID NO: 13939 - DNA, 23 bp, Artificial Sequence
  Description of Artificial Sequence: Synthetic oligonucleotide
  X-linked inhibitor of apoptosis (XIAP) siRNA
tggtatcaaactcctgacctcaa

SEQ ID NO: 13940 - DNA, 23 bp, Artificial Sequence
  Description of Artificial Sequence: Synthetic oligonucleotide
  X-linked inhibitor of apoptosis (XIAP) siRNA
ggtatcaaactcctgacctcaag

SEQ ID NO: 13941 - DNA, 23 bp, Artificial Sequence
  Description of Artificial Sequence: Synthetic oligonucleotide
  X-linked inhibitor of apoptosis (XIAP) siRNA
gtatcaaactcctgacctcaaga

SEQ ID NO: 13942 - DNA, 23 bp, Artificial Sequence
  Description of Artificial Sequence: Synthetic oligonucleotide
  X-linked inhibitor of apoptosis (XIAP) siRNA
tatcaaactcctgacctcaagag

SEQ ID NO: 13943 - DNA, 23 bp, Artificial Sequence
  Description of Artificial Sequence: Synthetic oligonucleotide
  X-linked inhibitor of apoptosis (XIAP) siRNA
atcaaactcctgacctcaagaga

SEQ ID NO: 13944 - DNA, 23 bp, Artificial Sequence
  Description of Artificial Sequence: Synthetic oligonucleotide
  X-linked inhibitor of apoptosis (XIAP) siRNA
tcaaactcctgacctcaagagat

SEQ ID NO: 13945 - DNA, 23 bp, Artificial Sequence
  Description of Artificial Sequence: Synthetic oligonucleotide
  X-linked inhibitor of apoptosis (XIAP) siRNA
caaactcctgacctcaagagatc

SEQ ID NO: 13946 - DNA, 23 bp, Artificial Sequence
  Description of Artificial Sequence: Synthetic oligonucleotide
  X-linked inhibitor of apoptosis (XIAP) siRNA
aaactcctgacctcaagagatcc

SEQ ID NO: 13947 - DNA, 23 bp, Artificial Sequence
  Description of Artificial Sequence: Synthetic oligonucleotide
  X-linked inhibitor of apoptosis (XIAP) siRNA
aactcctgacctcaagagatcca

SEQ ID NO: 13948 - DNA, 23 bp, Artificial Sequence
  Description of Artificial Sequence: Synthetic oligonucleotide
  X-linked inhibitor of apoptosis (XIAP) siRNA
actcctgacctcaagagatccac

SEQ ID NO: 13949 - DNA, 23 bp, Artificial Sequence
  Description of Artificial Sequence: Synthetic oligonucleotide
  X-linked inhibitor of apoptosis (XIAP) siRNA
ctcctgacctcaagagatccact

SEQ ID NO: 13950 - DNA, 23 bp, Artificial Sequence
  Description of Artificial Sequence: Synthetic oligonucleotide
  X-linked inhibitor of apoptosis (XIAP) siRNA
tcctgacctcaagagatccactc

SEQ ID NO: 13951 - DNA, 23 bp, Artificial Sequence
  Description of Artificial Sequence: Synthetic oligonucleotide
  X-linked inhibitor of apoptosis (XIAP) siRNA
cctgacctcaagagatccactcg

SEQ ID NO: 13952 - DNA, 23 bp, Artificial Sequence
  Description of Artificial Sequence: Synthetic oligonucleotide
  X-linked inhibitor of apoptosis (XIAP) siRNA
ctgacctcaagagatccactcgc

SEQ ID NO: 13953 - DNA, 23 bp, Artificial Sequence
  Description of Artificial Sequence: Synthetic oligonucleotide
  X-linked inhibitor of apoptosis (XIAP) siRNA
tgacctcaagagatccactcgcc

SEQ ID NO: 13954 - DNA, 23 bp, Artificial Sequence
  Description of Artificial Sequence: Synthetic oligonucleotide
  X-linked inhibitor of apoptosis (XIAP) siRNA
gacctcaagagatccactcgcct

SEQ ID NO: 13955 - DNA, 23 bp, Artificial Sequence
  Description of Artificial Sequence: Synthetic oligonucleotide
  X-linked inhibitor of apoptosis (XIAP) siRNA
acctcaagagatccactcgcctt

SEQ ID NO: 13956 - DNA, 23 bp, Artificial Sequence
  Description of Artificial Sequence: Synthetic oligonucleotide
  X-linked inhibitor of apoptosis (XIAP) siRNA
cctcaagagatccactcgccttg

SEQ ID NO: 13957 - DNA, 23 bp, Artificial Sequence
  Description of Artificial Sequence: Synthetic oligonucleotide
  X-linked inhibitor of apoptosis (XIAP) siRNA
ctcaagagatccactcgccttgc

SEQ ID NO: 13958 - DNA, 23 bp, Artificial Sequence
  Description of Artificial Sequence: Synthetic oligonucleotide
  X-linked inhibitor of apoptosis (XIAP) siRNA
tcaagagatccactcgccttgcc

SEQ ID NO: 13959 - DNA, 23 bp, Artificial Sequence
  Description of Artificial Sequence: Synthetic oligonucleotide
  X-linked inhibitor of apoptosis (XIAP) siRNA
caagagatccactcgccttgccc

SEQ ID NO: 13960 - DNA, 23 bp, Artificial Sequence
  Description of Artificial Sequence: Synthetic oligonucleotide
  X-linked inhibitor of apoptosis (XIAP) siRNA
aagagatccactcgccttgccct

SEQ ID NO: 13961 - DNA, 23 bp, Artificial Sequence
  Description of Artificial Sequence: Synthetic oligonucleotide
  X-linked inhibitor of apoptosis (XIAP) siRNA
agagatccactcgccttgccctc

SEQ ID NO: 13962 - DNA, 23 bp, Artificial Sequence
  Description of Artificial Sequence: Synthetic oligonucleotide
  X-linked inhibitor of apoptosis (XIAP) siRNA
gagatccactcgccttgccctcc

SEQ ID NO: 13963 - DNA, 23 bp, Artificial Sequence
  Description of Artificial Sequence: Synthetic oligonucleotide
  X-linked inhibitor of apoptosis (XIAP) siRNA
agatccactcgccttgccctccc

SEQ ID NO: 13964 - DNA, 23 bp, Artificial Sequence
  Description of Artificial Sequence: Synthetic oligonucleotide
  X-linked inhibitor of apoptosis (XIAP) siRNA
gatccactcgccttgccctccca

SEQ ID NO: 13965 - DNA, 23 bp, Artificial Sequence
  Description of Artificial Sequence: Synthetic oligonucleotide
  X-linked inhibitor of apoptosis (XIAP) siRNA
atccactcgccttgccctcccaa

SEQ ID NO: 13966 - DNA, 23 bp, Artificial Sequence
  Description of Artificial Sequence: Synthetic oligonucleotide
  X-linked inhibitor of apoptosis (XIAP) siRNA
tccactcgccttgccctcccaaa

SEQ ID NO: 13967 - DNA, 23 bp, Artificial Sequence
  Description of Artificial Sequence: Synthetic oligonucleotide
  X-linked inhibitor of apoptosis (XIAP) siRNA
ccactcgccttgccctcccaaag

SEQ ID NO: 13968 - DNA, 23 bp, Artificial Sequence
  Description of Artificial Sequence: Synthetic oligonucleotide
  X-linked inhibitor of apoptosis (XIAP) siRNA
cactcgccttgccctcccaaagt

SEQ ID NO: 13969 - DNA, 23 bp, Artificial Sequence
  Description of Artificial Sequence: Synthetic oligonucleotide
  X-linked inhibitor of apoptosis (XIAP) siRNA
actcgccttgccctcccaaagtg

SEQ ID NO: 13970 - DNA, 23 bp, Artificial Sequence
  Description of Artificial Sequence: Synthetic oligonucleotide
  X-linked inhibitor of apoptosis (XIAP) siRNA
ctcgccttgccctcccaaagtgc

SEQ ID NO: 13971 - DNA, 23 bp, Artificial Sequence
  Description of Artificial Sequence: Synthetic oligonucleotide
  X-linked inhibitor of apoptosis (XIAP) siRNA
tcgccttgccctcccaaagtgct

SEQ ID NO: 13972 - DNA, 23 bp, Artificial Sequence
  Description of Artificial Sequence: Synthetic oligonucleotide
  X-linked inhibitor of apoptosis (XIAP) siRNA
cgccttgccctcccaaagtgctg

SEQ ID NO: 13973 - DNA, 23 bp, Artificial Sequence
  Description of Artificial Sequence: Synthetic oligonucleotide
  X-linked inhibitor of apoptosis (XIAP) siRNA
gccttgccctcccaaagtgctgg

SEQ ID NO: 13974 - DNA, 23 bp, Artificial Sequence
  Description of Artificial Sequence: Synthetic oligonucleotide
  X-linked inhibitor of apoptosis (XIAP) siRNA
ccttgccctcccaaagtgctggg

SEQ ID NO: 13975 - DNA, 23 bp, Artificial Sequence
  Description of Artificial Sequence: Synthetic oligonucleotide
  X-linked inhibitor of apoptosis (XIAP) siRNA
cttgccctcccaaagtgctggga

SEQ ID NO: 13976 - DNA, 23 bp, Artificial Sequence
  Description of Artificial Sequence: Synthetic oligonucleotide
  X-linked inhibitor of apoptosis (XIAP) siRNA
ttgccctcccaaagtgctgggat

SEQ ID NO: 13977 - DNA, 23 bp, Artificial Sequence
  Description of Artificial Sequence: Synthetic oligonucleotide
  X-linked inhibitor of apoptosis (XIAP) siRNA
tgccctcccaaagtgctgggatt

SEQ ID NO: 13978 - DNA, 23 bp, Artificial Sequence
  Description of Artificial Sequence: Synthetic oligonucleotide
  X-linked inhibitor of apoptosis (XIAP) siRNA
gccctcccaaagtgctgggatta

SEQ ID NO: 13979 - DNA, 23 bp, Artificial Sequence
  Description of Artificial Sequence: Synthetic oligonucleotide
  X-linked inhibitor of apoptosis (XIAP) siRNA
ccctcccaaagtgctgggattac

SEQ ID NO: 13980 - DNA, 23 bp, Artificial Sequence
  Description of Artificial Sequence: Synthetic oligonucleotide
  X-linked inhibitor of apoptosis (XIAP) siRNA
cctcccaaagtgctgggattaca

SEQ ID NO: 13981 - DNA, 23 bp, Artificial Sequence
  Description of Artificial Sequence: Synthetic oligonucleotide
  X-linked inhibitor of apoptosis (XIAP) siRNA
ctcccaaagtgctgggattacag

SEQ ID NO: 13982 - DNA, 23 bp, Artificial Sequence
  Description of Artificial Sequence: Synthetic oligonucleotide
  X-linked inhibitor of apoptosis (XIAP) siRNA
tcccaaagtgctgggattacagg

SEQ ID NO: 13983 - DNA, 23 bp, Artificial Sequence
  Description of Artificial Sequence: Synthetic oligonucleotide
  X-linked inhibitor of apoptosis (XIAP) siRNA
cccaaagtgctgggattacaggc

SEQ ID NO: 13984 - DNA, 23 bp, Artificial Sequence
  Description of Artificial Sequence: Synthetic oligonucleotide
  X-linked inhibitor of apoptosis (XIAP) siRNA
ccaaagtgctgggattacaggct

SEQ ID NO: 13985 - DNA, 23 bp, Artificial Sequence
  Description of Artificial Sequence: Synthetic oligonucleotide
  X-linked inhibitor of apoptosis (XIAP) siRNA
caaagtgctgggattacaggctt

SEQ ID NO: 13986 - DNA, 23 bp, Artificial Sequence
  Description of Artificial Sequence: Synthetic oligonucleotide
  X-linked inhibitor of apoptosis (XIAP) siRNA
aaagtgctgggattacaggcttg

SEQ ID NO: 13987 - DNA, 23 bp, Artificial Sequence
  Description of Artificial Sequence: Synthetic oligonucleotide
  X-linked inhibitor of apoptosis (XIAP) siRNA
aagtgctgggattacaggcttga

SEQ ID NO: 13988 - DNA, 23 bp, Artificial Sequence
  Description of Artificial Sequence: Synthetic oligonucleotide
  X-linked inhibitor of apoptosis (XIAP) siRNA
agtgctgggattacaggcttgag

SEQ ID NO: 13989 - DNA, 23 bp, Artificial Sequence
  Description of Artificial Sequence: Synthetic oligonucleotide
  X-linked inhibitor of apoptosis (XIAP) siRNA
gtgctgggattacaggcttgagc

SEQ ID NO: 13990 - DNA, 23 bp, Artificial Sequence
  Description of Artificial Sequence: Synthetic oligonucleotide
  X-linked inhibitor of apoptosis (XIAP) siRNA
tgctgggattacaggcttgagcc

SEQ ID NO: 13991 - DNA, 23 bp, Artificial Sequence
  Description of Artificial Sequence: Synthetic oligonucleotide
  X-linked inhibitor of apoptosis (XIAP) siRNA
gctgggattacaggcttgagcca

SEQ ID NO: 13992 - DNA, 23 bp, Artificial Sequence
  Description of Artificial Sequence: Synthetic oligonucleotide
  X-linked inhibitor of apoptosis (XIAP) siRNA
ctgggattacaggcttgagccac

SEQ ID NO: 13993 - DNA, 23 bp, Artificial Sequence
  Description of Artificial Sequence: Synthetic oligonucleotide
  X-linked inhibitor of apoptosis (XIAP) siRNA
tgggattacaggcttgagccacc

SEQ ID NO: 13994 - DNA, 23 bp, Artificial Sequence
  Description of Artificial Sequence: Synthetic oligonucleotide
  X-linked inhibitor of apoptosis (XIAP) siRNA
gggattacaggcttgagccacca

SEQ ID NO: 13995 - DNA, 23 bp, Artificial Sequence
  Description of Artificial Sequence: Synthetic oligonucleotide
  X-linked inhibitor of apoptosis (XIAP) siRNA
ggattacaggcttgagccaccac

SEQ ID NO: 13996 - DNA, 23 bp, Artificial Sequence
  Description of Artificial Sequence: Synthetic oligonucleotide
  X-linked inhibitor of apoptosis (XIAP) siRNA
gattacaggcttgagccaccacg

SEQ ID NO: 13997 - DNA, 23 bp, Artificial Sequence
  Description of Artificial Sequence: Synthetic oligonucleotide
  X-linked inhibitor of apoptosis (XIAP) siRNA
attacaggcttgagccaccacgc

SEQ ID NO: 13998 - DNA, 23 bp, Artificial Sequence
  Description of Artificial Sequence: Synthetic oligonucleotide
  X-linked inhibitor of apoptosis (XIAP) siRNA
ttacaggcttgagccaccacgcc

SEQ ID NO: 13999 - DNA, 23 bp, Artificial Sequence
  Description of Artificial Sequence: Synthetic oligonucleotide
  X-linked inhibitor of apoptosis (XIAP) siRNA
tacaggcttgagccaccacgccc

SEQ ID NO: 14000 - DNA, 23 bp, Artificial Sequence
  Description of Artificial Sequence: Synthetic oligonucleotide
  X-linked inhibitor of apoptosis (XIAP) siRNA
acaggcttgagccaccacgcccg

SEQ ID NO: 14001 - DNA, 23 bp, Artificial Sequence
  Description of Artificial Sequence: Synthetic oligonucleotide
  X-linked inhibitor of apoptosis (XIAP) siRNA
caggcttgagccaccacgcccgg

SEQ ID NO: 14002 - DNA, 23 bp, Artificial Sequence
  Description of Artificial Sequence: Synthetic oligonucleotide
  X-linked inhibitor of apoptosis (XIAP) siRNA
aggcttgagccaccacgcccggc

SEQ ID NO: 14003 - DNA, 23 bp, Artificial Sequence
  Description of Artificial Sequence: Synthetic oligonucleotide
  X-linked inhibitor of apoptosis (XIAP) siRNA
ggcttgagccaccacgcccggct

SEQ ID NO: 14004 - DNA, 23 bp, Artificial Sequence
  Description of Artificial Sequence: Synthetic oligonucleotide
  X-linked inhibitor of apoptosis (XIAP) siRNA
gcttgagccaccacgcccggcta

SEQ ID NO: 14005 - DNA, 23 bp, Artificial Sequence
  Description of Artificial Sequence: Synthetic oligonucleotide
  X-linked inhibitor of apoptosis (XIAP) siRNA
cttgagccaccacgcccggctaa

SEQ ID NO: 14006 - DNA, 23 bp, Artificial Sequence
  Description of Artificial Sequence: Synthetic oligonucleotide
  X-linked inhibitor of apoptosis (XIAP) siRNA
ttgagccaccacgcccggctaaa

SEQ ID NO: 14007 - DNA, 23 bp, Artificial Sequence
  Description of Artificial Sequence: Synthetic oligonucleotide
  X-linked inhibitor of apoptosis (XIAP) siRNA
tgagccaccacgcccggctaaaa

SEQ ID NO: 14008 - DNA, 23 bp, Artificial Sequence
  Description of Artificial Sequence: Synthetic oligonucleotide
  X-linked inhibitor of apoptosis (XIAP) siRNA
gagccaccacgcccggctaaaac

SEQ ID NO: 14009 - DNA, 23 bp, Artificial Sequence
  Description of Artificial Sequence: Synthetic oligonucleotide
  X-linked inhibitor of apoptosis (XIAP) siRNA
agccaccacgcccggctaaaaca

SEQ ID NO: 14010 - DNA, 23 bp, Artificial Sequence
  Description of Artificial Sequence: Synthetic oligonucleotide
  X-linked inhibitor of apoptosis (XIAP) siRNA
gccaccacgcccggctaaaacat

SEQ ID NO: 14011 - DNA, 23 bp, Artificial Sequence
  Description of Artificial Sequence: Synthetic oligonucleotide
  X-linked inhibitor of apoptosis (XIAP) siRNA
ccaccacgcccggctaaaacatt

SEQ ID NO: 14012 - DNA, 23 bp, Artificial Sequence
  Description of Artificial Sequence: Synthetic oligonucleotide
  X-linked inhibitor of apoptosis (XIAP) siRNA
caccacgcccggctaaaacattg

SEQ ID NO: 14013 - DNA, 23 bp, Artificial Sequence
  Description of Artificial Sequence: Synthetic oligonucleotide
  X-linked inhibitor of apoptosis (XIAP) siRNA
accacgcccggctaaaacattgc

SEQ ID NO: 14014 - DNA, 23 bp, Artificial Sequence
  Description of Artificial Sequence: Synthetic oligonucleotide
  X-linked inhibitor of apoptosis (XIAP) siRNA
ccacgcccggctaaaacattgca

SEQ ID NO: 14015 - DNA, 23 bp, Artificial Sequence
  Description of Artificial Sequence: Synthetic oligonucleotide
  X-linked inhibitor of apoptosis (XIAP) siRNA
cacgcccggctaaaacattgcaa

SEQ ID NO: 14016 - DNA, 23 bp, Artificial Sequence
  Description of Artificial Sequence: Synthetic oligonucleotide
  X-linked inhibitor of apoptosis (XIAP) siRNA
acgcccggctaaaacattgcaaa

SEQ ID NO: 14017 - DNA, 23 bp, Artificial Sequence
  Description of Artificial Sequence: Synthetic oligonucleotide
  X-linked inhibitor of apoptosis (XIAP) siRNA
cgcccggctaaaacattgcaaat

SEQ ID NO: 14018 - DNA, 23 bp, Artificial Sequence
  Description of Artificial Sequence: Synthetic oligonucleotide
  X-linked inhibitor of apoptosis (XIAP) siRNA
gcccggctaaaacattgcaaatt

SEQ ID NO: 14019 - DNA, 23 bp, Artificial Sequence
  Description of Artificial Sequence: Synthetic oligonucleotide
  X-linked inhibitor of apoptosis (XIAP) siRNA
cccggctaaaacattgcaaattt

SEQ ID NO: 14020 - DNA, 23 bp, Artificial Sequence
  Description of Artificial Sequence: Synthetic oligonucleotide
  X-linked inhibitor of apoptosis (XIAP) siRNA
ccggctaaaacattgcaaattta

SEQ ID NO: 14021 - DNA, 23 bp, Artificial Sequence
  Description of Artificial Sequence: Synthetic oligonucleotide
  X-linked inhibitor of apoptosis (XIAP) siRNA
cggctaaaacattgcaaatttaa

SEQ ID NO: 14022 - DNA, 23 bp, Artificial Sequence
  Description of Artificial Sequence: Synthetic oligonucleotide
  X-linked inhibitor of apoptosis (XIAP) siRNA
ggctaaaacattgcaaatttaaa

SEQ ID NO: 14023 - DNA, 23 bp, Artificial Sequence
  Description of Artificial Sequence: Synthetic oligonucleotide
  X-linked inhibitor of apoptosis (XIAP) siRNA
gctaaaacattgcaaatttaaat

SEQ ID NO: 14024 - DNA, 23 bp, Artificial Sequence
  Description of Artificial Sequence: Synthetic oligonucleotide
  X-linked inhibitor of apoptosis (XIAP) siRNA
ctaaaacattgcaaatttaaatg

SEQ ID NO: 14025 - DNA, 23 bp, Artificial Sequence
  Description of Artificial Sequence: Synthetic oligonucleotide
  X-linked inhibitor of apoptosis (XIAP) siRNA
taaaacattgcaaatttaaatga

SEQ ID NO: 14026 - DNA, 23 bp, Artificial Sequence
  Description of Artificial Sequence: Synthetic oligonucleotide
  X-linked inhibitor of apoptosis (XIAP) siRNA
aaaacattgcaaatttaaatgag

SEQ ID NO: 14027 - DNA, 23 bp, Artificial Sequence
  Description of Artificial Sequence: Synthetic oligonucleotide
  X-linked inhibitor of apoptosis (XIAP) siRNA
aaacattgcaaatttaaatgaga

SEQ ID NO: 14028 - DNA, 23 bp, Artificial Sequence
  Description of Artificial Sequence: Synthetic oligonucleotide
  X-linked inhibitor of apoptosis (XIAP) siRNA
aacattgcaaatttaaatgagag

SEQ ID NO: 14029 - DNA, 23 bp, Artificial Sequence
  Description of Artificial Sequence: Synthetic oligonucleotide
  X-linked inhibitor of apoptosis (XIAP) siRNA
acattgcaaatttaaatgagagt

SEQ ID NO: 14030 - DNA, 23 bp, Artificial Sequence
  Description of Artificial Sequence: Synthetic oligonucleotide
  X-linked inhibitor of apoptosis (XIAP) siRNA
cattgcaaatttaaatgagagtt

SEQ ID NO: 14031 - DNA, 23 bp, Artificial Sequence
  Description of Artificial Sequence: Synthetic oligonucleotide
  X-linked inhibitor of apoptosis (XIAP) siRNA
attgcaaatttaaatgagagttt

SEQ ID NO: 14032 - DNA, 23 bp, Artificial Sequence
  Description of Artificial Sequence: Synthetic oligonucleotide
  X-linked inhibitor of apoptosis (XIAP) siRNA
ttgcaaatttaaatgagagtttt

SEQ ID NO: 14033 - DNA, 23 bp, Artificial Sequence
  Description of Artificial Sequence: Synthetic oligonucleotide
  X-linked inhibitor of apoptosis (XIAP) siRNA
tgcaaatttaaatgagagtttta

SEQ ID NO: 14034 - DNA, 23 bp, Artificial Sequence
  Description of Artificial Sequence: Synthetic oligonucleotide
  X-linked inhibitor of apoptosis (XIAP) siRNA
gcaaatttaaatgagagttttaa

SEQ ID NO: 14035 - DNA, 23 bp, Artificial Sequence
  Description of Artificial Sequence: Synthetic oligonucleotide
  X-linked inhibitor of apoptosis (XIAP) siRNA
caaatttaaatgagagttttaaa

SEQ ID NO: 14036 - DNA, 23 bp, Artificial Sequence
  Description of Artificial Sequence: Synthetic oligonucleotide
  X-linked inhibitor of apoptosis (XIAP) siRNA
aaatttaaatgagagttttaaaa

SEQ ID NO: 14037 - DNA, 23 bp, Artificial Sequence
  Description of Artificial Sequence: Synthetic oligonucleotide
  X-linked inhibitor of apoptosis (XIAP) siRNA
aatttaaatgagagttttaaaaa

SEQ ID NO: 14038 - DNA, 23 bp, Artificial Sequence
  Description of Artificial Sequence: Synthetic oligonucleotide
  X-linked inhibitor of apoptosis (XIAP) siRNA
atttaaatgagagttttaaaaat

SEQ ID NO: 14039 - DNA, 23 bp, Artificial Sequence
  Description of Artificial Sequence: Synthetic oligonucleotide
  X-linked inhibitor of apoptosis (XIAP) siRNA
tttaaatgagagttttaaaaatt

SEQ ID NO: 14040 - DNA, 23 bp, Artificial Sequence
  Description of Artificial Sequence: Synthetic oligonucleotide
  X-linked inhibitor of apoptosis (XIAP) siRNA
ttaaatgagagttttaaaaatta

SEQ ID NO: 14041 - DNA, 23 bp, Artificial Sequence
  Description of Artificial Sequence: Synthetic oligonucleotide
  X-linked inhibitor of apoptosis (XIAP) siRNA
taaatgagagttttaaaaattaa

SEQ ID NO: 14042 - DNA, 23 bp, Artificial Sequence
  Description of Artificial Sequence: Synthetic oligonucleotide
  X-linked inhibitor of apoptosis (XIAP) siRNA
aaatgagagttttaaaaattaaa

SEQ ID NO: 14043 - DNA, 23 bp, Artificial Sequence
  Description of Artificial Sequence: Synthetic oligonucleotide
  X-linked inhibitor of apoptosis (XIAP) siRNA
aatgagagttttaaaaattaaat

SEQ ID NO: 14044 - DNA, 23 bp, Artificial Sequence
  Description of Artificial Sequence: Synthetic oligonucleotide
  X-linked inhibitor of apoptosis (XIAP) siRNA
atgagagttttaaaaattaaata

SEQ ID NO: 14045 - DNA, 23 bp, Artificial Sequence
  Description of Artificial Sequence: Synthetic oligonucleotide
  X-linked inhibitor of apoptosis (XIAP) siRNA
tgagagttttaaaaattaaataa

SEQ ID NO: 14046 - DNA, 23 bp, Artificial Sequence
  Description of Artificial Sequence: Synthetic oligonucleotide
  X-linked inhibitor of apoptosis (XIAP) siRNA
gagagttttaaaaattaaataat

SEQ ID NO: 14047 - DNA, 23 bp, Artificial Sequence
  Description of Artificial Sequence: Synthetic oligonucleotide
  X-linked inhibitor of apoptosis (XIAP) siRNA
agagttttaaaaattaaataatg

SEQ ID NO: 14048 - DNA, 23 bp, Artificial Sequence
  Description of Artificial Sequence: Synthetic oligonucleotide
  X-linked inhibitor of apoptosis (XIAP) siRNA
gagttttaaaaattaaataatga

SEQ ID NO: 14049 - DNA, 23 bp, Artificial Sequence
  Description of Artificial Sequence: Synthetic oligonucleotide
  X-linked inhibitor of apoptosis (XIAP) siRNA
agttttaaaaattaaataatgac

SEQ ID NO: 14050 - DNA, 23 bp, Artificial Sequence
  Description of Artificial Sequence: Synthetic oligonucleotide
  X-linked inhibitor of apoptosis (XIAP) siRNA
gttttaaaaattaaataatgact

SEQ ID NO: 14051 - DNA, 23 bp, Artificial Sequence
  Description of Artificial Sequence: Synthetic oligonucleotide
  X-linked inhibitor of apoptosis (XIAP) siRNA
ttttaaaaattaaataatgactg

SEQ ID NO: 14052 - DNA, 23 bp, Artificial Sequence
  Description of Artificial Sequence: Synthetic oligonucleotide
  X-linked inhibitor of apoptosis (XIAP) siRNA
tttaaaaattaaataatgactgc

SEQ ID NO: 14053 - DNA, 23 bp, Artificial Sequence
  Description of Artificial Sequence: Synthetic oligonucleotide
  X-linked inhibitor of apoptosis (XIAP) siRNA
ttaaaaattaaataatgactgcc

SEQ ID NO: 14054 - DNA, 23 bp, Artificial Sequence
  Description of Artificial Sequence: Synthetic oligonucleotide
  X-linked inhibitor of apoptosis (XIAP) siRNA
taaaaattaaataatgactgccc

SEQ ID NO: 14055 - DNA, 23 bp, Artificial Sequence
  Description of Artificial Sequence: Synthetic oligonucleotide
  X-linked inhibitor of apoptosis (XIAP) siRNA
aaaaattaaataatgactgccct

SEQ ID NO: 14056 - DNA, 23 bp, Artificial Sequence
  Description of Artificial Sequence: Synthetic oligonucleotide
  X-linked inhibitor of apoptosis (XIAP) siRNA
aaaattaaataatgactgccctg

SEQ ID NO: 14057 - DNA, 23 bp, Artificial Sequence
  Description of Artificial Sequence: Synthetic oligonucleotide
  X-linked inhibitor of apoptosis (XIAP) siRNA
aaattaaataatgactgccctgt

SEQ ID NO: 14058 - DNA, 23 bp, Artificial Sequence
  Description of Artificial Sequence: Synthetic oligonucleotide
  X-linked inhibitor of apoptosis (XIAP) siRNA
aattaaataatgactgccctgtt

SEQ ID NO: 14059 - DNA, 23 bp, Artificial Sequence
  Description of Artificial Sequence: Synthetic oligonucleotide
  X-linked inhibitor of apoptosis (XIAP) siRNA
attaaataatgactgccctgttt

SEQ ID NO: 14060 - DNA, 23 bp, Artificial Sequence
  Description of Artificial Sequence: Synthetic oligonucleotide
  X-linked inhibitor of apoptosis (XIAP) siRNA
ttaaataatgactgccctgtttc

SEQ ID NO: 14061 - DNA, 23 bp, Artificial Sequence
  Description of Artificial Sequence: Synthetic oligonucleotide
  X-linked inhibitor of apoptosis (XIAP) siRNA
taaataatgactgccctgtttct

SEQ ID NO: 14062 - DNA, 23 bp, Artificial Sequence
  Description of Artificial Sequence: Synthetic oligonucleotide
  X-linked inhibitor of apoptosis (XIAP) siRNA
aaataatgactgccctgtttctg

SEQ ID NO: 14063 - DNA, 23 bp, Artificial Sequence
  Description of Artificial Sequence: Synthetic oligonucleotide
  X-linked inhibitor of apoptosis (XIAP) siRNA
aataatgactgccctgtttctgt

SEQ ID NO: 14064 - DNA, 23 bp, Artificial Sequence
  Description of Artificial Sequence: Synthetic oligonucleotide
  X-linked inhibitor of apoptosis (XIAP) siRNA
ataatgactgccctgtttctgtt

SEQ ID NO: 14065 - DNA, 23 bp, Artificial Sequence
  Description of Artificial Sequence: Synthetic oligonucleotide
  X-linked inhibitor of apoptosis (XIAP) siRNA
taatgactgccctgtttctgttt

SEQ ID NO: 14066 - DNA, 23 bp, Artificial Sequence
  Description of Artificial Sequence: Synthetic oligonucleotide
  X-linked inhibitor of apoptosis (XIAP) siRNA
aatgactgccctgtttctgtttt

SEQ ID NO: 14067 - DNA, 23 bp, Artificial Sequence
  Description of Artificial Sequence: Synthetic oligonucleotide
  X-linked inhibitor of apoptosis (XIAP) siRNA
atgactgccctgtttctgtttta

SEQ ID NO: 14068 - DNA, 23 bp, Artificial Sequence
  Description of Artificial Sequence: Synthetic oligonucleotide
  X-linked inhibitor of apoptosis (XIAP) siRNA
tgactgccctgtttctgttttag

SEQ ID NO: 14069 - DNA, 23 bp, Artificial Sequence
  Description of Artificial Sequence: Synthetic oligonucleotide
  X-linked inhibitor of apoptosis (XIAP) siRNA
gactgccctgtttctgttttagt

SEQ ID NO: 14070 - DNA, 23 bp, Artificial Sequence
  Description of Artificial Sequence: Synthetic oligonucleotide
  X-linked inhibitor of apoptosis (XIAP) siRNA
actgccctgtttctgttttagta

SEQ ID NO: 14071 - DNA, 23 bp, Artificial Sequence
  Description of Artificial Sequence: Synthetic oligonucleotide
  X-linked inhibitor of apoptosis (XIAP) siRNA
ctgccctgtttctgttttagtat

SEQ ID NO: 14072 - DNA, 23 bp, Artificial Sequence
  Description of Artificial Sequence: Synthetic oligonucleotide
  X-linked inhibitor of apoptosis (XIAP) siRNA
tgccctgtttctgttttagtatg

SEQ ID NO: 14073 - DNA, 23 bp, Artificial Sequence
  Description of Artificial Sequence: Synthetic oligonucleotide
  X-linked inhibitor of apoptosis (XIAP) siRNA
gccctgtttctgttttagtatgt

SEQ ID NO: 14074 - DNA, 23 bp, Artificial Sequence
  Description of Artificial Sequence: Synthetic oligonucleotide
  X-linked inhibitor of apoptosis (XIAP) siRNA
ccctgtttctgttttagtatgta

SEQ ID NO: 14075 - DNA, 23 bp, Artificial Sequence
  Description of Artificial Sequence: Synthetic oligonucleotide
  X-linked inhibitor of apoptosis (XIAP) siRNA
cctgtttctgttttagtatgtaa

SEQ ID NO: 14076 - DNA, 23 bp, Artificial Sequence
  Description of Artificial Sequence: Synthetic oligonucleotide
  X-linked inhibitor of apoptosis (XIAP) siRNA
ctgtttctgttttagtatgtaaa

SEQ ID NO: 14077 - DNA, 23 bp, Artificial Sequence
  Description of Artificial Sequence: Synthetic oligonucleotide
  X-linked inhibitor of apoptosis (XIAP) siRNA
tgtttctgttttagtatgtaaat

SEQ ID NO: 14078 - DNA, 23 bp, Artificial Sequence
  Description of Artificial Sequence: Synthetic oligonucleotide
  X-linked inhibitor of apoptosis (XIAP) siRNA
gtttctgttttagtatgtaaatc

SEQ ID NO: 14079 - DNA, 23 bp, Artificial Sequence
  Description of Artificial Sequence: Synthetic oligonucleotide
  X-linked inhibitor of apoptosis (XIAP) siRNA
tttctgttttagtatgtaaatcc

SEQ ID NO: 14080 - DNA, 23 bp, Artificial Sequence
  Description of Artificial Sequence: Synthetic oligonucleotide
  X-linked inhibitor of apoptosis (XIAP) siRNA
ttctgttttagtatgtaaatcct

SEQ ID NO: 14081 - DNA, 23 bp, Artificial Sequence
  Description of Artificial Sequence: Synthetic oligonucleotide
  X-linked inhibitor of apoptosis (XIAP) siRNA
tctgttttagtatgtaaatcctc

SEQ ID NO: 14082 - DNA, 23 bp, Artificial Sequence
  Description of Artificial Sequence: Synthetic oligonucleotide
  X-linked inhibitor of apoptosis (XIAP) siRNA
ctgttttagtatgtaaatcctca

SEQ ID NO: 14083 - DNA, 23 bp, Artificial Sequence
  Description of Artificial Sequence: Synthetic oligonucleotide
  X-linked inhibitor of apoptosis (XIAP) siRNA
tgttttagtatgtaaatcctcag

SEQ ID NO: 14084 - DNA, 23 bp, Artificial Sequence
  Description of Artificial Sequence: Synthetic oligonucleotide
  X-linked inhibitor of apoptosis (XIAP) siRNA
gttttagtatgtaaatcctcagt

SEQ ID NO: 14085 - DNA, 23 bp, Artificial Sequence
  Description of Artificial Sequence: Synthetic oligonucleotide
  X-linked inhibitor of apoptosis (XIAP) siRNA
ttttagtatgtaaatcctcagtt

SEQ ID NO: 14086 - DNA, 23 bp, Artificial Sequence
  Description of Artificial Sequence: Synthetic oligonucleotide
  X-linked inhibitor of apoptosis (XIAP) siRNA
tttagtatgtaaatcctcagttc

SEQ ID NO: 14087 - DNA, 23 bp, Artificial Sequence
  Description of Artificial Sequence: Synthetic oligonucleotide
  X-linked inhibitor of apoptosis (XIAP) siRNA
ttagtatgtaaatcctcagttct

SEQ ID NO: 14088 - DNA, 23 bp, Artificial Sequence
  Description of Artificial Sequence: Synthetic oligonucleotide
  X-linked inhibitor of apoptosis (XIAP) siRNA
tagtatgtaaatcctcagttctt

SEQ ID NO: 14089 - DNA, 23 bp, Artificial Sequence
  Description of Artificial Sequence: Synthetic oligonucleotide
  X-linked inhibitor of apoptosis (XIAP) siRNA
agtatgtaaatcctcagttcttc

SEQ ID NO: 14090 - DNA, 23 bp, Artificial Sequence
  Description of Artificial Sequence: Synthetic oligonucleotide
  X-linked inhibitor of apoptosis (XIAP) siRNA
gtatgtaaatcctcagttcttca

SEQ ID NO: 14091 - DNA, 23 bp, Artificial Sequence
  Description of Artificial Sequence: Synthetic oligonucleotide
  X-linked inhibitor of apoptosis (XIAP) siRNA
tatgtaaatcctcagttcttcac

SEQ ID NO: 14092 - DNA, 23 bp, Artificial Sequence
  Description of Artificial Sequence: Synthetic oligonucleotide
  X-linked inhibitor of apoptosis (XIAP) siRNA
atgtaaatcctcagttcttcacc

SEQ ID NO: 14093 - DNA, 23 bp, Artificial Sequence
  Description of Artificial Sequence: Synthetic oligonucleotide
  X-linked inhibitor of apoptosis (XIAP) siRNA
tgtaaatcctcagttcttcacct

SEQ ID NO: 14094 - DNA, 23 bp, Artificial Sequence
  Description of Artificial Sequence: Synthetic oligonucleotide
  X-linked inhibitor of apoptosis (XIAP) siRNA
gtaaatcctcagttcttcacctt

SEQ ID NO: 14095 - DNA, 23 bp, Artificial Sequence
  Description of Artificial Sequence: Synthetic oligonucleotide
  X-linked inhibitor of apoptosis (XIAP) siRNA
taaatcctcagttcttcaccttt

SEQ ID NO: 14096 - DNA, 23 bp, Artificial Sequence
  Description of Artificial Sequence: Synthetic oligonucleotide
  X-linked inhibitor of apoptosis (XIAP) siRNA
aaatcctcagttcttcacctttg

SEQ ID NO: 14097 - DNA, 23 bp, Artificial Sequence
  Description of Artificial Sequence: Synthetic oligonucleotide
  X-linked inhibitor of apoptosis (XIAP) siRNA
aatcctcagttcttcacctttgc

SEQ ID NO: 14098 - DNA, 23 bp, Artificial Sequence
  Description of Artificial Sequence: Synthetic oligonucleotide
  X-linked inhibitor of apoptosis (XIAP) siRNA
atcctcagttcttcacctttgca

SEQ ID NO: 14099 - DNA, 23 bp, Artificial Sequence
  Description of Artificial Sequence: Synthetic oligonucleotide
  X-linked inhibitor of apoptosis (XIAP) siRNA
tcctcagttcttcacctttgcac

SEQ ID NO: 14100 - DNA, 23 bp, Artificial Sequence
  Description of Artificial Sequence: Synthetic oligonucleotide
  X-linked inhibitor of apoptosis (XIAP) siRNA
cctcagttcttcacctttgcact

SEQ ID NO: 14101 - DNA, 23 bp, Artificial Sequence
  Description of Artificial Sequence: Synthetic oligonucleotide
  X-linked inhibitor of apoptosis (XIAP) siRNA
ctcagttcttcacctttgcactg

SEQ ID NO: 14102 - DNA, 23 bp, Artificial Sequence
  Description of Artificial Sequence: Synthetic oligonucleotide
  X-linked inhibitor of apoptosis (XIAP) siRNA
tcagttcttcacctttgcactgt

SEQ ID NO: 14103 - DNA, 23 bp, Artificial Sequence
  Description of Artificial Sequence: Synthetic oligonucleotide
  X-linked inhibitor of apoptosis (XIAP) siRNA
cagttcttcacctttgcactgtc

SEQ ID NO: 14104 - DNA, 23 bp, Artificial Sequence
  Description of Artificial Sequence: Synthetic oligonucleotide
  X-linked inhibitor of apoptosis (XIAP) siRNA
agttcttcacctttgcactgtct

SEQ ID NO: 14105 - DNA, 23 bp, Artificial Sequence
  Description of Artificial Sequence: Synthetic oligonucleotide
  X-linked inhibitor of apoptosis (XIAP) siRNA
gttcttcacctttgcactgtctg

SEQ ID NO: 14106 - DNA, 23 bp, Artificial Sequence
  Description of Artificial Sequence: Synthetic oligonucleotide
  X-linked inhibitor of apoptosis (XIAP) siRNA
ttcttcacctttgcactgtctgc

SEQ ID NO: 14107 - DNA, 23 bp, Artificial Sequence
  Description of Artificial Sequence: Synthetic oligonucleotide
  X-linked inhibitor of apoptosis (XIAP) siRNA
tcttcacctttgcactgtctgcc

SEQ ID NO: 14108 - DNA, 23 bp, Artificial Sequence
  Description of Artificial Sequence: Synthetic oligonucleotide
  X-linked inhibitor of apoptosis (XIAP) siRNA
cttcacctttgcactgtctgcca

SEQ ID NO: 14109 - DNA, 23 bp, Artificial Sequence
  Description of Artificial Sequence: Synthetic oligonucleotide
  X-linked inhibitor of apoptosis (XIAP) siRNA
ttcacctttgcactgtctgccac

SEQ ID NO: 14110 - DNA, 23 bp, Artificial Sequence
  Description of Artificial Sequence: Synthetic oligonucleotide
  X-linked inhibitor of apoptosis (XIAP) siRNA
tcacctttgcactgtctgccact

SEQ ID NO: 14111 - DNA, 23 bp, Artificial Sequence
  Description of Artificial Sequence: Synthetic oligonucleotide
  X-linked inhibitor of apoptosis (XIAP) siRNA
cacctttgcactgtctgccactt

SEQ ID NO: 14112 - DNA, 23 bp, Artificial Sequence
  Description of Artificial Sequence: Synthetic oligonucleotide
  X-linked inhibitor of apoptosis (XIAP) siRNA
acctttgcactgtctgccactta

SEQ ID NO: 14113 - DNA, 23 bp, Artificial Sequence
  Description of Artificial Sequence: Synthetic oligonucleotide
  X-linked inhibitor of apoptosis (XIAP) siRNA
cctttgcactgtctgccacttag

SEQ ID NO: 14114 - DNA, 23 bp, Artificial Sequence
  Description of Artificial Sequence: Synthetic oligonucleotide
  X-linked inhibitor of apoptosis (XIAP) siRNA
ctttgcactgtctgccacttagt

SEQ ID NO: 14115 - DNA, 23 bp, Artificial Sequence
  Description of Artificial Sequence: Synthetic oligonucleotide
  X-linked inhibitor of apoptosis (XIAP) siRNA
tttgcactgtctgccacttagtt

SEQ ID NO: 14116 - DNA, 23 bp, Artificial Sequence
  Description of Artificial Sequence: Synthetic oligonucleotide
  X-linked inhibitor of apoptosis (XIAP) siRNA
ttgcactgtctgccacttagttt

SEQ ID NO: 14117 - DNA, 23 bp, Artificial Sequence
  Description of Artificial Sequence: Synthetic oligonucleotide
  X-linked inhibitor of apoptosis (XIAP) siRNA
tgcactgtctgccacttagtttg

SEQ ID NO: 14118 - DNA, 23 bp, Artificial Sequence
  Description of Artificial Sequence: Synthetic oligonucleotide
  X-linked inhibitor of apoptosis (XIAP) siRNA
gcactgtctgccacttagtttgg

SEQ ID NO: 14119 - DNA, 23 bp, Artificial Sequence
  Description of Artificial Sequence: Synthetic oligonucleotide
  X-linked inhibitor of apoptosis (XIAP) siRNA
cactgtctgccacttagtttggt

SEQ ID NO: 14120 - DNA, 23 bp, Artificial Sequence
  Description of Artificial Sequence: Synthetic oligonucleotide
  X-linked inhibitor of apoptosis (XIAP) siRNA
actgtctgccacttagtttggtt

SEQ ID NO: 14121 - DNA, 23 bp, Artificial Sequence
  Description of Artificial Sequence: Synthetic oligonucleotide
  X-linked inhibitor of apoptosis (XIAP) siRNA
ctgtctgccacttagtttggtta

SEQ ID NO: 14122 - DNA, 23 bp, Artificial Sequence
  Description of Artificial Sequence: Synthetic oligonucleotide
  X-linked inhibitor of apoptosis (XIAP) siRNA
tgtctgccacttagtttggttat

SEQ ID NO: 14123 - DNA, 23 bp, Artificial Sequence
  Description of Artificial Sequence: Synthetic oligonucleotide
  X-linked inhibitor of apoptosis (XIAP) siRNA
gtctgccacttagtttggttata

SEQ ID NO: 14124 - DNA, 23 bp, Artificial Sequence
  Description of Artificial Sequence: Synthetic oligonucleotide
  X-linked inhibitor of apoptosis (XIAP) siRNA
tctgccacttagtttggttatat

SEQ ID NO: 14125 - DNA, 23 bp, Artificial Sequence
  Description of Artificial Sequence: Synthetic oligonucleotide
  X-linked inhibitor of apoptosis (XIAP) siRNA
ctgccacttagtttggttatata

SEQ ID NO: 14126 - DNA, 23 bp, Artificial Sequence
  Description of Artificial Sequence: Synthetic oligonucleotide
  X-linked inhibitor of apoptosis (XIAP) siRNA
tgccacttagtttggttatatag

SEQ ID NO: 14127 - DNA, 23 bp, Artificial Sequence
  Description of Artificial Sequence: Synthetic oligonucleotide
  X-linked inhibitor of apoptosis (XIAP) siRNA
gccacttagtttggttatatagt

SEQ ID NO: 14128 - DNA, 23 bp, Artificial Sequence
  Description of Artificial Sequence: Synthetic oligonucleotide
  X-linked inhibitor of apoptosis (XIAP) siRNA
ccacttagtttggttatatagtc

SEQ ID NO: 14129 - DNA, 23 bp, Artificial Sequence
  Description of Artificial Sequence: Synthetic oligonucleotide
  X-linked inhibitor of apoptosis (XIAP) siRNA
cacttagtttggttatatagtca

SEQ ID NO: 14130 - DNA, 23 bp, Artificial Sequence
  Description of Artificial Sequence: Synthetic oligonucleotide
  X-linked inhibitor of apoptosis (XIAP) siRNA
acttagtttggttatatagtcat

SEQ ID NO: 14131 - DNA, 23 bp, Artificial Sequence
  Description of Artificial Sequence: Synthetic oligonucleotide
  X-linked inhibitor of apoptosis (XIAP) siRNA
cttagtttggttatatagtcatt

SEQ ID NO: 14132 - DNA, 23 bp, Artificial Sequence
  Description of Artificial Sequence: Synthetic oligonucleotide
  X-linked inhibitor of apoptosis (XIAP) siRNA
ttagtttggttatatagtcatta

SEQ ID NO: 14133 - DNA, 23 bp, Artificial Sequence
  Description of Artificial Sequence: Synthetic oligonucleotide
  X-linked inhibitor of apoptosis (XIAP) siRNA
tagtttggttatatagtcattaa

SEQ ID NO: 14134 - DNA, 23 bp, Artificial Sequence
  Description of Artificial Sequence: Synthetic oligonucleotide
  X-linked inhibitor of apoptosis (XIAP) siRNA
agtttggttatatagtcattaac

SEQ ID NO: 14135 - DNA, 23 bp, Artificial Sequence
  Description of Artificial Sequence: Synthetic oligonucleotide
  X-linked inhibitor of apoptosis (XIAP) siRNA
gtttggttatatagtcattaact

SEQ ID NO: 14136 - DNA, 23 bp, Artificial Sequence
  Description of Artificial Sequence: Synthetic oligonucleotide
  X-linked inhibitor of apoptosis (XIAP) siRNA
tttggttatatagtcattaactt

SEQ ID NO: 14137 - DNA, 23 bp, Artificial Sequence
  Description of Artificial Sequence: Synthetic oligonucleotide
  X-linked inhibitor of apoptosis (XIAP) siRNA
ttggttatatagtcattaacttg

SEQ ID NO: 14138 - DNA, 23 bp, Artificial Sequence
  Description of Artificial Sequence: Synthetic oligonucleotide
  X-linked inhibitor of apoptosis (XIAP) siRNA
tggttatatagtcattaacttga

SEQ ID NO: 14139 - DNA, 23 bp, Artificial Sequence
  Description of Artificial Sequence: Synthetic oligonucleotide
  X-linked inhibitor of apoptosis (XIAP) siRNA
ggttatatagtcattaacttgaa

SEQ ID NO: 14140 - DNA, 23 bp, Artificial Sequence
  Description of Artificial Sequence: Synthetic oligonucleotide
  X-linked inhibitor of apoptosis (XIAP) siRNA
gttatatagtcattaacttgaat

SEQ ID NO: 14141 - DNA, 23 bp, Artificial Sequence
  Description of Artificial Sequence: Synthetic oligonucleotide
  X-linked inhibitor of apoptosis (XIAP) siRNA
ttatatagtcattaacttgaatt

SEQ ID NO: 14142 - DNA, 23 bp, Artificial Sequence
  Description of Artificial Sequence: Synthetic oligonucleotide
  X-linked inhibitor of apoptosis (XIAP) siRNA
tatatagtcattaacttgaattt

SEQ ID NO: 14143 - DNA, 23 bp, Artificial Sequence
  Description of Artificial Sequence: Synthetic oligonucleotide
  X-linked inhibitor of apoptosis (XIAP) siRNA
atatagtcattaacttgaatttg

SEQ ID NO: 14144 - DNA, 23 bp, Artificial Sequence
  Description of Artificial Sequence: Synthetic oligonucleotide
  X-linked inhibitor of apoptosis (XIAP) siRNA
tatagtcattaacttgaatttgg

SEQ ID NO: 14145 - DNA, 23 bp, Artificial Sequence
  Description of Artificial Sequence: Synthetic oligonucleotide
  X-linked inhibitor of apoptosis (XIAP) siRNA
atagtcattaacttgaatttggt

SEQ ID NO: 14146 - DNA, 23 bp, Artificial Sequence
  Description of Artificial Sequence: Synthetic oligonucleotide
  X-linked inhibitor of apoptosis (XIAP) siRNA
tagtcattaacttgaatttggtc

SEQ ID NO: 14147 - DNA, 23 bp, Artificial Sequence
  Description of Artificial Sequence: Synthetic oligonucleotide
  X-linked inhibitor of apoptosis (XIAP) siRNA
agtcattaacttgaatttggtct

SEQ ID NO: 14148 - DNA, 23 bp, Artificial Sequence
  Description of Artificial Sequence: Synthetic oligonucleotide
  X-linked inhibitor of apoptosis (XIAP) siRNA
gtcattaacttgaatttggtctg

SEQ ID NO: 14149 - DNA, 23 bp, Artificial Sequence
  Description of Artificial Sequence: Synthetic oligonucleotide
  X-linked inhibitor of apoptosis (XIAP) siRNA
tcattaacttgaatttggtctgt

SEQ ID NO: 14150 - DNA, 23 bp, Artificial Sequence
  Description of Artificial Sequence: Synthetic oligonucleotide
  X-linked inhibitor of apoptosis (XIAP) siRNA
cattaacttgaatttggtctgta

SEQ ID NO: 14151 - DNA, 23 bp, Artificial Sequence
  Description of Artificial Sequence: Synthetic oligonucleotide
  X-linked inhibitor of apoptosis (XIAP) siRNA
attaacttgaatttggtctgtat

SEQ ID NO: 14152 - DNA, 23 bp, Artificial Sequence
  Description of Artificial Sequence: Synthetic oligonucleotide
  X-linked inhibitor of apoptosis (XIAP) siRNA
ttaacttgaatttggtctgtata

SEQ ID NO: 14153 - DNA, 23 bp, Artificial Sequence
  Description of Artificial Sequence: Synthetic oligonucleotide
  X-linked inhibitor of apoptosis (XIAP) siRNA
taacttgaatttggtctgtatag

SEQ ID NO: 14154 - DNA, 23 bp, Artificial Sequence
  Description of Artificial Sequence: Synthetic oligonucleotide
  X-linked inhibitor of apoptosis (XIAP) siRNA
aacttgaatttggtctgtatagt

SEQ ID NO: 14155 - DNA, 23 bp, Artificial Sequence
  Description of Artificial Sequence: Synthetic oligonucleotide
  X-linked inhibitor of apoptosis (XIAP) siRNA
acttgaatttggtctgtatagtc

SEQ ID NO: 14156 - DNA, 23 bp, Artificial Sequence
  Description of Artificial Sequence: Synthetic oligonucleotide
  X-linked inhibitor of apoptosis (XIAP) siRNA
cttgaatttggtctgtatagtct

SEQ ID NO: 14157 - DNA, 23 bp, Artificial Sequence
  Description of Artificial Sequence: Synthetic oligonucleotide
  X-linked inhibitor of apoptosis (XIAP) siRNA
ttgaatttggtctgtatagtcta

SEQ ID NO: 14158 - DNA, 23 bp, Artificial Sequence
  Description of Artificial Sequence: Synthetic oligonucleotide
  X-linked inhibitor of apoptosis (XIAP) siRNA
tgaatttggtctgtatagtctag

SEQ ID NO: 14159 - DNA, 23 bp, Artificial Sequence
  Description of Artificial Sequence: Synthetic oligonucleotide
  X-linked inhibitor of apoptosis (XIAP) siRNA
gaatttggtctgtatagtctaga

SEQ ID NO: 14160 - DNA, 23 bp, Artificial Sequence
  Description of Artificial Sequence: Synthetic oligonucleotide
  X-linked inhibitor of apoptosis (XIAP) siRNA
aatttggtctgtatagtctagac

SEQ ID NO: 14161 - DNA, 23 bp, Artificial Sequence
  Description of Artificial Sequence: Synthetic oligonucleotide
  X-linked inhibitor of apoptosis (XIAP) siRNA
atttggtctgtatagtctagact

SEQ ID NO: 14162 - DNA, 23 bp, Artificial Sequence
  Description of Artificial Sequence: Synthetic oligonucleotide
  X-linked inhibitor of apoptosis (XIAP) siRNA
tttggtctgtatagtctagactt

SEQ ID NO: 14163 - DNA, 23 bp, Artificial Sequence
  Description of Artificial Sequence: Synthetic oligonucleotide
  X-linked inhibitor of apoptosis (XIAP) siRNA
ttggtctgtatagtctagacttt

SEQ ID NO: 14164 - DNA, 23 bp, Artificial Sequence
  Description of Artificial Sequence: Synthetic oligonucleotide
  X-linked inhibitor of apoptosis (XIAP) siRNA
tggtctgtatagtctagacttta

SEQ ID NO: 14165 - DNA, 23 bp, Artificial Sequence
  Description of Artificial Sequence: Synthetic oligonucleotide
  X-linked inhibitor of apoptosis (XIAP) siRNA
ggtctgtatagtctagactttaa

SEQ ID NO: 14166 - DNA, 23 bp, Artificial Sequence
  Description of Artificial Sequence: Synthetic oligonucleotide
  X-linked inhibitor of apoptosis (XIAP) siRNA
gtctgtatagtctagactttaaa

SEQ ID NO: 14167 - DNA, 23 bp, Artificial Sequence
  Description of Artificial Sequence: Synthetic oligonucleotide
  X-linked inhibitor of apoptosis (XIAP) siRNA
tctgtatagtctagactttaaat

SEQ ID NO: 14168 - DNA, 23 bp, Artificial Sequence
  Description of Artificial Sequence: Synthetic oligonucleotide
  X-linked inhibitor of apoptosis (XIAP) siRNA
ctgtatagtctagactttaaatt

SEQ ID NO: 14169 - DNA, 23 bp, Artificial Sequence
  Description of Artificial Sequence: Synthetic oligonucleotide
  X-linked inhibitor of apoptosis (XIAP) siRNA
tgtatagtctagactttaaattt

SEQ ID NO: 14170 - DNA, 23 bp, Artificial Sequence
  Description of Artificial Sequence: Synthetic oligonucleotide
  X-linked inhibitor of apoptosis (XIAP) siRNA
gtatagtctagactttaaattta

SEQ ID NO: 14171 - DNA, 23 bp, Artificial Sequence
  Description of Artificial Sequence: Synthetic oligonucleotide
  X-linked inhibitor of apoptosis (XIAP) siRNA
tatagtctagactttaaatttaa

SEQ ID NO: 14172 - DNA, 23 bp, Artificial Sequence
  Description of Artificial Sequence: Synthetic oligonucleotide
  X-linked inhibitor of apoptosis (XIAP) siRNA
atagtctagactttaaatttaaa

SEQ ID NO: 14173 - DNA, 23 bp, Artificial Sequence
  Description of Artificial Sequence: Synthetic oligonucleotide
  X-linked inhibitor of apoptosis (XIAP) siRNA
tagtctagactttaaatttaaag

SEQ ID NO: 14174 - DNA, 23 bp, Artificial Sequence
  Description of Artificial Sequence: Synthetic oligonucleotide
  X-linked inhibitor of apoptosis (XIAP) siRNA
agtctagactttaaatttaaagt

SEQ ID NO: 14175 - DNA, 23 bp, Artificial Sequence
  Description of Artificial Sequence: Synthetic oligonucleotide
  X-linked inhibitor of apoptosis (XIAP) siRNA
gtctagactttaaatttaaagtt

SEQ ID NO: 14176 - DNA, 23 bp, Artificial Sequence
  Description of Artificial Sequence: Synthetic oligonucleotide
  X-linked inhibitor of apoptosis (XIAP) siRNA
tctagactttaaatttaaagttt

SEQ ID NO: 14177 - DNA, 23 bp, Artificial Sequence
  Description of Artificial Sequence: Synthetic oligonucleotide
  X-linked inhibitor of apoptosis (XIAP) siRNA
ctagactttaaatttaaagtttt

SEQ ID NO: 14178 - DNA, 23 bp, Artificial Sequence
  Description of Artificial Sequence: Synthetic oligonucleotide
  X-linked inhibitor of apoptosis (XIAP) siRNA
tagactttaaatttaaagttttc

SEQ ID NO: 14179 - DNA, 23 bp, Artificial Sequence
  Description of Artificial Sequence: Synthetic oligonucleotide
  X-linked inhibitor of apoptosis (XIAP) siRNA
agactttaaatttaaagttttct

SEQ ID NO: 14180 - DNA, 23 bp, Artificial Sequence
  Description of Artificial Sequence: Synthetic oligonucleotide
  X-linked inhibitor of apoptosis (XIAP) siRNA
gactttaaatttaaagttttcta

SEQ ID NO: 14181 - DNA, 23 bp, Artificial Sequence
  Description of Artificial Sequence: Synthetic oligonucleotide
  X-linked inhibitor of apoptosis (XIAP) siRNA
actttaaatttaaagttttctac

SEQ ID NO: 14182 - DNA, 23 bp, Artificial Sequence
  Description of Artificial Sequence: Synthetic oligonucleotide
  X-linked inhibitor of apoptosis (XIAP) siRNA
ctttaaatttaaagttttctaca

SEQ ID NO: 14183 - DNA, 23 bp, Artificial Sequence
  Description of Artificial Sequence: Synthetic oligonucleotide
  X-linked inhibitor of apoptosis (XIAP) siRNA
tttaaatttaaagttttctacaa

SEQ ID NO: 14184 - DNA, 23 bp, Artificial Sequence
  Description of Artificial Sequence: Synthetic oligonucleotide
  X-linked inhibitor of apoptosis (XIAP) siRNA
ttaaatttaaagttttctacaag

SEQ ID NO: 14185 - DNA, 23 bp, Artificial Sequence
  Description of Artificial Sequence: Synthetic oligonucleotide
  X-linked inhibitor of apoptosis (XIAP) siRNA
taaatttaaagttttctacaagg

SEQ ID NO: 14186 - DNA, 23 bp, Artificial Sequence
  Description of Artificial Sequence: Synthetic oligonucleotide
  X-linked inhibitor of apoptosis (XIAP) siRNA
aaatttaaagttttctacaaggg

SEQ ID NO: 14187 - DNA, 23 bp, Artificial Sequence
  Description of Artificial Sequence: Synthetic oligonucleotide
  X-linked inhibitor of apoptosis (XIAP) siRNA
aatttaaagttttctacaagggg

SEQ ID NO: 14188 - DNA, 23 bp, Artificial Sequence
  Description of Artificial Sequence: Synthetic oligonucleotide
  X-linked inhibitor of apoptosis (XIAP) siRNA
atttaaagttttctacaagggga

SEQ ID NO: 14189 - DNA, 23 bp, Artificial Sequence
  Description of Artificial Sequence: Synthetic oligonucleotide
  X-linked inhibitor of apoptosis (XIAP) siRNA
tttaaagttttctacaaggggag

SEQ ID NO: 14190 - DNA, 23 bp, Artificial Sequence
  Description of Artificial Sequence: Synthetic oligonucleotide
  X-linked inhibitor of apoptosis (XIAP) siRNA
ttaaagttttctacaaggggaga

SEQ ID NO: 14191 - DNA, 23 bp, Artificial Sequence
  Description of Artificial Sequence: Synthetic oligonucleotide
  X-linked inhibitor of apoptosis (XIAP) siRNA
taaagttttctacaaggggagaa

SEQ ID NO: 14192 - DNA, 23 bp, Artificial Sequence
  Description of Artificial Sequence: Synthetic oligonucleotide
  X-linked inhibitor of apoptosis (XIAP) siRNA
aaagttttctacaaggggagaaa

SEQ ID NO: 14193 - DNA, 23 bp, Artificial Sequence
  Description of Artificial Sequence: Synthetic oligonucleotide
  X-linked inhibitor of apoptosis (XIAP) siRNA
aagttttctacaaggggagaaaa

SEQ ID NO: 14194 - DNA, 23 bp, Artificial Sequence
  Description of Artificial Sequence: Synthetic oligonucleotide
  X-linked inhibitor of apoptosis (XIAP) siRNA
agttttctacaaggggagaaaag

SEQ ID NO: 14195 - DNA, 23 bp, Artificial Sequence
  Description of Artificial Sequence: Synthetic oligonucleotide
  X-linked inhibitor of apoptosis (XIAP) siRNA
gttttctacaaggggagaaaagt

SEQ ID NO: 14196 - DNA, 23 bp, Artificial Sequence
  Description of Artificial Sequence: Synthetic oligonucleotide
  X-linked inhibitor of apoptosis (XIAP) siRNA
ttttctacaaggggagaaaagtg

SEQ ID NO: 14197 - DNA, 23 bp, Artificial Sequence
  Description of Artificial Sequence: Synthetic oligonucleotide
  X-linked inhibitor of apoptosis (XIAP) siRNA
tttctacaaggggagaaaagtgt

SEQ ID NO: 14198 - DNA, 23 bp, Artificial Sequence
  Description of Artificial Sequence: Synthetic oligonucleotide
  X-linked inhibitor of apoptosis (XIAP) siRNA
ttctacaaggggagaaaagtgtt

SEQ ID NO: 14199 - DNA, 23 bp, Artificial Sequence
  Description of Artificial Sequence: Synthetic oligonucleotide
  X-linked inhibitor of apoptosis (XIAP) siRNA
tctacaaggggagaaaagtgtta

SEQ ID NO: 14200 - DNA, 23 bp, Artificial Sequence
  Description of Artificial Sequence: Synthetic oligonucleotide
  X-linked inhibitor of apoptosis (XIAP) siRNA
ctacaaggggagaaaagtgttaa

SEQ ID NO: 14201 - DNA, 23 bp, Artificial Sequence
  Description of Artificial Sequence: Synthetic oligonucleotide
  X-linked inhibitor of apoptosis (XIAP) siRNA
tacaaggggagaaaagtgttaaa

SEQ ID NO: 14202 - DNA, 23 bp, Artificial Sequence
  Description of Artificial Sequence: Synthetic oligonucleotide
  X-linked inhibitor of apoptosis (XIAP) siRNA
acaaggggagaaaagtgttaaaa

SEQ ID NO: 14203 - DNA, 23 bp, Artificial Sequence
  Description of Artificial Sequence: Synthetic oligonucleotide
  X-linked inhibitor of apoptosis (XIAP) siRNA
caaggggagaaaagtgttaaaat

SEQ ID NO: 14204 - DNA, 23 bp, Artificial Sequence
  Description of Artificial Sequence: Synthetic oligonucleotide
  X-linked inhibitor of apoptosis (XIAP) siRNA
aaggggagaaaagtgttaaaatt

SEQ ID NO: 14205 - DNA, 23 bp, Artificial Sequence
  Description of Artificial Sequence: Synthetic oligonucleotide
  X-linked inhibitor of apoptosis (XIAP) siRNA
aggggagaaaagtgttaaaattt

SEQ ID NO: 14206 - DNA, 23 bp, Artificial Sequence
  Description of Artificial Sequence: Synthetic oligonucleotide
  X-linked inhibitor of apoptosis (XIAP) siRNA
ggggagaaaagtgttaaaatttt

SEQ ID NO: 14207 - DNA, 23 bp, Artificial Sequence
  Description of Artificial Sequence: Synthetic oligonucleotide
  X-linked inhibitor of apoptosis (XIAP) siRNA
gggagaaaagtgttaaaattttt

SEQ ID NO: 14208 - DNA, 23 bp, Artificial Sequence
  Description of Artificial Sequence: Synthetic oligonucleotide
  X-linked inhibitor of apoptosis (XIAP) siRNA
ggagaaaagtgttaaaattttta

SEQ ID NO: 14209 - DNA, 23 bp, Artificial Sequence
  Description of Artificial Sequence: Synthetic oligonucleotide
  X-linked inhibitor of apoptosis (XIAP) siRNA
gagaaaagtgttaaaatttttaa

SEQ ID NO: 14210 - DNA, 23 bp, Artificial Sequence
  Description of Artificial Sequence: Synthetic oligonucleotide
  X-linked inhibitor of apoptosis (XIAP) siRNA
agaaaagtgttaaaatttttaaa

SEQ ID NO: 14211 - DNA, 23 bp, Artificial Sequence
  Description of Artificial Sequence: Synthetic oligonucleotide
  X-linked inhibitor of apoptosis (XIAP) siRNA
gaaaagtgttaaaatttttaaaa

SEQ ID NO: 14212 - DNA, 23 bp, Artificial Sequence
  Description of Artificial Sequence: Synthetic oligonucleotide
  X-linked inhibitor of apoptosis (XIAP) siRNA
aaaagtgttaaaatttttaaaat

SEQ ID NO: 14213 - DNA, 23 bp, Artificial Sequence
  Description of Artificial Sequence: Synthetic oligonucleotide
  X-linked inhibitor of apoptosis (XIAP) siRNA
aaagtgttaaaatttttaaaata

SEQ ID NO: 14214 - DNA, 23 bp, Artificial Sequence
  Description of Artificial Sequence: Synthetic oligonucleotide
  X-linked inhibitor of apoptosis (XIAP) siRNA
aagtgttaaaatttttaaaatat

SEQ ID NO: 14215 - DNA, 23 bp, Artificial Sequence
  Description of Artificial Sequence: Synthetic oligonucleotide
  X-linked inhibitor of apoptosis (XIAP) siRNA
agtgttaaaatttttaaaatatg

SEQ ID NO: 14216 - DNA, 23 bp, Artificial Sequence
  Description of Artificial Sequence: Synthetic oligonucleotide
  X-linked inhibitor of apoptosis (XIAP) siRNA
gtgttaaaatttttaaaatatgt

SEQ ID NO: 14217 - DNA, 23 bp, Artificial Sequence
  Description of Artificial Sequence: Synthetic oligonucleotide
  X-linked inhibitor of apoptosis (XIAP) siRNA
tgttaaaatttttaaaatatgtt

SEQ ID NO: 14218 - DNA, 23 bp, Artificial Sequence
  Description of Artificial Sequence: Synthetic oligonucleotide
  X-linked inhibitor of apoptosis (XIAP) siRNA
gttaaaatttttaaaatatgttt

SEQ ID NO: 14219 - DNA, 23 bp, Artificial Sequence
  Description of Artificial Sequence: Synthetic oligonucleotide
  X-linked inhibitor of apoptosis (XIAP) siRNA
ttaaaatttttaaaatatgtttt

SEQ ID NO: 14220 - DNA, 23 bp, Artificial Sequence
  Description of Artificial Sequence: Synthetic oligonucleotide
  X-linked inhibitor of apoptosis (XIAP) siRNA
taaaatttttaaaatatgttttc

SEQ ID NO: 14221 - DNA, 23 bp, Artificial Sequence
  Description of Artificial Sequence: Synthetic oligonucleotide
  X-linked inhibitor of apoptosis (XIAP) siRNA
aaaatttttaaaatatgttttcc

SEQ ID NO: 14222 - DNA, 23 bp, Artificial Sequence
  Description of Artificial Sequence: Synthetic oligonucleotide
  X-linked inhibitor of apoptosis (XIAP) siRNA
aaatttttaaaatatgttttcca

SEQ ID NO: 14223 - DNA, 23 bp, Artificial Sequence
  Description of Artificial Sequence: Synthetic oligonucleotide
  X-linked inhibitor of apoptosis (XIAP) siRNA
aatttttaaaatatgttttccag

SEQ ID NO: 14224 - DNA, 23 bp, Artificial Sequence
  Description of Artificial Sequence: Synthetic oligonucleotide
  X-linked inhibitor of apoptosis (XIAP) siRNA
atttttaaaatatgttttccagg

SEQ ID NO: 14225 - DNA, 23 bp, Artificial Sequence
  Description of Artificial Sequence: Synthetic oligonucleotide
  X-linked inhibitor of apoptosis (XIAP) siRNA
tttttaaaatatgttttccagga

SEQ ID NO: 14226 - DNA, 23 bp, Artificial Sequence
  Description of Artificial Sequence: Synthetic oligonucleotide
  X-linked inhibitor of apoptosis (XIAP) siRNA
ttttaaaatatgttttccaggac

SEQ ID NO: 14227 - DNA, 23 bp, Artificial Sequence
  Description of Artificial Sequence: Synthetic oligonucleotide
  X-linked inhibitor of apoptosis (XIAP) siRNA
tttaaaatatgttttccaggaca

SEQ ID NO: 14228 - DNA, 23 bp, Artificial Sequence
  Description of Artificial Sequence: Synthetic oligonucleotide
  X-linked inhibitor of apoptosis (XIAP) siRNA
ttaaaatatgttttccaggacac

SEQ ID NO: 14229 - DNA, 23 bp, Artificial Sequence
  Description of Artificial Sequence: Synthetic oligonucleotide
  X-linked inhibitor of apoptosis (XIAP) siRNA
taaaatatgttttccaggacact

SEQ ID NO: 14230 - DNA, 23 bp, Artificial Sequence
  Description of Artificial Sequence: Synthetic oligonucleotide
  X-linked inhibitor of apoptosis (XIAP) siRNA
aaaatatgttttccaggacactt

SEQ ID NO: 14231 - DNA, 23 bp, Artificial Sequence
  Description of Artificial Sequence: Synthetic oligonucleotide
  X-linked inhibitor of apoptosis (XIAP) siRNA
aaatatgttttccaggacacttc

SEQ ID NO: 14232 - DNA, 23 bp, Artificial Sequence
  Description of Artificial Sequence: Synthetic oligonucleotide
  X-linked inhibitor of apoptosis (XIAP) siRNA
aatatgttttccaggacacttca

SEQ ID NO: 14233 - DNA, 23 bp, Artificial Sequence
  Description of Artificial Sequence: Synthetic oligonucleotide
  X-linked inhibitor of apoptosis (XIAP) siRNA
atatgttttccaggacacttcac

SEQ ID NO: 14234 - DNA, 23 bp, Artificial Sequence
  Description of Artificial Sequence: Synthetic oligonucleotide
  X-linked inhibitor of apoptosis (XIAP) siRNA
tatgttttccaggacacttcact

SEQ ID NO: 14235 - DNA, 23 bp, Artificial Sequence
  Description of Artificial Sequence: Synthetic oligonucleotide
  X-linked inhibitor of apoptosis (XIAP) siRNA
atgttttccaggacacttcactt

SEQ ID NO: 14236 - DNA, 23 bp, Artificial Sequence
  Description of Artificial Sequence: Synthetic oligonucleotide
  X-linked inhibitor of apoptosis (XIAP) siRNA
tgttttccaggacacttcacttc

SEQ ID NO: 14237 - DNA, 23 bp, Artificial Sequence
  Description of Artificial Sequence: Synthetic oligonucleotide
  X-linked inhibitor of apoptosis (XIAP) siRNA
gttttccaggacacttcacttcc

SEQ ID NO: 14238 - DNA, 23 bp, Artificial Sequence
  Description of Artificial Sequence: Synthetic oligonucleotide
  X-linked inhibitor of apoptosis (XIAP) siRNA
ttttccaggacacttcacttcca

SEQ ID NO: 14239 - DNA, 23 bp, Artificial Sequence
  Description of Artificial Sequence: Synthetic oligonucleotide
  X-linked inhibitor of apoptosis (XIAP) siRNA
tttccaggacacttcacttccaa

SEQ ID NO: 14240 - DNA, 23 bp, Artificial Sequence
  Description of Artificial Sequence: Synthetic oligonucleotide
  X-linked inhibitor of apoptosis (XIAP) siRNA
ttccaggacacttcacttccaag

SEQ ID NO: 14241 - DNA, 23 bp, Artificial Sequence
  Description of Artificial Sequence: Synthetic oligonucleotide
  X-linked inhibitor of apoptosis (XIAP) siRNA
tccaggacacttcacttccaagt

SEQ ID NO: 14242 - DNA, 23 bp, Artificial Sequence
  Description of Artificial Sequence: Synthetic oligonucleotide
  X-linked inhibitor of apoptosis (XIAP) siRNA
ccaggacacttcacttccaagtc

SEQ ID NO: 14243 - DNA, 23 bp, Artificial Sequence
  Description of Artificial Sequence: Synthetic oligonucleotide
  X-linked inhibitor of apoptosis (XIAP) siRNA
caggacacttcacttccaagtca

SEQ ID NO: 14244 - DNA, 23 bp, Artificial Sequence
  Description of Artificial Sequence: Synthetic oligonucleotide
  X-linked inhibitor of apoptosis (XIAP) siRNA
aggacacttcacttccaagtcag

SEQ ID NO: 14245 - DNA, 23 bp, Artificial Sequence
  Description of Artificial Sequence: Synthetic oligonucleotide
  X-linked inhibitor of apoptosis (XIAP) siRNA
ggacacttcacttccaagtcagg

SEQ ID NO: 14246 - DNA, 23 bp, Artificial Sequence
  Description of Artificial Sequence: Synthetic oligonucleotide
  X-linked inhibitor of apoptosis (XIAP) siRNA
gacacttcacttccaagtcaggt

SEQ ID NO: 14247 - DNA, 23 bp, Artificial Sequence
  Description of Artificial Sequence: Synthetic oligonucleotide
  X-linked inhibitor of apoptosis (XIAP) siRNA
acacttcacttccaagtcaggta

SEQ ID NO: 14248 - DNA, 23 bp, Artificial Sequence
  Description of Artificial Sequence: Synthetic oligonucleotide
  X-linked inhibitor of apoptosis (XIAP) siRNA
cacttcacttccaagtcaggtag

SEQ ID NO: 14249 - DNA, 23 bp, Artificial Sequence
  Description of Artificial Sequence: Synthetic oligonucleotide
  X-linked inhibitor of apoptosis (XIAP) siRNA
acttcacttccaagtcaggtagg

SEQ ID NO: 14250 - DNA, 23 bp, Artificial Sequence
  Description of Artificial Sequence: Synthetic oligonucleotide
  X-linked inhibitor of apoptosis (XIAP) siRNA
cttcacttccaagtcaggtaggt

SEQ ID NO: 14251 - DNA, 23 bp, Artificial Sequence
  Description of Artificial Sequence: Synthetic oligonucleotide
  X-linked inhibitor of apoptosis (XIAP) siRNA
ttcacttccaagtcaggtaggta

SEQ ID NO: 14252 - DNA, 23 bp, Artificial Sequence
  Description of Artificial Sequence: Synthetic oligonucleotide
  X-linked inhibitor of apoptosis (XIAP) siRNA
tcacttccaagtcaggtaggtag

SEQ ID NO: 14253 - DNA, 23 bp, Artificial Sequence
  Description of Artificial Sequence: Synthetic oligonucleotide
  X-linked inhibitor of apoptosis (XIAP) siRNA
cacttccaagtcaggtaggtagt

SEQ ID NO: 14254 - DNA, 23 bp, Artificial Sequence
  Description of Artificial Sequence: Synthetic oligonucleotide
  X-linked inhibitor of apoptosis (XIAP) siRNA
acttccaagtcaggtaggtagtt

SEQ ID NO: 14255 - DNA, 23 bp, Artificial Sequence
  Description of Artificial Sequence: Synthetic oligonucleotide
  X-linked inhibitor of apoptosis (XIAP) siRNA
cttccaagtcaggtaggtagttc

SEQ ID NO: 14256 - DNA, 23 bp, Artificial Sequence
  Description of Artificial Sequence: Synthetic oligonucleotide
  X-linked inhibitor of apoptosis (XIAP) siRNA
ttccaagtcaggtaggtagttca

SEQ ID NO: 14257 - DNA, 23 bp, Artificial Sequence
  Description of Artificial Sequence: Synthetic oligonucleotide
  X-linked inhibitor of apoptosis (XIAP) siRNA
tccaagtcaggtaggtagttcaa

SEQ ID NO: 14258 - DNA, 23 bp, Artificial Sequence
  Description of Artificial Sequence: Synthetic oligonucleotide
  X-linked inhibitor of apoptosis (XIAP) siRNA
ccaagtcaggtaggtagttcaat

SEQ ID NO: 14259 - DNA, 23 bp, Artificial Sequence
  Description of Artificial Sequence: Synthetic oligonucleotide
  X-linked inhibitor of apoptosis (XIAP) siRNA
caagtcaggtaggtagttcaatc

SEQ ID NO: 14260 - DNA, 23 bp, Artificial Sequence
  Description of Artificial Sequence: Synthetic oligonucleotide
  X-linked inhibitor of apoptosis (XIAP) siRNA
aagtcaggtaggtagttcaatct

SEQ ID NO: 14261 - DNA, 23 bp, Artificial Sequence
  Description of Artificial Sequence: Synthetic oligonucleotide
  X-linked inhibitor of apoptosis (XIAP) siRNA
agtcaggtaggtagttcaatcta

SEQ ID NO: 14262 - DNA, 23 bp, Artificial Sequence
  Description of Artificial Sequence: Synthetic oligonucleotide
  X-linked inhibitor of apoptosis (XIAP) siRNA
gtcaggtaggtagttcaatctag

SEQ ID NO: 14263 - DNA, 23 bp, Artificial Sequence
  Description of Artificial Sequence: Synthetic oligonucleotide
  X-linked inhibitor of apoptosis (XIAP) siRNA
tcaggtaggtagttcaatctagt

SEQ ID NO: 14264 - DNA, 23 bp, Artificial Sequence
  Description of Artificial Sequence: Synthetic oligonucleotide
  X-linked inhibitor of apoptosis (XIAP) siRNA
caggtaggtagttcaatctagtt

SEQ ID NO: 14265 - DNA, 23 bp, Artificial Sequence
  Description of Artificial Sequence: Synthetic oligonucleotide
  X-linked inhibitor of apoptosis (XIAP) siRNA
aggtaggtagttcaatctagttg

SEQ ID NO: 14266 - DNA, 23 bp, Artificial Sequence
  Description of Artificial Sequence: Synthetic oligonucleotide
  X-linked inhibitor of apoptosis (XIAP) siRNA
ggtaggtagttcaatctagttgt

SEQ ID NO: 14267 - DNA, 23 bp, Artificial Sequence
  Description of Artificial Sequence: Synthetic oligonucleotide
  X-linked inhibitor of apoptosis (XIAP) siRNA
gtaggtagttcaatctagttgtt

SEQ ID NO: 14268 - DNA, 23 bp, Artificial Sequence
  Description of Artificial Sequence: Synthetic oligonucleotide
  X-linked inhibitor of apoptosis (XIAP) siRNA
taggtagttcaatctagttgtta

SEQ ID NO: 14269 - DNA, 23 bp, Artificial Sequence
  Description of Artificial Sequence: Synthetic oligonucleotide
  X-linked inhibitor of apoptosis (XIAP) siRNA
aggtagttcaatctagttgttag

SEQ ID NO: 14270 - DNA, 23 bp, Artificial Sequence
  Description of Artificial Sequence: Synthetic oligonucleotide
  X-linked inhibitor of apoptosis (XIAP) siRNA
ggtagttcaatctagttgttagc

SEQ ID NO: 14271 - DNA, 23 bp, Artificial Sequence
  Description of Artificial Sequence: Synthetic oligonucleotide
  X-linked inhibitor of apoptosis (XIAP) siRNA
gtagttcaatctagttgttagcc

SEQ ID NO: 14272 - DNA, 23 bp, Artificial Sequence
  Description of Artificial Sequence: Synthetic oligonucleotide
  X-linked inhibitor of apoptosis (XIAP) siRNA
tagttcaatctagttgttagcca

SEQ ID NO: 14273 - DNA, 23 bp, Artificial Sequence
  Description of Artificial Sequence: Synthetic oligonucleotide
  X-linked inhibitor of apoptosis (XIAP) siRNA
agttcaatctagttgttagccaa

SEQ ID NO: 14274 - DNA, 23 bp, Artificial Sequence
  Description of Artificial Sequence: Synthetic oligonucleotide
  X-linked inhibitor of apoptosis (XIAP) siRNA
gttcaatctagttgttagccaag

SEQ ID NO: 14275 - DNA, 23 bp, Artificial Sequence
  Description of Artificial Sequence: Synthetic oligonucleotide
  X-linked inhibitor of apoptosis (XIAP) siRNA
ttcaatctagttgttagccaagg

SEQ ID NO: 14276 - DNA, 23 bp, Artificial Sequence
  Description of Artificial Sequence: Synthetic oligonucleotide
  X-linked inhibitor of apoptosis (XIAP) siRNA
tcaatctagttgttagccaagga

SEQ ID NO: 14277 - DNA, 23 bp, Artificial Sequence
  Description of Artificial Sequence: Synthetic oligonucleotide
  X-linked inhibitor of apoptosis (XIAP) siRNA
caatctagttgttagccaaggac

SEQ ID NO: 14278 - DNA, 23 bp, Artificial Sequence
  Description of Artificial Sequence: Synthetic oligonucleotide
  X-linked inhibitor of apoptosis (XIAP) siRNA
aatctagttgttagccaaggact

SEQ ID NO: 14279 - DNA, 23 bp, Artificial Sequence
  Description of Artificial Sequence: Synthetic oligonucleotide
  X-linked inhibitor of apoptosis (XIAP) siRNA
atctagttgttagccaaggactc

SEQ ID NO: 14280 - DNA, 23 bp, Artificial Sequence
  Description of Artificial Sequence: Synthetic oligonucleotide
  X-linked inhibitor of apoptosis (XIAP) siRNA
tctagttgttagccaaggactca

SEQ ID NO: 14281 - DNA, 23 bp, Artificial Sequence
  Description of Artificial Sequence: Synthetic oligonucleotide
  X-linked inhibitor of apoptosis (XIAP) siRNA
ctagttgttagccaaggactcaa

SEQ ID NO: 14282 - DNA, 23 bp, Artificial Sequence
  Description of Artificial Sequence: Synthetic oligonucleotide
  X-linked inhibitor of apoptosis (XIAP) siRNA
tagttgttagccaaggactcaag

SEQ ID NO: 14283 - DNA, 23 bp, Artificial Sequence
  Description of Artificial Sequence: Synthetic oligonucleotide
  X-linked inhibitor of apoptosis (XIAP) siRNA
agttgttagccaaggactcaagg

SEQ ID NO: 14284 - DNA, 23 bp, Artificial Sequence
  Description of Artificial Sequence: Synthetic oligonucleotide
  X-linked inhibitor of apoptosis (XIAP) siRNA
gttgttagccaaggactcaagga

SEQ ID NO: 14285 - DNA, 23 bp, Artificial Sequence
  Description of Artificial Sequence: Synthetic oligonucleotide
  X-linked inhibitor of apoptosis (XIAP) siRNA
ttgttagccaaggactcaaggac

SEQ ID NO: 14286 - DNA, 23 bp, Artificial Sequence
  Description of Artificial Sequence: Synthetic oligonucleotide
  X-linked inhibitor of apoptosis (XIAP) siRNA
tgttagccaaggactcaaggact

SEQ ID NO: 14287 - DNA, 23 bp, Artificial Sequence
  Description of Artificial Sequence: Synthetic oligonucleotide
  X-linked inhibitor of apoptosis (XIAP) siRNA
gttagccaaggactcaaggactg

SEQ ID NO: 14288 - DNA, 23 bp, Artificial Sequence
  Description of Artificial Sequence: Synthetic oligonucleotide
  X-linked inhibitor of apoptosis (XIAP) siRNA
ttagccaaggactcaaggactga

SEQ ID NO: 14289 - DNA, 23 bp, Artificial Sequence
  Description of Artificial Sequence: Synthetic oligonucleotide
  X-linked inhibitor of apoptosis (XIAP) siRNA
tagccaaggactcaaggactgaa

SEQ ID NO: 14290 - DNA, 23 bp, Artificial Sequence
  Description of Artificial Sequence: Synthetic oligonucleotide
  X-linked inhibitor of apoptosis (XIAP) siRNA
agccaaggactcaaggactgaat

SEQ ID NO: 14291 - DNA, 23 bp, Artificial Sequence
  Description of Artificial Sequence: Synthetic oligonucleotide
  X-linked inhibitor of apoptosis (XIAP) siRNA
gccaaggactcaaggactgaatt

SEQ ID NO: 14292 - DNA, 23 bp, Artificial Sequence
  Description of Artificial Sequence: Synthetic oligonucleotide
  X-linked inhibitor of apoptosis (XIAP) siRNA
ccaaggactcaaggactgaattg

SEQ ID NO: 14293 - DNA, 23 bp, Artificial Sequence
  Description of Artificial Sequence: Synthetic oligonucleotide
  X-linked inhibitor of apoptosis (XIAP) siRNA
caaggactcaaggactgaattgt

SEQ ID NO: 14294 - DNA, 23 bp, Artificial Sequence
  Description of Artificial Sequence: Synthetic oligonucleotide
  X-linked inhibitor of apoptosis (XIAP) siRNA
aaggactcaaggactgaattgtt

SEQ ID NO: 14295 - DNA, 23 bp, Artificial Sequence
  Description of Artificial Sequence: Synthetic oligonucleotide
  X-linked inhibitor of apoptosis (XIAP) siRNA
aggactcaaggactgaattgttt

SEQ ID NO: 14296 - DNA, 23 bp, Artificial Sequence
  Description of Artificial Sequence: Synthetic oligonucleotide
  X-linked inhibitor of apoptosis (XIAP) siRNA
ggactcaaggactgaattgtttt

SEQ ID NO: 14297 - DNA, 23 bp, Artificial Sequence
  Description of Artificial Sequence: Synthetic oligonucleotide
  X-linked inhibitor of apoptosis (XIAP) siRNA
gactcaaggactgaattgtttta

SEQ ID NO: 14298 - DNA, 23 bp, Artificial Sequence
  Description of Artificial Sequence: Synthetic oligonucleotide
  X-linked inhibitor of apoptosis (XIAP) siRNA
actcaaggactgaattgttttaa

SEQ ID NO: 14299 - DNA, 23 bp, Artificial Sequence
  Description of Artificial Sequence: Synthetic oligonucleotide
  X-linked inhibitor of apoptosis (XIAP) siRNA
ctcaaggactgaattgttttaac

SEQ ID NO: 14300 - DNA, 23 bp, Artificial Sequence
  Description of Artificial Sequence: Synthetic oligonucleotide
  X-linked inhibitor of apoptosis (XIAP) siRNA
tcaaggactgaattgttttaaca

SEQ ID NO: 14301 - DNA, 23 bp, Artificial Sequence
  Description of Artificial Sequence: Synthetic oligonucleotide
  X-linked inhibitor of apoptosis (XIAP) siRNA
caaggactgaattgttttaacat

SEQ ID NO: 14302 - DNA, 23 bp, Artificial Sequence
  Description of Artificial Sequence: Synthetic oligonucleotide
  X-linked inhibitor of apoptosis (XIAP) siRNA
aaggactgaattgttttaacata

SEQ ID NO: 14303 - DNA, 23 bp, Artificial Sequence
  Description of Artificial Sequence: Synthetic oligonucleotide
  X-linked inhibitor of apoptosis (XIAP) siRNA
aggactgaattgttttaacataa

SEQ ID NO: 14304 - DNA, 23 bp, Artificial Sequence
  Description of Artificial Sequence: Synthetic oligonucleotide
  X-linked inhibitor of apoptosis (XIAP) siRNA
ggactgaattgttttaacataag

SEQ ID NO: 14305 - DNA, 23 bp, Artificial Sequence
  Description of Artificial Sequence: Synthetic oligonucleotide
  X-linked inhibitor of apoptosis (XIAP) siRNA
gactgaattgttttaacataagg

SEQ ID NO: 14306 - DNA, 23 bp, Artificial Sequence
  Description of Artificial Sequence: Synthetic oligonucleotide
  X-linked inhibitor of apoptosis (XIAP) siRNA
actgaattgttttaacataaggc

SEQ ID NO: 14307 - DNA, 23 bp, Artificial Sequence
  Description of Artificial Sequence: Synthetic oligonucleotide
  X-linked inhibitor of apoptosis (XIAP) siRNA
ctgaattgttttaacataaggct

SEQ ID NO: 14308 - DNA, 23 bp, Artificial Sequence
  Description of Artificial Sequence: Synthetic oligonucleotide
  X-linked inhibitor of apoptosis (XIAP) siRNA
tgaattgttttaacataaggctt

SEQ ID NO: 14309 - DNA, 23 bp, Artificial Sequence
  Description of Artificial Sequence: Synthetic oligonucleotide
  X-linked inhibitor of apoptosis (XIAP) siRNA
gaattgttttaacataaggcttt

SEQ ID NO: 14310 - DNA, 23 bp, Artificial Sequence
  Description of Artificial Sequence: Synthetic oligonucleotide
  X-linked inhibitor of apoptosis (XIAP) siRNA
aattgttttaacataaggctttt

SEQ ID NO: 14311 - DNA, 23 bp, Artificial Sequence
  Description of Artificial Sequence: Synthetic oligonucleotide
  X-linked inhibitor of apoptosis (XIAP) siRNA
attgttttaacataaggcttttc

SEQ ID NO: 14312 - DNA, 23 bp, Artificial Sequence
  Description of Artificial Sequence: Synthetic oligonucleotide
  X-linked inhibitor of apoptosis (XIAP) siRNA
ttgttttaacataaggcttttcc

SEQ ID NO: 14313 - DNA, 23 bp, Artificial Sequence
  Description of Artificial Sequence: Synthetic oligonucleotide
  X-linked inhibitor of apoptosis (XIAP) siRNA
tgttttaacataaggcttttcct

SEQ ID NO: 14314 - DNA, 23 bp, Artificial Sequence
  Description of Artificial Sequence: Synthetic oligonucleotide
  X-linked inhibitor of apoptosis (XIAP) siRNA
gttttaacataaggcttttcctg

SEQ ID NO: 14315 - DNA, 23 bp, Artificial Sequence
  Description of Artificial Sequence: Synthetic oligonucleotide
  X-linked inhibitor of apoptosis (XIAP) siRNA
ttttaacataaggcttttcctgt

SEQ ID NO: 14316 - DNA, 23 bp, Artificial Sequence
  Description of Artificial Sequence: Synthetic oligonucleotide
  X-linked inhibitor of apoptosis (XIAP) siRNA
tttaacataaggcttttcctgtt

SEQ ID NO: 14317 - DNA, 23 bp, Artificial Sequence
  Description of Artificial Sequence: Synthetic oligonucleotide
  X-linked inhibitor of apoptosis (XIAP) siRNA
ttaacataaggcttttcctgttc

SEQ ID NO: 14318 - DNA, 23 bp, Artificial Sequence
  Description of Artificial Sequence: Synthetic oligonucleotide
  X-linked inhibitor of apoptosis (XIAP) siRNA
taacataaggcttttcctgttct

SEQ ID NO: 14319 - DNA, 23 bp, Artificial Sequence
  Description of Artificial Sequence: Synthetic oligonucleotide
  X-linked inhibitor of apoptosis (XIAP) siRNA
aacataaggcttttcctgttctg

SEQ ID NO: 14320 - DNA, 23 bp, Artificial Sequence
  Description of Artificial Sequence: Synthetic oligonucleotide
  X-linked inhibitor of apoptosis (XIAP) siRNA
acataaggcttttcctgttctgg

SEQ ID NO: 14321 - DNA, 23 bp, Artificial Sequence
  Description of Artificial Sequence: Synthetic oligonucleotide
  X-linked inhibitor of apoptosis (XIAP) siRNA
cataaggcttttcctgttctggg

SEQ ID NO: 14322 - DNA, 23 bp, Artificial Sequence
  Description of Artificial Sequence: Synthetic oligonucleotide
  X-linked inhibitor of apoptosis (XIAP) siRNA
ataaggcttttcctgttctggga

SEQ ID NO: 14323 - DNA, 23 bp, Artificial Sequence
  Description of Artificial Sequence: Synthetic oligonucleotide
  X-linked inhibitor of apoptosis (XIAP) siRNA
taaggcttttcctgttctgggag

SEQ ID NO: 14324 - DNA, 23 bp, Artificial Sequence
  Description of Artificial Sequence: Synthetic oligonucleotide
  X-linked inhibitor of apoptosis (XIAP) siRNA
aaggcttttcctgttctgggagc

SEQ ID NO: 14325 - DNA, 23 bp, Artificial Sequence
  Description of Artificial Sequence: Synthetic oligonucleotide
  X-linked inhibitor of apoptosis (XIAP) siRNA
aggcttttcctgttctgggagcc

SEQ ID NO: 14326 - DNA, 23 bp, Artificial Sequence
  Description of Artificial Sequence: Synthetic oligonucleotide
  X-linked inhibitor of apoptosis (XIAP) siRNA
ggcttttcctgttctgggagccg

SEQ ID NO: 14327 - DNA, 23 bp, Artificial Sequence
  Description of Artificial Sequence: Synthetic oligonucleotide
  X-linked inhibitor of apoptosis (XIAP) siRNA
gcttttcctgttctgggagccgc

SEQ ID NO: 14328 - DNA, 23 bp, Artificial Sequence
  Description of Artificial Sequence: Synthetic oligonucleotide
  X-linked inhibitor of apoptosis (XIAP) siRNA
cttttcctgttctgggagccgca

SEQ ID NO: 14329 - DNA, 23 bp, Artificial Sequence
  Description of Artificial Sequence: Synthetic oligonucleotide
  X-linked inhibitor of apoptosis (XIAP) siRNA
ttttcctgttctgggagccgcac

SEQ ID NO: 14330 - DNA, 23 bp, Artificial Sequence
  Description of Artificial Sequence: Synthetic oligonucleotide
  X-linked inhibitor of apoptosis (XIAP) siRNA
tttcctgttctgggagccgcact

SEQ ID NO: 14331 - DNA, 23 bp, Artificial Sequence
  Description of Artificial Sequence: Synthetic oligonucleotide
  X-linked inhibitor of apoptosis (XIAP) siRNA
ttcctgttctgggagccgcactt

SEQ ID NO: 14332 - DNA, 23 bp, Artificial Sequence
  Description of Artificial Sequence: Synthetic oligonucleotide
  X-linked inhibitor of apoptosis (XIAP) siRNA
tcctgttctgggagccgcacttc

SEQ ID NO: 14333 - DNA, 23 bp, Artificial Sequence
  Description of Artificial Sequence: Synthetic oligonucleotide
  X-linked inhibitor of apoptosis (XIAP) siRNA
cctgttctgggagccgcacttca

SEQ ID NO: 14334 - DNA, 23 bp, Artificial Sequence
  Description of Artificial Sequence: Synthetic oligonucleotide
  X-linked inhibitor of apoptosis (XIAP) siRNA
ctgttctgggagccgcacttcat

SEQ ID NO: 14335 - DNA, 23 bp, Artificial Sequence
  Description of Artificial Sequence: Synthetic oligonucleotide
  X-linked inhibitor of apoptosis (XIAP) siRNA
tgttctgggagccgcacttcatt

SEQ ID NO: 14336 - DNA, 23 bp, Artificial Sequence
  Description of Artificial Sequence: Synthetic oligonucleotide
  X-linked inhibitor of apoptosis (XIAP) siRNA
gttctgggagccgcacttcatta

SEQ ID NO: 14337 - DNA, 23 bp, Artificial Sequence
  Description of Artificial Sequence: Synthetic oligonucleotide
  X-linked inhibitor of apoptosis (XIAP) siRNA
ttctgggagccgcacttcattaa

SEQ ID NO: 14338 - DNA, 23 bp, Artificial Sequence
  Description of Artificial Sequence: Synthetic oligonucleotide
  X-linked inhibitor of apoptosis (XIAP) siRNA
tctgggagccgcacttcattaaa

SEQ ID NO: 14339 - DNA, 23 bp, Artificial Sequence
  Description of Artificial Sequence: Synthetic oligonucleotide
  X-linked inhibitor of apoptosis (XIAP) siRNA
ctgggagccgcacttcattaaaa

SEQ ID NO: 14340 - DNA, 23 bp, Artificial Sequence
  Description of Artificial Sequence: Synthetic oligonucleotide
  X-linked inhibitor of apoptosis (XIAP) siRNA
tgggagccgcacttcattaaaat

SEQ ID NO: 14341 - DNA, 23 bp, Artificial Sequence
  Description of Artificial Sequence: Synthetic oligonucleotide
  X-linked inhibitor of apoptosis (XIAP) siRNA
gggagccgcacttcattaaaatt

SEQ ID NO: 14342 - DNA, 23 bp, Artificial Sequence
  Description of Artificial Sequence: Synthetic oligonucleotide
  X-linked inhibitor of apoptosis (XIAP) siRNA
ggagccgcacttcattaaaattc

SEQ ID NO: 14343 - DNA, 23 bp, Artificial Sequence
  Description of Artificial Sequence: Synthetic oligonucleotide
  X-linked inhibitor of apoptosis (XIAP) siRNA
gagccgcacttcattaaaattct

SEQ ID NO: 14344 - DNA, 23 bp, Artificial Sequence
  Description of Artificial Sequence: Synthetic oligonucleotide
  X-linked inhibitor of apoptosis (XIAP) siRNA
agccgcacttcattaaaattctt

SEQ ID NO: 14345 - DNA, 23 bp, Artificial Sequence
  Description of Artificial Sequence: Synthetic oligonucleotide
  X-linked inhibitor of apoptosis (XIAP) siRNA
gccgcacttcattaaaattcttc

SEQ ID NO: 14346 - DNA, 23 bp, Artificial Sequence
  Description of Artificial Sequence: Synthetic oligonucleotide
  X-linked inhibitor of apoptosis (XIAP) siRNA
ccgcacttcattaaaattcttct

SEQ ID NO: 14347 - DNA, 23 bp, Artificial Sequence
  Description of Artificial Sequence: Synthetic oligonucleotide
  X-linked inhibitor of apoptosis (XIAP) siRNA
cgcacttcattaaaattcttcta

SEQ ID NO: 14348 - DNA, 23 bp, Artificial Sequence
  Description of Artificial Sequence: Synthetic oligonucleotide
  X-linked inhibitor of apoptosis (XIAP) siRNA
gcacttcattaaaattcttctaa

SEQ ID NO: 14349 - DNA, 23 bp, Artificial Sequence
  Description of Artificial Sequence: Synthetic oligonucleotide
  X-linked inhibitor of apoptosis (XIAP) siRNA
cacttcattaaaattcttctaaa

SEQ ID NO: 14350 - DNA, 23 bp, Artificial Sequence
  Description of Artificial Sequence: Synthetic oligonucleotide
  X-linked inhibitor of apoptosis (XIAP) siRNA
acttcattaaaattcttctaaaa

SEQ ID NO: 14351 - DNA, 23 bp, Artificial Sequence
  Description of Artificial Sequence: Synthetic oligonucleotide
  X-linked inhibitor of apoptosis (XIAP) siRNA
cttcattaaaattcttctaaaac

SEQ ID NO: 14352 - DNA, 23 bp, Artificial Sequence
  Description of Artificial Sequence: Synthetic oligonucleotide
  X-linked inhibitor of apoptosis (XIAP) siRNA
ttcattaaaattcttctaaaact

SEQ ID NO: 14353 - DNA, 23 bp, Artificial Sequence
  Description of Artificial Sequence: Synthetic oligonucleotide
  X-linked inhibitor of apoptosis (XIAP) siRNA
tcattaaaattcttctaaaactt

SEQ ID NO: 14354 - DNA, 23 bp, Artificial Sequence
  Description of Artificial Sequence: Synthetic oligonucleotide
  X-linked inhibitor of apoptosis (XIAP) siRNA
cattaaaattcttctaaaacttg

SEQ ID NO: 14355 - DNA, 23 bp, Artificial Sequence
  Description of Artificial Sequence: Synthetic oligonucleotide
  X-linked inhibitor of apoptosis (XIAP) siRNA
attaaaattcttctaaaacttgt

SEQ ID NO: 14356 - DNA, 23 bp, Artificial Sequence
  Description of Artificial Sequence: Synthetic oligonucleotide
  X-linked inhibitor of apoptosis (XIAP) siRNA
ttaaaattcttctaaaacttgta

SEQ ID NO: 14357 - DNA, 23 bp, Artificial Sequence
  Description of Artificial Sequence: Synthetic oligonucleotide
  X-linked inhibitor of apoptosis (XIAP) siRNA
taaaattcttctaaaacttgtat

SEQ ID NO: 14358 - DNA, 23 bp, Artificial Sequence
  Description of Artificial Sequence: Synthetic oligonucleotide
  X-linked inhibitor of apoptosis (XIAP) siRNA
aaaattcttctaaaacttgtatg

SEQ ID NO: 14359 - DNA, 23 bp, Artificial Sequence
  Description of Artificial Sequence: Synthetic oligonucleotide
  X-linked inhibitor of apoptosis (XIAP) siRNA
aaattcttctaaaacttgtatgt

SEQ ID NO: 14360 - DNA, 23 bp, Artificial Sequence
  Description of Artificial Sequence: Synthetic oligonucleotide
  X-linked inhibitor of apoptosis (XIAP) siRNA
aattcttctaaaacttgtatgtt

SEQ ID NO: 14361 - DNA, 23 bp, Artificial Sequence
  Description of Artificial Sequence: Synthetic oligonucleotide
  X-linked inhibitor of apoptosis (XIAP) siRNA
attcttctaaaacttgtatgttt

SEQ ID NO: 14362 - DNA, 23 bp, Artificial Sequence
  Description of Artificial Sequence: Synthetic oligonucleotide
  X-linked inhibitor of apoptosis (XIAP) siRNA
ttcttctaaaacttgtatgttta

SEQ ID NO: 14363 - DNA, 23 bp, Artificial Sequence
  Description of Artificial Sequence: Synthetic oligonucleotide
  X-linked inhibitor of apoptosis (XIAP) siRNA
tcttctaaaacttgtatgtttag

SEQ ID NO: 14364 - DNA, 23 bp, Artificial Sequence
  Description of Artificial Sequence: Synthetic oligonucleotide
  X-linked inhibitor of apoptosis (XIAP) siRNA
cttctaaaacttgtatgtttaga

SEQ ID NO: 14365 - DNA, 23 bp, Artificial Sequence
  Description of Artificial Sequence: Synthetic oligonucleotide
  X-linked inhibitor of apoptosis (XIAP) siRNA
ttctaaaacttgtatgtttagag

SEQ ID NO: 14366 - DNA, 23 bp, Artificial Sequence
  Description of Artificial Sequence: Synthetic oligonucleotide
  X-linked inhibitor of apoptosis (XIAP) siRNA
tctaaaacttgtatgtttagagt

SEQ ID NO: 14367 - DNA, 23 bp, Artificial Sequence
  Description of Artificial Sequence: Synthetic oligonucleotide
  X-linked inhibitor of apoptosis (XIAP) siRNA
ctaaaacttgtatgtttagagtt

SEQ ID NO: 14368 - DNA, 23 bp, Artificial Sequence
  Description of Artificial Sequence: Synthetic oligonucleotide
  X-linked inhibitor of apoptosis (XIAP) siRNA
taaaacttgtatgtttagagtta

SEQ ID NO: 14369 - DNA, 23 bp, Artificial Sequence
  Description of Artificial Sequence: Synthetic oligonucleotide
  X-linked inhibitor of apoptosis (XIAP) siRNA
aaaacttgtatgtttagagttaa

SEQ ID NO: 14370 - DNA, 23 bp, Artificial Sequence
  Description of Artificial Sequence: Synthetic oligonucleotide
  X-linked inhibitor of apoptosis (XIAP) siRNA
aaacttgtatgtttagagttaag

SEQ ID NO: 14371 - DNA, 23 bp, Artificial Sequence
  Description of Artificial Sequence: Synthetic oligonucleotide
  X-linked inhibitor of apoptosis (XIAP) siRNA
aacttgtatgtttagagttaagc

SEQ ID NO: 14372 - DNA, 23 bp, Artificial Sequence
  Description of Artificial Sequence: Synthetic oligonucleotide
  X-linked inhibitor of apoptosis (XIAP) siRNA
acttgtatgtttagagttaagca

SEQ ID NO: 14373 - DNA, 23 bp, Artificial Sequence
  Description of Artificial Sequence: Synthetic oligonucleotide
  X-linked inhibitor of apoptosis (XIAP) siRNA
cttgtatgtttagagttaagcaa

SEQ ID NO: 14374 - DNA, 23 bp, Artificial Sequence
  Description of Artificial Sequence: Synthetic oligonucleotide
  X-linked inhibitor of apoptosis (XIAP) siRNA
ttgtatgtttagagttaagcaag

SEQ ID NO: 14375 - DNA, 23 bp, Artificial Sequence
  Description of Artificial Sequence: Synthetic oligonucleotide
  X-linked inhibitor of apoptosis (XIAP) siRNA
tgtatgtttagagttaagcaaga

SEQ ID NO: 14376 - DNA, 23 bp, Artificial Sequence
  Description of Artificial Sequence: Synthetic oligonucleotide
  X-linked inhibitor of apoptosis (XIAP) siRNA
gtatgtttagagttaagcaagac

SEQ ID NO: 14377 - DNA, 23 bp, Artificial Sequence
  Description of Artificial Sequence: Synthetic oligonucleotide
  X-linked inhibitor of apoptosis (XIAP) siRNA
tatgtttagagttaagcaagact

SEQ ID NO: 14378 - DNA, 23 bp, Artificial Sequence
  Description of Artificial Sequence: Synthetic oligonucleotide
  X-linked inhibitor of apoptosis (XIAP) siRNA
atgtttagagttaagcaagactt

SEQ ID NO: 14379 - DNA, 23 bp, Artificial Sequence
  Description of Artificial Sequence: Synthetic oligonucleotide
  X-linked inhibitor of apoptosis (XIAP) siRNA
tgtttagagttaagcaagacttt

SEQ ID NO: 14380 - DNA, 23 bp, Artificial Sequence
  Description of Artificial Sequence: Synthetic oligonucleotide
  X-linked inhibitor of apoptosis (XIAP) siRNA
gtttagagttaagcaagactttt

SEQ ID NO: 14381 - DNA, 23 bp, Artificial Sequence
  Description of Artificial Sequence: Synthetic oligonucleotide
  X-linked inhibitor of apoptosis (XIAP) siRNA
tttagagttaagcaagacttttt

SEQ ID NO: 14382 - DNA, 23 bp, Artificial Sequence
  Description of Artificial Sequence: Synthetic oligonucleotide
  X-linked inhibitor of apoptosis (XIAP) siRNA
ttagagttaagcaagactttttt

SEQ ID NO: 14383 - DNA, 23 bp, Artificial Sequence
  Description of Artificial Sequence: Synthetic oligonucleotide
  X-linked inhibitor of apoptosis (XIAP) siRNA
tagagttaagcaagacttttttt

SEQ ID NO: 14384 - DNA, 23 bp, Artificial Sequence
  Description of Artificial Sequence: Synthetic oligonucleotide
  X-linked inhibitor of apoptosis (XIAP) siRNA
agagttaagcaagactttttttc

SEQ ID NO: 14385 - DNA, 23 bp, Artificial Sequence
  Description of Artificial Sequence: Synthetic oligonucleotide
  X-linked inhibitor of apoptosis (XIAP) siRNA
gagttaagcaagactttttttct

SEQ ID NO: 14386 - DNA, 23 bp, Artificial Sequence
  Description of Artificial Sequence: Synthetic oligonucleotide
  X-linked inhibitor of apoptosis (XIAP) siRNA
agttaagcaagactttttttctt

SEQ ID NO: 14387 - DNA, 23 bp, Artificial Sequence
  Description of Artificial Sequence: Synthetic oligonucleotide
  X-linked inhibitor of apoptosis (XIAP) siRNA
gttaagcaagactttttttcttc

SEQ ID NO: 14388 - DNA, 23 bp, Artificial Sequence
  Description of Artificial Sequence: Synthetic oligonucleotide
  X-linked inhibitor of apoptosis (XIAP) siRNA
ttaagcaagactttttttcttcc

SEQ ID NO: 14389 - DNA, 23 bp, Artificial Sequence
  Description of Artificial Sequence: Synthetic oligonucleotide
  X-linked inhibitor of apoptosis (XIAP) siRNA
taagcaagactttttttcttcct

SEQ ID NO: 14390 - DNA, 23 bp, Artificial Sequence
  Description of Artificial Sequence: Synthetic oligonucleotide
  X-linked inhibitor of apoptosis (XIAP) siRNA
aagcaagactttttttcttcctc

SEQ ID NO: 14391 - DNA, 23 bp, Artificial Sequence
  Description of Artificial Sequence: Synthetic oligonucleotide
  X-linked inhibitor of apoptosis (XIAP) siRNA
agcaagactttttttcttcctct

SEQ ID NO: 14392 - DNA, 23 bp, Artificial Sequence
  Description of Artificial Sequence: Synthetic oligonucleotide
  X-linked inhibitor of apoptosis (XIAP) siRNA
gcaagactttttttcttcctctc

SEQ ID NO: 14393 - DNA, 23 bp, Artificial Sequence
  Description of Artificial Sequence: Synthetic oligonucleotide
  X-linked inhibitor of apoptosis (XIAP) siRNA
caagactttttttcttcctctcc

SEQ ID NO: 14394 - DNA, 23 bp, Artificial Sequence
  Description of Artificial Sequence: Synthetic oligonucleotide
  X-linked inhibitor of apoptosis (XIAP) siRNA
aagactttttttcttcctctcca

SEQ ID NO: 14395 - DNA, 23 bp, Artificial Sequence
  Description of Artificial Sequence: Synthetic oligonucleotide
  X-linked inhibitor of apoptosis (XIAP) siRNA
agactttttttcttcctctccat

SEQ ID NO: 14396 - DNA, 23 bp, Artificial Sequence
  Description of Artificial Sequence: Synthetic oligonucleotide
  X-linked inhibitor of apoptosis (XIAP) siRNA
gactttttttcttcctctccatg

SEQ ID NO: 14397 - DNA, 23 bp, Artificial Sequence
  Description of Artificial Sequence: Synthetic oligonucleotide
  X-linked inhibitor of apoptosis (XIAP) siRNA
actttttttcttcctctccatga

SEQ ID NO: 14398 - DNA, 23 bp, Artificial Sequence
  Description of Artificial Sequence: Synthetic oligonucleotide
  X-linked inhibitor of apoptosis (XIAP) siRNA
ctttttttcttcctctccatgag

SEQ ID NO: 14399 - DNA, 23 bp, Artificial Sequence
  Description of Artificial Sequence: Synthetic oligonucleotide
  X-linked inhibitor of apoptosis (XIAP) siRNA
tttttttcttcctctccatgagt

SEQ ID NO: 14400 - DNA, 23 bp, Artificial Sequence
  Description of Artificial Sequence: Synthetic oligonucleotide
  X-linked inhibitor of apoptosis (XIAP) siRNA
ttttttcttcctctccatgagtt

SEQ ID NO: 14401 - DNA, 23 bp, Artificial Sequence
  Description of Artificial Sequence: Synthetic oligonucleotide
  X-linked inhibitor of apoptosis (XIAP) siRNA
tttttcttcctctccatgagttg

SEQ ID NO: 14402 - DNA, 23 bp, Artificial Sequence
  Description of Artificial Sequence: Synthetic oligonucleotide
  X-linked inhibitor of apoptosis (XIAP) siRNA
ttttcttcctctccatgagttgt

SEQ ID NO: 14403 - DNA, 23 bp, Artificial Sequence
  Description of Artificial Sequence: Synthetic oligonucleotide
  X-linked inhibitor of apoptosis (XIAP) siRNA
tttcttcctctccatgagttgtg

SEQ ID NO: 14404 - DNA, 23 bp, Artificial Sequence
  Description of Artificial Sequence: Synthetic oligonucleotide
  X-linked inhibitor of apoptosis (XIAP) siRNA
ttcttcctctccatgagttgtga

SEQ ID NO: 14405 - DNA, 23 bp, Artificial Sequence
  Description of Artificial Sequence: Synthetic oligonucleotide
  X-linked inhibitor of apoptosis (XIAP) siRNA
tcttcctctccatgagttgtgaa

SEQ ID NO: 14406 - DNA, 23 bp, Artificial Sequence
  Description of Artificial Sequence: Synthetic oligonucleotide
  X-linked inhibitor of apoptosis (XIAP) siRNA
cttcctctccatgagttgtgaaa

SEQ ID NO: 14407 - DNA, 23 bp, Artificial Sequence
  Description of Artificial Sequence: Synthetic oligonucleotide
  X-linked inhibitor of apoptosis (XIAP) siRNA
ttcctctccatgagttgtgaaat

SEQ ID NO: 14408 - DNA, 23 bp, Artificial Sequence
  Description of Artificial Sequence: Synthetic oligonucleotide
  X-linked inhibitor of apoptosis (XIAP) siRNA
tcctctccatgagttgtgaaatt

SEQ ID NO: 14409 - DNA, 23 bp, Artificial Sequence
  Description of Artificial Sequence: Synthetic oligonucleotide
  X-linked inhibitor of apoptosis (XIAP) siRNA
cctctccatgagttgtgaaattt

SEQ ID NO: 14410 - DNA, 23 bp, Artificial Sequence
  Description of Artificial Sequence: Synthetic oligonucleotide
  X-linked inhibitor of apoptosis (XIAP) siRNA
ctctccatgagttgtgaaattta

SEQ ID NO: 14411 - DNA, 23 bp, Artificial Sequence
  Description of Artificial Sequence: Synthetic oligonucleotide
  X-linked inhibitor of apoptosis (XIAP) siRNA
tctccatgagttgtgaaatttaa

SEQ ID NO: 14412 - DNA, 23 bp, Artificial Sequence
  Description of Artificial Sequence: Synthetic oligonucleotide
  X-linked inhibitor of apoptosis (XIAP) siRNA
ctccatgagttgtgaaatttaat

SEQ ID NO: 14413 - DNA, 23 bp, Artificial Sequence
  Description of Artificial Sequence: Synthetic oligonucleotide
  X-linked inhibitor of apoptosis (XIAP) siRNA
tccatgagttgtgaaatttaatg

SEQ ID NO: 14414 - DNA, 23 bp, Artificial Sequence
  Description of Artificial Sequence: Synthetic oligonucleotide
  X-linked inhibitor of apoptosis (XIAP) siRNA
ccatgagttgtgaaatttaatgc

SEQ ID NO: 14415 - DNA, 23 bp, Artificial Sequence
  Description of Artificial Sequence: Synthetic oligonucleotide
  X-linked inhibitor of apoptosis (XIAP) siRNA
catgagttgtgaaatttaatgca

SEQ ID NO: 14416 - DNA, 23 bp, Artificial Sequence
  Description of Artificial Sequence: Synthetic oligonucleotide
  X-linked inhibitor of apoptosis (XIAP) siRNA
atgagttgtgaaatttaatgcac

SEQ ID NO: 14417 - DNA, 23 bp, Artificial Sequence
  Description of Artificial Sequence: Synthetic oligonucleotide
  X-linked inhibitor of apoptosis (XIAP) siRNA
tgagttgtgaaatttaatgcaca

SEQ ID NO: 14418 - DNA, 23 bp, Artificial Sequence
  Description of Artificial Sequence: Synthetic oligonucleotide
  X-linked inhibitor of apoptosis (XIAP) siRNA
gagttgtgaaatttaatgcacaa

SEQ ID NO: 14419 - DNA, 23 bp, Artificial Sequence
  Description of Artificial Sequence: Synthetic oligonucleotide
  X-linked inhibitor of apoptosis (XIAP) siRNA
agttgtgaaatttaatgcacaac

SEQ ID NO: 14420 - DNA, 23 bp, Artificial Sequence
  Description of Artificial Sequence: Synthetic oligonucleotide
  X-linked inhibitor of apoptosis (XIAP) siRNA
gttgtgaaatttaatgcacaacg

SEQ ID NO: 14421 - DNA, 23 bp, Artificial Sequence
  Description of Artificial Sequence: Synthetic oligonucleotide
  X-linked inhibitor of apoptosis (XIAP) siRNA
ttgtgaaatttaatgcacaacgc

SEQ ID NO: 14422 - DNA, 23 bp, Artificial Sequence
  Description of Artificial Sequence: Synthetic oligonucleotide
  X-linked inhibitor of apoptosis (XIAP) siRNA
tgtgaaatttaatgcacaacgct

SEQ ID NO: 14423 - DNA, 23 bp, Artificial Sequence
  Description of Artificial Sequence: Synthetic oligonucleotide
  X-linked inhibitor of apoptosis (XIAP) siRNA
gtgaaatttaatgcacaacgctg

SEQ ID NO: 14424 - DNA, 23 bp, Artificial Sequence
  Description of Artificial Sequence: Synthetic oligonucleotide
  X-linked inhibitor of apoptosis (XIAP) siRNA
tgaaatttaatgcacaacgctga

SEQ ID NO: 14425 - DNA, 23 bp, Artificial Sequence
  Description of Artificial Sequence: Synthetic oligonucleotide
  X-linked inhibitor of apoptosis (XIAP) siRNA
gaaatttaatgcacaacgctgat

SEQ ID NO: 14426 - DNA, 23 bp, Artificial Sequence
  Description of Artificial Sequence: Synthetic oligonucleotide
  X-linked inhibitor of apoptosis (XIAP) siRNA
aaatttaatgcacaacgctgatg

SEQ ID NO: 14427 - DNA, 23 bp, Artificial Sequence
  Description of Artificial Sequence: Synthetic oligonucleotide
  X-linked inhibitor of apoptosis (XIAP) siRNA
aatttaatgcacaacgctgatgt

SEQ ID NO: 14428 - DNA, 23 bp, Artificial Sequence
  Description of Artificial Sequence: Synthetic oligonucleotide
  X-linked inhibitor of apoptosis (XIAP) siRNA
atttaatgcacaacgctgatgtg

SEQ ID NO: 14429 - DNA, 23 bp, Artificial Sequence
  Description of Artificial Sequence: Synthetic oligonucleotide
  X-linked inhibitor of apoptosis (XIAP) siRNA
tttaatgcacaacgctgatgtgg

SEQ ID NO: 14430 - DNA, 23 bp, Artificial Sequence
  Description of Artificial Sequence: Synthetic oligonucleotide
  X-linked inhibitor of apoptosis (XIAP) siRNA
ttaatgcacaacgctgatgtggc

SEQ ID NO: 14431 - DNA, 23 bp, Artificial Sequence
  Description of Artificial Sequence: Synthetic oligonucleotide
  X-linked inhibitor of apoptosis (XIAP) siRNA
taatgcacaacgctgatgtggct

SEQ ID NO: 14432 - DNA, 23 bp, Artificial Sequence
  Description of Artificial Sequence: Synthetic oligonucleotide
  X-linked inhibitor of apoptosis (XIAP) siRNA
aatgcacaacgctgatgtggcta

SEQ ID NO: 14433 - DNA, 23 bp, Artificial Sequence
  Description of Artificial Sequence: Synthetic oligonucleotide
  X-linked inhibitor of apoptosis (XIAP) siRNA
atgcacaacgctgatgtggctaa

SEQ ID NO: 14434 - DNA, 23 bp, Artificial Sequence
  Description of Artificial Sequence: Synthetic oligonucleotide
  X-linked inhibitor of apoptosis (XIAP) siRNA
tgcacaacgctgatgtggctaac

SEQ ID NO: 14435 - DNA, 23 bp, Artificial Sequence
  Description of Artificial Sequence: Synthetic oligonucleotide
  X-linked inhibitor of apoptosis (XIAP) siRNA
gcacaacgctgatgtggctaaca

SEQ ID NO: 14436 - DNA, 23 bp, Artificial Sequence
  Description of Artificial Sequence: Synthetic oligonucleotide
  X-linked inhibitor of apoptosis (XIAP) siRNA
cacaacgctgatgtggctaacaa

SEQ ID NO: 14437 - DNA, 23 bp, Artificial Sequence
  Description of Artificial Sequence: Synthetic oligonucleotide
  X-linked inhibitor of apoptosis (XIAP) siRNA
acaacgctgatgtggctaacaag

SEQ ID NO: 14438 - DNA, 23 bp, Artificial Sequence
  Description of Artificial Sequence: Synthetic oligonucleotide
  X-linked inhibitor of apoptosis (XIAP) siRNA
caacgctgatgtggctaacaagt

SEQ ID NO: 14439 - DNA, 23 bp, Artificial Sequence
  Description of Artificial Sequence: Synthetic oligonucleotide
  X-linked inhibitor of apoptosis (XIAP) siRNA
aacgctgatgtggctaacaagtt

SEQ ID NO: 14440 - DNA, 23 bp, Artificial Sequence
  Description of Artificial Sequence: Synthetic oligonucleotide
  X-linked inhibitor of apoptosis (XIAP) siRNA
acgctgatgtggctaacaagttt

SEQ ID NO: 14441 - DNA, 23 bp, Artificial Sequence
  Description of Artificial Sequence: Synthetic oligonucleotide
  X-linked inhibitor of apoptosis (XIAP) siRNA
cgctgatgtggctaacaagttta

SEQ ID NO: 14442 - DNA, 23 bp, Artificial Sequence
  Description of Artificial Sequence: Synthetic oligonucleotide
  X-linked inhibitor of apoptosis (XIAP) siRNA
gctgatgtggctaacaagtttat

SEQ ID NO: 14443 - DNA, 23 bp, Artificial Sequence
  Description of Artificial Sequence: Synthetic oligonucleotide
  X-linked inhibitor of apoptosis (XIAP) siRNA
ctgatgtggctaacaagtttatt

SEQ ID NO: 14444 - DNA, 23 bp, Artificial Sequence
  Description of Artificial Sequence: Synthetic oligonucleotide
  X-linked inhibitor of apoptosis (XIAP) siRNA
tgatgtggctaacaagtttattt

SEQ ID NO: 14445 - DNA, 23 bp, Artificial Sequence
  Description of Artificial Sequence: Synthetic oligonucleotide
  X-linked inhibitor of apoptosis (XIAP) siRNA
gatgtggctaacaagtttatttt

SEQ ID NO: 14446 - DNA, 23 bp, Artificial Sequence
  Description of Artificial Sequence: Synthetic oligonucleotide
  X-linked inhibitor of apoptosis (XIAP) siRNA
atgtggctaacaagtttatttta

SEQ ID NO: 14447 - DNA, 23 bp, Artificial Sequence
  Description of Artificial Sequence: Synthetic oligonucleotide
  X-linked inhibitor of apoptosis (XIAP) siRNA
tgtggctaacaagtttattttaa

SEQ ID NO: 14448 - DNA, 23 bp, Artificial Sequence
  Description of Artificial Sequence: Synthetic oligonucleotide
  X-linked inhibitor of apoptosis (XIAP) siRNA
gtggctaacaagtttattttaag

SEQ ID NO: 14449 - DNA, 23 bp, Artificial Sequence
  Description of Artificial Sequence: Synthetic oligonucleotide
  X-linked inhibitor of apoptosis (XIAP) siRNA
tggctaacaagtttattttaaga

SEQ ID NO: 14450 - DNA, 23 bp, Artificial Sequence
  Description of Artificial Sequence: Synthetic oligonucleotide
  X-linked inhibitor of apoptosis (XIAP) siRNA
ggctaacaagtttattttaagaa

SEQ ID NO: 14451 - DNA, 23 bp, Artificial Sequence
  Description of Artificial Sequence: Synthetic oligonucleotide
  X-linked inhibitor of apoptosis (XIAP) siRNA
gctaacaagtttattttaagaat

SEQ ID NO: 14452 - DNA, 23 bp, Artificial Sequence
  Description of Artificial Sequence: Synthetic oligonucleotide
  X-linked inhibitor of apoptosis (XIAP) siRNA
ctaacaagtttattttaagaatt

SEQ ID NO: 14453 - DNA, 23 bp, Artificial Sequence
  Description of Artificial Sequence: Synthetic oligonucleotide
  X-linked inhibitor of apoptosis (XIAP) siRNA
taacaagtttattttaagaattg

SEQ ID NO: 14454 - DNA, 23 bp, Artificial Sequence
  Description of Artificial Sequence: Synthetic oligonucleotide
  X-linked inhibitor of apoptosis (XIAP) siRNA
aacaagtttattttaagaattgt

SEQ ID NO: 14455 - DNA, 23 bp, Artificial Sequence
  Description of Artificial Sequence: Synthetic oligonucleotide
  X-linked inhibitor of apoptosis (XIAP) siRNA
acaagtttattttaagaattgtt

SEQ ID NO: 14456 - DNA, 23 bp, Artificial Sequence
  Description of Artificial Sequence: Synthetic oligonucleotide
  X-linked inhibitor of apoptosis (XIAP) siRNA
caagtttattttaagaattgttt

SEQ ID NO: 14457 - DNA, 23 bp, Artificial Sequence
  Description of Artificial Sequence: Synthetic oligonucleotide
  X-linked inhibitor of apoptosis (XIAP) siRNA
aagtttattttaagaattgttta

SEQ ID NO: 14458 - DNA, 23 bp, Artificial Sequence
  Description of Artificial Sequence: Synthetic oligonucleotide
  X-linked inhibitor of apoptosis (XIAP) siRNA
agtttattttaagaattgtttag

SEQ ID NO: 14459 - DNA, 23 bp, Artificial Sequence
  Description of Artificial Sequence: Synthetic oligonucleotide
  X-linked inhibitor of apoptosis (XIAP) siRNA
gtttattttaagaattgtttaga

SEQ ID NO: 14460 - DNA, 23 bp, Artificial Sequence
  Description of Artificial Sequence: Synthetic oligonucleotide
  X-linked inhibitor of apoptosis (XIAP) siRNA
tttattttaagaattgtttagaa

SEQ ID NO: 14461 - DNA, 23 bp, Artificial Sequence
  Description of Artificial Sequence: Synthetic oligonucleotide
  X-linked inhibitor of apoptosis (XIAP) siRNA
ttattttaagaattgtttagaaa

SEQ ID NO: 14462 - DNA, 23 bp, Artificial Sequence
  Description of Artificial Sequence: Synthetic oligonucleotide
  X-linked inhibitor of apoptosis (XIAP) siRNA
tattttaagaattgtttagaaat

SEQ ID NO: 14463 - DNA, 23 bp, Artificial Sequence
  Description of Artificial Sequence: Synthetic oligonucleotide
  X-linked inhibitor of apoptosis (XIAP) siRNA
attttaagaattgtttagaaatg

SEQ ID NO: 14464 - DNA, 23 bp, Artificial Sequence
  Description of Artificial Sequence: Synthetic oligonucleotide
  X-linked inhibitor of apoptosis (XIAP) siRNA
ttttaagaattgtttagaaatgc

SEQ ID NO: 14465 - DNA, 23 bp, Artificial Sequence
  Description of Artificial Sequence: Synthetic oligonucleotide
  X-linked inhibitor of apoptosis (XIAP) siRNA
tttaagaattgtttagaaatgct

SEQ ID NO: 14466 - DNA, 23 bp, Artificial Sequence
  Description of Artificial Sequence: Synthetic oligonucleotide
  X-linked inhibitor of apoptosis (XIAP) siRNA
ttaagaattgtttagaaatgctg

SEQ ID NO: 14467 - DNA, 23 bp, Artificial Sequence
  Description of Artificial Sequence: Synthetic oligonucleotide
  X-linked inhibitor of apoptosis (XIAP) siRNA
taagaattgtttagaaatgctgt

SEQ ID NO: 14468 - DNA, 23 bp, Artificial Sequence
  Description of Artificial Sequence: Synthetic oligonucleotide
  X-linked inhibitor of apoptosis (XIAP) siRNA
aagaattgtttagaaatgctgtt

SEQ ID NO: 14469 - DNA, 23 bp, Artificial Sequence
  Description of Artificial Sequence: Synthetic oligonucleotide
  X-linked inhibitor of apoptosis (XIAP) siRNA
agaattgtttagaaatgctgttg

SEQ ID NO: 14470 - DNA, 23 bp, Artificial Sequence
  Description of Artificial Sequence: Synthetic oligonucleotide
  X-linked inhibitor of apoptosis (XIAP) siRNA
gaattgtttagaaatgctgttgc

SEQ ID NO: 14471 - DNA, 23 bp, Artificial Sequence
  Description of Artificial Sequence: Synthetic oligonucleotide
  X-linked inhibitor of apoptosis (XIAP) siRNA
aattgtttagaaatgctgttgct

SEQ ID NO: 14472 - DNA, 23 bp, Artificial Sequence
  Description of Artificial Sequence: Synthetic oligonucleotide
  X-linked inhibitor of apoptosis (XIAP) siRNA
attgtttagaaatgctgttgctt

SEQ ID NO: 14473 - DNA, 23 bp, Artificial Sequence
  Description of Artificial Sequence: Synthetic oligonucleotide
  X-linked inhibitor of apoptosis (XIAP) siRNA
ttgtttagaaatgctgttgcttc

SEQ ID NO: 14474 - DNA, 23 bp, Artificial Sequence
  Description of Artificial Sequence: Synthetic oligonucleotide
  X-linked inhibitor of apoptosis (XIAP) siRNA
tgtttagaaatgctgttgcttca

SEQ ID NO: 14475 - DNA, 23 bp, Artificial Sequence
  Description of Artificial Sequence: Synthetic oligonucleotide
  X-linked inhibitor of apoptosis (XIAP) siRNA
gtttagaaatgctgttgcttcag

SEQ ID NO: 14476 - DNA, 23 bp, Artificial Sequence
  Description of Artificial Sequence: Synthetic oligonucleotide
  X-linked inhibitor of apoptosis (XIAP) siRNA
tttagaaatgctgttgcttcagg

SEQ ID NO: 14477 - DNA, 23 bp, Artificial Sequence
  Description of Artificial Sequence: Synthetic oligonucleotide
  X-linked inhibitor of apoptosis (XIAP) siRNA
ttagaaatgctgttgcttcaggt

SEQ ID NO: 14478 - DNA, 23 bp, Artificial Sequence
  Description of Artificial Sequence: Synthetic oligonucleotide
  X-linked inhibitor of apoptosis (XIAP) siRNA
tagaaatgctgttgcttcaggtt

SEQ ID NO: 14479 - DNA, 23 bp, Artificial Sequence
  Description of Artificial Sequence: Synthetic oligonucleotide
  X-linked inhibitor of apoptosis (XIAP) siRNA
agaaatgctgttgcttcaggttc

SEQ ID NO: 14480 - DNA, 23 bp, Artificial Sequence
  Description of Artificial Sequence: Synthetic oligonucleotide
  X-linked inhibitor of apoptosis (XIAP) siRNA
gaaatgctgttgcttcaggttct

SEQ ID NO: 14481 - DNA, 23 bp, Artificial Sequence
  Description of Artificial Sequence: Synthetic oligonucleotide
  X-linked inhibitor of apoptosis (XIAP) siRNA
aaatgctgttgcttcaggttctt

SEQ ID NO: 14482 - DNA, 23 bp, Artificial Sequence
  Description of Artificial Sequence: Synthetic oligonucleotide
  X-linked inhibitor of apoptosis (XIAP) siRNA
aatgctgttgcttcaggttctta

SEQ ID NO: 14483 - DNA, 23 bp, Artificial Sequence
  Description of Artificial Sequence: Synthetic oligonucleotide
  X-linked inhibitor of apoptosis (XIAP) siRNA
atgctgttgcttcaggttcttaa

SEQ ID NO: 14484 - DNA, 23 bp, Artificial Sequence
  Description of Artificial Sequence: Synthetic oligonucleotide
  X-linked inhibitor of apoptosis (XIAP) siRNA
tgctgttgcttcaggttcttaaa

SEQ ID NO: 14485 - DNA, 23 bp, Artificial Sequence
  Description of Artificial Sequence: Synthetic oligonucleotide
  X-linked inhibitor of apoptosis (XIAP) siRNA
gctgttgcttcaggttcttaaaa

SEQ ID NO: 14486 - DNA, 23 bp, Artificial Sequence
  Description of Artificial Sequence: Synthetic oligonucleotide
  X-linked inhibitor of apoptosis (XIAP) siRNA
ctgttgcttcaggttcttaaaat

SEQ ID NO: 14487 - DNA, 23 bp, Artificial Sequence
  Description of Artificial Sequence: Synthetic oligonucleotide
  X-linked inhibitor of apoptosis (XIAP) siRNA
tgttgcttcaggttcttaaaatc

SEQ ID NO: 14488 - DNA, 23 bp, Artificial Sequence
  Description of Artificial Sequence: Synthetic oligonucleotide
  X-linked inhibitor of apoptosis (XIAP) siRNA
gttgcttcaggttcttaaaatca

SEQ ID NO: 14489 - DNA, 23 bp, Artificial Sequence
  Description of Artificial Sequence: Synthetic oligonucleotide
  X-linked inhibitor of apoptosis (XIAP) siRNA
ttgcttcaggttcttaaaatcac

SEQ ID NO: 14490 - DNA, 23 bp, Artificial Sequence
  Description of Artificial Sequence: Synthetic oligonucleotide
  X-linked inhibitor of apoptosis (XIAP) siRNA
tgcttcaggttcttaaaatcact

SEQ ID NO: 14491 - DNA, 23 bp, Artificial Sequence
  Description of Artificial Sequence: Synthetic oligonucleotide
  X-linked inhibitor of apoptosis (XIAP) siRNA
gcttcaggttcttaaaatcactc

SEQ ID NO: 14492 - DNA, 23 bp, Artificial Sequence
  Description of Artificial Sequence: Synthetic oligonucleotide
  X-linked inhibitor of apoptosis (XIAP) siRNA
cttcaggttcttaaaatcactca

SEQ ID NO: 14493 - DNA, 23 bp, Artificial Sequence
  Description of Artificial Sequence: Synthetic oligonucleotide
  X-linked inhibitor of apoptosis (XIAP) siRNA
ttcaggttcttaaaatcactcag

SEQ ID NO: 14494 - DNA, 23 bp, Artificial Sequence
  Description of Artificial Sequence: Synthetic oligonucleotide
  X-linked inhibitor of apoptosis (XIAP) siRNA
tcaggttcttaaaatcactcagc

SEQ ID NO: 14495 - DNA, 23 bp, Artificial Sequence
  Description of Artificial Sequence: Synthetic oligonucleotide
  X-linked inhibitor of apoptosis (XIAP) siRNA
caggttcttaaaatcactcagca

SEQ ID NO: 14496 - DNA, 23 bp, Artificial Sequence
  Description of Artificial Sequence: Synthetic oligonucleotide
  X-linked inhibitor of apoptosis (XIAP) siRNA
aggttcttaaaatcactcagcac

SEQ ID NO: 14497 - DNA, 23 bp, Artificial Sequence
  Description of Artificial Sequence: Synthetic oligonucleotide
  X-linked inhibitor of apoptosis (XIAP) siRNA
ggttcttaaaatcactcagcact

SEQ ID NO: 14498 - DNA, 23 bp, Artificial Sequence
  Description of Artificial Sequence: Synthetic oligonucleotide
  X-linked inhibitor of apoptosis (XIAP) siRNA
gttcttaaaatcactcagcactc

SEQ ID NO: 14499 - DNA, 23 bp, Artificial Sequence
  Description of Artificial Sequence: Synthetic oligonucleotide
  X-linked inhibitor of apoptosis (XIAP) siRNA
ttcttaaaatcactcagcactcc

SEQ ID NO: 14500 - DNA, 23 bp, Artificial Sequence
  Description of Artificial Sequence: Synthetic oligonucleotide
  X-linked inhibitor of apoptosis (XIAP) siRNA
tcttaaaatcactcagcactcca

SEQ ID NO: 14501 - DNA, 23 bp, Artificial Sequence
  Description of Artificial Sequence: Synthetic oligonucleotide
  X-linked inhibitor of apoptosis (XIAP) siRNA
cttaaaatcactcagcactccaa

SEQ ID NO: 14502 - DNA, 23 bp, Artificial Sequence
  Description of Artificial Sequence: Synthetic oligonucleotide
  X-linked inhibitor of apoptosis (XIAP) siRNA
ttaaaatcactcagcactccaac

SEQ ID NO: 14503 - DNA, 23 bp, Artificial Sequence
  Description of Artificial Sequence: Synthetic oligonucleotide
  X-linked inhibitor of apoptosis (XIAP) siRNA
taaaatcactcagcactccaact

SEQ ID NO: 14504 - DNA, 23 bp, Artificial Sequence
  Description of Artificial Sequence: Synthetic oligonucleotide
  X-linked inhibitor of apoptosis (XIAP) siRNA
aaaatcactcagcactccaactt

SEQ ID NO: 14505 - DNA, 23 bp, Artificial Sequence
  Description of Artificial Sequence: Synthetic oligonucleotide
  X-linked inhibitor of apoptosis (XIAP) siRNA
aaatcactcagcactccaacttc

SEQ ID NO: 14506 - DNA, 23 bp, Artificial Sequence
  Description of Artificial Sequence: Synthetic oligonucleotide
  X-linked inhibitor of apoptosis (XIAP) siRNA
aatcactcagcactccaacttct

SEQ ID NO: 14507 - DNA, 23 bp, Artificial Sequence
  Description of Artificial Sequence: Synthetic oligonucleotide
  X-linked inhibitor of apoptosis (XIAP) siRNA
atcactcagcactccaacttcta

SEQ ID NO: 14508 - DNA, 23 bp, Artificial Sequence
  Description of Artificial Sequence: Synthetic oligonucleotide
  X-linked inhibitor of apoptosis (XIAP) siRNA
tcactcagcactccaacttctaa

SEQ ID NO: 14509 - DNA, 23 bp, Artificial Sequence
  Description of Artificial Sequence: Synthetic oligonucleotide
  X-linked inhibitor of apoptosis (XIAP) siRNA
cactcagcactccaacttctaat

SEQ ID NO: 14510 - DNA, 23 bp, Artificial Sequence
  Description of Artificial Sequence: Synthetic oligonucleotide
  X-linked inhibitor of apoptosis (XIAP) siRNA
actcagcactccaacttctaatc

SEQ ID NO: 14511 - DNA, 23 bp, Artificial Sequence
  Description of Artificial Sequence: Synthetic oligonucleotide
  X-linked inhibitor of apoptosis (XIAP) siRNA
ctcagcactccaacttctaatca

SEQ ID NO: 14512 - DNA, 23 bp, Artificial Sequence
  Description of Artificial Sequence: Synthetic oligonucleotide
  X-linked inhibitor of apoptosis (XIAP) siRNA
tcagcactccaacttctaatcaa

SEQ ID NO: 14513 - DNA, 23 bp, Artificial Sequence
  Description of Artificial Sequence: Synthetic oligonucleotide
  X-linked inhibitor of apoptosis (XIAP) siRNA
cagcactccaacttctaatcaaa

SEQ ID NO: 14514 - DNA, 23 bp, Artificial Sequence
  Description of Artificial Sequence: Synthetic oligonucleotide
  X-linked inhibitor of apoptosis (XIAP) siRNA
agcactccaacttctaatcaaat

SEQ ID NO: 14515 - DNA, 23 bp, Artificial Sequence
  Description of Artificial Sequence: Synthetic oligonucleotide
  X-linked inhibitor of apoptosis (XIAP) siRNA
gcactccaacttctaatcaaatt

SEQ ID NO: 14516 - DNA, 23 bp, Artificial Sequence
  Description of Artificial Sequence: Synthetic oligonucleotide
  X-linked inhibitor of apoptosis (XIAP) siRNA
cactccaacttctaatcaaattt

SEQ ID NO: 14517 - DNA, 23 bp, Artificial Sequence
  Description of Artificial Sequence: Synthetic oligonucleotide
  X-linked inhibitor of apoptosis (XIAP) siRNA
actccaacttctaatcaaatttt

SEQ ID NO: 14518 - DNA, 23 bp, Artificial Sequence
  Description of Artificial Sequence: Synthetic oligonucleotide
  X-linked inhibitor of apoptosis (XIAP) siRNA
ctccaacttctaatcaaattttt

SEQ ID NO: 14519 - DNA, 23 bp, Artificial Sequence
  Description of Artificial Sequence: Synthetic oligonucleotide
  X-linked inhibitor of apoptosis (XIAP) siRNA
tccaacttctaatcaaatttttg

SEQ ID NO: 14520 - DNA, 23 bp, Artificial Sequence
  Description of Artificial Sequence: Synthetic oligonucleotide
  X-linked inhibitor of apoptosis (XIAP) siRNA
ccaacttctaatcaaatttttgg

SEQ ID NO: 14521 - DNA, 23 bp, Artificial Sequence
  Description of Artificial Sequence: Synthetic oligonucleotide
  X-linked inhibitor of apoptosis (XIAP) siRNA
caacttctaatcaaatttttgga

SEQ ID NO: 14522 - DNA, 23 bp, Artificial Sequence
  Description of Artificial Sequence: Synthetic oligonucleotide
  X-linked inhibitor of apoptosis (XIAP) siRNA
aacttctaatcaaatttttggag

SEQ ID NO: 14523 - DNA, 23 bp, Artificial Sequence
  Description of Artificial Sequence: Synthetic oligonucleotide
  X-linked inhibitor of apoptosis (XIAP) siRNA
acttctaatcaaatttttggaga

SEQ ID NO: 14524 - DNA, 23 bp, Artificial Sequence
  Description of Artificial Sequence: Synthetic oligonucleotide
  X-linked inhibitor of apoptosis (XIAP) siRNA
cttctaatcaaatttttggagac

SEQ ID NO: 14525 - DNA, 23 bp, Artificial Sequence
  Description of Artificial Sequence: Synthetic oligonucleotide
  X-linked inhibitor of apoptosis (XIAP) siRNA
ttctaatcaaatttttggagact

SEQ ID NO: 14526 - DNA, 23 bp, Artificial Sequence
  Description of Artificial Sequence: Synthetic oligonucleotide
  X-linked inhibitor of apoptosis (XIAP) siRNA
tctaatcaaatttttggagactt

SEQ ID NO: 14527 - DNA, 23 bp, Artificial Sequence
  Description of Artificial Sequence: Synthetic oligonucleotide
  X-linked inhibitor of apoptosis (XIAP) siRNA
ctaatcaaatttttggagactta

SEQ ID NO: 14528 - DNA, 23 bp, Artificial Sequence
  Description of Artificial Sequence: Synthetic oligonucleotide
  X-linked inhibitor of apoptosis (XIAP) siRNA
taatcaaatttttggagacttaa

SEQ ID NO: 14529 - DNA, 23 bp, Artificial Sequence
  Description of Artificial Sequence: Synthetic oligonucleotide
  X-linked inhibitor of apoptosis (XIAP) siRNA
aatcaaatttttggagacttaac

SEQ ID NO: 14530 - DNA, 23 bp, Artificial Sequence
  Description of Artificial Sequence: Synthetic oligonucleotide
  X-linked inhibitor of apoptosis (XIAP) siRNA
atcaaatttttggagacttaaca

SEQ ID NO: 14531 - DNA, 23 bp, Artificial Sequence
  Description of Artificial Sequence: Synthetic oligonucleotide
  X-linked inhibitor of apoptosis (XIAP) siRNA
tcaaatttttggagacttaacag

SEQ ID NO: 14532 - DNA, 23 bp, Artificial Sequence
  Description of Artificial Sequence: Synthetic oligonucleotide
  X-linked inhibitor of apoptosis (XIAP) siRNA
caaatttttggagacttaacagc

SEQ ID NO: 14533 - DNA, 23 bp, Artificial Sequence
  Description of Artificial Sequence: Synthetic oligonucleotide
  X-linked inhibitor of apoptosis (XIAP) siRNA
aaatttttggagacttaacagca

SEQ ID NO: 14534 - DNA, 23 bp, Artificial Sequence
  Description of Artificial Sequence: Synthetic oligonucleotide
  X-linked inhibitor of apoptosis (XIAP) siRNA
aatttttggagacttaacagcat

SEQ ID NO: 14535 - DNA, 23 bp, Artificial Sequence
  Description of Artificial Sequence: Synthetic oligonucleotide
  X-linked inhibitor of apoptosis (XIAP) siRNA
atttttggagacttaacagcatt

SEQ ID NO: 14536 - DNA, 23 bp, Artificial Sequence
  Description of Artificial Sequence: Synthetic oligonucleotide
  X-linked inhibitor of apoptosis (XIAP) siRNA
tttttggagacttaacagcattt

SEQ ID NO: 14537 - DNA, 23 bp, Artificial Sequence
  Description of Artificial Sequence: Synthetic oligonucleotide
  X-linked inhibitor of apoptosis (XIAP) siRNA
ttttggagacttaacagcatttg

SEQ ID NO: 14538 - DNA, 23 bp, Artificial Sequence
  Description of Artificial Sequence: Synthetic oligonucleotide
  X-linked inhibitor of apoptosis (XIAP) siRNA
tttggagacttaacagcatttgt

SEQ ID NO: 14539 - DNA, 23 bp, Artificial Sequence
  Description of Artificial Sequence: Synthetic oligonucleotide
  X-linked inhibitor of apoptosis (XIAP) siRNA
ttggagacttaacagcatttgtc

SEQ ID NO: 14540 - DNA, 23 bp, Artificial Sequence
  Description of Artificial Sequence: Synthetic oligonucleotide
  X-linked inhibitor of apoptosis (XIAP) siRNA
tggagacttaacagcatttgtct

SEQ ID NO: 14541 - DNA, 23 bp, Artificial Sequence
  Description of Artificial Sequence: Synthetic oligonucleotide
  X-linked inhibitor of apoptosis (XIAP) siRNA
ggagacttaacagcatttgtctg

SEQ ID NO: 14542 - DNA, 23 bp, Artificial Sequence
  Description of Artificial Sequence: Synthetic oligonucleotide
  X-linked inhibitor of apoptosis (XIAP) siRNA
gagacttaacagcatttgtctgt

SEQ ID NO: 14543 - DNA, 23 bp, Artificial Sequence
  Description of Artificial Sequence: Synthetic oligonucleotide
  X-linked inhibitor of apoptosis (XIAP) siRNA
agacttaacagcatttgtctgtg

SEQ ID NO: 14544 - DNA, 23 bp, Artificial Sequence
  Description of Artificial Sequence: Synthetic oligonucleotide
  X-linked inhibitor of apoptosis (XIAP) siRNA
gacttaacagcatttgtctgtgt

SEQ ID NO: 14545 - DNA, 23 bp, Artificial Sequence
  Description of Artificial Sequence: Synthetic oligonucleotide
  X-linked inhibitor of apoptosis (XIAP) siRNA
acttaacagcatttgtctgtgtt

SEQ ID NO: 14546 - DNA, 23 bp, Artificial Sequence
  Description of Artificial Sequence: Synthetic oligonucleotide
  X-linked inhibitor of apoptosis (XIAP) siRNA
cttaacagcatttgtctgtgttt

SEQ ID NO: 14547 - DNA, 23 bp, Artificial Sequence
  Description of Artificial Sequence: Synthetic oligonucleotide
  X-linked inhibitor of apoptosis (XIAP) siRNA
ttaacagcatttgtctgtgtttg

SEQ ID NO: 14548 - DNA, 23 bp, Artificial Sequence
  Description of Artificial Sequence: Synthetic oligonucleotide
  X-linked inhibitor of apoptosis (XIAP) siRNA
taacagcatttgtctgtgtttga

SEQ ID NO: 14549 - DNA, 23 bp, Artificial Sequence
  Description of Artificial Sequence: Synthetic oligonucleotide
  X-linked inhibitor of apoptosis (XIAP) siRNA
aacagcatttgtctgtgtttgaa

SEQ ID NO: 14550 - DNA, 23 bp, Artificial Sequence
  Description of Artificial Sequence: Synthetic oligonucleotide
  X-linked inhibitor of apoptosis (XIAP) siRNA
acagcatttgtctgtgtttgaac

SEQ ID NO: 14551 - DNA, 23 bp, Artificial Sequence
  Description of Artificial Sequence: Synthetic oligonucleotide
  X-linked inhibitor of apoptosis (XIAP) siRNA
cagcatttgtctgtgtttgaact

SEQ ID NO: 14552 - DNA, 23 bp, Artificial Sequence
  Description of Artificial Sequence: Synthetic oligonucleotide
  X-linked inhibitor of apoptosis (XIAP) siRNA
agcatttgtctgtgtttgaacta

SEQ ID NO: 14553 - DNA, 23 bp, Artificial Sequence
  Description of Artificial Sequence: Synthetic oligonucleotide
  X-linked inhibitor of apoptosis (XIAP) siRNA
gcatttgtctgtgtttgaactat

SEQ ID NO: 14554 - DNA, 23 bp, Artificial Sequence
  Description of Artificial Sequence: Synthetic oligonucleotide
  X-linked inhibitor of apoptosis (XIAP) siRNA
catttgtctgtgtttgaactata

SEQ ID NO: 14555 - DNA, 23 bp, Artificial Sequence
  Description of Artificial Sequence: Synthetic oligonucleotide
  X-linked inhibitor of apoptosis (XIAP) siRNA
atttgtctgtgtttgaactataa

SEQ ID NO: 14556 - DNA, 23 bp, Artificial Sequence
  Description of Artificial Sequence: Synthetic oligonucleotide
  X-linked inhibitor of apoptosis (XIAP) siRNA
tttgtctgtgtttgaactataaa

SEQ ID NO: 14557 - DNA, 23 bp, Artificial Sequence
  Description of Artificial Sequence: Synthetic oligonucleotide
  X-linked inhibitor of apoptosis (XIAP) siRNA
ttgtctgtgtttgaactataaaa

SEQ ID NO: 14558 - DNA, 23 bp, Artificial Sequence
  Description of Artificial Sequence: Synthetic oligonucleotide
  X-linked inhibitor of apoptosis (XIAP) siRNA
tgtctgtgtttgaactataaaaa

SEQ ID NO: 14559 - DNA, 23 bp, Artificial Sequence
  Description of Artificial Sequence: Synthetic oligonucleotide
  X-linked inhibitor of apoptosis (XIAP) siRNA
gtctgtgtttgaactataaaaag

SEQ ID NO: 14560 - DNA, 23 bp, Artificial Sequence
  Description of Artificial Sequence: Synthetic oligonucleotide
  X-linked inhibitor of apoptosis (XIAP) siRNA
tctgtgtttgaactataaaaagc

SEQ ID NO: 14561 - DNA, 23 bp, Artificial Sequence
  Description of Artificial Sequence: Synthetic oligonucleotide
  X-linked inhibitor of apoptosis (XIAP) siRNA
ctgtgtttgaactataaaaagca

SEQ ID NO: 14562 - DNA, 23 bp, Artificial Sequence
  Description of Artificial Sequence: Synthetic oligonucleotide
  X-linked inhibitor of apoptosis (XIAP) siRNA
tgtgtttgaactataaaaagcac

SEQ ID NO: 14563 - DNA, 23 bp, Artificial Sequence
  Description of Artificial Sequence: Synthetic oligonucleotide
  X-linked inhibitor of apoptosis (XIAP) siRNA
gtgtttgaactataaaaagcacc

SEQ ID NO: 14564 - DNA, 23 bp, Artificial Sequence
  Description of Artificial Sequence: Synthetic oligonucleotide
  X-linked inhibitor of apoptosis (XIAP) siRNA
tgtttgaactataaaaagcaccg

SEQ ID NO: 14565 - DNA, 23 bp, Artificial Sequence
  Description of Artificial Sequence: Synthetic oligonucleotide
  X-linked inhibitor of apoptosis (XIAP) siRNA
gtttgaactataaaaagcaccgg

SEQ ID NO: 14566 - DNA, 23 bp, Artificial Sequence
  Description of Artificial Sequence: Synthetic oligonucleotide
  X-linked inhibitor of apoptosis (XIAP) siRNA
tttgaactataaaaagcaccgga

SEQ ID NO: 14567 - DNA, 23 bp, Artificial Sequence
  Description of Artificial Sequence: Synthetic oligonucleotide
  X-linked inhibitor of apoptosis (XIAP) siRNA
ttgaactataaaaagcaccggat

SEQ ID NO: 14568 - DNA, 23 bp, Artificial Sequence
  Description of Artificial Sequence: Synthetic oligonucleotide
  X-linked inhibitor of apoptosis (XIAP) siRNA
tgaactataaaaagcaccggatc

SEQ ID NO: 14569 - DNA, 23 bp, Artificial Sequence
  Description of Artificial Sequence: Synthetic oligonucleotide
  X-linked inhibitor of apoptosis (XIAP) siRNA
gaactataaaaagcaccggatct

SEQ ID NO: 14570 - DNA, 23 bp, Artificial Sequence
  Description of Artificial Sequence: Synthetic oligonucleotide
  X-linked inhibitor of apoptosis (XIAP) siRNA
aactataaaaagcaccggatctt

SEQ ID NO: 14571 - DNA, 23 bp, Artificial Sequence
  Description of Artificial Sequence: Synthetic oligonucleotide
  X-linked inhibitor of apoptosis (XIAP) siRNA
actataaaaagcaccggatcttt

SEQ ID NO: 14572 - DNA, 23 bp, Artificial Sequence
  Description of Artificial Sequence: Synthetic oligonucleotide
  X-linked inhibitor of apoptosis (XIAP) siRNA
ctataaaaagcaccggatctttt

SEQ ID NO: 14573 - DNA, 23 bp, Artificial Sequence
  Description of Artificial Sequence: Synthetic oligonucleotide
  X-linked inhibitor of apoptosis (XIAP) siRNA
tataaaaagcaccggatcttttc

SEQ ID NO: 14574 - DNA, 23 bp, Artificial Sequence
  Description of Artificial Sequence: Synthetic oligonucleotide
  X-linked inhibitor of apoptosis (XIAP) siRNA
ataaaaagcaccggatcttttcc

SEQ ID NO: 14575 - DNA, 23 bp, Artificial Sequence
  Description of Artificial Sequence: Synthetic oligonucleotide
  X-linked inhibitor of apoptosis (XIAP) siRNA
taaaaagcaccggatcttttcca

SEQ ID NO: 14576 - DNA, 23 bp, Artificial Sequence
  Description of Artificial Sequence: Synthetic oligonucleotide
  X-linked inhibitor of apoptosis (XIAP) siRNA
aaaaagcaccggatcttttccat

SEQ ID NO: 14577 - DNA, 23 bp, Artificial Sequence
  Description of Artificial Sequence: Synthetic oligonucleotide
  X-linked inhibitor of apoptosis (XIAP) siRNA
aaaagcaccggatcttttccatc

SEQ ID NO: 14578 - DNA, 23 bp, Artificial Sequence
  Description of Artificial Sequence: Synthetic oligonucleotide
  X-linked inhibitor of apoptosis (XIAP) siRNA
aaagcaccggatcttttccatct

SEQ ID NO: 14579 - DNA, 23 bp, Artificial Sequence
  Description of Artificial Sequence: Synthetic oligonucleotide
  X-linked inhibitor of apoptosis (XIAP) siRNA
aagcaccggatcttttccatcta

SEQ ID NO: 14580 - DNA, 23 bp, Artificial Sequence
  Description of Artificial Sequence: Synthetic oligonucleotide
  X-linked inhibitor of apoptosis (XIAP) siRNA
agcaccggatcttttccatctaa

SEQ ID NO: 14581 - DNA, 23 bp, Artificial Sequence
  Description of Artificial Sequence: Synthetic oligonucleotide
  X-linked inhibitor of apoptosis (XIAP) siRNA
gcaccggatcttttccatctaat

SEQ ID NO: 14582 - DNA, 23 bp, Artificial Sequence
  Description of Artificial Sequence: Synthetic oligonucleotide
  X-linked inhibitor of apoptosis (XIAP) siRNA
caccggatcttttccatctaatt

SEQ ID NO: 14583 - DNA, 23 bp, Artificial Sequence
  Description of Artificial Sequence: Synthetic oligonucleotide
  X-linked inhibitor of apoptosis (XIAP) siRNA
accggatcttttccatctaattc

SEQ ID NO: 14584 - DNA, 23 bp, Artificial Sequence
  Description of Artificial Sequence: Synthetic oligonucleotide
  X-linked inhibitor of apoptosis (XIAP) siRNA
ccggatcttttccatctaattcc

SEQ ID NO: 14585 - DNA, 23 bp, Artificial Sequence
  Description of Artificial Sequence: Synthetic oligonucleotide
  X-linked inhibitor of apoptosis (XIAP) siRNA
cggatcttttccatctaattccg

SEQ ID NO: 14586 - DNA, 23 bp, Artificial Sequence
  Description of Artificial Sequence: Synthetic oligonucleotide
  X-linked inhibitor of apoptosis (XIAP) siRNA
ggatcttttccatctaattccgc

SEQ ID NO: 14587 - DNA, 23 bp, Artificial Sequence
  Description of Artificial Sequence: Synthetic oligonucleotide
  X-linked inhibitor of apoptosis (XIAP) siRNA
gatcttttccatctaattccgca

SEQ ID NO: 14588 - DNA, 23 bp, Artificial Sequence
  Description of Artificial Sequence: Synthetic oligonucleotide
  X-linked inhibitor of apoptosis (XIAP) siRNA
atcttttccatctaattccgcaa

SEQ ID NO: 14589 - DNA, 23 bp, Artificial Sequence
  Description of Artificial Sequence: Synthetic oligonucleotide
  X-linked inhibitor of apoptosis (XIAP) siRNA
tcttttccatctaattccgcaaa

SEQ ID NO: 14590 - DNA, 23 bp, Artificial Sequence
  Description of Artificial Sequence: Synthetic oligonucleotide
  X-linked inhibitor of apoptosis (XIAP) siRNA
cttttccatctaattccgcaaaa

SEQ ID NO: 14591 - DNA, 23 bp, Artificial Sequence
  Description of Artificial Sequence: Synthetic oligonucleotide
  X-linked inhibitor of apoptosis (XIAP) siRNA
ttttccatctaattccgcaaaaa

SEQ ID NO: 14592 - DNA, 23 bp, Artificial Sequence
  Description of Artificial Sequence: Synthetic oligonucleotide
  X-linked inhibitor of apoptosis (XIAP) siRNA
tttccatctaattccgcaaaaat

SEQ ID NO: 14593 - DNA, 23 bp, Artificial Sequence
  Description of Artificial Sequence: Synthetic oligonucleotide
  X-linked inhibitor of apoptosis (XIAP) siRNA
ttccatctaattccgcaaaaatt

SEQ ID NO: 14594 - DNA, 23 bp, Artificial Sequence
  Description of Artificial Sequence: Synthetic oligonucleotide
  X-linked inhibitor of apoptosis (XIAP) siRNA
tccatctaattccgcaaaaattg

SEQ ID NO: 14595 - DNA, 23 bp, Artificial Sequence
  Description of Artificial Sequence: Synthetic oligonucleotide
  X-linked inhibitor of apoptosis (XIAP) siRNA
ccatctaattccgcaaaaattga

SEQ ID NO: 14596 - DNA, 23 bp, Artificial Sequence
  Description of Artificial Sequence: Synthetic oligonucleotide
  X-linked inhibitor of apoptosis (XIAP) siRNA
catctaattccgcaaaaattgat

SEQ ID NO: 14597 - DNA, 23 bp, Artificial Sequence
  Description of Artificial Sequence: Synthetic oligonucleotide
  X-linked inhibitor of apoptosis (XIAP) siRNA
atctaattccgcaaaaattgatc

SEQ ID NO: 14598 - DNA, 23 bp, Artificial Sequence
  Description of Artificial Sequence: Synthetic oligonucleotide
  X-linked inhibitor of apoptosis (XIAP) siRNA
tctaattccgcaaaaattgatca

SEQ ID NO: 14599 - DNA, 23 bp, Artificial Sequence
  Description of Artificial Sequence: Synthetic oligonucleotide
  X-linked inhibitor of apoptosis (XIAP) siRNA
ctaattccgcaaaaattgatcat

SEQ ID NO: 14600 - DNA, 23 bp, Artificial Sequence
  Description of Artificial Sequence: Synthetic oligonucleotide
  X-linked inhibitor of apoptosis (XIAP) siRNA
taattccgcaaaaattgatcatt

SEQ ID NO: 14601 - DNA, 23 bp, Artificial Sequence
  Description of Artificial Sequence: Synthetic oligonucleotide
  X-linked inhibitor of apoptosis (XIAP) siRNA
aattccgcaaaaattgatcattt

SEQ ID NO: 14602 - DNA, 23 bp, Artificial Sequence
  Description of Artificial Sequence: Synthetic oligonucleotide
  X-linked inhibitor of apoptosis (XIAP) siRNA
attccgcaaaaattgatcatttg

SEQ ID NO: 14603 - DNA, 23 bp, Artificial Sequence
  Description of Artificial Sequence: Synthetic oligonucleotide
  X-linked inhibitor of apoptosis (XIAP) siRNA
ttccgcaaaaattgatcatttgc

SEQ ID NO: 14604 - DNA, 23 bp, Artificial Sequence
  Description of Artificial Sequence: Synthetic oligonucleotide
  X-linked inhibitor of apoptosis (XIAP) siRNA
tccgcaaaaattgatcatttgca

SEQ ID NO: 14605 - DNA, 23 bp, Artificial Sequence
  Description of Artificial Sequence: Synthetic oligonucleotide
  X-linked inhibitor of apoptosis (XIAP) siRNA
ccgcaaaaattgatcatttgcaa

SEQ ID NO: 14606 - DNA, 23 bp, Artificial Sequence
  Description of Artificial Sequence: Synthetic oligonucleotide
  X-linked inhibitor of apoptosis (XIAP) siRNA
cgcaaaaattgatcatttgcaaa

SEQ ID NO: 14607 - DNA, 23 bp, Artificial Sequence
  Description of Artificial Sequence: Synthetic oligonucleotide
  X-linked inhibitor of apoptosis (XIAP) siRNA
gcaaaaattgatcatttgcaaag

SEQ ID NO: 14608 - DNA, 23 bp, Artificial Sequence
  Description of Artificial Sequence: Synthetic oligonucleotide
  X-linked inhibitor of apoptosis (XIAP) siRNA
caaaaattgatcatttgcaaagt

SEQ ID NO: 14609 - DNA, 23 bp, Artificial Sequence
  Description of Artificial Sequence: Synthetic oligonucleotide
  X-linked inhibitor of apoptosis (XIAP) siRNA
aaaaattgatcatttgcaaagtc

SEQ ID NO: 14610 - DNA, 23 bp, Artificial Sequence
  Description of Artificial Sequence: Synthetic oligonucleotide
  X-linked inhibitor of apoptosis (XIAP) siRNA
aaaattgatcatttgcaaagtca

SEQ ID NO: 14611 - DNA, 23 bp, Artificial Sequence
  Description of Artificial Sequence: Synthetic oligonucleotide
  X-linked inhibitor of apoptosis (XIAP) siRNA
aaattgatcatttgcaaagtcaa

SEQ ID NO: 14612 - DNA, 23 bp, Artificial Sequence
  Description of Artificial Sequence: Synthetic oligonucleotide
  X-linked inhibitor of apoptosis (XIAP) siRNA
aattgatcatttgcaaagtcaaa

SEQ ID NO: 14613 - DNA, 23 bp, Artificial Sequence
  Description of Artificial Sequence: Synthetic oligonucleotide
  X-linked inhibitor of apoptosis (XIAP) siRNA
attgatcatttgcaaagtcaaaa

SEQ ID NO: 14614 - DNA, 23 bp, Artificial Sequence
  Description of Artificial Sequence: Synthetic oligonucleotide
  X-linked inhibitor of apoptosis (XIAP) siRNA
ttgatcatttgcaaagtcaaaac

SEQ ID NO: 14615 - DNA, 23 bp, Artificial Sequence
  Description of Artificial Sequence: Synthetic oligonucleotide
  X-linked inhibitor of apoptosis (XIAP) siRNA
tgatcatttgcaaagtcaaaact

SEQ ID NO: 14616 - DNA, 23 bp, Artificial Sequence
  Description of Artificial Sequence: Synthetic oligonucleotide
  X-linked inhibitor of apoptosis (XIAP) siRNA
gatcatttgcaaagtcaaaacta

SEQ ID NO: 14617 - DNA, 23 bp, Artificial Sequence
  Description of Artificial Sequence: Synthetic oligonucleotide
  X-linked inhibitor of apoptosis (XIAP) siRNA
atcatttgcaaagtcaaaactat

SEQ ID NO: 14618 - DNA, 23 bp, Artificial Sequence
  Description of Artificial Sequence: Synthetic oligonucleotide
  X-linked inhibitor of apoptosis (XIAP) siRNA
tcatttgcaaagtcaaaactata

SEQ ID NO: 14619 - DNA, 23 bp, Artificial Sequence
  Description of Artificial Sequence: Synthetic oligonucleotide
  X-linked inhibitor of apoptosis (XIAP) siRNA
catttgcaaagtcaaaactatag

SEQ ID NO: 14620 - DNA, 23 bp, Artificial Sequence
  Description of Artificial Sequence: Synthetic oligonucleotide
  X-linked inhibitor of apoptosis (XIAP) siRNA
atttgcaaagtcaaaactatagc

SEQ ID NO: 14621 - DNA, 23 bp, Artificial Sequence
  Description of Artificial Sequence: Synthetic oligonucleotide
  X-linked inhibitor of apoptosis (XIAP) siRNA
tttgcaaagtcaaaactatagcc

SEQ ID NO: 14622 - DNA, 23 bp, Artificial Sequence
  Description of Artificial Sequence: Synthetic oligonucleotide
  X-linked inhibitor of apoptosis (XIAP) siRNA
ttgcaaagtcaaaactatagcca

SEQ ID NO: 14623 - DNA, 23 bp, Artificial Sequence
  Description of Artificial Sequence: Synthetic oligonucleotide
  X-linked inhibitor of apoptosis (XIAP) siRNA
tgcaaagtcaaaactatagccat

SEQ ID NO: 14624 - DNA, 23 bp, Artificial Sequence
  Description of Artificial Sequence: Synthetic oligonucleotide
  X-linked inhibitor of apoptosis (XIAP) siRNA
gcaaagtcaaaactatagccata

SEQ ID NO: 14625 - DNA, 23 bp, Artificial Sequence
  Description of Artificial Sequence: Synthetic oligonucleotide
  X-linked inhibitor of apoptosis (XIAP) siRNA
caaagtcaaaactatagccatat

SEQ ID NO: 14626 - DNA, 23 bp, Artificial Sequence
  Description of Artificial Sequence: Synthetic oligonucleotide
  X-linked inhibitor of apoptosis (XIAP) siRNA
aaagtcaaaactatagccatatc

SEQ ID NO: 14627 - DNA, 23 bp, Artificial Sequence
  Description of Artificial Sequence: Synthetic oligonucleotide
  X-linked inhibitor of apoptosis (XIAP) siRNA
aagtcaaaactatagccatatcc

SEQ ID NO: 14628 - DNA, 23 bp, Artificial Sequence
  Description of Artificial Sequence: Synthetic oligonucleotide
  X-linked inhibitor of apoptosis (XIAP) siRNA
agtcaaaactatagccatatcca

SEQ ID NO: 14629 - DNA, 23 bp, Artificial Sequence
  Description of Artificial Sequence: Synthetic oligonucleotide
  X-linked inhibitor of apoptosis (XIAP) siRNA
gtcaaaactatagccatatccaa

SEQ ID NO: 14630 - DNA, 23 bp, Artificial Sequence
  Description of Artificial Sequence: Synthetic oligonucleotide
  X-linked inhibitor of apoptosis (XIAP) siRNA
tcaaaactatagccatatccaaa

SEQ ID NO: 14631 - DNA, 23 bp, Artificial Sequence
  Description of Artificial Sequence: Synthetic oligonucleotide
  X-linked inhibitor of apoptosis (XIAP) siRNA
caaaactatagccatatccaaat

SEQ ID NO: 14632 - DNA, 23 bp, Artificial Sequence
  Description of Artificial Sequence: Synthetic oligonucleotide
  X-linked inhibitor of apoptosis (XIAP) siRNA
aaaactatagccatatccaaatc

SEQ ID NO: 14633 - DNA, 23 bp, Artificial Sequence
  Description of Artificial Sequence: Synthetic oligonucleotide
  X-linked inhibitor of apoptosis (XIAP) siRNA
aaactatagccatatccaaatct

SEQ ID NO: 14634 - DNA, 23 bp, Artificial Sequence
  Description of Artificial Sequence: Synthetic oligonucleotide
  X-linked inhibitor of apoptosis (XIAP) siRNA
aactatagccatatccaaatctt

SEQ ID NO: 14635 - DNA, 23 bp, Artificial Sequence
  Description of Artificial Sequence: Synthetic oligonucleotide
  X-linked inhibitor of apoptosis (XIAP) siRNA
actatagccatatccaaatcttt

SEQ ID NO: 14636 - DNA, 23 bp, Artificial Sequence
  Description of Artificial Sequence: Synthetic oligonucleotide
  X-linked inhibitor of apoptosis (XIAP) siRNA
ctatagccatatccaaatctttt

SEQ ID NO: 14637 - DNA, 23 bp, Artificial Sequence
  Description of Artificial Sequence: Synthetic oligonucleotide
  X-linked inhibitor of apoptosis (XIAP) siRNA
tatagccatatccaaatcttttc

SEQ ID NO: 14638 - DNA, 23 bp, Artificial Sequence
  Description of Artificial Sequence: Synthetic oligonucleotide
  X-linked inhibitor of apoptosis (XIAP) siRNA
atagccatatccaaatcttttcc

SEQ ID NO: 14639 - DNA, 23 bp, Artificial Sequence
  Description of Artificial Sequence: Synthetic oligonucleotide
  X-linked inhibitor of apoptosis (XIAP) siRNA
tagccatatccaaatcttttccc

SEQ ID NO: 14640 - DNA, 23 bp, Artificial Sequence
  Description of Artificial Sequence: Synthetic oligonucleotide
  X-linked inhibitor of apoptosis (XIAP) siRNA
agccatatccaaatcttttcccc

SEQ ID NO: 14641 - DNA, 23 bp, Artificial Sequence
  Description of Artificial Sequence: Synthetic oligonucleotide
  X-linked inhibitor of apoptosis (XIAP) siRNA
gccatatccaaatcttttccccc

SEQ ID NO: 14642 - DNA, 23 bp, Artificial Sequence
  Description of Artificial Sequence: Synthetic oligonucleotide
  X-linked inhibitor of apoptosis (XIAP) siRNA
ccatatccaaatcttttccccct

SEQ ID NO: 14643 - DNA, 23 bp, Artificial Sequence
  Description of Artificial Sequence: Synthetic oligonucleotide
  X-linked inhibitor of apoptosis (XIAP) siRNA
catatccaaatcttttccccctc

SEQ ID NO: 14644 - DNA, 23 bp, Artificial Sequence
  Description of Artificial Sequence: Synthetic oligonucleotide
  X-linked inhibitor of apoptosis (XIAP) siRNA
atatccaaatcttttccccctcc

SEQ ID NO: 14645 - DNA, 23 bp, Artificial Sequence
  Description of Artificial Sequence: Synthetic oligonucleotide
  X-linked inhibitor of apoptosis (XIAP) siRNA
tatccaaatcttttccccctccc

SEQ ID NO: 14646 - DNA, 23 bp, Artificial Sequence
  Description of Artificial Sequence: Synthetic oligonucleotide
  X-linked inhibitor of apoptosis (XIAP) siRNA
atccaaatcttttccccctccca

SEQ ID NO: 14647 - DNA, 23 bp, Artificial Sequence
  Description of Artificial Sequence: Synthetic oligonucleotide
  X-linked inhibitor of apoptosis (XIAP) siRNA
tccaaatcttttccccctcccaa

SEQ ID NO: 14648 - DNA, 23 bp, Artificial Sequence
  Description of Artificial Sequence: Synthetic oligonucleotide
  X-linked inhibitor of apoptosis (XIAP) siRNA
ccaaatcttttccccctcccaag

SEQ ID NO: 14649 - DNA, 23 bp, Artificial Sequence
  Description of Artificial Sequence: Synthetic oligonucleotide
  X-linked inhibitor of apoptosis (XIAP) siRNA
caaatcttttccccctcccaaga

SEQ ID NO: 14650 - DNA, 23 bp, Artificial Sequence
  Description of Artificial Sequence: Synthetic oligonucleotide
  X-linked inhibitor of apoptosis (XIAP) siRNA
aaatcttttccccctcccaagag

SEQ ID NO: 14651 - DNA, 23 bp, Artificial Sequence
  Description of Artificial Sequence: Synthetic oligonucleotide
  X-linked inhibitor of apoptosis (XIAP) siRNA
aatcttttccccctcccaagagt

SEQ ID NO: 14652 - DNA, 23 bp, Artificial Sequence
  Description of Artificial Sequence: Synthetic oligonucleotide
  X-linked inhibitor of apoptosis (XIAP) siRNA
atcttttccccctcccaagagtt

SEQ ID NO: 14653 - DNA, 23 bp, Artificial Sequence
  Description of Artificial Sequence: Synthetic oligonucleotide
  X-linked inhibitor of apoptosis (XIAP) siRNA
tcttttccccctcccaagagttc

SEQ ID NO: 14654 - DNA, 23 bp, Artificial Sequence
  Description of Artificial Sequence: Synthetic oligonucleotide
  X-linked inhibitor of apoptosis (XIAP) siRNA
cttttccccctcccaagagttct

SEQ ID NO: 14655 - DNA, 23 bp, Artificial Sequence
  Description of Artificial Sequence: Synthetic oligonucleotide
  X-linked inhibitor of apoptosis (XIAP) siRNA
ttttccccctcccaagagttctc

SEQ ID NO: 14656 - DNA, 23 bp, Artificial Sequence
  Description of Artificial Sequence: Synthetic oligonucleotide
  X-linked inhibitor of apoptosis (XIAP) siRNA
tttccccctcccaagagttctca

SEQ ID NO: 14657 - DNA, 23 bp, Artificial Sequence
  Description of Artificial Sequence: Synthetic oligonucleotide
  X-linked inhibitor of apoptosis (XIAP) siRNA
ttccccctcccaagagttctcag

SEQ ID NO: 14658 - DNA, 23 bp, Artificial Sequence
  Description of Artificial Sequence: Synthetic oligonucleotide
  X-linked inhibitor of apoptosis (XIAP) siRNA
tccccctcccaagagttctcagt

SEQ ID NO: 14659 - DNA, 23 bp, Artificial Sequence
  Description of Artificial Sequence: Synthetic oligonucleotide
  X-linked inhibitor of apoptosis (XIAP) siRNA
ccccctcccaagagttctcagtg

SEQ ID NO: 14660 - DNA, 23 bp, Artificial Sequence
  Description of Artificial Sequence: Synthetic oligonucleotide
  X-linked inhibitor of apoptosis (XIAP) siRNA
cccctcccaagagttctcagtgt

SEQ ID NO: 14661 - DNA, 23 bp, Artificial Sequence
  Description of Artificial Sequence: Synthetic oligonucleotide
  X-linked inhibitor of apoptosis (XIAP) siRNA
ccctcccaagagttctcagtgtc

SEQ ID NO: 14662 - DNA, 23 bp, Artificial Sequence
  Description of Artificial Sequence: Synthetic oligonucleotide
  X-linked inhibitor of apoptosis (XIAP) siRNA
cctcccaagagttctcagtgtct

SEQ ID NO: 14663 - DNA, 23 bp, Artificial Sequence
  Description of Artificial Sequence: Synthetic oligonucleotide
  X-linked inhibitor of apoptosis (XIAP) siRNA
ctcccaagagttctcagtgtcta

SEQ ID NO: 14664 - DNA, 23 bp, Artificial Sequence
  Description of Artificial Sequence: Synthetic oligonucleotide
  X-linked inhibitor of apoptosis (XIAP) siRNA
tcccaagagttctcagtgtctac

SEQ ID NO: 14665 - DNA, 23 bp, Artificial Sequence
  Description of Artificial Sequence: Synthetic oligonucleotide
  X-linked inhibitor of apoptosis (XIAP) siRNA
cccaagagttctcagtgtctaca

SEQ ID NO: 14666 - DNA, 23 bp, Artificial Sequence
  Description of Artificial Sequence: Synthetic oligonucleotide
  X-linked inhibitor of apoptosis (XIAP) siRNA
ccaagagttctcagtgtctacat

SEQ ID NO: 14667 - DNA, 23 bp, Artificial Sequence
  Description of Artificial Sequence: Synthetic oligonucleotide
  X-linked inhibitor of apoptosis (XIAP) siRNA
caagagttctcagtgtctacatg

SEQ ID NO: 14668 - DNA, 23 bp, Artificial Sequence
  Description of Artificial Sequence: Synthetic oligonucleotide
  X-linked inhibitor of apoptosis (XIAP) siRNA
aagagttctcagtgtctacatgt

SEQ ID NO: 14669 - DNA, 23 bp, Artificial Sequence
  Description of Artificial Sequence: Synthetic oligonucleotide
  X-linked inhibitor of apoptosis (XIAP) siRNA
agagttctcagtgtctacatgta

SEQ ID NO: 14670 - DNA, 23 bp, Artificial Sequence
  Description of Artificial Sequence: Synthetic oligonucleotide
  X-linked inhibitor of apoptosis (XIAP) siRNA
gagttctcagtgtctacatgtag

SEQ ID NO: 14671 - DNA, 23 bp, Artificial Sequence
  Description of Artificial Sequence: Synthetic oligonucleotide
  X-linked inhibitor of apoptosis (XIAP) siRNA
agttctcagtgtctacatgtaga

SEQ ID NO: 14672 - DNA, 23 bp, Artificial Sequence
  Description of Artificial Sequence: Synthetic oligonucleotide
  X-linked inhibitor of apoptosis (XIAP) siRNA
gttctcagtgtctacatgtagac

SEQ ID NO: 14673 - DNA, 23 bp, Artificial Sequence
  Description of Artificial Sequence: Synthetic oligonucleotide
  X-linked inhibitor of apoptosis (XIAP) siRNA
ttctcagtgtctacatgtagact

SEQ ID NO: 14674 - DNA, 23 bp, Artificial Sequence
  Description of Artificial Sequence: Synthetic oligonucleotide
  X-linked inhibitor of apoptosis (XIAP) siRNA
tctcagtgtctacatgtagacta

SEQ ID NO: 14675 - DNA, 23 bp, Artificial Sequence
  Description of Artificial Sequence: Synthetic oligonucleotide
  X-linked inhibitor of apoptosis (XIAP) siRNA
ctcagtgtctacatgtagactat

SEQ ID NO: 14676 - DNA, 23 bp, Artificial Sequence
  Description of Artificial Sequence: Synthetic oligonucleotide
  X-linked inhibitor of apoptosis (XIAP) siRNA
tcagtgtctacatgtagactatt

SEQ ID NO: 14677 - DNA, 23 bp, Artificial Sequence
  Description of Artificial Sequence: Synthetic oligonucleotide
  X-linked inhibitor of apoptosis (XIAP) siRNA
cagtgtctacatgtagactattc

SEQ ID NO: 14678 - DNA, 23 bp, Artificial Sequence
  Description of Artificial Sequence: Synthetic oligonucleotide
  X-linked inhibitor of apoptosis (XIAP) siRNA
agtgtctacatgtagactattcc

SEQ ID NO: 14679 - DNA, 23 bp, Artificial Sequence
  Description of Artificial Sequence: Synthetic oligonucleotide
  X-linked inhibitor of apoptosis (XIAP) siRNA
gtgtctacatgtagactattcct

SEQ ID NO: 14680 - DNA, 23 bp, Artificial Sequence
  Description of Artificial Sequence: Synthetic oligonucleotide
  X-linked inhibitor of apoptosis (XIAP) siRNA
tgtctacatgtagactattcctt

SEQ ID NO: 14681 - DNA, 23 bp, Artificial Sequence
  Description of Artificial Sequence: Synthetic oligonucleotide
  X-linked inhibitor of apoptosis (XIAP) siRNA
gtctacatgtagactattccttt

SEQ ID NO: 14682 - DNA, 23 bp, Artificial Sequence
  Description of Artificial Sequence: Synthetic oligonucleotide
  X-linked inhibitor of apoptosis (XIAP) siRNA
tctacatgtagactattcctttt

SEQ ID NO: 14683 - DNA, 23 bp, Artificial Sequence
  Description of Artificial Sequence: Synthetic oligonucleotide
  X-linked inhibitor of apoptosis (XIAP) siRNA
ctacatgtagactattccttttc

SEQ ID NO: 14684 - DNA, 23 bp, Artificial Sequence
  Description of Artificial Sequence: Synthetic oligonucleotide
  X-linked inhibitor of apoptosis (XIAP) siRNA
tacatgtagactattccttttct

SEQ ID NO: 14685 - DNA, 23 bp, Artificial Sequence
  Description of Artificial Sequence: Synthetic oligonucleotide
  X-linked inhibitor of apoptosis (XIAP) siRNA
acatgtagactattccttttctg

SEQ ID NO: 14686 - DNA, 23 bp, Artificial Sequence
  Description of Artificial Sequence: Synthetic oligonucleotide
  X-linked inhibitor of apoptosis (XIAP) siRNA
catgtagactattccttttctgt

SEQ ID NO: 14687 - DNA, 23 bp, Artificial Sequence
  Description of Artificial Sequence: Synthetic oligonucleotide
  X-linked inhibitor of apoptosis (XIAP) siRNA
atgtagactattccttttctgta

SEQ ID NO: 14688 - DNA, 23 bp, Artificial Sequence
  Description of Artificial Sequence: Synthetic oligonucleotide
  X-linked inhibitor of apoptosis (XIAP) siRNA
tgtagactattccttttctgtat

SEQ ID NO: 14689 - DNA, 23 bp, Artificial Sequence
  Description of Artificial Sequence: Synthetic oligonucleotide
  X-linked inhibitor of apoptosis (XIAP) siRNA
gtagactattccttttctgtata

SEQ ID NO: 14690 - DNA, 23 bp, Artificial Sequence
  Description of Artificial Sequence: Synthetic oligonucleotide
  X-linked inhibitor of apoptosis (XIAP) siRNA
tagactattccttttctgtataa

SEQ ID NO: 14691 - DNA, 23 bp, Artificial Sequence
  Description of Artificial Sequence: Synthetic oligonucleotide
  X-linked inhibitor of apoptosis (XIAP) siRNA
agactattccttttctgtataaa

SEQ ID NO: 14692 - DNA, 23 bp, Artificial Sequence
  Description of Artificial Sequence: Synthetic oligonucleotide
  X-linked inhibitor of apoptosis (XIAP) siRNA
gactattccttttctgtataaag

SEQ ID NO: 14693 - DNA, 23 bp, Artificial Sequence
  Description of Artificial Sequence: Synthetic oligonucleotide
  X-linked inhibitor of apoptosis (XIAP) siRNA
actattccttttctgtataaagt

SEQ ID NO: 14694 - DNA, 23 bp, Artificial Sequence
  Description of Artificial Sequence: Synthetic oligonucleotide
  X-linked inhibitor of apoptosis (XIAP) siRNA
ctattccttttctgtataaagtt

SEQ ID NO: 14695 - DNA, 23 bp, Artificial Sequence
  Description of Artificial Sequence: Synthetic oligonucleotide
  X-linked inhibitor of apoptosis (XIAP) siRNA
tattccttttctgtataaagttc

SEQ ID NO: 14696 - DNA, 23 bp, Artificial Sequence
  Description of Artificial Sequence: Synthetic oligonucleotide
  X-linked inhibitor of apoptosis (XIAP) siRNA
attccttttctgtataaagttca

SEQ ID NO: 14697 - DNA, 23 bp, Artificial Sequence
  Description of Artificial Sequence: Synthetic oligonucleotide
  X-linked inhibitor of apoptosis (XIAP) siRNA
ttccttttctgtataaagttcac

SEQ ID NO: 14698 - DNA, 23 bp, Artificial Sequence
  Description of Artificial Sequence: Synthetic oligonucleotide
  X-linked inhibitor of apoptosis (XIAP) siRNA
tccttttctgtataaagttcact

SEQ ID NO: 14699 - DNA, 23 bp, Artificial Sequence
  Description of Artificial Sequence: Synthetic oligonucleotide
  X-linked inhibitor of apoptosis (XIAP) siRNA
ccttttctgtataaagttcactc

SEQ ID NO: 14700 - DNA, 23 bp, Artificial Sequence
  Description of Artificial Sequence: Synthetic oligonucleotide
  X-linked inhibitor of apoptosis (XIAP) siRNA
cttttctgtataaagttcactct

SEQ ID NO: 14701 - DNA, 23 bp, Artificial Sequence
  Description of Artificial Sequence: Synthetic oligonucleotide
  X-linked inhibitor of apoptosis (XIAP) siRNA
ttttctgtataaagttcactcta

SEQ ID NO: 14702 - DNA, 23 bp, Artificial Sequence
  Description of Artificial Sequence: Synthetic oligonucleotide
  X-linked inhibitor of apoptosis (XIAP) siRNA
tttctgtataaagttcactctag

SEQ ID NO: 14703 - DNA, 23 bp, Artificial Sequence
  Description of Artificial Sequence: Synthetic oligonucleotide
  X-linked inhibitor of apoptosis (XIAP) siRNA
ttctgtataaagttcactctagg

SEQ ID NO: 14704 - DNA, 23 bp, Artificial Sequence
  Description of Artificial Sequence: Synthetic oligonucleotide
  X-linked inhibitor of apoptosis (XIAP) siRNA
tctgtataaagttcactctagga

SEQ ID NO: 14705 - DNA, 23 bp, Artificial Sequence
  Description of Artificial Sequence: Synthetic oligonucleotide
  X-linked inhibitor of apoptosis (XIAP) siRNA
ctgtataaagttcactctaggat

SEQ ID NO: 14706 - DNA, 23 bp, Artificial Sequence
  Description of Artificial Sequence: Synthetic oligonucleotide
  X-linked inhibitor of apoptosis (XIAP) siRNA
tgtataaagttcactctaggatt

SEQ ID NO: 14707 - DNA, 23 bp, Artificial Sequence
  Description of Artificial Sequence: Synthetic oligonucleotide
  X-linked inhibitor of apoptosis (XIAP) siRNA
gtataaagttcactctaggattt

SEQ ID NO: 14708 - DNA, 23 bp, Artificial Sequence
  Description of Artificial Sequence: Synthetic oligonucleotide
  X-linked inhibitor of apoptosis (XIAP) siRNA
tataaagttcactctaggatttc

SEQ ID NO: 14709 - DNA, 23 bp, Artificial Sequence
  Description of Artificial Sequence: Synthetic oligonucleotide
  X-linked inhibitor of apoptosis (XIAP) siRNA
ataaagttcactctaggatttca

SEQ ID NO: 14710 - DNA, 23 bp, Artificial Sequence
  Description of Artificial Sequence: Synthetic oligonucleotide
  X-linked inhibitor of apoptosis (XIAP) siRNA
taaagttcactctaggatttcaa

SEQ ID NO: 14711 - DNA, 23 bp, Artificial Sequence
  Description of Artificial Sequence: Synthetic oligonucleotide
  X-linked inhibitor of apoptosis (XIAP) siRNA
aaagttcactctaggatttcaag

SEQ ID NO: 14712 - DNA, 23 bp, Artificial Sequence
  Description of Artificial Sequence: Synthetic oligonucleotide
  X-linked inhibitor of apoptosis (XIAP) siRNA
aagttcactctaggatttcaagt

SEQ ID NO: 14713 - DNA, 23 bp, Artificial Sequence
  Description of Artificial Sequence: Synthetic oligonucleotide
  X-linked inhibitor of apoptosis (XIAP) siRNA
agttcactctaggatttcaagtc

SEQ ID NO: 14714 - DNA, 23 bp, Artificial Sequence
  Description of Artificial Sequence: Synthetic oligonucleotide
  X-linked inhibitor of apoptosis (XIAP) siRNA
gttcactctaggatttcaagtca

SEQ ID NO: 14715 - DNA, 23 bp, Artificial Sequence
  Description of Artificial Sequence: Synthetic oligonucleotide
  X-linked inhibitor of apoptosis (XIAP) siRNA
ttcactctaggatttcaagtcac

SEQ ID NO: 14716 - DNA, 23 bp, Artificial Sequence
  Description of Artificial Sequence: Synthetic oligonucleotide
  X-linked inhibitor of apoptosis (XIAP) siRNA
tcactctaggatttcaagtcacc

SEQ ID NO: 14717 - DNA, 23 bp, Artificial Sequence
  Description of Artificial Sequence: Synthetic oligonucleotide
  X-linked inhibitor of apoptosis (XIAP) siRNA
cactctaggatttcaagtcacca

SEQ ID NO: 14718 - DNA, 23 bp, Artificial Sequence
  Description of Artificial Sequence: Synthetic oligonucleotide
  X-linked inhibitor of apoptosis (XIAP) siRNA
actctaggatttcaagtcaccac

SEQ ID NO: 14719 - DNA, 23 bp, Artificial Sequence
  Description of Artificial Sequence: Synthetic oligonucleotide
  X-linked inhibitor of apoptosis (XIAP) siRNA
ctctaggatttcaagtcaccact

SEQ ID NO: 14720 - DNA, 23 bp, Artificial Sequence
  Description of Artificial Sequence: Synthetic oligonucleotide
  X-linked inhibitor of apoptosis (XIAP) siRNA
tctaggatttcaagtcaccactt

SEQ ID NO: 14721 - DNA, 23 bp, Artificial Sequence
  Description of Artificial Sequence: Synthetic oligonucleotide
  X-linked inhibitor of apoptosis (XIAP) siRNA
ctaggatttcaagtcaccactta

SEQ ID NO: 14722 - DNA, 23 bp, Artificial Sequence
  Description of Artificial Sequence: Synthetic oligonucleotide
  X-linked inhibitor of apoptosis (XIAP) siRNA
taggatttcaagtcaccacttat

SEQ ID NO: 14723 - DNA, 23 bp, Artificial Sequence
  Description of Artificial Sequence: Synthetic oligonucleotide
  X-linked inhibitor of apoptosis (XIAP) siRNA
aggatttcaagtcaccacttatt

SEQ ID NO: 14724 - DNA, 23 bp, Artificial Sequence
  Description of Artificial Sequence: Synthetic oligonucleotide
  X-linked inhibitor of apoptosis (XIAP) siRNA
ggatttcaagtcaccacttattt

SEQ ID NO: 14725 - DNA, 23 bp, Artificial Sequence
  Description of Artificial Sequence: Synthetic oligonucleotide
  X-linked inhibitor of apoptosis (XIAP) siRNA
gatttcaagtcaccacttatttt

SEQ ID NO: 14726 - DNA, 23 bp, Artificial Sequence
  Description of Artificial Sequence: Synthetic oligonucleotide
  X-linked inhibitor of apoptosis (XIAP) siRNA
atttcaagtcaccacttatttta

SEQ ID NO: 14727 - DNA, 23 bp, Artificial Sequence
  Description of Artificial Sequence: Synthetic oligonucleotide
  X-linked inhibitor of apoptosis (XIAP) siRNA
tttcaagtcaccacttattttac

SEQ ID NO: 14728 - DNA, 23 bp, Artificial Sequence
  Description of Artificial Sequence: Synthetic oligonucleotide
  X-linked inhibitor of apoptosis (XIAP) siRNA
ttcaagtcaccacttattttaca

SEQ ID NO: 14729 - DNA, 23 bp, Artificial Sequence
  Description of Artificial Sequence: Synthetic oligonucleotide
  X-linked inhibitor of apoptosis (XIAP) siRNA
tcaagtcaccacttattttacat

SEQ ID NO: 14730 - DNA, 23 bp, Artificial Sequence
  Description of Artificial Sequence: Synthetic oligonucleotide
  X-linked inhibitor of apoptosis (XIAP) siRNA
caagtcaccacttattttacatt

SEQ ID NO: 14731 - DNA, 23 bp, Artificial Sequence
  Description of Artificial Sequence: Synthetic oligonucleotide
  X-linked inhibitor of apoptosis (XIAP) siRNA
aagtcaccacttattttacattt

SEQ ID NO: 14732 - DNA, 23 bp, Artificial Sequence
  Description of Artificial Sequence: Synthetic oligonucleotide
  X-linked inhibitor of apoptosis (XIAP) siRNA
agtcaccacttattttacatttt

SEQ ID NO: 14733 - DNA, 23 bp, Artificial Sequence
  Description of Artificial Sequence: Synthetic oligonucleotide
  X-linked inhibitor of apoptosis (XIAP) siRNA
gtcaccacttattttacatttta

SEQ ID NO: 14734 - DNA, 23 bp, Artificial Sequence
  Description of Artificial Sequence: Synthetic oligonucleotide
  X-linked inhibitor of apoptosis (XIAP) siRNA
tcaccacttattttacattttag

SEQ ID NO: 14735 - DNA, 23 bp, Artificial Sequence
  Description of Artificial Sequence: Synthetic oligonucleotide
  X-linked inhibitor of apoptosis (XIAP) siRNA
caccacttattttacattttagt

SEQ ID NO: 14736 - DNA, 23 bp, Artificial Sequence
  Description of Artificial Sequence: Synthetic oligonucleotide
  X-linked inhibitor of apoptosis (XIAP) siRNA
accacttattttacattttagtc

SEQ ID NO: 14737 - DNA, 23 bp, Artificial Sequence
  Description of Artificial Sequence: Synthetic oligonucleotide
  X-linked inhibitor of apoptosis (XIAP) siRNA
ccacttattttacattttagtca

SEQ ID NO: 14738 - DNA, 23 bp, Artificial Sequence
  Description of Artificial Sequence: Synthetic oligonucleotide
  X-linked inhibitor of apoptosis (XIAP) siRNA
cacttattttacattttagtcat

SEQ ID NO: 14739 - DNA, 23 bp, Artificial Sequence
  Description of Artificial Sequence: Synthetic oligonucleotide
  X-linked inhibitor of apoptosis (XIAP) siRNA
acttattttacattttagtcatg

SEQ ID NO: 14740 - DNA, 23 bp, Artificial Sequence
  Description of Artificial Sequence: Synthetic oligonucleotide
  X-linked inhibitor of apoptosis (XIAP) siRNA
cttattttacattttagtcatgc

SEQ ID NO: 14741 - DNA, 23 bp, Artificial Sequence
  Description of Artificial Sequence: Synthetic oligonucleotide
  X-linked inhibitor of apoptosis (XIAP) siRNA
ttattttacattttagtcatgca

SEQ ID NO: 14742 - DNA, 23 bp, Artificial Sequence
  Description of Artificial Sequence: Synthetic oligonucleotide
  X-linked inhibitor of apoptosis (XIAP) siRNA
tattttacattttagtcatgcaa

SEQ ID NO: 14743 - DNA, 23 bp, Artificial Sequence
  Description of Artificial Sequence: Synthetic oligonucleotide
  X-linked inhibitor of apoptosis (XIAP) siRNA
attttacattttagtcatgcaaa

SEQ ID NO: 14744 - DNA, 23 bp, Artificial Sequence
  Description of Artificial Sequence: Synthetic oligonucleotide
  X-linked inhibitor of apoptosis (XIAP) siRNA
ttttacattttagtcatgcaaag

SEQ ID NO: 14745 - DNA, 23 bp, Artificial Sequence
  Description of Artificial Sequence: Synthetic oligonucleotide
  X-linked inhibitor of apoptosis (XIAP) siRNA
tttacattttagtcatgcaaaga

SEQ ID NO: 14746 - DNA, 23 bp, Artificial Sequence
  Description of Artificial Sequence: Synthetic oligonucleotide
  X-linked inhibitor of apoptosis (XIAP) siRNA
ttacattttagtcatgcaaagat

SEQ ID NO: 14747 - DNA, 23 bp, Artificial Sequence
  Description of Artificial Sequence: Synthetic oligonucleotide
  X-linked inhibitor of apoptosis (XIAP) siRNA
tacattttagtcatgcaaagatt

SEQ ID NO: 14748 - DNA, 23 bp, Artificial Sequence
  Description of Artificial Sequence: Synthetic oligonucleotide
  X-linked inhibitor of apoptosis (XIAP) siRNA
acattttagtcatgcaaagattc

SEQ ID NO: 14749 - DNA, 23 bp, Artificial Sequence
  Description of Artificial Sequence: Synthetic oligonucleotide
  X-linked inhibitor of apoptosis (XIAP) siRNA
cattttagtcatgcaaagattca

SEQ ID NO: 14750 - DNA, 23 bp, Artificial Sequence
  Description of Artificial Sequence: Synthetic oligonucleotide
  X-linked inhibitor of apoptosis (XIAP) siRNA
attttagtcatgcaaagattcaa

SEQ ID NO: 14751 - DNA, 23 bp, Artificial Sequence
  Description of Artificial Sequence: Synthetic oligonucleotide
  X-linked inhibitor of apoptosis (XIAP) siRNA
ttttagtcatgcaaagattcaag

SEQ ID NO: 14752 - DNA, 23 bp, Artificial Sequence
  Description of Artificial Sequence: Synthetic oligonucleotide
  X-linked inhibitor of apoptosis (XIAP) siRNA
tttagtcatgcaaagattcaagt

SEQ ID NO: 14753 - DNA, 23 bp, Artificial Sequence
  Description of Artificial Sequence: Synthetic oligonucleotide
  X-linked inhibitor of apoptosis (XIAP) siRNA
ttagtcatgcaaagattcaagta

SEQ ID NO: 14754 - DNA, 23 bp, Artificial Sequence
  Description of Artificial Sequence: Synthetic oligonucleotide
  X-linked inhibitor of apoptosis (XIAP) siRNA
tagtcatgcaaagattcaagtag

SEQ ID NO: 14755 - DNA, 23 bp, Artificial Sequence
  Description of Artificial Sequence: Synthetic oligonucleotide
  X-linked inhibitor of apoptosis (XIAP) siRNA
agtcatgcaaagattcaagtagt

SEQ ID NO: 14756 - DNA, 23 bp, Artificial Sequence
  Description of Artificial Sequence: Synthetic oligonucleotide
  X-linked inhibitor of apoptosis (XIAP) siRNA
gtcatgcaaagattcaagtagtt

SEQ ID NO: 14757 - DNA, 23 bp, Artificial Sequence
  Description of Artificial Sequence: Synthetic oligonucleotide
  X-linked inhibitor of apoptosis (XIAP) siRNA
tcatgcaaagattcaagtagttt

SEQ ID NO: 14758 - DNA, 23 bp, Artificial Sequence
  Description of Artificial Sequence: Synthetic oligonucleotide
  X-linked inhibitor of apoptosis (XIAP) siRNA
catgcaaagattcaagtagtttt

SEQ ID NO: 14759 - DNA, 23 bp, Artificial Sequence
  Description of Artificial Sequence: Synthetic oligonucleotide
  X-linked inhibitor of apoptosis (XIAP) siRNA
atgcaaagattcaagtagttttg

SEQ ID NO: 14760 - DNA, 23 bp, Artificial Sequence
  Description of Artificial Sequence: Synthetic oligonucleotide
  X-linked inhibitor of apoptosis (XIAP) siRNA
tgcaaagattcaagtagttttgc

SEQ ID NO: 14761 - DNA, 23 bp, Artificial Sequence
  Description of Artificial Sequence: Synthetic oligonucleotide
  X-linked inhibitor of apoptosis (XIAP) siRNA
gcaaagattcaagtagttttgca

SEQ ID NO: 14762 - DNA, 23 bp, Artificial Sequence
  Description of Artificial Sequence: Synthetic oligonucleotide
  X-linked inhibitor of apoptosis (XIAP) siRNA
caaagattcaagtagttttgcaa

SEQ ID NO: 14763 - DNA, 23 bp, Artificial Sequence
  Description of Artificial Sequence: Synthetic oligonucleotide
  X-linked inhibitor of apoptosis (XIAP) siRNA
aaagattcaagtagttttgcaat

SEQ ID NO: 14764 - DNA, 23 bp, Artificial Sequence
  Description of Artificial Sequence: Synthetic oligonucleotide
  X-linked inhibitor of apoptosis (XIAP) siRNA
aagattcaagtagttttgcaata

SEQ ID NO: 14765 - DNA, 23 bp, Artificial Sequence
  Description of Artificial Sequence: Synthetic oligonucleotide
  X-linked inhibitor of apoptosis (XIAP) siRNA
agattcaagtagttttgcaataa

SEQ ID NO: 14766 - DNA, 23 bp, Artificial Sequence
  Description of Artificial Sequence: Synthetic oligonucleotide
  X-linked inhibitor of apoptosis (XIAP) siRNA
gattcaagtagttttgcaataag

SEQ ID NO: 14767 - DNA, 23 bp, Artificial Sequence
  Description of Artificial Sequence: Synthetic oligonucleotide
  X-linked inhibitor of apoptosis (XIAP) siRNA
attcaagtagttttgcaataagt

SEQ ID NO: 14768 - DNA, 23 bp, Artificial Sequence
  Description of Artificial Sequence: Synthetic oligonucleotide
  X-linked inhibitor of apoptosis (XIAP) siRNA
ttcaagtagttttgcaataagta

SEQ ID NO: 14769 - DNA, 23 bp, Artificial Sequence
  Description of Artificial Sequence: Synthetic oligonucleotide
  X-linked inhibitor of apoptosis (XIAP) siRNA
tcaagtagttttgcaataagtac

SEQ ID NO: 14770 - DNA, 23 bp, Artificial Sequence
  Description of Artificial Sequence: Synthetic oligonucleotide
  X-linked inhibitor of apoptosis (XIAP) siRNA
caagtagttttgcaataagtact

SEQ ID NO: 14771 - DNA, 23 bp, Artificial Sequence
  Description of Artificial Sequence: Synthetic oligonucleotide
  X-linked inhibitor of apoptosis (XIAP) siRNA
aagtagttttgcaataagtactt

SEQ ID NO: 14772 - DNA, 23 bp, Artificial Sequence
  Description of Artificial Sequence: Synthetic oligonucleotide
  X-linked inhibitor of apoptosis (XIAP) siRNA
agtagttttgcaataagtactta

SEQ ID NO: 14773 - DNA, 23 bp, Artificial Sequence
  Description of Artificial Sequence: Synthetic oligonucleotide
  X-linked inhibitor of apoptosis (XIAP) siRNA
gtagttttgcaataagtacttat

SEQ ID NO: 14774 - DNA, 23 bp, Artificial Sequence
  Description of Artificial Sequence: Synthetic oligonucleotide
  X-linked inhibitor of apoptosis (XIAP) siRNA
tagttttgcaataagtacttatc

SEQ ID NO: 14775 - DNA, 23 bp, Artificial Sequence
  Description of Artificial Sequence: Synthetic oligonucleotide
  X-linked inhibitor of apoptosis (XIAP) siRNA
agttttgcaataagtacttatct

SEQ ID NO: 14776 - DNA, 23 bp, Artificial Sequence
  Description of Artificial Sequence: Synthetic oligonucleotide
  X-linked inhibitor of apoptosis (XIAP) siRNA
gttttgcaataagtacttatctt

SEQ ID NO: 14777 - DNA, 23 bp, Artificial Sequence
  Description of Artificial Sequence: Synthetic oligonucleotide
  X-linked inhibitor of apoptosis (XIAP) siRNA
ttttgcaataagtacttatcttt

SEQ ID NO: 14778 - DNA, 23 bp, Artificial Sequence
  Description of Artificial Sequence: Synthetic oligonucleotide
  X-linked inhibitor of apoptosis (XIAP) siRNA
tttgcaataagtacttatcttta

SEQ ID NO: 14779 - DNA, 23 bp, Artificial Sequence
  Description of Artificial Sequence: Synthetic oligonucleotide
  X-linked inhibitor of apoptosis (XIAP) siRNA
ttgcaataagtacttatctttat

SEQ ID NO: 14780 - DNA, 23 bp, Artificial Sequence
  Description of Artificial Sequence: Synthetic oligonucleotide
  X-linked inhibitor of apoptosis (XIAP) siRNA
tgcaataagtacttatctttatt

SEQ ID NO: 14781 - DNA, 23 bp, Artificial Sequence
  Description of Artificial Sequence: Synthetic oligonucleotide
  X-linked inhibitor of apoptosis (XIAP) siRNA
gcaataagtacttatctttattt

SEQ ID NO: 14782 - DNA, 23 bp, Artificial Sequence
  Description of Artificial Sequence: Synthetic oligonucleotide
  X-linked inhibitor of apoptosis (XIAP) siRNA
caataagtacttatctttatttg

SEQ ID NO: 14783 - DNA, 23 bp, Artificial Sequence
  Description of Artificial Sequence: Synthetic oligonucleotide
  X-linked inhibitor of apoptosis (XIAP) siRNA
aataagtacttatctttatttgt

SEQ ID NO: 14784 - DNA, 23 bp, Artificial Sequence
  Description of Artificial Sequence: Synthetic oligonucleotide
  X-linked inhibitor of apoptosis (XIAP) siRNA
ataagtacttatctttatttgta

SEQ ID NO: 14785 - DNA, 23 bp, Artificial Sequence
  Description of Artificial Sequence: Synthetic oligonucleotide
  X-linked inhibitor of apoptosis (XIAP) siRNA
taagtacttatctttatttgtaa

SEQ ID NO: 14786 - DNA, 23 bp, Artificial Sequence
  Description of Artificial Sequence: Synthetic oligonucleotide
  X-linked inhibitor of apoptosis (XIAP) siRNA
aagtacttatctttatttgtaat

SEQ ID NO: 14787 - DNA, 23 bp, Artificial Sequence
  Description of Artificial Sequence: Synthetic oligonucleotide
  X-linked inhibitor of apoptosis (XIAP) siRNA
agtacttatctttatttgtaata

SEQ ID NO: 14788 - DNA, 23 bp, Artificial Sequence
  Description of Artificial Sequence: Synthetic oligonucleotide
  X-linked inhibitor of apoptosis (XIAP) siRNA
gtacttatctttatttgtaataa

SEQ ID NO: 14789 - DNA, 23 bp, Artificial Sequence
  Description of Artificial Sequence: Synthetic oligonucleotide
  X-linked inhibitor of apoptosis (XIAP) siRNA
tacttatctttatttgtaataat

SEQ ID NO: 14790 - DNA, 23 bp, Artificial Sequence
  Description of Artificial Sequence: Synthetic oligonucleotide
  X-linked inhibitor of apoptosis (XIAP) siRNA
acttatctttatttgtaataatt

SEQ ID NO: 14791 - DNA, 23 bp, Artificial Sequence
  Description of Artificial Sequence: Synthetic oligonucleotide
  X-linked inhibitor of apoptosis (XIAP) siRNA
cttatctttatttgtaataattt

SEQ ID NO: 14792 - DNA, 23 bp, Artificial Sequence
  Description of Artificial Sequence: Synthetic oligonucleotide
  X-linked inhibitor of apoptosis (XIAP) siRNA
ttatctttatttgtaataattta

SEQ ID NO: 14793 - DNA, 23 bp, Artificial Sequence
  Description of Artificial Sequence: Synthetic oligonucleotide
  X-linked inhibitor of apoptosis (XIAP) siRNA
tatctttatttgtaataatttag

SEQ ID NO: 14794 - DNA, 23 bp, Artificial Sequence
  Description of Artificial Sequence: Synthetic oligonucleotide
  X-linked inhibitor of apoptosis (XIAP) siRNA
atctttatttgtaataatttagt

SEQ ID NO: 14795 - DNA, 23 bp, Artificial Sequence
  Description of Artificial Sequence: Synthetic oligonucleotide
  X-linked inhibitor of apoptosis (XIAP) siRNA
tctttatttgtaataatttagtc

SEQ ID NO: 14796 - DNA, 23 bp, Artificial Sequence
  Description of Artificial Sequence: Synthetic oligonucleotide
  X-linked inhibitor of apoptosis (XIAP) siRNA
ctttatttgtaataatttagtct

SEQ ID NO: 14797 - DNA, 23 bp, Artificial Sequence
  Description of Artificial Sequence: Synthetic oligonucleotide
  X-linked inhibitor of apoptosis (XIAP) siRNA
tttatttgtaataatttagtctg

SEQ ID NO: 14798 - DNA, 23 bp, Artificial Sequence
  Description of Artificial Sequence: Synthetic oligonucleotide
  X-linked inhibitor of apoptosis (XIAP) siRNA
ttatttgtaataatttagtctgc

SEQ ID NO: 14799 - DNA, 23 bp, Artificial Sequence
  Description of Artificial Sequence: Synthetic oligonucleotide
  X-linked inhibitor of apoptosis (XIAP) siRNA
tatttgtaataatttagtctgct

SEQ ID NO: 14800 - DNA, 23 bp, Artificial Sequence
  Description of Artificial Sequence: Synthetic oligonucleotide
  X-linked inhibitor of apoptosis (XIAP) siRNA
atttgtaataatttagtctgctg

SEQ ID NO: 14801 - DNA, 23 bp, Artificial Sequence
  Description of Artificial Sequence: Synthetic oligonucleotide
  X-linked inhibitor of apoptosis (XIAP) siRNA
tttgtaataatttagtctgctga

SEQ ID NO: 14802 - DNA, 23 bp, Artificial Sequence
  Description of Artificial Sequence: Synthetic oligonucleotide
  X-linked inhibitor of apoptosis (XIAP) siRNA
ttgtaataatttagtctgctgat

SEQ ID NO: 14803 - DNA, 23 bp, Artificial Sequence
  Description of Artificial Sequence: Synthetic oligonucleotide
  X-linked inhibitor of apoptosis (XIAP) siRNA
tgtaataatttagtctgctgatc

SEQ ID NO: 14804 - DNA, 23 bp, Artificial Sequence
  Description of Artificial Sequence: Synthetic oligonucleotide
  X-linked inhibitor of apoptosis (XIAP) siRNA
gtaataatttagtctgctgatca

SEQ ID NO: 14805 - DNA, 23 bp, Artificial Sequence
  Description of Artificial Sequence: Synthetic oligonucleotide
  X-linked inhibitor of apoptosis (XIAP) siRNA
taataatttagtctgctgatcaa

SEQ ID NO: 14806 - DNA, 23 bp, Artificial Sequence
  Description of Artificial Sequence: Synthetic oligonucleotide
  X-linked inhibitor of apoptosis (XIAP) siRNA
aataatttagtctgctgatcaaa

SEQ ID NO: 14807 - DNA, 23 bp, Artificial Sequence
  Description of Artificial Sequence: Synthetic oligonucleotide
  X-linked inhibitor of apoptosis (XIAP) siRNA
ataatttagtctgctgatcaaaa

SEQ ID NO: 14808 - DNA, 23 bp, Artificial Sequence
  Description of Artificial Sequence: Synthetic oligonucleotide
  X-linked inhibitor of apoptosis (XIAP) siRNA
taatttagtctgctgatcaaaag

SEQ ID NO: 14809 - DNA, 23 bp, Artificial Sequence
  Description of Artificial Sequence: Synthetic oligonucleotide
  X-linked inhibitor of apoptosis (XIAP) siRNA
aatttagtctgctgatcaaaagc

SEQ ID NO: 14810 - DNA, 23 bp, Artificial Sequence
  Description of Artificial Sequence: Synthetic oligonucleotide
  X-linked inhibitor of apoptosis (XIAP) siRNA
atttagtctgctgatcaaaagca

SEQ ID NO: 14811 - DNA, 23 bp, Artificial Sequence
  Description of Artificial Sequence: Synthetic oligonucleotide
  X-linked inhibitor of apoptosis (XIAP) siRNA
tttagtctgctgatcaaaagcat

SEQ ID NO: 14812 - DNA, 23 bp, Artificial Sequence
  Description of Artificial Sequence: Synthetic oligonucleotide
  X-linked inhibitor of apoptosis (XIAP) siRNA
ttagtctgctgatcaaaagcatt

SEQ ID NO: 14813 - DNA, 23 bp, Artificial Sequence
  Description of Artificial Sequence: Synthetic oligonucleotide
  X-linked inhibitor of apoptosis (XIAP) siRNA
tagtctgctgatcaaaagcattg

SEQ ID NO: 14814 - DNA, 23 bp, Artificial Sequence
  Description of Artificial Sequence: Synthetic oligonucleotide
  X-linked inhibitor of apoptosis (XIAP) siRNA
agtctgctgatcaaaagcattgt

SEQ ID NO: 14815 - DNA, 23 bp, Artificial Sequence
  Description of Artificial Sequence: Synthetic oligonucleotide
  X-linked inhibitor of apoptosis (XIAP) siRNA
gtctgctgatcaaaagcattgtc

SEQ ID NO: 14816 - DNA, 23 bp, Artificial Sequence
  Description of Artificial Sequence: Synthetic oligonucleotide
  X-linked inhibitor of apoptosis (XIAP) siRNA
tctgctgatcaaaagcattgtct

SEQ ID NO: 14817 - DNA, 23 bp, Artificial Sequence
  Description of Artificial Sequence: Synthetic oligonucleotide
  X-linked inhibitor of apoptosis (XIAP) siRNA
ctgctgatcaaaagcattgtctt

SEQ ID NO: 14818 - DNA, 23 bp, Artificial Sequence
  Description of Artificial Sequence: Synthetic oligonucleotide
  X-linked inhibitor of apoptosis (XIAP) siRNA
tgctgatcaaaagcattgtctta

SEQ ID NO: 14819 - DNA, 23 bp, Artificial Sequence
  Description of Artificial Sequence: Synthetic oligonucleotide
  X-linked inhibitor of apoptosis (XIAP) siRNA
gctgatcaaaagcattgtcttaa

SEQ ID NO: 14820 - DNA, 23 bp, Artificial Sequence
  Description of Artificial Sequence: Synthetic oligonucleotide
  X-linked inhibitor of apoptosis (XIAP) siRNA
ctgatcaaaagcattgtcttaat

SEQ ID NO: 14821 - DNA, 23 bp, Artificial Sequence
  Description of Artificial Sequence: Synthetic oligonucleotide
  X-linked inhibitor of apoptosis (XIAP) siRNA
tgatcaaaagcattgtcttaatt

SEQ ID NO: 14822 - DNA, 23 bp, Artificial Sequence
  Description of Artificial Sequence: Synthetic oligonucleotide
  X-linked inhibitor of apoptosis (XIAP) siRNA
gatcaaaagcattgtcttaattt

SEQ ID NO: 14823 - DNA, 23 bp, Artificial Sequence
  Description of Artificial Sequence: Synthetic oligonucleotide
  X-linked inhibitor of apoptosis (XIAP) siRNA
atcaaaagcattgtcttaatttt

SEQ ID NO: 14824 - DNA, 23 bp, Artificial Sequence
  Description of Artificial Sequence: Synthetic oligonucleotide
  X-linked inhibitor of apoptosis (XIAP) siRNA
tcaaaagcattgtcttaattttt

SEQ ID NO: 14825 - DNA, 23 bp, Artificial Sequence
  Description of Artificial Sequence: Synthetic oligonucleotide
  X-linked inhibitor of apoptosis (XIAP) siRNA
caaaagcattgtcttaatttttg

SEQ ID NO: 14826 - DNA, 23 bp, Artificial Sequence
  Description of Artificial Sequence: Synthetic oligonucleotide
  X-linked inhibitor of apoptosis (XIAP) siRNA
aaaagcattgtcttaatttttga

SEQ ID NO: 14827 - DNA, 23 bp, Artificial Sequence
  Description of Artificial Sequence: Synthetic oligonucleotide
  X-linked inhibitor of apoptosis (XIAP) siRNA
aaagcattgtcttaatttttgag

SEQ ID NO: 14828 - DNA, 23 bp, Artificial Sequence
  Description of Artificial Sequence: Synthetic oligonucleotide
  X-linked inhibitor of apoptosis (XIAP) siRNA
aagcattgtcttaatttttgaga

SEQ ID NO: 14829 - DNA, 23 bp, Artificial Sequence
  Description of Artificial Sequence: Synthetic oligonucleotide
  X-linked inhibitor of apoptosis (XIAP) siRNA
agcattgtcttaatttttgagaa

SEQ ID NO: 14830 - DNA, 23 bp, Artificial Sequence
  Description of Artificial Sequence: Synthetic oligonucleotide
  X-linked inhibitor of apoptosis (XIAP) siRNA
gcattgtcttaatttttgagaac

SEQ ID NO: 14831 - DNA, 23 bp, Artificial Sequence
  Description of Artificial Sequence: Synthetic oligonucleotide
  X-linked inhibitor of apoptosis (XIAP) siRNA
cattgtcttaatttttgagaact

SEQ ID NO: 14832 - DNA, 23 bp, Artificial Sequence
  Description of Artificial Sequence: Synthetic oligonucleotide
  X-linked inhibitor of apoptosis (XIAP) siRNA
attgtcttaatttttgagaactg

SEQ ID NO: 14833 - DNA, 23 bp, Artificial Sequence
  Description of Artificial Sequence: Synthetic oligonucleotide
  X-linked inhibitor of apoptosis (XIAP) siRNA
ttgtcttaatttttgagaactgg

SEQ ID NO: 14834 - DNA, 23 bp, Artificial Sequence
  Description of Artificial Sequence: Synthetic oligonucleotide
  X-linked inhibitor of apoptosis (XIAP) siRNA
tgtcttaatttttgagaactggt

SEQ ID NO: 14835 - DNA, 23 bp, Artificial Sequence
  Description of Artificial Sequence: Synthetic oligonucleotide
  X-linked inhibitor of apoptosis (XIAP) siRNA
gtcttaatttttgagaactggtt

SEQ ID NO: 14836 - DNA, 23 bp, Artificial Sequence
  Description of Artificial Sequence: Synthetic oligonucleotide
  X-linked inhibitor of apoptosis (XIAP) siRNA
tcttaatttttgagaactggttt

SEQ ID NO: 14837 - DNA, 23 bp, Artificial Sequence
  Description of Artificial Sequence: Synthetic oligonucleotide
  X-linked inhibitor of apoptosis (XIAP) siRNA
cttaatttttgagaactggtttt

SEQ ID NO: 14838 - DNA, 23 bp, Artificial Sequence
  Description of Artificial Sequence: Synthetic oligonucleotide
  X-linked inhibitor of apoptosis (XIAP) siRNA
ttaatttttgagaactggtttta

SEQ ID NO: 14839 - DNA, 23 bp, Artificial Sequence
  Description of Artificial Sequence: Synthetic oligonucleotide
  X-linked inhibitor of apoptosis (XIAP) siRNA
taatttttgagaactggttttag

SEQ ID NO: 14840 - DNA, 23 bp, Artificial Sequence
  Description of Artificial Sequence: Synthetic oligonucleotide
  X-linked inhibitor of apoptosis (XIAP) siRNA
aatttttgagaactggttttagc

SEQ ID NO: 14841 - DNA, 23 bp, Artificial Sequence
  Description of Artificial Sequence: Synthetic oligonucleotide
  X-linked inhibitor of apoptosis (XIAP) siRNA
atttttgagaactggttttagca

SEQ ID NO: 14842 - DNA, 23 bp, Artificial Sequence
  Description of Artificial Sequence: Synthetic oligonucleotide
  X-linked inhibitor of apoptosis (XIAP) siRNA
tttttgagaactggttttagcat

SEQ ID NO: 14843 - DNA, 23 bp, Artificial Sequence
  Description of Artificial Sequence: Synthetic oligonucleotide
  X-linked inhibitor of apoptosis (XIAP) siRNA
ttttgagaactggttttagcatt

SEQ ID NO: 14844 - DNA, 23 bp, Artificial Sequence
  Description of Artificial Sequence: Synthetic oligonucleotide
  X-linked inhibitor of apoptosis (XIAP) siRNA
tttgagaactggttttagcattt

SEQ ID NO: 14845 - DNA, 23 bp, Artificial Sequence
  Description of Artificial Sequence: Synthetic oligonucleotide
  X-linked inhibitor of apoptosis (XIAP) siRNA
ttgagaactggttttagcattta

SEQ ID NO: 14846 - DNA, 23 bp, Artificial Sequence
  Description of Artificial Sequence: Synthetic oligonucleotide
  X-linked inhibitor of apoptosis (XIAP) siRNA
tgagaactggttttagcatttac

SEQ ID NO: 14847 - DNA, 23 bp, Artificial Sequence
  Description of Artificial Sequence: Synthetic oligonucleotide
  X-linked inhibitor of apoptosis (XIAP) siRNA
gagaactggttttagcatttaca

SEQ ID NO: 14848 - DNA, 23 bp, Artificial Sequence
  Description of Artificial Sequence: Synthetic oligonucleotide
  X-linked inhibitor of apoptosis (XIAP) siRNA
agaactggttttagcatttacaa

SEQ ID NO: 14849 - DNA, 23 bp, Artificial Sequence
  Description of Artificial Sequence: Synthetic oligonucleotide
  X-linked inhibitor of apoptosis (XIAP) siRNA
gaactggttttagcatttacaaa

SEQ ID NO: 14850 - DNA, 23 bp, Artificial Sequence
  Description of Artificial Sequence: Synthetic oligonucleotide
  X-linked inhibitor of apoptosis (XIAP) siRNA
aactggttttagcatttacaaac

SEQ ID NO: 14851 - DNA, 23 bp, Artificial Sequence
  Description of Artificial Sequence: Synthetic oligonucleotide
  X-linked inhibitor of apoptosis (XIAP) siRNA
actggttttagcatttacaaact

SEQ ID NO: 14852 - DNA, 23 bp, Artificial Sequence
  Description of Artificial Sequence: Synthetic oligonucleotide
  X-linked inhibitor of apoptosis (XIAP) siRNA
ctggttttagcatttacaaacta

SEQ ID NO: 14853 - DNA, 23 bp, Artificial Sequence
  Description of Artificial Sequence: Synthetic oligonucleotide
  X-linked inhibitor of apoptosis (XIAP) siRNA
tggttttagcatttacaaactaa

SEQ ID NO: 14854 - DNA, 23 bp, Artificial Sequence
  Description of Artificial Sequence: Synthetic oligonucleotide
  X-linked inhibitor of apoptosis (XIAP) siRNA
ggttttagcatttacaaactaaa

SEQ ID NO: 14855 - DNA, 23 bp, Artificial Sequence
  Description of Artificial Sequence: Synthetic oligonucleotide
  X-linked inhibitor of apoptosis (XIAP) siRNA
gttttagcatttacaaactaaat

SEQ ID NO: 14856 - DNA, 23 bp, Artificial Sequence
  Description of Artificial Sequence: Synthetic oligonucleotide
  X-linked inhibitor of apoptosis (XIAP) siRNA
ttttagcatttacaaactaaatt

SEQ ID NO: 14857 - DNA, 23 bp, Artificial Sequence
  Description of Artificial Sequence: Synthetic oligonucleotide
  X-linked inhibitor of apoptosis (XIAP) siRNA
tttagcatttacaaactaaattc

SEQ ID NO: 14858 - DNA, 23 bp, Artificial Sequence
  Description of Artificial Sequence: Synthetic oligonucleotide
  X-linked inhibitor of apoptosis (XIAP) siRNA
ttagcatttacaaactaaattcc

SEQ ID NO: 14859 - DNA, 23 bp, Artificial Sequence
  Description of Artificial Sequence: Synthetic oligonucleotide
  X-linked inhibitor of apoptosis (XIAP) siRNA
tagcatttacaaactaaattcca

SEQ ID NO: 14860 - DNA, 23 bp, Artificial Sequence
  Description of Artificial Sequence: Synthetic oligonucleotide
  X-linked inhibitor of apoptosis (XIAP) siRNA
agcatttacaaactaaattccag

SEQ ID NO: 14861 - DNA, 23 bp, Artificial Sequence
  Description of Artificial Sequence: Synthetic oligonucleotide
  X-linked inhibitor of apoptosis (XIAP) siRNA
gcatttacaaactaaattccagt

SEQ ID NO: 14862 - DNA, 23 bp, Artificial Sequence
  Description of Artificial Sequence: Synthetic oligonucleotide
  X-linked inhibitor of apoptosis (XIAP) siRNA
catttacaaactaaattccagtt

SEQ ID NO: 14863 - DNA, 23 bp, Artificial Sequence
  Description of Artificial Sequence: Synthetic oligonucleotide
  X-linked inhibitor of apoptosis (XIAP) siRNA
atttacaaactaaattccagtta

SEQ ID NO: 14864 - DNA, 23 bp, Artificial Sequence
  Description of Artificial Sequence: Synthetic oligonucleotide
  X-linked inhibitor of apoptosis (XIAP) siRNA
tttacaaactaaattccagttaa

SEQ ID NO: 14865 - DNA, 23 bp, Artificial Sequence
  Description of Artificial Sequence: Synthetic oligonucleotide
  X-linked inhibitor of apoptosis (XIAP) siRNA
ttacaaactaaattccagttaat

SEQ ID NO: 14866 - DNA, 23 bp, Artificial Sequence
  Description of Artificial Sequence: Synthetic oligonucleotide
  X-linked inhibitor of apoptosis (XIAP) siRNA
tacaaactaaattccagttaatt

SEQ ID NO: 14867 - DNA, 23 bp, Artificial Sequence
  Description of Artificial Sequence: Synthetic oligonucleotide
  X-linked inhibitor of apoptosis (XIAP) siRNA
acaaactaaattccagttaatta

SEQ ID NO: 14868 - DNA, 23 bp, Artificial Sequence
  Description of Artificial Sequence: Synthetic oligonucleotide
  X-linked inhibitor of apoptosis (XIAP) siRNA
caaactaaattccagttaattaa

SEQ ID NO: 14869 - DNA, 23 bp, Artificial Sequence
  Description of Artificial Sequence: Synthetic oligonucleotide
  X-linked inhibitor of apoptosis (XIAP) siRNA
aaactaaattccagttaattaat

SEQ ID NO: 14870 - DNA, 23 bp, Artificial Sequence
  Description of Artificial Sequence: Synthetic oligonucleotide
  X-linked inhibitor of apoptosis (XIAP) siRNA
aactaaattccagttaattaatt

SEQ ID NO: 14871 - DNA, 23 bp, Artificial Sequence
  Description of Artificial Sequence: Synthetic oligonucleotide
  X-linked inhibitor of apoptosis (XIAP) siRNA
actaaattccagttaattaatta

SEQ ID NO: 14872 - DNA, 23 bp, Artificial Sequence
  Description of Artificial Sequence: Synthetic oligonucleotide
  X-linked inhibitor of apoptosis (XIAP) siRNA
ctaaattccagttaattaattaa

SEQ ID NO: 14873 - DNA, 23 bp, Artificial Sequence
  Description of Artificial Sequence: Synthetic oligonucleotide
  X-linked inhibitor of apoptosis (XIAP) siRNA
taaattccagttaattaattaat

SEQ ID NO: 14874 - DNA, 23 bp, Artificial Sequence
  Description of Artificial Sequence: Synthetic oligonucleotide
  X-linked inhibitor of apoptosis (XIAP) siRNA
aaattccagttaattaattaata

SEQ ID NO: 14875 - DNA, 23 bp, Artificial Sequence
  Description of Artificial Sequence: Synthetic oligonucleotide
  X-linked inhibitor of apoptosis (XIAP) siRNA
aattccagttaattaattaatag

SEQ ID NO: 14876 - DNA, 23 bp, Artificial Sequence
  Description of Artificial Sequence: Synthetic oligonucleotide
  X-linked inhibitor of apoptosis (XIAP) siRNA
attccagttaattaattaatagc

SEQ ID NO: 14877 - DNA, 23 bp, Artificial Sequence
  Description of Artificial Sequence: Synthetic oligonucleotide
  X-linked inhibitor of apoptosis (XIAP) siRNA
ttccagttaattaattaatagct

SEQ ID NO: 14878 - DNA, 23 bp, Artificial Sequence
  Description of Artificial Sequence: Synthetic oligonucleotide
  X-linked inhibitor of apoptosis (XIAP) siRNA
tccagttaattaattaatagctt

SEQ ID NO: 14879 - DNA, 23 bp, Artificial Sequence
  Description of Artificial Sequence: Synthetic oligonucleotide
  X-linked inhibitor of apoptosis (XIAP) siRNA
ccagttaattaattaatagcttt

SEQ ID NO: 14880 - DNA, 23 bp, Artificial Sequence
  Description of Artificial Sequence: Synthetic oligonucleotide
  X-linked inhibitor of apoptosis (XIAP) siRNA
cagttaattaattaatagcttta

SEQ ID NO: 14881 - DNA, 23 bp, Artificial Sequence
  Description of Artificial Sequence: Synthetic oligonucleotide
  X-linked inhibitor of apoptosis (XIAP) siRNA
agttaattaattaatagctttat

SEQ ID NO: 14882 - DNA, 23 bp, Artificial Sequence
  Description of Artificial Sequence: Synthetic oligonucleotide
  X-linked inhibitor of apoptosis (XIAP) siRNA
gttaattaattaatagctttata

SEQ ID NO: 14883 - DNA, 23 bp, Artificial Sequence
  Description of Artificial Sequence: Synthetic oligonucleotide
  X-linked inhibitor of apoptosis (XIAP) siRNA
ttaattaattaatagctttatat

SEQ ID NO: 14884 - DNA, 23 bp, Artificial Sequence
  Description of Artificial Sequence: Synthetic oligonucleotide
  X-linked inhibitor of apoptosis (XIAP) siRNA
taattaattaatagctttatatt

SEQ ID NO: 14885 - DNA, 23 bp, Artificial Sequence
  Description of Artificial Sequence: Synthetic oligonucleotide
  X-linked inhibitor of apoptosis (XIAP) siRNA
aattaattaatagctttatattg

SEQ ID NO: 14886 - DNA, 23 bp, Artificial Sequence
  Description of Artificial Sequence: Synthetic oligonucleotide
  X-linked inhibitor of apoptosis (XIAP) siRNA
attaattaatagctttatattgc

SEQ ID NO: 14887 - DNA, 23 bp, Artificial Sequence
  Description of Artificial Sequence: Synthetic oligonucleotide
  X-linked inhibitor of apoptosis (XIAP) siRNA
ttaattaatagctttatattgcc

SEQ ID NO: 14888 - DNA, 23 bp, Artificial Sequence
  Description of Artificial Sequence: Synthetic oligonucleotide
  X-linked inhibitor of apoptosis (XIAP) siRNA
taattaatagctttatattgcct

SEQ ID NO: 14889 - DNA, 23 bp, Artificial Sequence
  Description of Artificial Sequence: Synthetic oligonucleotide
  X-linked inhibitor of apoptosis (XIAP) siRNA
aattaatagctttatattgcctt

SEQ ID NO: 14890 - DNA, 23 bp, Artificial Sequence
  Description of Artificial Sequence: Synthetic oligonucleotide
  X-linked inhibitor of apoptosis (XIAP) siRNA
attaatagctttatattgccttt

SEQ ID NO: 14891 - DNA, 23 bp, Artificial Sequence
  Description of Artificial Sequence: Synthetic oligonucleotide
  X-linked inhibitor of apoptosis (XIAP) siRNA
ttaatagctttatattgcctttc

SEQ ID NO: 14892 - DNA, 23 bp, Artificial Sequence
  Description of Artificial Sequence: Synthetic oligonucleotide
  X-linked inhibitor of apoptosis (XIAP) siRNA
taatagctttatattgcctttcc

SEQ ID NO: 14893 - DNA, 23 bp, Artificial Sequence
  Description of Artificial Sequence: Synthetic oligonucleotide
  X-linked inhibitor of apoptosis (XIAP) siRNA
aatagctttatattgcctttcct

SEQ ID NO: 14894 - DNA, 23 bp, Artificial Sequence
  Description of Artificial Sequence: Synthetic oligonucleotide
  X-linked inhibitor of apoptosis (XIAP) siRNA
atagctttatattgcctttcctg

SEQ ID NO: 14895 - DNA, 23 bp, Artificial Sequence
  Description of Artificial Sequence: Synthetic oligonucleotide
  X-linked inhibitor of apoptosis (XIAP) siRNA
tagctttatattgcctttcctgc

SEQ ID NO: 14896 - DNA, 23 bp, Artificial Sequence
  Description of Artificial Sequence: Synthetic oligonucleotide
  X-linked inhibitor of apoptosis (XIAP) siRNA
agctttatattgcctttcctgct

SEQ ID NO: 14897 - DNA, 23 bp, Artificial Sequence
  Description of Artificial Sequence: Synthetic oligonucleotide
  X-linked inhibitor of apoptosis (XIAP) siRNA
gctttatattgcctttcctgcta

SEQ ID NO: 14898 - DNA, 23 bp, Artificial Sequence
  Description of Artificial Sequence: Synthetic oligonucleotide
  X-linked inhibitor of apoptosis (XIAP) siRNA
ctttatattgcctttcctgctac

SEQ ID NO: 14899 - DNA, 23 bp, Artificial Sequence
  Description of Artificial Sequence: Synthetic oligonucleotide
  X-linked inhibitor of apoptosis (XIAP) siRNA
tttatattgcctttcctgctaca

SEQ ID NO: 14900 - DNA, 23 bp, Artificial Sequence
  Description of Artificial Sequence: Synthetic oligonucleotide
  X-linked inhibitor of apoptosis (XIAP) siRNA
ttatattgcctttcctgctacat

SEQ ID NO: 14901 - DNA, 23 bp, Artificial Sequence
  Description of Artificial Sequence: Synthetic oligonucleotide
  X-linked inhibitor of apoptosis (XIAP) siRNA
tatattgcctttcctgctacatt

SEQ ID NO: 14902 - DNA, 23 bp, Artificial Sequence
  Description of Artificial Sequence: Synthetic oligonucleotide
  X-linked inhibitor of apoptosis (XIAP) siRNA
atattgcctttcctgctacattt

SEQ ID NO: 14903 - DNA, 23 bp, Artificial Sequence
  Description of Artificial Sequence: Synthetic oligonucleotide
  X-linked inhibitor of apoptosis (XIAP) siRNA
tattgcctttcctgctacatttg

SEQ ID NO: 14904 - DNA, 23 bp, Artificial Sequence
  Description of Artificial Sequence: Synthetic oligonucleotide
  X-linked inhibitor of apoptosis (XIAP) siRNA
attgcctttcctgctacatttgg

SEQ ID NO: 14905 - DNA, 23 bp, Artificial Sequence
  Description of Artificial Sequence: Synthetic oligonucleotide
  X-linked inhibitor of apoptosis (XIAP) siRNA
ttgcctttcctgctacatttggt

SEQ ID NO: 14906 - DNA, 23 bp, Artificial Sequence
  Description of Artificial Sequence: Synthetic oligonucleotide
  X-linked inhibitor of apoptosis (XIAP) siRNA
tgcctttcctgctacatttggtt

SEQ ID NO: 14907 - DNA, 23 bp, Artificial Sequence
  Description of Artificial Sequence: Synthetic oligonucleotide
  X-linked inhibitor of apoptosis (XIAP) siRNA
gcctttcctgctacatttggttt

SEQ ID NO: 14908 - DNA, 23 bp, Artificial Sequence
  Description of Artificial Sequence: Synthetic oligonucleotide
  X-linked inhibitor of apoptosis (XIAP) siRNA
cctttcctgctacatttggtttt

SEQ ID NO: 14909 - DNA, 23 bp, Artificial Sequence
  Description of Artificial Sequence: Synthetic oligonucleotide
  X-linked inhibitor of apoptosis (XIAP) siRNA
ctttcctgctacatttggttttt

SEQ ID NO: 14910 - DNA, 23 bp, Artificial Sequence
  Description of Artificial Sequence: Synthetic oligonucleotide
  X-linked inhibitor of apoptosis (XIAP) siRNA
tttcctgctacatttggtttttt

SEQ ID NO: 14911 - DNA, 23 bp, Artificial Sequence
  Description of Artificial Sequence: Synthetic oligonucleotide
  X-linked inhibitor of apoptosis (XIAP) siRNA
ttcctgctacatttggttttttc

SEQ ID NO: 14912 - DNA, 23 bp, Artificial Sequence
  Description of Artificial Sequence: Synthetic oligonucleotide
  X-linked inhibitor of apoptosis (XIAP) siRNA
tcctgctacatttggttttttcc

SEQ ID NO: 14913 - DNA, 23 bp, Artificial Sequence
  Description of Artificial Sequence: Synthetic oligonucleotide
  X-linked inhibitor of apoptosis (XIAP) siRNA
cctgctacatttggttttttccc

SEQ ID NO: 14914 - DNA, 23 bp, Artificial Sequence
  Description of Artificial Sequence: Synthetic oligonucleotide
  X-linked inhibitor of apoptosis (XIAP) siRNA
ctgctacatttggttttttcccc

SEQ ID NO: 14915 - DNA, 23 bp, Artificial Sequence
  Description of Artificial Sequence: Synthetic oligonucleotide
  X-linked inhibitor of apoptosis (XIAP) siRNA
tgctacatttggttttttcccct

SEQ ID NO: 14916 - DNA, 23 bp, Artificial Sequence
  Description of Artificial Sequence: Synthetic oligonucleotide
  X-linked inhibitor of apoptosis (XIAP) siRNA
gctacatttggttttttcccctg

SEQ ID NO: 14917 - DNA, 23 bp, Artificial Sequence
  Description of Artificial Sequence: Synthetic oligonucleotide
  X-linked inhibitor of apoptosis (XIAP) siRNA
ctacatttggttttttcccctgt

SEQ ID NO: 14918 - DNA, 23 bp, Artificial Sequence
  Description of Artificial Sequence: Synthetic oligonucleotide
  X-linked inhibitor of apoptosis (XIAP) siRNA
tacatttggttttttcccctgtc

SEQ ID NO: 14919 - DNA, 23 bp, Artificial Sequence
  Description of Artificial Sequence: Synthetic oligonucleotide
  X-linked inhibitor of apoptosis (XIAP) siRNA
acatttggttttttcccctgtcc

SEQ ID NO: 14920 - DNA, 23 bp, Artificial Sequence
  Description of Artificial Sequence: Synthetic oligonucleotide
  X-linked inhibitor of apoptosis (XIAP) siRNA
catttggttttttcccctgtccc

SEQ ID NO: 14921 - DNA, 23 bp, Artificial Sequence
  Description of Artificial Sequence: Synthetic oligonucleotide
  X-linked inhibitor of apoptosis (XIAP) siRNA
atttggttttttcccctgtccct

SEQ ID NO: 14922 - DNA, 23 bp, Artificial Sequence
  Description of Artificial Sequence: Synthetic oligonucleotide
  X-linked inhibitor of apoptosis (XIAP) siRNA
tttggttttttcccctgtccctt

SEQ ID NO: 14923 - DNA, 23 bp, Artificial Sequence
  Description of Artificial Sequence: Synthetic oligonucleotide
  X-linked inhibitor of apoptosis (XIAP) siRNA
ttggttttttcccctgtcccttt

SEQ ID NO: 14924 - DNA, 23 bp, Artificial Sequence
  Description of Artificial Sequence: Synthetic oligonucleotide
  X-linked inhibitor of apoptosis (XIAP) siRNA
tggttttttcccctgtccctttg

SEQ ID NO: 14925 - DNA, 23 bp, Artificial Sequence
  Description of Artificial Sequence: Synthetic oligonucleotide
  X-linked inhibitor of apoptosis (XIAP) siRNA
ggttttttcccctgtccctttga

SEQ ID NO: 14926 - DNA, 23 bp, Artificial Sequence
  Description of Artificial Sequence: Synthetic oligonucleotide
  X-linked inhibitor of apoptosis (XIAP) siRNA
gttttttcccctgtccctttgat

SEQ ID NO: 14927 - DNA, 23 bp, Artificial Sequence
  Description of Artificial Sequence: Synthetic oligonucleotide
  X-linked inhibitor of apoptosis (XIAP) siRNA
ttttttcccctgtccctttgatt

SEQ ID NO: 14928 - DNA, 23 bp, Artificial Sequence
  Description of Artificial Sequence: Synthetic oligonucleotide
  X-linked inhibitor of apoptosis (XIAP) siRNA
tttttcccctgtccctttgatta

SEQ ID NO: 14929 - DNA, 23 bp, Artificial Sequence
  Description of Artificial Sequence: Synthetic oligonucleotide
  X-linked inhibitor of apoptosis (XIAP) siRNA
ttttcccctgtccctttgattac

SEQ ID NO: 14930 - DNA, 23 bp, Artificial Sequence
  Description of Artificial Sequence: Synthetic oligonucleotide
  X-linked inhibitor of apoptosis (XIAP) siRNA
tttcccctgtccctttgattacg

SEQ ID NO: 14931 - DNA, 23 bp, Artificial Sequence
  Description of Artificial Sequence: Synthetic oligonucleotide
  X-linked inhibitor of apoptosis (XIAP) siRNA
ttcccctgtccctttgattacgg

SEQ ID NO: 14932 - DNA, 23 bp, Artificial Sequence
  Description of Artificial Sequence: Synthetic oligonucleotide
  X-linked inhibitor of apoptosis (XIAP) siRNA
tcccctgtccctttgattacggg

SEQ ID NO: 14933 - DNA, 23 bp, Artificial Sequence
  Description of Artificial Sequence: Synthetic oligonucleotide
  X-linked inhibitor of apoptosis (XIAP) siRNA
cccctgtccctttgattacgggc

SEQ ID NO: 14934 - DNA, 23 bp, Artificial Sequence
  Description of Artificial Sequence: Synthetic oligonucleotide
  X-linked inhibitor of apoptosis (XIAP) siRNA
ccctgtccctttgattacgggct

SEQ ID NO: 14935 - DNA, 23 bp, Artificial Sequence
  Description of Artificial Sequence: Synthetic oligonucleotide
  X-linked inhibitor of apoptosis (XIAP) siRNA
cctgtccctttgattacgggcta

SEQ ID NO: 14936 - DNA, 23 bp, Artificial Sequence
  Description of Artificial Sequence: Synthetic oligonucleotide
  X-linked inhibitor of apoptosis (XIAP) siRNA
ctgtccctttgattacgggctaa

SEQ ID NO: 14937 - DNA, 23 bp, Artificial Sequence
  Description of Artificial Sequence: Synthetic oligonucleotide
  X-linked inhibitor of apoptosis (XIAP) siRNA
tgtccctttgattacgggctaag

SEQ ID NO: 14938 - DNA, 23 bp, Artificial Sequence
  Description of Artificial Sequence: Synthetic oligonucleotide
  X-linked inhibitor of apoptosis (XIAP) siRNA
gtccctttgattacgggctaagg

SEQ ID NO: 14939 - DNA, 23 bp, Artificial Sequence
  Description of Artificial Sequence: Synthetic oligonucleotide
  X-linked inhibitor of apoptosis (XIAP) siRNA
tccctttgattacgggctaaggt

SEQ ID NO: 14940 - DNA, 23 bp, Artificial Sequence
  Description of Artificial Sequence: Synthetic oligonucleotide
  X-linked inhibitor of apoptosis (XIAP) siRNA
ccctttgattacgggctaaggta

SEQ ID NO: 14941 - DNA, 23 bp, Artificial Sequence
  Description of Artificial Sequence: Synthetic oligonucleotide
  X-linked inhibitor of apoptosis (XIAP) siRNA
cctttgattacgggctaaggtag

SEQ ID NO: 14942 - DNA, 23 bp, Artificial Sequence
  Description of Artificial Sequence: Synthetic oligonucleotide
  X-linked inhibitor of apoptosis (XIAP) siRNA
ctttgattacgggctaaggtagg

SEQ ID NO: 14943 - DNA, 23 bp, Artificial Sequence
  Description of Artificial Sequence: Synthetic oligonucleotide
  X-linked inhibitor of apoptosis (XIAP) siRNA
tttgattacgggctaaggtaggg

SEQ ID NO: 14944 - DNA, 23 bp, Artificial Sequence
  Description of Artificial Sequence: Synthetic oligonucleotide
  X-linked inhibitor of apoptosis (XIAP) siRNA
ttgattacgggctaaggtagggt

SEQ ID NO: 14945 - DNA, 23 bp, Artificial Sequence
  Description of Artificial Sequence: Synthetic oligonucleotide
  X-linked inhibitor of apoptosis (XIAP) siRNA
tgattacgggctaaggtagggta

SEQ ID NO: 14946 - DNA, 23 bp, Artificial Sequence
  Description of Artificial Sequence: Synthetic oligonucleotide
  X-linked inhibitor of apoptosis (XIAP) siRNA
gattacgggctaaggtagggtag

SEQ ID NO: 14947 - DNA, 23 bp, Artificial Sequence
  Description of Artificial Sequence: Synthetic oligonucleotide
  X-linked inhibitor of apoptosis (XIAP) siRNA
attacgggctaaggtagggtaga

SEQ ID NO: 14948 - DNA, 23 bp, Artificial Sequence
  Description of Artificial Sequence: Synthetic oligonucleotide
  X-linked inhibitor of apoptosis (XIAP) siRNA
ttacgggctaaggtagggtagag

SEQ ID NO: 14949 - DNA, 23 bp, Artificial Sequence
  Description of Artificial Sequence: Synthetic oligonucleotide
  X-linked inhibitor of apoptosis (XIAP) siRNA
tacgggctaaggtagggtagagt

SEQ ID NO: 14950 - DNA, 23 bp, Artificial Sequence
  Description of Artificial Sequence: Synthetic oligonucleotide
  X-linked inhibitor of apoptosis (XIAP) siRNA
acgggctaaggtagggtagagtg

SEQ ID NO: 14951 - DNA, 23 bp, Artificial Sequence
  Description of Artificial Sequence: Synthetic oligonucleotide
  X-linked inhibitor of apoptosis (XIAP) siRNA
cgggctaaggtagggtagagtgg

SEQ ID NO: 14952 - DNA, 23 bp, Artificial Sequence
  Description of Artificial Sequence: Synthetic oligonucleotide
  X-linked inhibitor of apoptosis (XIAP) siRNA
gggctaaggtagggtagagtggg

SEQ ID NO: 14953 - DNA, 23 bp, Artificial Sequence
  Description of Artificial Sequence: Synthetic oligonucleotide
  X-linked inhibitor of apoptosis (XIAP) siRNA
ggctaaggtagggtagagtgggt

SEQ ID NO: 14954 - DNA, 23 bp, Artificial Sequence
  Description of Artificial Sequence: Synthetic oligonucleotide
  X-linked inhibitor of apoptosis (XIAP) siRNA
gctaaggtagggtagagtgggtg

SEQ ID NO: 14955 - DNA, 23 bp, Artificial Sequence
  Description of Artificial Sequence: Synthetic oligonucleotide
  X-linked inhibitor of apoptosis (XIAP) siRNA
ctaaggtagggtagagtgggtgt

SEQ ID NO: 14956 - DNA, 23 bp, Artificial Sequence
  Description of Artificial Sequence: Synthetic oligonucleotide
  X-linked inhibitor of apoptosis (XIAP) siRNA
taaggtagggtagagtgggtgta

SEQ ID NO: 14957 - DNA, 23 bp, Artificial Sequence
  Description of Artificial Sequence: Synthetic oligonucleotide
  X-linked inhibitor of apoptosis (XIAP) siRNA
aaggtagggtagagtgggtgtag

SEQ ID NO: 14958 - DNA, 23 bp, Artificial Sequence
  Description of Artificial Sequence: Synthetic oligonucleotide
  X-linked inhibitor of apoptosis (XIAP) siRNA
aggtagggtagagtgggtgtagt

SEQ ID NO: 14959 - DNA, 23 bp, Artificial Sequence
  Description of Artificial Sequence: Synthetic oligonucleotide
  X-linked inhibitor of apoptosis (XIAP) siRNA
ggtagggtagagtgggtgtagtg

SEQ ID NO: 14960 - DNA, 23 bp, Artificial Sequence
  Description of Artificial Sequence: Synthetic oligonucleotide
  X-linked inhibitor of apoptosis (XIAP) siRNA
gtagggtagagtgggtgtagtga

SEQ ID NO: 14961 - DNA, 23 bp, Artificial Sequence
  Description of Artificial Sequence: Synthetic oligonucleotide
  X-linked inhibitor of apoptosis (XIAP) siRNA
tagggtagagtgggtgtagtgag

SEQ ID NO: 14962 - DNA, 23 bp, Artificial Sequence
  Description of Artificial Sequence: Synthetic oligonucleotide
  X-linked inhibitor of apoptosis (XIAP) siRNA
agggtagagtgggtgtagtgagt

SEQ ID NO: 14963 - DNA, 23 bp, Artificial Sequence
  Description of Artificial Sequence: Synthetic oligonucleotide
  X-linked inhibitor of apoptosis (XIAP) siRNA
gggtagagtgggtgtagtgagtg

SEQ ID NO: 14964 - DNA, 23 bp, Artificial Sequence
  Description of Artificial Sequence: Synthetic oligonucleotide
  X-linked inhibitor of apoptosis (XIAP) siRNA
ggtagagtgggtgtagtgagtgt

SEQ ID NO: 14965 - DNA, 23 bp, Artificial Sequence
  Description of Artificial Sequence: Synthetic oligonucleotide
  X-linked inhibitor of apoptosis (XIAP) siRNA
gtagagtgggtgtagtgagtgta

SEQ ID NO: 14966 - DNA, 23 bp, Artificial Sequence
  Description of Artificial Sequence: Synthetic oligonucleotide
  X-linked inhibitor of apoptosis (XIAP) siRNA
tagagtgggtgtagtgagtgtat

SEQ ID NO: 14967 - DNA, 23 bp, Artificial Sequence
  Description of Artificial Sequence: Synthetic oligonucleotide
  X-linked inhibitor of apoptosis (XIAP) siRNA
agagtgggtgtagtgagtgtata

SEQ ID NO: 14968 - DNA, 23 bp, Artificial Sequence
  Description of Artificial Sequence: Synthetic oligonucleotide
  X-linked inhibitor of apoptosis (XIAP) siRNA
gagtgggtgtagtgagtgtatat

SEQ ID NO: 14969 - DNA, 23 bp, Artificial Sequence
  Description of Artificial Sequence: Synthetic oligonucleotide
  X-linked inhibitor of apoptosis (XIAP) siRNA
agtgggtgtagtgagtgtatata

SEQ ID NO: 14970 - DNA, 23 bp, Artificial Sequence
  Description of Artificial Sequence: Synthetic oligonucleotide
  X-linked inhibitor of apoptosis (XIAP) siRNA
gtgggtgtagtgagtgtatataa

SEQ ID NO: 14971 - DNA, 23 bp, Artificial Sequence
  Description of Artificial Sequence: Synthetic oligonucleotide
  X-linked inhibitor of apoptosis (XIAP) siRNA
tgggtgtagtgagtgtatataat

SEQ ID NO: 14972 - DNA, 23 bp, Artificial Sequence
  Description of Artificial Sequence: Synthetic oligonucleotide
  X-linked inhibitor of apoptosis (XIAP) siRNA
gggtgtagtgagtgtatataatg

SEQ ID NO: 14973 - DNA, 23 bp, Artificial Sequence
  Description of Artificial Sequence: Synthetic oligonucleotide
  X-linked inhibitor of apoptosis (XIAP) siRNA
ggtgtagtgagtgtatataatgt

SEQ ID NO: 14974 - DNA, 23 bp, Artificial Sequence
  Description of Artificial Sequence: Synthetic oligonucleotide
  X-linked inhibitor of apoptosis (XIAP) siRNA
gtgtagtgagtgtatataatgtg

SEQ ID NO: 14975 - DNA, 23 bp, Artificial Sequence
  Description of Artificial Sequence: Synthetic oligonucleotide
  X-linked inhibitor of apoptosis (XIAP) siRNA
tgtagtgagtgtatataatgtga

SEQ ID NO: 14976 - DNA, 23 bp, Artificial Sequence
  Description of Artificial Sequence: Synthetic oligonucleotide
  X-linked inhibitor of apoptosis (XIAP) siRNA
gtagtgagtgtatataatgtgat

SEQ ID NO: 14977 - DNA, 23 bp, Artificial Sequence
  Description of Artificial Sequence: Synthetic oligonucleotide
  X-linked inhibitor of apoptosis (XIAP) siRNA
tagtgagtgtatataatgtgatt

SEQ ID NO: 14978 - DNA, 23 bp, Artificial Sequence
  Description of Artificial Sequence: Synthetic oligonucleotide
  X-linked inhibitor of apoptosis (XIAP) siRNA
agtgagtgtatataatgtgattt

SEQ ID NO: 14979 - DNA, 23 bp, Artificial Sequence
  Description of Artificial Sequence: Synthetic oligonucleotide
  X-linked inhibitor of apoptosis (XIAP) siRNA
gtgagtgtatataatgtgatttg

SEQ ID NO: 14980 - DNA, 23 bp, Artificial Sequence
  Description of Artificial Sequence: Synthetic oligonucleotide
  X-linked inhibitor of apoptosis (XIAP) siRNA
tgagtgtatataatgtgatttgg

SEQ ID NO: 14981 - DNA, 23 bp, Artificial Sequence
  Description of Artificial Sequence: Synthetic oligonucleotide
  X-linked inhibitor of apoptosis (XIAP) siRNA
gagtgtatataatgtgatttggc

SEQ ID NO: 14982 - DNA, 23 bp, Artificial Sequence
  Description of Artificial Sequence: Synthetic oligonucleotide
  X-linked inhibitor of apoptosis (XIAP) siRNA
agtgtatataatgtgatttggcc

SEQ ID NO: 14983 - DNA, 23 bp, Artificial Sequence
  Description of Artificial Sequence: Synthetic oligonucleotide
  X-linked inhibitor of apoptosis (XIAP) siRNA
gtgtatataatgtgatttggccc

SEQ ID NO: 14984 - DNA, 23 bp, Artificial Sequence
  Description of Artificial Sequence: Synthetic oligonucleotide
  X-linked inhibitor of apoptosis (XIAP) siRNA
tgtatataatgtgatttggccct

SEQ ID NO: 14985 - DNA, 23 bp, Artificial Sequence
  Description of Artificial Sequence: Synthetic oligonucleotide
  X-linked inhibitor of apoptosis (XIAP) siRNA
gtatataatgtgatttggccctg

SEQ ID NO: 14986 - DNA, 23 bp, Artificial Sequence
  Description of Artificial Sequence: Synthetic oligonucleotide
  X-linked inhibitor of apoptosis (XIAP) siRNA
tatataatgtgatttggccctgt

SEQ ID NO: 14987 - DNA, 23 bp, Artificial Sequence
  Description of Artificial Sequence: Synthetic oligonucleotide
  X-linked inhibitor of apoptosis (XIAP) siRNA
atataatgtgatttggccctgtg

SEQ ID NO: 14988 - DNA, 23 bp, Artificial Sequence
  Description of Artificial Sequence: Synthetic oligonucleotide
  X-linked inhibitor of apoptosis (XIAP) siRNA
tataatgtgatttggccctgtgt

SEQ ID NO: 14989 - DNA, 23 bp, Artificial Sequence
  Description of Artificial Sequence: Synthetic oligonucleotide
  X-linked inhibitor of apoptosis (XIAP) siRNA
ataatgtgatttggccctgtgta

SEQ ID NO: 14990 - DNA, 23 bp, Artificial Sequence
  Description of Artificial Sequence: Synthetic oligonucleotide
  X-linked inhibitor of apoptosis (XIAP) siRNA
taatgtgatttggccctgtgtat

SEQ ID NO: 14991 - DNA, 23 bp, Artificial Sequence
  Description of Artificial Sequence: Synthetic oligonucleotide
  X-linked inhibitor of apoptosis (XIAP) siRNA
aatgtgatttggccctgtgtatt

SEQ ID NO: 14992 - DNA, 23 bp, Artificial Sequence
  Description of Artificial Sequence: Synthetic oligonucleotide
  X-linked inhibitor of apoptosis (XIAP) siRNA
atgtgatttggccctgtgtatta

SEQ ID NO: 14993 - DNA, 23 bp, Artificial Sequence
  Description of Artificial Sequence: Synthetic oligonucleotide
  X-linked inhibitor of apoptosis (XIAP) siRNA
tgtgatttggccctgtgtattat

SEQ ID NO: 14994 - DNA, 23 bp, Artificial Sequence
  Description of Artificial Sequence: Synthetic oligonucleotide
  X-linked inhibitor of apoptosis (XIAP) siRNA
gtgatttggccctgtgtattatg

SEQ ID NO: 14995 - DNA, 23 bp, Artificial Sequence
  Description of Artificial Sequence: Synthetic oligonucleotide
  X-linked inhibitor of apoptosis (XIAP) siRNA
tgatttggccctgtgtattatga

SEQ ID NO: 14996 - DNA, 23 bp, Artificial Sequence
  Description of Artificial Sequence: Synthetic oligonucleotide
  X-linked inhibitor of apoptosis (XIAP) siRNA
gatttggccctgtgtattatgat

SEQ ID NO: 14997 - DNA, 23 bp, Artificial Sequence
  Description of Artificial Sequence: Synthetic oligonucleotide
  X-linked inhibitor of apoptosis (XIAP) siRNA
atttggccctgtgtattatgata

SEQ ID NO: 14998 - DNA, 23 bp, Artificial Sequence
  Description of Artificial Sequence: Synthetic oligonucleotide
  X-linked inhibitor of apoptosis (XIAP) siRNA
tttggccctgtgtattatgatat

SEQ ID NO: 14999 - DNA, 23 bp, Artificial Sequence
  Description of Artificial Sequence: Synthetic oligonucleotide
  X-linked inhibitor of apoptosis (XIAP) siRNA
ttggccctgtgtattatgatatt

SEQ ID NO: 15000 - DNA, 23 bp, Artificial Sequence
  Description of Artificial Sequence: Synthetic oligonucleotide
  X-linked inhibitor of apoptosis (XIAP) siRNA
tggccctgtgtattatgatattt

SEQ ID NO: 15001 - DNA, 23 bp, Artificial Sequence
  Description of Artificial Sequence: Synthetic oligonucleotide
  X-linked inhibitor of apoptosis (XIAP) siRNA
ggccctgtgtattatgatatttt

SEQ ID NO: 15002 - DNA, 23 bp, Artificial Sequence
  Description of Artificial Sequence: Synthetic oligonucleotide
  X-linked inhibitor of apoptosis (XIAP) siRNA
gccctgtgtattatgatattttg

SEQ ID NO: 15003 - DNA, 23 bp, Artificial Sequence
  Description of Artificial Sequence: Synthetic oligonucleotide
  X-linked inhibitor of apoptosis (XIAP) siRNA
ccctgtgtattatgatattttgt

SEQ ID NO: 15004 - DNA, 23 bp, Artificial Sequence
  Description of Artificial Sequence: Synthetic oligonucleotide
  X-linked inhibitor of apoptosis (XIAP) siRNA
cctgtgtattatgatattttgtt

SEQ ID NO: 15005 - DNA, 23 bp, Artificial Sequence
  Description of Artificial Sequence: Synthetic oligonucleotide
  X-linked inhibitor of apoptosis (XIAP) siRNA
ctgtgtattatgatattttgtta

SEQ ID NO: 15006 - DNA, 23 bp, Artificial Sequence
  Description of Artificial Sequence: Synthetic oligonucleotide
  X-linked inhibitor of apoptosis (XIAP) siRNA
tgtgtattatgatattttgttat

SEQ ID NO: 15007 - DNA, 23 bp, Artificial Sequence
  Description of Artificial Sequence: Synthetic oligonucleotide
  X-linked inhibitor of apoptosis (XIAP) siRNA
gtgtattatgatattttgttatt

SEQ ID NO: 15008 - DNA, 23 bp, Artificial Sequence
  Description of Artificial Sequence: Synthetic oligonucleotide
  X-linked inhibitor of apoptosis (XIAP) siRNA
tgtattatgatattttgttattt

SEQ ID NO: 15009 - DNA, 23 bp, Artificial Sequence
  Description of Artificial Sequence: Synthetic oligonucleotide
  X-linked inhibitor of apoptosis (XIAP) siRNA
gtattatgatattttgttatttt

SEQ ID NO: 15010 - DNA, 23 bp, Artificial Sequence
  Description of Artificial Sequence: Synthetic oligonucleotide
  X-linked inhibitor of apoptosis (XIAP) siRNA
tattatgatattttgttattttt

SEQ ID NO: 15011 - DNA, 23 bp, Artificial Sequence
  Description of Artificial Sequence: Synthetic oligonucleotide
  X-linked inhibitor of apoptosis (XIAP) siRNA
attatgatattttgttatttttg

SEQ ID NO: 15012 - DNA, 23 bp, Artificial Sequence
  Description of Artificial Sequence: Synthetic oligonucleotide
  X-linked inhibitor of apoptosis (XIAP) siRNA
ttatgatattttgttatttttgt

SEQ ID NO: 15013 - DNA, 23 bp, Artificial Sequence
  Description of Artificial Sequence: Synthetic oligonucleotide
  X-linked inhibitor of apoptosis (XIAP) siRNA
tatgatattttgttatttttgtt

SEQ ID NO: 15014 - DNA, 23 bp, Artificial Sequence
  Description of Artificial Sequence: Synthetic oligonucleotide
  X-linked inhibitor of apoptosis (XIAP) siRNA
atgatattttgttatttttgttg

SEQ ID NO: 15015 - DNA, 23 bp, Artificial Sequence
  Description of Artificial Sequence: Synthetic oligonucleotide
  X-linked inhibitor of apoptosis (XIAP) siRNA
tgatattttgttatttttgttgt

SEQ ID NO: 15016 - DNA, 23 bp, Artificial Sequence
  Description of Artificial Sequence: Synthetic oligonucleotide
  X-linked inhibitor of apoptosis (XIAP) siRNA
gatattttgttatttttgttgtt

SEQ ID NO: 15017 - DNA, 23 bp, Artificial Sequence
  Description of Artificial Sequence: Synthetic oligonucleotide
  X-linked inhibitor of apoptosis (XIAP) siRNA
atattttgttatttttgttgtta

SEQ ID NO: 15018 - DNA, 23 bp, Artificial Sequence
  Description of Artificial Sequence: Synthetic oligonucleotide
  X-linked inhibitor of apoptosis (XIAP) siRNA
tattttgttatttttgttgttat

SEQ ID NO: 15019 - DNA, 23 bp, Artificial Sequence
  Description of Artificial Sequence: Synthetic oligonucleotide
  X-linked inhibitor of apoptosis (XIAP) siRNA
attttgttatttttgttgttata

SEQ ID NO: 15020 - DNA, 23 bp, Artificial Sequence
  Description of Artificial Sequence: Synthetic oligonucleotide
  X-linked inhibitor of apoptosis (XIAP) siRNA
ttttgttatttttgttgttatat

SEQ ID NO: 15021 - DNA, 23 bp, Artificial Sequence
  Description of Artificial Sequence: Synthetic oligonucleotide
  X-linked inhibitor of apoptosis (XIAP) siRNA
tttgttatttttgttgttatatt

SEQ ID NO: 15022 - DNA, 23 bp, Artificial Sequence
  Description of Artificial Sequence: Synthetic oligonucleotide
  X-linked inhibitor of apoptosis (XIAP) siRNA
ttgttatttttgttgttatatta

SEQ ID NO: 15023 - DNA, 23 bp, Artificial Sequence
  Description of Artificial Sequence: Synthetic oligonucleotide
  X-linked inhibitor of apoptosis (XIAP) siRNA
tgttatttttgttgttatattat

SEQ ID NO: 15024 - DNA, 23 bp, Artificial Sequence
  Description of Artificial Sequence: Synthetic oligonucleotide
  X-linked inhibitor of apoptosis (XIAP) siRNA
gttatttttgttgttatattatt

SEQ ID NO: 15025 - DNA, 23 bp, Artificial Sequence
  Description of Artificial Sequence: Synthetic oligonucleotide
  X-linked inhibitor of apoptosis (XIAP) siRNA
ttatttttgttgttatattattt

SEQ ID NO: 15026 - DNA, 23 bp, Artificial Sequence
  Description of Artificial Sequence: Synthetic oligonucleotide
  X-linked inhibitor of apoptosis (XIAP) siRNA
tatttttgttgttatattattta

SEQ ID NO: 15027 - DNA, 23 bp, Artificial Sequence
  Description of Artificial Sequence: Synthetic oligonucleotide
  X-linked inhibitor of apoptosis (XIAP) siRNA
atttttgttgttatattatttac

SEQ ID NO: 15028 - DNA, 23 bp, Artificial Sequence
  Description of Artificial Sequence: Synthetic oligonucleotide
  X-linked inhibitor of apoptosis (XIAP) siRNA
tttttgttgttatattatttaca

SEQ ID NO: 15029 - DNA, 23 bp, Artificial Sequence
  Description of Artificial Sequence: Synthetic oligonucleotide
  X-linked inhibitor of apoptosis (XIAP) siRNA
ttttgttgttatattatttacat

SEQ ID NO: 15030 - DNA, 23 bp, Artificial Sequence
  Description of Artificial Sequence: Synthetic oligonucleotide
  X-linked inhibitor of apoptosis (XIAP) siRNA
tttgttgttatattatttacatt

SEQ ID NO: 15031 - DNA, 23 bp, Artificial Sequence
  Description of Artificial Sequence: Synthetic oligonucleotide
  X-linked inhibitor of apoptosis (XIAP) siRNA
ttgttgttatattatttacattt

SEQ ID NO: 15032 - DNA, 23 bp, Artificial Sequence
  Description of Artificial Sequence: Synthetic oligonucleotide
  X-linked inhibitor of apoptosis (XIAP) siRNA
tgttgttatattatttacatttc

SEQ ID NO: 15033 - DNA, 23 bp, Artificial Sequence
  Description of Artificial Sequence: Synthetic oligonucleotide
  X-linked inhibitor of apoptosis (XIAP) siRNA
gttgttatattatttacatttca

SEQ ID NO: 15034 - DNA, 23 bp, Artificial Sequence
  Description of Artificial Sequence: Synthetic oligonucleotide
  X-linked inhibitor of apoptosis (XIAP) siRNA
ttgttatattatttacatttcag

SEQ ID NO: 15035 - DNA, 23 bp, Artificial Sequence
  Description of Artificial Sequence: Synthetic oligonucleotide
  X-linked inhibitor of apoptosis (XIAP) siRNA
tgttatattatttacatttcagt

SEQ ID NO: 15036 - DNA, 23 bp, Artificial Sequence
  Description of Artificial Sequence: Synthetic oligonucleotide
  X-linked inhibitor of apoptosis (XIAP) siRNA
gttatattatttacatttcagta

SEQ ID NO: 15037 - DNA, 23 bp, Artificial Sequence
  Description of Artificial Sequence: Synthetic oligonucleotide
  X-linked inhibitor of apoptosis (XIAP) siRNA
ttatattatttacatttcagtag

SEQ ID NO: 15038 - DNA, 23 bp, Artificial Sequence
  Description of Artificial Sequence: Synthetic oligonucleotide
  X-linked inhibitor of apoptosis (XIAP) siRNA
tatattatttacatttcagtagt

SEQ ID NO: 15039 - DNA, 23 bp, Artificial Sequence
  Description of Artificial Sequence: Synthetic oligonucleotide
  X-linked inhibitor of apoptosis (XIAP) siRNA
atattatttacatttcagtagtt

SEQ ID NO: 15040 - DNA, 23 bp, Artificial Sequence
  Description of Artificial Sequence: Synthetic oligonucleotide
  X-linked inhibitor of apoptosis (XIAP) siRNA
tattatttacatttcagtagttg

SEQ ID NO: 15041 - DNA, 23 bp, Artificial Sequence
  Description of Artificial Sequence: Synthetic oligonucleotide
  X-linked inhibitor of apoptosis (XIAP) siRNA
attatttacatttcagtagttgt

SEQ ID NO: 15042 - DNA, 23 bp, Artificial Sequence
  Description of Artificial Sequence: Synthetic oligonucleotide
  X-linked inhibitor of apoptosis (XIAP) siRNA
ttatttacatttcagtagttgtt

SEQ ID NO: 15043 - DNA, 23 bp, Artificial Sequence
  Description of Artificial Sequence: Synthetic oligonucleotide
  X-linked inhibitor of apoptosis (XIAP) siRNA
tatttacatttcagtagttgttt

SEQ ID NO: 15044 - DNA, 23 bp, Artificial Sequence
  Description of Artificial Sequence: Synthetic oligonucleotide
  X-linked inhibitor of apoptosis (XIAP) siRNA
atttacatttcagtagttgtttt

SEQ ID NO: 15045 - DNA, 23 bp, Artificial Sequence
  Description of Artificial Sequence: Synthetic oligonucleotide
  X-linked inhibitor of apoptosis (XIAP) siRNA
tttacatttcagtagttgttttt

SEQ ID NO: 15046 - DNA, 23 bp, Artificial Sequence
  Description of Artificial Sequence: Synthetic oligonucleotide
  X-linked inhibitor of apoptosis (XIAP) siRNA
ttacatttcagtagttgtttttt

SEQ ID NO: 15047 - DNA, 23 bp, Artificial Sequence
  Description of Artificial Sequence: Synthetic oligonucleotide
  X-linked inhibitor of apoptosis (XIAP) siRNA
tacatttcagtagttgttttttg

SEQ ID NO: 15048 - DNA, 23 bp, Artificial Sequence
  Description of Artificial Sequence: Synthetic oligonucleotide
  X-linked inhibitor of apoptosis (XIAP) siRNA
acatttcagtagttgttttttgt

SEQ ID NO: 15049 - DNA, 23 bp, Artificial Sequence
  Description of Artificial Sequence: Synthetic oligonucleotide
  X-linked inhibitor of apoptosis (XIAP) siRNA
catttcagtagttgttttttgtg

SEQ ID NO: 15050 - DNA, 23 bp, Artificial Sequence
  Description of Artificial Sequence: Synthetic oligonucleotide
  X-linked inhibitor of apoptosis (XIAP) siRNA
atttcagtagttgttttttgtgt

SEQ ID NO: 15051 - DNA, 23 bp, Artificial Sequence
  Description of Artificial Sequence: Synthetic oligonucleotide
  X-linked inhibitor of apoptosis (XIAP) siRNA
tttcagtagttgttttttgtgtt

SEQ ID NO: 15052 - DNA, 23 bp, Artificial Sequence
  Description of Artificial Sequence: Synthetic oligonucleotide
  X-linked inhibitor of apoptosis (XIAP) siRNA
ttcagtagttgttttttgtgttt

SEQ ID NO: 15053 - DNA, 23 bp, Artificial Sequence
  Description of Artificial Sequence: Synthetic oligonucleotide
  X-linked inhibitor of apoptosis (XIAP) siRNA
tcagtagttgttttttgtgtttc

SEQ ID NO: 15054 - DNA, 23 bp, Artificial Sequence
  Description of Artificial Sequence: Synthetic oligonucleotide
  X-linked inhibitor of apoptosis (XIAP) siRNA
cagtagttgttttttgtgtttcc

SEQ ID NO: 15055 - DNA, 23 bp, Artificial Sequence
  Description of Artificial Sequence: Synthetic oligonucleotide
  X-linked inhibitor of apoptosis (XIAP) siRNA
agtagttgttttttgtgtttcca

SEQ ID NO: 15056 - DNA, 23 bp, Artificial Sequence
  Description of Artificial Sequence: Synthetic oligonucleotide
  X-linked inhibitor of apoptosis (XIAP) siRNA
gtagttgttttttgtgtttccat

SEQ ID NO: 15057 - DNA, 23 bp, Artificial Sequence
  Description of Artificial Sequence: Synthetic oligonucleotide
  X-linked inhibitor of apoptosis (XIAP) siRNA
tagttgttttttgtgtttccatt

SEQ ID NO: 15058 - DNA, 23 bp, Artificial Sequence
  Description of Artificial Sequence: Synthetic oligonucleotide
  X-linked inhibitor of apoptosis (XIAP) siRNA
agttgttttttgtgtttccattt

SEQ ID NO: 15059 - DNA, 23 bp, Artificial Sequence
  Description of Artificial Sequence: Synthetic oligonucleotide
  X-linked inhibitor of apoptosis (XIAP) siRNA
gttgttttttgtgtttccatttt

SEQ ID NO: 15060 - DNA, 23 bp, Artificial Sequence
  Description of Artificial Sequence: Synthetic oligonucleotide
  X-linked inhibitor of apoptosis (XIAP) siRNA
ttgttttttgtgtttccatttta

SEQ ID NO: 15061 - DNA, 23 bp, Artificial Sequence
  Description of Artificial Sequence: Synthetic oligonucleotide
  X-linked inhibitor of apoptosis (XIAP) siRNA
tgttttttgtgtttccattttag

SEQ ID NO: 15062 - DNA, 23 bp, Artificial Sequence
  Description of Artificial Sequence: Synthetic oligonucleotide
  X-linked inhibitor of apoptosis (XIAP) siRNA
gttttttgtgtttccattttagt

SEQ ID NO: 15063 - DNA, 23 bp, Artificial Sequence
  Description of Artificial Sequence: Synthetic oligonucleotide
  X-linked inhibitor of apoptosis (XIAP) siRNA
ttttttgtgtttccattttagtg

SEQ ID NO: 15064 - DNA, 23 bp, Artificial Sequence
  Description of Artificial Sequence: Synthetic oligonucleotide
  X-linked inhibitor of apoptosis (XIAP) siRNA
tttttgtgtttccattttagtgg

SEQ ID NO: 15065 - DNA, 23 bp, Artificial Sequence
  Description of Artificial Sequence: Synthetic oligonucleotide
  X-linked inhibitor of apoptosis (XIAP) siRNA
ttttgtgtttccattttagtgga

SEQ ID NO: 15066 - DNA, 23 bp, Artificial Sequence
  Description of Artificial Sequence: Synthetic oligonucleotide
  X-linked inhibitor of apoptosis (XIAP) siRNA
tttgtgtttccattttagtggat

SEQ ID NO: 15067 - DNA, 23 bp, Artificial Sequence
  Description of Artificial Sequence: Synthetic oligonucleotide
  X-linked inhibitor of apoptosis (XIAP) siRNA
ttgtgtttccattttagtggata

SEQ ID NO: 15068 - DNA, 23 bp, Artificial Sequence
  Description of Artificial Sequence: Synthetic oligonucleotide
  X-linked inhibitor of apoptosis (XIAP) siRNA
tgtgtttccattttagtggataa

SEQ ID NO: 15069 - DNA, 23 bp, Artificial Sequence
  Description of Artificial Sequence: Synthetic oligonucleotide
  X-linked inhibitor of apoptosis (XIAP) siRNA
gtgtttccattttagtggataaa

SEQ ID NO: 15070 - DNA, 23 bp, Artificial Sequence
  Description of Artificial Sequence: Synthetic oligonucleotide
  X-linked inhibitor of apoptosis (XIAP) siRNA
tgtttccattttagtggataaaa

SEQ ID NO: 15071 - DNA, 23 bp, Artificial Sequence
  Description of Artificial Sequence: Synthetic oligonucleotide
  X-linked inhibitor of apoptosis (XIAP) siRNA
gtttccattttagtggataaaat

SEQ ID NO: 15072 - DNA, 23 bp, Artificial Sequence
  Description of Artificial Sequence: Synthetic oligonucleotide
  X-linked inhibitor of apoptosis (XIAP) siRNA
tttccattttagtggataaaatt

SEQ ID NO: 15073 - DNA, 23 bp, Artificial Sequence
  Description of Artificial Sequence: Synthetic oligonucleotide
  X-linked inhibitor of apoptosis (XIAP) siRNA
ttccattttagtggataaaattt

SEQ ID NO: 15074 - DNA, 23 bp, Artificial Sequence
  Description of Artificial Sequence: Synthetic oligonucleotide
  X-linked inhibitor of apoptosis (XIAP) siRNA
tccattttagtggataaaatttg

SEQ ID NO: 15075 - DNA, 23 bp, Artificial Sequence
  Description of Artificial Sequence: Synthetic oligonucleotide
  X-linked inhibitor of apoptosis (XIAP) siRNA
ccattttagtggataaaatttgt

SEQ ID NO: 15076 - DNA, 23 bp, Artificial Sequence
  Description of Artificial Sequence: Synthetic oligonucleotide
  X-linked inhibitor of apoptosis (XIAP) siRNA
cattttagtggataaaatttgta

SEQ ID NO: 15077 - DNA, 23 bp, Artificial Sequence
  Description of Artificial Sequence: Synthetic oligonucleotide
  X-linked inhibitor of apoptosis (XIAP) siRNA
attttagtggataaaatttgtat

SEQ ID NO: 15078 - DNA, 23 bp, Artificial Sequence
  Description of Artificial Sequence: Synthetic oligonucleotide
  X-linked inhibitor of apoptosis (XIAP) siRNA
ttttagtggataaaatttgtatt

SEQ ID NO: 15079 - DNA, 23 bp, Artificial Sequence
  Description of Artificial Sequence: Synthetic oligonucleotide
  X-linked inhibitor of apoptosis (XIAP) siRNA
tttagtggataaaatttgtattt

SEQ ID NO: 15080 - DNA, 23 bp, Artificial Sequence
  Description of Artificial Sequence: Synthetic oligonucleotide
  X-linked inhibitor of apoptosis (XIAP) siRNA
ttagtggataaaatttgtatttt

SEQ ID NO: 15081 - DNA, 23 bp, Artificial Sequence
  Description of Artificial Sequence: Synthetic oligonucleotide
  X-linked inhibitor of apoptosis (XIAP) siRNA
tagtggataaaatttgtattttg

SEQ ID NO: 15082 - DNA, 23 bp, Artificial Sequence
  Description of Artificial Sequence: Synthetic oligonucleotide
  X-linked inhibitor of apoptosis (XIAP) siRNA
agtggataaaatttgtattttga

SEQ ID NO: 15083 - DNA, 23 bp, Artificial Sequence
  Description of Artificial Sequence: Synthetic oligonucleotide
  X-linked inhibitor of apoptosis (XIAP) siRNA
gtggataaaatttgtattttgaa

SEQ ID NO: 15084 - DNA, 23 bp, Artificial Sequence
  Description of Artificial Sequence: Synthetic oligonucleotide
  X-linked inhibitor of apoptosis (XIAP) siRNA
tggataaaatttgtattttgaac

SEQ ID NO: 15085 - DNA, 23 bp, Artificial Sequence
  Description of Artificial Sequence: Synthetic oligonucleotide
  X-linked inhibitor of apoptosis (XIAP) siRNA
ggataaaatttgtattttgaact

SEQ ID NO: 15086 - DNA, 23 bp, Artificial Sequence
  Description of Artificial Sequence: Synthetic oligonucleotide
  X-linked inhibitor of apoptosis (XIAP) siRNA
gataaaatttgtattttgaacta

SEQ ID NO: 15087 - DNA, 23 bp, Artificial Sequence
  Description of Artificial Sequence: Synthetic oligonucleotide
  X-linked inhibitor of apoptosis (XIAP) siRNA
ataaaatttgtattttgaactat

SEQ ID NO: 15088 - DNA, 23 bp, Artificial Sequence
  Description of Artificial Sequence: Synthetic oligonucleotide
  X-linked inhibitor of apoptosis (XIAP) siRNA
taaaatttgtattttgaactatg

SEQ ID NO: 15089 - DNA, 23 bp, Artificial Sequence
  Description of Artificial Sequence: Synthetic oligonucleotide
  X-linked inhibitor of apoptosis (XIAP) siRNA
aaaatttgtattttgaactatga

SEQ ID NO: 15090 - DNA, 23 bp, Artificial Sequence
  Description of Artificial Sequence: Synthetic oligonucleotide
  X-linked inhibitor of apoptosis (XIAP) siRNA
aaatttgtattttgaactatgaa

SEQ ID NO: 15091 - DNA, 23 bp, Artificial Sequence
  Description of Artificial Sequence: Synthetic oligonucleotide
  X-linked inhibitor of apoptosis (XIAP) siRNA
aatttgtattttgaactatgaat

SEQ ID NO: 15092 - DNA, 23 bp, Artificial Sequence
  Description of Artificial Sequence: Synthetic oligonucleotide
  X-linked inhibitor of apoptosis (XIAP) siRNA
atttgtattttgaactatgaatg

SEQ ID NO: 15093 - DNA, 23 bp, Artificial Sequence
  Description of Artificial Sequence: Synthetic oligonucleotide
  X-linked inhibitor of apoptosis (XIAP) siRNA
tttgtattttgaactatgaatgg

SEQ ID NO: 15094 - DNA, 23 bp, Artificial Sequence
  Description of Artificial Sequence: Synthetic oligonucleotide
  X-linked inhibitor of apoptosis (XIAP) siRNA
ttgtattttgaactatgaatgga

SEQ ID NO: 15095 - DNA, 23 bp, Artificial Sequence
  Description of Artificial Sequence: Synthetic oligonucleotide
  X-linked inhibitor of apoptosis (XIAP) siRNA
tgtattttgaactatgaatggag

SEQ ID NO: 15096 - DNA, 23 bp, Artificial Sequence
  Description of Artificial Sequence: Synthetic oligonucleotide
  X-linked inhibitor of apoptosis (XIAP) siRNA
gtattttgaactatgaatggaga

SEQ ID NO: 15097 - DNA, 23 bp, Artificial Sequence
  Description of Artificial Sequence: Synthetic oligonucleotide
  X-linked inhibitor of apoptosis (XIAP) siRNA
tattttgaactatgaatggagac

SEQ ID NO: 15098 - DNA, 23 bp, Artificial Sequence
  Description of Artificial Sequence: Synthetic oligonucleotide
  X-linked inhibitor of apoptosis (XIAP) siRNA
attttgaactatgaatggagact

SEQ ID NO: 15099 - DNA, 23 bp, Artificial Sequence
  Description of Artificial Sequence: Synthetic oligonucleotide
  X-linked inhibitor of apoptosis (XIAP) siRNA
ttttgaactatgaatggagacta

SEQ ID NO: 15100 - DNA, 23 bp, Artificial Sequence
  Description of Artificial Sequence: Synthetic oligonucleotide
  X-linked inhibitor of apoptosis (XIAP) siRNA
tttgaactatgaatggagactac

SEQ ID NO: 15101 - DNA, 23 bp, Artificial Sequence
  Description of Artificial Sequence: Synthetic oligonucleotide
  X-linked inhibitor of apoptosis (XIAP) siRNA
ttgaactatgaatggagactacc

SEQ ID NO: 15102 - DNA, 23 bp, Artificial Sequence
  Description of Artificial Sequence: Synthetic oligonucleotide
  X-linked inhibitor of apoptosis (XIAP) siRNA
tgaactatgaatggagactaccg

SEQ ID NO: 15103 - DNA, 23 bp, Artificial Sequence
  Description of Artificial Sequence: Synthetic oligonucleotide
  X-linked inhibitor of apoptosis (XIAP) siRNA
gaactatgaatggagactaccgc

SEQ ID NO: 15104 - DNA, 23 bp, Artificial Sequence
  Description of Artificial Sequence: Synthetic oligonucleotide
  X-linked inhibitor of apoptosis (XIAP) siRNA
aactatgaatggagactaccgcc

SEQ ID NO: 15105 - DNA, 23 bp, Artificial Sequence
  Description of Artificial Sequence: Synthetic oligonucleotide
  X-linked inhibitor of apoptosis (XIAP) siRNA
actatgaatggagactaccgccc

SEQ ID NO: 15106 - DNA, 23 bp, Artificial Sequence
  Description of Artificial Sequence: Synthetic oligonucleotide
  X-linked inhibitor of apoptosis (XIAP) siRNA
ctatgaatggagactaccgcccc

SEQ ID NO: 15107 - DNA, 23 bp, Artificial Sequence
  Description of Artificial Sequence: Synthetic oligonucleotide
  X-linked inhibitor of apoptosis (XIAP) siRNA
tatgaatggagactaccgcccca

SEQ ID NO: 15108 - DNA, 23 bp, Artificial Sequence
  Description of Artificial Sequence: Synthetic oligonucleotide
  X-linked inhibitor of apoptosis (XIAP) siRNA
atgaatggagactaccgccccag

SEQ ID NO: 15109 - DNA, 23 bp, Artificial Sequence
  Description of Artificial Sequence: Synthetic oligonucleotide
  X-linked inhibitor of apoptosis (XIAP) siRNA
tgaatggagactaccgccccagc

SEQ ID NO: 15110 - DNA, 23 bp, Artificial Sequence
  Description of Artificial Sequence: Synthetic oligonucleotide
  X-linked inhibitor of apoptosis (XIAP) siRNA
gaatggagactaccgccccagca

SEQ ID NO: 15111 - DNA, 23 bp, Artificial Sequence
  Description of Artificial Sequence: Synthetic oligonucleotide
  X-linked inhibitor of apoptosis (XIAP) siRNA
aatggagactaccgccccagcat

SEQ ID NO: 15112 - DNA, 23 bp, Artificial Sequence
  Description of Artificial Sequence: Synthetic oligonucleotide
  X-linked inhibitor of apoptosis (XIAP) siRNA
atggagactaccgccccagcatt

SEQ ID NO: 15113 - DNA, 23 bp, Artificial Sequence
  Description of Artificial Sequence: Synthetic oligonucleotide
  X-linked inhibitor of apoptosis (XIAP) siRNA
tggagactaccgccccagcatta

SEQ ID NO: 15114 - DNA, 23 bp, Artificial Sequence
  Description of Artificial Sequence: Synthetic oligonucleotide
  X-linked inhibitor of apoptosis (XIAP) siRNA
ggagactaccgccccagcattag

SEQ ID NO: 15115 - DNA, 23 bp, Artificial Sequence
  Description of Artificial Sequence: Synthetic oligonucleotide
  X-linked inhibitor of apoptosis (XIAP) siRNA
gagactaccgccccagcattagt

SEQ ID NO: 15116 - DNA, 23 bp, Artificial Sequence
  Description of Artificial Sequence: Synthetic oligonucleotide
  X-linked inhibitor of apoptosis (XIAP) siRNA
agactaccgccccagcattagtt

SEQ ID NO: 15117 - DNA, 23 bp, Artificial Sequence
  Description of Artificial Sequence: Synthetic oligonucleotide
  X-linked inhibitor of apoptosis (XIAP) siRNA
gactaccgccccagcattagttt

SEQ ID NO: 15118 - DNA, 23 bp, Artificial Sequence
  Description of Artificial Sequence: Synthetic oligonucleotide
  X-linked inhibitor of apoptosis (XIAP) siRNA
actaccgccccagcattagtttc

SEQ ID NO: 15119 - DNA, 23 bp, Artificial Sequence
  Description of Artificial Sequence: Synthetic oligonucleotide
  X-linked inhibitor of apoptosis (XIAP) siRNA
ctaccgccccagcattagtttca

SEQ ID NO: 15120 - DNA, 23 bp, Artificial Sequence
  Description of Artificial Sequence: Synthetic oligonucleotide
  X-linked inhibitor of apoptosis (XIAP) siRNA
taccgccccagcattagtttcac

SEQ ID NO: 15121 - DNA, 23 bp, Artificial Sequence
  Description of Artificial Sequence: Synthetic oligonucleotide
  X-linked inhibitor of apoptosis (XIAP) siRNA
accgccccagcattagtttcaca

SEQ ID NO: 15122 - DNA, 23 bp, Artificial Sequence
  Description of Artificial Sequence: Synthetic oligonucleotide
  X-linked inhibitor of apoptosis (XIAP) siRNA
ccgccccagcattagtttcacat

SEQ ID NO: 15123 - DNA, 23 bp, Artificial Sequence
  Description of Artificial Sequence: Synthetic oligonucleotide
  X-linked inhibitor of apoptosis (XIAP) siRNA
cgccccagcattagtttcacatg

SEQ ID NO: 15124 - DNA, 23 bp, Artificial Sequence
  Description of Artificial Sequence: Synthetic oligonucleotide
  X-linked inhibitor of apoptosis (XIAP) siRNA
gccccagcattagtttcacatga

SEQ ID NO: 15125 - DNA, 23 bp, Artificial Sequence
  Description of Artificial Sequence: Synthetic oligonucleotide
  X-linked inhibitor of apoptosis (XIAP) siRNA
ccccagcattagtttcacatgat

SEQ ID NO: 15126 - DNA, 23 bp, Artificial Sequence
  Description of Artificial Sequence: Synthetic oligonucleotide
  X-linked inhibitor of apoptosis (XIAP) siRNA
cccagcattagtttcacatgata

SEQ ID NO: 15127 - DNA, 23 bp, Artificial Sequence
  Description of Artificial Sequence: Synthetic oligonucleotide
  X-linked inhibitor of apoptosis (XIAP) siRNA
ccagcattagtttcacatgatat

SEQ ID NO: 15128 - DNA, 23 bp, Artificial Sequence
  Description of Artificial Sequence: Synthetic oligonucleotide
  X-linked inhibitor of apoptosis (XIAP) siRNA
cagcattagtttcacatgatata

SEQ ID NO: 15129 - DNA, 23 bp, Artificial Sequence
  Description of Artificial Sequence: Synthetic oligonucleotide
  X-linked inhibitor of apoptosis (XIAP) siRNA
agcattagtttcacatgatatac

SEQ ID NO: 15130 - DNA, 23 bp, Artificial Sequence
  Description of Artificial Sequence: Synthetic oligonucleotide
  X-linked inhibitor of apoptosis (XIAP) siRNA
gcattagtttcacatgatatacc

SEQ ID NO: 15131 - DNA, 23 bp, Artificial Sequence
  Description of Artificial Sequence: Synthetic oligonucleotide
  X-linked inhibitor of apoptosis (XIAP) siRNA
cattagtttcacatgatataccc

SEQ ID NO: 15132 - DNA, 23 bp, Artificial Sequence
  Description of Artificial Sequence: Synthetic oligonucleotide
  X-linked inhibitor of apoptosis (XIAP) siRNA
attagtttcacatgatataccct

SEQ ID NO: 15133 - DNA, 23 bp, Artificial Sequence
  Description of Artificial Sequence: Synthetic oligonucleotide
  X-linked inhibitor of apoptosis (XIAP) siRNA
ttagtttcacatgatataccctt

SEQ ID NO: 15134 - DNA, 23 bp, Artificial Sequence
  Description of Artificial Sequence: Synthetic oligonucleotide
  X-linked inhibitor of apoptosis (XIAP) siRNA
tagtttcacatgatatacccttt

SEQ ID NO: 15135 - DNA, 23 bp, Artificial Sequence
  Description of Artificial Sequence: Synthetic oligonucleotide
  X-linked inhibitor of apoptosis (XIAP) siRNA
agtttcacatgatatacccttta

SEQ ID NO: 15136 - DNA, 23 bp, Artificial Sequence
  Description of Artificial Sequence: Synthetic oligonucleotide
  X-linked inhibitor of apoptosis (XIAP) siRNA
gtttcacatgatataccctttaa

SEQ ID NO: 15137 - DNA, 23 bp, Artificial Sequence
  Description of Artificial Sequence: Synthetic oligonucleotide
  X-linked inhibitor of apoptosis (XIAP) siRNA
tttcacatgatataccctttaaa

SEQ ID NO: 15138 - DNA, 23 bp, Artificial Sequence
  Description of Artificial Sequence: Synthetic oligonucleotide
  X-linked inhibitor of apoptosis (XIAP) siRNA
ttcacatgatataccctttaaac

SEQ ID NO: 15139 - DNA, 23 bp, Artificial Sequence
  Description of Artificial Sequence: Synthetic oligonucleotide
  X-linked inhibitor of apoptosis (XIAP) siRNA
tcacatgatataccctttaaacc

SEQ ID NO: 15140 - DNA, 23 bp, Artificial Sequence
  Description of Artificial Sequence: Synthetic oligonucleotide
  X-linked inhibitor of apoptosis (XIAP) siRNA
cacatgatataccctttaaaccc

SEQ ID NO: 15141 - DNA, 23 bp, Artificial Sequence
  Description of Artificial Sequence: Synthetic oligonucleotide
  X-linked inhibitor of apoptosis (XIAP) siRNA
acatgatataccctttaaacccg

SEQ ID NO: 15142 - DNA, 23 bp, Artificial Sequence
  Description of Artificial Sequence: Synthetic oligonucleotide
  X-linked inhibitor of apoptosis (XIAP) siRNA
catgatataccctttaaacccga

SEQ ID NO: 15143 - DNA, 23 bp, Artificial Sequence
  Description of Artificial Sequence: Synthetic oligonucleotide
  X-linked inhibitor of apoptosis (XIAP) siRNA
atgatataccctttaaacccgaa

SEQ ID NO: 15144 - DNA, 23 bp, Artificial Sequence
  Description of Artificial Sequence: Synthetic oligonucleotide
  X-linked inhibitor of apoptosis (XIAP) siRNA
tgatataccctttaaacccgaat

SEQ ID NO: 15145 - DNA, 23 bp, Artificial Sequence
  Description of Artificial Sequence: Synthetic oligonucleotide
  X-linked inhibitor of apoptosis (XIAP) siRNA
gatataccctttaaacccgaatc

SEQ ID NO: 15146 - DNA, 23 bp, Artificial Sequence
  Description of Artificial Sequence: Synthetic oligonucleotide
  X-linked inhibitor of apoptosis (XIAP) siRNA
atataccctttaaacccgaatca

SEQ ID NO: 15147 - DNA, 23 bp, Artificial Sequence
  Description of Artificial Sequence: Synthetic oligonucleotide
  X-linked inhibitor of apoptosis (XIAP) siRNA
tataccctttaaacccgaatcat

SEQ ID NO: 15148 - DNA, 23 bp, Artificial Sequence
  Description of Artificial Sequence: Synthetic oligonucleotide
  X-linked inhibitor of apoptosis (XIAP) siRNA
ataccctttaaacccgaatcatt

SEQ ID NO: 15149 - DNA, 23 bp, Artificial Sequence
  Description of Artificial Sequence: Synthetic oligonucleotide
  X-linked inhibitor of apoptosis (XIAP) siRNA
taccctttaaacccgaatcattg

SEQ ID NO: 15150 - DNA, 23 bp, Artificial Sequence
  Description of Artificial Sequence: Synthetic oligonucleotide
  X-linked inhibitor of apoptosis (XIAP) siRNA
accctttaaacccgaatcattgt

SEQ ID NO: 15151 - DNA, 23 bp, Artificial Sequence
  Description of Artificial Sequence: Synthetic oligonucleotide
  X-linked inhibitor of apoptosis (XIAP) siRNA
ccctttaaacccgaatcattgtt

SEQ ID NO: 15152 - DNA, 23 bp, Artificial Sequence
  Description of Artificial Sequence: Synthetic oligonucleotide
  X-linked inhibitor of apoptosis (XIAP) siRNA
cctttaaacccgaatcattgttt

SEQ ID NO: 15153 - DNA, 23 bp, Artificial Sequence
  Description of Artificial Sequence: Synthetic oligonucleotide
  X-linked inhibitor of apoptosis (XIAP) siRNA
ctttaaacccgaatcattgtttt

SEQ ID NO: 15154 - DNA, 23 bp, Artificial Sequence
  Description of Artificial Sequence: Synthetic oligonucleotide
  X-linked inhibitor of apoptosis (XIAP) siRNA
tttaaacccgaatcattgtttta

SEQ ID NO: 15155 - DNA, 23 bp, Artificial Sequence
  Description of Artificial Sequence: Synthetic oligonucleotide
  X-linked inhibitor of apoptosis (XIAP) siRNA
ttaaacccgaatcattgttttat

SEQ ID NO: 15156 - DNA, 23 bp, Artificial Sequence
  Description of Artificial Sequence: Synthetic oligonucleotide
  X-linked inhibitor of apoptosis (XIAP) siRNA
taaacccgaatcattgttttatt

SEQ ID NO: 15157 - DNA, 23 bp, Artificial Sequence
  Description of Artificial Sequence: Synthetic oligonucleotide
  X-linked inhibitor of apoptosis (XIAP) siRNA
aaacccgaatcattgttttattt

SEQ ID NO: 15158 - DNA, 23 bp, Artificial Sequence
  Description of Artificial Sequence: Synthetic oligonucleotide
  X-linked inhibitor of apoptosis (XIAP) siRNA
aacccgaatcattgttttatttc

SEQ ID NO: 15159 - DNA, 23 bp, Artificial Sequence
  Description of Artificial Sequence: Synthetic oligonucleotide
  X-linked inhibitor of apoptosis (XIAP) siRNA
acccgaatcattgttttatttcc

SEQ ID NO: 15160 - DNA, 23 bp, Artificial Sequence
  Description of Artificial Sequence: Synthetic oligonucleotide
  X-linked inhibitor of apoptosis (XIAP) siRNA
cccgaatcattgttttatttcct

SEQ ID NO: 15161 - DNA, 23 bp, Artificial Sequence
  Description of Artificial Sequence: Synthetic oligonucleotide
  X-linked inhibitor of apoptosis (XIAP) siRNA
ccgaatcattgttttatttcctg

SEQ ID NO: 15162 - DNA, 23 bp, Artificial Sequence
  Description of Artificial Sequence: Synthetic oligonucleotide
  X-linked inhibitor of apoptosis (XIAP) siRNA
cgaatcattgttttatttcctga

SEQ ID NO: 15163 - DNA, 23 bp, Artificial Sequence
  Description of Artificial Sequence: Synthetic oligonucleotide
  X-linked inhibitor of apoptosis (XIAP) siRNA
gaatcattgttttatttcctgat

SEQ ID NO: 15164 - DNA, 23 bp, Artificial Sequence
  Description of Artificial Sequence: Synthetic oligonucleotide
  X-linked inhibitor of apoptosis (XIAP) siRNA
aatcattgttttatttcctgatt

SEQ ID NO: 15165 - DNA, 23 bp, Artificial Sequence
  Description of Artificial Sequence: Synthetic oligonucleotide
  X-linked inhibitor of apoptosis (XIAP) siRNA
atcattgttttatttcctgatta

SEQ ID NO: 15166 - DNA, 23 bp, Artificial Sequence
  Description of Artificial Sequence: Synthetic oligonucleotide
  X-linked inhibitor of apoptosis (XIAP) siRNA
tcattgttttatttcctgattac

SEQ ID NO: 15167 - DNA, 23 bp, Artificial Sequence
  Description of Artificial Sequence: Synthetic oligonucleotide
  X-linked inhibitor of apoptosis (XIAP) siRNA
cattgttttatttcctgattaca

SEQ ID NO: 15168 - DNA, 23 bp, Artificial Sequence
  Description of Artificial Sequence: Synthetic oligonucleotide
  X-linked inhibitor of apoptosis (XIAP) siRNA
attgttttatttcctgattacac

SEQ ID NO: 15169 - DNA, 23 bp, Artificial Sequence
  Description of Artificial Sequence: Synthetic oligonucleotide
  X-linked inhibitor of apoptosis (XIAP) siRNA
ttgttttatttcctgattacaca

SEQ ID NO: 15170 - DNA, 23 bp, Artificial Sequence
  Description of Artificial Sequence: Synthetic oligonucleotide
  X-linked inhibitor of apoptosis (XIAP) siRNA
tgttttatttcctgattacacag

SEQ ID NO: 15171 - DNA, 23 bp, Artificial Sequence
  Description of Artificial Sequence: Synthetic oligonucleotide
  X-linked inhibitor of apoptosis (XIAP) siRNA
gttttatttcctgattacacagg

SEQ ID NO: 15172 - DNA, 23 bp, Artificial Sequence
  Description of Artificial Sequence: Synthetic oligonucleotide
  X-linked inhibitor of apoptosis (XIAP) siRNA
ttttatttcctgattacacaggt

SEQ ID NO: 15173 - DNA, 23 bp, Artificial Sequence
  Description of Artificial Sequence: Synthetic oligonucleotide
  X-linked inhibitor of apoptosis (XIAP) siRNA
tttatttcctgattacacaggtg

SEQ ID NO: 15174 - DNA, 23 bp, Artificial Sequence
  Description of Artificial Sequence: Synthetic oligonucleotide
  X-linked inhibitor of apoptosis (XIAP) siRNA
ttatttcctgattacacaggtgt

SEQ ID NO: 15175 - DNA, 23 bp, Artificial Sequence
  Description of Artificial Sequence: Synthetic oligonucleotide
  X-linked inhibitor of apoptosis (XIAP) siRNA
tatttcctgattacacaggtgtt

SEQ ID NO: 15176 - DNA, 23 bp, Artificial Sequence
  Description of Artificial Sequence: Synthetic oligonucleotide
  X-linked inhibitor of apoptosis (XIAP) siRNA
atttcctgattacacaggtgttg

SEQ ID NO: 15177 - DNA, 23 bp, Artificial Sequence
  Description of Artificial Sequence: Synthetic oligonucleotide
  X-linked inhibitor of apoptosis (XIAP) siRNA
tttcctgattacacaggtgttga

SEQ ID NO: 15178 - DNA, 23 bp, Artificial Sequence
  Description of Artificial Sequence: Synthetic oligonucleotide
  X-linked inhibitor of apoptosis (XIAP) siRNA
ttcctgattacacaggtgttgaa

SEQ ID NO: 15179 - DNA, 23 bp, Artificial Sequence
  Description of Artificial Sequence: Synthetic oligonucleotide
  X-linked inhibitor of apoptosis (XIAP) siRNA
tcctgattacacaggtgttgaat

SEQ ID NO: 15180 - DNA, 23 bp, Artificial Sequence
  Description of Artificial Sequence: Synthetic oligonucleotide
  X-linked inhibitor of apoptosis (XIAP) siRNA
cctgattacacaggtgttgaatg

SEQ ID NO: 15181 - DNA, 23 bp, Artificial Sequence
  Description of Artificial Sequence: Synthetic oligonucleotide
  X-linked inhibitor of apoptosis (XIAP) siRNA
ctgattacacaggtgttgaatgg

SEQ ID NO: 15182 - DNA, 23 bp, Artificial Sequence
  Description of Artificial Sequence: Synthetic oligonucleotide
  X-linked inhibitor of apoptosis (XIAP) siRNA
tgattacacaggtgttgaatggg

SEQ ID NO: 15183 - DNA, 23 bp, Artificial Sequence
  Description of Artificial Sequence: Synthetic oligonucleotide
  X-linked inhibitor of apoptosis (XIAP) siRNA
gattacacaggtgttgaatgggg

SEQ ID NO: 15184 - DNA, 23 bp, Artificial Sequence
  Description of Artificial Sequence: Synthetic oligonucleotide
  X-linked inhibitor of apoptosis (XIAP) siRNA
attacacaggtgttgaatgggga

SEQ ID NO: 15185 - DNA, 23 bp, Artificial Sequence
  Description of Artificial Sequence: Synthetic oligonucleotide
  X-linked inhibitor of apoptosis (XIAP) siRNA
ttacacaggtgttgaatggggaa

SEQ ID NO: 15186 - DNA, 23 bp, Artificial Sequence
  Description of Artificial Sequence: Synthetic oligonucleotide
  X-linked inhibitor of apoptosis (XIAP) siRNA
tacacaggtgttgaatggggaaa

SEQ ID NO: 15187 - DNA, 23 bp, Artificial Sequence
  Description of Artificial Sequence: Synthetic oligonucleotide
  X-linked inhibitor of apoptosis (XIAP) siRNA
acacaggtgttgaatggggaaag

SEQ ID NO: 15188 - DNA, 23 bp, Artificial Sequence
  Description of Artificial Sequence: Synthetic oligonucleotide
  X-linked inhibitor of apoptosis (XIAP) siRNA
cacaggtgttgaatggggaaagg

SEQ ID NO: 15189 - DNA, 23 bp, Artificial Sequence
  Description of Artificial Sequence: Synthetic oligonucleotide
  X-linked inhibitor of apoptosis (XIAP) siRNA
acaggtgttgaatggggaaaggg

SEQ ID NO: 15190 - DNA, 23 bp, Artificial Sequence
  Description of Artificial Sequence: Synthetic oligonucleotide
  X-linked inhibitor of apoptosis (XIAP) siRNA
caggtgttgaatggggaaagggg

SEQ ID NO: 15191 - DNA, 23 bp, Artificial Sequence
  Description of Artificial Sequence: Synthetic oligonucleotide
  X-linked inhibitor of apoptosis (XIAP) siRNA
aggtgttgaatggggaaaggggc

SEQ ID NO: 15192 - DNA, 23 bp, Artificial Sequence
  Description of Artificial Sequence: Synthetic oligonucleotide
  X-linked inhibitor of apoptosis (XIAP) siRNA
ggtgttgaatggggaaaggggct

SEQ ID NO: 15193 - DNA, 23 bp, Artificial Sequence
  Description of Artificial Sequence: Synthetic oligonucleotide
  X-linked inhibitor of apoptosis (XIAP) siRNA
gtgttgaatggggaaaggggcta

SEQ ID NO: 15194 - DNA, 23 bp, Artificial Sequence
  Description of Artificial Sequence: Synthetic oligonucleotide
  X-linked inhibitor of apoptosis (XIAP) siRNA
tgttgaatggggaaaggggctag

SEQ ID NO: 15195 - DNA, 23 bp, Artificial Sequence
  Description of Artificial Sequence: Synthetic oligonucleotide
  X-linked inhibitor of apoptosis (XIAP) siRNA
gttgaatggggaaaggggctagt

SEQ ID NO: 15196 - DNA, 23 bp, Artificial Sequence
  Description of Artificial Sequence: Synthetic oligonucleotide
  X-linked inhibitor of apoptosis (XIAP) siRNA
ttgaatggggaaaggggctagta

SEQ ID NO: 15197 - DNA, 23 bp, Artificial Sequence
  Description of Artificial Sequence: Synthetic oligonucleotide
  X-linked inhibitor of apoptosis (XIAP) siRNA
tgaatggggaaaggggctagtat

SEQ ID NO: 15198 - DNA, 23 bp, Artificial Sequence
  Description of Artificial Sequence: Synthetic oligonucleotide
  X-linked inhibitor of apoptosis (XIAP) siRNA
gaatggggaaaggggctagtata

SEQ ID NO: 15199 - DNA, 23 bp, Artificial Sequence
  Description of Artificial Sequence: Synthetic oligonucleotide
  X-linked inhibitor of apoptosis (XIAP) siRNA
aatggggaaaggggctagtatat

SEQ ID NO: 15200 - DNA, 23 bp, Artificial Sequence
  Description of Artificial Sequence: Synthetic oligonucleotide
  X-linked inhibitor of apoptosis (XIAP) siRNA
atggggaaaggggctagtatatc

SEQ ID NO: 15201 - DNA, 23 bp, Artificial Sequence
  Description of Artificial Sequence: Synthetic oligonucleotide
  X-linked inhibitor of apoptosis (XIAP) siRNA
tggggaaaggggctagtatatca

SEQ ID NO: 15202 - DNA, 23 bp, Artificial Sequence
  Description of Artificial Sequence: Synthetic oligonucleotide
  X-linked inhibitor of apoptosis (XIAP) siRNA
ggggaaaggggctagtatatcag

SEQ ID NO: 15203 - DNA, 23 bp, Artificial Sequence
  Description of Artificial Sequence: Synthetic oligonucleotide
  X-linked inhibitor of apoptosis (XIAP) siRNA
gggaaaggggctagtatatcagt

SEQ ID NO: 15204 - DNA, 23 bp, Artificial Sequence
  Description of Artificial Sequence: Synthetic oligonucleotide
  X-linked inhibitor of apoptosis (XIAP) siRNA
ggaaaggggctagtatatcagta

SEQ ID NO: 15205 - DNA, 23 bp, Artificial Sequence
  Description of Artificial Sequence: Synthetic oligonucleotide
  X-linked inhibitor of apoptosis (XIAP) siRNA
gaaaggggctagtatatcagtag

SEQ ID NO: 15206 - DNA, 23 bp, Artificial Sequence
  Description of Artificial Sequence: Synthetic oligonucleotide
  X-linked inhibitor of apoptosis (XIAP) siRNA
aaaggggctagtatatcagtagg

SEQ ID NO: 15207 - DNA, 23 bp, Artificial Sequence
  Description of Artificial Sequence: Synthetic oligonucleotide
  X-linked inhibitor of apoptosis (XIAP) siRNA
aaggggctagtatatcagtagga

SEQ ID NO: 15208 - DNA, 23 bp, Artificial Sequence
  Description of Artificial Sequence: Synthetic oligonucleotide
  X-linked inhibitor of apoptosis (XIAP) siRNA
aggggctagtatatcagtaggat

SEQ ID NO: 15209 - DNA, 23 bp, Artificial Sequence
  Description of Artificial Sequence: Synthetic oligonucleotide
  X-linked inhibitor of apoptosis (XIAP) siRNA
ggggctagtatatcagtaggata

SEQ ID NO: 15210 - DNA, 23 bp, Artificial Sequence
  Description of Artificial Sequence: Synthetic oligonucleotide
  X-linked inhibitor of apoptosis (XIAP) siRNA
gggctagtatatcagtaggatat

SEQ ID NO: 15211 - DNA, 23 bp, Artificial Sequence
  Description of Artificial Sequence: Synthetic oligonucleotide
  X-linked inhibitor of apoptosis (XIAP) siRNA
ggctagtatatcagtaggatata

SEQ ID NO: 15212 - DNA, 23 bp, Artificial Sequence
  Description of Artificial Sequence: Synthetic oligonucleotide
  X-linked inhibitor of apoptosis (XIAP) siRNA
gctagtatatcagtaggatatac

SEQ ID NO: 15213 - DNA, 23 bp, Artificial Sequence
  Description of Artificial Sequence: Synthetic oligonucleotide
  X-linked inhibitor of apoptosis (XIAP) siRNA
ctagtatatcagtaggatatact

SEQ ID NO: 15214 - DNA, 23 bp, Artificial Sequence
  Description of Artificial Sequence: Synthetic oligonucleotide
  X-linked inhibitor of apoptosis (XIAP) siRNA
tagtatatcagtaggatatacta

SEQ ID NO: 15215 - DNA, 23 bp, Artificial Sequence
  Description of Artificial Sequence: Synthetic oligonucleotide
  X-linked inhibitor of apoptosis (XIAP) siRNA
agtatatcagtaggatatactat

SEQ ID NO: 15216 - DNA, 23 bp, Artificial Sequence
  Description of Artificial Sequence: Synthetic oligonucleotide
  X-linked inhibitor of apoptosis (XIAP) siRNA
gtatatcagtaggatatactatg

SEQ ID NO: 15217 - DNA, 23 bp, Artificial Sequence
  Description of Artificial Sequence: Synthetic oligonucleotide
  X-linked inhibitor of apoptosis (XIAP) siRNA
tatatcagtaggatatactatgg

SEQ ID NO: 15218 - DNA, 23 bp, Artificial Sequence
  Description of Artificial Sequence: Synthetic oligonucleotide
  X-linked inhibitor of apoptosis (XIAP) siRNA
atatcagtaggatatactatggg

SEQ ID NO: 15219 - DNA, 23 bp, Artificial Sequence
  Description of Artificial Sequence: Synthetic oligonucleotide
  X-linked inhibitor of apoptosis (XIAP) siRNA
tatcagtaggatatactatggga

SEQ ID NO: 15220 - DNA, 23 bp, Artificial Sequence
  Description of Artificial Sequence: Synthetic oligonucleotide
  X-linked inhibitor of apoptosis (XIAP) siRNA
atcagtaggatatactatgggat

SEQ ID NO: 15221 - DNA, 23 bp, Artificial Sequence
  Description of Artificial Sequence: Synthetic oligonucleotide
  X-linked inhibitor of apoptosis (XIAP) siRNA
tcagtaggatatactatgggatg

SEQ ID NO: 15222 - DNA, 23 bp, Artificial Sequence
  Description of Artificial Sequence: Synthetic oligonucleotide
  X-linked inhibitor of apoptosis (XIAP) siRNA
cagtaggatatactatgggatgt

SEQ ID NO: 15223 - DNA, 23 bp, Artificial Sequence
  Description of Artificial Sequence: Synthetic oligonucleotide
  X-linked inhibitor of apoptosis (XIAP) siRNA
agtaggatatactatgggatgta

SEQ ID NO: 15224 - DNA, 23 bp, Artificial Sequence
  Description of Artificial Sequence: Synthetic oligonucleotide
  X-linked inhibitor of apoptosis (XIAP) siRNA
gtaggatatactatgggatgtat

SEQ ID NO: 15225 - DNA, 23 bp, Artificial Sequence
  Description of Artificial Sequence: Synthetic oligonucleotide
  X-linked inhibitor of apoptosis (XIAP) siRNA
taggatatactatgggatgtata

SEQ ID NO: 15226 - DNA, 23 bp, Artificial Sequence
  Description of Artificial Sequence: Synthetic oligonucleotide
  X-linked inhibitor of apoptosis (XIAP) siRNA
aggatatactatgggatgtatat

SEQ ID NO: 15227 - DNA, 23 bp, Artificial Sequence
  Description of Artificial Sequence: Synthetic oligonucleotide
  X-linked inhibitor of apoptosis (XIAP) siRNA
ggatatactatgggatgtatata

SEQ ID NO: 15228 - DNA, 23 bp, Artificial Sequence
  Description of Artificial Sequence: Synthetic oligonucleotide
  X-linked inhibitor of apoptosis (XIAP) siRNA
gatatactatgggatgtatatat

SEQ ID NO: 15229 - DNA, 23 bp, Artificial Sequence
  Description of Artificial Sequence: Synthetic oligonucleotide
  X-linked inhibitor of apoptosis (XIAP) siRNA
atatactatgggatgtatatata

SEQ ID NO: 15230 - DNA, 23 bp, Artificial Sequence
  Description of Artificial Sequence: Synthetic oligonucleotide
  X-linked inhibitor of apoptosis (XIAP) siRNA
tatactatgggatgtatatatat

SEQ ID NO: 15231 - DNA, 23 bp, Artificial Sequence
  Description of Artificial Sequence: Synthetic oligonucleotide
  X-linked inhibitor of apoptosis (XIAP) siRNA
atactatgggatgtatatatatc

SEQ ID NO: 15232 - DNA, 23 bp, Artificial Sequence
  Description of Artificial Sequence: Synthetic oligonucleotide
  X-linked inhibitor of apoptosis (XIAP) siRNA
tactatgggatgtatatatatca

SEQ ID NO: 15233 - DNA, 23 bp, Artificial Sequence
  Description of Artificial Sequence: Synthetic oligonucleotide
  X-linked inhibitor of apoptosis (XIAP) siRNA
actatgggatgtatatatatcat

SEQ ID NO: 15234 - DNA, 23 bp, Artificial Sequence
  Description of Artificial Sequence: Synthetic oligonucleotide
  X-linked inhibitor of apoptosis (XIAP) siRNA
ctatgggatgtatatatatcatt

SEQ ID NO: 15235 - DNA, 23 bp, Artificial Sequence
  Description of Artificial Sequence: Synthetic oligonucleotide
  X-linked inhibitor of apoptosis (XIAP) siRNA
tatgggatgtatatatatcattg

SEQ ID NO: 15236 - DNA, 23 bp, Artificial Sequence
  Description of Artificial Sequence: Synthetic oligonucleotide
  X-linked inhibitor of apoptosis (XIAP) siRNA
atgggatgtatatatatcattgc

SEQ ID NO: 15237 - DNA, 23 bp, Artificial Sequence
  Description of Artificial Sequence: Synthetic oligonucleotide
  X-linked inhibitor of apoptosis (XIAP) siRNA
tgggatgtatatatatcattgct

SEQ ID NO: 15238 - DNA, 23 bp, Artificial Sequence
  Description of Artificial Sequence: Synthetic oligonucleotide
  X-linked inhibitor of apoptosis (XIAP) siRNA
gggatgtatatatatcattgctg

SEQ ID NO: 15239 - DNA, 23 bp, Artificial Sequence
  Description of Artificial Sequence: Synthetic oligonucleotide
  X-linked inhibitor of apoptosis (XIAP) siRNA
ggatgtatatatatcattgctgt

SEQ ID NO: 15240 - DNA, 23 bp, Artificial Sequence
  Description of Artificial Sequence: Synthetic oligonucleotide
  X-linked inhibitor of apoptosis (XIAP) siRNA
gatgtatatatatcattgctgtt

SEQ ID NO: 15241 - DNA, 23 bp, Artificial Sequence
  Description of Artificial Sequence: Synthetic oligonucleotide
  X-linked inhibitor of apoptosis (XIAP) siRNA
atgtatatatatcattgctgtta

SEQ ID NO: 15242 - DNA, 23 bp, Artificial Sequence
  Description of Artificial Sequence: Synthetic oligonucleotide
  X-linked inhibitor of apoptosis (XIAP) siRNA
tgtatatatatcattgctgttag

SEQ ID NO: 15243 - DNA, 23 bp, Artificial Sequence
  Description of Artificial Sequence: Synthetic oligonucleotide
  X-linked inhibitor of apoptosis (XIAP) siRNA
gtatatatatcattgctgttaga

SEQ ID NO: 15244 - DNA, 23 bp, Artificial Sequence
  Description of Artificial Sequence: Synthetic oligonucleotide
  X-linked inhibitor of apoptosis (XIAP) siRNA
tatatatatcattgctgttagag

SEQ ID NO: 15245 - DNA, 23 bp, Artificial Sequence
  Description of Artificial Sequence: Synthetic oligonucleotide
  X-linked inhibitor of apoptosis (XIAP) siRNA
atatatatcattgctgttagaga

SEQ ID NO: 15246 - DNA, 23 bp, Artificial Sequence
  Description of Artificial Sequence: Synthetic oligonucleotide
  X-linked inhibitor of apoptosis (XIAP) siRNA
tatatatcattgctgttagagaa

SEQ ID NO: 15247 - DNA, 23 bp, Artificial Sequence
  Description of Artificial Sequence: Synthetic oligonucleotide
  X-linked inhibitor of apoptosis (XIAP) siRNA
atatatcattgctgttagagaaa

SEQ ID NO: 15248 - DNA, 23 bp, Artificial Sequence
  Description of Artificial Sequence: Synthetic oligonucleotide
  X-linked inhibitor of apoptosis (XIAP) siRNA
tatatcattgctgttagagaaat

SEQ ID NO: 15249 - DNA, 23 bp, Artificial Sequence
  Description of Artificial Sequence: Synthetic oligonucleotide
  X-linked inhibitor of apoptosis (XIAP) siRNA
atatcattgctgttagagaaatg

SEQ ID NO: 15250 - DNA, 23 bp, Artificial Sequence
  Description of Artificial Sequence: Synthetic oligonucleotide
  X-linked inhibitor of apoptosis (XIAP) siRNA
tatcattgctgttagagaaatga

SEQ ID NO: 15251 - DNA, 23 bp, Artificial Sequence
  Description of Artificial Sequence: Synthetic oligonucleotide
  X-linked inhibitor of apoptosis (XIAP) siRNA
atcattgctgttagagaaatgaa

SEQ ID NO: 15252 - DNA, 23 bp, Artificial Sequence
  Description of Artificial Sequence: Synthetic oligonucleotide
  X-linked inhibitor of apoptosis (XIAP) siRNA
tcattgctgttagagaaatgaaa

SEQ ID NO: 15253 - DNA, 23 bp, Artificial Sequence
  Description of Artificial Sequence: Synthetic oligonucleotide
  X-linked inhibitor of apoptosis (XIAP) siRNA
cattgctgttagagaaatgaaat

SEQ ID NO: 15254 - DNA, 23 bp, Artificial Sequence
  Description of Artificial Sequence: Synthetic oligonucleotide
  X-linked inhibitor of apoptosis (XIAP) siRNA
attgctgttagagaaatgaaata

SEQ ID NO: 15255 - DNA, 23 bp, Artificial Sequence
  Description of Artificial Sequence: Synthetic oligonucleotide
  X-linked inhibitor of apoptosis (XIAP) siRNA
ttgctgttagagaaatgaaataa

SEQ ID NO: 15256 - DNA, 23 bp, Artificial Sequence
  Description of Artificial Sequence: Synthetic oligonucleotide
  X-linked inhibitor of apoptosis (XIAP) siRNA
tgctgttagagaaatgaaataaa

SEQ ID NO: 15257 - DNA, 23 bp, Artificial Sequence
  Description of Artificial Sequence: Synthetic oligonucleotide
  X-linked inhibitor of apoptosis (XIAP) siRNA
gctgttagagaaatgaaataaaa

SEQ ID NO: 15258 - DNA, 23 bp, Artificial Sequence
  Description of Artificial Sequence: Synthetic oligonucleotide
  X-linked inhibitor of apoptosis (XIAP) siRNA
ctgttagagaaatgaaataaaat

SEQ ID NO: 15259 - DNA, 23 bp, Artificial Sequence
  Description of Artificial Sequence: Synthetic oligonucleotide
  X-linked inhibitor of apoptosis (XIAP) siRNA
tgttagagaaatgaaataaaatg

SEQ ID NO: 15260 - DNA, 23 bp, Artificial Sequence
  Description of Artificial Sequence: Synthetic oligonucleotide
  X-linked inhibitor of apoptosis (XIAP) siRNA
gttagagaaatgaaataaaatgg

SEQ ID NO: 15261 - DNA, 23 bp, Artificial Sequence
  Description of Artificial Sequence: Synthetic oligonucleotide
  X-linked inhibitor of apoptosis (XIAP) siRNA
ttagagaaatgaaataaaatggg

SEQ ID NO: 15262 - DNA, 23 bp, Artificial Sequence
  Description of Artificial Sequence: Synthetic oligonucleotide
  X-linked inhibitor of apoptosis (XIAP) siRNA
tagagaaatgaaataaaatgggg

SEQ ID NO: 15263 - DNA, 23 bp, Artificial Sequence
  Description of Artificial Sequence: Synthetic oligonucleotide
  X-linked inhibitor of apoptosis (XIAP) siRNA
agagaaatgaaataaaatggggc

SEQ ID NO: 15264 - DNA, 23 bp, Artificial Sequence
  Description of Artificial Sequence: Synthetic oligonucleotide
  X-linked inhibitor of apoptosis (XIAP) siRNA
gagaaatgaaataaaatggggct

SEQ ID NO: 15265 - DNA, 23 bp, Artificial Sequence
  Description of Artificial Sequence: Synthetic oligonucleotide
  X-linked inhibitor of apoptosis (XIAP) siRNA
agaaatgaaataaaatggggctg

SEQ ID NO: 15266 - DNA, 23 bp, Artificial Sequence
  Description of Artificial Sequence: Synthetic oligonucleotide
  X-linked inhibitor of apoptosis (XIAP) siRNA
gaaatgaaataaaatggggctgg

SEQ ID NO: 15267 - DNA, 23 bp, Artificial Sequence
  Description of Artificial Sequence: Synthetic oligonucleotide
  X-linked inhibitor of apoptosis (XIAP) siRNA
aaatgaaataaaatggggctggg

SEQ ID NO: 15268 - DNA, 23 bp, Artificial Sequence
  Description of Artificial Sequence: Synthetic oligonucleotide
  X-linked inhibitor of apoptosis (XIAP) siRNA
aatgaaataaaatggggctgggc

SEQ ID NO: 15269 - DNA, 23 bp, Artificial Sequence
  Description of Artificial Sequence: Synthetic oligonucleotide
  X-linked inhibitor of apoptosis (XIAP) siRNA
atgaaataaaatggggctgggct

SEQ ID NO: 15270 - DNA, 23 bp, Artificial Sequence
  Description of Artificial Sequence: Synthetic oligonucleotide
  X-linked inhibitor of apoptosis (XIAP) siRNA
tgaaataaaatggggctgggctc

SEQ ID NO: 15271 - DNA, 23 bp, Artificial Sequence
  Description of Artificial Sequence: Synthetic oligonucleotide
  X-linked inhibitor of apoptosis (XIAP) siRNA
gaaataaaatggggctgggctca

SEQ ID NO: 15272 - DNA, 23 bp, Artificial Sequence
  Description of Artificial Sequence: Synthetic oligonucleotide
  X-linked inhibitor of apoptosis (XIAP) siRNA
aaataaaatggggctgggctcag

SEQ ID NO: 15273 - DNA, 23 bp, Artificial Sequence
  Description of Artificial Sequence: Synthetic oligonucleotide
  X-linked inhibitor of apoptosis (XIAP) siRNA
aataaaatggggctgggctcagt

SEQ ID NO: 15274 - DNA, 23 bp, Artificial Sequence
  Description of Artificial Sequence: Synthetic oligonucleotide
  X-linked inhibitor of apoptosis (XIAP) siRNA
ataaaatggggctgggctcagtg

SEQ ID NO: 15275 - DNA, 23 bp, Artificial Sequence
  Description of Artificial Sequence: Synthetic oligonucleotide
  X-linked inhibitor of apoptosis (XIAP) siRNA
taaaatggggctgggctcagtgg

SEQ ID NO: 15276 - DNA, 23 bp, Artificial Sequence
  Description of Artificial Sequence: Synthetic oligonucleotide
  X-linked inhibitor of apoptosis (XIAP) siRNA
aaaatggggctgggctcagtggc

SEQ ID NO: 15277 - DNA, 23 bp, Artificial Sequence
  Description of Artificial Sequence: Synthetic oligonucleotide
  X-linked inhibitor of apoptosis (XIAP) siRNA
aaatggggctgggctcagtggct

SEQ ID NO: 15278 - DNA, 23 bp, Artificial Sequence
  Description of Artificial Sequence: Synthetic oligonucleotide
  X-linked inhibitor of apoptosis (XIAP) siRNA
aatggggctgggctcagtggctc

SEQ ID NO: 15279 - DNA, 23 bp, Artificial Sequence
  Description of Artificial Sequence: Synthetic oligonucleotide
  X-linked inhibitor of apoptosis (XIAP) siRNA
atggggctgggctcagtggctca

SEQ ID NO: 15280 - DNA, 23 bp, Artificial Sequence
  Description of Artificial Sequence: Synthetic oligonucleotide
  X-linked inhibitor of apoptosis (XIAP) siRNA
tggggctgggctcagtggctcac

SEQ ID NO: 15281 - DNA, 23 bp, Artificial Sequence
  Description of Artificial Sequence: Synthetic oligonucleotide
  X-linked inhibitor of apoptosis (XIAP) siRNA
ggggctgggctcagtggctcacg

SEQ ID NO: 15282 - DNA, 23 bp, Artificial Sequence
  Description of Artificial Sequence: Synthetic oligonucleotide
  X-linked inhibitor of apoptosis (XIAP) siRNA
gggctgggctcagtggctcacgc

SEQ ID NO: 15283 - DNA, 23 bp, Artificial Sequence
  Description of Artificial Sequence: Synthetic oligonucleotide
  X-linked inhibitor of apoptosis (XIAP) siRNA
ggctgggctcagtggctcacgcc

SEQ ID NO: 15284 - DNA, 23 bp, Artificial Sequence
  Description of Artificial Sequence: Synthetic oligonucleotide
  X-linked inhibitor of apoptosis (XIAP) siRNA
gctgggctcagtggctcacgcct

SEQ ID NO: 15285 - DNA, 23 bp, Artificial Sequence
  Description of Artificial Sequence: Synthetic oligonucleotide
  X-linked inhibitor of apoptosis (XIAP) siRNA
ctgggctcagtggctcacgcctg

SEQ ID NO: 15286 - DNA, 23 bp, Artificial Sequence
  Description of Artificial Sequence: Synthetic oligonucleotide
  X-linked inhibitor of apoptosis (XIAP) siRNA
tgggctcagtggctcacgcctgt

SEQ ID NO: 15287 - DNA, 23 bp, Artificial Sequence
  Description of Artificial Sequence: Synthetic oligonucleotide
  X-linked inhibitor of apoptosis (XIAP) siRNA
gggctcagtggctcacgcctgta

SEQ ID NO: 15288 - DNA, 23 bp, Artificial Sequence
  Description of Artificial Sequence: Synthetic oligonucleotide
  X-linked inhibitor of apoptosis (XIAP) siRNA
ggctcagtggctcacgcctgtaa

SEQ ID NO: 15289 - DNA, 23 bp, Artificial Sequence
  Description of Artificial Sequence: Synthetic oligonucleotide
  X-linked inhibitor of apoptosis (XIAP) siRNA
gctcagtggctcacgcctgtaat

SEQ ID NO: 15290 - DNA, 23 bp, Artificial Sequence
  Description of Artificial Sequence: Synthetic oligonucleotide
  X-linked inhibitor of apoptosis (XIAP) siRNA
ctcagtggctcacgcctgtaatc

SEQ ID NO: 15291 - DNA, 23 bp, Artificial Sequence
  Description of Artificial Sequence: Synthetic oligonucleotide
  X-linked inhibitor of apoptosis (XIAP) siRNA
tcagtggctcacgcctgtaatcc

SEQ ID NO: 15292 - DNA, 23 bp, Artificial Sequence
  Description of Artificial Sequence: Synthetic oligonucleotide
  X-linked inhibitor of apoptosis (XIAP) siRNA
cagtggctcacgcctgtaatccc

SEQ ID NO: 15293 - DNA, 23 bp, Artificial Sequence
  Description of Artificial Sequence: Synthetic oligonucleotide
  X-linked inhibitor of apoptosis (XIAP) siRNA
agtggctcacgcctgtaatccca

SEQ ID NO: 15294 - DNA, 23 bp, Artificial Sequence
  Description of Artificial Sequence: Synthetic oligonucleotide
  X-linked inhibitor of apoptosis (XIAP) siRNA
gtggctcacgcctgtaatcccag

SEQ ID NO: 15295 - DNA, 23 bp, Artificial Sequence
  Description of Artificial Sequence: Synthetic oligonucleotide
  X-linked inhibitor of apoptosis (XIAP) siRNA
tggctcacgcctgtaatcccagc

SEQ ID NO: 15296 - DNA, 23 bp, Artificial Sequence
  Description of Artificial Sequence: Synthetic oligonucleotide
  X-linked inhibitor of apoptosis (XIAP) siRNA
ggctcacgcctgtaatcccagca

SEQ ID NO: 15297 - DNA, 23 bp, Artificial Sequence
  Description of Artificial Sequence: Synthetic oligonucleotide
  X-linked inhibitor of apoptosis (XIAP) siRNA
gctcacgcctgtaatcccagcac

SEQ ID NO: 15298 - DNA, 23 bp, Artificial Sequence
  Description of Artificial Sequence: Synthetic oligonucleotide
  X-linked inhibitor of apoptosis (XIAP) siRNA
ctcacgcctgtaatcccagcact

SEQ ID NO: 15299 - DNA, 23 bp, Artificial Sequence
  Description of Artificial Sequence: Synthetic oligonucleotide
  X-linked inhibitor of apoptosis (XIAP) siRNA
tcacgcctgtaatcccagcactt

SEQ ID NO: 15300 - DNA, 23 bp, Artificial Sequence
  Description of Artificial Sequence: Synthetic oligonucleotide
  X-linked inhibitor of apoptosis (XIAP) siRNA
cacgcctgtaatcccagcacttt

SEQ ID NO: 15301 - DNA, 23 bp, Artificial Sequence
  Description of Artificial Sequence: Synthetic oligonucleotide
  X-linked inhibitor of apoptosis (XIAP) siRNA
acgcctgtaatcccagcactttg

SEQ ID NO: 15302 - DNA, 23 bp, Artificial Sequence
  Description of Artificial Sequence: Synthetic oligonucleotide
  X-linked inhibitor of apoptosis (XIAP) siRNA
cgcctgtaatcccagcactttgg

SEQ ID NO: 15303 - DNA, 23 bp, Artificial Sequence
  Description of Artificial Sequence: Synthetic oligonucleotide
  X-linked inhibitor of apoptosis (XIAP) siRNA
gcctgtaatcccagcactttggg

SEQ ID NO: 15304 - DNA, 23 bp, Artificial Sequence
  Description of Artificial Sequence: Synthetic oligonucleotide
  X-linked inhibitor of apoptosis (XIAP) siRNA
cctgtaatcccagcactttggga

SEQ ID NO: 15305 - DNA, 23 bp, Artificial Sequence
  Description of Artificial Sequence: Synthetic oligonucleotide
  X-linked inhibitor of apoptosis (XIAP) siRNA
ctgtaatcccagcactttgggag

SEQ ID NO: 15306 - DNA, 23 bp, Artificial Sequence
  Description of Artificial Sequence: Synthetic oligonucleotide
  X-linked inhibitor of apoptosis (XIAP) siRNA
tgtaatcccagcactttgggagg

SEQ ID NO: 15307 - DNA, 23 bp, Artificial Sequence
  Description of Artificial Sequence: Synthetic oligonucleotide
  X-linked inhibitor of apoptosis (XIAP) siRNA
gtaatcccagcactttgggaggc

SEQ ID NO: 15308 - DNA, 23 bp, Artificial Sequence
  Description of Artificial Sequence: Synthetic oligonucleotide
  X-linked inhibitor of apoptosis (XIAP) siRNA
taatcccagcactttgggaggct

SEQ ID NO: 15309 - DNA, 23 bp, Artificial Sequence
  Description of Artificial Sequence: Synthetic oligonucleotide
  X-linked inhibitor of apoptosis (XIAP) siRNA
aatcccagcactttgggaggctg

SEQ ID NO: 15310 - DNA, 23 bp, Artificial Sequence
  Description of Artificial Sequence: Synthetic oligonucleotide
  X-linked inhibitor of apoptosis (XIAP) siRNA
atcccagcactttgggaggctga

SEQ ID NO: 15311 - DNA, 23 bp, Artificial Sequence
  Description of Artificial Sequence: Synthetic oligonucleotide
  X-linked inhibitor of apoptosis (XIAP) siRNA
tcccagcactttgggaggctgag

SEQ ID NO: 15312 - DNA, 23 bp, Artificial Sequence
  Description of Artificial Sequence: Synthetic oligonucleotide
  X-linked inhibitor of apoptosis (XIAP) siRNA
cccagcactttgggaggctgagg

SEQ ID NO: 15313 - DNA, 23 bp, Artificial Sequence
  Description of Artificial Sequence: Synthetic oligonucleotide
  X-linked inhibitor of apoptosis (XIAP) siRNA
ccagcactttgggaggctgaggc

SEQ ID NO: 15314 - DNA, 23 bp, Artificial Sequence
  Description of Artificial Sequence: Synthetic oligonucleotide
  X-linked inhibitor of apoptosis (XIAP) siRNA
cagcactttgggaggctgaggca

SEQ ID NO: 15315 - DNA, 23 bp, Artificial Sequence
  Description of Artificial Sequence: Synthetic oligonucleotide
  X-linked inhibitor of apoptosis (XIAP) siRNA
agcactttgggaggctgaggcag

SEQ ID NO: 15316 - DNA, 23 bp, Artificial Sequence
  Description of Artificial Sequence: Synthetic oligonucleotide
  X-linked inhibitor of apoptosis (XIAP) siRNA
gcactttgggaggctgaggcagg

SEQ ID NO: 15317 - DNA, 23 bp, Artificial Sequence
  Description of Artificial Sequence: Synthetic oligonucleotide
  X-linked inhibitor of apoptosis (XIAP) siRNA
cactttgggaggctgaggcaggt

SEQ ID NO: 15318 - DNA, 23 bp, Artificial Sequence
  Description of Artificial Sequence: Synthetic oligonucleotide
  X-linked inhibitor of apoptosis (XIAP) siRNA
actttgggaggctgaggcaggtg

SEQ ID NO: 15319 - DNA, 23 bp, Artificial Sequence
  Description of Artificial Sequence: Synthetic oligonucleotide
  X-linked inhibitor of apoptosis (XIAP) siRNA
ctttgggaggctgaggcaggtgg

SEQ ID NO: 15320 - DNA, 23 bp, Artificial Sequence
  Description of Artificial Sequence: Synthetic oligonucleotide
  X-linked inhibitor of apoptosis (XIAP) siRNA
tttgggaggctgaggcaggtgga

SEQ ID NO: 15321 - DNA, 23 bp, Artificial Sequence
  Description of Artificial Sequence: Synthetic oligonucleotide
  X-linked inhibitor of apoptosis (XIAP) siRNA
ttgggaggctgaggcaggtggat

SEQ ID NO: 15322 - DNA, 23 bp, Artificial Sequence
  Description of Artificial Sequence: Synthetic oligonucleotide
  X-linked inhibitor of apoptosis (XIAP) siRNA
tgggaggctgaggcaggtggatc

SEQ ID NO: 15323 - DNA, 23 bp, Artificial Sequence
  Description of Artificial Sequence: Synthetic oligonucleotide
  X-linked inhibitor of apoptosis (XIAP) siRNA
gggaggctgaggcaggtggatca

SEQ ID NO: 15324 - DNA, 23 bp, Artificial Sequence
  Description of Artificial Sequence: Synthetic oligonucleotide
  X-linked inhibitor of apoptosis (XIAP) siRNA
ggaggctgaggcaggtggatcac

SEQ ID NO: 15325 - DNA, 23 bp, Artificial Sequence
  Description of Artificial Sequence: Synthetic oligonucleotide
  X-linked inhibitor of apoptosis (XIAP) siRNA
gaggctgaggcaggtggatcacg

SEQ ID NO: 15326 - DNA, 23 bp, Artificial Sequence
  Description of Artificial Sequence: Synthetic oligonucleotide
  X-linked inhibitor of apoptosis (XIAP) siRNA
aggctgaggcaggtggatcacga

SEQ ID NO: 15327 - DNA, 23 bp, Artificial Sequence
  Description of Artificial Sequence: Synthetic oligonucleotide
  X-linked inhibitor of apoptosis (XIAP) siRNA
ggctgaggcaggtggatcacgag

SEQ ID NO: 15328 - DNA, 23 bp, Artificial Sequence
  Description of Artificial Sequence: Synthetic oligonucleotide
  X-linked inhibitor of apoptosis (XIAP) siRNA
gctgaggcaggtggatcacgagg

SEQ ID NO: 15329 - DNA, 23 bp, Artificial Sequence
  Description of Artificial Sequence: Synthetic oligonucleotide
  X-linked inhibitor of apoptosis (XIAP) siRNA
ctgaggcaggtggatcacgaggt

SEQ ID NO: 15330 - DNA, 23 bp, Artificial Sequence
  Description of Artificial Sequence: Synthetic oligonucleotide
  X-linked inhibitor of apoptosis (XIAP) siRNA
tgaggcaggtggatcacgaggtc

SEQ ID NO: 15331 - DNA, 23 bp, Artificial Sequence
  Description of Artificial Sequence: Synthetic oligonucleotide
  X-linked inhibitor of apoptosis (XIAP) siRNA
gaggcaggtggatcacgaggtca

SEQ ID NO: 15332 - DNA, 23 bp, Artificial Sequence
  Description of Artificial Sequence: Synthetic oligonucleotide
  X-linked inhibitor of apoptosis (XIAP) siRNA
aggcaggtggatcacgaggtcag

SEQ ID NO: 15333 - DNA, 23 bp, Artificial Sequence
  Description of Artificial Sequence: Synthetic oligonucleotide
  X-linked inhibitor of apoptosis (XIAP) siRNA
ggcaggtggatcacgaggtcagg

SEQ ID NO: 15334 - DNA, 23 bp, Artificial Sequence
  Description of Artificial Sequence: Synthetic oligonucleotide
  X-linked inhibitor of apoptosis (XIAP) siRNA
gcaggtggatcacgaggtcagga

SEQ ID NO: 15335 - DNA, 23 bp, Artificial Sequence
  Description of Artificial Sequence: Synthetic oligonucleotide
  X-linked inhibitor of apoptosis (XIAP) siRNA
caggtggatcacgaggtcaggag

SEQ ID NO: 15336 - DNA, 23 bp, Artificial Sequence
  Description of Artificial Sequence: Synthetic oligonucleotide
  X-linked inhibitor of apoptosis (XIAP) siRNA
aggtggatcacgaggtcaggaga

SEQ ID NO: 15337 - DNA, 23 bp, Artificial Sequence
  Description of Artificial Sequence: Synthetic oligonucleotide
  X-linked inhibitor of apoptosis (XIAP) siRNA
ggtggatcacgaggtcaggagat

SEQ ID NO: 15338 - DNA, 23 bp, Artificial Sequence
  Description of Artificial Sequence: Synthetic oligonucleotide
  X-linked inhibitor of apoptosis (XIAP) siRNA
gtggatcacgaggtcaggagatc

SEQ ID NO: 15339 - DNA, 23 bp, Artificial Sequence
  Description of Artificial Sequence: Synthetic oligonucleotide
  X-linked inhibitor of apoptosis (XIAP) siRNA
tggatcacgaggtcaggagatcg

SEQ ID NO: 15340 - DNA, 23 bp, Artificial Sequence
  Description of Artificial Sequence: Synthetic oligonucleotide
  X-linked inhibitor of apoptosis (XIAP) siRNA
ggatcacgaggtcaggagatcga

SEQ ID NO: 15341 - DNA, 23 bp, Artificial Sequence
  Description of Artificial Sequence: Synthetic oligonucleotide
  X-linked inhibitor of apoptosis (XIAP) siRNA
gatcacgaggtcaggagatcgag

SEQ ID NO: 15342 - DNA, 23 bp, Artificial Sequence
  Description of Artificial Sequence: Synthetic oligonucleotide
  X-linked inhibitor of apoptosis (XIAP) siRNA
atcacgaggtcaggagatcgaga

SEQ ID NO: 15343 - DNA, 23 bp, Artificial Sequence
  Description of Artificial Sequence: Synthetic oligonucleotide
  X-linked inhibitor of apoptosis (XIAP) siRNA
tcacgaggtcaggagatcgagac

SEQ ID NO: 15344 - DNA, 23 bp, Artificial Sequence
  Description of Artificial Sequence: Synthetic oligonucleotide
  X-linked inhibitor of apoptosis (XIAP) siRNA
cacgaggtcaggagatcgagacc

SEQ ID NO: 15345 - DNA, 23 bp, Artificial Sequence
  Description of Artificial Sequence: Synthetic oligonucleotide
  X-linked inhibitor of apoptosis (XIAP) siRNA
acgaggtcaggagatcgagacca

SEQ ID NO: 15346 - DNA, 23 bp, Artificial Sequence
  Description of Artificial Sequence: Synthetic oligonucleotide
  X-linked inhibitor of apoptosis (XIAP) siRNA
cgaggtcaggagatcgagaccat

SEQ ID NO: 15347 - DNA, 23 bp, Artificial Sequence
  Description of Artificial Sequence: Synthetic oligonucleotide
  X-linked inhibitor of apoptosis (XIAP) siRNA
gaggtcaggagatcgagaccatc

SEQ ID NO: 15348 - DNA, 23 bp, Artificial Sequence
  Description of Artificial Sequence: Synthetic oligonucleotide
  X-linked inhibitor of apoptosis (XIAP) siRNA
aggtcaggagatcgagaccatcc

SEQ ID NO: 15349 - DNA, 23 bp, Artificial Sequence
  Description of Artificial Sequence: Synthetic oligonucleotide
  X-linked inhibitor of apoptosis (XIAP) siRNA
ggtcaggagatcgagaccatcct

SEQ ID NO: 15350 - DNA, 23 bp, Artificial Sequence
  Description of Artificial Sequence: Synthetic oligonucleotide
  X-linked inhibitor of apoptosis (XIAP) siRNA
gtcaggagatcgagaccatcctg

SEQ ID NO: 15351 - DNA, 23 bp, Artificial Sequence
  Description of Artificial Sequence: Synthetic oligonucleotide
  X-linked inhibitor of apoptosis (XIAP) siRNA
tcaggagatcgagaccatcctgg

SEQ ID NO: 15352 - DNA, 23 bp, Artificial Sequence
  Description of Artificial Sequence: Synthetic oligonucleotide
  X-linked inhibitor of apoptosis (XIAP) siRNA
caggagatcgagaccatcctggc

SEQ ID NO: 15353 - DNA, 23 bp, Artificial Sequence
  Description of Artificial Sequence: Synthetic oligonucleotide
  X-linked inhibitor of apoptosis (XIAP) siRNA
aggagatcgagaccatcctggct

SEQ ID NO: 15354 - DNA, 23 bp, Artificial Sequence
  Description of Artificial Sequence: Synthetic oligonucleotide
  X-linked inhibitor of apoptosis (XIAP) siRNA
ggagatcgagaccatcctggcta

SEQ ID NO: 15355 - DNA, 23 bp, Artificial Sequence
  Description of Artificial Sequence: Synthetic oligonucleotide
  X-linked inhibitor of apoptosis (XIAP) siRNA
gagatcgagaccatcctggctaa

SEQ ID NO: 15356 - DNA, 23 bp, Artificial Sequence
  Description of Artificial Sequence: Synthetic oligonucleotide
  X-linked inhibitor of apoptosis (XIAP) siRNA
agatcgagaccatcctggctaac

SEQ ID NO: 15357 - DNA, 23 bp, Artificial Sequence
  Description of Artificial Sequence: Synthetic oligonucleotide
  X-linked inhibitor of apoptosis (XIAP) siRNA
gatcgagaccatcctggctaaca

SEQ ID NO: 15358 - DNA, 23 bp, Artificial Sequence
  Description of Artificial Sequence: Synthetic oligonucleotide
  X-linked inhibitor of apoptosis (XIAP) siRNA
atcgagaccatcctggctaacac

SEQ ID NO: 15359 - DNA, 23 bp, Artificial Sequence
  Description of Artificial Sequence: Synthetic oligonucleotide
  X-linked inhibitor of apoptosis (XIAP) siRNA
tcgagaccatcctggctaacacg

SEQ ID NO: 15360 - DNA, 23 bp, Artificial Sequence
  Description of Artificial Sequence: Synthetic oligonucleotide
  X-linked inhibitor of apoptosis (XIAP) siRNA
cgagaccatcctggctaacacgg

SEQ ID NO: 15361 - DNA, 23 bp, Artificial Sequence
  Description of Artificial Sequence: Synthetic oligonucleotide
  X-linked inhibitor of apoptosis (XIAP) siRNA
gagaccatcctggctaacacggt

SEQ ID NO: 15362 - DNA, 23 bp, Artificial Sequence
  Description of Artificial Sequence: Synthetic oligonucleotide
  X-linked inhibitor of apoptosis (XIAP) siRNA
agaccatcctggctaacacggtg

SEQ ID NO: 15363 - DNA, 23 bp, Artificial Sequence
  Description of Artificial Sequence: Synthetic oligonucleotide
  X-linked inhibitor of apoptosis (XIAP) siRNA
gaccatcctggctaacacggtga

SEQ ID NO: 15364 - DNA, 23 bp, Artificial Sequence
  Description of Artificial Sequence: Synthetic oligonucleotide
  X-linked inhibitor of apoptosis (XIAP) siRNA
accatcctggctaacacggtgaa

SEQ ID NO: 15365 - DNA, 23 bp, Artificial Sequence
  Description of Artificial Sequence: Synthetic oligonucleotide
  X-linked inhibitor of apoptosis (XIAP) siRNA
ccatcctggctaacacggtgaaa

SEQ ID NO: 15366 - DNA, 23 bp, Artificial Sequence
  Description of Artificial Sequence: Synthetic oligonucleotide
  X-linked inhibitor of apoptosis (XIAP) siRNA
catcctggctaacacggtgaaac

SEQ ID NO: 15367 - DNA, 23 bp, Artificial Sequence
  Description of Artificial Sequence: Synthetic oligonucleotide
  X-linked inhibitor of apoptosis (XIAP) siRNA
atcctggctaacacggtgaaacc

SEQ ID NO: 15368 - DNA, 23 bp, Artificial Sequence
  Description of Artificial Sequence: Synthetic oligonucleotide
  X-linked inhibitor of apoptosis (XIAP) siRNA
tcctggctaacacggtgaaaccc

SEQ ID NO: 15369 - DNA, 23 bp, Artificial Sequence
  Description of Artificial Sequence: Synthetic oligonucleotide
  X-linked inhibitor of apoptosis (XIAP) siRNA
cctggctaacacggtgaaacccc

SEQ ID NO: 15370 - DNA, 23 bp, Artificial Sequence
  Description of Artificial Sequence: Synthetic oligonucleotide
  X-linked inhibitor of apoptosis (XIAP) siRNA
ctggctaacacggtgaaaccccg

SEQ ID NO: 15371 - DNA, 23 bp, Artificial Sequence
  Description of Artificial Sequence: Synthetic oligonucleotide
  X-linked inhibitor of apoptosis (XIAP) siRNA
tggctaacacggtgaaaccccgt

SEQ ID NO: 15372 - DNA, 23 bp, Artificial Sequence
  Description of Artificial Sequence: Synthetic oligonucleotide
  X-linked inhibitor of apoptosis (XIAP) siRNA
ggctaacacggtgaaaccccgtc

SEQ ID NO: 15373 - DNA, 23 bp, Artificial Sequence
  Description of Artificial Sequence: Synthetic oligonucleotide
  X-linked inhibitor of apoptosis (XIAP) siRNA
gctaacacggtgaaaccccgtct

SEQ ID NO: 15374 - DNA, 23 bp, Artificial Sequence
  Description of Artificial Sequence: Synthetic oligonucleotide
  X-linked inhibitor of apoptosis (XIAP) siRNA
ctaacacggtgaaaccccgtctc

SEQ ID NO: 15375 - DNA, 23 bp, Artificial Sequence
  Description of Artificial Sequence: Synthetic oligonucleotide
  X-linked inhibitor of apoptosis (XIAP) siRNA
taacacggtgaaaccccgtctct

SEQ ID NO: 15376 - DNA, 23 bp, Artificial Sequence
  Description of Artificial Sequence: Synthetic oligonucleotide
  X-linked inhibitor of apoptosis (XIAP) siRNA
aacacggtgaaaccccgtctcta

SEQ ID NO: 15377 - DNA, 23 bp, Artificial Sequence
  Description of Artificial Sequence: Synthetic oligonucleotide
  X-linked inhibitor of apoptosis (XIAP) siRNA
acacggtgaaaccccgtctctac

SEQ ID NO: 15378 - DNA, 23 bp, Artificial Sequence
  Description of Artificial Sequence: Synthetic oligonucleotide
  X-linked inhibitor of apoptosis (XIAP) siRNA
cacggtgaaaccccgtctctact

SEQ ID NO: 15379 - DNA, 23 bp, Artificial Sequence
  Description of Artificial Sequence: Synthetic oligonucleotide
  X-linked inhibitor of apoptosis (XIAP) siRNA
acggtgaaaccccgtctctacta

SEQ ID NO: 15380 - DNA, 23 bp, Artificial Sequence
  Description of Artificial Sequence: Synthetic oligonucleotide
  X-linked inhibitor of apoptosis (XIAP) siRNA
cggtgaaaccccgtctctactaa

SEQ ID NO: 15381 - DNA, 23 bp, Artificial Sequence
  Description of Artificial Sequence: Synthetic oligonucleotide
  X-linked inhibitor of apoptosis (XIAP) siRNA
ggtgaaaccccgtctctactaaa

SEQ ID NO: 15382 - DNA, 23 bp, Artificial Sequence
  Description of Artificial Sequence: Synthetic oligonucleotide
  X-linked inhibitor of apoptosis (XIAP) siRNA
gtgaaaccccgtctctactaaaa

SEQ ID NO: 15383 - DNA, 23 bp, Artificial Sequence
  Description of Artificial Sequence: Synthetic oligonucleotide
  X-linked inhibitor of apoptosis (XIAP) siRNA
tgaaaccccgtctctactaaaaa

SEQ ID NO: 15384 - DNA, 23 bp, Artificial Sequence
  Description of Artificial Sequence: Synthetic oligonucleotide
  X-linked inhibitor of apoptosis (XIAP) siRNA
gaaaccccgtctctactaaaaaa

SEQ ID NO: 15385 - DNA, 23 bp, Artificial Sequence
  Description of Artificial Sequence: Synthetic oligonucleotide
  X-linked inhibitor of apoptosis (XIAP) siRNA
aaaccccgtctctactaaaaaac

SEQ ID NO: 15386 - DNA, 23 bp, Artificial Sequence
  Description of Artificial Sequence: Synthetic oligonucleotide
  X-linked inhibitor of apoptosis (XIAP) siRNA
aaccccgtctctactaaaaaaca

SEQ ID NO: 15387 - DNA, 23 bp, Artificial Sequence
  Description of Artificial Sequence: Synthetic oligonucleotide
  X-linked inhibitor of apoptosis (XIAP) siRNA
accccgtctctactaaaaaacag

SEQ ID NO: 15388 - DNA, 23 bp, Artificial Sequence
  Description of Artificial Sequence: Synthetic oligonucleotide
  X-linked inhibitor of apoptosis (XIAP) siRNA
ccccgtctctactaaaaaacaga

SEQ ID NO: 15389 - DNA, 23 bp, Artificial Sequence
  Description of Artificial Sequence: Synthetic oligonucleotide
  X-linked inhibitor of apoptosis (XIAP) siRNA
cccgtctctactaaaaaacagaa

SEQ ID NO: 15390 - DNA, 23 bp, Artificial Sequence
  Description of Artificial Sequence: Synthetic oligonucleotide
  X-linked inhibitor of apoptosis (XIAP) siRNA
ccgtctctactaaaaaacagaaa

SEQ ID NO: 15391 - DNA, 23 bp, Artificial Sequence
  Description of Artificial Sequence: Synthetic oligonucleotide
  X-linked inhibitor of apoptosis (XIAP) siRNA
cgtctctactaaaaaacagaaaa

SEQ ID NO: 15392 - DNA, 23 bp, Artificial Sequence
  Description of Artificial Sequence: Synthetic oligonucleotide
  X-linked inhibitor of apoptosis (XIAP) siRNA
gtctctactaaaaaacagaaaat

SEQ ID NO: 15393 - DNA, 23 bp, Artificial Sequence
  Description of Artificial Sequence: Synthetic oligonucleotide
  X-linked inhibitor of apoptosis (XIAP) siRNA
tctctactaaaaaacagaaaatt

SEQ ID NO: 15394 - DNA, 23 bp, Artificial Sequence
  Description of Artificial Sequence: Synthetic oligonucleotide
  X-linked inhibitor of apoptosis (XIAP) siRNA
ctctactaaaaaacagaaaatta

SEQ ID NO: 15395 - DNA, 23 bp, Artificial Sequence
  Description of Artificial Sequence: Synthetic oligonucleotide
  X-linked inhibitor of apoptosis (XIAP) siRNA
tctactaaaaaacagaaaattag

SEQ ID NO: 15396 - DNA, 23 bp, Artificial Sequence
  Description of Artificial Sequence: Synthetic oligonucleotide
  X-linked inhibitor of apoptosis (XIAP) siRNA
ctactaaaaaacagaaaattagc

SEQ ID NO: 15397 - DNA, 23 bp, Artificial Sequence
  Description of Artificial Sequence: Synthetic oligonucleotide
  X-linked inhibitor of apoptosis (XIAP) siRNA
tactaaaaaacagaaaattagcc

SEQ ID NO: 15398 - DNA, 23 bp, Artificial Sequence
  Description of Artificial Sequence: Synthetic oligonucleotide
  X-linked inhibitor of apoptosis (XIAP) siRNA
actaaaaaacagaaaattagccg

SEQ ID NO: 15399 - DNA, 23 bp, Artificial Sequence
  Description of Artificial Sequence: Synthetic oligonucleotide
  X-linked inhibitor of apoptosis (XIAP) siRNA
ctaaaaaacagaaaattagccgg

SEQ ID NO: 15400 - DNA, 23 bp, Artificial Sequence
  Description of Artificial Sequence: Synthetic oligonucleotide
  X-linked inhibitor of apoptosis (XIAP) siRNA
taaaaaacagaaaattagccggg

SEQ ID NO: 15401 - DNA, 23 bp, Artificial Sequence
  Description of Artificial Sequence: Synthetic oligonucleotide
  X-linked inhibitor of apoptosis (XIAP) siRNA
aaaaaacagaaaattagccgggc

SEQ ID NO: 15402 - DNA, 23 bp, Artificial Sequence
  Description of Artificial Sequence: Synthetic oligonucleotide
  X-linked inhibitor of apoptosis (XIAP) siRNA
aaaaacagaaaattagccgggcg

SEQ ID NO: 15403 - DNA, 23 bp, Artificial Sequence
  Description of Artificial Sequence: Synthetic oligonucleotide
  X-linked inhibitor of apoptosis (XIAP) siRNA
aaaacagaaaattagccgggcgt

SEQ ID NO: 15404 - DNA, 23 bp, Artificial Sequence
  Description of Artificial Sequence: Synthetic oligonucleotide
  X-linked inhibitor of apoptosis (XIAP) siRNA
aaacagaaaattagccgggcgtg

SEQ ID NO: 15405 - DNA, 23 bp, Artificial Sequence
  Description of Artificial Sequence: Synthetic oligonucleotide
  X-linked inhibitor of apoptosis (XIAP) siRNA
aacagaaaattagccgggcgtgg

SEQ ID NO: 15406 - DNA, 23 bp, Artificial Sequence
  Description of Artificial Sequence: Synthetic oligonucleotide
  X-linked inhibitor of apoptosis (XIAP) siRNA
acagaaaattagccgggcgtggt

SEQ ID NO: 15407 - DNA, 23 bp, Artificial Sequence
  Description of Artificial Sequence: Synthetic oligonucleotide
  X-linked inhibitor of apoptosis (XIAP) siRNA
cagaaaattagccgggcgtggtg

SEQ ID NO: 15408 - DNA, 23 bp, Artificial Sequence
  Description of Artificial Sequence: Synthetic oligonucleotide
  X-linked inhibitor of apoptosis (XIAP) siRNA
agaaaattagccgggcgtggtgg

SEQ ID NO: 15409 - DNA, 23 bp, Artificial Sequence
  Description of Artificial Sequence: Synthetic oligonucleotide
  X-linked inhibitor of apoptosis (XIAP) siRNA
gaaaattagccgggcgtggtggc

SEQ ID NO: 15410 - DNA, 23 bp, Artificial Sequence
  Description of Artificial Sequence: Synthetic oligonucleotide
  X-linked inhibitor of apoptosis (XIAP) siRNA
aaaattagccgggcgtggtggcg

SEQ ID NO: 15411 - DNA, 23 bp, Artificial Sequence
  Description of Artificial Sequence: Synthetic oligonucleotide
  X-linked inhibitor of apoptosis (XIAP) siRNA
aaattagccgggcgtggtggcgg

SEQ ID NO: 15412 - DNA, 23 bp, Artificial Sequence
  Description of Artificial Sequence: Synthetic oligonucleotide
  X-linked inhibitor of apoptosis (XIAP) siRNA
aattagccgggcgtggtggcggg

SEQ ID NO: 15413 - DNA, 23 bp, Artificial Sequence
  Description of Artificial Sequence: Synthetic oligonucleotide
  X-linked inhibitor of apoptosis (XIAP) siRNA
attagccgggcgtggtggcgggc

SEQ ID NO: 15414 - DNA, 23 bp, Artificial Sequence
  Description of Artificial Sequence: Synthetic oligonucleotide
  X-linked inhibitor of apoptosis (XIAP) siRNA
ttagccgggcgtggtggcgggcg

SEQ ID NO: 15415 - DNA, 23 bp, Artificial Sequence
  Description of Artificial Sequence: Synthetic oligonucleotide
  X-linked inhibitor of apoptosis (XIAP) siRNA
cgggcgcctgtagtcccagctac

SEQ ID NO: 15416 - DNA, 23 bp, Artificial Sequence
  Description of Artificial Sequence: Synthetic oligonucleotide
  X-linked inhibitor of apoptosis (XIAP) siRNA
gggcgcctgtagtcccagctact

SEQ ID NO: 15417 - DNA, 23 bp, Artificial Sequence
  Description of Artificial Sequence: Synthetic oligonucleotide
  X-linked inhibitor of apoptosis (XIAP) siRNA
ggcgcctgtagtcccagctactc

SEQ ID NO: 15418 - DNA, 23 bp, Artificial Sequence
  Description of Artificial Sequence: Synthetic oligonucleotide
  X-linked inhibitor of apoptosis (XIAP) siRNA
gcgcctgtagtcccagctactcg

SEQ ID NO: 15419 - DNA, 23 bp, Artificial Sequence
  Description of Artificial Sequence: Synthetic oligonucleotide
  X-linked inhibitor of apoptosis (XIAP) siRNA
cgcctgtagtcccagctactcgg

SEQ ID NO: 15420 - DNA, 23 bp, Artificial Sequence
  Description of Artificial Sequence: Synthetic oligonucleotide
  X-linked inhibitor of apoptosis (XIAP) siRNA
gcctgtagtcccagctactcggg

SEQ ID NO: 15421 - DNA, 23 bp, Artificial Sequence
  Description of Artificial Sequence: Synthetic oligonucleotide
  X-linked inhibitor of apoptosis (XIAP) siRNA
cctgtagtcccagctactcggga

SEQ ID NO: 15422 - DNA, 23 bp, Artificial Sequence
  Description of Artificial Sequence: Synthetic oligonucleotide
  X-linked inhibitor of apoptosis (XIAP) siRNA
ctgtagtcccagctactcgggag

SEQ ID NO: 15423 - DNA, 23 bp, Artificial Sequence
  Description of Artificial Sequence: Synthetic oligonucleotide
  X-linked inhibitor of apoptosis (XIAP) siRNA
tgtagtcccagctactcgggagg

SEQ ID NO: 15424 - DNA, 23 bp, Artificial Sequence
  Description of Artificial Sequence: Synthetic oligonucleotide
  X-linked inhibitor of apoptosis (XIAP) siRNA
gtagtcccagctactcgggaggc

SEQ ID NO: 15425 - DNA, 23 bp, Artificial Sequence
  Description of Artificial Sequence: Synthetic oligonucleotide
  X-linked inhibitor of apoptosis (XIAP) siRNA
tagtcccagctactcgggaggct

SEQ ID NO: 15426 - DNA, 23 bp, Artificial Sequence
  Description of Artificial Sequence: Synthetic oligonucleotide
  X-linked inhibitor of apoptosis (XIAP) siRNA
agtcccagctactcgggaggctg

SEQ ID NO: 15427 - DNA, 23 bp, Artificial Sequence
  Description of Artificial Sequence: Synthetic oligonucleotide
  X-linked inhibitor of apoptosis (XIAP) siRNA
gtcccagctactcgggaggctga

SEQ ID NO: 15428 - DNA, 23 bp, Artificial Sequence
  Description of Artificial Sequence: Synthetic oligonucleotide
  X-linked inhibitor of apoptosis (XIAP) siRNA
tcccagctactcgggaggctgag

SEQ ID NO: 15429 - DNA, 23 bp, Artificial Sequence
  Description of Artificial Sequence: Synthetic oligonucleotide
  X-linked inhibitor of apoptosis (XIAP) siRNA
cccagctactcgggaggctgagg

SEQ ID NO: 15430 - DNA, 23 bp, Artificial Sequence
  Description of Artificial Sequence: Synthetic oligonucleotide
  X-linked inhibitor of apoptosis (XIAP) siRNA
ccagctactcgggaggctgaggc

SEQ ID NO: 15431 - DNA, 23 bp, Artificial Sequence
  Description of Artificial Sequence: Synthetic oligonucleotide
  X-linked inhibitor of apoptosis (XIAP) siRNA
cagctactcgggaggctgaggca

SEQ ID NO: 15432 - DNA, 23 bp, Artificial Sequence
  Description of Artificial Sequence: Synthetic oligonucleotide
  X-linked inhibitor of apoptosis (XIAP) siRNA
agctactcgggaggctgaggcag

SEQ ID NO: 15433 - DNA, 23 bp, Artificial Sequence
  Description of Artificial Sequence: Synthetic oligonucleotide
  X-linked inhibitor of apoptosis (XIAP) siRNA
gctactcgggaggctgaggcagg

SEQ ID NO: 15434 - DNA, 23 bp, Artificial Sequence
  Description of Artificial Sequence: Synthetic oligonucleotide
  X-linked inhibitor of apoptosis (XIAP) siRNA
ctactcgggaggctgaggcagga

SEQ ID NO: 15435 - DNA, 23 bp, Artificial Sequence
  Description of Artificial Sequence: Synthetic oligonucleotide
  X-linked inhibitor of apoptosis (XIAP) siRNA
tactcgggaggctgaggcaggag

SEQ ID NO: 15436 - DNA, 23 bp, Artificial Sequence
  Description of Artificial Sequence: Synthetic oligonucleotide
  X-linked inhibitor of apoptosis (XIAP) siRNA
actcgggaggctgaggcaggaga

SEQ ID NO: 15437 - DNA, 23 bp, Artificial Sequence
  Description of Artificial Sequence: Synthetic oligonucleotide
  X-linked inhibitor of apoptosis (XIAP) siRNA
ctcgggaggctgaggcaggagaa

SEQ ID NO: 15438 - DNA, 23 bp, Artificial Sequence
  Description of Artificial Sequence: Synthetic oligonucleotide
  X-linked inhibitor of apoptosis (XIAP) siRNA
tcgggaggctgaggcaggagaat

SEQ ID NO: 15439 - DNA, 23 bp, Artificial Sequence
  Description of Artificial Sequence: Synthetic oligonucleotide
  X-linked inhibitor of apoptosis (XIAP) siRNA
cgggaggctgaggcaggagaatg

SEQ ID NO: 15440 - DNA, 23 bp, Artificial Sequence
  Description of Artificial Sequence: Synthetic oligonucleotide
  X-linked inhibitor of apoptosis (XIAP) siRNA
gggaggctgaggcaggagaatgg

SEQ ID NO: 15441 - DNA, 23 bp, Artificial Sequence
  Description of Artificial Sequence: Synthetic oligonucleotide
  X-linked inhibitor of apoptosis (XIAP) siRNA
ggaggctgaggcaggagaatggt

SEQ ID NO: 15442 - DNA, 23 bp, Artificial Sequence
  Description of Artificial Sequence: Synthetic oligonucleotide
  X-linked inhibitor of apoptosis (XIAP) siRNA
gaggctgaggcaggagaatggtg

SEQ ID NO: 15443 - DNA, 23 bp, Artificial Sequence
  Description of Artificial Sequence: Synthetic oligonucleotide
  X-linked inhibitor of apoptosis (XIAP) siRNA
aggctgaggcaggagaatggtgt

SEQ ID NO: 15444 - DNA, 23 bp, Artificial Sequence
  Description of Artificial Sequence: Synthetic oligonucleotide
  X-linked inhibitor of apoptosis (XIAP) siRNA
ggctgaggcaggagaatggtgtg

SEQ ID NO: 15445 - DNA, 23 bp, Artificial Sequence
  Description of Artificial Sequence: Synthetic oligonucleotide
  X-linked inhibitor of apoptosis (XIAP) siRNA
gctgaggcaggagaatggtgtga

SEQ ID NO: 15446 - DNA, 23 bp, Artificial Sequence
  Description of Artificial Sequence: Synthetic oligonucleotide
  X-linked inhibitor of apoptosis (XIAP) siRNA
ctgaggcaggagaatggtgtgaa

SEQ ID NO: 15447 - DNA, 23 bp, Artificial Sequence
  Description of Artificial Sequence: Synthetic oligonucleotide
  X-linked inhibitor of apoptosis (XIAP) siRNA
tgaggcaggagaatggtgtgaac

SEQ ID NO: 15448 - DNA, 23 bp, Artificial Sequence
  Description of Artificial Sequence: Synthetic oligonucleotide
  X-linked inhibitor of apoptosis (XIAP) siRNA
gaggcaggagaatggtgtgaacc

SEQ ID NO: 15449 - DNA, 23 bp, Artificial Sequence
  Description of Artificial Sequence: Synthetic oligonucleotide
  X-linked inhibitor of apoptosis (XIAP) siRNA
aggcaggagaatggtgtgaaccc

SEQ ID NO: 15450 - DNA, 23 bp, Artificial Sequence
  Description of Artificial Sequence: Synthetic oligonucleotide
  X-linked inhibitor of apoptosis (XIAP) siRNA
ggcaggagaatggtgtgaacccg

SEQ ID NO: 15451 - DNA, 23 bp, Artificial Sequence
  Description of Artificial Sequence: Synthetic oligonucleotide
  X-linked inhibitor of apoptosis (XIAP) siRNA
gcaggagaatggtgtgaacccgg

SEQ ID NO: 15452 - DNA, 23 bp, Artificial Sequence
  Description of Artificial Sequence: Synthetic oligonucleotide
  X-linked inhibitor of apoptosis (XIAP) siRNA
caggagaatggtgtgaacccggg

SEQ ID NO: 15453 - DNA, 23 bp, Artificial Sequence
  Description of Artificial Sequence: Synthetic oligonucleotide
  X-linked inhibitor of apoptosis (XIAP) siRNA
aggagaatggtgtgaacccggga

SEQ ID NO: 15454 - DNA, 23 bp, Artificial Sequence
  Description of Artificial Sequence: Synthetic oligonucleotide
  X-linked inhibitor of apoptosis (XIAP) siRNA
ggagaatggtgtgaacccgggag

SEQ ID NO: 15455 - DNA, 23 bp, Artificial Sequence
  Description of Artificial Sequence: Synthetic oligonucleotide
  X-linked inhibitor of apoptosis (XIAP) siRNA
gagaatggtgtgaacccgggagg

SEQ ID NO: 15456 - DNA, 23 bp, Artificial Sequence
  Description of Artificial Sequence: Synthetic oligonucleotide
  X-linked inhibitor of apoptosis (XIAP) siRNA
agaatggtgtgaacccgggaggc

SEQ ID NO: 15457 - DNA, 23 bp, Artificial Sequence
  Description of Artificial Sequence: Synthetic oligonucleotide
  X-linked inhibitor of apoptosis (XIAP) siRNA
gaatggtgtgaacccgggaggca

SEQ ID NO: 15458 - DNA, 23 bp, Artificial Sequence
  Description of Artificial Sequence: Synthetic oligonucleotide
  X-linked inhibitor of apoptosis (XIAP) siRNA
aatggtgtgaacccgggaggcag

SEQ ID NO: 15459 - DNA, 23 bp, Artificial Sequence
  Description of Artificial Sequence: Synthetic oligonucleotide
  X-linked inhibitor of apoptosis (XIAP) siRNA
atggtgtgaacccgggaggcaga

SEQ ID NO: 15460 - DNA, 23 bp, Artificial Sequence
  Description of Artificial Sequence: Synthetic oligonucleotide
  X-linked inhibitor of apoptosis (XIAP) siRNA
tggtgtgaacccgggaggcagag

SEQ ID NO: 15461 - DNA, 23 bp, Artificial Sequence
  Description of Artificial Sequence: Synthetic oligonucleotide
  X-linked inhibitor of apoptosis (XIAP) siRNA
ggtgtgaacccgggaggcagagc

SEQ ID NO: 15462 - DNA, 23 bp, Artificial Sequence
  Description of Artificial Sequence: Synthetic oligonucleotide
  X-linked inhibitor of apoptosis (XIAP) siRNA
gtgtgaacccgggaggcagagct

SEQ ID NO: 15463 - DNA, 23 bp, Artificial Sequence
  Description of Artificial Sequence: Synthetic oligonucleotide
  X-linked inhibitor of apoptosis (XIAP) siRNA
tgtgaacccgggaggcagagctt

SEQ ID NO: 15464 - DNA, 23 bp, Artificial Sequence
  Description of Artificial Sequence: Synthetic oligonucleotide
  X-linked inhibitor of apoptosis (XIAP) siRNA
gtgaacccgggaggcagagcttg

SEQ ID NO: 15465 - DNA, 23 bp, Artificial Sequence
  Description of Artificial Sequence: Synthetic oligonucleotide
  X-linked inhibitor of apoptosis (XIAP) siRNA
tgaacccgggaggcagagcttgc

SEQ ID NO: 15466 - DNA, 23 bp, Artificial Sequence
  Description of Artificial Sequence: Synthetic oligonucleotide
  X-linked inhibitor of apoptosis (XIAP) siRNA
gaacccgggaggcagagcttgca

SEQ ID NO: 15467 - DNA, 23 bp, Artificial Sequence
  Description of Artificial Sequence: Synthetic oligonucleotide
  X-linked inhibitor of apoptosis (XIAP) siRNA
aacccgggaggcagagcttgcag

SEQ ID NO: 15468 - DNA, 23 bp, Artificial Sequence
  Description of Artificial Sequence: Synthetic oligonucleotide
  X-linked inhibitor of apoptosis (XIAP) siRNA
acccgggaggcagagcttgcagt

SEQ ID NO: 15469 - DNA, 23 bp, Artificial Sequence
  Description of Artificial Sequence: Synthetic oligonucleotide
  X-linked inhibitor of apoptosis (XIAP) siRNA
cccgggaggcagagcttgcagtg

SEQ ID NO: 15470 - DNA, 23 bp, Artificial Sequence
  Description of Artificial Sequence: Synthetic oligonucleotide
  X-linked inhibitor of apoptosis (XIAP) siRNA
ccgggaggcagagcttgcagtga

SEQ ID NO: 15471 - DNA, 23 bp, Artificial Sequence
  Description of Artificial Sequence: Synthetic oligonucleotide
  X-linked inhibitor of apoptosis (XIAP) siRNA
cgggaggcagagcttgcagtgag

SEQ ID NO: 15472 - DNA, 23 bp, Artificial Sequence
  Description of Artificial Sequence: Synthetic oligonucleotide
  X-linked inhibitor of apoptosis (XIAP) siRNA
gggaggcagagcttgcagtgagc

SEQ ID NO: 15473 - DNA, 23 bp, Artificial Sequence
  Description of Artificial Sequence: Synthetic oligonucleotide
  X-linked inhibitor of apoptosis (XIAP) siRNA
ggaggcagagcttgcagtgagcc

SEQ ID NO: 15474 - DNA, 23 bp, Artificial Sequence
  Description of Artificial Sequence: Synthetic oligonucleotide
  X-linked inhibitor of apoptosis (XIAP) siRNA
gaggcagagcttgcagtgagccg

SEQ ID NO: 15475 - DNA, 23 bp, Artificial Sequence
  Description of Artificial Sequence: Synthetic oligonucleotide
  X-linked inhibitor of apoptosis (XIAP) siRNA
aggcagagcttgcagtgagccga

SEQ ID NO: 15476 - DNA, 23 bp, Artificial Sequence
  Description of Artificial Sequence: Synthetic oligonucleotide
  X-linked inhibitor of apoptosis (XIAP) siRNA
ggcagagcttgcagtgagccgag

SEQ ID NO: 15477 - DNA, 23 bp, Artificial Sequence
  Description of Artificial Sequence: Synthetic oligonucleotide
  X-linked inhibitor of apoptosis (XIAP) siRNA
gcagagcttgcagtgagccgaga

SEQ ID NO: 15478 - DNA, 23 bp, Artificial Sequence
  Description of Artificial Sequence: Synthetic oligonucleotide
  X-linked inhibitor of apoptosis (XIAP) siRNA
cagagcttgcagtgagccgagat

SEQ ID NO: 15479 - DNA, 23 bp, Artificial Sequence
  Description of Artificial Sequence: Synthetic oligonucleotide
  X-linked inhibitor of apoptosis (XIAP) siRNA
agagcttgcagtgagccgagatc

SEQ ID NO: 15480 - DNA, 23 bp, Artificial Sequence
  Description of Artificial Sequence: Synthetic oligonucleotide
  X-linked inhibitor of apoptosis (XIAP) siRNA
gagcttgcagtgagccgagatct

SEQ ID NO: 15481 - DNA, 23 bp, Artificial Sequence
  Description of Artificial Sequence: Synthetic oligonucleotide
  X-linked inhibitor of apoptosis (XIAP) siRNA
agcttgcagtgagccgagatctc

SEQ ID NO: 15482 - DNA, 23 bp, Artificial Sequence
  Description of Artificial Sequence: Synthetic oligonucleotide
  X-linked inhibitor of apoptosis (XIAP) siRNA
gcttgcagtgagccgagatctcg

SEQ ID NO: 15483 - DNA, 23 bp, Artificial Sequence
  Description of Artificial Sequence: Synthetic oligonucleotide
  X-linked inhibitor of apoptosis (XIAP) siRNA
cttgcagtgagccgagatctcgc

SEQ ID NO: 15484 - DNA, 23 bp, Artificial Sequence
  Description of Artificial Sequence: Synthetic oligonucleotide
  X-linked inhibitor of apoptosis (XIAP) siRNA
ttgcagtgagccgagatctcgcc

SEQ ID NO: 15485 - DNA, 23 bp, Artificial Sequence
  Description of Artificial Sequence: Synthetic oligonucleotide
  X-linked inhibitor of apoptosis (XIAP) siRNA
tgcagtgagccgagatctcgcca

SEQ ID NO: 15486 - DNA, 23 bp, Artificial Sequence
  Description of Artificial Sequence: Synthetic oligonucleotide
  X-linked inhibitor of apoptosis (XIAP) siRNA
gcagtgagccgagatctcgccac

SEQ ID NO: 15487 - DNA, 23 bp, Artificial Sequence
  Description of Artificial Sequence: Synthetic oligonucleotide
  X-linked inhibitor of apoptosis (XIAP) siRNA
cagtgagccgagatctcgccact

SEQ ID NO: 15488 - DNA, 23 bp, Artificial Sequence
  Description of Artificial Sequence: Synthetic oligonucleotide
  X-linked inhibitor of apoptosis (XIAP) siRNA
agtgagccgagatctcgccactg

SEQ ID NO: 15489 - DNA, 23 bp, Artificial Sequence
  Description of Artificial Sequence: Synthetic oligonucleotide
  X-linked inhibitor of apoptosis (XIAP) siRNA
gtgagccgagatctcgccactgc

SEQ ID NO: 15490 - DNA, 23 bp, Artificial Sequence
  Description of Artificial Sequence: Synthetic oligonucleotide
  X-linked inhibitor of apoptosis (XIAP) siRNA
tgagccgagatctcgccactgca

SEQ ID NO: 15491 - DNA, 23 bp, Artificial Sequence
  Description of Artificial Sequence: Synthetic oligonucleotide
  X-linked inhibitor of apoptosis (XIAP) siRNA
gagccgagatctcgccactgcac

SEQ ID NO: 15492 - DNA, 23 bp, Artificial Sequence
  Description of Artificial Sequence: Synthetic oligonucleotide
  X-linked inhibitor of apoptosis (XIAP) siRNA
agccgagatctcgccactgcact

SEQ ID NO: 15493 - DNA, 23 bp, Artificial Sequence
  Description of Artificial Sequence: Synthetic oligonucleotide
  X-linked inhibitor of apoptosis (XIAP) siRNA
gccgagatctcgccactgcactc

SEQ ID NO: 15494 - DNA, 23 bp, Artificial Sequence
  Description of Artificial Sequence: Synthetic oligonucleotide
  X-linked inhibitor of apoptosis (XIAP) siRNA
ccgagatctcgccactgcactcc

SEQ ID NO: 15495 - DNA, 23 bp, Artificial Sequence
  Description of Artificial Sequence: Synthetic oligonucleotide
  X-linked inhibitor of apoptosis (XIAP) siRNA
cgagatctcgccactgcactcca

SEQ ID NO: 15496 - DNA, 23 bp, Artificial Sequence
  Description of Artificial Sequence: Synthetic oligonucleotide
  X-linked inhibitor of apoptosis (XIAP) siRNA
gagatctcgccactgcactccag

SEQ ID NO: 15497 - DNA, 23 bp, Artificial Sequence
  Description of Artificial Sequence: Synthetic oligonucleotide
  X-linked inhibitor of apoptosis (XIAP) siRNA
agatctcgccactgcactccagc

SEQ ID NO: 15498 - DNA, 23 bp, Artificial Sequence
  Description of Artificial Sequence: Synthetic oligonucleotide
  X-linked inhibitor of apoptosis (XIAP) siRNA
gatctcgccactgcactccagcc

SEQ ID NO: 15499 - DNA, 23 bp, Artificial Sequence
  Description of Artificial Sequence: Synthetic oligonucleotide
  X-linked inhibitor of apoptosis (XIAP) siRNA
atctcgccactgcactccagcct

SEQ ID NO: 15500 - DNA, 23 bp, Artificial Sequence
  Description of Artificial Sequence: Synthetic oligonucleotide
  X-linked inhibitor of apoptosis (XIAP) siRNA
tctcgccactgcactccagcctg

SEQ ID NO: 15501 - DNA, 23 bp, Artificial Sequence
  Description of Artificial Sequence: Synthetic oligonucleotide
  X-linked inhibitor of apoptosis (XIAP) siRNA
ctcgccactgcactccagcctgg

SEQ ID NO: 15502 - DNA, 23 bp, Artificial Sequence
  Description of Artificial Sequence: Synthetic oligonucleotide
  X-linked inhibitor of apoptosis (XIAP) siRNA
tcgccactgcactccagcctggg

SEQ ID NO: 15503 - DNA, 23 bp, Artificial Sequence
  Description of Artificial Sequence: Synthetic oligonucleotide
  X-linked inhibitor of apoptosis (XIAP) siRNA
cgccactgcactccagcctgggc

SEQ ID NO: 15504 - DNA, 23 bp, Artificial Sequence
  Description of Artificial Sequence: Synthetic oligonucleotide
  X-linked inhibitor of apoptosis (XIAP) siRNA
gccactgcactccagcctgggca

SEQ ID NO: 15505 - DNA, 23 bp, Artificial Sequence
  Description of Artificial Sequence: Synthetic oligonucleotide
  X-linked inhibitor of apoptosis (XIAP) siRNA
ccactgcactccagcctgggcaa

SEQ ID NO: 15506 - DNA, 23 bp, Artificial Sequence
  Description of Artificial Sequence: Synthetic oligonucleotide
  X-linked inhibitor of apoptosis (XIAP) siRNA
cactgcactccagcctgggcaac

SEQ ID NO: 15507 - DNA, 23 bp, Artificial Sequence
  Description of Artificial Sequence: Synthetic oligonucleotide
  X-linked inhibitor of apoptosis (XIAP) siRNA
actgcactccagcctgggcaaca

SEQ ID NO: 15508 - DNA, 23 bp, Artificial Sequence
  Description of Artificial Sequence: Synthetic oligonucleotide
  X-linked inhibitor of apoptosis (XIAP) siRNA
ctgcactccagcctgggcaacag

SEQ ID NO: 15509 - DNA, 23 bp, Artificial Sequence
  Description of Artificial Sequence: Synthetic oligonucleotide
  X-linked inhibitor of apoptosis (XIAP) siRNA
tgcactccagcctgggcaacaga

SEQ ID NO: 15510 - DNA, 23 bp, Artificial Sequence
  Description of Artificial Sequence: Synthetic oligonucleotide
  X-linked inhibitor of apoptosis (XIAP) siRNA
gcactccagcctgggcaacagag

SEQ ID NO: 15511 - DNA, 23 bp, Artificial Sequence
  Description of Artificial Sequence: Synthetic oligonucleotide
  X-linked inhibitor of apoptosis (XIAP) siRNA
cactccagcctgggcaacagagc

SEQ ID NO: 15512 - DNA, 23 bp, Artificial Sequence
  Description of Artificial Sequence: Synthetic oligonucleotide
  X-linked inhibitor of apoptosis (XIAP) siRNA
actccagcctgggcaacagagca

SEQ ID NO: 15513 - DNA, 23 bp, Artificial Sequence
  Description of Artificial Sequence: Synthetic oligonucleotide
  X-linked inhibitor of apoptosis (XIAP) siRNA
ctccagcctgggcaacagagcaa

SEQ ID NO: 15514 - DNA, 23 bp, Artificial Sequence
  Description of Artificial Sequence: Synthetic oligonucleotide
  X-linked inhibitor of apoptosis (XIAP) siRNA
tccagcctgggcaacagagcaag

SEQ ID NO: 15515 - DNA, 23 bp, Artificial Sequence
  Description of Artificial Sequence: Synthetic oligonucleotide
  X-linked inhibitor of apoptosis (XIAP) siRNA
ccagcctgggcaacagagcaaga

SEQ ID NO: 15516 - DNA, 23 bp, Artificial Sequence
  Description of Artificial Sequence: Synthetic oligonucleotide
  X-linked inhibitor of apoptosis (XIAP) siRNA
cagcctgggcaacagagcaagac

SEQ ID NO: 15517 - DNA, 23 bp, Artificial Sequence
  Description of Artificial Sequence: Synthetic oligonucleotide
  X-linked inhibitor of apoptosis (XIAP) siRNA
agcctgggcaacagagcaagact

SEQ ID NO: 15518 - DNA, 23 bp, Artificial Sequence
  Description of Artificial Sequence: Synthetic oligonucleotide
  X-linked inhibitor of apoptosis (XIAP) siRNA
gcctgggcaacagagcaagactc

SEQ ID NO: 15519 - DNA, 23 bp, Artificial Sequence
  Description of Artificial Sequence: Synthetic oligonucleotide
  X-linked inhibitor of apoptosis (XIAP) siRNA
cctgggcaacagagcaagactct

SEQ ID NO: 15520 - DNA, 23 bp, Artificial Sequence
  Description of Artificial Sequence: Synthetic oligonucleotide
  X-linked inhibitor of apoptosis (XIAP) siRNA
ctgggcaacagagcaagactctg

SEQ ID NO: 15521 - DNA, 23 bp, Artificial Sequence
  Description of Artificial Sequence: Synthetic oligonucleotide
  X-linked inhibitor of apoptosis (XIAP) siRNA
tgggcaacagagcaagactctgt

SEQ ID NO: 15522 - DNA, 23 bp, Artificial Sequence
  Description of Artificial Sequence: Synthetic oligonucleotide
  X-linked inhibitor of apoptosis (XIAP) siRNA
gggcaacagagcaagactctgtc

SEQ ID NO: 15523 - DNA, 23 bp, Artificial Sequence
  Description of Artificial Sequence: Synthetic oligonucleotide
  X-linked inhibitor of apoptosis (XIAP) siRNA
ggcaacagagcaagactctgtct

SEQ ID NO: 15524 - DNA, 23 bp, Artificial Sequence
  Description of Artificial Sequence: Synthetic oligonucleotide
  X-linked inhibitor of apoptosis (XIAP) siRNA
gcaacagagcaagactctgtctc

SEQ ID NO: 15525 - DNA, 23 bp, Artificial Sequence
  Description of Artificial Sequence: Synthetic oligonucleotide
  X-linked inhibitor of apoptosis (XIAP) siRNA
caacagagcaagactctgtctca

SEQ ID NO: 15526 - DNA, 23 bp, Artificial Sequence
  Description of Artificial Sequence: Synthetic oligonucleotide
  X-linked inhibitor of apoptosis (XIAP) siRNA
aacagagcaagactctgtctcaa

SEQ ID NO: 15527 - DNA, 23 bp, Artificial Sequence
  Description of Artificial Sequence: Synthetic oligonucleotide
  X-linked inhibitor of apoptosis (XIAP) siRNA
acagagcaagactctgtctcaaa

SEQ ID NO: 15528 - DNA, 23 bp, Artificial Sequence
  Description of Artificial Sequence: Synthetic oligonucleotide
  X-linked inhibitor of apoptosis (XIAP) siRNA
cagagcaagactctgtctcaaaa

SEQ ID NO: 15529 - DNA, 23 bp, Artificial Sequence
  Description of Artificial Sequence: Synthetic oligonucleotide
  X-linked inhibitor of apoptosis (XIAP) siRNA
agagcaagactctgtctcaaaaa

SEQ ID NO: 15530 - DNA, 23 bp, Artificial Sequence
  Description of Artificial Sequence: Synthetic oligonucleotide
  X-linked inhibitor of apoptosis (XIAP) siRNA
gagcaagactctgtctcaaaaaa

SEQ ID NO: 15531 - DNA, 23 bp, Artificial Sequence
  Description of Artificial Sequence: Synthetic oligonucleotide
  X-linked inhibitor of apoptosis (XIAP) siRNA
agcaagactctgtctcaaaaaaa

SEQ ID NO: 15532 - DNA, 23 bp, Artificial Sequence
  Description of Artificial Sequence: Synthetic oligonucleotide
  X-linked inhibitor of apoptosis (XIAP) siRNA
gcaagactctgtctcaaaaaaaa

SEQ ID NO: 15533 - DNA, 23 bp, Artificial Sequence
  Description of Artificial Sequence: Synthetic oligonucleotide
  X-linked inhibitor of apoptosis (XIAP) siRNA
aaaaaaaagaaataagaaaatgg

SEQ ID NO: 15534 - DNA, 23 bp, Artificial Sequence
  Description of Artificial Sequence: Synthetic oligonucleotide
  X-linked inhibitor of apoptosis (XIAP) siRNA
aaaaaaagaaataagaaaatggg

SEQ ID NO: 15535 - DNA, 23 bp, Artificial Sequence
  Description of Artificial Sequence: Synthetic oligonucleotide
  X-linked inhibitor of apoptosis (XIAP) siRNA
aaaaaagaaataagaaaatggga

SEQ ID NO: 15536 - DNA, 23 bp, Artificial Sequence
  Description of Artificial Sequence: Synthetic oligonucleotide
  X-linked inhibitor of apoptosis (XIAP) siRNA
aaaaagaaataagaaaatgggaa

SEQ ID NO: 15537 - DNA, 23 bp, Artificial Sequence
  Description of Artificial Sequence: Synthetic oligonucleotide
  X-linked inhibitor of apoptosis (XIAP) siRNA
aaaagaaataagaaaatgggaag

SEQ ID NO: 15538 - DNA, 23 bp, Artificial Sequence
  Description of Artificial Sequence: Synthetic oligonucleotide
  X-linked inhibitor of apoptosis (XIAP) siRNA
aaagaaataagaaaatgggaagc

SEQ ID NO: 15539 - DNA, 23 bp, Artificial Sequence
  Description of Artificial Sequence: Synthetic oligonucleotide
  X-linked inhibitor of apoptosis (XIAP) siRNA
aagaaataagaaaatgggaagca

SEQ ID NO: 15540 - DNA, 23 bp, Artificial Sequence
  Description of Artificial Sequence: Synthetic oligonucleotide
  X-linked inhibitor of apoptosis (XIAP) siRNA
agaaataagaaaatgggaagcaa

SEQ ID NO: 15541 - DNA, 23 bp, Artificial Sequence
  Description of Artificial Sequence: Synthetic oligonucleotide
  X-linked inhibitor of apoptosis (XIAP) siRNA
gaaataagaaaatgggaagcaat

SEQ ID NO: 15542 - DNA, 23 bp, Artificial Sequence
  Description of Artificial Sequence: Synthetic oligonucleotide
  X-linked inhibitor of apoptosis (XIAP) siRNA
aaataagaaaatgggaagcaata

SEQ ID NO: 15543 - DNA, 23 bp, Artificial Sequence
  Description of Artificial Sequence: Synthetic oligonucleotide
  X-linked inhibitor of apoptosis (XIAP) siRNA
aataagaaaatgggaagcaatat

SEQ ID NO: 15544 - DNA, 23 bp, Artificial Sequence
  Description of Artificial Sequence: Synthetic oligonucleotide
  X-linked inhibitor of apoptosis (XIAP) siRNA
ataagaaaatgggaagcaatatt

SEQ ID NO: 15545 - DNA, 23 bp, Artificial Sequence
  Description of Artificial Sequence: Synthetic oligonucleotide
  X-linked inhibitor of apoptosis (XIAP) siRNA
taagaaaatgggaagcaatattt

SEQ ID NO: 15546 - DNA, 23 bp, Artificial Sequence
  Description of Artificial Sequence: Synthetic oligonucleotide
  X-linked inhibitor of apoptosis (XIAP) siRNA
aagaaaatgggaagcaatatttg

SEQ ID NO: 15547 - DNA, 23 bp, Artificial Sequence
  Description of Artificial Sequence: Synthetic oligonucleotide
  X-linked inhibitor of apoptosis (XIAP) siRNA
agaaaatgggaagcaatatttga

SEQ ID NO: 15548 - DNA, 23 bp, Artificial Sequence
  Description of Artificial Sequence: Synthetic oligonucleotide
  X-linked inhibitor of apoptosis (XIAP) siRNA
gaaaatgggaagcaatatttgac

SEQ ID NO: 15549 - DNA, 23 bp, Artificial Sequence
  Description of Artificial Sequence: Synthetic oligonucleotide
  X-linked inhibitor of apoptosis (XIAP) siRNA
aaaatgggaagcaatatttgaca

SEQ ID NO: 15550 - DNA, 23 bp, Artificial Sequence
  Description of Artificial Sequence: Synthetic oligonucleotide
  X-linked inhibitor of apoptosis (XIAP) siRNA
aaatgggaagcaatatttgacat

SEQ ID NO: 15551 - DNA, 23 bp, Artificial Sequence
  Description of Artificial Sequence: Synthetic oligonucleotide
  X-linked inhibitor of apoptosis (XIAP) siRNA
aatgggaagcaatatttgacata

SEQ ID NO: 15552 - DNA, 23 bp, Artificial Sequence
  Description of Artificial Sequence: Synthetic oligonucleotide
  X-linked inhibitor of apoptosis (XIAP) siRNA
atgggaagcaatatttgacatag

SEQ ID NO: 15553 - DNA, 23 bp, Artificial Sequence
  Description of Artificial Sequence: Synthetic oligonucleotide
  X-linked inhibitor of apoptosis (XIAP) siRNA
tgggaagcaatatttgacatagt

SEQ ID NO: 15554 - DNA, 23 bp, Artificial Sequence
  Description of Artificial Sequence: Synthetic oligonucleotide
  X-linked inhibitor of apoptosis (XIAP) siRNA
gggaagcaatatttgacatagtt

SEQ ID NO: 15555 - DNA, 23 bp, Artificial Sequence
  Description of Artificial Sequence: Synthetic oligonucleotide
  X-linked inhibitor of apoptosis (XIAP) siRNA
ggaagcaatatttgacatagttc

SEQ ID NO: 15556 - DNA, 23 bp, Artificial Sequence
  Description of Artificial Sequence: Synthetic oligonucleotide
  X-linked inhibitor of apoptosis (XIAP) siRNA
gaagcaatatttgacatagttct

SEQ ID NO: 15557 - DNA, 23 bp, Artificial Sequence
  Description of Artificial Sequence: Synthetic oligonucleotide
  X-linked inhibitor of apoptosis (XIAP) siRNA
aagcaatatttgacatagttctt

SEQ ID NO: 15558 - DNA, 23 bp, Artificial Sequence
  Description of Artificial Sequence: Synthetic oligonucleotide
  X-linked inhibitor of apoptosis (XIAP) siRNA
agcaatatttgacatagttcttt

SEQ ID NO: 15559 - DNA, 23 bp, Artificial Sequence
  Description of Artificial Sequence: Synthetic oligonucleotide
  X-linked inhibitor of apoptosis (XIAP) siRNA
gcaatatttgacatagttctttt

SEQ ID NO: 15560 - DNA, 23 bp, Artificial Sequence
  Description of Artificial Sequence: Synthetic oligonucleotide
  X-linked inhibitor of apoptosis (XIAP) siRNA
caatatttgacatagttcttttt

SEQ ID NO: 15561 - DNA, 23 bp, Artificial Sequence
  Description of Artificial Sequence: Synthetic oligonucleotide
  X-linked inhibitor of apoptosis (XIAP) siRNA
aatatttgacatagttcttttta

SEQ ID NO: 15562 - DNA, 23 bp, Artificial Sequence
  Description of Artificial Sequence: Synthetic oligonucleotide
  X-linked inhibitor of apoptosis (XIAP) siRNA
atatttgacatagttctttttag

SEQ ID NO: 15563 - DNA, 23 bp, Artificial Sequence
  Description of Artificial Sequence: Synthetic oligonucleotide
  X-linked inhibitor of apoptosis (XIAP) siRNA
tatttgacatagttctttttagt

SEQ ID NO: 15564 - DNA, 23 bp, Artificial Sequence
  Description of Artificial Sequence: Synthetic oligonucleotide
  X-linked inhibitor of apoptosis (XIAP) siRNA
atttgacatagttctttttagtc

SEQ ID NO: 15565 - DNA, 23 bp, Artificial Sequence
  Description of Artificial Sequence: Synthetic oligonucleotide
  X-linked inhibitor of apoptosis (XIAP) siRNA
tttgacatagttctttttagtca

SEQ ID NO: 15566 - DNA, 23 bp, Artificial Sequence
  Description of Artificial Sequence: Synthetic oligonucleotide
  X-linked inhibitor of apoptosis (XIAP) siRNA
ttgacatagttctttttagtcaa

SEQ ID NO: 15567 - DNA, 23 bp, Artificial Sequence
  Description of Artificial Sequence: Synthetic oligonucleotide
  X-linked inhibitor of apoptosis (XIAP) siRNA
tgacatagttctttttagtcaaa

SEQ ID NO: 15568 - DNA, 23 bp, Artificial Sequence
  Description of Artificial Sequence: Synthetic oligonucleotide
  X-linked inhibitor of apoptosis (XIAP) siRNA
gacatagttctttttagtcaaat

SEQ ID NO: 15569 - DNA, 23 bp, Artificial Sequence
  Description of Artificial Sequence: Synthetic oligonucleotide
  X-linked inhibitor of apoptosis (XIAP) siRNA
acatagttctttttagtcaaatc

SEQ ID NO: 15570 - DNA, 23 bp, Artificial Sequence
  Description of Artificial Sequence: Synthetic oligonucleotide
  X-linked inhibitor of apoptosis (XIAP) siRNA
catagttctttttagtcaaatct

SEQ ID NO: 15571 - DNA, 23 bp, Artificial Sequence
  Description of Artificial Sequence: Synthetic oligonucleotide
  X-linked inhibitor of apoptosis (XIAP) siRNA
atagttctttttagtcaaatcta

SEQ ID NO: 15572 - DNA, 23 bp, Artificial Sequence
  Description of Artificial Sequence: Synthetic oligonucleotide
  X-linked inhibitor of apoptosis (XIAP) siRNA
tagttctttttagtcaaatctac

SEQ ID NO: 15573 - DNA, 23 bp, Artificial Sequence
  Description of Artificial Sequence: Synthetic oligonucleotide
  X-linked inhibitor of apoptosis (XIAP) siRNA
agttctttttagtcaaatctact

SEQ ID NO: 15574 - DNA, 23 bp, Artificial Sequence
  Description of Artificial Sequence: Synthetic oligonucleotide
  X-linked inhibitor of apoptosis (XIAP) siRNA
gttctttttagtcaaatctactt

SEQ ID NO: 15575 - DNA, 23 bp, Artificial Sequence
  Description of Artificial Sequence: Synthetic oligonucleotide
  X-linked inhibitor of apoptosis (XIAP) siRNA
ttctttttagtcaaatctacttg

SEQ ID NO: 15576 - DNA, 23 bp, Artificial Sequence
  Description of Artificial Sequence: Synthetic oligonucleotide
  X-linked inhibitor of apoptosis (XIAP) siRNA
tctttttagtcaaatctacttgt

SEQ ID NO: 15577 - DNA, 23 bp, Artificial Sequence
  Description of Artificial Sequence: Synthetic oligonucleotide
  X-linked inhibitor of apoptosis (XIAP) siRNA
ctttttagtcaaatctacttgtt

SEQ ID NO: 15578 - DNA, 23 bp, Artificial Sequence
  Description of Artificial Sequence: Synthetic oligonucleotide
  X-linked inhibitor of apoptosis (XIAP) siRNA
tttttagtcaaatctacttgtta

SEQ ID NO: 15579 - DNA, 23 bp, Artificial Sequence
  Description of Artificial Sequence: Synthetic oligonucleotide
  X-linked inhibitor of apoptosis (XIAP) siRNA
ttttagtcaaatctacttgttaa

SEQ ID NO: 15580 - DNA, 23 bp, Artificial Sequence
  Description of Artificial Sequence: Synthetic oligonucleotide
  X-linked inhibitor of apoptosis (XIAP) siRNA
tttagtcaaatctacttgttaaa

SEQ ID NO: 15581 - DNA, 23 bp, Artificial Sequence
  Description of Artificial Sequence: Synthetic oligonucleotide
  X-linked inhibitor of apoptosis (XIAP) siRNA
ttagtcaaatctacttgttaaaa

SEQ ID NO: 15582 - DNA, 23 bp, Artificial Sequence
  Description of Artificial Sequence: Synthetic oligonucleotide
  X-linked inhibitor of apoptosis (XIAP) siRNA
tagtcaaatctacttgttaaaaa

SEQ ID NO: 15583 - DNA, 23 bp, Artificial Sequence
  Description of Artificial Sequence: Synthetic oligonucleotide
  X-linked inhibitor of apoptosis (XIAP) siRNA
agtcaaatctacttgttaaaaaa

SEQ ID NO: 15584 - DNA, 23 bp, Artificial Sequence
  Description of Artificial Sequence: Synthetic oligonucleotide
  X-linked inhibitor of apoptosis (XIAP) siRNA
gtcaaatctacttgttaaaaaaa

SEQ ID NO: 15585 - DNA, 23 bp, Artificial Sequence
  Description of Artificial Sequence: Synthetic oligonucleotide
  X-linked inhibitor of apoptosis (XIAP) siRNA
tcaaatctacttgttaaaaaaag

SEQ ID NO: 15586 - DNA, 23 bp, Artificial Sequence
  Description of Artificial Sequence: Synthetic oligonucleotide
  X-linked inhibitor of apoptosis (XIAP) siRNA
caaatctacttgttaaaaaaagg

SEQ ID NO: 15587 - DNA, 23 bp, Artificial Sequence
  Description of Artificial Sequence: Synthetic oligonucleotide
  X-linked inhibitor of apoptosis (XIAP) siRNA
aaatctacttgttaaaaaaaggg

SEQ ID NO: 15588 - DNA, 23 bp, Artificial Sequence
  Description of Artificial Sequence: Synthetic oligonucleotide
  X-linked inhibitor of apoptosis (XIAP) siRNA
aatctacttgttaaaaaaagggt

SEQ ID NO: 15589 - DNA, 23 bp, Artificial Sequence
  Description of Artificial Sequence: Synthetic oligonucleotide
  X-linked inhibitor of apoptosis (XIAP) siRNA
atctacttgttaaaaaaagggta

SEQ ID NO: 15590 - DNA, 23 bp, Artificial Sequence
  Description of Artificial Sequence: Synthetic oligonucleotide
  X-linked inhibitor of apoptosis (XIAP) siRNA
tctacttgttaaaaaaagggtag

SEQ ID NO: 15591 - DNA, 23 bp, Artificial Sequence
  Description of Artificial Sequence: Synthetic oligonucleotide
  X-linked inhibitor of apoptosis (XIAP) siRNA
ctacttgttaaaaaaagggtagc

SEQ ID NO: 15592 - DNA, 23 bp, Artificial Sequence
  Description of Artificial Sequence: Synthetic oligonucleotide
  X-linked inhibitor of apoptosis (XIAP) siRNA
tacttgttaaaaaaagggtagca

SEQ ID NO: 15593 - DNA, 23 bp, Artificial Sequence
  Description of Artificial Sequence: Synthetic oligonucleotide
  X-linked inhibitor of apoptosis (XIAP) siRNA
acttgttaaaaaaagggtagcag

SEQ ID NO: 15594 - DNA, 23 bp, Artificial Sequence
  Description of Artificial Sequence: Synthetic oligonucleotide
  X-linked inhibitor of apoptosis (XIAP) siRNA
cttgttaaaaaaagggtagcagt

SEQ ID NO: 15595 - DNA, 23 bp, Artificial Sequence
  Description of Artificial Sequence: Synthetic oligonucleotide
  X-linked inhibitor of apoptosis (XIAP) siRNA
ttgttaaaaaaagggtagcagtt

SEQ ID NO: 15596 - DNA, 23 bp, Artificial Sequence
  Description of Artificial Sequence: Synthetic oligonucleotide
  X-linked inhibitor of apoptosis (XIAP) siRNA
tgttaaaaaaagggtagcagttt

SEQ ID NO: 15597 - DNA, 23 bp, Artificial Sequence
  Description of Artificial Sequence: Synthetic oligonucleotide
  X-linked inhibitor of apoptosis (XIAP) siRNA
gttaaaaaaagggtagcagttta

SEQ ID NO: 15598 - DNA, 23 bp, Artificial Sequence
  Description of Artificial Sequence: Synthetic oligonucleotide
  X-linked inhibitor of apoptosis (XIAP) siRNA
ttaaaaaaagggtagcagtttat

SEQ ID NO: 15599 - DNA, 23 bp, Artificial Sequence
  Description of Artificial Sequence: Synthetic oligonucleotide
  X-linked inhibitor of apoptosis (XIAP) siRNA
taaaaaaagggtagcagtttatt

SEQ ID NO: 15600 - DNA, 23 bp, Artificial Sequence
  Description of Artificial Sequence: Synthetic oligonucleotide
  X-linked inhibitor of apoptosis (XIAP) siRNA
aaaaaaagggtagcagtttattc

SEQ ID NO: 15601 - DNA, 23 bp, Artificial Sequence
  Description of Artificial Sequence: Synthetic oligonucleotide
  X-linked inhibitor of apoptosis (XIAP) siRNA
aaaaaagggtagcagtttattca

SEQ ID NO: 15602 - DNA, 23 bp, Artificial Sequence
  Description of Artificial Sequence: Synthetic oligonucleotide
  X-linked inhibitor of apoptosis (XIAP) siRNA
aaaaagggtagcagtttattcat

SEQ ID NO: 15603 - DNA, 23 bp, Artificial Sequence
  Description of Artificial Sequence: Synthetic oligonucleotide
  X-linked inhibitor of apoptosis (XIAP) siRNA
aaaagggtagcagtttattcatc

SEQ ID NO: 15604 - DNA, 23 bp, Artificial Sequence
  Description of Artificial Sequence: Synthetic oligonucleotide
  X-linked inhibitor of apoptosis (XIAP) siRNA
aaagggtagcagtttattcatct

SEQ ID NO: 15605 - DNA, 23 bp, Artificial Sequence
  Description of Artificial Sequence: Synthetic oligonucleotide
  X-linked inhibitor of apoptosis (XIAP) siRNA
aagggtagcagtttattcatctg

SEQ ID NO: 15606 - DNA, 23 bp, Artificial Sequence
  Description of Artificial Sequence: Synthetic oligonucleotide
  X-linked inhibitor of apoptosis (XIAP) siRNA
agggtagcagtttattcatctgt

SEQ ID NO: 15607 - DNA, 23 bp, Artificial Sequence
  Description of Artificial Sequence: Synthetic oligonucleotide
  X-linked inhibitor of apoptosis (XIAP) siRNA
gggtagcagtttattcatctgtg

SEQ ID NO: 15608 - DNA, 23 bp, Artificial Sequence
  Description of Artificial Sequence: Synthetic oligonucleotide
  X-linked inhibitor of apoptosis (XIAP) siRNA
ggtagcagtttattcatctgtga

SEQ ID NO: 15609 - DNA, 23 bp, Artificial Sequence
  Description of Artificial Sequence: Synthetic oligonucleotide
  X-linked inhibitor of apoptosis (XIAP) siRNA
gtagcagtttattcatctgtgaa

SEQ ID NO: 15610 - DNA, 23 bp, Artificial Sequence
  Description of Artificial Sequence: Synthetic oligonucleotide
  X-linked inhibitor of apoptosis (XIAP) siRNA
tagcagtttattcatctgtgaaa

SEQ ID NO: 15611 - DNA, 23 bp, Artificial Sequence
  Description of Artificial Sequence: Synthetic oligonucleotide
  X-linked inhibitor of apoptosis (XIAP) siRNA
agcagtttattcatctgtgaaag

SEQ ID NO: 15612 - DNA, 23 bp, Artificial Sequence
  Description of Artificial Sequence: Synthetic oligonucleotide
  X-linked inhibitor of apoptosis (XIAP) siRNA
gcagtttattcatctgtgaaagg

SEQ ID NO: 15613 - DNA, 23 bp, Artificial Sequence
  Description of Artificial Sequence: Synthetic oligonucleotide
  X-linked inhibitor of apoptosis (XIAP) siRNA
cagtttattcatctgtgaaagga

SEQ ID NO: 15614 - DNA, 23 bp, Artificial Sequence
  Description of Artificial Sequence: Synthetic oligonucleotide
  X-linked inhibitor of apoptosis (XIAP) siRNA
agtttattcatctgtgaaaggaa

SEQ ID NO: 15615 - DNA, 23 bp, Artificial Sequence
  Description of Artificial Sequence: Synthetic oligonucleotide
  X-linked inhibitor of apoptosis (XIAP) siRNA
gtttattcatctgtgaaaggaaa

SEQ ID NO: 15616 - DNA, 23 bp, Artificial Sequence
  Description of Artificial Sequence: Synthetic oligonucleotide
  X-linked inhibitor of apoptosis (XIAP) siRNA
tttattcatctgtgaaaggaaaa

SEQ ID NO: 15617 - DNA, 23 bp, Artificial Sequence
  Description of Artificial Sequence: Synthetic oligonucleotide
  X-linked inhibitor of apoptosis (XIAP) siRNA
ttattcatctgtgaaaggaaaat

SEQ ID NO: 15618 - DNA, 23 bp, Artificial Sequence
  Description of Artificial Sequence: Synthetic oligonucleotide
  X-linked inhibitor of apoptosis (XIAP) siRNA
tattcatctgtgaaaggaaaata

SEQ ID NO: 15619 - DNA, 23 bp, Artificial Sequence
  Description of Artificial Sequence: Synthetic oligonucleotide
  X-linked inhibitor of apoptosis (XIAP) siRNA
attcatctgtgaaaggaaaataa

SEQ ID NO: 15620 - DNA, 23 bp, Artificial Sequence
  Description of Artificial Sequence: Synthetic oligonucleotide
  X-linked inhibitor of apoptosis (XIAP) siRNA
ttcatctgtgaaaggaaaataat

SEQ ID NO: 15621 - DNA, 23 bp, Artificial Sequence
  Description of Artificial Sequence: Synthetic oligonucleotide
  X-linked inhibitor of apoptosis (XIAP) siRNA
tcatctgtgaaaggaaaataata

SEQ ID NO: 15622 - DNA, 23 bp, Artificial Sequence
  Description of Artificial Sequence: Synthetic oligonucleotide
  X-linked inhibitor of apoptosis (XIAP) siRNA
catctgtgaaaggaaaataatac

SEQ ID NO: 15623 - DNA, 23 bp, Artificial Sequence
  Description of Artificial Sequence: Synthetic oligonucleotide
  X-linked inhibitor of apoptosis (XIAP) siRNA
atctgtgaaaggaaaataatact

SEQ ID NO: 15624 - DNA, 23 bp, Artificial Sequence
  Description of Artificial Sequence: Synthetic oligonucleotide
  X-linked inhibitor of apoptosis (XIAP) siRNA
tctgtgaaaggaaaataatactt

SEQ ID NO: 15625 - DNA, 23 bp, Artificial Sequence
  Description of Artificial Sequence: Synthetic oligonucleotide
  X-linked inhibitor of apoptosis (XIAP) siRNA
ctgtgaaaggaaaataatactta

SEQ ID NO: 15626 - DNA, 23 bp, Artificial Sequence
  Description of Artificial Sequence: Synthetic oligonucleotide
  X-linked inhibitor of apoptosis (XIAP) siRNA
tgtgaaaggaaaataatacttat

SEQ ID NO: 15627 - DNA, 23 bp, Artificial Sequence
  Description of Artificial Sequence: Synthetic oligonucleotide
  X-linked inhibitor of apoptosis (XIAP) siRNA
gtgaaaggaaaataatacttatc

SEQ ID NO: 15628 - DNA, 23 bp, Artificial Sequence
  Description of Artificial Sequence: Synthetic oligonucleotide
  X-linked inhibitor of apoptosis (XIAP) siRNA
tgaaaggaaaataatacttatct

SEQ ID NO: 15629 - DNA, 23 bp, Artificial Sequence
  Description of Artificial Sequence: Synthetic oligonucleotide
  X-linked inhibitor of apoptosis (XIAP) siRNA
gaaaggaaaataatacttatctt

SEQ ID NO: 15630 - DNA, 23 bp, Artificial Sequence
  Description of Artificial Sequence: Synthetic oligonucleotide
  X-linked inhibitor of apoptosis (XIAP) siRNA
aaaggaaaataatacttatctta

SEQ ID NO: 15631 - DNA, 23 bp, Artificial Sequence
  Description of Artificial Sequence: Synthetic oligonucleotide
  X-linked inhibitor of apoptosis (XIAP) siRNA
aaggaaaataatacttatcttac

SEQ ID NO: 15632 - DNA, 23 bp, Artificial Sequence
  Description of Artificial Sequence: Synthetic oligonucleotide
  X-linked inhibitor of apoptosis (XIAP) siRNA
aggaaaataatacttatcttaca

SEQ ID NO: 15633 - DNA, 23 bp, Artificial Sequence
  Description of Artificial Sequence: Synthetic oligonucleotide
  X-linked inhibitor of apoptosis (XIAP) siRNA
ggaaaataatacttatcttacaa

SEQ ID NO: 15634 - DNA, 23 bp, Artificial Sequence
  Description of Artificial Sequence: Synthetic oligonucleotide
  X-linked inhibitor of apoptosis (XIAP) siRNA
gaaaataatacttatcttacaag

SEQ ID NO: 15635 - DNA, 23 bp, Artificial Sequence
  Description of Artificial Sequence: Synthetic oligonucleotide
  X-linked inhibitor of apoptosis (XIAP) siRNA
aaaataatacttatcttacaagg

SEQ ID NO: 15636 - DNA, 23 bp, Artificial Sequence
  Description of Artificial Sequence: Synthetic oligonucleotide
  X-linked inhibitor of apoptosis (XIAP) siRNA
aaataatacttatcttacaaggt

SEQ ID NO: 15637 - DNA, 23 bp, Artificial Sequence
  Description of Artificial Sequence: Synthetic oligonucleotide
  X-linked inhibitor of apoptosis (XIAP) siRNA
aataatacttatcttacaaggtt

SEQ ID NO: 15638 - DNA, 23 bp, Artificial Sequence
  Description of Artificial Sequence: Synthetic oligonucleotide
  X-linked inhibitor of apoptosis (XIAP) siRNA
ataatacttatcttacaaggttg

SEQ ID NO: 15639 - DNA, 23 bp, Artificial Sequence
  Description of Artificial Sequence: Synthetic oligonucleotide
  X-linked inhibitor of apoptosis (XIAP) siRNA
taatacttatcttacaaggttgc

SEQ ID NO: 15640 - DNA, 23 bp, Artificial Sequence
  Description of Artificial Sequence: Synthetic oligonucleotide
  X-linked inhibitor of apoptosis (XIAP) siRNA
aatacttatcttacaaggttgca

SEQ ID NO: 15641 - DNA, 23 bp, Artificial Sequence
  Description of Artificial Sequence: Synthetic oligonucleotide
  X-linked inhibitor of apoptosis (XIAP) siRNA
atacttatcttacaaggttgcaa

SEQ ID NO: 15642 - DNA, 23 bp, Artificial Sequence
  Description of Artificial Sequence: Synthetic oligonucleotide
  X-linked inhibitor of apoptosis (XIAP) siRNA
tacttatcttacaaggttgcaag

SEQ ID NO: 15643 - DNA, 23 bp, Artificial Sequence
  Description of Artificial Sequence: Synthetic oligonucleotide
  X-linked inhibitor of apoptosis (XIAP) siRNA
acttatcttacaaggttgcaaga

SEQ ID NO: 15644 - DNA, 23 bp, Artificial Sequence
  Description of Artificial Sequence: Synthetic oligonucleotide
  X-linked inhibitor of apoptosis (XIAP) siRNA
cttatcttacaaggttgcaagag

SEQ ID NO: 15645 - DNA, 23 bp, Artificial Sequence
  Description of Artificial Sequence: Synthetic oligonucleotide
  X-linked inhibitor of apoptosis (XIAP) siRNA
ttatcttacaaggttgcaagagc

SEQ ID NO: 15646 - DNA, 23 bp, Artificial Sequence
  Description of Artificial Sequence: Synthetic oligonucleotide
  X-linked inhibitor of apoptosis (XIAP) siRNA
tatcttacaaggttgcaagagct

SEQ ID NO: 15647 - DNA, 23 bp, Artificial Sequence
  Description of Artificial Sequence: Synthetic oligonucleotide
  X-linked inhibitor of apoptosis (XIAP) siRNA
atcttacaaggttgcaagagctc

SEQ ID NO: 15648 - DNA, 23 bp, Artificial Sequence
  Description of Artificial Sequence: Synthetic oligonucleotide
  X-linked inhibitor of apoptosis (XIAP) siRNA
tcttacaaggttgcaagagctca

SEQ ID NO: 15649 - DNA, 23 bp, Artificial Sequence
  Description of Artificial Sequence: Synthetic oligonucleotide
  X-linked inhibitor of apoptosis (XIAP) siRNA
cttacaaggttgcaagagctcaa

SEQ ID NO: 15650 - DNA, 23 bp, Artificial Sequence
  Description of Artificial Sequence: Synthetic oligonucleotide
  X-linked inhibitor of apoptosis (XIAP) siRNA
ttacaaggttgcaagagctcaag

SEQ ID NO: 15651 - DNA, 23 bp, Artificial Sequence
  Description of Artificial Sequence: Synthetic oligonucleotide
  X-linked inhibitor of apoptosis (XIAP) siRNA
tacaaggttgcaagagctcaagg

SEQ ID NO: 15652 - DNA, 23 bp, Artificial Sequence
  Description of Artificial Sequence: Synthetic oligonucleotide
  X-linked inhibitor of apoptosis (XIAP) siRNA
acaaggttgcaagagctcaagga

SEQ ID NO: 15653 - DNA, 23 bp, Artificial Sequence
  Description of Artificial Sequence: Synthetic oligonucleotide
  X-linked inhibitor of apoptosis (XIAP) siRNA
caaggttgcaagagctcaaggag

SEQ ID NO: 15654 - DNA, 23 bp, Artificial Sequence
  Description of Artificial Sequence: Synthetic oligonucleotide
  X-linked inhibitor of apoptosis (XIAP) siRNA
aaggttgcaagagctcaaggaga

SEQ ID NO: 15655 - DNA, 23 bp, Artificial Sequence
  Description of Artificial Sequence: Synthetic oligonucleotide
  X-linked inhibitor of apoptosis (XIAP) siRNA
aggttgcaagagctcaaggagac

SEQ ID NO: 15656 - DNA, 23 bp, Artificial Sequence
  Description of Artificial Sequence: Synthetic oligonucleotide
  X-linked inhibitor of apoptosis (XIAP) siRNA
ggttgcaagagctcaaggagacc

SEQ ID NO: 15657 - DNA, 23 bp, Artificial Sequence
  Description of Artificial Sequence: Synthetic oligonucleotide
  X-linked inhibitor of apoptosis (XIAP) siRNA
gttgcaagagctcaaggagacca

SEQ ID NO: 15658 - DNA, 23 bp, Artificial Sequence
  Description of Artificial Sequence: Synthetic oligonucleotide
  X-linked inhibitor of apoptosis (XIAP) siRNA
ttgcaagagctcaaggagaccat

SEQ ID NO: 15659 - DNA, 23 bp, Artificial Sequence
  Description of Artificial Sequence: Synthetic oligonucleotide
  X-linked inhibitor of apoptosis (XIAP) siRNA
tgcaagagctcaaggagaccatg

SEQ ID NO: 15660 - DNA, 23 bp, Artificial Sequence
  Description of Artificial Sequence: Synthetic oligonucleotide
  X-linked inhibitor of apoptosis (XIAP) siRNA
gcaagagctcaaggagaccatgt

SEQ ID NO: 15661 - DNA, 23 bp, Artificial Sequence
  Description of Artificial Sequence: Synthetic oligonucleotide
  X-linked inhibitor of apoptosis (XIAP) siRNA
caagagctcaaggagaccatgta

SEQ ID NO: 15662 - DNA, 23 bp, Artificial Sequence
  Description of Artificial Sequence: Synthetic oligonucleotide
  X-linked inhibitor of apoptosis (XIAP) siRNA
aagagctcaaggagaccatgtat

SEQ ID NO: 15663 - DNA, 23 bp, Artificial Sequence
  Description of Artificial Sequence: Synthetic oligonucleotide
  X-linked inhibitor of apoptosis (XIAP) siRNA
agagctcaaggagaccatgtatg

SEQ ID NO: 15664 - DNA, 23 bp, Artificial Sequence
  Description of Artificial Sequence: Synthetic oligonucleotide
  X-linked inhibitor of apoptosis (XIAP) siRNA
gagctcaaggagaccatgtatgt

SEQ ID NO: 15665 - DNA, 23 bp, Artificial Sequence
  Description of Artificial Sequence: Synthetic oligonucleotide
  X-linked inhibitor of apoptosis (XIAP) siRNA
agctcaaggagaccatgtatgta

SEQ ID NO: 15666 - DNA, 23 bp, Artificial Sequence
  Description of Artificial Sequence: Synthetic oligonucleotide
  X-linked inhibitor of apoptosis (XIAP) siRNA
gctcaaggagaccatgtatgtaa

SEQ ID NO: 15667 - DNA, 23 bp, Artificial Sequence
  Description of Artificial Sequence: Synthetic oligonucleotide
  X-linked inhibitor of apoptosis (XIAP) siRNA
ctcaaggagaccatgtatgtaaa

SEQ ID NO: 15668 - DNA, 23 bp, Artificial Sequence
  Description of Artificial Sequence: Synthetic oligonucleotide
  X-linked inhibitor of apoptosis (XIAP) siRNA
tcaaggagaccatgtatgtaaag

SEQ ID NO: 15669 - DNA, 23 bp, Artificial Sequence
  Description of Artificial Sequence: Synthetic oligonucleotide
  X-linked inhibitor of apoptosis (XIAP) siRNA
caaggagaccatgtatgtaaagt

SEQ ID NO: 15670 - DNA, 23 bp, Artificial Sequence
  Description of Artificial Sequence: Synthetic oligonucleotide
  X-linked inhibitor of apoptosis (XIAP) siRNA
aaggagaccatgtatgtaaagtt

SEQ ID NO: 15671 - DNA, 23 bp, Artificial Sequence
  Description of Artificial Sequence: Synthetic oligonucleotide
  X-linked inhibitor of apoptosis (XIAP) siRNA
aggagaccatgtatgtaaagttc

SEQ ID NO: 15672 - DNA, 23 bp, Artificial Sequence
  Description of Artificial Sequence: Synthetic oligonucleotide
  X-linked inhibitor of apoptosis (XIAP) siRNA
ggagaccatgtatgtaaagttcc

SEQ ID NO: 15673 - DNA, 23 bp, Artificial Sequence
  Description of Artificial Sequence: Synthetic oligonucleotide
  X-linked inhibitor of apoptosis (XIAP) siRNA
gagaccatgtatgtaaagttcct

SEQ ID NO: 15674 - DNA, 23 bp, Artificial Sequence
  Description of Artificial Sequence: Synthetic oligonucleotide
  X-linked inhibitor of apoptosis (XIAP) siRNA
agaccatgtatgtaaagttcctg

SEQ ID NO: 15675 - DNA, 23 bp, Artificial Sequence
  Description of Artificial Sequence: Synthetic oligonucleotide
  X-linked inhibitor of apoptosis (XIAP) siRNA
gaccatgtatgtaaagttcctgc

SEQ ID NO: 15676 - DNA, 23 bp, Artificial Sequence
  Description of Artificial Sequence: Synthetic oligonucleotide
  X-linked inhibitor of apoptosis (XIAP) siRNA
accatgtatgtaaagttcctgct

SEQ ID NO: 15677 - DNA, 23 bp, Artificial Sequence
  Description of Artificial Sequence: Synthetic oligonucleotide
  X-linked inhibitor of apoptosis (XIAP) siRNA
ccatgtatgtaaagttcctgctg

SEQ ID NO: 15678 - DNA, 23 bp, Artificial Sequence
  Description of Artificial Sequence: Synthetic oligonucleotide
  X-linked inhibitor of apoptosis (XIAP) siRNA
catgtatgtaaagttcctgctgt

SEQ ID NO: 15679 - DNA, 23 bp, Artificial Sequence
  Description of Artificial Sequence: Synthetic oligonucleotide
  X-linked inhibitor of apoptosis (XIAP) siRNA
atgtatgtaaagttcctgctgta

SEQ ID NO: 15680 - DNA, 23 bp, Artificial Sequence
  Description of Artificial Sequence: Synthetic oligonucleotide
  X-linked inhibitor of apoptosis (XIAP) siRNA
tgtatgtaaagttcctgctgtaa

SEQ ID NO: 15681 - DNA, 23 bp, Artificial Sequence
  Description of Artificial Sequence: Synthetic oligonucleotide
  X-linked inhibitor of apoptosis (XIAP) siRNA
gtatgtaaagttcctgctgtaaa

SEQ ID NO: 15682 - DNA, 23 bp, Artificial Sequence
  Description of Artificial Sequence: Synthetic oligonucleotide
  X-linked inhibitor of apoptosis (XIAP) siRNA
tatgtaaagttcctgctgtaaat

SEQ ID NO: 15683 - DNA, 23 bp, Artificial Sequence
  Description of Artificial Sequence: Synthetic oligonucleotide
  X-linked inhibitor of apoptosis (XIAP) siRNA
atgtaaagttcctgctgtaaata

SEQ ID NO: 15684 - DNA, 23 bp, Artificial Sequence
  Description of Artificial Sequence: Synthetic oligonucleotide
  X-linked inhibitor of apoptosis (XIAP) siRNA
tgtaaagttcctgctgtaaatat

SEQ ID NO: 15685 - DNA, 23 bp, Artificial Sequence
  Description of Artificial Sequence: Synthetic oligonucleotide
  X-linked inhibitor of apoptosis (XIAP) siRNA
gtaaagttcctgctgtaaatatg

SEQ ID NO: 15686 - DNA, 23 bp, Artificial Sequence
  Description of Artificial Sequence: Synthetic oligonucleotide
  X-linked inhibitor of apoptosis (XIAP) siRNA
taaagttcctgctgtaaatatga

SEQ ID NO: 15687 - DNA, 23 bp, Artificial Sequence
  Description of Artificial Sequence: Synthetic oligonucleotide
  X-linked inhibitor of apoptosis (XIAP) siRNA
aaagttcctgctgtaaatatgaa

SEQ ID NO: 15688 - DNA, 23 bp, Artificial Sequence
  Description of Artificial Sequence: Synthetic oligonucleotide
  X-linked inhibitor of apoptosis (XIAP) siRNA
aagttcctgctgtaaatatgaac

SEQ ID NO: 15689 - DNA, 23 bp, Artificial Sequence
  Description of Artificial Sequence: Synthetic oligonucleotide
  X-linked inhibitor of apoptosis (XIAP) siRNA
agttcctgctgtaaatatgaact

SEQ ID NO: 15690 - DNA, 23 bp, Artificial Sequence
  Description of Artificial Sequence: Synthetic oligonucleotide
  X-linked inhibitor of apoptosis (XIAP) siRNA
gttcctgctgtaaatatgaactc

SEQ ID NO: 15691 - DNA, 23 bp, Artificial Sequence
  Description of Artificial Sequence: Synthetic oligonucleotide
  X-linked inhibitor of apoptosis (XIAP) siRNA
ttcctgctgtaaatatgaactcc

SEQ ID NO: 15692 - DNA, 23 bp, Artificial Sequence
  Description of Artificial Sequence: Synthetic oligonucleotide
  X-linked inhibitor of apoptosis (XIAP) siRNA
tcctgctgtaaatatgaactccc

SEQ ID NO: 15693 - DNA, 23 bp, Artificial Sequence
  Description of Artificial Sequence: Synthetic oligonucleotide
  X-linked inhibitor of apoptosis (XIAP) siRNA
cctgctgtaaatatgaactccca

SEQ ID NO: 15694 - DNA, 23 bp, Artificial Sequence
  Description of Artificial Sequence: Synthetic oligonucleotide
  X-linked inhibitor of apoptosis (XIAP) siRNA
ctgctgtaaatatgaactcccat

SEQ ID NO: 15695 - DNA, 23 bp, Artificial Sequence
  Description of Artificial Sequence: Synthetic oligonucleotide
  X-linked inhibitor of apoptosis (XIAP) siRNA
tgctgtaaatatgaactcccatc

SEQ ID NO: 15696 - DNA, 23 bp, Artificial Sequence
  Description of Artificial Sequence: Synthetic oligonucleotide
  X-linked inhibitor of apoptosis (XIAP) siRNA
gctgtaaatatgaactcccatcc

SEQ ID NO: 15697 - DNA, 23 bp, Artificial Sequence
  Description of Artificial Sequence: Synthetic oligonucleotide
  X-linked inhibitor of apoptosis (XIAP) siRNA
ctgtaaatatgaactcccatcct

SEQ ID NO: 15698 - DNA, 23 bp, Artificial Sequence
  Description of Artificial Sequence: Synthetic oligonucleotide
  X-linked inhibitor of apoptosis (XIAP) siRNA
tgtaaatatgaactcccatccta

SEQ ID NO: 15699 - DNA, 23 bp, Artificial Sequence
  Description of Artificial Sequence: Synthetic oligonucleotide
  X-linked inhibitor of apoptosis (XIAP) siRNA
gtaaatatgaactcccatcctaa

SEQ ID NO: 15700 - DNA, 23 bp, Artificial Sequence
  Description of Artificial Sequence: Synthetic oligonucleotide
  X-linked inhibitor of apoptosis (XIAP) siRNA
taaatatgaactcccatcctaat

SEQ ID NO: 15701 - DNA, 23 bp, Artificial Sequence
  Description of Artificial Sequence: Synthetic oligonucleotide
  X-linked inhibitor of apoptosis (XIAP) siRNA
aaatatgaactcccatcctaata

SEQ ID NO: 15702 - DNA, 23 bp, Artificial Sequence
  Description of Artificial Sequence: Synthetic oligonucleotide
  X-linked inhibitor of apoptosis (XIAP) siRNA
aatatgaactcccatcctaatac

SEQ ID NO: 15703 - DNA, 23 bp, Artificial Sequence
  Description of Artificial Sequence: Synthetic oligonucleotide
  X-linked inhibitor of apoptosis (XIAP) siRNA
atatgaactcccatcctaatacc

SEQ ID NO: 15704 - DNA, 23 bp, Artificial Sequence
  Description of Artificial Sequence: Synthetic oligonucleotide
  X-linked inhibitor of apoptosis (XIAP) siRNA
tatgaactcccatcctaataccc

SEQ ID NO: 15705 - DNA, 23 bp, Artificial Sequence
  Description of Artificial Sequence: Synthetic oligonucleotide
  X-linked inhibitor of apoptosis (XIAP) siRNA
atgaactcccatcctaataccct

SEQ ID NO: 15706 - DNA, 23 bp, Artificial Sequence
  Description of Artificial Sequence: Synthetic oligonucleotide
  X-linked inhibitor of apoptosis (XIAP) siRNA
tgaactcccatcctaataccctt

SEQ ID NO: 15707 - DNA, 23 bp, Artificial Sequence
  Description of Artificial Sequence: Synthetic oligonucleotide
  X-linked inhibitor of apoptosis (XIAP) siRNA
gaactcccatcctaatacccttt

SEQ ID NO: 15708 - DNA, 23 bp, Artificial Sequence
  Description of Artificial Sequence: Synthetic oligonucleotide
  X-linked inhibitor of apoptosis (XIAP) siRNA
aactcccatcctaataccctttt

SEQ ID NO: 15709 - DNA, 23 bp, Artificial Sequence
  Description of Artificial Sequence: Synthetic oligonucleotide
  X-linked inhibitor of apoptosis (XIAP) siRNA
actcccatcctaataccctttta

SEQ ID NO: 15710 - DNA, 23 bp, Artificial Sequence
  Description of Artificial Sequence: Synthetic oligonucleotide
  X-linked inhibitor of apoptosis (XIAP) siRNA
ctcccatcctaatacccttttac

SEQ ID NO: 15711 - DNA, 23 bp, Artificial Sequence
  Description of Artificial Sequence: Synthetic oligonucleotide
  X-linked inhibitor of apoptosis (XIAP) siRNA
tcccatcctaatacccttttacc

SEQ ID NO: 15712 - DNA, 23 bp, Artificial Sequence
  Description of Artificial Sequence: Synthetic oligonucleotide
  X-linked inhibitor of apoptosis (XIAP) siRNA
cccatcctaatacccttttacct

SEQ ID NO: 15713 - DNA, 23 bp, Artificial Sequence
  Description of Artificial Sequence: Synthetic oligonucleotide
  X-linked inhibitor of apoptosis (XIAP) siRNA
ccatcctaatacccttttacctc

SEQ ID NO: 15714 - DNA, 23 bp, Artificial Sequence
  Description of Artificial Sequence: Synthetic oligonucleotide
  X-linked inhibitor of apoptosis (XIAP) siRNA
catcctaatacccttttacctct

SEQ ID NO: 15715 - DNA, 23 bp, Artificial Sequence
  Description of Artificial Sequence: Synthetic oligonucleotide
  X-linked inhibitor of apoptosis (XIAP) siRNA
atcctaatacccttttacctctc

SEQ ID NO: 15716 - DNA, 23 bp, Artificial Sequence
  Description of Artificial Sequence: Synthetic oligonucleotide
  X-linked inhibitor of apoptosis (XIAP) siRNA
tcctaatacccttttacctctct

SEQ ID NO: 15717 - DNA, 23 bp, Artificial Sequence
  Description of Artificial Sequence: Synthetic oligonucleotide
  X-linked inhibitor of apoptosis (XIAP) siRNA
cctaatacccttttacctctctg

SEQ ID NO: 15718 - DNA, 23 bp, Artificial Sequence
  Description of Artificial Sequence: Synthetic oligonucleotide
  X-linked inhibitor of apoptosis (XIAP) siRNA
ctaatacccttttacctctctgt

SEQ ID NO: 15719 - DNA, 23 bp, Artificial Sequence
  Description of Artificial Sequence: Synthetic oligonucleotide
  X-linked inhibitor of apoptosis (XIAP) siRNA
taatacccttttacctctctgtg

SEQ ID NO: 15720 - DNA, 23 bp, Artificial Sequence
  Description of Artificial Sequence: Synthetic oligonucleotide
  X-linked inhibitor of apoptosis (XIAP) siRNA
aatacccttttacctctctgtgg

SEQ ID NO: 15721 - DNA, 23 bp, Artificial Sequence
  Description of Artificial Sequence: Synthetic oligonucleotide
  X-linked inhibitor of apoptosis (XIAP) siRNA
atacccttttacctctctgtggg

SEQ ID NO: 15722 - DNA, 23 bp, Artificial Sequence
  Description of Artificial Sequence: Synthetic oligonucleotide
  X-linked inhibitor of apoptosis (XIAP) siRNA
tacccttttacctctctgtgggt

SEQ ID NO: 15723 - DNA, 23 bp, Artificial Sequence
  Description of Artificial Sequence: Synthetic oligonucleotide
  X-linked inhibitor of apoptosis (XIAP) siRNA
acccttttacctctctgtgggtt

SEQ ID NO: 15724 - DNA, 23 bp, Artificial Sequence
  Description of Artificial Sequence: Synthetic oligonucleotide
  X-linked inhibitor of apoptosis (XIAP) siRNA
cccttttacctctctgtgggttt

SEQ ID NO: 15725 - DNA, 23 bp, Artificial Sequence
  Description of Artificial Sequence: Synthetic oligonucleotide
  X-linked inhibitor of apoptosis (XIAP) siRNA
ccttttacctctctgtgggtttg

SEQ ID NO: 15726 - DNA, 23 bp, Artificial Sequence
  Description of Artificial Sequence: Synthetic oligonucleotide
  X-linked inhibitor of apoptosis (XIAP) siRNA
cttttacctctctgtgggtttgt

SEQ ID NO: 15727 - DNA, 23 bp, Artificial Sequence
  Description of Artificial Sequence: Synthetic oligonucleotide
  X-linked inhibitor of apoptosis (XIAP) siRNA
ttttacctctctgtgggtttgtc

SEQ ID NO: 15728 - DNA, 23 bp, Artificial Sequence
  Description of Artificial Sequence: Synthetic oligonucleotide
  X-linked inhibitor of apoptosis (XIAP) siRNA
tttacctctctgtgggtttgtct

SEQ ID NO: 15729 - DNA, 23 bp, Artificial Sequence
  Description of Artificial Sequence: Synthetic oligonucleotide
  X-linked inhibitor of apoptosis (XIAP) siRNA
ttacctctctgtgggtttgtctt

SEQ ID NO: 15730 - DNA, 23 bp, Artificial Sequence
  Description of Artificial Sequence: Synthetic oligonucleotide
  X-linked inhibitor of apoptosis (XIAP) siRNA
tacctctctgtgggtttgtcttg

SEQ ID NO: 15731 - DNA, 23 bp, Artificial Sequence
  Description of Artificial Sequence: Synthetic oligonucleotide
  X-linked inhibitor of apoptosis (XIAP) siRNA
acctctctgtgggtttgtcttga

SEQ ID NO: 15732 - DNA, 23 bp, Artificial Sequence
  Description of Artificial Sequence: Synthetic oligonucleotide
  X-linked inhibitor of apoptosis (XIAP) siRNA
cctctctgtgggtttgtcttgac

SEQ ID NO: 15733 - DNA, 23 bp, Artificial Sequence
  Description of Artificial Sequence: Synthetic oligonucleotide
  X-linked inhibitor of apoptosis (XIAP) siRNA
ctctctgtgggtttgtcttgacc

SEQ ID NO: 15734 - DNA, 23 bp, Artificial Sequence
  Description of Artificial Sequence: Synthetic oligonucleotide
  X-linked inhibitor of apoptosis (XIAP) siRNA
tctctgtgggtttgtcttgacct

SEQ ID NO: 15735 - DNA, 23 bp, Artificial Sequence
  Description of Artificial Sequence: Synthetic oligonucleotide
  X-linked inhibitor of apoptosis (XIAP) siRNA
ctctgtgggtttgtcttgacctg

SEQ ID NO: 15736 - DNA, 23 bp, Artificial Sequence
  Description of Artificial Sequence: Synthetic oligonucleotide
  X-linked inhibitor of apoptosis (XIAP) siRNA
tctgtgggtttgtcttgacctgg

SEQ ID NO: 15737 - DNA, 23 bp, Artificial Sequence
  Description of Artificial Sequence: Synthetic oligonucleotide
  X-linked inhibitor of apoptosis (XIAP) siRNA
ctgtgggtttgtcttgacctgga

SEQ ID NO: 15738 - DNA, 23 bp, Artificial Sequence
  Description of Artificial Sequence: Synthetic oligonucleotide
  X-linked inhibitor of apoptosis (XIAP) siRNA
tgtgggtttgtcttgacctggaa

SEQ ID NO: 15739 - DNA, 23 bp, Artificial Sequence
  Description of Artificial Sequence: Synthetic oligonucleotide
  X-linked inhibitor of apoptosis (XIAP) siRNA
gtgggtttgtcttgacctggaaa

SEQ ID NO: 15740 - DNA, 23 bp, Artificial Sequence
  Description of Artificial Sequence: Synthetic oligonucleotide
  X-linked inhibitor of apoptosis (XIAP) siRNA
tgggtttgtcttgacctggaaat

SEQ ID NO: 15741 - DNA, 23 bp, Artificial Sequence
  Description of Artificial Sequence: Synthetic oligonucleotide
  X-linked inhibitor of apoptosis (XIAP) siRNA
gggtttgtcttgacctggaaatt

SEQ ID NO: 15742 - DNA, 23 bp, Artificial Sequence
  Description of Artificial Sequence: Synthetic oligonucleotide
  X-linked inhibitor of apoptosis (XIAP) siRNA
ggtttgtcttgacctggaaattt

SEQ ID NO: 15743 - DNA, 23 bp, Artificial Sequence
  Description of Artificial Sequence: Synthetic oligonucleotide
  X-linked inhibitor of apoptosis (XIAP) siRNA
gtttgtcttgacctggaaatttg

SEQ ID NO: 15744 - DNA, 23 bp, Artificial Sequence
  Description of Artificial Sequence: Synthetic oligonucleotide
  X-linked inhibitor of apoptosis (XIAP) siRNA
tttgtcttgacctggaaatttgg

SEQ ID NO: 15745 - DNA, 23 bp, Artificial Sequence
  Description of Artificial Sequence: Synthetic oligonucleotide
  X-linked inhibitor of apoptosis (XIAP) siRNA
ttgtcttgacctggaaatttggg

SEQ ID NO: 15746 - DNA, 23 bp, Artificial Sequence
  Description of Artificial Sequence: Synthetic oligonucleotide
  X-linked inhibitor of apoptosis (XIAP) siRNA
tgtcttgacctggaaatttgggc

SEQ ID NO: 15747 - DNA, 23 bp, Artificial Sequence
  Description of Artificial Sequence: Synthetic oligonucleotide
  X-linked inhibitor of apoptosis (XIAP) siRNA
gtcttgacctggaaatttgggct

SEQ ID NO: 15748 - DNA, 23 bp, Artificial Sequence
  Description of Artificial Sequence: Synthetic oligonucleotide
  X-linked inhibitor of apoptosis (XIAP) siRNA
tcttgacctggaaatttgggcta

SEQ ID NO: 15749 - DNA, 23 bp, Artificial Sequence
  Description of Artificial Sequence: Synthetic oligonucleotide
  X-linked inhibitor of apoptosis (XIAP) siRNA
cttgacctggaaatttgggctaa

SEQ ID NO: 15750 - DNA, 23 bp, Artificial Sequence
  Description of Artificial Sequence: Synthetic oligonucleotide
  X-linked inhibitor of apoptosis (XIAP) siRNA
ttgacctggaaatttgggctaaa

SEQ ID NO: 15751 - DNA, 23 bp, Artificial Sequence
  Description of Artificial Sequence: Synthetic oligonucleotide
  X-linked inhibitor of apoptosis (XIAP) siRNA
tgacctggaaatttgggctaaaa

SEQ ID NO: 15752 - DNA, 23 bp, Artificial Sequence
  Description of Artificial Sequence: Synthetic oligonucleotide
  X-linked inhibitor of apoptosis (XIAP) siRNA
gacctggaaatttgggctaaaac

SEQ ID NO: 15753 - DNA, 23 bp, Artificial Sequence
  Description of Artificial Sequence: Synthetic oligonucleotide
  X-linked inhibitor of apoptosis (XIAP) siRNA
acctggaaatttgggctaaaact

SEQ ID NO: 15754 - DNA, 23 bp, Artificial Sequence
  Description of Artificial Sequence: Synthetic oligonucleotide
  X-linked inhibitor of apoptosis (XIAP) siRNA
cctggaaatttgggctaaaactt

SEQ ID NO: 15755 - DNA, 23 bp, Artificial Sequence
  Description of Artificial Sequence: Synthetic oligonucleotide
  X-linked inhibitor of apoptosis (XIAP) siRNA
ctggaaatttgggctaaaactta

SEQ ID NO: 15756 - DNA, 23 bp, Artificial Sequence
  Description of Artificial Sequence: Synthetic oligonucleotide
  X-linked inhibitor of apoptosis (XIAP) siRNA
tggaaatttgggctaaaacttag

SEQ ID NO: 15757 - DNA, 23 bp, Artificial Sequence
  Description of Artificial Sequence: Synthetic oligonucleotide
  X-linked inhibitor of apoptosis (XIAP) siRNA
ggaaatttgggctaaaacttaga

SEQ ID NO: 15758 - DNA, 23 bp, Artificial Sequence
  Description of Artificial Sequence: Synthetic oligonucleotide
  X-linked inhibitor of apoptosis (XIAP) siRNA
gaaatttgggctaaaacttagaa

SEQ ID NO: 15759 - DNA, 23 bp, Artificial Sequence
  Description of Artificial Sequence: Synthetic oligonucleotide
  X-linked inhibitor of apoptosis (XIAP) siRNA
aaatttgggctaaaacttagaaa

SEQ ID NO: 15760 - DNA, 23 bp, Artificial Sequence
  Description of Artificial Sequence: Synthetic oligonucleotide
  X-linked inhibitor of apoptosis (XIAP) siRNA
aatttgggctaaaacttagaaaa

SEQ ID NO: 15761 - DNA, 23 bp, Artificial Sequence
  Description of Artificial Sequence: Synthetic oligonucleotide
  X-linked inhibitor of apoptosis (XIAP) siRNA
atttgggctaaaacttagaaaaa

SEQ ID NO: 15762 - DNA, 23 bp, Artificial Sequence
  Description of Artificial Sequence: Synthetic oligonucleotide
  X-linked inhibitor of apoptosis (XIAP) siRNA
tttgggctaaaacttagaaaaaa

SEQ ID NO: 15763 - DNA, 23 bp, Artificial Sequence
  Description of Artificial Sequence: Synthetic oligonucleotide
  X-linked inhibitor of apoptosis (XIAP) siRNA
ttgggctaaaacttagaaaaaat

SEQ ID NO: 15764 - DNA, 23 bp, Artificial Sequence
  Description of Artificial Sequence: Synthetic oligonucleotide
  X-linked inhibitor of apoptosis (XIAP) siRNA
tgggctaaaacttagaaaaaatt

SEQ ID NO: 15765 - DNA, 23 bp, Artificial Sequence
  Description of Artificial Sequence: Synthetic oligonucleotide
  X-linked inhibitor of apoptosis (XIAP) siRNA
gggctaaaacttagaaaaaattc

SEQ ID NO: 15766 - DNA, 23 bp, Artificial Sequence
  Description of Artificial Sequence: Synthetic oligonucleotide
  X-linked inhibitor of apoptosis (XIAP) siRNA
ggctaaaacttagaaaaaattct

SEQ ID NO: 15767 - DNA, 23 bp, Artificial Sequence
  Description of Artificial Sequence: Synthetic oligonucleotide
  X-linked inhibitor of apoptosis (XIAP) siRNA
gctaaaacttagaaaaaattctt

SEQ ID NO: 15768 - DNA, 23 bp, Artificial Sequence
  Description of Artificial Sequence: Synthetic oligonucleotide
  X-linked inhibitor of apoptosis (XIAP) siRNA
ctaaaacttagaaaaaattctta

SEQ ID NO: 15769 - DNA, 23 bp, Artificial Sequence
  Description of Artificial Sequence: Synthetic oligonucleotide
  X-linked inhibitor of apoptosis (XIAP) siRNA
taaaacttagaaaaaattcttac

SEQ ID NO: 15770 - DNA, 23 bp, Artificial Sequence
  Description of Artificial Sequence: Synthetic oligonucleotide
  X-linked inhibitor of apoptosis (XIAP) siRNA
aaaacttagaaaaaattcttaca

SEQ ID NO: 15771 - DNA, 23 bp, Artificial Sequence
  Description of Artificial Sequence: Synthetic oligonucleotide
  X-linked inhibitor of apoptosis (XIAP) siRNA
aaacttagaaaaaattcttacat

SEQ ID NO: 15772 - DNA, 23 bp, Artificial Sequence
  Description of Artificial Sequence: Synthetic oligonucleotide
  X-linked inhibitor of apoptosis (XIAP) siRNA
aacttagaaaaaattcttacatg

SEQ ID NO: 15773 - DNA, 23 bp, Artificial Sequence
  Description of Artificial Sequence: Synthetic oligonucleotide
  X-linked inhibitor of apoptosis (XIAP) siRNA
acttagaaaaaattcttacatga

SEQ ID NO: 15774 - DNA, 23 bp, Artificial Sequence
  Description of Artificial Sequence: Synthetic oligonucleotide
  X-linked inhibitor of apoptosis (XIAP) siRNA
cttagaaaaaattcttacatgat

SEQ ID NO: 15775 - DNA, 23 bp, Artificial Sequence
  Description of Artificial Sequence: Synthetic oligonucleotide
  X-linked inhibitor of apoptosis (XIAP) siRNA
ttagaaaaaattcttacatgata

SEQ ID NO: 15776 - DNA, 23 bp, Artificial Sequence
  Description of Artificial Sequence: Synthetic oligonucleotide
  X-linked inhibitor of apoptosis (XIAP) siRNA
tagaaaaaattcttacatgataa

SEQ ID NO: 15777 - DNA, 23 bp, Artificial Sequence
  Description of Artificial Sequence: Synthetic oligonucleotide
  X-linked inhibitor of apoptosis (XIAP) siRNA
agaaaaaattcttacatgataac

SEQ ID NO: 15778 - DNA, 23 bp, Artificial Sequence
  Description of Artificial Sequence: Synthetic oligonucleotide
  X-linked inhibitor of apoptosis (XIAP) siRNA
gaaaaaattcttacatgataact

SEQ ID NO: 15779 - DNA, 23 bp, Artificial Sequence
  Description of Artificial Sequence: Synthetic oligonucleotide
  X-linked inhibitor of apoptosis (XIAP) siRNA
aaaaaattcttacatgataactc

SEQ ID NO: 15780 - DNA, 23 bp, Artificial Sequence
  Description of Artificial Sequence: Synthetic oligonucleotide
  X-linked inhibitor of apoptosis (XIAP) siRNA
aaaaattcttacatgataactca

SEQ ID NO: 15781 - DNA, 23 bp, Artificial Sequence
  Description of Artificial Sequence: Synthetic oligonucleotide
  X-linked inhibitor of apoptosis (XIAP) siRNA
aaaattcttacatgataactcag

SEQ ID NO: 15782 - DNA, 23 bp, Artificial Sequence
  Description of Artificial Sequence: Synthetic oligonucleotide
  X-linked inhibitor of apoptosis (XIAP) siRNA
aaattcttacatgataactcagt

SEQ ID NO: 15783 - DNA, 23 bp, Artificial Sequence
  Description of Artificial Sequence: Synthetic oligonucleotide
  X-linked inhibitor of apoptosis (XIAP) siRNA
aattcttacatgataactcagtg

SEQ ID NO: 15784 - DNA, 23 bp, Artificial Sequence
  Description of Artificial Sequence: Synthetic oligonucleotide
  X-linked inhibitor of apoptosis (XIAP) siRNA
attcttacatgataactcagtga

SEQ ID NO: 15785 - DNA, 23 bp, Artificial Sequence
  Description of Artificial Sequence: Synthetic oligonucleotide
  X-linked inhibitor of apoptosis (XIAP) siRNA
ttcttacatgataactcagtgat

SEQ ID NO: 15786 - DNA, 23 bp, Artificial Sequence
  Description of Artificial Sequence: Synthetic oligonucleotide
  X-linked inhibitor of apoptosis (XIAP) siRNA
tcttacatgataactcagtgatg

SEQ ID NO: 15787 - DNA, 23 bp, Artificial Sequence
  Description of Artificial Sequence: Synthetic oligonucleotide
  X-linked inhibitor of apoptosis (XIAP) siRNA
cttacatgataactcagtgatgc

SEQ ID NO: 15788 - DNA, 23 bp, Artificial Sequence
  Description of Artificial Sequence: Synthetic oligonucleotide
  X-linked inhibitor of apoptosis (XIAP) siRNA
ttacatgataactcagtgatgct

SEQ ID NO: 15789 - DNA, 23 bp, Artificial Sequence
  Description of Artificial Sequence: Synthetic oligonucleotide
  X-linked inhibitor of apoptosis (XIAP) siRNA
tacatgataactcagtgatgctt

SEQ ID NO: 15790 - DNA, 23 bp, Artificial Sequence
  Description of Artificial Sequence: Synthetic oligonucleotide
  X-linked inhibitor of apoptosis (XIAP) siRNA
acatgataactcagtgatgctta

SEQ ID NO: 15791 - DNA, 23 bp, Artificial Sequence
  Description of Artificial Sequence: Synthetic oligonucleotide
  X-linked inhibitor of apoptosis (XIAP) siRNA
catgataactcagtgatgcttac

SEQ ID NO: 15792 - DNA, 23 bp, Artificial Sequence
  Description of Artificial Sequence: Synthetic oligonucleotide
  X-linked inhibitor of apoptosis (XIAP) siRNA
atgataactcagtgatgcttact

SEQ ID NO: 15793 - DNA, 23 bp, Artificial Sequence
  Description of Artificial Sequence: Synthetic oligonucleotide
  X-linked inhibitor of apoptosis (XIAP) siRNA
tgataactcagtgatgcttactc

SEQ ID NO: 15794 - DNA, 23 bp, Artificial Sequence
  Description of Artificial Sequence: Synthetic oligonucleotide
  X-linked inhibitor of apoptosis (XIAP) siRNA
gataactcagtgatgcttactca

SEQ ID NO: 15795 - DNA, 23 bp, Artificial Sequence
  Description of Artificial Sequence: Synthetic oligonucleotide
  X-linked inhibitor of apoptosis (XIAP) siRNA
ataactcagtgatgcttactcat

SEQ ID NO: 15796 - DNA, 23 bp, Artificial Sequence
  Description of Artificial Sequence: Synthetic oligonucleotide
  X-linked inhibitor of apoptosis (XIAP) siRNA
taactcagtgatgcttactcata

SEQ ID NO: 15797 - DNA, 23 bp, Artificial Sequence
  Description of Artificial Sequence: Synthetic oligonucleotide
  X-linked inhibitor of apoptosis (XIAP) siRNA
aactcagtgatgcttactcatag

SEQ ID NO: 15798 - DNA, 23 bp, Artificial Sequence
  Description of Artificial Sequence: Synthetic oligonucleotide
  X-linked inhibitor of apoptosis (XIAP) siRNA
actcagtgatgcttactcatagt

SEQ ID NO: 15799 - DNA, 23 bp, Artificial Sequence
  Description of Artificial Sequence: Synthetic oligonucleotide
  X-linked inhibitor of apoptosis (XIAP) siRNA
ctcagtgatgcttactcatagtt

SEQ ID NO: 15800 - DNA, 23 bp, Artificial Sequence
  Description of Artificial Sequence: Synthetic oligonucleotide
  X-linked inhibitor of apoptosis (XIAP) siRNA
tcagtgatgcttactcatagttt

SEQ ID NO: 15801 - DNA, 23 bp, Artificial Sequence
  Description of Artificial Sequence: Synthetic oligonucleotide
  X-linked inhibitor of apoptosis (XIAP) siRNA
cagtgatgcttactcatagtttt

SEQ ID NO: 15802 - DNA, 23 bp, Artificial Sequence
  Description of Artificial Sequence: Synthetic oligonucleotide
  X-linked inhibitor of apoptosis (XIAP) siRNA
agtgatgcttactcatagttttt

SEQ ID NO: 15803 - DNA, 23 bp, Artificial Sequence
  Description of Artificial Sequence: Synthetic oligonucleotide
  X-linked inhibitor of apoptosis (XIAP) siRNA
gtgatgcttactcatagtttttg

SEQ ID NO: 15804 - DNA, 23 bp, Artificial Sequence
  Description of Artificial Sequence: Synthetic oligonucleotide
  X-linked inhibitor of apoptosis (XIAP) siRNA
tgatgcttactcatagtttttgg

SEQ ID NO: 15805 - DNA, 23 bp, Artificial Sequence
  Description of Artificial Sequence: Synthetic oligonucleotide
  X-linked inhibitor of apoptosis (XIAP) siRNA
gatgcttactcatagtttttggt

SEQ ID NO: 15806 - DNA, 23 bp, Artificial Sequence
  Description of Artificial Sequence: Synthetic oligonucleotide
  X-linked inhibitor of apoptosis (XIAP) siRNA
atgcttactcatagtttttggtg

SEQ ID NO: 15807 - DNA, 23 bp, Artificial Sequence
  Description of Artificial Sequence: Synthetic oligonucleotide
  X-linked inhibitor of apoptosis (XIAP) siRNA
tgcttactcatagtttttggtgt

SEQ ID NO: 15808 - DNA, 23 bp, Artificial Sequence
  Description of Artificial Sequence: Synthetic oligonucleotide
  X-linked inhibitor of apoptosis (XIAP) siRNA
gcttactcatagtttttggtgtt

SEQ ID NO: 15809 - DNA, 23 bp, Artificial Sequence
  Description of Artificial Sequence: Synthetic oligonucleotide
  X-linked inhibitor of apoptosis (XIAP) siRNA
cttactcatagtttttggtgttt

SEQ ID NO: 15810 - DNA, 23 bp, Artificial Sequence
  Description of Artificial Sequence: Synthetic oligonucleotide
  X-linked inhibitor of apoptosis (XIAP) siRNA
ttactcatagtttttggtgtttc

SEQ ID NO: 15811 - DNA, 23 bp, Artificial Sequence
  Description of Artificial Sequence: Synthetic oligonucleotide
  X-linked inhibitor of apoptosis (XIAP) siRNA
tactcatagtttttggtgtttct

SEQ ID NO: 15812 - DNA, 23 bp, Artificial Sequence
  Description of Artificial Sequence: Synthetic oligonucleotide
  X-linked inhibitor of apoptosis (XIAP) siRNA
actcatagtttttggtgtttctc

SEQ ID NO: 15813 - DNA, 23 bp, Artificial Sequence
  Description of Artificial Sequence: Synthetic oligonucleotide
  X-linked inhibitor of apoptosis (XIAP) siRNA
ctcatagtttttggtgtttctca

SEQ ID NO: 15814 - DNA, 23 bp, Artificial Sequence
  Description of Artificial Sequence: Synthetic oligonucleotide
  X-linked inhibitor of apoptosis (XIAP) siRNA
tcatagtttttggtgtttctcat

SEQ ID NO: 15815 - DNA, 23 bp, Artificial Sequence
  Description of Artificial Sequence: Synthetic oligonucleotide
  X-linked inhibitor of apoptosis (XIAP) siRNA
catagtttttggtgtttctcata

SEQ ID NO: 15816 - DNA, 23 bp, Artificial Sequence
  Description of Artificial Sequence: Synthetic oligonucleotide
  X-linked inhibitor of apoptosis (XIAP) siRNA
atagtttttggtgtttctcatag

SEQ ID NO: 15817 - DNA, 23 bp, Artificial Sequence
  Description of Artificial Sequence: Synthetic oligonucleotide
  X-linked inhibitor of apoptosis (XIAP) siRNA
tagtttttggtgtttctcataga

SEQ ID NO: 15818 - DNA, 23 bp, Artificial Sequence
  Description of Artificial Sequence: Synthetic oligonucleotide
  X-linked inhibitor of apoptosis (XIAP) siRNA
agtttttggtgtttctcatagat

SEQ ID NO: 15819 - DNA, 23 bp, Artificial Sequence
  Description of Artificial Sequence: Synthetic oligonucleotide
  X-linked inhibitor of apoptosis (XIAP) siRNA
gtttttggtgtttctcatagata

SEQ ID NO: 15820 - DNA, 23 bp, Artificial Sequence
  Description of Artificial Sequence: Synthetic oligonucleotide
  X-linked inhibitor of apoptosis (XIAP) siRNA
tttttggtgtttctcatagataa

SEQ ID NO: 15821 - DNA, 23 bp, Artificial Sequence
  Description of Artificial Sequence: Synthetic oligonucleotide
  X-linked inhibitor of apoptosis (XIAP) siRNA
ttttggtgtttctcatagataag

SEQ ID NO: 15822 - DNA, 23 bp, Artificial Sequence
  Description of Artificial Sequence: Synthetic oligonucleotide
  X-linked inhibitor of apoptosis (XIAP) siRNA
tttggtgtttctcatagataaga

SEQ ID NO: 15823 - DNA, 23 bp, Artificial Sequence
  Description of Artificial Sequence: Synthetic oligonucleotide
  X-linked inhibitor of apoptosis (XIAP) siRNA
ttggtgtttctcatagataagat

SEQ ID NO: 15824 - DNA, 23 bp, Artificial Sequence
  Description of Artificial Sequence: Synthetic oligonucleotide
  X-linked inhibitor of apoptosis (XIAP) siRNA
tggtgtttctcatagataagata

SEQ ID NO: 15825 - DNA, 23 bp, Artificial Sequence
  Description of Artificial Sequence: Synthetic oligonucleotide
  X-linked inhibitor of apoptosis (XIAP) siRNA
ggtgtttctcatagataagatat

SEQ ID NO: 15826 - DNA, 23 bp, Artificial Sequence
  Description of Artificial Sequence: Synthetic oligonucleotide
  X-linked inhibitor of apoptosis (XIAP) siRNA
gtgtttctcatagataagatata

SEQ ID NO: 15827 - DNA, 23 bp, Artificial Sequence
  Description of Artificial Sequence: Synthetic oligonucleotide
  X-linked inhibitor of apoptosis (XIAP) siRNA
tgtttctcatagataagatataa

SEQ ID NO: 15828 - DNA, 23 bp, Artificial Sequence
  Description of Artificial Sequence: Synthetic oligonucleotide
  X-linked inhibitor of apoptosis (XIAP) siRNA
gtttctcatagataagatataaa

SEQ ID NO: 15829 - DNA, 23 bp, Artificial Sequence
  Description of Artificial Sequence: Synthetic oligonucleotide
  X-linked inhibitor of apoptosis (XIAP) siRNA
tttctcatagataagatataaat

SEQ ID NO: 15830 - DNA, 23 bp, Artificial Sequence
  Description of Artificial Sequence: Synthetic oligonucleotide
  X-linked inhibitor of apoptosis (XIAP) siRNA
ttctcatagataagatataaatc

SEQ ID NO: 15831 - DNA, 23 bp, Artificial Sequence
  Description of Artificial Sequence: Synthetic oligonucleotide
  X-linked inhibitor of apoptosis (XIAP) siRNA
tctcatagataagatataaatca

SEQ ID NO: 15832 - DNA, 23 bp, Artificial Sequence
  Description of Artificial Sequence: Synthetic oligonucleotide
  X-linked inhibitor of apoptosis (XIAP) siRNA
ctcatagataagatataaatcag

SEQ ID NO: 15833 - DNA, 23 bp, Artificial Sequence
  Description of Artificial Sequence: Synthetic oligonucleotide
  X-linked inhibitor of apoptosis (XIAP) siRNA
tcatagataagatataaatcagc

SEQ ID NO: 15834 - DNA, 23 bp, Artificial Sequence
  Description of Artificial Sequence: Synthetic oligonucleotide
  X-linked inhibitor of apoptosis (XIAP) siRNA
catagataagatataaatcagct

SEQ ID NO: 15835 - DNA, 23 bp, Artificial Sequence
  Description of Artificial Sequence: Synthetic oligonucleotide
  X-linked inhibitor of apoptosis (XIAP) siRNA
atagataagatataaatcagctg

SEQ ID NO: 15836 - DNA, 23 bp, Artificial Sequence
  Description of Artificial Sequence: Synthetic oligonucleotide
  X-linked inhibitor of apoptosis (XIAP) siRNA
tagataagatataaatcagctgg

SEQ ID NO: 15837 - DNA, 23 bp, Artificial Sequence
  Description of Artificial Sequence: Synthetic oligonucleotide
  X-linked inhibitor of apoptosis (XIAP) siRNA
agataagatataaatcagctggg

SEQ ID NO: 15838 - DNA, 23 bp, Artificial Sequence
  Description of Artificial Sequence: Synthetic oligonucleotide
  X-linked inhibitor of apoptosis (XIAP) siRNA
gataagatataaatcagctgggc

SEQ ID NO: 15839 - DNA, 23 bp, Artificial Sequence
  Description of Artificial Sequence: Synthetic oligonucleotide
  X-linked inhibitor of apoptosis (XIAP) siRNA
ataagatataaatcagctgggcg

SEQ ID NO: 15840 - DNA, 23 bp, Artificial Sequence
  Description of Artificial Sequence: Synthetic oligonucleotide
  X-linked inhibitor of apoptosis (XIAP) siRNA
taagatataaatcagctgggcgc

SEQ ID NO: 15841 - DNA, 23 bp, Artificial Sequence
  Description of Artificial Sequence: Synthetic oligonucleotide
  X-linked inhibitor of apoptosis (XIAP) siRNA
aagatataaatcagctgggcgcg

SEQ ID NO: 15842 - DNA, 23 bp, Artificial Sequence
  Description of Artificial Sequence: Synthetic oligonucleotide
  X-linked inhibitor of apoptosis (XIAP) siRNA
agatataaatcagctgggcgcgg

SEQ ID NO: 15843 - DNA, 23 bp, Artificial Sequence
  Description of Artificial Sequence: Synthetic oligonucleotide
  X-linked inhibitor of apoptosis (XIAP) siRNA
gatataaatcagctgggcgcggt

SEQ ID NO: 15844 - DNA, 23 bp, Artificial Sequence
  Description of Artificial Sequence: Synthetic oligonucleotide
  X-linked inhibitor of apoptosis (XIAP) siRNA
atataaatcagctgggcgcggtg

SEQ ID NO: 15845 - DNA, 23 bp, Artificial Sequence
  Description of Artificial Sequence: Synthetic oligonucleotide
  X-linked inhibitor of apoptosis (XIAP) siRNA
tataaatcagctgggcgcggtgg

SEQ ID NO: 15846 - DNA, 23 bp, Artificial Sequence
  Description of Artificial Sequence: Synthetic oligonucleotide
  X-linked inhibitor of apoptosis (XIAP) siRNA
ataaatcagctgggcgcggtggc

SEQ ID NO: 15847 - DNA, 23 bp, Artificial Sequence
  Description of Artificial Sequence: Synthetic oligonucleotide
  X-linked inhibitor of apoptosis (XIAP) siRNA
taaatcagctgggcgcggtggct

SEQ ID NO: 15848 - DNA, 23 bp, Artificial Sequence
  Description of Artificial Sequence: Synthetic oligonucleotide
  X-linked inhibitor of apoptosis (XIAP) siRNA
aaatcagctgggcgcggtggctc

SEQ ID NO: 15849 - DNA, 23 bp, Artificial Sequence
  Description of Artificial Sequence: Synthetic oligonucleotide
  X-linked inhibitor of apoptosis (XIAP) siRNA
aatcagctgggcgcggtggctca

SEQ ID NO: 15850 - DNA, 23 bp, Artificial Sequence
  Description of Artificial Sequence: Synthetic oligonucleotide
  X-linked inhibitor of apoptosis (XIAP) siRNA
atcagctgggcgcggtggctcat

SEQ ID NO: 15851 - DNA, 23 bp, Artificial Sequence
  Description of Artificial Sequence: Synthetic oligonucleotide
  X-linked inhibitor of apoptosis (XIAP) siRNA
tcagctgggcgcggtggctcatg

SEQ ID NO: 15852 - DNA, 23 bp, Artificial Sequence
  Description of Artificial Sequence: Synthetic oligonucleotide
  X-linked inhibitor of apoptosis (XIAP) siRNA
cagctgggcgcggtggctcatgc

SEQ ID NO: 15853 - DNA, 23 bp, Artificial Sequence
  Description of Artificial Sequence: Synthetic oligonucleotide
  X-linked inhibitor of apoptosis (XIAP) siRNA
agctgggcgcggtggctcatgcc

SEQ ID NO: 15854 - DNA, 23 bp, Artificial Sequence
  Description of Artificial Sequence: Synthetic oligonucleotide
  X-linked inhibitor of apoptosis (XIAP) siRNA
gctgggcgcggtggctcatgcct

SEQ ID NO: 15855 - DNA, 23 bp, Artificial Sequence
  Description of Artificial Sequence: Synthetic oligonucleotide
  X-linked inhibitor of apoptosis (XIAP) siRNA
ctgggcgcggtggctcatgcctg

SEQ ID NO: 15856 - DNA, 23 bp, Artificial Sequence
  Description of Artificial Sequence: Synthetic oligonucleotide
  X-linked inhibitor of apoptosis (XIAP) siRNA
tgggcgcggtggctcatgcctgt

SEQ ID NO: 15857 - DNA, 23 bp, Artificial Sequence
  Description of Artificial Sequence: Synthetic oligonucleotide
  X-linked inhibitor of apoptosis (XIAP) siRNA
gggcgcggtggctcatgcctgta

SEQ ID NO: 15858 - DNA, 23 bp, Artificial Sequence
  Description of Artificial Sequence: Synthetic oligonucleotide
  X-linked inhibitor of apoptosis (XIAP) siRNA
ggcgcggtggctcatgcctgtaa

SEQ ID NO: 15859 - DNA, 23 bp, Artificial Sequence
  Description of Artificial Sequence: Synthetic oligonucleotide
  X-linked inhibitor of apoptosis (XIAP) siRNA
gcgcggtggctcatgcctgtaat

SEQ ID NO: 15860 - DNA, 23 bp, Artificial Sequence
  Description of Artificial Sequence: Synthetic oligonucleotide
  X-linked inhibitor of apoptosis (XIAP) siRNA
cgcggtggctcatgcctgtaatc

SEQ ID NO: 15861 - DNA, 23 bp, Artificial Sequence
  Description of Artificial Sequence: Synthetic oligonucleotide
  X-linked inhibitor of apoptosis (XIAP) siRNA
gcggtggctcatgcctgtaatcc

SEQ ID NO: 15862 - DNA, 23 bp, Artificial Sequence
  Description of Artificial Sequence: Synthetic oligonucleotide
  X-linked inhibitor of apoptosis (XIAP) siRNA
cggtggctcatgcctgtaatccc

SEQ ID NO: 15863 - DNA, 23 bp, Artificial Sequence
  Description of Artificial Sequence: Synthetic oligonucleotide
  X-linked inhibitor of apoptosis (XIAP) siRNA
ggtggctcatgcctgtaatccca

SEQ ID NO: 15864 - DNA, 23 bp, Artificial Sequence
  Description of Artificial Sequence: Synthetic oligonucleotide
  X-linked inhibitor of apoptosis (XIAP) siRNA
gtggctcatgcctgtaatcccag

SEQ ID NO: 15865 - DNA, 23 bp, Artificial Sequence
  Description of Artificial Sequence: Synthetic oligonucleotide
  X-linked inhibitor of apoptosis (XIAP) siRNA
tggctcatgcctgtaatcccagc

SEQ ID NO: 15866 - DNA, 23 bp, Artificial Sequence
  Description of Artificial Sequence: Synthetic oligonucleotide
  X-linked inhibitor of apoptosis (XIAP) siRNA
ggctcatgcctgtaatcccagca

SEQ ID NO: 15867 - DNA, 23 bp, Artificial Sequence
  Description of Artificial Sequence: Synthetic oligonucleotide
  X-linked inhibitor of apoptosis (XIAP) siRNA
gctcatgcctgtaatcccagcac

SEQ ID NO: 15868 - DNA, 23 bp, Artificial Sequence
  Description of Artificial Sequence: Synthetic oligonucleotide
  X-linked inhibitor of apoptosis (XIAP) siRNA
ctcatgcctgtaatcccagcact

SEQ ID NO: 15869 - DNA, 23 bp, Artificial Sequence
  Description of Artificial Sequence: Synthetic oligonucleotide
  X-linked inhibitor of apoptosis (XIAP) siRNA
tcatgcctgtaatcccagcactt

SEQ ID NO: 15870 - DNA, 23 bp, Artificial Sequence
  Description of Artificial Sequence: Synthetic oligonucleotide
  X-linked inhibitor of apoptosis (XIAP) siRNA
catgcctgtaatcccagcacttt

SEQ ID NO: 15871 - DNA, 23 bp, Artificial Sequence
  Description of Artificial Sequence: Synthetic oligonucleotide
  X-linked inhibitor of apoptosis (XIAP) siRNA
atgcctgtaatcccagcactttg

SEQ ID NO: 15872 - DNA, 23 bp, Artificial Sequence
  Description of Artificial Sequence: Synthetic oligonucleotide
  X-linked inhibitor of apoptosis (XIAP) siRNA
tgcctgtaatcccagcactttgg

SEQ ID NO: 15873 - DNA, 23 bp, Artificial Sequence
  Description of Artificial Sequence: Synthetic oligonucleotide
  X-linked inhibitor of apoptosis (XIAP) siRNA
gcctgtaatcccagcactttggg

SEQ ID NO: 15874 - DNA, 23 bp, Artificial Sequence
  Description of Artificial Sequence: Synthetic oligonucleotide
  X-linked inhibitor of apoptosis (XIAP) siRNA
cctgtaatcccagcactttggga

SEQ ID NO: 15875 - DNA, 23 bp, Artificial Sequence
  Description of Artificial Sequence: Synthetic oligonucleotide
  X-linked inhibitor of apoptosis (XIAP) siRNA
ctgtaatcccagcactttgggag

SEQ ID NO: 15876 - DNA, 23 bp, Artificial Sequence
  Description of Artificial Sequence: Synthetic oligonucleotide
  X-linked inhibitor of apoptosis (XIAP) siRNA
tgtaatcccagcactttgggagg

SEQ ID NO: 15877 - DNA, 23 bp, Artificial Sequence
  Description of Artificial Sequence: Synthetic oligonucleotide
  X-linked inhibitor of apoptosis (XIAP) siRNA
gtaatcccagcactttgggaggc

SEQ ID NO: 15878 - DNA, 23 bp, Artificial Sequence
  Description of Artificial Sequence: Synthetic oligonucleotide
  X-linked inhibitor of apoptosis (XIAP) siRNA
taatcccagcactttgggaggcc

SEQ ID NO: 15879 - DNA, 23 bp, Artificial Sequence
  Description of Artificial Sequence: Synthetic oligonucleotide
  X-linked inhibitor of apoptosis (XIAP) siRNA
aatcccagcactttgggaggccg

SEQ ID NO: 15880 - DNA, 23 bp, Artificial Sequence
  Description of Artificial Sequence: Synthetic oligonucleotide
  X-linked inhibitor of apoptosis (XIAP) siRNA
atcccagcactttgggaggccga

SEQ ID NO: 15881 - DNA, 23 bp, Artificial Sequence
  Description of Artificial Sequence: Synthetic oligonucleotide
  X-linked inhibitor of apoptosis (XIAP) siRNA
tcccagcactttgggaggccgag

SEQ ID NO: 15882 - DNA, 23 bp, Artificial Sequence
  Description of Artificial Sequence: Synthetic oligonucleotide
  X-linked inhibitor of apoptosis (XIAP) siRNA
cccagcactttgggaggccgagg

SEQ ID NO: 15883 - DNA, 23 bp, Artificial Sequence
  Description of Artificial Sequence: Synthetic oligonucleotide
  X-linked inhibitor of apoptosis (XIAP) siRNA
ccagcactttgggaggccgaggc

SEQ ID NO: 15884 - DNA, 23 bp, Artificial Sequence
  Description of Artificial Sequence: Synthetic oligonucleotide
  X-linked inhibitor of apoptosis (XIAP) siRNA
cagcactttgggaggccgaggcg

SEQ ID NO: 15885 - DNA, 23 bp, Artificial Sequence
  Description of Artificial Sequence: Synthetic oligonucleotide
  X-linked inhibitor of apoptosis (XIAP) siRNA
agcactttgggaggccgaggcgg

SEQ ID NO: 15886 - DNA, 23 bp, Artificial Sequence
  Description of Artificial Sequence: Synthetic oligonucleotide
  X-linked inhibitor of apoptosis (XIAP) siRNA
gcactttgggaggccgaggcggg

SEQ ID NO: 15887 - DNA, 23 bp, Artificial Sequence
  Description of Artificial Sequence: Synthetic oligonucleotide
  X-linked inhibitor of apoptosis (XIAP) siRNA
cactttgggaggccgaggcgggc

SEQ ID NO: 15888 - DNA, 23 bp, Artificial Sequence
  Description of Artificial Sequence: Synthetic oligonucleotide
  X-linked inhibitor of apoptosis (XIAP) siRNA
actttgggaggccgaggcgggca

SEQ ID NO: 15889 - DNA, 23 bp, Artificial Sequence
  Description of Artificial Sequence: Synthetic oligonucleotide
  X-linked inhibitor of apoptosis (XIAP) siRNA
ctttgggaggccgaggcgggcag

SEQ ID NO: 15890 - DNA, 23 bp, Artificial Sequence
  Description of Artificial Sequence: Synthetic oligonucleotide
  X-linked inhibitor of apoptosis (XIAP) siRNA
tttgggaggccgaggcgggcaga

SEQ ID NO: 15891 - DNA, 23 bp, Artificial Sequence
  Description of Artificial Sequence: Synthetic oligonucleotide
  X-linked inhibitor of apoptosis (XIAP) siRNA
ttgggaggccgaggcgggcagat

SEQ ID NO: 15892 - DNA, 23 bp, Artificial Sequence
  Description of Artificial Sequence: Synthetic oligonucleotide
  X-linked inhibitor of apoptosis (XIAP) siRNA
tgggaggccgaggcgggcagatc

SEQ ID NO: 15893 - DNA, 23 bp, Artificial Sequence
  Description of Artificial Sequence: Synthetic oligonucleotide
  X-linked inhibitor of apoptosis (XIAP) siRNA
gggaggccgaggcgggcagatca

SEQ ID NO: 15894 - DNA, 23 bp, Artificial Sequence
  Description of Artificial Sequence: Synthetic oligonucleotide
  X-linked inhibitor of apoptosis (XIAP) siRNA
ggaggccgaggcgggcagatcac

SEQ ID NO: 15895 - DNA, 23 bp, Artificial Sequence
  Description of Artificial Sequence: Synthetic oligonucleotide
  X-linked inhibitor of apoptosis (XIAP) siRNA
gaggccgaggcgggcagatcacc

SEQ ID NO: 15896 - DNA, 23 bp, Artificial Sequence
  Description of Artificial Sequence: Synthetic oligonucleotide
  X-linked inhibitor of apoptosis (XIAP) siRNA
aggccgaggcgggcagatcacct

SEQ ID NO: 15897 - DNA, 23 bp, Artificial Sequence
  Description of Artificial Sequence: Synthetic oligonucleotide
  X-linked inhibitor of apoptosis (XIAP) siRNA
ggccgaggcgggcagatcacctg

SEQ ID NO: 15898 - DNA, 23 bp, Artificial Sequence
  Description of Artificial Sequence: Synthetic oligonucleotide
  X-linked inhibitor of apoptosis (XIAP) siRNA
gccgaggcgggcagatcacctga

SEQ ID NO: 15899 - DNA, 23 bp, Artificial Sequence
  Description of Artificial Sequence: Synthetic oligonucleotide
  X-linked inhibitor of apoptosis (XIAP) siRNA
ccgaggcgggcagatcacctgag

SEQ ID NO: 15900 - DNA, 23 bp, Artificial Sequence
  Description of Artificial Sequence: Synthetic oligonucleotide
  X-linked inhibitor of apoptosis (XIAP) siRNA
cgaggcgggcagatcacctgagg

SEQ ID NO: 15901 - DNA, 23 bp, Artificial Sequence
  Description of Artificial Sequence: Synthetic oligonucleotide
  X-linked inhibitor of apoptosis (XIAP) siRNA
gaggcgggcagatcacctgaggt

SEQ ID NO: 15902 - DNA, 23 bp, Artificial Sequence
  Description of Artificial Sequence: Synthetic oligonucleotide
  X-linked inhibitor of apoptosis (XIAP) siRNA
aggcgggcagatcacctgaggtc

SEQ ID NO: 15903 - DNA, 23 bp, Artificial Sequence
  Description of Artificial Sequence: Synthetic oligonucleotide
  X-linked inhibitor of apoptosis (XIAP) siRNA
ggcgggcagatcacctgaggtcg

SEQ ID NO: 15904 - DNA, 23 bp, Artificial Sequence
  Description of Artificial Sequence: Synthetic oligonucleotide
  X-linked inhibitor of apoptosis (XIAP) siRNA
gcgggcagatcacctgaggtcgg

SEQ ID NO: 15905 - DNA, 23 bp, Artificial Sequence
  Description of Artificial Sequence: Synthetic oligonucleotide
  X-linked inhibitor of apoptosis (XIAP) siRNA
cgggcagatcacctgaggtcggg

SEQ ID NO: 15906 - DNA, 23 bp, Artificial Sequence
  Description of Artificial Sequence: Synthetic oligonucleotide
  X-linked inhibitor of apoptosis (XIAP) siRNA
gggcagatcacctgaggtcggga

SEQ ID NO: 15907 - DNA, 23 bp, Artificial Sequence
  Description of Artificial Sequence: Synthetic oligonucleotide
  X-linked inhibitor of apoptosis (XIAP) siRNA
ggcagatcacctgaggtcgggag

SEQ ID NO: 15908 - DNA, 23 bp, Artificial Sequence
  Description of Artificial Sequence: Synthetic oligonucleotide
  X-linked inhibitor of apoptosis (XIAP) siRNA
gcagatcacctgaggtcgggagg

SEQ ID NO: 15909 - DNA, 23 bp, Artificial Sequence
  Description of Artificial Sequence: Synthetic oligonucleotide
  X-linked inhibitor of apoptosis (XIAP) siRNA
cagatcacctgaggtcgggaggt

SEQ ID NO: 15910 - DNA, 23 bp, Artificial Sequence
  Description of Artificial Sequence: Synthetic oligonucleotide
  X-linked inhibitor of apoptosis (XIAP) siRNA
agatcacctgaggtcgggaggtc

SEQ ID NO: 15911 - DNA, 23 bp, Artificial Sequence
  Description of Artificial Sequence: Synthetic oligonucleotide
  X-linked inhibitor of apoptosis (XIAP) siRNA
gatcacctgaggtcgggaggtcg

SEQ ID NO: 15912 - DNA, 23 bp, Artificial Sequence
  Description of Artificial Sequence: Synthetic oligonucleotide
  X-linked inhibitor of apoptosis (XIAP) siRNA
atcacctgaggtcgggaggtcga

SEQ ID NO: 15913 - DNA, 23 bp, Artificial Sequence
  Description of Artificial Sequence: Synthetic oligonucleotide
  X-linked inhibitor of apoptosis (XIAP) siRNA
tcacctgaggtcgggaggtcgag

SEQ ID NO: 15914 - DNA, 23 bp, Artificial Sequence
  Description of Artificial Sequence: Synthetic oligonucleotide
  X-linked inhibitor of apoptosis (XIAP) siRNA
cacctgaggtcgggaggtcgaga

SEQ ID NO: 15915 - DNA, 23 bp, Artificial Sequence
  Description of Artificial Sequence: Synthetic oligonucleotide
  X-linked inhibitor of apoptosis (XIAP) siRNA
acctgaggtcgggaggtcgagac

SEQ ID NO: 15916 - DNA, 23 bp, Artificial Sequence
  Description of Artificial Sequence: Synthetic oligonucleotide
  X-linked inhibitor of apoptosis (XIAP) siRNA
cctgaggtcgggaggtcgagacc

SEQ ID NO: 15917 - DNA, 23 bp, Artificial Sequence
  Description of Artificial Sequence: Synthetic oligonucleotide
  X-linked inhibitor of apoptosis (XIAP) siRNA
ctgaggtcgggaggtcgagacca

SEQ ID NO: 15918 - DNA, 23 bp, Artificial Sequence
  Description of Artificial Sequence: Synthetic oligonucleotide
  X-linked inhibitor of apoptosis (XIAP) siRNA
tgaggtcgggaggtcgagaccag

SEQ ID NO: 15919 - DNA, 23 bp, Artificial Sequence
  Description of Artificial Sequence: Synthetic oligonucleotide
  X-linked inhibitor of apoptosis (XIAP) siRNA
gaggtcgggaggtcgagaccagc

SEQ ID NO: 15920 - DNA, 23 bp, Artificial Sequence
  Description of Artificial Sequence: Synthetic oligonucleotide
  X-linked inhibitor of apoptosis (XIAP) siRNA
aggtcgggaggtcgagaccagcc

SEQ ID NO: 15921 - DNA, 23 bp, Artificial Sequence
  Description of Artificial Sequence: Synthetic oligonucleotide
  X-linked inhibitor of apoptosis (XIAP) siRNA
ggtcgggaggtcgagaccagcct

SEQ ID NO: 15922 - DNA, 23 bp, Artificial Sequence
  Description of Artificial Sequence: Synthetic oligonucleotide
  X-linked inhibitor of apoptosis (XIAP) siRNA
gtcgggaggtcgagaccagcctg

SEQ ID NO: 15923 - DNA, 23 bp, Artificial Sequence
  Description of Artificial Sequence: Synthetic oligonucleotide
  X-linked inhibitor of apoptosis (XIAP) siRNA
tcgggaggtcgagaccagcctga

SEQ ID NO: 15924 - DNA, 23 bp, Artificial Sequence
  Description of Artificial Sequence: Synthetic oligonucleotide
  X-linked inhibitor of apoptosis (XIAP) siRNA
cgggaggtcgagaccagcctgac

SEQ ID NO: 15925 - DNA, 23 bp, Artificial Sequence
  Description of Artificial Sequence: Synthetic oligonucleotide
  X-linked inhibitor of apoptosis (XIAP) siRNA
gggaggtcgagaccagcctgacc

SEQ ID NO: 15926 - DNA, 23 bp, Artificial Sequence
  Description of Artificial Sequence: Synthetic oligonucleotide
  X-linked inhibitor of apoptosis (XIAP) siRNA
ggaggtcgagaccagcctgacca

SEQ ID NO: 15927 - DNA, 23 bp, Artificial Sequence
  Description of Artificial Sequence: Synthetic oligonucleotide
  X-linked inhibitor of apoptosis (XIAP) siRNA
gaggtcgagaccagcctgaccaa

SEQ ID NO: 15928 - DNA, 23 bp, Artificial Sequence
  Description of Artificial Sequence: Synthetic oligonucleotide
  X-linked inhibitor of apoptosis (XIAP) siRNA
aggtcgagaccagcctgaccaac

SEQ ID NO: 15929 - DNA, 23 bp, Artificial Sequence
  Description of Artificial Sequence: Synthetic oligonucleotide
  X-linked inhibitor of apoptosis (XIAP) siRNA
ggtcgagaccagcctgaccaaca

SEQ ID NO: 15930 - DNA, 23 bp, Artificial Sequence
  Description of Artificial Sequence: Synthetic oligonucleotide
  X-linked inhibitor of apoptosis (XIAP) siRNA
gtcgagaccagcctgaccaacat

SEQ ID NO: 15931 - DNA, 23 bp, Artificial Sequence
  Description of Artificial Sequence: Synthetic oligonucleotide
  X-linked inhibitor of apoptosis (XIAP) siRNA
tcgagaccagcctgaccaacatg

SEQ ID NO: 15932 - DNA, 23 bp, Artificial Sequence
  Description of Artificial Sequence: Synthetic oligonucleotide
  X-linked inhibitor of apoptosis (XIAP) siRNA
cgagaccagcctgaccaacatgg

SEQ ID NO: 15933 - DNA, 23 bp, Artificial Sequence
  Description of Artificial Sequence: Synthetic oligonucleotide
  X-linked inhibitor of apoptosis (XIAP) siRNA
gagaccagcctgaccaacatgga

SEQ ID NO: 15934 - DNA, 23 bp, Artificial Sequence
  Description of Artificial Sequence: Synthetic oligonucleotide
  X-linked inhibitor of apoptosis (XIAP) siRNA
agaccagcctgaccaacatggag

SEQ ID NO: 15935 - DNA, 23 bp, Artificial Sequence
  Description of Artificial Sequence: Synthetic oligonucleotide
  X-linked inhibitor of apoptosis (XIAP) siRNA
gaccagcctgaccaacatggaga

SEQ ID NO: 15936 - DNA, 23 bp, Artificial Sequence
  Description of Artificial Sequence: Synthetic oligonucleotide
  X-linked inhibitor of apoptosis (XIAP) siRNA
accagcctgaccaacatggagaa

SEQ ID NO: 15937 - DNA, 23 bp, Artificial Sequence
  Description of Artificial Sequence: Synthetic oligonucleotide
  X-linked inhibitor of apoptosis (XIAP) siRNA
ccagcctgaccaacatggagaaa

SEQ ID NO: 15938 - DNA, 23 bp, Artificial Sequence
  Description of Artificial Sequence: Synthetic oligonucleotide
  X-linked inhibitor of apoptosis (XIAP) siRNA
cagcctgaccaacatggagaaac

SEQ ID NO: 15939 - DNA, 23 bp, Artificial Sequence
  Description of Artificial Sequence: Synthetic oligonucleotide
  X-linked inhibitor of apoptosis (XIAP) siRNA
agcctgaccaacatggagaaacc

SEQ ID NO: 15940 - DNA, 23 bp, Artificial Sequence
  Description of Artificial Sequence: Synthetic oligonucleotide
  X-linked inhibitor of apoptosis (XIAP) siRNA
gcctgaccaacatggagaaaccc

SEQ ID NO: 15941 - DNA, 23 bp, Artificial Sequence
  Description of Artificial Sequence: Synthetic oligonucleotide
  X-linked inhibitor of apoptosis (XIAP) siRNA
cctgaccaacatggagaaacccc

SEQ ID NO: 15942 - DNA, 23 bp, Artificial Sequence
  Description of Artificial Sequence: Synthetic oligonucleotide
  X-linked inhibitor of apoptosis (XIAP) siRNA
ctgaccaacatggagaaaccccg

SEQ ID NO: 15943 - DNA, 23 bp, Artificial Sequence
  Description of Artificial Sequence: Synthetic oligonucleotide
  X-linked inhibitor of apoptosis (XIAP) siRNA
tgaccaacatggagaaaccccgt

SEQ ID NO: 15944 - DNA, 23 bp, Artificial Sequence
  Description of Artificial Sequence: Synthetic oligonucleotide
  X-linked inhibitor of apoptosis (XIAP) siRNA
gaccaacatggagaaaccccgtc

SEQ ID NO: 15945 - DNA, 23 bp, Artificial Sequence
  Description of Artificial Sequence: Synthetic oligonucleotide
  X-linked inhibitor of apoptosis (XIAP) siRNA
accaacatggagaaaccccgtct

SEQ ID NO: 15946 - DNA, 23 bp, Artificial Sequence
  Description of Artificial Sequence: Synthetic oligonucleotide
  X-linked inhibitor of apoptosis (XIAP) siRNA
ccaacatggagaaaccccgtctc

SEQ ID NO: 15947 - DNA, 23 bp, Artificial Sequence
  Description of Artificial Sequence: Synthetic oligonucleotide
  X-linked inhibitor of apoptosis (XIAP) siRNA
caacatggagaaaccccgtctct

SEQ ID NO: 15948 - DNA, 23 bp, Artificial Sequence
  Description of Artificial Sequence: Synthetic oligonucleotide
  X-linked inhibitor of apoptosis (XIAP) siRNA
aacatggagaaaccccgtctcta

SEQ ID NO: 15949 - DNA, 23 bp, Artificial Sequence
  Description of Artificial Sequence: Synthetic oligonucleotide
  X-linked inhibitor of apoptosis (XIAP) siRNA
acatggagaaaccccgtctctac

SEQ ID NO: 15950 - DNA, 23 bp, Artificial Sequence
  Description of Artificial Sequence: Synthetic oligonucleotide
  X-linked inhibitor of apoptosis (XIAP) siRNA
catggagaaaccccgtctctact

SEQ ID NO: 15951 - DNA, 23 bp, Artificial Sequence
  Description of Artificial Sequence: Synthetic oligonucleotide
  X-linked inhibitor of apoptosis (XIAP) siRNA
atggagaaaccccgtctctacta

SEQ ID NO: 15952 - DNA, 23 bp, Artificial Sequence
  Description of Artificial Sequence: Synthetic oligonucleotide
  X-linked inhibitor of apoptosis (XIAP) siRNA
tggagaaaccccgtctctactaa

SEQ ID NO: 15953 - DNA, 23 bp, Artificial Sequence
  Description of Artificial Sequence: Synthetic oligonucleotide
  X-linked inhibitor of apoptosis (XIAP) siRNA
ggagaaaccccgtctctactaaa

SEQ ID NO: 15954 - DNA, 23 bp, Artificial Sequence
  Description of Artificial Sequence: Synthetic oligonucleotide
  X-linked inhibitor of apoptosis (XIAP) siRNA
gagaaaccccgtctctactaaaa

SEQ ID NO: 15955 - DNA, 23 bp, Artificial Sequence
  Description of Artificial Sequence: Synthetic oligonucleotide
  X-linked inhibitor of apoptosis (XIAP) siRNA
agaaaccccgtctctactaaaaa

SEQ ID NO: 15956 - DNA, 23 bp, Artificial Sequence
  Description of Artificial Sequence: Synthetic oligonucleotide
  X-linked inhibitor of apoptosis (XIAP) siRNA
gaaaccccgtctctactaaaaat

SEQ ID NO: 15957 - DNA, 23 bp, Artificial Sequence
  Description of Artificial Sequence: Synthetic oligonucleotide
  X-linked inhibitor of apoptosis (XIAP) siRNA
aaaccccgtctctactaaaaata

SEQ ID NO: 15958 - DNA, 23 bp, Artificial Sequence
  Description of Artificial Sequence: Synthetic oligonucleotide
  X-linked inhibitor of apoptosis (XIAP) siRNA
aaccccgtctctactaaaaatac

SEQ ID NO: 15959 - DNA, 23 bp, Artificial Sequence
  Description of Artificial Sequence: Synthetic oligonucleotide
  X-linked inhibitor of apoptosis (XIAP) siRNA
accccgtctctactaaaaataca

SEQ ID NO: 15960 - DNA, 23 bp, Artificial Sequence
  Description of Artificial Sequence: Synthetic oligonucleotide
  X-linked inhibitor of apoptosis (XIAP) siRNA
ccccgtctctactaaaaatacaa

SEQ ID NO: 15961 - DNA, 23 bp, Artificial Sequence
  Description of Artificial Sequence: Synthetic oligonucleotide
  X-linked inhibitor of apoptosis (XIAP) siRNA
cccgtctctactaaaaatacaaa

SEQ ID NO: 15962 - DNA, 23 bp, Artificial Sequence
  Description of Artificial Sequence: Synthetic oligonucleotide
  X-linked inhibitor of apoptosis (XIAP) siRNA
ccgtctctactaaaaatacaaaa

SEQ ID NO: 15963 - DNA, 23 bp, Artificial Sequence
  Description of Artificial Sequence: Synthetic oligonucleotide
  X-linked inhibitor of apoptosis (XIAP) siRNA
cgtctctactaaaaatacaaaat

SEQ ID NO: 15964 - DNA, 23 bp, Artificial Sequence
  Description of Artificial Sequence: Synthetic oligonucleotide
  X-linked inhibitor of apoptosis (XIAP) siRNA
gtctctactaaaaatacaaaatt

SEQ ID NO: 15965 - DNA, 23 bp, Artificial Sequence
  Description of Artificial Sequence: Synthetic oligonucleotide
  X-linked inhibitor of apoptosis (XIAP) siRNA
tctctactaaaaatacaaaatta

SEQ ID NO: 15966 - DNA, 23 bp, Artificial Sequence
  Description of Artificial Sequence: Synthetic oligonucleotide
  X-linked inhibitor of apoptosis (XIAP) siRNA
ctctactaaaaatacaaaattag

SEQ ID NO: 15967 - DNA, 23 bp, Artificial Sequence
  Description of Artificial Sequence: Synthetic oligonucleotide
  X-linked inhibitor of apoptosis (XIAP) siRNA
tctactaaaaatacaaaattagc

SEQ ID NO: 15968 - DNA, 23 bp, Artificial Sequence
  Description of Artificial Sequence: Synthetic oligonucleotide
  X-linked inhibitor of apoptosis (XIAP) siRNA
ctactaaaaatacaaaattagct

SEQ ID NO: 15969 - DNA, 23 bp, Artificial Sequence
  Description of Artificial Sequence: Synthetic oligonucleotide
  X-linked inhibitor of apoptosis (XIAP) siRNA
tactaaaaatacaaaattagctg

SEQ ID NO: 15970 - DNA, 23 bp, Artificial Sequence
  Description of Artificial Sequence: Synthetic oligonucleotide
  X-linked inhibitor of apoptosis (XIAP) siRNA
actaaaaatacaaaattagctgg

SEQ ID NO: 15971 - DNA, 23 bp, Artificial Sequence
  Description of Artificial Sequence: Synthetic oligonucleotide
  X-linked inhibitor of apoptosis (XIAP) siRNA
ctaaaaatacaaaattagctggg

SEQ ID NO: 15972 - DNA, 23 bp, Artificial Sequence
  Description of Artificial Sequence: Synthetic oligonucleotide
  X-linked inhibitor of apoptosis (XIAP) siRNA
taaaaatacaaaattagctgggc

SEQ ID NO: 15973 - DNA, 23 bp, Artificial Sequence
  Description of Artificial Sequence: Synthetic oligonucleotide
  X-linked inhibitor of apoptosis (XIAP) siRNA
aaaaatacaaaattagctgggcg

SEQ ID NO: 15974 - DNA, 23 bp, Artificial Sequence
  Description of Artificial Sequence: Synthetic oligonucleotide
  X-linked inhibitor of apoptosis (XIAP) siRNA
aaaatacaaaattagctgggcgt

SEQ ID NO: 15975 - DNA, 23 bp, Artificial Sequence
  Description of Artificial Sequence: Synthetic oligonucleotide
  X-linked inhibitor of apoptosis (XIAP) siRNA
aaatacaaaattagctgggcgtg

SEQ ID NO: 15976 - DNA, 23 bp, Artificial Sequence
  Description of Artificial Sequence: Synthetic oligonucleotide
  X-linked inhibitor of apoptosis (XIAP) siRNA
aatacaaaattagctgggcgtgg

SEQ ID NO: 15977 - DNA, 23 bp, Artificial Sequence
  Description of Artificial Sequence: Synthetic oligonucleotide
  X-linked inhibitor of apoptosis (XIAP) siRNA
atacaaaattagctgggcgtggt

SEQ ID NO: 15978 - DNA, 23 bp, Artificial Sequence
  Description of Artificial Sequence: Synthetic oligonucleotide
  X-linked inhibitor of apoptosis (XIAP) siRNA
tacaaaattagctgggcgtggtg

SEQ ID NO: 15979 - DNA, 23 bp, Artificial Sequence
  Description of Artificial Sequence: Synthetic oligonucleotide
  X-linked inhibitor of apoptosis (XIAP) siRNA
acaaaattagctgggcgtggtgg

SEQ ID NO: 15980 - DNA, 23 bp, Artificial Sequence
  Description of Artificial Sequence: Synthetic oligonucleotide
  X-linked inhibitor of apoptosis (XIAP) siRNA
caaaattagctgggcgtggtggc

SEQ ID NO: 15981 - DNA, 23 bp, Artificial Sequence
  Description of Artificial Sequence: Synthetic oligonucleotide
  X-linked inhibitor of apoptosis (XIAP) siRNA
aaaattagctgggcgtggtggct

SEQ ID NO: 15982 - DNA, 23 bp, Artificial Sequence
  Description of Artificial Sequence: Synthetic oligonucleotide
  X-linked inhibitor of apoptosis (XIAP) siRNA
aaattagctgggcgtggtggctc

SEQ ID NO: 15983 - DNA, 23 bp, Artificial Sequence
  Description of Artificial Sequence: Synthetic oligonucleotide
  X-linked inhibitor of apoptosis (XIAP) siRNA
aattagctgggcgtggtggctca

SEQ ID NO: 15984 - DNA, 23 bp, Artificial Sequence
  Description of Artificial Sequence: Synthetic oligonucleotide
  X-linked inhibitor of apoptosis (XIAP) siRNA
attagctgggcgtggtggctcat

SEQ ID NO: 15985 - DNA, 23 bp, Artificial Sequence
  Description of Artificial Sequence: Synthetic oligonucleotide
  X-linked inhibitor of apoptosis (XIAP) siRNA
ttagctgggcgtggtggctcatg

SEQ ID NO: 15986 - DNA, 23 bp, Artificial Sequence
  Description of Artificial Sequence: Synthetic oligonucleotide
  X-linked inhibitor of apoptosis (XIAP) siRNA
tagctgggcgtggtggctcatgc

SEQ ID NO: 15987 - DNA, 23 bp, Artificial Sequence
  Description of Artificial Sequence: Synthetic oligonucleotide
  X-linked inhibitor of apoptosis (XIAP) siRNA
agctgggcgtggtggctcatgcc

SEQ ID NO: 15988 - DNA, 23 bp, Artificial Sequence
  Description of Artificial Sequence: Synthetic oligonucleotide
  X-linked inhibitor of apoptosis (XIAP) siRNA
gctgggcgtggtggctcatgcct

SEQ ID NO: 15989 - DNA, 23 bp, Artificial Sequence
  Description of Artificial Sequence: Synthetic oligonucleotide
  X-linked inhibitor of apoptosis (XIAP) siRNA
ctgggcgtggtggctcatgcctg

SEQ ID NO: 15990 - DNA, 23 bp, Artificial Sequence
  Description of Artificial Sequence: Synthetic oligonucleotide
  X-linked inhibitor of apoptosis (XIAP) siRNA
tgggcgtggtggctcatgcctgt

SEQ ID NO: 15991 - DNA, 23 bp, Artificial Sequence
  Description of Artificial Sequence: Synthetic oligonucleotide
  X-linked inhibitor of apoptosis (XIAP) siRNA
gggcgtggtggctcatgcctgta

SEQ ID NO: 15992 - DNA, 23 bp, Artificial Sequence
  Description of Artificial Sequence: Synthetic oligonucleotide
  X-linked inhibitor of apoptosis (XIAP) siRNA
ggcgtggtggctcatgcctgtaa

SEQ ID NO: 15993 - DNA, 23 bp, Artificial Sequence
  Description of Artificial Sequence: Synthetic oligonucleotide
  X-linked inhibitor of apoptosis (XIAP) siRNA
gcgtggtggctcatgcctgtaat

SEQ ID NO: 15994 - DNA, 23 bp, Artificial Sequence
  Description of Artificial Sequence: Synthetic oligonucleotide
  X-linked inhibitor of apoptosis (XIAP) siRNA
cgtggtggctcatgcctgtaatc

SEQ ID NO: 15995 - DNA, 23 bp, Artificial Sequence
  Description of Artificial Sequence: Synthetic oligonucleotide
  X-linked inhibitor of apoptosis (XIAP) siRNA
gtggtggctcatgcctgtaatcc

SEQ ID NO: 15996 - DNA, 23 bp, Artificial Sequence
  Description of Artificial Sequence: Synthetic oligonucleotide
  X-linked inhibitor of apoptosis (XIAP) siRNA
tggtggctcatgcctgtaatccc

SEQ ID NO: 15997 - DNA, 23 bp, Artificial Sequence
  Description of Artificial Sequence: Synthetic oligonucleotide
  X-linked inhibitor of apoptosis (XIAP) siRNA
ggtggctcatgcctgtaatccca

SEQ ID NO: 15998 - DNA, 23 bp, Artificial Sequence
  Description of Artificial Sequence: Synthetic oligonucleotide
  X-linked inhibitor of apoptosis (XIAP) siRNA
gtggctcatgcctgtaatcccag

SEQ ID NO: 15999 - DNA, 23 bp, Artificial Sequence
  Description of Artificial Sequence: Synthetic oligonucleotide
  X-linked inhibitor of apoptosis (XIAP) siRNA
tggctcatgcctgtaatcccagc

SEQ ID NO: 16000 - DNA, 23 bp, Artificial Sequence
  Description of Artificial Sequence: Synthetic oligonucleotide
  X-linked inhibitor of apoptosis (XIAP) siRNA
ggctcatgcctgtaatcccagct

SEQ ID NO: 16001 - DNA, 23 bp, Artificial Sequence
  Description of Artificial Sequence: Synthetic oligonucleotide
  X-linked inhibitor of apoptosis (XIAP) siRNA
gctcatgcctgtaatcccagcta

SEQ ID NO: 16002 - DNA, 23 bp, Artificial Sequence
  Description of Artificial Sequence: Synthetic oligonucleotide
  X-linked inhibitor of apoptosis (XIAP) siRNA
ctcatgcctgtaatcccagctac

SEQ ID NO: 16003 - DNA, 23 bp, Artificial Sequence
  Description of Artificial Sequence: Synthetic oligonucleotide
  X-linked inhibitor of apoptosis (XIAP) siRNA
tcatgcctgtaatcccagctact

SEQ ID NO: 16004 - DNA, 23 bp, Artificial Sequence
  Description of Artificial Sequence: Synthetic oligonucleotide
  X-linked inhibitor of apoptosis (XIAP) siRNA
catgcctgtaatcccagctactt

SEQ ID NO: 16005 - DNA, 23 bp, Artificial Sequence
  Description of Artificial Sequence: Synthetic oligonucleotide
  X-linked inhibitor of apoptosis (XIAP) siRNA
atgcctgtaatcccagctacttg

SEQ ID NO: 16006 - DNA, 23 bp, Artificial Sequence
  Description of Artificial Sequence: Synthetic oligonucleotide
  X-linked inhibitor of apoptosis (XIAP) siRNA
tgcctgtaatcccagctacttgg

SEQ ID NO: 16007 - DNA, 23 bp, Artificial Sequence
  Description of Artificial Sequence: Synthetic oligonucleotide
  X-linked inhibitor of apoptosis (XIAP) siRNA
gcctgtaatcccagctacttggg

SEQ ID NO: 16008 - DNA, 23 bp, Artificial Sequence
  Description of Artificial Sequence: Synthetic oligonucleotide
  X-linked inhibitor of apoptosis (XIAP) siRNA
cctgtaatcccagctacttggga

SEQ ID NO: 16009 - DNA, 23 bp, Artificial Sequence
  Description of Artificial Sequence: Synthetic oligonucleotide
  X-linked inhibitor of apoptosis (XIAP) siRNA
ctgtaatcccagctacttgggag

SEQ ID NO: 16010 - DNA, 23 bp, Artificial Sequence
  Description of Artificial Sequence: Synthetic oligonucleotide
  X-linked inhibitor of apoptosis (XIAP) siRNA
tgtaatcccagctacttgggagg

SEQ ID NO: 16011 - DNA, 23 bp, Artificial Sequence
  Description of Artificial Sequence: Synthetic oligonucleotide
  X-linked inhibitor of apoptosis (XIAP) siRNA
gtaatcccagctacttgggaggc

SEQ ID NO: 16012 - DNA, 23 bp, Artificial Sequence
  Description of Artificial Sequence: Synthetic oligonucleotide
  X-linked inhibitor of apoptosis (XIAP) siRNA
taatcccagctacttgggaggct

SEQ ID NO: 16013 - DNA, 23 bp, Artificial Sequence
  Description of Artificial Sequence: Synthetic oligonucleotide
  X-linked inhibitor of apoptosis (XIAP) siRNA
aatcccagctacttgggaggctg

SEQ ID NO: 16014 - DNA, 23 bp, Artificial Sequence
  Description of Artificial Sequence: Synthetic oligonucleotide
  X-linked inhibitor of apoptosis (XIAP) siRNA
atcccagctacttgggaggctga

SEQ ID NO: 16015 - DNA, 23 bp, Artificial Sequence
  Description of Artificial Sequence: Synthetic oligonucleotide
  X-linked inhibitor of apoptosis (XIAP) siRNA
tcccagctacttgggaggctgag

SEQ ID NO: 16016 - DNA, 23 bp, Artificial Sequence
  Description of Artificial Sequence: Synthetic oligonucleotide
  X-linked inhibitor of apoptosis (XIAP) siRNA
cccagctacttgggaggctgagg

SEQ ID NO: 16017 - DNA, 23 bp, Artificial Sequence
  Description of Artificial Sequence: Synthetic oligonucleotide
  X-linked inhibitor of apoptosis (XIAP) siRNA
ccagctacttgggaggctgaggc

SEQ ID NO: 16018 - DNA, 23 bp, Artificial Sequence
  Description of Artificial Sequence: Synthetic oligonucleotide
  X-linked inhibitor of apoptosis (XIAP) siRNA
cagctacttgggaggctgaggca

SEQ ID NO: 16019 - DNA, 23 bp, Artificial Sequence
  Description of Artificial Sequence: Synthetic oligonucleotide
  X-linked inhibitor of apoptosis (XIAP) siRNA
agctacttgggaggctgaggcag

SEQ ID NO: 16020 - DNA, 23 bp, Artificial Sequence
  Description of Artificial Sequence: Synthetic oligonucleotide
  X-linked inhibitor of apoptosis (XIAP) siRNA
gctacttgggaggctgaggcagg

SEQ ID NO: 16021 - DNA, 23 bp, Artificial Sequence
  Description of Artificial Sequence: Synthetic oligonucleotide
  X-linked inhibitor of apoptosis (XIAP) siRNA
ctacttgggaggctgaggcagga

SEQ ID NO: 16022 - DNA, 23 bp, Artificial Sequence
  Description of Artificial Sequence: Synthetic oligonucleotide
  X-linked inhibitor of apoptosis (XIAP) siRNA
tacttgggaggctgaggcaggag

SEQ ID NO: 16023 - DNA, 23 bp, Artificial Sequence
  Description of Artificial Sequence: Synthetic oligonucleotide
  X-linked inhibitor of apoptosis (XIAP) siRNA
acttgggaggctgaggcaggaga

SEQ ID NO: 16024 - DNA, 23 bp, Artificial Sequence
  Description of Artificial Sequence: Synthetic oligonucleotide
  X-linked inhibitor of apoptosis (XIAP) siRNA
cttgggaggctgaggcaggagaa

SEQ ID NO: 16025 - DNA, 23 bp, Artificial Sequence
  Description of Artificial Sequence: Synthetic oligonucleotide
  X-linked inhibitor of apoptosis (XIAP) siRNA
ttgggaggctgaggcaggagaat

SEQ ID NO: 16026 - DNA, 23 bp, Artificial Sequence
  Description of Artificial Sequence: Synthetic oligonucleotide
  X-linked inhibitor of apoptosis (XIAP) siRNA
tgggaggctgaggcaggagaatc

SEQ ID NO: 16027 - DNA, 23 bp, Artificial Sequence
  Description of Artificial Sequence: Synthetic oligonucleotide
  X-linked inhibitor of apoptosis (XIAP) siRNA
gggaggctgaggcaggagaatcg

SEQ ID NO: 16028 - DNA, 23 bp, Artificial Sequence
  Description of Artificial Sequence: Synthetic oligonucleotide
  X-linked inhibitor of apoptosis (XIAP) siRNA
ggaggctgaggcaggagaatcgc

SEQ ID NO: 16029 - DNA, 23 bp, Artificial Sequence
  Description of Artificial Sequence: Synthetic oligonucleotide
  X-linked inhibitor of apoptosis (XIAP) siRNA
gaggctgaggcaggagaatcgct

SEQ ID NO: 16030 - DNA, 23 bp, Artificial Sequence
  Description of Artificial Sequence: Synthetic oligonucleotide
  X-linked inhibitor of apoptosis (XIAP) siRNA
aggctgaggcaggagaatcgctt

SEQ ID NO: 16031 - DNA, 23 bp, Artificial Sequence
  Description of Artificial Sequence: Synthetic oligonucleotide
  X-linked inhibitor of apoptosis (XIAP) siRNA
ggctgaggcaggagaatcgcttg

SEQ ID NO: 16032 - DNA, 23 bp, Artificial Sequence
  Description of Artificial Sequence: Synthetic oligonucleotide
  X-linked inhibitor of apoptosis (XIAP) siRNA
gctgaggcaggagaatcgcttga

SEQ ID NO: 16033 - DNA, 23 bp, Artificial Sequence
  Description of Artificial Sequence: Synthetic oligonucleotide
  X-linked inhibitor of apoptosis (XIAP) siRNA
ctgaggcaggagaatcgcttgaa

SEQ ID NO: 16034 - DNA, 23 bp, Artificial Sequence
  Description of Artificial Sequence: Synthetic oligonucleotide
  X-linked inhibitor of apoptosis (XIAP) siRNA
tgaggcaggagaatcgcttgaac

SEQ ID NO: 16035 - DNA, 23 bp, Artificial Sequence
  Description of Artificial Sequence: Synthetic oligonucleotide
  X-linked inhibitor of apoptosis (XIAP) siRNA
gaggcaggagaatcgcttgaacc

SEQ ID NO: 16036 - DNA, 23 bp, Artificial Sequence
  Description of Artificial Sequence: Synthetic oligonucleotide
  X-linked inhibitor of apoptosis (XIAP) siRNA
aggcaggagaatcgcttgaaccc

SEQ ID NO: 16037 - DNA, 23 bp, Artificial Sequence
  Description of Artificial Sequence: Synthetic oligonucleotide
  X-linked inhibitor of apoptosis (XIAP) siRNA
ggcaggagaatcgcttgaaccca

SEQ ID NO: 16038 - DNA, 23 bp, Artificial Sequence
  Description of Artificial Sequence: Synthetic oligonucleotide
  X-linked inhibitor of apoptosis (XIAP) siRNA
gcaggagaatcgcttgaacccag

SEQ ID NO: 16039 - DNA, 23 bp, Artificial Sequence
  Description of Artificial Sequence: Synthetic oligonucleotide
  X-linked inhibitor of apoptosis (XIAP) siRNA
caggagaatcgcttgaacccagg

SEQ ID NO: 16040 - DNA, 23 bp, Artificial Sequence
  Description of Artificial Sequence: Synthetic oligonucleotide
  X-linked inhibitor of apoptosis (XIAP) siRNA
aggagaatcgcttgaacccagga

SEQ ID NO: 16041 - DNA, 23 bp, Artificial Sequence
  Description of Artificial Sequence: Synthetic oligonucleotide
  X-linked inhibitor of apoptosis (XIAP) siRNA
ggagaatcgcttgaacccaggag

SEQ ID NO: 16042 - DNA, 23 bp, Artificial Sequence
  Description of Artificial Sequence: Synthetic oligonucleotide
  X-linked inhibitor of apoptosis (XIAP) siRNA
gagaatcgcttgaacccaggagg

SEQ ID NO: 16043 - DNA, 23 bp, Artificial Sequence
  Description of Artificial Sequence: Synthetic oligonucleotide
  X-linked inhibitor of apoptosis (XIAP) siRNA
agaatcgcttgaacccaggaggc

SEQ ID NO: 16044 - DNA, 23 bp, Artificial Sequence
  Description of Artificial Sequence: Synthetic oligonucleotide
  X-linked inhibitor of apoptosis (XIAP) siRNA
gaatcgcttgaacccaggaggcg

SEQ ID NO: 16045 - DNA, 23 bp, Artificial Sequence
  Description of Artificial Sequence: Synthetic oligonucleotide
  X-linked inhibitor of apoptosis (XIAP) siRNA
aatcgcttgaacccaggaggcgg

SEQ ID NO: 16046 - DNA, 23 bp, Artificial Sequence
  Description of Artificial Sequence: Synthetic oligonucleotide
  X-linked inhibitor of apoptosis (XIAP) siRNA
atcgcttgaacccaggaggcgga

SEQ ID NO: 16047 - DNA, 23 bp, Artificial Sequence
  Description of Artificial Sequence: Synthetic oligonucleotide
  X-linked inhibitor of apoptosis (XIAP) siRNA
tcgcttgaacccaggaggcggag

SEQ ID NO: 16048 - DNA, 23 bp, Artificial Sequence
  Description of Artificial Sequence: Synthetic oligonucleotide
  X-linked inhibitor of apoptosis (XIAP) siRNA
cgcttgaacccaggaggcggagg

SEQ ID NO: 16049 - DNA, 23 bp, Artificial Sequence
  Description of Artificial Sequence: Synthetic oligonucleotide
  X-linked inhibitor of apoptosis (XIAP) siRNA
gcttgaacccaggaggcggaggt

SEQ ID NO: 16050 - DNA, 23 bp, Artificial Sequence
  Description of Artificial Sequence: Synthetic oligonucleotide
  X-linked inhibitor of apoptosis (XIAP) siRNA
cttgaacccaggaggcggaggtt

SEQ ID NO: 16051 - DNA, 23 bp, Artificial Sequence
  Description of Artificial Sequence: Synthetic oligonucleotide
  X-linked inhibitor of apoptosis (XIAP) siRNA
ttgaacccaggaggcggaggttg

SEQ ID NO: 16052 - DNA, 23 bp, Artificial Sequence
  Description of Artificial Sequence: Synthetic oligonucleotide
  X-linked inhibitor of apoptosis (XIAP) siRNA
tgaacccaggaggcggaggttgt

SEQ ID NO: 16053 - DNA, 23 bp, Artificial Sequence
  Description of Artificial Sequence: Synthetic oligonucleotide
  X-linked inhibitor of apoptosis (XIAP) siRNA
gaacccaggaggcggaggttgtg

SEQ ID NO: 16054 - DNA, 23 bp, Artificial Sequence
  Description of Artificial Sequence: Synthetic oligonucleotide
  X-linked inhibitor of apoptosis (XIAP) siRNA
aacccaggaggcggaggttgtgg

SEQ ID NO: 16055 - DNA, 23 bp, Artificial Sequence
  Description of Artificial Sequence: Synthetic oligonucleotide
  X-linked inhibitor of apoptosis (XIAP) siRNA
acccaggaggcggaggttgtggt

SEQ ID NO: 16056 - DNA, 23 bp, Artificial Sequence
  Description of Artificial Sequence: Synthetic oligonucleotide
  X-linked inhibitor of apoptosis (XIAP) siRNA
cccaggaggcggaggttgtggtg

SEQ ID NO: 16057 - DNA, 23 bp, Artificial Sequence
  Description of Artificial Sequence: Synthetic oligonucleotide
  X-linked inhibitor of apoptosis (XIAP) siRNA
ccaggaggcggaggttgtggtga

SEQ ID NO: 16058 - DNA, 23 bp, Artificial Sequence
  Description of Artificial Sequence: Synthetic oligonucleotide
  X-linked inhibitor of apoptosis (XIAP) siRNA
caggaggcggaggttgtggtgag

SEQ ID NO: 16059 - DNA, 23 bp, Artificial Sequence
  Description of Artificial Sequence: Synthetic oligonucleotide
  X-linked inhibitor of apoptosis (XIAP) siRNA
aggaggcggaggttgtggtgagc

SEQ ID NO: 16060 - DNA, 23 bp, Artificial Sequence
  Description of Artificial Sequence: Synthetic oligonucleotide
  X-linked inhibitor of apoptosis (XIAP) siRNA
ggaggcggaggttgtggtgagcg

SEQ ID NO: 16061 - DNA, 23 bp, Artificial Sequence
  Description of Artificial Sequence: Synthetic oligonucleotide
  X-linked inhibitor of apoptosis (XIAP) siRNA
gaggcggaggttgtggtgagcga

SEQ ID NO: 16062 - DNA, 23 bp, Artificial Sequence
  Description of Artificial Sequence: Synthetic oligonucleotide
  X-linked inhibitor of apoptosis (XIAP) siRNA
aggcggaggttgtggtgagcgaa

SEQ ID NO: 16063 - DNA, 23 bp, Artificial Sequence
  Description of Artificial Sequence: Synthetic oligonucleotide
  X-linked inhibitor of apoptosis (XIAP) siRNA
ggcggaggttgtggtgagcgaag

SEQ ID NO: 16064 - DNA, 23 bp, Artificial Sequence
  Description of Artificial Sequence: Synthetic oligonucleotide
  X-linked inhibitor of apoptosis (XIAP) siRNA
gcggaggttgtggtgagcgaaga

SEQ ID NO: 16065 - DNA, 23 bp, Artificial Sequence
  Description of Artificial Sequence: Synthetic oligonucleotide
  X-linked inhibitor of apoptosis (XIAP) siRNA
cggaggttgtggtgagcgaagat

SEQ ID NO: 16066 - DNA, 23 bp, Artificial Sequence
  Description of Artificial Sequence: Synthetic oligonucleotide
  X-linked inhibitor of apoptosis (XIAP) siRNA
ggaggttgtggtgagcgaagatc

SEQ ID NO: 16067 - DNA, 23 bp, Artificial Sequence
  Description of Artificial Sequence: Synthetic oligonucleotide
  X-linked inhibitor of apoptosis (XIAP) siRNA
gaggttgtggtgagcgaagatcg

SEQ ID NO: 16068 - DNA, 23 bp, Artificial Sequence
  Description of Artificial Sequence: Synthetic oligonucleotide
  X-linked inhibitor of apoptosis (XIAP) siRNA
aggttgtggtgagcgaagatcgt

SEQ ID NO: 16069 - DNA, 23 bp, Artificial Sequence
  Description of Artificial Sequence: Synthetic oligonucleotide
  X-linked inhibitor of apoptosis (XIAP) siRNA
ggttgtggtgagcgaagatcgtg

SEQ ID NO: 16070 - DNA, 23 bp, Artificial Sequence
  Description of Artificial Sequence: Synthetic oligonucleotide
  X-linked inhibitor of apoptosis (XIAP) siRNA
gttgtggtgagcgaagatcgtgc

SEQ ID NO: 16071 - DNA, 23 bp, Artificial Sequence
  Description of Artificial Sequence: Synthetic oligonucleotide
  X-linked inhibitor of apoptosis (XIAP) siRNA
ttgtggtgagcgaagatcgtgcc

SEQ ID NO: 16072 - DNA, 23 bp, Artificial Sequence
  Description of Artificial Sequence: Synthetic oligonucleotide
  X-linked inhibitor of apoptosis (XIAP) siRNA
tgtggtgagcgaagatcgtgcca

SEQ ID NO: 16073 - DNA, 23 bp, Artificial Sequence
  Description of Artificial Sequence: Synthetic oligonucleotide
  X-linked inhibitor of apoptosis (XIAP) siRNA
gtggtgagcgaagatcgtgccat

SEQ ID NO: 16074 - DNA, 23 bp, Artificial Sequence
  Description of Artificial Sequence: Synthetic oligonucleotide
  X-linked inhibitor of apoptosis (XIAP) siRNA
tggtgagcgaagatcgtgccatt

SEQ ID NO: 16075 - DNA, 23 bp, Artificial Sequence
  Description of Artificial Sequence: Synthetic oligonucleotide
  X-linked inhibitor of apoptosis (XIAP) siRNA
ggtgagcgaagatcgtgccattg

SEQ ID NO: 16076 - DNA, 23 bp, Artificial Sequence
  Description of Artificial Sequence: Synthetic oligonucleotide
  X-linked inhibitor of apoptosis (XIAP) siRNA
gtgagcgaagatcgtgccattgc

SEQ ID NO: 16077 - DNA, 23 bp, Artificial Sequence
  Description of Artificial Sequence: Synthetic oligonucleotide
  X-linked inhibitor of apoptosis (XIAP) siRNA
tgagcgaagatcgtgccattgca

SEQ ID NO: 16078 - DNA, 23 bp, Artificial Sequence
  Description of Artificial Sequence: Synthetic oligonucleotide
  X-linked inhibitor of apoptosis (XIAP) siRNA
gagcgaagatcgtgccattgcac

SEQ ID NO: 16079 - DNA, 23 bp, Artificial Sequence
  Description of Artificial Sequence: Synthetic oligonucleotide
  X-linked inhibitor of apoptosis (XIAP) siRNA
agcgaagatcgtgccattgcact

SEQ ID NO: 16080 - DNA, 23 bp, Artificial Sequence
  Description of Artificial Sequence: Synthetic oligonucleotide
  X-linked inhibitor of apoptosis (XIAP) siRNA
gcgaagatcgtgccattgcactc

SEQ ID NO: 16081 - DNA, 23 bp, Artificial Sequence
  Description of Artificial Sequence: Synthetic oligonucleotide
  X-linked inhibitor of apoptosis (XIAP) siRNA
cgaagatcgtgccattgcactcc

SEQ ID NO: 16082 - DNA, 23 bp, Artificial Sequence
  Description of Artificial Sequence: Synthetic oligonucleotide
  X-linked inhibitor of apoptosis (XIAP) siRNA
gaagatcgtgccattgcactcca

SEQ ID NO: 16083 - DNA, 23 bp, Artificial Sequence
  Description of Artificial Sequence: Synthetic oligonucleotide
  X-linked inhibitor of apoptosis (XIAP) siRNA
aagatcgtgccattgcactccag

SEQ ID NO: 16084 - DNA, 23 bp, Artificial Sequence
  Description of Artificial Sequence: Synthetic oligonucleotide
  X-linked inhibitor of apoptosis (XIAP) siRNA
agatcgtgccattgcactccagc

SEQ ID NO: 16085 - DNA, 23 bp, Artificial Sequence
  Description of Artificial Sequence: Synthetic oligonucleotide
  X-linked inhibitor of apoptosis (XIAP) siRNA
gatcgtgccattgcactccagcc

SEQ ID NO: 16086 - DNA, 23 bp, Artificial Sequence
  Description of Artificial Sequence: Synthetic oligonucleotide
  X-linked inhibitor of apoptosis (XIAP) siRNA
atcgtgccattgcactccagcct

SEQ ID NO: 16087 - DNA, 23 bp, Artificial Sequence
  Description of Artificial Sequence: Synthetic oligonucleotide
  X-linked inhibitor of apoptosis (XIAP) siRNA
tcgtgccattgcactccagcctg

SEQ ID NO: 16088 - DNA, 23 bp, Artificial Sequence
  Description of Artificial Sequence: Synthetic oligonucleotide
  X-linked inhibitor of apoptosis (XIAP) siRNA
cgtgccattgcactccagcctgg

SEQ ID NO: 16089 - DNA, 23 bp, Artificial Sequence
  Description of Artificial Sequence: Synthetic oligonucleotide
  X-linked inhibitor of apoptosis (XIAP) siRNA
gtgccattgcactccagcctggg

SEQ ID NO: 16090 - DNA, 23 bp, Artificial Sequence
  Description of Artificial Sequence: Synthetic oligonucleotide
  X-linked inhibitor of apoptosis (XIAP) siRNA
tgccattgcactccagcctgggc

SEQ ID NO: 16091 - DNA, 23 bp, Artificial Sequence
  Description of Artificial Sequence: Synthetic oligonucleotide
  X-linked inhibitor of apoptosis (XIAP) siRNA
gccattgcactccagcctgggca

SEQ ID NO: 16092 - DNA, 23 bp, Artificial Sequence
  Description of Artificial Sequence: Synthetic oligonucleotide
  X-linked inhibitor of apoptosis (XIAP) siRNA
ccattgcactccagcctgggcaa

SEQ ID NO: 16093 - DNA, 23 bp, Artificial Sequence
  Description of Artificial Sequence: Synthetic oligonucleotide
  X-linked inhibitor of apoptosis (XIAP) siRNA
cattgcactccagcctgggcaac

SEQ ID NO: 16094 - DNA, 23 bp, Artificial Sequence
  Description of Artificial Sequence: Synthetic oligonucleotide
  X-linked inhibitor of apoptosis (XIAP) siRNA
attgcactccagcctgggcaaca

SEQ ID NO: 16095 - DNA, 23 bp, Artificial Sequence
  Description of Artificial Sequence: Synthetic oligonucleotide
  X-linked inhibitor of apoptosis (XIAP) siRNA
ttgcactccagcctgggcaacaa

SEQ ID NO: 16096 - DNA, 23 bp, Artificial Sequence
  Description of Artificial Sequence: Synthetic oligonucleotide
  X-linked inhibitor of apoptosis (XIAP) siRNA
tgcactccagcctgggcaacaag

SEQ ID NO: 16097 - DNA, 23 bp, Artificial Sequence
  Description of Artificial Sequence: Synthetic oligonucleotide
  X-linked inhibitor of apoptosis (XIAP) siRNA
gcactccagcctgggcaacaaga

SEQ ID NO: 16098 - DNA, 23 bp, Artificial Sequence
  Description of Artificial Sequence: Synthetic oligonucleotide
  X-linked inhibitor of apoptosis (XIAP) siRNA
cactccagcctgggcaacaagag

SEQ ID NO: 16099 - DNA, 23 bp, Artificial Sequence
  Description of Artificial Sequence: Synthetic oligonucleotide
  X-linked inhibitor of apoptosis (XIAP) siRNA
actccagcctgggcaacaagagc

SEQ ID NO: 16100 - DNA, 23 bp, Artificial Sequence
  Description of Artificial Sequence: Synthetic oligonucleotide
  X-linked inhibitor of apoptosis (XIAP) siRNA
ctccagcctgggcaacaagagca

SEQ ID NO: 16101 - DNA, 23 bp, Artificial Sequence
  Description of Artificial Sequence: Synthetic oligonucleotide
  X-linked inhibitor of apoptosis (XIAP) siRNA
tccagcctgggcaacaagagcaa

SEQ ID NO: 16102 - DNA, 23 bp, Artificial Sequence
  Description of Artificial Sequence: Synthetic oligonucleotide
  X-linked inhibitor of apoptosis (XIAP) siRNA
ccagcctgggcaacaagagcaaa

SEQ ID NO: 16103 - DNA, 23 bp, Artificial Sequence
  Description of Artificial Sequence: Synthetic oligonucleotide
  X-linked inhibitor of apoptosis (XIAP) siRNA
cagcctgggcaacaagagcaaaa

SEQ ID NO: 16104 - DNA, 23 bp, Artificial Sequence
  Description of Artificial Sequence: Synthetic oligonucleotide
  X-linked inhibitor of apoptosis (XIAP) siRNA
agcctgggcaacaagagcaaaac

SEQ ID NO: 16105 - DNA, 23 bp, Artificial Sequence
  Description of Artificial Sequence: Synthetic oligonucleotide
  X-linked inhibitor of apoptosis (XIAP) siRNA
gcctgggcaacaagagcaaaact

SEQ ID NO: 16106 - DNA, 23 bp, Artificial Sequence
  Description of Artificial Sequence: Synthetic oligonucleotide
  X-linked inhibitor of apoptosis (XIAP) siRNA
cctgggcaacaagagcaaaactc

SEQ ID NO: 16107 - DNA, 23 bp, Artificial Sequence
  Description of Artificial Sequence: Synthetic oligonucleotide
  X-linked inhibitor of apoptosis (XIAP) siRNA
ctgggcaacaagagcaaaactct

SEQ ID NO: 16108 - DNA, 23 bp, Artificial Sequence
  Description of Artificial Sequence: Synthetic oligonucleotide
  X-linked inhibitor of apoptosis (XIAP) siRNA
tgggcaacaagagcaaaactctg

SEQ ID NO: 16109 - DNA, 23 bp, Artificial Sequence
  Description of Artificial Sequence: Synthetic oligonucleotide
  X-linked inhibitor of apoptosis (XIAP) siRNA
gggcaacaagagcaaaactctgt

SEQ ID NO: 16110 - DNA, 23 bp, Artificial Sequence
  Description of Artificial Sequence: Synthetic oligonucleotide
  X-linked inhibitor of apoptosis (XIAP) siRNA
ggcaacaagagcaaaactctgtc

SEQ ID NO: 16111 - DNA, 23 bp, Artificial Sequence
  Description of Artificial Sequence: Synthetic oligonucleotide
  X-linked inhibitor of apoptosis (XIAP) siRNA
gcaacaagagcaaaactctgtct

SEQ ID NO: 16112 - DNA, 23 bp, Artificial Sequence
  Description of Artificial Sequence: Synthetic oligonucleotide
  X-linked inhibitor of apoptosis (XIAP) siRNA
caacaagagcaaaactctgtctc

SEQ ID NO: 16113 - DNA, 23 bp, Artificial Sequence
  Description of Artificial Sequence: Synthetic oligonucleotide
  X-linked inhibitor of apoptosis (XIAP) siRNA
aacaagagcaaaactctgtctca

SEQ ID NO: 16114 - DNA, 23 bp, Artificial Sequence
  Description of Artificial Sequence: Synthetic oligonucleotide
  X-linked inhibitor of apoptosis (XIAP) siRNA
acaagagcaaaactctgtctcaa

SEQ ID NO: 16115 - DNA, 23 bp, Artificial Sequence
  Description of Artificial Sequence: Synthetic oligonucleotide
  X-linked inhibitor of apoptosis (XIAP) siRNA
caagagcaaaactctgtctcaaa

SEQ ID NO: 16116 - DNA, 23 bp, Artificial Sequence
  Description of Artificial Sequence: Synthetic oligonucleotide
  X-linked inhibitor of apoptosis (XIAP) siRNA
aagagcaaaactctgtctcaaaa

SEQ ID NO: 16117 - DNA, 23 bp, Artificial Sequence
  Description of Artificial Sequence: Synthetic oligonucleotide
  X-linked inhibitor of apoptosis (XIAP) siRNA
agagcaaaactctgtctcaaaaa

SEQ ID NO: 16118 - DNA, 23 bp, Artificial Sequence
  Description of Artificial Sequence: Synthetic oligonucleotide
  X-linked inhibitor of apoptosis (XIAP) siRNA
gagcaaaactctgtctcaaaaaa

SEQ ID NO: 16119 - DNA, 23 bp, Artificial Sequence
  Description of Artificial Sequence: Synthetic oligonucleotide
  X-linked inhibitor of apoptosis (XIAP) siRNA
agcaaaactctgtctcaaaaaaa

SEQ ID NO: 16120 - DNA, 23 bp, Artificial Sequence
  Description of Artificial Sequence: Synthetic oligonucleotide
  X-linked inhibitor of apoptosis (XIAP) siRNA
gcaaaactctgtctcaaaaaaaa

SEQ ID NO: 16121 - DNA, 23 bp, Artificial Sequence
  Description of Artificial Sequence: Synthetic oligonucleotide
  X-linked inhibitor of apoptosis (XIAP) siRNA
aaaaaaaagatataaatcacaat

SEQ ID NO: 16122 - DNA, 23 bp, Artificial Sequence
  Description of Artificial Sequence: Synthetic oligonucleotide
  X-linked inhibitor of apoptosis (XIAP) siRNA
aaaaaaagatataaatcacaata

SEQ ID NO: 16123 - DNA, 23 bp, Artificial Sequence
  Description of Artificial Sequence: Synthetic oligonucleotide
  X-linked inhibitor of apoptosis (XIAP) siRNA
aaaaaagatataaatcacaataa

SEQ ID NO: 16124 - DNA, 23 bp, Artificial Sequence
  Description of Artificial Sequence: Synthetic oligonucleotide
  X-linked inhibitor of apoptosis (XIAP) siRNA
aaaaagatataaatcacaataaa

SEQ ID NO: 16125 - DNA, 23 bp, Artificial Sequence
  Description of Artificial Sequence: Synthetic oligonucleotide
  X-linked inhibitor of apoptosis (XIAP) siRNA
aaaagatataaatcacaataaat

SEQ ID NO: 16126 - DNA, 23 bp, Artificial Sequence
  Description of Artificial Sequence: Synthetic oligonucleotide
  X-linked inhibitor of apoptosis (XIAP) siRNA
aaagatataaatcacaataaata

SEQ ID NO: 16127 - DNA, 23 bp, Artificial Sequence
  Description of Artificial Sequence: Synthetic oligonucleotide
  X-linked inhibitor of apoptosis (XIAP) siRNA
aagatataaatcacaataaataa

SEQ ID NO: 16128 - DNA, 23 bp, Artificial Sequence
  Description of Artificial Sequence: Synthetic oligonucleotide
  X-linked inhibitor of apoptosis (XIAP) siRNA
agatataaatcacaataaataaa

SEQ ID NO: 16129 - DNA, 23 bp, Artificial Sequence
  Description of Artificial Sequence: Synthetic oligonucleotide
  X-linked inhibitor of apoptosis (XIAP) siRNA
gatataaatcacaataaataaat

SEQ ID NO: 16130 - DNA, 23 bp, Artificial Sequence
  Description of Artificial Sequence: Synthetic oligonucleotide
  X-linked inhibitor of apoptosis (XIAP) siRNA
atataaatcacaataaataaata

SEQ ID NO: 16131 - DNA, 23 bp, Artificial Sequence
  Description of Artificial Sequence: Synthetic oligonucleotide
  X-linked inhibitor of apoptosis (XIAP) siRNA
tataaatcacaataaataaatag

SEQ ID NO: 16132 - DNA, 23 bp, Artificial Sequence
  Description of Artificial Sequence: Synthetic oligonucleotide
  X-linked inhibitor of apoptosis (XIAP) siRNA
ataaatcacaataaataaatagg

SEQ ID NO: 16133 - DNA, 23 bp, Artificial Sequence
  Description of Artificial Sequence: Synthetic oligonucleotide
  X-linked inhibitor of apoptosis (XIAP) siRNA
taaatcacaataaataaataggt

SEQ ID NO: 16134 - DNA, 23 bp, Artificial Sequence
  Description of Artificial Sequence: Synthetic oligonucleotide
  X-linked inhibitor of apoptosis (XIAP) siRNA
aaatcacaataaataaataggtc

SEQ ID NO: 16135 - DNA, 23 bp, Artificial Sequence
  Description of Artificial Sequence: Synthetic oligonucleotide
  X-linked inhibitor of apoptosis (XIAP) siRNA
aatcacaataaataaataggtca

SEQ ID NO: 16136 - DNA, 23 bp, Artificial Sequence
  Description of Artificial Sequence: Synthetic oligonucleotide
  X-linked inhibitor of apoptosis (XIAP) siRNA
atcacaataaataaataggtcaa

SEQ ID NO: 16137 - DNA, 23 bp, Artificial Sequence
  Description of Artificial Sequence: Synthetic oligonucleotide
  X-linked inhibitor of apoptosis (XIAP) siRNA
tcacaataaataaataggtcaat

SEQ ID NO: 16138 - DNA, 23 bp, Artificial Sequence
  Description of Artificial Sequence: Synthetic oligonucleotide
  X-linked inhibitor of apoptosis (XIAP) siRNA
cacaataaataaataggtcaata

SEQ ID NO: 16139 - DNA, 23 bp, Artificial Sequence
  Description of Artificial Sequence: Synthetic oligonucleotide
  X-linked inhibitor of apoptosis (XIAP) siRNA
acaataaataaataggtcaatac

SEQ ID NO: 16140 - DNA, 23 bp, Artificial Sequence
  Description of Artificial Sequence: Synthetic oligonucleotide
  X-linked inhibitor of apoptosis (XIAP) siRNA
caataaataaataggtcaataca

SEQ ID NO: 16141 - DNA, 23 bp, Artificial Sequence
  Description of Artificial Sequence: Synthetic oligonucleotide
  X-linked inhibitor of apoptosis (XIAP) siRNA
aataaataaataggtcaatacaa

SEQ ID NO: 16142 - DNA, 23 bp, Artificial Sequence
  Description of Artificial Sequence: Synthetic oligonucleotide
  X-linked inhibitor of apoptosis (XIAP) siRNA
ataaataaataggtcaatacaaa

SEQ ID NO: 16143 - DNA, 23 bp, Artificial Sequence
  Description of Artificial Sequence: Synthetic oligonucleotide
  X-linked inhibitor of apoptosis (XIAP) siRNA
taaataaataggtcaatacaaat

SEQ ID NO: 16144 - DNA, 23 bp, Artificial Sequence
  Description of Artificial Sequence: Synthetic oligonucleotide
  X-linked inhibitor of apoptosis (XIAP) siRNA
aaataaataggtcaatacaaatg

SEQ ID NO: 16145 - DNA, 23 bp, Artificial Sequence
  Description of Artificial Sequence: Synthetic oligonucleotide
  X-linked inhibitor of apoptosis (XIAP) siRNA
aataaataggtcaatacaaatgt

SEQ ID NO: 16146 - DNA, 23 bp, Artificial Sequence
  Description of Artificial Sequence: Synthetic oligonucleotide
  X-linked inhibitor of apoptosis (XIAP) siRNA
ataaataggtcaatacaaatgtt

SEQ ID NO: 16147 - DNA, 23 bp, Artificial Sequence
  Description of Artificial Sequence: Synthetic oligonucleotide
  X-linked inhibitor of apoptosis (XIAP) siRNA
taaataggtcaatacaaatgtta

SEQ ID NO: 16148 - DNA, 23 bp, Artificial Sequence
  Description of Artificial Sequence: Synthetic oligonucleotide
  X-linked inhibitor of apoptosis (XIAP) siRNA
aaataggtcaatacaaatgttag

SEQ ID NO: 16149 - DNA, 23 bp, Artificial Sequence
  Description of Artificial Sequence: Synthetic oligonucleotide
  X-linked inhibitor of apoptosis (XIAP) siRNA
aataggtcaatacaaatgttagc

SEQ ID NO: 16150 - DNA, 23 bp, Artificial Sequence
  Description of Artificial Sequence: Synthetic oligonucleotide
  X-linked inhibitor of apoptosis (XIAP) siRNA
ataggtcaatacaaatgttagcc

SEQ ID NO: 16151 - DNA, 23 bp, Artificial Sequence
  Description of Artificial Sequence: Synthetic oligonucleotide
  X-linked inhibitor of apoptosis (XIAP) siRNA
taggtcaatacaaatgttagcca

SEQ ID NO: 16152 - DNA, 23 bp, Artificial Sequence
  Description of Artificial Sequence: Synthetic oligonucleotide
  X-linked inhibitor of apoptosis (XIAP) siRNA
aggtcaatacaaatgttagccag

SEQ ID NO: 16153 - DNA, 23 bp, Artificial Sequence
  Description of Artificial Sequence: Synthetic oligonucleotide
  X-linked inhibitor of apoptosis (XIAP) siRNA
ggtcaatacaaatgttagccagg

SEQ ID NO: 16154 - DNA, 23 bp, Artificial Sequence
  Description of Artificial Sequence: Synthetic oligonucleotide
  X-linked inhibitor of apoptosis (XIAP) siRNA
gtcaatacaaatgttagccaggc

SEQ ID NO: 16155 - DNA, 23 bp, Artificial Sequence
  Description of Artificial Sequence: Synthetic oligonucleotide
  X-linked inhibitor of apoptosis (XIAP) siRNA
tcaatacaaatgttagccaggcg

SEQ ID NO: 16156 - DNA, 23 bp, Artificial Sequence
  Description of Artificial Sequence: Synthetic oligonucleotide
  X-linked inhibitor of apoptosis (XIAP) siRNA
caatacaaatgttagccaggcgt

SEQ ID NO: 16157 - DNA, 23 bp, Artificial Sequence
  Description of Artificial Sequence: Synthetic oligonucleotide
  X-linked inhibitor of apoptosis (XIAP) siRNA
aatacaaatgttagccaggcgtg

SEQ ID NO: 16158 - DNA, 23 bp, Artificial Sequence
  Description of Artificial Sequence: Synthetic oligonucleotide
  X-linked inhibitor of apoptosis (XIAP) siRNA
atacaaatgttagccaggcgtgg

SEQ ID NO: 16159 - DNA, 23 bp, Artificial Sequence
  Description of Artificial Sequence: Synthetic oligonucleotide
  X-linked inhibitor of apoptosis (XIAP) siRNA
tacaaatgttagccaggcgtggt

SEQ ID NO: 16160 - DNA, 23 bp, Artificial Sequence
  Description of Artificial Sequence: Synthetic oligonucleotide
  X-linked inhibitor of apoptosis (XIAP) siRNA
acaaatgttagccaggcgtggtg

SEQ ID NO: 16161 - DNA, 23 bp, Artificial Sequence
  Description of Artificial Sequence: Synthetic oligonucleotide
  X-linked inhibitor of apoptosis (XIAP) siRNA
caaatgttagccaggcgtggtgg

SEQ ID NO: 16162 - DNA, 23 bp, Artificial Sequence
  Description of Artificial Sequence: Synthetic oligonucleotide
  X-linked inhibitor of apoptosis (XIAP) siRNA
aaatgttagccaggcgtggtggc

SEQ ID NO: 16163 - DNA, 23 bp, Artificial Sequence
  Description of Artificial Sequence: Synthetic oligonucleotide
  X-linked inhibitor of apoptosis (XIAP) siRNA
aatgttagccaggcgtggtggca

SEQ ID NO: 16164 - DNA, 23 bp, Artificial Sequence
  Description of Artificial Sequence: Synthetic oligonucleotide
  X-linked inhibitor of apoptosis (XIAP) siRNA
atgttagccaggcgtggtggcac

SEQ ID NO: 16165 - DNA, 23 bp, Artificial Sequence
  Description of Artificial Sequence: Synthetic oligonucleotide
  X-linked inhibitor of apoptosis (XIAP) siRNA
tgttagccaggcgtggtggcaca

SEQ ID NO: 16166 - DNA, 23 bp, Artificial Sequence
  Description of Artificial Sequence: Synthetic oligonucleotide
  X-linked inhibitor of apoptosis (XIAP) siRNA
gttagccaggcgtggtggcacat

SEQ ID NO: 16167 - DNA, 23 bp, Artificial Sequence
  Description of Artificial Sequence: Synthetic oligonucleotide
  X-linked inhibitor of apoptosis (XIAP) siRNA
ttagccaggcgtggtggcacatg

SEQ ID NO: 16168 - DNA, 23 bp, Artificial Sequence
  Description of Artificial Sequence: Synthetic oligonucleotide
  X-linked inhibitor of apoptosis (XIAP) siRNA
tagccaggcgtggtggcacatgc

SEQ ID NO: 16169 - DNA, 23 bp, Artificial Sequence
  Description of Artificial Sequence: Synthetic oligonucleotide
  X-linked inhibitor of apoptosis (XIAP) siRNA
agccaggcgtggtggcacatgcc

SEQ ID NO: 16170 - DNA, 23 bp, Artificial Sequence
  Description of Artificial Sequence: Synthetic oligonucleotide
  X-linked inhibitor of apoptosis (XIAP) siRNA
gccaggcgtggtggcacatgccc

SEQ ID NO: 16171 - DNA, 23 bp, Artificial Sequence
  Description of Artificial Sequence: Synthetic oligonucleotide
  X-linked inhibitor of apoptosis (XIAP) siRNA
ccaggcgtggtggcacatgccca

SEQ ID NO: 16172 - DNA, 23 bp, Artificial Sequence
  Description of Artificial Sequence: Synthetic oligonucleotide
  X-linked inhibitor of apoptosis (XIAP) siRNA
caggcgtggtggcacatgcccat

SEQ ID NO: 16173 - DNA, 23 bp, Artificial Sequence
  Description of Artificial Sequence: Synthetic oligonucleotide
  X-linked inhibitor of apoptosis (XIAP) siRNA
aggcgtggtggcacatgcccata

SEQ ID NO: 16174 - DNA, 23 bp, Artificial Sequence
  Description of Artificial Sequence: Synthetic oligonucleotide
  X-linked inhibitor of apoptosis (XIAP) siRNA
ggcgtggtggcacatgcccatag

SEQ ID NO: 16175 - DNA, 23 bp, Artificial Sequence
  Description of Artificial Sequence: Synthetic oligonucleotide
  X-linked inhibitor of apoptosis (XIAP) siRNA
gcgtggtggcacatgcccatagt

SEQ ID NO: 16176 - DNA, 23 bp, Artificial Sequence
  Description of Artificial Sequence: Synthetic oligonucleotide
  X-linked inhibitor of apoptosis (XIAP) siRNA
cgtggtggcacatgcccatagtc

SEQ ID NO: 16177 - DNA, 23 bp, Artificial Sequence
  Description of Artificial Sequence: Synthetic oligonucleotide
  X-linked inhibitor of apoptosis (XIAP) siRNA
gtggtggcacatgcccatagtcg

SEQ ID NO: 16178 - DNA, 23 bp, Artificial Sequence
  Description of Artificial Sequence: Synthetic oligonucleotide
  X-linked inhibitor of apoptosis (XIAP) siRNA
tggtggcacatgcccatagtcgc

SEQ ID NO: 16179 - DNA, 23 bp, Artificial Sequence
  Description of Artificial Sequence: Synthetic oligonucleotide
  X-linked inhibitor of apoptosis (XIAP) siRNA
ggtggcacatgcccatagtcgca

SEQ ID NO: 16180 - DNA, 23 bp, Artificial Sequence
  Description of Artificial Sequence: Synthetic oligonucleotide
  X-linked inhibitor of apoptosis (XIAP) siRNA
gtggcacatgcccatagtcgcag

SEQ ID NO: 16181 - DNA, 23 bp, Artificial Sequence
  Description of Artificial Sequence: Synthetic oligonucleotide
  X-linked inhibitor of apoptosis (XIAP) siRNA
tggcacatgcccatagtcgcagc

SEQ ID NO: 16182 - DNA, 23 bp, Artificial Sequence
  Description of Artificial Sequence: Synthetic oligonucleotide
  X-linked inhibitor of apoptosis (XIAP) siRNA
ggcacatgcccatagtcgcagct

SEQ ID NO: 16183 - DNA, 23 bp, Artificial Sequence
  Description of Artificial Sequence: Synthetic oligonucleotide
  X-linked inhibitor of apoptosis (XIAP) siRNA
gcacatgcccatagtcgcagcta

SEQ ID NO: 16184 - DNA, 23 bp, Artificial Sequence
  Description of Artificial Sequence: Synthetic oligonucleotide
  X-linked inhibitor of apoptosis (XIAP) siRNA
cacatgcccatagtcgcagctac

SEQ ID NO: 16185 - DNA, 23 bp, Artificial Sequence
  Description of Artificial Sequence: Synthetic oligonucleotide
  X-linked inhibitor of apoptosis (XIAP) siRNA
acatgcccatagtcgcagctact

SEQ ID NO: 16186 - DNA, 23 bp, Artificial Sequence
  Description of Artificial Sequence: Synthetic oligonucleotide
  X-linked inhibitor of apoptosis (XIAP) siRNA
catgcccatagtcgcagctactc

SEQ ID NO: 16187 - DNA, 23 bp, Artificial Sequence
  Description of Artificial Sequence: Synthetic oligonucleotide
  X-linked inhibitor of apoptosis (XIAP) siRNA
atgcccatagtcgcagctactct

SEQ ID NO: 16188 - DNA, 23 bp, Artificial Sequence
  Description of Artificial Sequence: Synthetic oligonucleotide
  X-linked inhibitor of apoptosis (XIAP) siRNA
tgcccatagtcgcagctactctg

SEQ ID NO: 16189 - DNA, 23 bp, Artificial Sequence
  Description of Artificial Sequence: Synthetic oligonucleotide
  X-linked inhibitor of apoptosis (XIAP) siRNA
gcccatagtcgcagctactctgg

SEQ ID NO: 16190 - DNA, 23 bp, Artificial Sequence
  Description of Artificial Sequence: Synthetic oligonucleotide
  X-linked inhibitor of apoptosis (XIAP) siRNA
cccatagtcgcagctactctgga

SEQ ID NO: 16191 - DNA, 23 bp, Artificial Sequence
  Description of Artificial Sequence: Synthetic oligonucleotide
  X-linked inhibitor of apoptosis (XIAP) siRNA
ccatagtcgcagctactctggag

SEQ ID NO: 16192 - DNA, 23 bp, Artificial Sequence
  Description of Artificial Sequence: Synthetic oligonucleotide
  X-linked inhibitor of apoptosis (XIAP) siRNA
catagtcgcagctactctggagg

SEQ ID NO: 16193 - DNA, 23 bp, Artificial Sequence
  Description of Artificial Sequence: Synthetic oligonucleotide
  X-linked inhibitor of apoptosis (XIAP) siRNA
atagtcgcagctactctggaggc

SEQ ID NO: 16194 - DNA, 23 bp, Artificial Sequence
  Description of Artificial Sequence: Synthetic oligonucleotide
  X-linked inhibitor of apoptosis (XIAP) siRNA
tagtcgcagctactctggaggca

SEQ ID NO: 16195 - DNA, 23 bp, Artificial Sequence
  Description of Artificial Sequence: Synthetic oligonucleotide
  X-linked inhibitor of apoptosis (XIAP) siRNA
agtcgcagctactctggaggcag

SEQ ID NO: 16196 - DNA, 23 bp, Artificial Sequence
  Description of Artificial Sequence: Synthetic oligonucleotide
  X-linked inhibitor of apoptosis (XIAP) siRNA
gtcgcagctactctggaggcaga

SEQ ID NO: 16197 - DNA, 23 bp, Artificial Sequence
  Description of Artificial Sequence: Synthetic oligonucleotide
  X-linked inhibitor of apoptosis (XIAP) siRNA
tcgcagctactctggaggcagag

SEQ ID NO: 16198 - DNA, 23 bp, Artificial Sequence
  Description of Artificial Sequence: Synthetic oligonucleotide
  X-linked inhibitor of apoptosis (XIAP) siRNA
cgcagctactctggaggcagagg

SEQ ID NO: 16199 - DNA, 23 bp, Artificial Sequence
  Description of Artificial Sequence: Synthetic oligonucleotide
  X-linked inhibitor of apoptosis (XIAP) siRNA
gcagctactctggaggcagaggc

SEQ ID NO: 16200 - DNA, 23 bp, Artificial Sequence
  Description of Artificial Sequence: Synthetic oligonucleotide
  X-linked inhibitor of apoptosis (XIAP) siRNA
cagctactctggaggcagaggca

SEQ ID NO: 16201 - DNA, 23 bp, Artificial Sequence
  Description of Artificial Sequence: Synthetic oligonucleotide
  X-linked inhibitor of apoptosis (XIAP) siRNA
agctactctggaggcagaggcag

SEQ ID NO: 16202 - DNA, 23 bp, Artificial Sequence
  Description of Artificial Sequence: Synthetic oligonucleotide
  X-linked inhibitor of apoptosis (XIAP) siRNA
gctactctggaggcagaggcagg

SEQ ID NO: 16203 - DNA, 23 bp, Artificial Sequence
  Description of Artificial Sequence: Synthetic oligonucleotide
  X-linked inhibitor of apoptosis (XIAP) siRNA
ctactctggaggcagaggcagga

SEQ ID NO: 16204 - DNA, 23 bp, Artificial Sequence
  Description of Artificial Sequence: Synthetic oligonucleotide
  X-linked inhibitor of apoptosis (XIAP) siRNA
tactctggaggcagaggcaggag

SEQ ID NO: 16205 - DNA, 23 bp, Artificial Sequence
  Description of Artificial Sequence: Synthetic oligonucleotide
  X-linked inhibitor of apoptosis (XIAP) siRNA
actctggaggcagaggcaggagg

SEQ ID NO: 16206 - DNA, 23 bp, Artificial Sequence
  Description of Artificial Sequence: Synthetic oligonucleotide
  X-linked inhibitor of apoptosis (XIAP) siRNA
ctctggaggcagaggcaggagga

SEQ ID NO: 16207 - DNA, 23 bp, Artificial Sequence
  Description of Artificial Sequence: Synthetic oligonucleotide
  X-linked inhibitor of apoptosis (XIAP) siRNA
tctggaggcagaggcaggaggat

SEQ ID NO: 16208 - DNA, 23 bp, Artificial Sequence
  Description of Artificial Sequence: Synthetic oligonucleotide
  X-linked inhibitor of apoptosis (XIAP) siRNA
ctggaggcagaggcaggaggatc

SEQ ID NO: 16209 - DNA, 23 bp, Artificial Sequence
  Description of Artificial Sequence: Synthetic oligonucleotide
  X-linked inhibitor of apoptosis (XIAP) siRNA
tggaggcagaggcaggaggatca

SEQ ID NO: 16210 - DNA, 23 bp, Artificial Sequence
  Description of Artificial Sequence: Synthetic oligonucleotide
  X-linked inhibitor of apoptosis (XIAP) siRNA
ggaggcagaggcaggaggatcac

SEQ ID NO: 16211 - DNA, 23 bp, Artificial Sequence
  Description of Artificial Sequence: Synthetic oligonucleotide
  X-linked inhibitor of apoptosis (XIAP) siRNA
gaggcagaggcaggaggatcact

SEQ ID NO: 16212 - DNA, 23 bp, Artificial Sequence
  Description of Artificial Sequence: Synthetic oligonucleotide
  X-linked inhibitor of apoptosis (XIAP) siRNA
aggcagaggcaggaggatcactt

SEQ ID NO: 16213 - DNA, 23 bp, Artificial Sequence
  Description of Artificial Sequence: Synthetic oligonucleotide
  X-linked inhibitor of apoptosis (XIAP) siRNA
ggcagaggcaggaggatcacttg

SEQ ID NO: 16214 - DNA, 23 bp, Artificial Sequence
  Description of Artificial Sequence: Synthetic oligonucleotide
  X-linked inhibitor of apoptosis (XIAP) siRNA
gcagaggcaggaggatcacttga

SEQ ID NO: 16215 - DNA, 23 bp, Artificial Sequence
  Description of Artificial Sequence: Synthetic oligonucleotide
  X-linked inhibitor of apoptosis (XIAP) siRNA
cagaggcaggaggatcacttgag

SEQ ID NO: 16216 - DNA, 23 bp, Artificial Sequence
  Description of Artificial Sequence: Synthetic oligonucleotide
  X-linked inhibitor of apoptosis (XIAP) siRNA
agaggcaggaggatcacttgagc

SEQ ID NO: 16217 - DNA, 23 bp, Artificial Sequence
  Description of Artificial Sequence: Synthetic oligonucleotide
  X-linked inhibitor of apoptosis (XIAP) siRNA
gaggcaggaggatcacttgagcc

SEQ ID NO: 16218 - DNA, 23 bp, Artificial Sequence
  Description of Artificial Sequence: Synthetic oligonucleotide
  X-linked inhibitor of apoptosis (XIAP) siRNA
aggcaggaggatcacttgagccc

SEQ ID NO: 16219 - DNA, 23 bp, Artificial Sequence
  Description of Artificial Sequence: Synthetic oligonucleotide
  X-linked inhibitor of apoptosis (XIAP) siRNA
ggcaggaggatcacttgagccca

SEQ ID NO: 16220 - DNA, 23 bp, Artificial Sequence
  Description of Artificial Sequence: Synthetic oligonucleotide
  X-linked inhibitor of apoptosis (XIAP) siRNA
gcaggaggatcacttgagcccat

SEQ ID NO: 16221 - DNA, 23 bp, Artificial Sequence
  Description of Artificial Sequence: Synthetic oligonucleotide
  X-linked inhibitor of apoptosis (XIAP) siRNA
caggaggatcacttgagcccatg

SEQ ID NO: 16222 - DNA, 23 bp, Artificial Sequence
  Description of Artificial Sequence: Synthetic oligonucleotide
  X-linked inhibitor of apoptosis (XIAP) siRNA
aggaggatcacttgagcccatga

SEQ ID NO: 16223 - DNA, 23 bp, Artificial Sequence
  Description of Artificial Sequence: Synthetic oligonucleotide
  X-linked inhibitor of apoptosis (XIAP) siRNA
ggaggatcacttgagcccatgaa

SEQ ID NO: 16224 - DNA, 23 bp, Artificial Sequence
  Description of Artificial Sequence: Synthetic oligonucleotide
  X-linked inhibitor of apoptosis (XIAP) siRNA
gaggatcacttgagcccatgaat

SEQ ID NO: 16225 - DNA, 23 bp, Artificial Sequence
  Description of Artificial Sequence: Synthetic oligonucleotide
  X-linked inhibitor of apoptosis (XIAP) siRNA
aggatcacttgagcccatgaatt

SEQ ID NO: 16226 - DNA, 23 bp, Artificial Sequence
  Description of Artificial Sequence: Synthetic oligonucleotide
  X-linked inhibitor of apoptosis (XIAP) siRNA
ggatcacttgagcccatgaattt

SEQ ID NO: 16227 - DNA, 23 bp, Artificial Sequence
  Description of Artificial Sequence: Synthetic oligonucleotide
  X-linked inhibitor of apoptosis (XIAP) siRNA
gatcacttgagcccatgaatttg

SEQ ID NO: 16228 - DNA, 23 bp, Artificial Sequence
  Description of Artificial Sequence: Synthetic oligonucleotide
  X-linked inhibitor of apoptosis (XIAP) siRNA
atcacttgagcccatgaatttga

SEQ ID NO: 16229 - DNA, 23 bp, Artificial Sequence
  Description of Artificial Sequence: Synthetic oligonucleotide
  X-linked inhibitor of apoptosis (XIAP) siRNA
tcacttgagcccatgaatttgag

SEQ ID NO: 16230 - DNA, 23 bp, Artificial Sequence
  Description of Artificial Sequence: Synthetic oligonucleotide
  X-linked inhibitor of apoptosis (XIAP) siRNA
cacttgagcccatgaatttgagg

SEQ ID NO: 16231 - DNA, 23 bp, Artificial Sequence
  Description of Artificial Sequence: Synthetic oligonucleotide
  X-linked inhibitor of apoptosis (XIAP) siRNA
acttgagcccatgaatttgaggc

SEQ ID NO: 16232 - DNA, 23 bp, Artificial Sequence
  Description of Artificial Sequence: Synthetic oligonucleotide
  X-linked inhibitor of apoptosis (XIAP) siRNA
cttgagcccatgaatttgaggca

SEQ ID NO: 16233 - DNA, 23 bp, Artificial Sequence
  Description of Artificial Sequence: Synthetic oligonucleotide
  X-linked inhibitor of apoptosis (XIAP) siRNA
ttgagcccatgaatttgaggcag

SEQ ID NO: 16234 - DNA, 23 bp, Artificial Sequence
  Description of Artificial Sequence: Synthetic oligonucleotide
  X-linked inhibitor of apoptosis (XIAP) siRNA
tgagcccatgaatttgaggcagc

SEQ ID NO: 16235 - DNA, 23 bp, Artificial Sequence
  Description of Artificial Sequence: Synthetic oligonucleotide
  X-linked inhibitor of apoptosis (XIAP) siRNA
gagcccatgaatttgaggcagca

SEQ ID NO: 16236 - DNA, 23 bp, Artificial Sequence
  Description of Artificial Sequence: Synthetic oligonucleotide
  X-linked inhibitor of apoptosis (XIAP) siRNA
agcccatgaatttgaggcagcag

SEQ ID NO: 16237 - DNA, 23 bp, Artificial Sequence
  Description of Artificial Sequence: Synthetic oligonucleotide
  X-linked inhibitor of apoptosis (XIAP) siRNA
gcccatgaatttgaggcagcagt

SEQ ID NO: 16238 - DNA, 23 bp, Artificial Sequence
  Description of Artificial Sequence: Synthetic oligonucleotide
  X-linked inhibitor of apoptosis (XIAP) siRNA
cccatgaatttgaggcagcagtg

SEQ ID NO: 16239 - DNA, 23 bp, Artificial Sequence
  Description of Artificial Sequence: Synthetic oligonucleotide
  X-linked inhibitor of apoptosis (XIAP) siRNA
ccatgaatttgaggcagcagtga

SEQ ID NO: 16240 - DNA, 23 bp, Artificial Sequence
  Description of Artificial Sequence: Synthetic oligonucleotide
  X-linked inhibitor of apoptosis (XIAP) siRNA
catgaatttgaggcagcagtgag

SEQ ID NO: 16241 - DNA, 23 bp, Artificial Sequence
  Description of Artificial Sequence: Synthetic oligonucleotide
  X-linked inhibitor of apoptosis (XIAP) siRNA
atgaatttgaggcagcagtgagc

SEQ ID NO: 16242 - DNA, 23 bp, Artificial Sequence
  Description of Artificial Sequence: Synthetic oligonucleotide
  X-linked inhibitor of apoptosis (XIAP) siRNA
tgaatttgaggcagcagtgagct

SEQ ID NO: 16243 - DNA, 23 bp, Artificial Sequence
  Description of Artificial Sequence: Synthetic oligonucleotide
  X-linked inhibitor of apoptosis (XIAP) siRNA
gaatttgaggcagcagtgagcta

SEQ ID NO: 16244 - DNA, 23 bp, Artificial Sequence
  Description of Artificial Sequence: Synthetic oligonucleotide
  X-linked inhibitor of apoptosis (XIAP) siRNA
aatttgaggcagcagtgagctat

SEQ ID NO: 16245 - DNA, 23 bp, Artificial Sequence
  Description of Artificial Sequence: Synthetic oligonucleotide
  X-linked inhibitor of apoptosis (XIAP) siRNA
atttgaggcagcagtgagctatg

SEQ ID NO: 16246 - DNA, 23 bp, Artificial Sequence
  Description of Artificial Sequence: Synthetic oligonucleotide
  X-linked inhibitor of apoptosis (XIAP) siRNA
tttgaggcagcagtgagctatga

SEQ ID NO: 16247 - DNA, 23 bp, Artificial Sequence
  Description of Artificial Sequence: Synthetic oligonucleotide
  X-linked inhibitor of apoptosis (XIAP) siRNA
ttgaggcagcagtgagctatgat

SEQ ID NO: 16248 - DNA, 23 bp, Artificial Sequence
  Description of Artificial Sequence: Synthetic oligonucleotide
  X-linked inhibitor of apoptosis (XIAP) siRNA
tgaggcagcagtgagctatgatt

SEQ ID NO: 16249 - DNA, 23 bp, Artificial Sequence
  Description of Artificial Sequence: Synthetic oligonucleotide
  X-linked inhibitor of apoptosis (XIAP) siRNA
gaggcagcagtgagctatgattg

SEQ ID NO: 16250 - DNA, 23 bp, Artificial Sequence
  Description of Artificial Sequence: Synthetic oligonucleotide
  X-linked inhibitor of apoptosis (XIAP) siRNA
aggcagcagtgagctatgattgt

SEQ ID NO: 16251 - DNA, 23 bp, Artificial Sequence
  Description of Artificial Sequence: Synthetic oligonucleotide
  X-linked inhibitor of apoptosis (XIAP) siRNA
ggcagcagtgagctatgattgtg

SEQ ID NO: 16252 - DNA, 23 bp, Artificial Sequence
  Description of Artificial Sequence: Synthetic oligonucleotide
  X-linked inhibitor of apoptosis (XIAP) siRNA
gcagcagtgagctatgattgtgc

SEQ ID NO: 16253 - DNA, 23 bp, Artificial Sequence
  Description of Artificial Sequence: Synthetic oligonucleotide
  X-linked inhibitor of apoptosis (XIAP) siRNA
cagcagtgagctatgattgtgcc

SEQ ID NO: 16254 - DNA, 23 bp, Artificial Sequence
  Description of Artificial Sequence: Synthetic oligonucleotide
  X-linked inhibitor of apoptosis (XIAP) siRNA
agcagtgagctatgattgtgcca

SEQ ID NO: 16255 - DNA, 23 bp, Artificial Sequence
  Description of Artificial Sequence: Synthetic oligonucleotide
  X-linked inhibitor of apoptosis (XIAP) siRNA
gcagtgagctatgattgtgccac

SEQ ID NO: 16256 - DNA, 23 bp, Artificial Sequence
  Description of Artificial Sequence: Synthetic oligonucleotide
  X-linked inhibitor of apoptosis (XIAP) siRNA
cagtgagctatgattgtgccact

SEQ ID NO: 16257 - DNA, 23 bp, Artificial Sequence
  Description of Artificial Sequence: Synthetic oligonucleotide
  X-linked inhibitor of apoptosis (XIAP) siRNA
agtgagctatgattgtgccactg

SEQ ID NO: 16258 - DNA, 23 bp, Artificial Sequence
  Description of Artificial Sequence: Synthetic oligonucleotide
  X-linked inhibitor of apoptosis (XIAP) siRNA
gtgagctatgattgtgccactgt

SEQ ID NO: 16259 - DNA, 23 bp, Artificial Sequence
  Description of Artificial Sequence: Synthetic oligonucleotide
  X-linked inhibitor of apoptosis (XIAP) siRNA
tgagctatgattgtgccactgta

SEQ ID NO: 16260 - DNA, 23 bp, Artificial Sequence
  Description of Artificial Sequence: Synthetic oligonucleotide
  X-linked inhibitor of apoptosis (XIAP) siRNA
gagctatgattgtgccactgtac

SEQ ID NO: 16261 - DNA, 23 bp, Artificial Sequence
  Description of Artificial Sequence: Synthetic oligonucleotide
  X-linked inhibitor of apoptosis (XIAP) siRNA
agctatgattgtgccactgtact

SEQ ID NO: 16262 - DNA, 23 bp, Artificial Sequence
  Description of Artificial Sequence: Synthetic oligonucleotide
  X-linked inhibitor of apoptosis (XIAP) siRNA
gctatgattgtgccactgtactc

SEQ ID NO: 16263 - DNA, 23 bp, Artificial Sequence
  Description of Artificial Sequence: Synthetic oligonucleotide
  X-linked inhibitor of apoptosis (XIAP) siRNA
ctatgattgtgccactgtactcc

SEQ ID NO: 16264 - DNA, 23 bp, Artificial Sequence
  Description of Artificial Sequence: Synthetic oligonucleotide
  X-linked inhibitor of apoptosis (XIAP) siRNA
tatgattgtgccactgtactcca

SEQ ID NO: 16265 - DNA, 23 bp, Artificial Sequence
  Description of Artificial Sequence: Synthetic oligonucleotide
  X-linked inhibitor of apoptosis (XIAP) siRNA
atgattgtgccactgtactccag

SEQ ID NO: 16266 - DNA, 23 bp, Artificial Sequence
  Description of Artificial Sequence: Synthetic oligonucleotide
  X-linked inhibitor of apoptosis (XIAP) siRNA
tgattgtgccactgtactccagt

SEQ ID NO: 16267 - DNA, 23 bp, Artificial Sequence
  Description of Artificial Sequence: Synthetic oligonucleotide
  X-linked inhibitor of apoptosis (XIAP) siRNA
gattgtgccactgtactccagtc

SEQ ID NO: 16268 - DNA, 23 bp, Artificial Sequence
  Description of Artificial Sequence: Synthetic oligonucleotide
  X-linked inhibitor of apoptosis (XIAP) siRNA
attgtgccactgtactccagtct

SEQ ID NO: 16269 - DNA, 23 bp, Artificial Sequence
  Description of Artificial Sequence: Synthetic oligonucleotide
  X-linked inhibitor of apoptosis (XIAP) siRNA
ttgtgccactgtactccagtctg

SEQ ID NO: 16270 - DNA, 23 bp, Artificial Sequence
  Description of Artificial Sequence: Synthetic oligonucleotide
  X-linked inhibitor of apoptosis (XIAP) siRNA
tgtgccactgtactccagtctgg

SEQ ID NO: 16271 - DNA, 23 bp, Artificial Sequence
  Description of Artificial Sequence: Synthetic oligonucleotide
  X-linked inhibitor of apoptosis (XIAP) siRNA
gtgccactgtactccagtctggg

SEQ ID NO: 16272 - DNA, 23 bp, Artificial Sequence
  Description of Artificial Sequence: Synthetic oligonucleotide
  X-linked inhibitor of apoptosis (XIAP) siRNA
tgccactgtactccagtctgggt

SEQ ID NO: 16273 - DNA, 23 bp, Artificial Sequence
  Description of Artificial Sequence: Synthetic oligonucleotide
  X-linked inhibitor of apoptosis (XIAP) siRNA
gccactgtactccagtctgggtg

SEQ ID NO: 16274 - DNA, 23 bp, Artificial Sequence
  Description of Artificial Sequence: Synthetic oligonucleotide
  X-linked inhibitor of apoptosis (XIAP) siRNA
ccactgtactccagtctgggtga

SEQ ID NO: 16275 - DNA, 23 bp, Artificial Sequence
  Description of Artificial Sequence: Synthetic oligonucleotide
  X-linked inhibitor of apoptosis (XIAP) siRNA
cactgtactccagtctgggtgac

SEQ ID NO: 16276 - DNA, 23 bp, Artificial Sequence
  Description of Artificial Sequence: Synthetic oligonucleotide
  X-linked inhibitor of apoptosis (XIAP) siRNA
actgtactccagtctgggtgaca

SEQ ID NO: 16277 - DNA, 23 bp, Artificial Sequence
  Description of Artificial Sequence: Synthetic oligonucleotide
  X-linked inhibitor of apoptosis (XIAP) siRNA
ctgtactccagtctgggtgacag

SEQ ID NO: 16278 - DNA, 23 bp, Artificial Sequence
  Description of Artificial Sequence: Synthetic oligonucleotide
  X-linked inhibitor of apoptosis (XIAP) siRNA
tgtactccagtctgggtgacaga

SEQ ID NO: 16279 - DNA, 23 bp, Artificial Sequence
  Description of Artificial Sequence: Synthetic oligonucleotide
  X-linked inhibitor of apoptosis (XIAP) siRNA
gtactccagtctgggtgacagag

SEQ ID NO: 16280 - DNA, 23 bp, Artificial Sequence
  Description of Artificial Sequence: Synthetic oligonucleotide
  X-linked inhibitor of apoptosis (XIAP) siRNA
tactccagtctgggtgacagagt

SEQ ID NO: 16281 - DNA, 23 bp, Artificial Sequence
  Description of Artificial Sequence: Synthetic oligonucleotide
  X-linked inhibitor of apoptosis (XIAP) siRNA
actccagtctgggtgacagagtg

SEQ ID NO: 16282 - DNA, 23 bp, Artificial Sequence
  Description of Artificial Sequence: Synthetic oligonucleotide
  X-linked inhibitor of apoptosis (XIAP) siRNA
ctccagtctgggtgacagagtga

SEQ ID NO: 16283 - DNA, 23 bp, Artificial Sequence
  Description of Artificial Sequence: Synthetic oligonucleotide
  X-linked inhibitor of apoptosis (XIAP) siRNA
tccagtctgggtgacagagtgag

SEQ ID NO: 16284 - DNA, 23 bp, Artificial Sequence
  Description of Artificial Sequence: Synthetic oligonucleotide
  X-linked inhibitor of apoptosis (XIAP) siRNA
ccagtctgggtgacagagtgaga

SEQ ID NO: 16285 - DNA, 23 bp, Artificial Sequence
  Description of Artificial Sequence: Synthetic oligonucleotide
  X-linked inhibitor of apoptosis (XIAP) siRNA
cagtctgggtgacagagtgagac

SEQ ID NO: 16286 - DNA, 23 bp, Artificial Sequence
  Description of Artificial Sequence: Synthetic oligonucleotide
  X-linked inhibitor of apoptosis (XIAP) siRNA
agtctgggtgacagagtgagacc

SEQ ID NO: 16287 - DNA, 23 bp, Artificial Sequence
  Description of Artificial Sequence: Synthetic oligonucleotide
  X-linked inhibitor of apoptosis (XIAP) siRNA
gtctgggtgacagagtgagaccc

SEQ ID NO: 16288 - DNA, 23 bp, Artificial Sequence
  Description of Artificial Sequence: Synthetic oligonucleotide
  X-linked inhibitor of apoptosis (XIAP) siRNA
tctgggtgacagagtgagacccc

SEQ ID NO: 16289 - DNA, 23 bp, Artificial Sequence
  Description of Artificial Sequence: Synthetic oligonucleotide
  X-linked inhibitor of apoptosis (XIAP) siRNA
ctgggtgacagagtgagacccca

SEQ ID NO: 16290 - DNA, 23 bp, Artificial Sequence
  Description of Artificial Sequence: Synthetic oligonucleotide
  X-linked inhibitor of apoptosis (XIAP) siRNA
tgggtgacagagtgagaccccat

SEQ ID NO: 16291 - DNA, 23 bp, Artificial Sequence
  Description of Artificial Sequence: Synthetic oligonucleotide
  X-linked inhibitor of apoptosis (XIAP) siRNA
gggtgacagagtgagaccccatc

SEQ ID NO: 16292 - DNA, 23 bp, Artificial Sequence
  Description of Artificial Sequence: Synthetic oligonucleotide
  X-linked inhibitor of apoptosis (XIAP) siRNA
ggtgacagagtgagaccccatct

SEQ ID NO: 16293 - DNA, 23 bp, Artificial Sequence
  Description of Artificial Sequence: Synthetic oligonucleotide
  X-linked inhibitor of apoptosis (XIAP) siRNA
gtgacagagtgagaccccatctc

SEQ ID NO: 16294 - DNA, 23 bp, Artificial Sequence
  Description of Artificial Sequence: Synthetic oligonucleotide
  X-linked inhibitor of apoptosis (XIAP) siRNA
tgacagagtgagaccccatctct

SEQ ID NO: 16295 - DNA, 23 bp, Artificial Sequence
  Description of Artificial Sequence: Synthetic oligonucleotide
  X-linked inhibitor of apoptosis (XIAP) siRNA
gacagagtgagaccccatctcta

SEQ ID NO: 16296 - DNA, 23 bp, Artificial Sequence
  Description of Artificial Sequence: Synthetic oligonucleotide
  X-linked inhibitor of apoptosis (XIAP) siRNA
acagagtgagaccccatctctaa

SEQ ID NO: 16297 - DNA, 23 bp, Artificial Sequence
  Description of Artificial Sequence: Synthetic oligonucleotide
  X-linked inhibitor of apoptosis (XIAP) siRNA
cagagtgagaccccatctctaaa

SEQ ID NO: 16298 - DNA, 23 bp, Artificial Sequence
  Description of Artificial Sequence: Synthetic oligonucleotide
  X-linked inhibitor of apoptosis (XIAP) siRNA
agagtgagaccccatctctaaat

SEQ ID NO: 16299 - DNA, 23 bp, Artificial Sequence
  Description of Artificial Sequence: Synthetic oligonucleotide
  X-linked inhibitor of apoptosis (XIAP) siRNA
gagtgagaccccatctctaaata

SEQ ID NO: 16300 - DNA, 23 bp, Artificial Sequence
  Description of Artificial Sequence: Synthetic oligonucleotide
  X-linked inhibitor of apoptosis (XIAP) siRNA
agtgagaccccatctctaaataa

SEQ ID NO: 16301 - DNA, 23 bp, Artificial Sequence
  Description of Artificial Sequence: Synthetic oligonucleotide
  X-linked inhibitor of apoptosis (XIAP) siRNA
gtgagaccccatctctaaataaa

SEQ ID NO: 16302 - DNA, 23 bp, Artificial Sequence
  Description of Artificial Sequence: Synthetic oligonucleotide
  X-linked inhibitor of apoptosis (XIAP) siRNA
tgagaccccatctctaaataaat

SEQ ID NO: 16303 - DNA, 23 bp, Artificial Sequence
  Description of Artificial Sequence: Synthetic oligonucleotide
  X-linked inhibitor of apoptosis (XIAP) siRNA
gagaccccatctctaaataaata

SEQ ID NO: 16304 - DNA, 23 bp, Artificial Sequence
  Description of Artificial Sequence: Synthetic oligonucleotide
  X-linked inhibitor of apoptosis (XIAP) siRNA
agaccccatctctaaataaatag

SEQ ID NO: 16305 - DNA, 23 bp, Artificial Sequence
  Description of Artificial Sequence: Synthetic oligonucleotide
  X-linked inhibitor of apoptosis (XIAP) siRNA
gaccccatctctaaataaatagg

SEQ ID NO: 16306 - DNA, 23 bp, Artificial Sequence
  Description of Artificial Sequence: Synthetic oligonucleotide
  X-linked inhibitor of apoptosis (XIAP) siRNA
accccatctctaaataaataggt

SEQ ID NO: 16307 - DNA, 23 bp, Artificial Sequence
  Description of Artificial Sequence: Synthetic oligonucleotide
  X-linked inhibitor of apoptosis (XIAP) siRNA
ccccatctctaaataaataggtc

SEQ ID NO: 16308 - DNA, 23 bp, Artificial Sequence
  Description of Artificial Sequence: Synthetic oligonucleotide
  X-linked inhibitor of apoptosis (XIAP) siRNA
cccatctctaaataaataggtca

SEQ ID NO: 16309 - DNA, 23 bp, Artificial Sequence
  Description of Artificial Sequence: Synthetic oligonucleotide
  X-linked inhibitor of apoptosis (XIAP) siRNA
ccatctctaaataaataggtcaa

SEQ ID NO: 16310 - DNA, 23 bp, Artificial Sequence
  Description of Artificial Sequence: Synthetic oligonucleotide
  X-linked inhibitor of apoptosis (XIAP) siRNA
catctctaaataaataggtcaaa

SEQ ID NO: 16311 - DNA, 23 bp, Artificial Sequence
  Description of Artificial Sequence: Synthetic oligonucleotide
  X-linked inhibitor of apoptosis (XIAP) siRNA
atctctaaataaataggtcaaac

SEQ ID NO: 16312 - DNA, 23 bp, Artificial Sequence
  Description of Artificial Sequence: Synthetic oligonucleotide
  X-linked inhibitor of apoptosis (XIAP) siRNA
tctctaaataaataggtcaaacc

SEQ ID NO: 16313 - DNA, 23 bp, Artificial Sequence
  Description of Artificial Sequence: Synthetic oligonucleotide
  X-linked inhibitor of apoptosis (XIAP) siRNA
ctctaaataaataggtcaaaccc

SEQ ID NO: 16314 - DNA, 23 bp, Artificial Sequence
  Description of Artificial Sequence: Synthetic oligonucleotide
  X-linked inhibitor of apoptosis (XIAP) siRNA
tctaaataaataggtcaaaccct

SEQ ID NO: 16315 - DNA, 23 bp, Artificial Sequence
  Description of Artificial Sequence: Synthetic oligonucleotide
  X-linked inhibitor of apoptosis (XIAP) siRNA
ctaaataaataggtcaaaccctt

SEQ ID NO: 16316 - DNA, 23 bp, Artificial Sequence
  Description of Artificial Sequence: Synthetic oligonucleotide
  X-linked inhibitor of apoptosis (XIAP) siRNA
taaataaataggtcaaaccctta

SEQ ID NO: 16317 - DNA, 23 bp, Artificial Sequence
  Description of Artificial Sequence: Synthetic oligonucleotide
  X-linked inhibitor of apoptosis (XIAP) siRNA
aaataaataggtcaaacccttaa

SEQ ID NO: 16318 - DNA, 23 bp, Artificial Sequence
  Description of Artificial Sequence: Synthetic oligonucleotide
  X-linked inhibitor of apoptosis (XIAP) siRNA
aataaataggtcaaacccttaaa

SEQ ID NO: 16319 - DNA, 23 bp, Artificial Sequence
  Description of Artificial Sequence: Synthetic oligonucleotide
  X-linked inhibitor of apoptosis (XIAP) siRNA
ataaataggtcaaacccttaaaa

SEQ ID NO: 16320 - DNA, 23 bp, Artificial Sequence
  Description of Artificial Sequence: Synthetic oligonucleotide
  X-linked inhibitor of apoptosis (XIAP) siRNA
taaataggtcaaacccttaaaaa

SEQ ID NO: 16321 - DNA, 23 bp, Artificial Sequence
  Description of Artificial Sequence: Synthetic oligonucleotide
  X-linked inhibitor of apoptosis (XIAP) siRNA
aaataggtcaaacccttaaaaat

SEQ ID NO: 16322 - DNA, 23 bp, Artificial Sequence
  Description of Artificial Sequence: Synthetic oligonucleotide
  X-linked inhibitor of apoptosis (XIAP) siRNA
aataggtcaaacccttaaaaata

SEQ ID NO: 16323 - DNA, 23 bp, Artificial Sequence
  Description of Artificial Sequence: Synthetic oligonucleotide
  X-linked inhibitor of apoptosis (XIAP) siRNA
ataggtcaaacccttaaaaatat

SEQ ID NO: 16324 - DNA, 23 bp, Artificial Sequence
  Description of Artificial Sequence: Synthetic oligonucleotide
  X-linked inhibitor of apoptosis (XIAP) siRNA
taggtcaaacccttaaaaatatt

SEQ ID NO: 16325 - DNA, 23 bp, Artificial Sequence
  Description of Artificial Sequence: Synthetic oligonucleotide
  X-linked inhibitor of apoptosis (XIAP) siRNA
aggtcaaacccttaaaaatattt

SEQ ID NO: 16326 - DNA, 23 bp, Artificial Sequence
  Description of Artificial Sequence: Synthetic oligonucleotide
  X-linked inhibitor of apoptosis (XIAP) siRNA
ggtcaaacccttaaaaatattta

SEQ ID NO: 16327 - DNA, 23 bp, Artificial Sequence
  Description of Artificial Sequence: Synthetic oligonucleotide
  X-linked inhibitor of apoptosis (XIAP) siRNA
gtcaaacccttaaaaatatttaa

SEQ ID NO: 16328 - DNA, 23 bp, Artificial Sequence
  Description of Artificial Sequence: Synthetic oligonucleotide
  X-linked inhibitor of apoptosis (XIAP) siRNA
tcaaacccttaaaaatatttaaa

SEQ ID NO: 16329 - DNA, 23 bp, Artificial Sequence
  Description of Artificial Sequence: Synthetic oligonucleotide
  X-linked inhibitor of apoptosis (XIAP) siRNA
caaacccttaaaaatatttaaat

SEQ ID NO: 16330 - DNA, 23 bp, Artificial Sequence
  Description of Artificial Sequence: Synthetic oligonucleotide
  X-linked inhibitor of apoptosis (XIAP) siRNA
aaacccttaaaaatatttaaatt

SEQ ID NO: 16331 - DNA, 23 bp, Artificial Sequence
  Description of Artificial Sequence: Synthetic oligonucleotide
  X-linked inhibitor of apoptosis (XIAP) siRNA
aacccttaaaaatatttaaattc

SEQ ID NO: 16332 - DNA, 23 bp, Artificial Sequence
  Description of Artificial Sequence: Synthetic oligonucleotide
  X-linked inhibitor of apoptosis (XIAP) siRNA
acccttaaaaatatttaaattct

SEQ ID NO: 16333 - DNA, 23 bp, Artificial Sequence
  Description of Artificial Sequence: Synthetic oligonucleotide
  X-linked inhibitor of apoptosis (XIAP) siRNA
cccttaaaaatatttaaattctt

SEQ ID NO: 16334 - DNA, 23 bp, Artificial Sequence
  Description of Artificial Sequence: Synthetic oligonucleotide
  X-linked inhibitor of apoptosis (XIAP) siRNA
ccttaaaaatatttaaattctta

SEQ ID NO: 16335 - DNA, 23 bp, Artificial Sequence
  Description of Artificial Sequence: Synthetic oligonucleotide
  X-linked inhibitor of apoptosis (XIAP) siRNA
cttaaaaatatttaaattcttaa

SEQ ID NO: 16336 - DNA, 23 bp, Artificial Sequence
  Description of Artificial Sequence: Synthetic oligonucleotide
  X-linked inhibitor of apoptosis (XIAP) siRNA
ttaaaaatatttaaattcttaaa

SEQ ID NO: 16337 - DNA, 23 bp, Artificial Sequence
  Description of Artificial Sequence: Synthetic oligonucleotide
  X-linked inhibitor of apoptosis (XIAP) siRNA
taaaaatatttaaattcttaaaa

SEQ ID NO: 16338 - DNA, 23 bp, Artificial Sequence
  Description of Artificial Sequence: Synthetic oligonucleotide
  X-linked inhibitor of apoptosis (XIAP) siRNA
aaaaatatttaaattcttaaaaa

SEQ ID NO: 16339 - DNA, 23 bp, Artificial Sequence
  Description of Artificial Sequence: Synthetic oligonucleotide
  X-linked inhibitor of apoptosis (XIAP) siRNA
aaaatatttaaattcttaaaaaa

SEQ ID NO: 16340 - DNA, 23 bp, Artificial Sequence
  Description of Artificial Sequence: Synthetic oligonucleotide
  X-linked inhibitor of apoptosis (XIAP) siRNA
aaatatttaaattcttaaaaaat

SEQ ID NO: 16341 - DNA, 23 bp, Artificial Sequence
  Description of Artificial Sequence: Synthetic oligonucleotide
  X-linked inhibitor of apoptosis (XIAP) siRNA
aatatttaaattcttaaaaaatt

SEQ ID NO: 16342 - DNA, 23 bp, Artificial Sequence
  Description of Artificial Sequence: Synthetic oligonucleotide
  X-linked inhibitor of apoptosis (XIAP) siRNA
atatttaaattcttaaaaaattg

SEQ ID NO: 16343 - DNA, 23 bp, Artificial Sequence
  Description of Artificial Sequence: Synthetic oligonucleotide
  X-linked inhibitor of apoptosis (XIAP) siRNA
tatttaaattcttaaaaaattga

SEQ ID NO: 16344 - DNA, 23 bp, Artificial Sequence
  Description of Artificial Sequence: Synthetic oligonucleotide
  X-linked inhibitor of apoptosis (XIAP) siRNA
atttaaattcttaaaaaattgaa

SEQ ID NO: 16345 - DNA, 23 bp, Artificial Sequence
  Description of Artificial Sequence: Synthetic oligonucleotide
  X-linked inhibitor of apoptosis (XIAP) siRNA
tttaaattcttaaaaaattgaaa

SEQ ID NO: 16346 - DNA, 23 bp, Artificial Sequence
  Description of Artificial Sequence: Synthetic oligonucleotide
  X-linked inhibitor of apoptosis (XIAP) siRNA
ttaaattcttaaaaaattgaaaa

SEQ ID NO: 16347 - DNA, 23 bp, Artificial Sequence
  Description of Artificial Sequence: Synthetic oligonucleotide
  X-linked inhibitor of apoptosis (XIAP) siRNA
taaattcttaaaaaattgaaaag

SEQ ID NO: 16348 - DNA, 23 bp, Artificial Sequence
  Description of Artificial Sequence: Synthetic oligonucleotide
  X-linked inhibitor of apoptosis (XIAP) siRNA
aaattcttaaaaaattgaaaaga

SEQ ID NO: 16349 - DNA, 23 bp, Artificial Sequence
  Description of Artificial Sequence: Synthetic oligonucleotide
  X-linked inhibitor of apoptosis (XIAP) siRNA
aattcttaaaaaattgaaaagat

SEQ ID NO: 16350 - DNA, 23 bp, Artificial Sequence
  Description of Artificial Sequence: Synthetic oligonucleotide
  X-linked inhibitor of apoptosis (XIAP) siRNA
attcttaaaaaattgaaaagatt

SEQ ID NO: 16351 - DNA, 23 bp, Artificial Sequence
  Description of Artificial Sequence: Synthetic oligonucleotide
  X-linked inhibitor of apoptosis (XIAP) siRNA
ttcttaaaaaattgaaaagatta

SEQ ID NO: 16352 - DNA, 23 bp, Artificial Sequence
  Description of Artificial Sequence: Synthetic oligonucleotide
  X-linked inhibitor of apoptosis (XIAP) siRNA
tcttaaaaaattgaaaagattat

SEQ ID NO: 16353 - DNA, 23 bp, Artificial Sequence
  Description of Artificial Sequence: Synthetic oligonucleotide
  X-linked inhibitor of apoptosis (XIAP) siRNA
cttaaaaaattgaaaagattatt

SEQ ID NO: 16354 - DNA, 23 bp, Artificial Sequence
  Description of Artificial Sequence: Synthetic oligonucleotide
  X-linked inhibitor of apoptosis (XIAP) siRNA
ttaaaaaattgaaaagattattc

SEQ ID NO: 16355 - DNA, 23 bp, Artificial Sequence
  Description of Artificial Sequence: Synthetic oligonucleotide
  X-linked inhibitor of apoptosis (XIAP) siRNA
taaaaaattgaaaagattattct

SEQ ID NO: 16356 - DNA, 23 bp, Artificial Sequence
  Description of Artificial Sequence: Synthetic oligonucleotide
  X-linked inhibitor of apoptosis (XIAP) siRNA
aaaaaattgaaaagattattctt

SEQ ID NO: 16357 - DNA, 23 bp, Artificial Sequence
  Description of Artificial Sequence: Synthetic oligonucleotide
  X-linked inhibitor of apoptosis (XIAP) siRNA
aaaaattgaaaagattattcttc

SEQ ID NO: 16358 - DNA, 23 bp, Artificial Sequence
  Description of Artificial Sequence: Synthetic oligonucleotide
  X-linked inhibitor of apoptosis (XIAP) siRNA
aaaattgaaaagattattcttct

SEQ ID NO: 16359 - DNA, 23 bp, Artificial Sequence
  Description of Artificial Sequence: Synthetic oligonucleotide
  X-linked inhibitor of apoptosis (XIAP) siRNA
aaattgaaaagattattcttctc

SEQ ID NO: 16360 - DNA, 23 bp, Artificial Sequence
  Description of Artificial Sequence: Synthetic oligonucleotide
  X-linked inhibitor of apoptosis (XIAP) siRNA
aattgaaaagattattcttctca

SEQ ID NO: 16361 - DNA, 23 bp, Artificial Sequence
  Description of Artificial Sequence: Synthetic oligonucleotide
  X-linked inhibitor of apoptosis (XIAP) siRNA
attgaaaagattattcttctcaa

SEQ ID NO: 16362 - DNA, 23 bp, Artificial Sequence
  Description of Artificial Sequence: Synthetic oligonucleotide
  X-linked inhibitor of apoptosis (XIAP) siRNA
ttgaaaagattattcttctcaaa

SEQ ID NO: 16363 - DNA, 23 bp, Artificial Sequence
  Description of Artificial Sequence: Synthetic oligonucleotide
  X-linked inhibitor of apoptosis (XIAP) siRNA
tgaaaagattattcttctcaaat

SEQ ID NO: 16364 - DNA, 23 bp, Artificial Sequence
  Description of Artificial Sequence: Synthetic oligonucleotide
  X-linked inhibitor of apoptosis (XIAP) siRNA
gaaaagattattcttctcaaatt

SEQ ID NO: 16365 - DNA, 23 bp, Artificial Sequence
  Description of Artificial Sequence: Synthetic oligonucleotide
  X-linked inhibitor of apoptosis (XIAP) siRNA
aaaagattattcttctcaaattt

SEQ ID NO: 16366 - DNA, 23 bp, Artificial Sequence
  Description of Artificial Sequence: Synthetic oligonucleotide
  X-linked inhibitor of apoptosis (XIAP) siRNA
aaagattattcttctcaaattta

SEQ ID NO: 16367 - DNA, 23 bp, Artificial Sequence
  Description of Artificial Sequence: Synthetic oligonucleotide
  X-linked inhibitor of apoptosis (XIAP) siRNA
aagattattcttctcaaatttag

SEQ ID NO: 16368 - DNA, 23 bp, Artificial Sequence
  Description of Artificial Sequence: Synthetic oligonucleotide
  X-linked inhibitor of apoptosis (XIAP) siRNA
agattattcttctcaaatttagt

SEQ ID NO: 16369 - DNA, 23 bp, Artificial Sequence
  Description of Artificial Sequence: Synthetic oligonucleotide
  X-linked inhibitor of apoptosis (XIAP) siRNA
gattattcttctcaaatttagtt

SEQ ID NO: 16370 - DNA, 23 bp, Artificial Sequence
  Description of Artificial Sequence: Synthetic oligonucleotide
  X-linked inhibitor of apoptosis (XIAP) siRNA
attattcttctcaaatttagttg

SEQ ID NO: 16371 - DNA, 23 bp, Artificial Sequence
  Description of Artificial Sequence: Synthetic oligonucleotide
  X-linked inhibitor of apoptosis (XIAP) siRNA
ttattcttctcaaatttagttga

SEQ ID NO: 16372 - DNA, 23 bp, Artificial Sequence
  Description of Artificial Sequence: Synthetic oligonucleotide
  X-linked inhibitor of apoptosis (XIAP) siRNA
tattcttctcaaatttagttgag

SEQ ID NO: 16373 - DNA, 23 bp, Artificial Sequence
  Description of Artificial Sequence: Synthetic oligonucleotide
  X-linked inhibitor of apoptosis (XIAP) siRNA
attcttctcaaatttagttgagc

SEQ ID NO: 16374 - DNA, 23 bp, Artificial Sequence
  Description of Artificial Sequence: Synthetic oligonucleotide
  X-linked inhibitor of apoptosis (XIAP) siRNA
ttcttctcaaatttagttgagct

SEQ ID NO: 16375 - DNA, 23 bp, Artificial Sequence
  Description of Artificial Sequence: Synthetic oligonucleotide
  X-linked inhibitor of apoptosis (XIAP) siRNA
tcttctcaaatttagttgagctt

SEQ ID NO: 16376 - DNA, 23 bp, Artificial Sequence
  Description of Artificial Sequence: Synthetic oligonucleotide
  X-linked inhibitor of apoptosis (XIAP) siRNA
cttctcaaatttagttgagcttt

SEQ ID NO: 16377 - DNA, 23 bp, Artificial Sequence
  Description of Artificial Sequence: Synthetic oligonucleotide
  X-linked inhibitor of apoptosis (XIAP) siRNA
ttctcaaatttagttgagctttc

SEQ ID NO: 16378 - DNA, 23 bp, Artificial Sequence
  Description of Artificial Sequence: Synthetic oligonucleotide
  X-linked inhibitor of apoptosis (XIAP) siRNA
tctcaaatttagttgagctttct

SEQ ID NO: 16379 - DNA, 23 bp, Artificial Sequence
  Description of Artificial Sequence: Synthetic oligonucleotide
  X-linked inhibitor of apoptosis (XIAP) siRNA
ctcaaatttagttgagctttcta

SEQ ID NO: 16380 - DNA, 23 bp, Artificial Sequence
  Description of Artificial Sequence: Synthetic oligonucleotide
  X-linked inhibitor of apoptosis (XIAP) siRNA
tcaaatttagttgagctttctaa

SEQ ID NO: 16381 - DNA, 23 bp, Artificial Sequence
  Description of Artificial Sequence: Synthetic oligonucleotide
  X-linked inhibitor of apoptosis (XIAP) siRNA
caaatttagttgagctttctaag

SEQ ID NO: 16382 - DNA, 23 bp, Artificial Sequence
  Description of Artificial Sequence: Synthetic oligonucleotide
  X-linked inhibitor of apoptosis (XIAP) siRNA
aaatttagttgagctttctaaga

SEQ ID NO: 16383 - DNA, 23 bp, Artificial Sequence
  Description of Artificial Sequence: Synthetic oligonucleotide
  X-linked inhibitor of apoptosis (XIAP) siRNA
aatttagttgagctttctaagag

SEQ ID NO: 16384 - DNA, 23 bp, Artificial Sequence
  Description of Artificial Sequence: Synthetic oligonucleotide
  X-linked inhibitor of apoptosis (XIAP) siRNA
atttagttgagctttctaagaga

SEQ ID NO: 16385 - DNA, 23 bp, Artificial Sequence
  Description of Artificial Sequence: Synthetic oligonucleotide
  X-linked inhibitor of apoptosis (XIAP) siRNA
tttagttgagctttctaagagaa

SEQ ID NO: 16386 - DNA, 23 bp, Artificial Sequence
  Description of Artificial Sequence: Synthetic oligonucleotide
  X-linked inhibitor of apoptosis (XIAP) siRNA
ttagttgagctttctaagagaag

SEQ ID NO: 16387 - DNA, 23 bp, Artificial Sequence
  Description of Artificial Sequence: Synthetic oligonucleotide
  X-linked inhibitor of apoptosis (XIAP) siRNA
tagttgagctttctaagagaagc

SEQ ID NO: 16388 - DNA, 23 bp, Artificial Sequence
  Description of Artificial Sequence: Synthetic oligonucleotide
  X-linked inhibitor of apoptosis (XIAP) siRNA
agttgagctttctaagagaagca

SEQ ID NO: 16389 - DNA, 23 bp, Artificial Sequence
  Description of Artificial Sequence: Synthetic oligonucleotide
  X-linked inhibitor of apoptosis (XIAP) siRNA
gttgagctttctaagagaagcaa

SEQ ID NO: 16390 - DNA, 23 bp, Artificial Sequence
  Description of Artificial Sequence: Synthetic oligonucleotide
  X-linked inhibitor of apoptosis (XIAP) siRNA
ttgagctttctaagagaagcaat

SEQ ID NO: 16391 - DNA, 23 bp, Artificial Sequence
  Description of Artificial Sequence: Synthetic oligonucleotide
  X-linked inhibitor of apoptosis (XIAP) siRNA
tgagctttctaagagaagcaatt

SEQ ID NO: 16392 - DNA, 23 bp, Artificial Sequence
  Description of Artificial Sequence: Synthetic oligonucleotide
  X-linked inhibitor of apoptosis (XIAP) siRNA
gagctttctaagagaagcaattg

SEQ ID NO: 16393 - DNA, 23 bp, Artificial Sequence
  Description of Artificial Sequence: Synthetic oligonucleotide
  X-linked inhibitor of apoptosis (XIAP) siRNA
agctttctaagagaagcaattgg

SEQ ID NO: 16394 - DNA, 23 bp, Artificial Sequence
  Description of Artificial Sequence: Synthetic oligonucleotide
  X-linked inhibitor of apoptosis (XIAP) siRNA
gctttctaagagaagcaattggc

SEQ ID NO: 16395 - DNA, 23 bp, Artificial Sequence
  Description of Artificial Sequence: Synthetic oligonucleotide
  X-linked inhibitor of apoptosis (XIAP) siRNA
ctttctaagagaagcaattggct

SEQ ID NO: 16396 - DNA, 23 bp, Artificial Sequence
  Description of Artificial Sequence: Synthetic oligonucleotide
  X-linked inhibitor of apoptosis (XIAP) siRNA
tttctaagagaagcaattggctt

SEQ ID NO: 16397 - DNA, 23 bp, Artificial Sequence
  Description of Artificial Sequence: Synthetic oligonucleotide
  X-linked inhibitor of apoptosis (XIAP) siRNA
ttctaagagaagcaattggcttt

SEQ ID NO: 16398 - DNA, 23 bp, Artificial Sequence
  Description of Artificial Sequence: Synthetic oligonucleotide
  X-linked inhibitor of apoptosis (XIAP) siRNA
tctaagagaagcaattggctttt

SEQ ID NO: 16399 - DNA, 23 bp, Artificial Sequence
  Description of Artificial Sequence: Synthetic oligonucleotide
  X-linked inhibitor of apoptosis (XIAP) siRNA
ctaagagaagcaattggcttttt

SEQ ID NO: 16400 - DNA, 23 bp, Artificial Sequence
  Description of Artificial Sequence: Synthetic oligonucleotide
  X-linked inhibitor of apoptosis (XIAP) siRNA
taagagaagcaattggctttttc

SEQ ID NO: 16401 - DNA, 23 bp, Artificial Sequence
  Description of Artificial Sequence: Synthetic oligonucleotide
  X-linked inhibitor of apoptosis (XIAP) siRNA
aagagaagcaattggctttttcc

SEQ ID NO: 16402 - DNA, 23 bp, Artificial Sequence
  Description of Artificial Sequence: Synthetic oligonucleotide
  X-linked inhibitor of apoptosis (XIAP) siRNA
agagaagcaattggctttttccc

SEQ ID NO: 16403 - DNA, 23 bp, Artificial Sequence
  Description of Artificial Sequence: Synthetic oligonucleotide
  X-linked inhibitor of apoptosis (XIAP) siRNA
gagaagcaattggctttttccca

SEQ ID NO: 16404 - DNA, 23 bp, Artificial Sequence
  Description of Artificial Sequence: Synthetic oligonucleotide
  X-linked inhibitor of apoptosis (XIAP) siRNA
agaagcaattggctttttcccac

SEQ ID NO: 16405 - DNA, 23 bp, Artificial Sequence
  Description of Artificial Sequence: Synthetic oligonucleotide
  X-linked inhibitor of apoptosis (XIAP) siRNA
gaagcaattggctttttcccact

SEQ ID NO: 16406 - DNA, 23 bp, Artificial Sequence
  Description of Artificial Sequence: Synthetic oligonucleotide
  X-linked inhibitor of apoptosis (XIAP) siRNA
aagcaattggctttttcccactt

SEQ ID NO: 16407 - DNA, 23 bp, Artificial Sequence
  Description of Artificial Sequence: Synthetic oligonucleotide
  X-linked inhibitor of apoptosis (XIAP) siRNA
agcaattggctttttcccacttc

SEQ ID NO: 16408 - DNA, 23 bp, Artificial Sequence
  Description of Artificial Sequence: Synthetic oligonucleotide
  X-linked inhibitor of apoptosis (XIAP) siRNA
gcaattggctttttcccacttca

SEQ ID NO: 16409 - DNA, 23 bp, Artificial Sequence
  Description of Artificial Sequence: Synthetic oligonucleotide
  X-linked inhibitor of apoptosis (XIAP) siRNA
caattggctttttcccacttcaa

SEQ ID NO: 16410 - DNA, 23 bp, Artificial Sequence
  Description of Artificial Sequence: Synthetic oligonucleotide
  X-linked inhibitor of apoptosis (XIAP) siRNA
aattggctttttcccacttcaat

SEQ ID NO: 16411 - DNA, 23 bp, Artificial Sequence
  Description of Artificial Sequence: Synthetic oligonucleotide
  X-linked inhibitor of apoptosis (XIAP) siRNA
attggctttttcccacttcaata

SEQ ID NO: 16412 - DNA, 23 bp, Artificial Sequence
  Description of Artificial Sequence: Synthetic oligonucleotide
  X-linked inhibitor of apoptosis (XIAP) siRNA
ttggctttttcccacttcaataa

SEQ ID NO: 16413 - DNA, 23 bp, Artificial Sequence
  Description of Artificial Sequence: Synthetic oligonucleotide
  X-linked inhibitor of apoptosis (XIAP) siRNA
tggctttttcccacttcaataat

SEQ ID NO: 16414 - DNA, 23 bp, Artificial Sequence
  Description of Artificial Sequence: Synthetic oligonucleotide
  X-linked inhibitor of apoptosis (XIAP) siRNA
ggctttttcccacttcaataatc

SEQ ID NO: 16415 - DNA, 23 bp, Artificial Sequence
  Description of Artificial Sequence: Synthetic oligonucleotide
  X-linked inhibitor of apoptosis (XIAP) siRNA
gctttttcccacttcaataatca

SEQ ID NO: 16416 - DNA, 23 bp, Artificial Sequence
  Description of Artificial Sequence: Synthetic oligonucleotide
  X-linked inhibitor of apoptosis (XIAP) siRNA
ctttttcccacttcaataatcat

SEQ ID NO: 16417 - DNA, 23 bp, Artificial Sequence
  Description of Artificial Sequence: Synthetic oligonucleotide
  X-linked inhibitor of apoptosis (XIAP) siRNA
tttttcccacttcaataatcatt

SEQ ID NO: 16418 - DNA, 23 bp, Artificial Sequence
  Description of Artificial Sequence: Synthetic oligonucleotide
  X-linked inhibitor of apoptosis (XIAP) siRNA
ttttcccacttcaataatcattt

SEQ ID NO: 16419 - DNA, 23 bp, Artificial Sequence
  Description of Artificial Sequence: Synthetic oligonucleotide
  X-linked inhibitor of apoptosis (XIAP) siRNA
tttcccacttcaataatcatttt

SEQ ID NO: 16420 - DNA, 23 bp, Artificial Sequence
  Description of Artificial Sequence: Synthetic oligonucleotide
  X-linked inhibitor of apoptosis (XIAP) siRNA
ttcccacttcaataatcattttc

SEQ ID NO: 16421 - DNA, 23 bp, Artificial Sequence
  Description of Artificial Sequence: Synthetic oligonucleotide
  X-linked inhibitor of apoptosis (XIAP) siRNA
tcccacttcaataatcattttca

SEQ ID NO: 16422 - DNA, 23 bp, Artificial Sequence
  Description of Artificial Sequence: Synthetic oligonucleotide
  X-linked inhibitor of apoptosis (XIAP) siRNA
cccacttcaataatcattttcag

SEQ ID NO: 16423 - DNA, 23 bp, Artificial Sequence
  Description of Artificial Sequence: Synthetic oligonucleotide
  X-linked inhibitor of apoptosis (XIAP) siRNA
ccacttcaataatcattttcagt

SEQ ID NO: 16424 - DNA, 23 bp, Artificial Sequence
  Description of Artificial Sequence: Synthetic oligonucleotide
  X-linked inhibitor of apoptosis (XIAP) siRNA
cacttcaataatcattttcagtt

SEQ ID NO: 16425 - DNA, 23 bp, Artificial Sequence
  Description of Artificial Sequence: Synthetic oligonucleotide
  X-linked inhibitor of apoptosis (XIAP) siRNA
acttcaataatcattttcagttt

SEQ ID NO: 16426 - DNA, 23 bp, Artificial Sequence
  Description of Artificial Sequence: Synthetic oligonucleotide
  X-linked inhibitor of apoptosis (XIAP) siRNA
cttcaataatcattttcagtttg

SEQ ID NO: 16427 - DNA, 23 bp, Artificial Sequence
  Description of Artificial Sequence: Synthetic oligonucleotide
  X-linked inhibitor of apoptosis (XIAP) siRNA
ttcaataatcattttcagtttga

SEQ ID NO: 16428 - DNA, 23 bp, Artificial Sequence
  Description of Artificial Sequence: Synthetic oligonucleotide
  X-linked inhibitor of apoptosis (XIAP) siRNA
tcaataatcattttcagtttgac

SEQ ID NO: 16429 - DNA, 23 bp, Artificial Sequence
  Description of Artificial Sequence: Synthetic oligonucleotide
  X-linked inhibitor of apoptosis (XIAP) siRNA
caataatcattttcagtttgact

SEQ ID NO: 16430 - DNA, 23 bp, Artificial Sequence
  Description of Artificial Sequence: Synthetic oligonucleotide
  X-linked inhibitor of apoptosis (XIAP) siRNA
aataatcattttcagtttgactc

SEQ ID NO: 16431 - DNA, 23 bp, Artificial Sequence
  Description of Artificial Sequence: Synthetic oligonucleotide
  X-linked inhibitor of apoptosis (XIAP) siRNA
ataatcattttcagtttgactca

SEQ ID NO: 16432 - DNA, 23 bp, Artificial Sequence
  Description of Artificial Sequence: Synthetic oligonucleotide
  X-linked inhibitor of apoptosis (XIAP) siRNA
taatcattttcagtttgactcat

SEQ ID NO: 16433 - DNA, 23 bp, Artificial Sequence
  Description of Artificial Sequence: Synthetic oligonucleotide
  X-linked inhibitor of apoptosis (XIAP) siRNA
aatcattttcagtttgactcata

SEQ ID NO: 16434 - DNA, 23 bp, Artificial Sequence
  Description of Artificial Sequence: Synthetic oligonucleotide
  X-linked inhibitor of apoptosis (XIAP) siRNA
atcattttcagtttgactcatac

SEQ ID NO: 16435 - DNA, 23 bp, Artificial Sequence
  Description of Artificial Sequence: Synthetic oligonucleotide
  X-linked inhibitor of apoptosis (XIAP) siRNA
tcattttcagtttgactcataca

SEQ ID NO: 16436 - DNA, 23 bp, Artificial Sequence
  Description of Artificial Sequence: Synthetic oligonucleotide
  X-linked inhibitor of apoptosis (XIAP) siRNA
cattttcagtttgactcatacag

SEQ ID NO: 16437 - DNA, 23 bp, Artificial Sequence
  Description of Artificial Sequence: Synthetic oligonucleotide
  X-linked inhibitor of apoptosis (XIAP) siRNA
attttcagtttgactcatacagt

SEQ ID NO: 16438 - DNA, 23 bp, Artificial Sequence
  Description of Artificial Sequence: Synthetic oligonucleotide
  X-linked inhibitor of apoptosis (XIAP) siRNA
ttttcagtttgactcatacagtt

SEQ ID NO: 16439 - DNA, 23 bp, Artificial Sequence
  Description of Artificial Sequence: Synthetic oligonucleotide
  X-linked inhibitor of apoptosis (XIAP) siRNA
tttcagtttgactcatacagtta

SEQ ID NO: 16440 - DNA, 23 bp, Artificial Sequence
  Description of Artificial Sequence: Synthetic oligonucleotide
  X-linked inhibitor of apoptosis (XIAP) siRNA
ttcagtttgactcatacagttaa

SEQ ID NO: 16441 - DNA, 23 bp, Artificial Sequence
  Description of Artificial Sequence: Synthetic oligonucleotide
  X-linked inhibitor of apoptosis (XIAP) siRNA
tcagtttgactcatacagttaac

SEQ ID NO: 16442 - DNA, 23 bp, Artificial Sequence
  Description of Artificial Sequence: Synthetic oligonucleotide
  X-linked inhibitor of apoptosis (XIAP) siRNA
cagtttgactcatacagttaaca

SEQ ID NO: 16443 - DNA, 23 bp, Artificial Sequence
  Description of Artificial Sequence: Synthetic oligonucleotide
  X-linked inhibitor of apoptosis (XIAP) siRNA
agtttgactcatacagttaacac

SEQ ID NO: 16444 - DNA, 23 bp, Artificial Sequence
  Description of Artificial Sequence: Synthetic oligonucleotide
  X-linked inhibitor of apoptosis (XIAP) siRNA
gtttgactcatacagttaacaca

SEQ ID NO: 16445 - DNA, 23 bp, Artificial Sequence
  Description of Artificial Sequence: Synthetic oligonucleotide
  X-linked inhibitor of apoptosis (XIAP) siRNA
tttgactcatacagttaacacaa

SEQ ID NO: 16446 - DNA, 23 bp, Artificial Sequence
  Description of Artificial Sequence: Synthetic oligonucleotide
  X-linked inhibitor of apoptosis (XIAP) siRNA
ttgactcatacagttaacacaat

SEQ ID NO: 16447 - DNA, 23 bp, Artificial Sequence
  Description of Artificial Sequence: Synthetic oligonucleotide
  X-linked inhibitor of apoptosis (XIAP) siRNA
tgactcatacagttaacacaatg

SEQ ID NO: 16448 - DNA, 23 bp, Artificial Sequence
  Description of Artificial Sequence: Synthetic oligonucleotide
  X-linked inhibitor of apoptosis (XIAP) siRNA
gactcatacagttaacacaatgt

SEQ ID NO: 16449 - DNA, 23 bp, Artificial Sequence
  Description of Artificial Sequence: Synthetic oligonucleotide
  X-linked inhibitor of apoptosis (XIAP) siRNA
actcatacagttaacacaatgtg

SEQ ID NO: 16450 - DNA, 23 bp, Artificial Sequence
  Description of Artificial Sequence: Synthetic oligonucleotide
  X-linked inhibitor of apoptosis (XIAP) siRNA
ctcatacagttaacacaatgtga

SEQ ID NO: 16451 - DNA, 23 bp, Artificial Sequence
  Description of Artificial Sequence: Synthetic oligonucleotide
  X-linked inhibitor of apoptosis (XIAP) siRNA
tcatacagttaacacaatgtgaa

SEQ ID NO: 16452 - DNA, 23 bp, Artificial Sequence
  Description of Artificial Sequence: Synthetic oligonucleotide
  X-linked inhibitor of apoptosis (XIAP) siRNA
catacagttaacacaatgtgaat

SEQ ID NO: 16453 - DNA, 23 bp, Artificial Sequence
  Description of Artificial Sequence: Synthetic oligonucleotide
  X-linked inhibitor of apoptosis (XIAP) siRNA
atacagttaacacaatgtgaatt

SEQ ID NO: 16454 - DNA, 23 bp, Artificial Sequence
  Description of Artificial Sequence: Synthetic oligonucleotide
  X-linked inhibitor of apoptosis (XIAP) siRNA
tacagttaacacaatgtgaattt

SEQ ID NO: 16455 - DNA, 23 bp, Artificial Sequence
  Description of Artificial Sequence: Synthetic oligonucleotide
  X-linked inhibitor of apoptosis (XIAP) siRNA
acagttaacacaatgtgaatttc

SEQ ID NO: 16456 - DNA, 23 bp, Artificial Sequence
  Description of Artificial Sequence: Synthetic oligonucleotide
  X-linked inhibitor of apoptosis (XIAP) siRNA
cagttaacacaatgtgaatttct

SEQ ID NO: 16457 - DNA, 23 bp, Artificial Sequence
  Description of Artificial Sequence: Synthetic oligonucleotide
  X-linked inhibitor of apoptosis (XIAP) siRNA
agttaacacaatgtgaatttctt

SEQ ID NO: 16458 - DNA, 23 bp, Artificial Sequence
  Description of Artificial Sequence: Synthetic oligonucleotide
  X-linked inhibitor of apoptosis (XIAP) siRNA
gttaacacaatgtgaatttcttc

SEQ ID NO: 16459 - DNA, 23 bp, Artificial Sequence
  Description of Artificial Sequence: Synthetic oligonucleotide
  X-linked inhibitor of apoptosis (XIAP) siRNA
ttaacacaatgtgaatttcttcc

SEQ ID NO: 16460 - DNA, 23 bp, Artificial Sequence
  Description of Artificial Sequence: Synthetic oligonucleotide
  X-linked inhibitor of apoptosis (XIAP) siRNA
taacacaatgtgaatttcttcct

SEQ ID NO: 16461 - DNA, 23 bp, Artificial Sequence
  Description of Artificial Sequence: Synthetic oligonucleotide
  X-linked inhibitor of apoptosis (XIAP) siRNA
aacacaatgtgaatttcttcctc

SEQ ID NO: 16462 - DNA, 23 bp, Artificial Sequence
  Description of Artificial Sequence: Synthetic oligonucleotide
  X-linked inhibitor of apoptosis (XIAP) siRNA
acacaatgtgaatttcttcctca

SEQ ID NO: 16463 - DNA, 23 bp, Artificial Sequence
  Description of Artificial Sequence: Synthetic oligonucleotide
  X-linked inhibitor of apoptosis (XIAP) siRNA
cacaatgtgaatttcttcctcag

SEQ ID NO: 16464 - DNA, 23 bp, Artificial Sequence
  Description of Artificial Sequence: Synthetic oligonucleotide
  X-linked inhibitor of apoptosis (XIAP) siRNA
acaatgtgaatttcttcctcagc

SEQ ID NO: 16465 - DNA, 23 bp, Artificial Sequence
  Description of Artificial Sequence: Synthetic oligonucleotide
  X-linked inhibitor of apoptosis (XIAP) siRNA
caatgtgaatttcttcctcagca

SEQ ID NO: 16466 - DNA, 23 bp, Artificial Sequence
  Description of Artificial Sequence: Synthetic oligonucleotide
  X-linked inhibitor of apoptosis (XIAP) siRNA
aatgtgaatttcttcctcagcat

SEQ ID NO: 16467 - DNA, 23 bp, Artificial Sequence
  Description of Artificial Sequence: Synthetic oligonucleotide
  X-linked inhibitor of apoptosis (XIAP) siRNA
atgtgaatttcttcctcagcata

SEQ ID NO: 16468 - DNA, 23 bp, Artificial Sequence
  Description of Artificial Sequence: Synthetic oligonucleotide
  X-linked inhibitor of apoptosis (XIAP) siRNA
tgtgaatttcttcctcagcataa

SEQ ID NO: 16469 - DNA, 23 bp, Artificial Sequence
  Description of Artificial Sequence: Synthetic oligonucleotide
  X-linked inhibitor of apoptosis (XIAP) siRNA
gtgaatttcttcctcagcataac

SEQ ID NO: 16470 - DNA, 23 bp, Artificial Sequence
  Description of Artificial Sequence: Synthetic oligonucleotide
  X-linked inhibitor of apoptosis (XIAP) siRNA
tgaatttcttcctcagcataaca

SEQ ID NO: 16471 - DNA, 23 bp, Artificial Sequence
  Description of Artificial Sequence: Synthetic oligonucleotide
  X-linked inhibitor of apoptosis (XIAP) siRNA
gaatttcttcctcagcataacag

SEQ ID NO: 16472 - DNA, 23 bp, Artificial Sequence
  Description of Artificial Sequence: Synthetic oligonucleotide
  X-linked inhibitor of apoptosis (XIAP) siRNA
aatttcttcctcagcataacaga

SEQ ID NO: 16473 - DNA, 23 bp, Artificial Sequence
  Description of Artificial Sequence: Synthetic oligonucleotide
  X-linked inhibitor of apoptosis (XIAP) siRNA
atttcttcctcagcataacagag

SEQ ID NO: 16474 - DNA, 23 bp, Artificial Sequence
  Description of Artificial Sequence: Synthetic oligonucleotide
  X-linked inhibitor of apoptosis (XIAP) siRNA
tttcttcctcagcataacagagt

SEQ ID NO: 16475 - DNA, 23 bp, Artificial Sequence
  Description of Artificial Sequence: Synthetic oligonucleotide
  X-linked inhibitor of apoptosis (XIAP) siRNA
ttcttcctcagcataacagagtt

SEQ ID NO: 16476 - DNA, 23 bp, Artificial Sequence
  Description of Artificial Sequence: Synthetic oligonucleotide
  X-linked inhibitor of apoptosis (XIAP) siRNA
tcttcctcagcataacagagtta

SEQ ID NO: 16477 - DNA, 23 bp, Artificial Sequence
  Description of Artificial Sequence: Synthetic oligonucleotide
  X-linked inhibitor of apoptosis (XIAP) siRNA
cttcctcagcataacagagttat

SEQ ID NO: 16478 - DNA, 23 bp, Artificial Sequence
  Description of Artificial Sequence: Synthetic oligonucleotide
  X-linked inhibitor of apoptosis (XIAP) siRNA
ttcctcagcataacagagttata

SEQ ID NO: 16479 - DNA, 23 bp, Artificial Sequence
  Description of Artificial Sequence: Synthetic oligonucleotide
  X-linked inhibitor of apoptosis (XIAP) siRNA
tcctcagcataacagagttatag

SEQ ID NO: 16480 - DNA, 23 bp, Artificial Sequence
  Description of Artificial Sequence: Synthetic oligonucleotide
  X-linked inhibitor of apoptosis (XIAP) siRNA
cctcagcataacagagttataga

SEQ ID NO: 16481 - DNA, 23 bp, Artificial Sequence
  Description of Artificial Sequence: Synthetic oligonucleotide
  X-linked inhibitor of apoptosis (XIAP) siRNA
ctcagcataacagagttatagaa

SEQ ID NO: 16482 - DNA, 23 bp, Artificial Sequence
  Description of Artificial Sequence: Synthetic oligonucleotide
  X-linked inhibitor of apoptosis (XIAP) siRNA
tcagcataacagagttatagaat

SEQ ID NO: 16483 - DNA, 23 bp, Artificial Sequence
  Description of Artificial Sequence: Synthetic oligonucleotide
  X-linked inhibitor of apoptosis (XIAP) siRNA
cagcataacagagttatagaatg

SEQ ID NO: 16484 - DNA, 23 bp, Artificial Sequence
  Description of Artificial Sequence: Synthetic oligonucleotide
  X-linked inhibitor of apoptosis (XIAP) siRNA
agcataacagagttatagaatga

SEQ ID NO: 16485 - DNA, 23 bp, Artificial Sequence
  Description of Artificial Sequence: Synthetic oligonucleotide
  X-linked inhibitor of apoptosis (XIAP) siRNA
gcataacagagttatagaatgac

SEQ ID NO: 16486 - DNA, 23 bp, Artificial Sequence
  Description of Artificial Sequence: Synthetic oligonucleotide
  X-linked inhibitor of apoptosis (XIAP) siRNA
cataacagagttatagaatgaca

SEQ ID NO: 16487 - DNA, 23 bp, Artificial Sequence
  Description of Artificial Sequence: Synthetic oligonucleotide
  X-linked inhibitor of apoptosis (XIAP) siRNA
ataacagagttatagaatgacag

SEQ ID NO: 16488 - DNA, 23 bp, Artificial Sequence
  Description of Artificial Sequence: Synthetic oligonucleotide
  X-linked inhibitor of apoptosis (XIAP) siRNA
taacagagttatagaatgacagg

SEQ ID NO: 16489 - DNA, 23 bp, Artificial Sequence
  Description of Artificial Sequence: Synthetic oligonucleotide
  X-linked inhibitor of apoptosis (XIAP) siRNA
aacagagttatagaatgacaggg

SEQ ID NO: 16490 - DNA, 23 bp, Artificial Sequence
  Description of Artificial Sequence: Synthetic oligonucleotide
  X-linked inhibitor of apoptosis (XIAP) siRNA
acagagttatagaatgacagggc

SEQ ID NO: 16491 - DNA, 23 bp, Artificial Sequence
  Description of Artificial Sequence: Synthetic oligonucleotide
  X-linked inhibitor of apoptosis (XIAP) siRNA
cagagttatagaatgacagggct

SEQ ID NO: 16492 - DNA, 23 bp, Artificial Sequence
  Description of Artificial Sequence: Synthetic oligonucleotide
  X-linked inhibitor of apoptosis (XIAP) siRNA
agagttatagaatgacagggctg

SEQ ID NO: 16493 - DNA, 23 bp, Artificial Sequence
  Description of Artificial Sequence: Synthetic oligonucleotide
  X-linked inhibitor of apoptosis (XIAP) siRNA
gagttatagaatgacagggctgg

SEQ ID NO: 16494 - DNA, 23 bp, Artificial Sequence
  Description of Artificial Sequence: Synthetic oligonucleotide
  X-linked inhibitor of apoptosis (XIAP) siRNA
agttatagaatgacagggctgga

SEQ ID NO: 16495 - DNA, 23 bp, Artificial Sequence
  Description of Artificial Sequence: Synthetic oligonucleotide
  X-linked inhibitor of apoptosis (XIAP) siRNA
gttatagaatgacagggctggaa

SEQ ID NO: 16496 - DNA, 23 bp, Artificial Sequence
  Description of Artificial Sequence: Synthetic oligonucleotide
  X-linked inhibitor of apoptosis (XIAP) siRNA
ttatagaatgacagggctggaag

SEQ ID NO: 16497 - DNA, 23 bp, Artificial Sequence
  Description of Artificial Sequence: Synthetic oligonucleotide
  X-linked inhibitor of apoptosis (XIAP) siRNA
tatagaatgacagggctggaagt

SEQ ID NO: 16498 - DNA, 23 bp, Artificial Sequence
  Description of Artificial Sequence: Synthetic oligonucleotide
  X-linked inhibitor of apoptosis (XIAP) siRNA
atagaatgacagggctggaagtg

SEQ ID NO: 16499 - DNA, 23 bp, Artificial Sequence
  Description of Artificial Sequence: Synthetic oligonucleotide
  X-linked inhibitor of apoptosis (XIAP) siRNA
tagaatgacagggctggaagtga

SEQ ID NO: 16500 - DNA, 23 bp, Artificial Sequence
  Description of Artificial Sequence: Synthetic oligonucleotide
  X-linked inhibitor of apoptosis (XIAP) siRNA
agaatgacagggctggaagtgac

SEQ ID NO: 16501 - DNA, 23 bp, Artificial Sequence
  Description of Artificial Sequence: Synthetic oligonucleotide
  X-linked inhibitor of apoptosis (XIAP) siRNA
gaatgacagggctggaagtgacc

SEQ ID NO: 16502 - DNA, 23 bp, Artificial Sequence
  Description of Artificial Sequence: Synthetic oligonucleotide
  X-linked inhibitor of apoptosis (XIAP) siRNA
aatgacagggctggaagtgacct

SEQ ID NO: 16503 - DNA, 23 bp, Artificial Sequence
  Description of Artificial Sequence: Synthetic oligonucleotide
  X-linked inhibitor of apoptosis (XIAP) siRNA
atgacagggctggaagtgacctt

SEQ ID NO: 16504 - DNA, 23 bp, Artificial Sequence
  Description of Artificial Sequence: Synthetic oligonucleotide
  X-linked inhibitor of apoptosis (XIAP) siRNA
tgacagggctggaagtgacctta

SEQ ID NO: 16505 - DNA, 23 bp, Artificial Sequence
  Description of Artificial Sequence: Synthetic oligonucleotide
  X-linked inhibitor of apoptosis (XIAP) siRNA
gacagggctggaagtgaccttag

SEQ ID NO: 16506 - DNA, 23 bp, Artificial Sequence
  Description of Artificial Sequence: Synthetic oligonucleotide
  X-linked inhibitor of apoptosis (XIAP) siRNA
acagggctggaagtgaccttaga

SEQ ID NO: 16507 - DNA, 23 bp, Artificial Sequence
  Description of Artificial Sequence: Synthetic oligonucleotide
  X-linked inhibitor of apoptosis (XIAP) siRNA
cagggctggaagtgaccttagag

SEQ ID NO: 16508 - DNA, 23 bp, Artificial Sequence
  Description of Artificial Sequence: Synthetic oligonucleotide
  X-linked inhibitor of apoptosis (XIAP) siRNA
agggctggaagtgaccttagaga

SEQ ID NO: 16509 - DNA, 23 bp, Artificial Sequence
  Description of Artificial Sequence: Synthetic oligonucleotide
  X-linked inhibitor of apoptosis (XIAP) siRNA
gggctggaagtgaccttagagag

SEQ ID NO: 16510 - DNA, 23 bp, Artificial Sequence
  Description of Artificial Sequence: Synthetic oligonucleotide
  X-linked inhibitor of apoptosis (XIAP) siRNA
ggctggaagtgaccttagagagt

SEQ ID NO: 16511 - DNA, 23 bp, Artificial Sequence
  Description of Artificial Sequence: Synthetic oligonucleotide
  X-linked inhibitor of apoptosis (XIAP) siRNA
gctggaagtgaccttagagagta

SEQ ID NO: 16512 - DNA, 23 bp, Artificial Sequence
  Description of Artificial Sequence: Synthetic oligonucleotide
  X-linked inhibitor of apoptosis (XIAP) siRNA
ctggaagtgaccttagagagtat

SEQ ID NO: 16513 - DNA, 23 bp, Artificial Sequence
  Description of Artificial Sequence: Synthetic oligonucleotide
  X-linked inhibitor of apoptosis (XIAP) siRNA
tggaagtgaccttagagagtatc

SEQ ID NO: 16514 - DNA, 23 bp, Artificial Sequence
  Description of Artificial Sequence: Synthetic oligonucleotide
  X-linked inhibitor of apoptosis (XIAP) siRNA
ggaagtgaccttagagagtatcc

SEQ ID NO: 16515 - DNA, 23 bp, Artificial Sequence
  Description of Artificial Sequence: Synthetic oligonucleotide
  X-linked inhibitor of apoptosis (XIAP) siRNA
gaagtgaccttagagagtatcca

SEQ ID NO: 16516 - DNA, 23 bp, Artificial Sequence
  Description of Artificial Sequence: Synthetic oligonucleotide
  X-linked inhibitor of apoptosis (XIAP) siRNA
aagtgaccttagagagtatccag

SEQ ID NO: 16517 - DNA, 23 bp, Artificial Sequence
  Description of Artificial Sequence: Synthetic oligonucleotide
  X-linked inhibitor of apoptosis (XIAP) siRNA
agtgaccttagagagtatccagt

SEQ ID NO: 16518 - DNA, 23 bp, Artificial Sequence
  Description of Artificial Sequence: Synthetic oligonucleotide
  X-linked inhibitor of apoptosis (XIAP) siRNA
gtgaccttagagagtatccagtt

SEQ ID NO: 16519 - DNA, 23 bp, Artificial Sequence
  Description of Artificial Sequence: Synthetic oligonucleotide
  X-linked inhibitor of apoptosis (XIAP) siRNA
tgaccttagagagtatccagttc

SEQ ID NO: 16520 - DNA, 23 bp, Artificial Sequence
  Description of Artificial Sequence: Synthetic oligonucleotide
  X-linked inhibitor of apoptosis (XIAP) siRNA
gaccttagagagtatccagttct

SEQ ID NO: 16521 - DNA, 23 bp, Artificial Sequence
  Description of Artificial Sequence: Synthetic oligonucleotide
  X-linked inhibitor of apoptosis (XIAP) siRNA
accttagagagtatccagttctt

SEQ ID NO: 16522 - DNA, 23 bp, Artificial Sequence
  Description of Artificial Sequence: Synthetic oligonucleotide
  X-linked inhibitor of apoptosis (XIAP) siRNA
ccttagagagtatccagttcttt

SEQ ID NO: 16523 - DNA, 23 bp, Artificial Sequence
  Description of Artificial Sequence: Synthetic oligonucleotide
  X-linked inhibitor of apoptosis (XIAP) siRNA
cttagagagtatccagttctttc

SEQ ID NO: 16524 - DNA, 23 bp, Artificial Sequence
  Description of Artificial Sequence: Synthetic oligonucleotide
  X-linked inhibitor of apoptosis (XIAP) siRNA
ttagagagtatccagttctttca

SEQ ID NO: 16525 - DNA, 23 bp, Artificial Sequence
  Description of Artificial Sequence: Synthetic oligonucleotide
  X-linked inhibitor of apoptosis (XIAP) siRNA
tagagagtatccagttctttcat

SEQ ID NO: 16526 - DNA, 23 bp, Artificial Sequence
  Description of Artificial Sequence: Synthetic oligonucleotide
  X-linked inhibitor of apoptosis (XIAP) siRNA
agagagtatccagttctttcatt

SEQ ID NO: 16527 - DNA, 23 bp, Artificial Sequence
  Description of Artificial Sequence: Synthetic oligonucleotide
  X-linked inhibitor of apoptosis (XIAP) siRNA
gagagtatccagttctttcattt

SEQ ID NO: 16528 - DNA, 23 bp, Artificial Sequence
  Description of Artificial Sequence: Synthetic oligonucleotide
  X-linked inhibitor of apoptosis (XIAP) siRNA
agagtatccagttctttcatttt

SEQ ID NO: 16529 - DNA, 23 bp, Artificial Sequence
  Description of Artificial Sequence: Synthetic oligonucleotide
  X-linked inhibitor of apoptosis (XIAP) siRNA
gagtatccagttctttcatttta

SEQ ID NO: 16530 - DNA, 23 bp, Artificial Sequence
  Description of Artificial Sequence: Synthetic oligonucleotide
  X-linked inhibitor of apoptosis (XIAP) siRNA
agtatccagttctttcattttac

SEQ ID NO: 16531 - DNA, 23 bp, Artificial Sequence
  Description of Artificial Sequence: Synthetic oligonucleotide
  X-linked inhibitor of apoptosis (XIAP) siRNA
gtatccagttctttcattttaca

SEQ ID NO: 16532 - DNA, 23 bp, Artificial Sequence
  Description of Artificial Sequence: Synthetic oligonucleotide
  X-linked inhibitor of apoptosis (XIAP) siRNA
tatccagttctttcattttacag

SEQ ID NO: 16533 - DNA, 23 bp, Artificial Sequence
  Description of Artificial Sequence: Synthetic oligonucleotide
  X-linked inhibitor of apoptosis (XIAP) siRNA
atccagttctttcattttacagg

SEQ ID NO: 16534 - DNA, 23 bp, Artificial Sequence
  Description of Artificial Sequence: Synthetic oligonucleotide
  X-linked inhibitor of apoptosis (XIAP) siRNA
tccagttctttcattttacaggt

SEQ ID NO: 16535 - DNA, 23 bp, Artificial Sequence
  Description of Artificial Sequence: Synthetic oligonucleotide
  X-linked inhibitor of apoptosis (XIAP) siRNA
ccagttctttcattttacaggtg

SEQ ID NO: 16536 - DNA, 23 bp, Artificial Sequence
  Description of Artificial Sequence: Synthetic oligonucleotide
  X-linked inhibitor of apoptosis (XIAP) siRNA
cagttctttcattttacaggtga

SEQ ID NO: 16537 - DNA, 23 bp, Artificial Sequence
  Description of Artificial Sequence: Synthetic oligonucleotide
  X-linked inhibitor of apoptosis (XIAP) siRNA
agttctttcattttacaggtgag

SEQ ID NO: 16538 - DNA, 23 bp, Artificial Sequence
  Description of Artificial Sequence: Synthetic oligonucleotide
  X-linked inhibitor of apoptosis (XIAP) siRNA
gttctttcattttacaggtgagg

SEQ ID NO: 16539 - DNA, 23 bp, Artificial Sequence
  Description of Artificial Sequence: Synthetic oligonucleotide
  X-linked inhibitor of apoptosis (XIAP) siRNA
ttctttcattttacaggtgaggc

SEQ ID NO: 16540 - DNA, 23 bp, Artificial Sequence
  Description of Artificial Sequence: Synthetic oligonucleotide
  X-linked inhibitor of apoptosis (XIAP) siRNA
tctttcattttacaggtgaggca

SEQ ID NO: 16541 - DNA, 23 bp, Artificial Sequence
  Description of Artificial Sequence: Synthetic oligonucleotide
  X-linked inhibitor of apoptosis (XIAP) siRNA
ctttcattttacaggtgaggcaa

SEQ ID NO: 16542 - DNA, 23 bp, Artificial Sequence
  Description of Artificial Sequence: Synthetic oligonucleotide
  X-linked inhibitor of apoptosis (XIAP) siRNA
tttcattttacaggtgaggcaac

SEQ ID NO: 16543 - DNA, 23 bp, Artificial Sequence
  Description of Artificial Sequence: Synthetic oligonucleotide
  X-linked inhibitor of apoptosis (XIAP) siRNA
ttcattttacaggtgaggcaact

SEQ ID NO: 16544 - DNA, 23 bp, Artificial Sequence
  Description of Artificial Sequence: Synthetic oligonucleotide
  X-linked inhibitor of apoptosis (XIAP) siRNA
tcattttacaggtgaggcaactg

SEQ ID NO: 16545 - DNA, 23 bp, Artificial Sequence
  Description of Artificial Sequence: Synthetic oligonucleotide
  X-linked inhibitor of apoptosis (XIAP) siRNA
cattttacaggtgaggcaactga

SEQ ID NO: 16546 - DNA, 23 bp, Artificial Sequence
  Description of Artificial Sequence: Synthetic oligonucleotide
  X-linked inhibitor of apoptosis (XIAP) siRNA
attttacaggtgaggcaactgag

SEQ ID NO: 16547 - DNA, 23 bp, Artificial Sequence
  Description of Artificial Sequence: Synthetic oligonucleotide
  X-linked inhibitor of apoptosis (XIAP) siRNA
ttttacaggtgaggcaactgaga

SEQ ID NO: 16548 - DNA, 23 bp, Artificial Sequence
  Description of Artificial Sequence: Synthetic oligonucleotide
  X-linked inhibitor of apoptosis (XIAP) siRNA
tttacaggtgaggcaactgagac

SEQ ID NO: 16549 - DNA, 23 bp, Artificial Sequence
  Description of Artificial Sequence: Synthetic oligonucleotide
  X-linked inhibitor of apoptosis (XIAP) siRNA
ttacaggtgaggcaactgagact

SEQ ID NO: 16550 - DNA, 23 bp, Artificial Sequence
  Description of Artificial Sequence: Synthetic oligonucleotide
  X-linked inhibitor of apoptosis (XIAP) siRNA
tacaggtgaggcaactgagactc

SEQ ID NO: 16551 - DNA, 23 bp, Artificial Sequence
  Description of Artificial Sequence: Synthetic oligonucleotide
  X-linked inhibitor of apoptosis (XIAP) siRNA
acaggtgaggcaactgagactca

SEQ ID NO: 16552 - DNA, 23 bp, Artificial Sequence
  Description of Artificial Sequence: Synthetic oligonucleotide
  X-linked inhibitor of apoptosis (XIAP) siRNA
caggtgaggcaactgagactcaa

SEQ ID NO: 16553 - DNA, 23 bp, Artificial Sequence
  Description of Artificial Sequence: Synthetic oligonucleotide
  X-linked inhibitor of apoptosis (XIAP) siRNA
aggtgaggcaactgagactcaaa

SEQ ID NO: 16554 - DNA, 23 bp, Artificial Sequence
  Description of Artificial Sequence: Synthetic oligonucleotide
  X-linked inhibitor of apoptosis (XIAP) siRNA
ggtgaggcaactgagactcaaag

SEQ ID NO: 16555 - DNA, 23 bp, Artificial Sequence
  Description of Artificial Sequence: Synthetic oligonucleotide
  X-linked inhibitor of apoptosis (XIAP) siRNA
gtgaggcaactgagactcaaagg

SEQ ID NO: 16556 - DNA, 23 bp, Artificial Sequence
  Description of Artificial Sequence: Synthetic oligonucleotide
  X-linked inhibitor of apoptosis (XIAP) siRNA
tgaggcaactgagactcaaaggt

SEQ ID NO: 16557 - DNA, 23 bp, Artificial Sequence
  Description of Artificial Sequence: Synthetic oligonucleotide
  X-linked inhibitor of apoptosis (XIAP) siRNA
gaggcaactgagactcaaaggtg

SEQ ID NO: 16558 - DNA, 23 bp, Artificial Sequence
  Description of Artificial Sequence: Synthetic oligonucleotide
  X-linked inhibitor of apoptosis (XIAP) siRNA
aggcaactgagactcaaaggtga

SEQ ID NO: 16559 - DNA, 23 bp, Artificial Sequence
  Description of Artificial Sequence: Synthetic oligonucleotide
  X-linked inhibitor of apoptosis (XIAP) siRNA
ggcaactgagactcaaaggtgat

SEQ ID NO: 16560 - DNA, 23 bp, Artificial Sequence
  Description of Artificial Sequence: Synthetic oligonucleotide
  X-linked inhibitor of apoptosis (XIAP) siRNA
gcaactgagactcaaaggtgatg

SEQ ID NO: 16561 - DNA, 23 bp, Artificial Sequence
  Description of Artificial Sequence: Synthetic oligonucleotide
  X-linked inhibitor of apoptosis (XIAP) siRNA
caactgagactcaaaggtgatgt

SEQ ID NO: 16562 - DNA, 23 bp, Artificial Sequence
  Description of Artificial Sequence: Synthetic oligonucleotide
  X-linked inhibitor of apoptosis (XIAP) siRNA
aactgagactcaaaggtgatgta

SEQ ID NO: 16563 - DNA, 23 bp, Artificial Sequence
  Description of Artificial Sequence: Synthetic oligonucleotide
  X-linked inhibitor of apoptosis (XIAP) siRNA
actgagactcaaaggtgatgtaa

SEQ ID NO: 16564 - DNA, 23 bp, Artificial Sequence
  Description of Artificial Sequence: Synthetic oligonucleotide
  X-linked inhibitor of apoptosis (XIAP) siRNA
ctgagactcaaaggtgatgtaat

SEQ ID NO: 16565 - DNA, 23 bp, Artificial Sequence
  Description of Artificial Sequence: Synthetic oligonucleotide
  X-linked inhibitor of apoptosis (XIAP) siRNA
tgagactcaaaggtgatgtaatt

SEQ ID NO: 16566 - DNA, 23 bp, Artificial Sequence
  Description of Artificial Sequence: Synthetic oligonucleotide
  X-linked inhibitor of apoptosis (XIAP) siRNA
gagactcaaaggtgatgtaattt

SEQ ID NO: 16567 - DNA, 23 bp, Artificial Sequence
  Description of Artificial Sequence: Synthetic oligonucleotide
  X-linked inhibitor of apoptosis (XIAP) siRNA
agactcaaaggtgatgtaatttg

SEQ ID NO: 16568 - DNA, 23 bp, Artificial Sequence
  Description of Artificial Sequence: Synthetic oligonucleotide
  X-linked inhibitor of apoptosis (XIAP) siRNA
gactcaaaggtgatgtaatttgt

SEQ ID NO: 16569 - DNA, 23 bp, Artificial Sequence
  Description of Artificial Sequence: Synthetic oligonucleotide
  X-linked inhibitor of apoptosis (XIAP) siRNA
actcaaaggtgatgtaatttgtg

SEQ ID NO: 16570 - DNA, 23 bp, Artificial Sequence
  Description of Artificial Sequence: Synthetic oligonucleotide
  X-linked inhibitor of apoptosis (XIAP) siRNA
ctcaaaggtgatgtaatttgtgc

SEQ ID NO: 16571 - DNA, 23 bp, Artificial Sequence
  Description of Artificial Sequence: Synthetic oligonucleotide
  X-linked inhibitor of apoptosis (XIAP) siRNA
tcaaaggtgatgtaatttgtgca

SEQ ID NO: 16572 - DNA, 23 bp, Artificial Sequence
  Description of Artificial Sequence: Synthetic oligonucleotide
  X-linked inhibitor of apoptosis (XIAP) siRNA
caaaggtgatgtaatttgtgcaa

SEQ ID NO: 16573 - DNA, 23 bp, Artificial Sequence
  Description of Artificial Sequence: Synthetic oligonucleotide
  X-linked inhibitor of apoptosis (XIAP) siRNA
aaaggtgatgtaatttgtgcaaa

SEQ ID NO: 16574 - DNA, 23 bp, Artificial Sequence
  Description of Artificial Sequence: Synthetic oligonucleotide
  X-linked inhibitor of apoptosis (XIAP) siRNA
aaggtgatgtaatttgtgcaaag

SEQ ID NO: 16575 - DNA, 23 bp, Artificial Sequence
  Description of Artificial Sequence: Synthetic oligonucleotide
  X-linked inhibitor of apoptosis (XIAP) siRNA
aggtgatgtaatttgtgcaaaga

SEQ ID NO: 16576 - DNA, 23 bp, Artificial Sequence
  Description of Artificial Sequence: Synthetic oligonucleotide
  X-linked inhibitor of apoptosis (XIAP) siRNA
ggtgatgtaatttgtgcaaagat

SEQ ID NO: 16577 - DNA, 23 bp, Artificial Sequence
  Description of Artificial Sequence: Synthetic oligonucleotide
  X-linked inhibitor of apoptosis (XIAP) siRNA
gtgatgtaatttgtgcaaagatt

SEQ ID NO: 16578 - DNA, 23 bp, Artificial Sequence
  Description of Artificial Sequence: Synthetic oligonucleotide
  X-linked inhibitor of apoptosis (XIAP) siRNA
tgatgtaatttgtgcaaagatta

SEQ ID NO: 16579 - DNA, 23 bp, Artificial Sequence
  Description of Artificial Sequence: Synthetic oligonucleotide
  X-linked inhibitor of apoptosis (XIAP) siRNA
gatgtaatttgtgcaaagattat

SEQ ID NO: 16580 - DNA, 23 bp, Artificial Sequence
  Description of Artificial Sequence: Synthetic oligonucleotide
  X-linked inhibitor of apoptosis (XIAP) siRNA
atgtaatttgtgcaaagattata

SEQ ID NO: 16581 - DNA, 23 bp, Artificial Sequence
  Description of Artificial Sequence: Synthetic oligonucleotide
  X-linked inhibitor of apoptosis (XIAP) siRNA
tgtaatttgtgcaaagattatag

SEQ ID NO: 16582 - DNA, 23 bp, Artificial Sequence
  Description of Artificial Sequence: Synthetic oligonucleotide
  X-linked inhibitor of apoptosis (XIAP) siRNA
gtaatttgtgcaaagattatagc

SEQ ID NO: 16583 - DNA, 23 bp, Artificial Sequence
  Description of Artificial Sequence: Synthetic oligonucleotide
  X-linked inhibitor of apoptosis (XIAP) siRNA
taatttgtgcaaagattatagct

SEQ ID NO: 16584 - DNA, 23 bp, Artificial Sequence
  Description of Artificial Sequence: Synthetic oligonucleotide
  X-linked inhibitor of apoptosis (XIAP) siRNA
aatttgtgcaaagattatagcta

SEQ ID NO: 16585 - DNA, 23 bp, Artificial Sequence
  Description of Artificial Sequence: Synthetic oligonucleotide
  X-linked inhibitor of apoptosis (XIAP) siRNA
atttgtgcaaagattatagctaa

SEQ ID NO: 16586 - DNA, 23 bp, Artificial Sequence
  Description of Artificial Sequence: Synthetic oligonucleotide
  X-linked inhibitor of apoptosis (XIAP) siRNA
tttgtgcaaagattatagctaat

SEQ ID NO: 16587 - DNA, 23 bp, Artificial Sequence
  Description of Artificial Sequence: Synthetic oligonucleotide
  X-linked inhibitor of apoptosis (XIAP) siRNA
ttgtgcaaagattatagctaatt

SEQ ID NO: 16588 - DNA, 23 bp, Artificial Sequence
  Description of Artificial Sequence: Synthetic oligonucleotide
  X-linked inhibitor of apoptosis (XIAP) siRNA
tgtgcaaagattatagctaatta

SEQ ID NO: 16589 - DNA, 23 bp, Artificial Sequence
  Description of Artificial Sequence: Synthetic oligonucleotide
  X-linked inhibitor of apoptosis (XIAP) siRNA
gtgcaaagattatagctaattag

SEQ ID NO: 16590 - DNA, 23 bp, Artificial Sequence
  Description of Artificial Sequence: Synthetic oligonucleotide
  X-linked inhibitor of apoptosis (XIAP) siRNA
tgcaaagattatagctaattagt

SEQ ID NO: 16591 - DNA, 23 bp, Artificial Sequence
  Description of Artificial Sequence: Synthetic oligonucleotide
  X-linked inhibitor of apoptosis (XIAP) siRNA
gcaaagattatagctaattagta

SEQ ID NO: 16592 - DNA, 23 bp, Artificial Sequence
  Description of Artificial Sequence: Synthetic oligonucleotide
  X-linked inhibitor of apoptosis (XIAP) siRNA
caaagattatagctaattagtag

SEQ ID NO: 16593 - DNA, 23 bp, Artificial Sequence
  Description of Artificial Sequence: Synthetic oligonucleotide
  X-linked inhibitor of apoptosis (XIAP) siRNA
aaagattatagctaattagtagc

SEQ ID NO: 16594 - DNA, 23 bp, Artificial Sequence
  Description of Artificial Sequence: Synthetic oligonucleotide
  X-linked inhibitor of apoptosis (XIAP) siRNA
aagattatagctaattagtagca

SEQ ID NO: 16595 - DNA, 23 bp, Artificial Sequence
  Description of Artificial Sequence: Synthetic oligonucleotide
  X-linked inhibitor of apoptosis (XIAP) siRNA
agattatagctaattagtagcag

SEQ ID NO: 16596 - DNA, 23 bp, Artificial Sequence
  Description of Artificial Sequence: Synthetic oligonucleotide
  X-linked inhibitor of apoptosis (XIAP) siRNA
gattatagctaattagtagcaga

SEQ ID NO: 16597 - DNA, 23 bp, Artificial Sequence
  Description of Artificial Sequence: Synthetic oligonucleotide
  X-linked inhibitor of apoptosis (XIAP) siRNA
attatagctaattagtagcagag

SEQ ID NO: 16598 - DNA, 23 bp, Artificial Sequence
  Description of Artificial Sequence: Synthetic oligonucleotide
  X-linked inhibitor of apoptosis (XIAP) siRNA
ttatagctaattagtagcagagc

SEQ ID NO: 16599 - DNA, 23 bp, Artificial Sequence
  Description of Artificial Sequence: Synthetic oligonucleotide
  X-linked inhibitor of apoptosis (XIAP) siRNA
tatagctaattagtagcagagcc

SEQ ID NO: 16600 - DNA, 23 bp, Artificial Sequence
  Description of Artificial Sequence: Synthetic oligonucleotide
  X-linked inhibitor of apoptosis (XIAP) siRNA
atagctaattagtagcagagccc

SEQ ID NO: 16601 - DNA, 23 bp, Artificial Sequence
  Description of Artificial Sequence: Synthetic oligonucleotide
  X-linked inhibitor of apoptosis (XIAP) siRNA
tagctaattagtagcagagccct

SEQ ID NO: 16602 - DNA, 23 bp, Artificial Sequence
  Description of Artificial Sequence: Synthetic oligonucleotide
  X-linked inhibitor of apoptosis (XIAP) siRNA
agctaattagtagcagagccctg

SEQ ID NO: 16603 - DNA, 23 bp, Artificial Sequence
  Description of Artificial Sequence: Synthetic oligonucleotide
  X-linked inhibitor of apoptosis (XIAP) siRNA
gctaattagtagcagagccctga

SEQ ID NO: 16604 - DNA, 23 bp, Artificial Sequence
  Description of Artificial Sequence: Synthetic oligonucleotide
  X-linked inhibitor of apoptosis (XIAP) siRNA
ctaattagtagcagagccctgac

SEQ ID NO: 16605 - DNA, 23 bp, Artificial Sequence
  Description of Artificial Sequence: Synthetic oligonucleotide
  X-linked inhibitor of apoptosis (XIAP) siRNA
taattagtagcagagccctgact

SEQ ID NO: 16606 - DNA, 23 bp, Artificial Sequence
  Description of Artificial Sequence: Synthetic oligonucleotide
  X-linked inhibitor of apoptosis (XIAP) siRNA
aattagtagcagagccctgactg

SEQ ID NO: 16607 - DNA, 23 bp, Artificial Sequence
  Description of Artificial Sequence: Synthetic oligonucleotide
  X-linked inhibitor of apoptosis (XIAP) siRNA
attagtagcagagccctgactgg

SEQ ID NO: 16608 - DNA, 23 bp, Artificial Sequence
  Description of Artificial Sequence: Synthetic oligonucleotide
  X-linked inhibitor of apoptosis (XIAP) siRNA
ttagtagcagagccctgactggg

SEQ ID NO: 16609 - DNA, 23 bp, Artificial Sequence
  Description of Artificial Sequence: Synthetic oligonucleotide
  X-linked inhibitor of apoptosis (XIAP) siRNA
tagtagcagagccctgactggga

SEQ ID NO: 16610 - DNA, 23 bp, Artificial Sequence
  Description of Artificial Sequence: Synthetic oligonucleotide
  X-linked inhibitor of apoptosis (XIAP) siRNA
agtagcagagccctgactgggac

SEQ ID NO: 16611 - DNA, 23 bp, Artificial Sequence
  Description of Artificial Sequence: Synthetic oligonucleotide
  X-linked inhibitor of apoptosis (XIAP) siRNA
gtagcagagccctgactgggaca

SEQ ID NO: 16612 - DNA, 23 bp, Artificial Sequence
  Description of Artificial Sequence: Synthetic oligonucleotide
  X-linked inhibitor of apoptosis (XIAP) siRNA
tagcagagccctgactgggacat

SEQ ID NO: 16613 - DNA, 23 bp, Artificial Sequence
  Description of Artificial Sequence: Synthetic oligonucleotide
  X-linked inhibitor of apoptosis (XIAP) siRNA
agcagagccctgactgggacata

SEQ ID NO: 16614 - DNA, 23 bp, Artificial Sequence
  Description of Artificial Sequence: Synthetic oligonucleotide
  X-linked inhibitor of apoptosis (XIAP) siRNA
gcagagccctgactgggacatag

SEQ ID NO: 16615 - DNA, 23 bp, Artificial Sequence
  Description of Artificial Sequence: Synthetic oligonucleotide
  X-linked inhibitor of apoptosis (XIAP) siRNA
cagagccctgactgggacatagt

SEQ ID NO: 16616 - DNA, 23 bp, Artificial Sequence
  Description of Artificial Sequence: Synthetic oligonucleotide
  X-linked inhibitor of apoptosis (XIAP) siRNA
agagccctgactgggacatagtt

SEQ ID NO: 16617 - DNA, 23 bp, Artificial Sequence
  Description of Artificial Sequence: Synthetic oligonucleotide
  X-linked inhibitor of apoptosis (XIAP) siRNA
gagccctgactgggacatagttt

SEQ ID NO: 16618 - DNA, 23 bp, Artificial Sequence
  Description of Artificial Sequence: Synthetic oligonucleotide
  X-linked inhibitor of apoptosis (XIAP) siRNA
agccctgactgggacatagtttg

SEQ ID NO: 16619 - DNA, 23 bp, Artificial Sequence
  Description of Artificial Sequence: Synthetic oligonucleotide
  X-linked inhibitor of apoptosis (XIAP) siRNA
gccctgactgggacatagtttga

SEQ ID NO: 16620 - DNA, 23 bp, Artificial Sequence
  Description of Artificial Sequence: Synthetic oligonucleotide
  X-linked inhibitor of apoptosis (XIAP) siRNA
ccctgactgggacatagtttgaa

SEQ ID NO: 16621 - DNA, 23 bp, Artificial Sequence
  Description of Artificial Sequence: Synthetic oligonucleotide
  X-linked inhibitor of apoptosis (XIAP) siRNA
cctgactgggacatagtttgaag

SEQ ID NO: 16622 - DNA, 23 bp, Artificial Sequence
  Description of Artificial Sequence: Synthetic oligonucleotide
  X-linked inhibitor of apoptosis (XIAP) siRNA
ctgactgggacatagtttgaagg

SEQ ID NO: 16623 - DNA, 23 bp, Artificial Sequence
  Description of Artificial Sequence: Synthetic oligonucleotide
  X-linked inhibitor of apoptosis (XIAP) siRNA
tgactgggacatagtttgaaggt

SEQ ID NO: 16624 - DNA, 23 bp, Artificial Sequence
  Description of Artificial Sequence: Synthetic oligonucleotide
  X-linked inhibitor of apoptosis (XIAP) siRNA
gactgggacatagtttgaaggtg

SEQ ID NO: 16625 - DNA, 23 bp, Artificial Sequence
  Description of Artificial Sequence: Synthetic oligonucleotide
  X-linked inhibitor of apoptosis (XIAP) siRNA
actgggacatagtttgaaggtga

SEQ ID NO: 16626 - DNA, 23 bp, Artificial Sequence
  Description of Artificial Sequence: Synthetic oligonucleotide
  X-linked inhibitor of apoptosis (XIAP) siRNA
ctgggacatagtttgaaggtgaa

SEQ ID NO: 16627 - DNA, 23 bp, Artificial Sequence
  Description of Artificial Sequence: Synthetic oligonucleotide
  X-linked inhibitor of apoptosis (XIAP) siRNA
tgggacatagtttgaaggtgaaa

SEQ ID NO: 16628 - DNA, 23 bp, Artificial Sequence
  Description of Artificial Sequence: Synthetic oligonucleotide
  X-linked inhibitor of apoptosis (XIAP) siRNA
gggacatagtttgaaggtgaaaa

SEQ ID NO: 16629 - DNA, 23 bp, Artificial Sequence
  Description of Artificial Sequence: Synthetic oligonucleotide
  X-linked inhibitor of apoptosis (XIAP) siRNA
ggacatagtttgaaggtgaaaaa

SEQ ID NO: 16630 - DNA, 23 bp, Artificial Sequence
  Description of Artificial Sequence: Synthetic oligonucleotide
  X-linked inhibitor of apoptosis (XIAP) siRNA
gacatagtttgaaggtgaaaaac

SEQ ID NO: 16631 - DNA, 23 bp, Artificial Sequence
  Description of Artificial Sequence: Synthetic oligonucleotide
  X-linked inhibitor of apoptosis (XIAP) siRNA
acatagtttgaaggtgaaaaact

SEQ ID NO: 16632 - DNA, 23 bp, Artificial Sequence
  Description of Artificial Sequence: Synthetic oligonucleotide
  X-linked inhibitor of apoptosis (XIAP) siRNA
catagtttgaaggtgaaaaactt

SEQ ID NO: 16633 - DNA, 23 bp, Artificial Sequence
  Description of Artificial Sequence: Synthetic oligonucleotide
  X-linked inhibitor of apoptosis (XIAP) siRNA
atagtttgaaggtgaaaaacttc

SEQ ID NO: 16634 - DNA, 23 bp, Artificial Sequence
  Description of Artificial Sequence: Synthetic oligonucleotide
  X-linked inhibitor of apoptosis (XIAP) siRNA
tagtttgaaggtgaaaaacttca

SEQ ID NO: 16635 - DNA, 23 bp, Artificial Sequence
  Description of Artificial Sequence: Synthetic oligonucleotide
  X-linked inhibitor of apoptosis (XIAP) siRNA
agtttgaaggtgaaaaacttcac

SEQ ID NO: 16636 - DNA, 23 bp, Artificial Sequence
  Description of Artificial Sequence: Synthetic oligonucleotide
  X-linked inhibitor of apoptosis (XIAP) siRNA
gtttgaaggtgaaaaacttcacc

SEQ ID NO: 16637 - DNA, 23 bp, Artificial Sequence
  Description of Artificial Sequence: Synthetic oligonucleotide
  X-linked inhibitor of apoptosis (XIAP) siRNA
tttgaaggtgaaaaacttcacca

SEQ ID NO: 16638 - DNA, 23 bp, Artificial Sequence
  Description of Artificial Sequence: Synthetic oligonucleotide
  X-linked inhibitor of apoptosis (XIAP) siRNA
ttgaaggtgaaaaacttcaccaa

SEQ ID NO: 16639 - DNA, 23 bp, Artificial Sequence
  Description of Artificial Sequence: Synthetic oligonucleotide
  X-linked inhibitor of apoptosis (XIAP) siRNA
tgaaggtgaaaaacttcaccaag

SEQ ID NO: 16640 - DNA, 23 bp, Artificial Sequence
  Description of Artificial Sequence: Synthetic oligonucleotide
  X-linked inhibitor of apoptosis (XIAP) siRNA
gaaggtgaaaaacttcaccaagc

SEQ ID NO: 16641 - DNA, 23 bp, Artificial Sequence
  Description of Artificial Sequence: Synthetic oligonucleotide
  X-linked inhibitor of apoptosis (XIAP) siRNA
aaggtgaaaaacttcaccaagct

SEQ ID NO: 16642 - DNA, 23 bp, Artificial Sequence
  Description of Artificial Sequence: Synthetic oligonucleotide
  X-linked inhibitor of apoptosis (XIAP) siRNA
aggtgaaaaacttcaccaagcta

SEQ ID NO: 16643 - DNA, 23 bp, Artificial Sequence
  Description of Artificial Sequence: Synthetic oligonucleotide
  X-linked inhibitor of apoptosis (XIAP) siRNA
ggtgaaaaacttcaccaagctac

SEQ ID NO: 16644 - DNA, 23 bp, Artificial Sequence
  Description of Artificial Sequence: Synthetic oligonucleotide
  X-linked inhibitor of apoptosis (XIAP) siRNA
gtgaaaaacttcaccaagctacc

SEQ ID NO: 16645 - DNA, 23 bp, Artificial Sequence
  Description of Artificial Sequence: Synthetic oligonucleotide
  X-linked inhibitor of apoptosis (XIAP) siRNA
tgaaaaacttcaccaagctacct

SEQ ID NO: 16646 - DNA, 23 bp, Artificial Sequence
  Description of Artificial Sequence: Synthetic oligonucleotide
  X-linked inhibitor of apoptosis (XIAP) siRNA
gaaaaacttcaccaagctacctt

SEQ ID NO: 16647 - DNA, 23 bp, Artificial Sequence
  Description of Artificial Sequence: Synthetic oligonucleotide
  X-linked inhibitor of apoptosis (XIAP) siRNA
aaaaacttcaccaagctaccttt

SEQ ID NO: 16648 - DNA, 23 bp, Artificial Sequence
  Description of Artificial Sequence: Synthetic oligonucleotide
  X-linked inhibitor of apoptosis (XIAP) siRNA
aaaacttcaccaagctacctttc

SEQ ID NO: 16649 - DNA, 23 bp, Artificial Sequence
  Description of Artificial Sequence: Synthetic oligonucleotide
  X-linked inhibitor of apoptosis (XIAP) siRNA
aaacttcaccaagctacctttct

SEQ ID NO: 16650 - DNA, 23 bp, Artificial Sequence
  Description of Artificial Sequence: Synthetic oligonucleotide
  X-linked inhibitor of apoptosis (XIAP) siRNA
aacttcaccaagctacctttctt

SEQ ID NO: 16651 - DNA, 23 bp, Artificial Sequence
  Description of Artificial Sequence: Synthetic oligonucleotide
  X-linked inhibitor of apoptosis (XIAP) siRNA
acttcaccaagctacctttcttg

SEQ ID NO: 16652 - DNA, 23 bp, Artificial Sequence
  Description of Artificial Sequence: Synthetic oligonucleotide
  X-linked inhibitor of apoptosis (XIAP) siRNA
cttcaccaagctacctttcttga

SEQ ID NO: 16653 - DNA, 23 bp, Artificial Sequence
  Description of Artificial Sequence: Synthetic oligonucleotide
  X-linked inhibitor of apoptosis (XIAP) siRNA
ttcaccaagctacctttcttgaa

SEQ ID NO: 16654 - DNA, 23 bp, Artificial Sequence
  Description of Artificial Sequence: Synthetic oligonucleotide
  X-linked inhibitor of apoptosis (XIAP) siRNA
tcaccaagctacctttcttgaaa

SEQ ID NO: 16655 - DNA, 23 bp, Artificial Sequence
  Description of Artificial Sequence: Synthetic oligonucleotide
  X-linked inhibitor of apoptosis (XIAP) siRNA
caccaagctacctttcttgaaag

SEQ ID NO: 16656 - DNA, 23 bp, Artificial Sequence
  Description of Artificial Sequence: Synthetic oligonucleotide
  X-linked inhibitor of apoptosis (XIAP) siRNA
accaagctacctttcttgaaagg

SEQ ID NO: 16657 - DNA, 23 bp, Artificial Sequence
  Description of Artificial Sequence: Synthetic oligonucleotide
  X-linked inhibitor of apoptosis (XIAP) siRNA
ccaagctacctttcttgaaaggt

SEQ ID NO: 16658 - DNA, 23 bp, Artificial Sequence
  Description of Artificial Sequence: Synthetic oligonucleotide
  X-linked inhibitor of apoptosis (XIAP) siRNA
caagctacctttcttgaaaggtc

SEQ ID NO: 16659 - DNA, 23 bp, Artificial Sequence
  Description of Artificial Sequence: Synthetic oligonucleotide
  X-linked inhibitor of apoptosis (XIAP) siRNA
aagctacctttcttgaaaggtcc

SEQ ID NO: 16660 - DNA, 23 bp, Artificial Sequence
  Description of Artificial Sequence: Synthetic oligonucleotide
  X-linked inhibitor of apoptosis (XIAP) siRNA
agctacctttcttgaaaggtcca

SEQ ID NO: 16661 - DNA, 23 bp, Artificial Sequence
  Description of Artificial Sequence: Synthetic oligonucleotide
  X-linked inhibitor of apoptosis (XIAP) siRNA
gctacctttcttgaaaggtccaa

SEQ ID NO: 16662 - DNA, 23 bp, Artificial Sequence
  Description of Artificial Sequence: Synthetic oligonucleotide
  X-linked inhibitor of apoptosis (XIAP) siRNA
ctacctttcttgaaaggtccaaa

SEQ ID NO: 16663 - DNA, 23 bp, Artificial Sequence
  Description of Artificial Sequence: Synthetic oligonucleotide
  X-linked inhibitor of apoptosis (XIAP) siRNA
tacctttcttgaaaggtccaaat

SEQ ID NO: 16664 - DNA, 23 bp, Artificial Sequence
  Description of Artificial Sequence: Synthetic oligonucleotide
  X-linked inhibitor of apoptosis (XIAP) siRNA
acctttcttgaaaggtccaaatg

SEQ ID NO: 16665 - DNA, 23 bp, Artificial Sequence
  Description of Artificial Sequence: Synthetic oligonucleotide
  X-linked inhibitor of apoptosis (XIAP) siRNA
cctttcttgaaaggtccaaatgt

SEQ ID NO: 16666 - DNA, 23 bp, Artificial Sequence
  Description of Artificial Sequence: Synthetic oligonucleotide
  X-linked inhibitor of apoptosis (XIAP) siRNA
ctttcttgaaaggtccaaatgtt

SEQ ID NO: 16667 - DNA, 23 bp, Artificial Sequence
  Description of Artificial Sequence: Synthetic oligonucleotide
  X-linked inhibitor of apoptosis (XIAP) siRNA
tttcttgaaaggtccaaatgttt

SEQ ID NO: 16668 - DNA, 23 bp, Artificial Sequence
  Description of Artificial Sequence: Synthetic oligonucleotide
  X-linked inhibitor of apoptosis (XIAP) siRNA
ttcttgaaaggtccaaatgttta

SEQ ID NO: 16669 - DNA, 23 bp, Artificial Sequence
  Description of Artificial Sequence: Synthetic oligonucleotide
  X-linked inhibitor of apoptosis (XIAP) siRNA
tcttgaaaggtccaaatgtttat

SEQ ID NO: 16670 - DNA, 23 bp, Artificial Sequence
  Description of Artificial Sequence: Synthetic oligonucleotide
  X-linked inhibitor of apoptosis (XIAP) siRNA
cttgaaaggtccaaatgtttatg

SEQ ID NO: 16671 - DNA, 23 bp, Artificial Sequence
  Description of Artificial Sequence: Synthetic oligonucleotide
  X-linked inhibitor of apoptosis (XIAP) siRNA
ttgaaaggtccaaatgtttatgt

SEQ ID NO: 16672 - DNA, 23 bp, Artificial Sequence
  Description of Artificial Sequence: Synthetic oligonucleotide
  X-linked inhibitor of apoptosis (XIAP) siRNA
tgaaaggtccaaatgtttatgtt

SEQ ID NO: 16673 - DNA, 23 bp, Artificial Sequence
  Description of Artificial Sequence: Synthetic oligonucleotide
  X-linked inhibitor of apoptosis (XIAP) siRNA
gaaaggtccaaatgtttatgttt

SEQ ID NO: 16674 - DNA, 23 bp, Artificial Sequence
  Description of Artificial Sequence: Synthetic oligonucleotide
  X-linked inhibitor of apoptosis (XIAP) siRNA
aaaggtccaaatgtttatgtttt

SEQ ID NO: 16675 - DNA, 23 bp, Artificial Sequence
  Description of Artificial Sequence: Synthetic oligonucleotide
  X-linked inhibitor of apoptosis (XIAP) siRNA
aaggtccaaatgtttatgttttc

SEQ ID NO: 16676 - DNA, 23 bp, Artificial Sequence
  Description of Artificial Sequence: Synthetic oligonucleotide
  X-linked inhibitor of apoptosis (XIAP) siRNA
aggtccaaatgtttatgttttca

SEQ ID NO: 16677 - DNA, 23 bp, Artificial Sequence
  Description of Artificial Sequence: Synthetic oligonucleotide
  X-linked inhibitor of apoptosis (XIAP) siRNA
ggtccaaatgtttatgttttcaa

SEQ ID NO: 16678 - DNA, 23 bp, Artificial Sequence
  Description of Artificial Sequence: Synthetic oligonucleotide
  X-linked inhibitor of apoptosis (XIAP) siRNA
gtccaaatgtttatgttttcaac

SEQ ID NO: 16679 - DNA, 23 bp, Artificial Sequence
  Description of Artificial Sequence: Synthetic oligonucleotide
  X-linked inhibitor of apoptosis (XIAP) siRNA
tccaaatgtttatgttttcaact

SEQ ID NO: 16680 - DNA, 23 bp, Artificial Sequence
  Description of Artificial Sequence: Synthetic oligonucleotide
  X-linked inhibitor of apoptosis (XIAP) siRNA
ccaaatgtttatgttttcaacta

SEQ ID NO: 16681 - DNA, 23 bp, Artificial Sequence
  Description of Artificial Sequence: Synthetic oligonucleotide
  X-linked inhibitor of apoptosis (XIAP) siRNA
caaatgtttatgttttcaactac

SEQ ID NO: 16682 - DNA, 23 bp, Artificial Sequence
  Description of Artificial Sequence: Synthetic oligonucleotide
  X-linked inhibitor of apoptosis (XIAP) siRNA
aaatgtttatgttttcaactact

SEQ ID NO: 16683 - DNA, 23 bp, Artificial Sequence
  Description of Artificial Sequence: Synthetic oligonucleotide
  X-linked inhibitor of apoptosis (XIAP) siRNA
aatgtttatgttttcaactactc

SEQ ID NO: 16684 - DNA, 23 bp, Artificial Sequence
  Description of Artificial Sequence: Synthetic oligonucleotide
  X-linked inhibitor of apoptosis (XIAP) siRNA
atgtttatgttttcaactactct

SEQ ID NO: 16685 - DNA, 23 bp, Artificial Sequence
  Description of Artificial Sequence: Synthetic oligonucleotide
  X-linked inhibitor of apoptosis (XIAP) siRNA
tgtttatgttttcaactactctt

SEQ ID NO: 16686 - DNA, 23 bp, Artificial Sequence
  Description of Artificial Sequence: Synthetic oligonucleotide
  X-linked inhibitor of apoptosis (XIAP) siRNA
gtttatgttttcaactactcttt

SEQ ID NO: 16687 - DNA, 23 bp, Artificial Sequence
  Description of Artificial Sequence: Synthetic oligonucleotide
  X-linked inhibitor of apoptosis (XIAP) siRNA
tttatgttttcaactactctttc

SEQ ID NO: 16688 - DNA, 23 bp, Artificial Sequence
  Description of Artificial Sequence: Synthetic oligonucleotide
  X-linked inhibitor of apoptosis (XIAP) siRNA
ttatgttttcaactactctttcc

SEQ ID NO: 16689 - DNA, 23 bp, Artificial Sequence
  Description of Artificial Sequence: Synthetic oligonucleotide
  X-linked inhibitor of apoptosis (XIAP) siRNA
tatgttttcaactactctttcca

SEQ ID NO: 16690 - DNA, 23 bp, Artificial Sequence
  Description of Artificial Sequence: Synthetic oligonucleotide
  X-linked inhibitor of apoptosis (XIAP) siRNA
atgttttcaactactctttccac

SEQ ID NO: 16691 - DNA, 23 bp, Artificial Sequence
  Description of Artificial Sequence: Synthetic oligonucleotide
  X-linked inhibitor of apoptosis (XIAP) siRNA
tgttttcaactactctttccact

SEQ ID NO: 16692 - DNA, 23 bp, Artificial Sequence
  Description of Artificial Sequence: Synthetic oligonucleotide
  X-linked inhibitor of apoptosis (XIAP) siRNA
gttttcaactactctttccactg

SEQ ID NO: 16693 - DNA, 23 bp, Artificial Sequence
  Description of Artificial Sequence: Synthetic oligonucleotide
  X-linked inhibitor of apoptosis (XIAP) siRNA
ttttcaactactctttccactgt

SEQ ID NO: 16694 - DNA, 23 bp, Artificial Sequence
  Description of Artificial Sequence: Synthetic oligonucleotide
  X-linked inhibitor of apoptosis (XIAP) siRNA
tttcaactactctttccactgta

SEQ ID NO: 16695 - DNA, 23 bp, Artificial Sequence
  Description of Artificial Sequence: Synthetic oligonucleotide
  X-linked inhibitor of apoptosis (XIAP) siRNA
ttcaactactctttccactgtac

SEQ ID NO: 16696 - DNA, 23 bp, Artificial Sequence
  Description of Artificial Sequence: Synthetic oligonucleotide
  X-linked inhibitor of apoptosis (XIAP) siRNA
tcaactactctttccactgtacc

SEQ ID NO: 16697 - DNA, 23 bp, Artificial Sequence
  Description of Artificial Sequence: Synthetic oligonucleotide
  X-linked inhibitor of apoptosis (XIAP) siRNA
caactactctttccactgtacca

SEQ ID NO: 16698 - DNA, 23 bp, Artificial Sequence
  Description of Artificial Sequence: Synthetic oligonucleotide
  X-linked inhibitor of apoptosis (XIAP) siRNA
aactactctttccactgtaccat

SEQ ID NO: 16699 - DNA, 23 bp, Artificial Sequence
  Description of Artificial Sequence: Synthetic oligonucleotide
  X-linked inhibitor of apoptosis (XIAP) siRNA
actactctttccactgtaccata

SEQ ID NO: 16700 - DNA, 23 bp, Artificial Sequence
  Description of Artificial Sequence: Synthetic oligonucleotide
  X-linked inhibitor of apoptosis (XIAP) siRNA
ctactctttccactgtaccataa

SEQ ID NO: 16701 - DNA, 23 bp, Artificial Sequence
  Description of Artificial Sequence: Synthetic oligonucleotide
  X-linked inhibitor of apoptosis (XIAP) siRNA
tactctttccactgtaccataac

SEQ ID NO: 16702 - DNA, 23 bp, Artificial Sequence
  Description of Artificial Sequence: Synthetic oligonucleotide
  X-linked inhibitor of apoptosis (XIAP) siRNA
actctttccactgtaccataact

SEQ ID NO: 16703 - DNA, 23 bp, Artificial Sequence
  Description of Artificial Sequence: Synthetic oligonucleotide
  X-linked inhibitor of apoptosis (XIAP) siRNA
ctctttccactgtaccataactt

SEQ ID NO: 16704 - DNA, 23 bp, Artificial Sequence
  Description of Artificial Sequence: Synthetic oligonucleotide
  X-linked inhibitor of apoptosis (XIAP) siRNA
tctttccactgtaccataacttt

SEQ ID NO: 16705 - DNA, 23 bp, Artificial Sequence
  Description of Artificial Sequence: Synthetic oligonucleotide
  X-linked inhibitor of apoptosis (XIAP) siRNA
ctttccactgtaccataactttc

SEQ ID NO: 16706 - DNA, 23 bp, Artificial Sequence
  Description of Artificial Sequence: Synthetic oligonucleotide
  X-linked inhibitor of apoptosis (XIAP) siRNA
tttccactgtaccataactttca

SEQ ID NO: 16707 - DNA, 23 bp, Artificial Sequence
  Description of Artificial Sequence: Synthetic oligonucleotide
  X-linked inhibitor of apoptosis (XIAP) siRNA
ttccactgtaccataactttcac

SEQ ID NO: 16708 - DNA, 23 bp, Artificial Sequence
  Description of Artificial Sequence: Synthetic oligonucleotide
  X-linked inhibitor of apoptosis (XIAP) siRNA
tccactgtaccataactttcact

SEQ ID NO: 16709 - DNA, 23 bp, Artificial Sequence
  Description of Artificial Sequence: Synthetic oligonucleotide
  X-linked inhibitor of apoptosis (XIAP) siRNA
ccactgtaccataactttcacta

SEQ ID NO: 16710 - DNA, 23 bp, Artificial Sequence
  Description of Artificial Sequence: Synthetic oligonucleotide
  X-linked inhibitor of apoptosis (XIAP) siRNA
cactgtaccataactttcactac

SEQ ID NO: 16711 - DNA, 23 bp, Artificial Sequence
  Description of Artificial Sequence: Synthetic oligonucleotide
  X-linked inhibitor of apoptosis (XIAP) siRNA
actgtaccataactttcactaca

SEQ ID NO: 16712 - DNA, 23 bp, Artificial Sequence
  Description of Artificial Sequence: Synthetic oligonucleotide
  X-linked inhibitor of apoptosis (XIAP) siRNA
ctgtaccataactttcactacat

SEQ ID NO: 16713 - DNA, 23 bp, Artificial Sequence
  Description of Artificial Sequence: Synthetic oligonucleotide
  X-linked inhibitor of apoptosis (XIAP) siRNA
tgtaccataactttcactacata

SEQ ID NO: 16714 - DNA, 23 bp, Artificial Sequence
  Description of Artificial Sequence: Synthetic oligonucleotide
  X-linked inhibitor of apoptosis (XIAP) siRNA
gtaccataactttcactacatat

SEQ ID NO: 16715 - DNA, 23 bp, Artificial Sequence
  Description of Artificial Sequence: Synthetic oligonucleotide
  X-linked inhibitor of apoptosis (XIAP) siRNA
taccataactttcactacatatt

SEQ ID NO: 16716 - DNA, 23 bp, Artificial Sequence
  Description of Artificial Sequence: Synthetic oligonucleotide
  X-linked inhibitor of apoptosis (XIAP) siRNA
accataactttcactacatatta

SEQ ID NO: 16717 - DNA, 23 bp, Artificial Sequence
  Description of Artificial Sequence: Synthetic oligonucleotide
  X-linked inhibitor of apoptosis (XIAP) siRNA
ccataactttcactacatattaa

SEQ ID NO: 16718 - DNA, 23 bp, Artificial Sequence
  Description of Artificial Sequence: Synthetic oligonucleotide
  X-linked inhibitor of apoptosis (XIAP) siRNA
cataactttcactacatattaaa

SEQ ID NO: 16719 - DNA, 23 bp, Artificial Sequence
  Description of Artificial Sequence: Synthetic oligonucleotide
  X-linked inhibitor of apoptosis (XIAP) siRNA
ataactttcactacatattaaat

SEQ ID NO: 16720 - DNA, 23 bp, Artificial Sequence
  Description of Artificial Sequence: Synthetic oligonucleotide
  X-linked inhibitor of apoptosis (XIAP) siRNA
taactttcactacatattaaatg

SEQ ID NO: 16721 - DNA, 23 bp, Artificial Sequence
  Description of Artificial Sequence: Synthetic oligonucleotide
  X-linked inhibitor of apoptosis (XIAP) siRNA
aactttcactacatattaaatga

SEQ ID NO: 16722 - DNA, 23 bp, Artificial Sequence
  Description of Artificial Sequence: Synthetic oligonucleotide
  X-linked inhibitor of apoptosis (XIAP) siRNA
actttcactacatattaaatgac

SEQ ID NO: 16723 - DNA, 23 bp, Artificial Sequence
  Description of Artificial Sequence: Synthetic oligonucleotide
  X-linked inhibitor of apoptosis (XIAP) siRNA
ctttcactacatattaaatgaca

SEQ ID NO: 16724 - DNA, 23 bp, Artificial Sequence
  Description of Artificial Sequence: Synthetic oligonucleotide
  X-linked inhibitor of apoptosis (XIAP) siRNA
tttcactacatattaaatgacac

SEQ ID NO: 16725 - DNA, 23 bp, Artificial Sequence
  Description of Artificial Sequence: Synthetic oligonucleotide
  X-linked inhibitor of apoptosis (XIAP) siRNA
ttcactacatattaaatgacact

SEQ ID NO: 16726 - DNA, 23 bp, Artificial Sequence
  Description of Artificial Sequence: Synthetic oligonucleotide
  X-linked inhibitor of apoptosis (XIAP) siRNA
tcactacatattaaatgacactt

SEQ ID NO: 16727 - DNA, 23 bp, Artificial Sequence
  Description of Artificial Sequence: Synthetic oligonucleotide
  X-linked inhibitor of apoptosis (XIAP) siRNA
cactacatattaaatgacacttt

SEQ ID NO: 16728 - DNA, 23 bp, Artificial Sequence
  Description of Artificial Sequence: Synthetic oligonucleotide
  X-linked inhibitor of apoptosis (XIAP) siRNA
actacatattaaatgacacttta

SEQ ID NO: 16729 - DNA, 23 bp, Artificial Sequence
  Description of Artificial Sequence: Synthetic oligonucleotide
  X-linked inhibitor of apoptosis (XIAP) siRNA
ctacatattaaatgacactttat

SEQ ID NO: 16730 - DNA, 23 bp, Artificial Sequence
  Description of Artificial Sequence: Synthetic oligonucleotide
  X-linked inhibitor of apoptosis (XIAP) siRNA
tacatattaaatgacactttata

SEQ ID NO: 16731 - DNA, 23 bp, Artificial Sequence
  Description of Artificial Sequence: Synthetic oligonucleotide
  X-linked inhibitor of apoptosis (XIAP) siRNA
acatattaaatgacactttataa

SEQ ID NO: 16732 - DNA, 23 bp, Artificial Sequence
  Description of Artificial Sequence: Synthetic oligonucleotide
  X-linked inhibitor of apoptosis (XIAP) siRNA
catattaaatgacactttataac

SEQ ID NO: 16733 - DNA, 23 bp, Artificial Sequence
  Description of Artificial Sequence: Synthetic oligonucleotide
  X-linked inhibitor of apoptosis (XIAP) siRNA
atattaaatgacactttataact

SEQ ID NO: 16734 - DNA, 23 bp, Artificial Sequence
  Description of Artificial Sequence: Synthetic oligonucleotide
  X-linked inhibitor of apoptosis (XIAP) siRNA
tattaaatgacactttataacta

SEQ ID NO: 16735 - DNA, 23 bp, Artificial Sequence
  Description of Artificial Sequence: Synthetic oligonucleotide
  X-linked inhibitor of apoptosis (XIAP) siRNA
attaaatgacactttataactaa

SEQ ID NO: 16736 - DNA, 23 bp, Artificial Sequence
  Description of Artificial Sequence: Synthetic oligonucleotide
  X-linked inhibitor of apoptosis (XIAP) siRNA
ttaaatgacactttataactaat

SEQ ID NO: 16737 - DNA, 23 bp, Artificial Sequence
  Description of Artificial Sequence: Synthetic oligonucleotide
  X-linked inhibitor of apoptosis (XIAP) siRNA
taaatgacactttataactaata

SEQ ID NO: 16738 - DNA, 23 bp, Artificial Sequence
  Description of Artificial Sequence: Synthetic oligonucleotide
  X-linked inhibitor of apoptosis (XIAP) siRNA
aaatgacactttataactaatat

SEQ ID NO: 16739 - DNA, 23 bp, Artificial Sequence
  Description of Artificial Sequence: Synthetic oligonucleotide
  X-linked inhibitor of apoptosis (XIAP) siRNA
aatgacactttataactaatata

SEQ ID NO: 16740 - DNA, 23 bp, Artificial Sequence
  Description of Artificial Sequence: Synthetic oligonucleotide
  X-linked inhibitor of apoptosis (XIAP) siRNA
atgacactttataactaatataa

SEQ ID NO: 16741 - DNA, 23 bp, Artificial Sequence
  Description of Artificial Sequence: Synthetic oligonucleotide
  X-linked inhibitor of apoptosis (XIAP) siRNA
tgacactttataactaatataat

SEQ ID NO: 16742 - DNA, 23 bp, Artificial Sequence
  Description of Artificial Sequence: Synthetic oligonucleotide
  X-linked inhibitor of apoptosis (XIAP) siRNA
gacactttataactaatataata

SEQ ID NO: 16743 - DNA, 23 bp, Artificial Sequence
  Description of Artificial Sequence: Synthetic oligonucleotide
  X-linked inhibitor of apoptosis (XIAP) siRNA
acactttataactaatataatag

SEQ ID NO: 16744 - DNA, 23 bp, Artificial Sequence
  Description of Artificial Sequence: Synthetic oligonucleotide
  X-linked inhibitor of apoptosis (XIAP) siRNA
cactttataactaatataatagg

SEQ ID NO: 16745 - DNA, 23 bp, Artificial Sequence
  Description of Artificial Sequence: Synthetic oligonucleotide
  X-linked inhibitor of apoptosis (XIAP) siRNA
actttataactaatataatagga

SEQ ID NO: 16746 - DNA, 23 bp, Artificial Sequence
  Description of Artificial Sequence: Synthetic oligonucleotide
  X-linked inhibitor of apoptosis (XIAP) siRNA
ctttataactaatataataggac

SEQ ID NO: 16747 - DNA, 23 bp, Artificial Sequence
  Description of Artificial Sequence: Synthetic oligonucleotide
  X-linked inhibitor of apoptosis (XIAP) siRNA
tttataactaatataataggaca

SEQ ID NO: 16748 - DNA, 23 bp, Artificial Sequence
  Description of Artificial Sequence: Synthetic oligonucleotide
  X-linked inhibitor of apoptosis (XIAP) siRNA
ttataactaatataataggacaa

SEQ ID NO: 16749 - DNA, 23 bp, Artificial Sequence
  Description of Artificial Sequence: Synthetic oligonucleotide
  X-linked inhibitor of apoptosis (XIAP) siRNA
tataactaatataataggacaat

SEQ ID NO: 16750 - DNA, 23 bp, Artificial Sequence
  Description of Artificial Sequence: Synthetic oligonucleotide
  X-linked inhibitor of apoptosis (XIAP) siRNA
ataactaatataataggacaatc

SEQ ID NO: 16751 - DNA, 23 bp, Artificial Sequence
  Description of Artificial Sequence: Synthetic oligonucleotide
  X-linked inhibitor of apoptosis (XIAP) siRNA
taactaatataataggacaatca

SEQ ID NO: 16752 - DNA, 23 bp, Artificial Sequence
  Description of Artificial Sequence: Synthetic oligonucleotide
  X-linked inhibitor of apoptosis (XIAP) siRNA
aactaatataataggacaatcat

SEQ ID NO: 16753 - DNA, 23 bp, Artificial Sequence
  Description of Artificial Sequence: Synthetic oligonucleotide
  X-linked inhibitor of apoptosis (XIAP) siRNA
actaatataataggacaatcatc

SEQ ID NO: 16754 - DNA, 23 bp, Artificial Sequence
  Description of Artificial Sequence: Synthetic oligonucleotide
  X-linked inhibitor of apoptosis (XIAP) siRNA
ctaatataataggacaatcatca

SEQ ID NO: 16755 - DNA, 23 bp, Artificial Sequence
  Description of Artificial Sequence: Synthetic oligonucleotide
  X-linked inhibitor of apoptosis (XIAP) siRNA
taatataataggacaatcatcaa

SEQ ID NO: 16756 - DNA, 23 bp, Artificial Sequence
  Description of Artificial Sequence: Synthetic oligonucleotide
  X-linked inhibitor of apoptosis (XIAP) siRNA
aatataataggacaatcatcaat

SEQ ID NO: 16757 - DNA, 23 bp, Artificial Sequence
  Description of Artificial Sequence: Synthetic oligonucleotide
  X-linked inhibitor of apoptosis (XIAP) siRNA
atataataggacaatcatcaatg

SEQ ID NO: 16758 - DNA, 23 bp, Artificial Sequence
  Description of Artificial Sequence: Synthetic oligonucleotide
  X-linked inhibitor of apoptosis (XIAP) siRNA
tataataggacaatcatcaatgc

SEQ ID NO: 16759 - DNA, 23 bp, Artificial Sequence
  Description of Artificial Sequence: Synthetic oligonucleotide
  X-linked inhibitor of apoptosis (XIAP) siRNA
ataataggacaatcatcaatgca

SEQ ID NO: 16760 - DNA, 23 bp, Artificial Sequence
  Description of Artificial Sequence: Synthetic oligonucleotide
  X-linked inhibitor of apoptosis (XIAP) siRNA
taataggacaatcatcaatgcat

SEQ ID NO: 16761 - DNA, 23 bp, Artificial Sequence
  Description of Artificial Sequence: Synthetic oligonucleotide
  X-linked inhibitor of apoptosis (XIAP) siRNA
aataggacaatcatcaatgcata

SEQ ID NO: 16762 - DNA, 23 bp, Artificial Sequence
  Description of Artificial Sequence: Synthetic oligonucleotide
  X-linked inhibitor of apoptosis (XIAP) siRNA
ataggacaatcatcaatgcatat

SEQ ID NO: 16763 - DNA, 23 bp, Artificial Sequence
  Description of Artificial Sequence: Synthetic oligonucleotide
  X-linked inhibitor of apoptosis (XIAP) siRNA
taggacaatcatcaatgcatata

SEQ ID NO: 16764 - DNA, 23 bp, Artificial Sequence
  Description of Artificial Sequence: Synthetic oligonucleotide
  X-linked inhibitor of apoptosis (XIAP) siRNA
aggacaatcatcaatgcatatat

SEQ ID NO: 16765 - DNA, 23 bp, Artificial Sequence
  Description of Artificial Sequence: Synthetic oligonucleotide
  X-linked inhibitor of apoptosis (XIAP) siRNA
ggacaatcatcaatgcatatata

SEQ ID NO: 16766 - DNA, 23 bp, Artificial Sequence
  Description of Artificial Sequence: Synthetic oligonucleotide
  X-linked inhibitor of apoptosis (XIAP) siRNA
gacaatcatcaatgcatatatag

SEQ ID NO: 16767 - DNA, 23 bp, Artificial Sequence
  Description of Artificial Sequence: Synthetic oligonucleotide
  X-linked inhibitor of apoptosis (XIAP) siRNA
acaatcatcaatgcatatatagc

SEQ ID NO: 16768 - DNA, 23 bp, Artificial Sequence
  Description of Artificial Sequence: Synthetic oligonucleotide
  X-linked inhibitor of apoptosis (XIAP) siRNA
caatcatcaatgcatatatagcc

SEQ ID NO: 16769 - DNA, 23 bp, Artificial Sequence
  Description of Artificial Sequence: Synthetic oligonucleotide
  X-linked inhibitor of apoptosis (XIAP) siRNA
aatcatcaatgcatatatagcca

SEQ ID NO: 16770 - DNA, 23 bp, Artificial Sequence
  Description of Artificial Sequence: Synthetic oligonucleotide
  X-linked inhibitor of apoptosis (XIAP) siRNA
atcatcaatgcatatatagccag

SEQ ID NO: 16771 - DNA, 23 bp, Artificial Sequence
  Description of Artificial Sequence: Synthetic oligonucleotide
  X-linked inhibitor of apoptosis (XIAP) siRNA
tcatcaatgcatatatagccagc

SEQ ID NO: 16772 - DNA, 23 bp, Artificial Sequence
  Description of Artificial Sequence: Synthetic oligonucleotide
  X-linked inhibitor of apoptosis (XIAP) siRNA
catcaatgcatatatagccagcc

SEQ ID NO: 16773 - DNA, 23 bp, Artificial Sequence
  Description of Artificial Sequence: Synthetic oligonucleotide
  X-linked inhibitor of apoptosis (XIAP) siRNA
atcaatgcatatatagccagccc

SEQ ID NO: 16774 - DNA, 23 bp, Artificial Sequence
  Description of Artificial Sequence: Synthetic oligonucleotide
  X-linked inhibitor of apoptosis (XIAP) siRNA
tcaatgcatatatagccagccct

SEQ ID NO: 16775 - DNA, 23 bp, Artificial Sequence
  Description of Artificial Sequence: Synthetic oligonucleotide
  X-linked inhibitor of apoptosis (XIAP) siRNA
caatgcatatatagccagccctt

SEQ ID NO: 16776 - DNA, 23 bp, Artificial Sequence
  Description of Artificial Sequence: Synthetic oligonucleotide
  X-linked inhibitor of apoptosis (XIAP) siRNA
aatgcatatatagccagcccttc

SEQ ID NO: 16777 - DNA, 23 bp, Artificial Sequence
  Description of Artificial Sequence: Synthetic oligonucleotide
  X-linked inhibitor of apoptosis (XIAP) siRNA
atgcatatatagccagcccttca

SEQ ID NO: 16778 - DNA, 23 bp, Artificial Sequence
  Description of Artificial Sequence: Synthetic oligonucleotide
  X-linked inhibitor of apoptosis (XIAP) siRNA
tgcatatatagccagcccttcat

SEQ ID NO: 16779 - DNA, 23 bp, Artificial Sequence
  Description of Artificial Sequence: Synthetic oligonucleotide
  X-linked inhibitor of apoptosis (XIAP) siRNA
gcatatatagccagcccttcata

SEQ ID NO: 16780 - DNA, 23 bp, Artificial Sequence
  Description of Artificial Sequence: Synthetic oligonucleotide
  X-linked inhibitor of apoptosis (XIAP) siRNA
catatatagccagcccttcatat

SEQ ID NO: 16781 - DNA, 23 bp, Artificial Sequence
  Description of Artificial Sequence: Synthetic oligonucleotide
  X-linked inhibitor of apoptosis (XIAP) siRNA
atatatagccagcccttcatatc

SEQ ID NO: 16782 - DNA, 23 bp, Artificial Sequence
  Description of Artificial Sequence: Synthetic oligonucleotide
  X-linked inhibitor of apoptosis (XIAP) siRNA
tatatagccagcccttcatatct

SEQ ID NO: 16783 - DNA, 23 bp, Artificial Sequence
  Description of Artificial Sequence: Synthetic oligonucleotide
  X-linked inhibitor of apoptosis (XIAP) siRNA
atatagccagcccttcatatctg

SEQ ID NO: 16784 - DNA, 23 bp, Artificial Sequence
  Description of Artificial Sequence: Synthetic oligonucleotide
  X-linked inhibitor of apoptosis (XIAP) siRNA
tatagccagcccttcatatctgt

SEQ ID NO: 16785 - DNA, 23 bp, Artificial Sequence
  Description of Artificial Sequence: Synthetic oligonucleotide
  X-linked inhibitor of apoptosis (XIAP) siRNA
atagccagcccttcatatctgtg

SEQ ID NO: 16786 - DNA, 23 bp, Artificial Sequence
  Description of Artificial Sequence: Synthetic oligonucleotide
  X-linked inhibitor of apoptosis (XIAP) siRNA
tagccagcccttcatatctgtgg

SEQ ID NO: 16787 - DNA, 23 bp, Artificial Sequence
  Description of Artificial Sequence: Synthetic oligonucleotide
  X-linked inhibitor of apoptosis (XIAP) siRNA
agccagcccttcatatctgtggg

SEQ ID NO: 16788 - DNA, 23 bp, Artificial Sequence
  Description of Artificial Sequence: Synthetic oligonucleotide
  X-linked inhibitor of apoptosis (XIAP) siRNA
gccagcccttcatatctgtgggt

SEQ ID NO: 16789 - DNA, 23 bp, Artificial Sequence
  Description of Artificial Sequence: Synthetic oligonucleotide
  X-linked inhibitor of apoptosis (XIAP) siRNA
ccagcccttcatatctgtgggtt

SEQ ID NO: 16790 - DNA, 23 bp, Artificial Sequence
  Description of Artificial Sequence: Synthetic oligonucleotide
  X-linked inhibitor of apoptosis (XIAP) siRNA
cagcccttcatatctgtgggttt

SEQ ID NO: 16791 - DNA, 23 bp, Artificial Sequence
  Description of Artificial Sequence: Synthetic oligonucleotide
  X-linked inhibitor of apoptosis (XIAP) siRNA
agcccttcatatctgtgggtttt

SEQ ID NO: 16792 - DNA, 23 bp, Artificial Sequence
  Description of Artificial Sequence: Synthetic oligonucleotide
  X-linked inhibitor of apoptosis (XIAP) siRNA
gcccttcatatctgtgggttttg

SEQ ID NO: 16793 - DNA, 23 bp, Artificial Sequence
  Description of Artificial Sequence: Synthetic oligonucleotide
  X-linked inhibitor of apoptosis (XIAP) siRNA
cccttcatatctgtgggttttgc

SEQ ID NO: 16794 - DNA, 23 bp, Artificial Sequence
  Description of Artificial Sequence: Synthetic oligonucleotide
  X-linked inhibitor of apoptosis (XIAP) siRNA
ccttcatatctgtgggttttgca

SEQ ID NO: 16795 - DNA, 23 bp, Artificial Sequence
  Description of Artificial Sequence: Synthetic oligonucleotide
  X-linked inhibitor of apoptosis (XIAP) siRNA
cttcatatctgtgggttttgcat

SEQ ID NO: 16796 - DNA, 23 bp, Artificial Sequence
  Description of Artificial Sequence: Synthetic oligonucleotide
  X-linked inhibitor of apoptosis (XIAP) siRNA
ttcatatctgtgggttttgcatc

SEQ ID NO: 16797 - DNA, 23 bp, Artificial Sequence
  Description of Artificial Sequence: Synthetic oligonucleotide
  X-linked inhibitor of apoptosis (XIAP) siRNA
tcatatctgtgggttttgcatcc

SEQ ID NO: 16798 - DNA, 23 bp, Artificial Sequence
  Description of Artificial Sequence: Synthetic oligonucleotide
  X-linked inhibitor of apoptosis (XIAP) siRNA
catatctgtgggttttgcatcca

SEQ ID NO: 16799 - DNA, 23 bp, Artificial Sequence
  Description of Artificial Sequence: Synthetic oligonucleotide
  X-linked inhibitor of apoptosis (XIAP) siRNA
atatctgtgggttttgcatccat

SEQ ID NO: 16800 - DNA, 23 bp, Artificial Sequence
  Description of Artificial Sequence: Synthetic oligonucleotide
  X-linked inhibitor of apoptosis (XIAP) siRNA
tatctgtgggttttgcatccatg

SEQ ID NO: 16801 - DNA, 23 bp, Artificial Sequence
  Description of Artificial Sequence: Synthetic oligonucleotide
  X-linked inhibitor of apoptosis (XIAP) siRNA
atctgtgggttttgcatccatgg

SEQ ID NO: 16802 - DNA, 23 bp, Artificial Sequence
  Description of Artificial Sequence: Synthetic oligonucleotide
  X-linked inhibitor of apoptosis (XIAP) siRNA
tctgtgggttttgcatccatgga

SEQ ID NO: 16803 - DNA, 23 bp, Artificial Sequence
  Description of Artificial Sequence: Synthetic oligonucleotide
  X-linked inhibitor of apoptosis (XIAP) siRNA
ctgtgggttttgcatccatggat

SEQ ID NO: 16804 - DNA, 23 bp, Artificial Sequence
  Description of Artificial Sequence: Synthetic oligonucleotide
  X-linked inhibitor of apoptosis (XIAP) siRNA
tgtgggttttgcatccatggatt

SEQ ID NO: 16805 - DNA, 23 bp, Artificial Sequence
  Description of Artificial Sequence: Synthetic oligonucleotide
  X-linked inhibitor of apoptosis (XIAP) siRNA
gtgggttttgcatccatggattc

SEQ ID NO: 16806 - DNA, 23 bp, Artificial Sequence
  Description of Artificial Sequence: Synthetic oligonucleotide
  X-linked inhibitor of apoptosis (XIAP) siRNA
tgggttttgcatccatggattca

SEQ ID NO: 16807 - DNA, 23 bp, Artificial Sequence
  Description of Artificial Sequence: Synthetic oligonucleotide
  X-linked inhibitor of apoptosis (XIAP) siRNA
gggttttgcatccatggattcaa

SEQ ID NO: 16808 - DNA, 23 bp, Artificial Sequence
  Description of Artificial Sequence: Synthetic oligonucleotide
  X-linked inhibitor of apoptosis (XIAP) siRNA
ggttttgcatccatggattcaac

SEQ ID NO: 16809 - DNA, 23 bp, Artificial Sequence
  Description of Artificial Sequence: Synthetic oligonucleotide
  X-linked inhibitor of apoptosis (XIAP) siRNA
gttttgcatccatggattcaacc

SEQ ID NO: 16810 - DNA, 23 bp, Artificial Sequence
  Description of Artificial Sequence: Synthetic oligonucleotide
  X-linked inhibitor of apoptosis (XIAP) siRNA
ttttgcatccatggattcaacca

SEQ ID NO: 16811 - DNA, 23 bp, Artificial Sequence
  Description of Artificial Sequence: Synthetic oligonucleotide
  X-linked inhibitor of apoptosis (XIAP) siRNA
tttgcatccatggattcaaccaa

SEQ ID NO: 16812 - DNA, 23 bp, Artificial Sequence
  Description of Artificial Sequence: Synthetic oligonucleotide
  X-linked inhibitor of apoptosis (XIAP) siRNA
ttgcatccatggattcaaccaag

SEQ ID NO: 16813 - DNA, 23 bp, Artificial Sequence
  Description of Artificial Sequence: Synthetic oligonucleotide
  X-linked inhibitor of apoptosis (XIAP) siRNA
tgcatccatggattcaaccaagg

SEQ ID NO: 16814 - DNA, 23 bp, Artificial Sequence
  Description of Artificial Sequence: Synthetic oligonucleotide
  X-linked inhibitor of apoptosis (XIAP) siRNA
gcatccatggattcaaccaagga

SEQ ID NO: 16815 - DNA, 23 bp, Artificial Sequence
  Description of Artificial Sequence: Synthetic oligonucleotide
  X-linked inhibitor of apoptosis (XIAP) siRNA
catccatggattcaaccaaggag

SEQ ID NO: 16816 - DNA, 23 bp, Artificial Sequence
  Description of Artificial Sequence: Synthetic oligonucleotide
  X-linked inhibitor of apoptosis (XIAP) siRNA
atccatggattcaaccaaggagg

SEQ ID NO: 16817 - DNA, 23 bp, Artificial Sequence
  Description of Artificial Sequence: Synthetic oligonucleotide
  X-linked inhibitor of apoptosis (XIAP) siRNA
tccatggattcaaccaaggagga

SEQ ID NO: 16818 - DNA, 23 bp, Artificial Sequence
  Description of Artificial Sequence: Synthetic oligonucleotide
  X-linked inhibitor of apoptosis (XIAP) siRNA
ccatggattcaaccaaggaggaa

SEQ ID NO: 16819 - DNA, 23 bp, Artificial Sequence
  Description of Artificial Sequence: Synthetic oligonucleotide
  X-linked inhibitor of apoptosis (XIAP) siRNA
catggattcaaccaaggaggaat

SEQ ID NO: 16820 - DNA, 23 bp, Artificial Sequence
  Description of Artificial Sequence: Synthetic oligonucleotide
  X-linked inhibitor of apoptosis (XIAP) siRNA
atggattcaaccaaggaggaatt

SEQ ID NO: 16821 - DNA, 23 bp, Artificial Sequence
  Description of Artificial Sequence: Synthetic oligonucleotide
  X-linked inhibitor of apoptosis (XIAP) siRNA
tggattcaaccaaggaggaattg

SEQ ID NO: 16822 - DNA, 23 bp, Artificial Sequence
  Description of Artificial Sequence: Synthetic oligonucleotide
  X-linked inhibitor of apoptosis (XIAP) siRNA
ggattcaaccaaggaggaattga

SEQ ID NO: 16823 - DNA, 23 bp, Artificial Sequence
  Description of Artificial Sequence: Synthetic oligonucleotide
  X-linked inhibitor of apoptosis (XIAP) siRNA
gattcaaccaaggaggaattgaa

SEQ ID NO: 16824 - DNA, 23 bp, Artificial Sequence
  Description of Artificial Sequence: Synthetic oligonucleotide
  X-linked inhibitor of apoptosis (XIAP) siRNA
attcaaccaaggaggaattgaaa

SEQ ID NO: 16825 - DNA, 23 bp, Artificial Sequence
  Description of Artificial Sequence: Synthetic oligonucleotide
  X-linked inhibitor of apoptosis (XIAP) siRNA
ttcaaccaaggaggaattgaaaa

SEQ ID NO: 16826 - DNA, 23 bp, Artificial Sequence
  Description of Artificial Sequence: Synthetic oligonucleotide
  X-linked inhibitor of apoptosis (XIAP) siRNA
tcaaccaaggaggaattgaaaac

SEQ ID NO: 16827 - DNA, 23 bp, Artificial Sequence
  Description of Artificial Sequence: Synthetic oligonucleotide
  X-linked inhibitor of apoptosis (XIAP) siRNA
caaccaaggaggaattgaaaaca

SEQ ID NO: 16828 - DNA, 23 bp, Artificial Sequence
  Description of Artificial Sequence: Synthetic oligonucleotide
  X-linked inhibitor of apoptosis (XIAP) siRNA
aaccaaggaggaattgaaaacac

SEQ ID NO: 16829 - DNA, 23 bp, Artificial Sequence
  Description of Artificial Sequence: Synthetic oligonucleotide
  X-linked inhibitor of apoptosis (XIAP) siRNA
accaaggaggaattgaaaacact

SEQ ID NO: 16830 - DNA, 23 bp, Artificial Sequence
  Description of Artificial Sequence: Synthetic oligonucleotide
  X-linked inhibitor of apoptosis (XIAP) siRNA
ccaaggaggaattgaaaacactg

SEQ ID NO: 16831 - DNA, 23 bp, Artificial Sequence
  Description of Artificial Sequence: Synthetic oligonucleotide
  X-linked inhibitor of apoptosis (XIAP) siRNA
caaggaggaattgaaaacactga

SEQ ID NO: 16832 - DNA, 23 bp, Artificial Sequence
  Description of Artificial Sequence: Synthetic oligonucleotide
  X-linked inhibitor of apoptosis (XIAP) siRNA
aaggaggaattgaaaacactgag

SEQ ID NO: 16833 - DNA, 23 bp, Artificial Sequence
  Description of Artificial Sequence: Synthetic oligonucleotide
  X-linked inhibitor of apoptosis (XIAP) siRNA
aggaggaattgaaaacactgaga

SEQ ID NO: 16834 - DNA, 23 bp, Artificial Sequence
  Description of Artificial Sequence: Synthetic oligonucleotide
  X-linked inhibitor of apoptosis (XIAP) siRNA
ggaggaattgaaaacactgagaa

SEQ ID NO: 16835 - DNA, 23 bp, Artificial Sequence
  Description of Artificial Sequence: Synthetic oligonucleotide
  X-linked inhibitor of apoptosis (XIAP) siRNA
gaggaattgaaaacactgagaaa

SEQ ID NO: 16836 - DNA, 23 bp, Artificial Sequence
  Description of Artificial Sequence: Synthetic oligonucleotide
  X-linked inhibitor of apoptosis (XIAP) siRNA
aggaattgaaaacactgagaaaa

SEQ ID NO: 16837 - DNA, 23 bp, Artificial Sequence
  Description of Artificial Sequence: Synthetic oligonucleotide
  X-linked inhibitor of apoptosis (XIAP) siRNA
ggaattgaaaacactgagaaaaa

SEQ ID NO: 16838 - DNA, 23 bp, Artificial Sequence
  Description of Artificial Sequence: Synthetic oligonucleotide
  X-linked inhibitor of apoptosis (XIAP) siRNA
gaattgaaaacactgagaaaaaa

SEQ ID NO: 16839 - DNA, 23 bp, Artificial Sequence
  Description of Artificial Sequence: Synthetic oligonucleotide
  X-linked inhibitor of apoptosis (XIAP) siRNA
aattgaaaacactgagaaaaaaa

SEQ ID NO: 16840 - DNA, 23 bp, Artificial Sequence
  Description of Artificial Sequence: Synthetic oligonucleotide
  X-linked inhibitor of apoptosis (XIAP) siRNA
attgaaaacactgagaaaaaaaa

SEQ ID NO: 16841 - DNA, 23 bp, Artificial Sequence
  Description of Artificial Sequence: Synthetic oligonucleotide
  X-linked inhibitor of apoptosis (XIAP) siRNA
aaaaaaaagaccacacaataaaa

SEQ ID NO: 16842 - DNA, 23 bp, Artificial Sequence
  Description of Artificial Sequence: Synthetic oligonucleotide
  X-linked inhibitor of apoptosis (XIAP) siRNA
aaaaaaagaccacacaataaaaa

SEQ ID NO: 16843 - DNA, 23 bp, Artificial Sequence
  Description of Artificial Sequence: Synthetic oligonucleotide
  X-linked inhibitor of apoptosis (XIAP) siRNA
aaaaaagaccacacaataaaaaa

SEQ ID NO: 16844 - DNA, 23 bp, Artificial Sequence
  Description of Artificial Sequence: Synthetic oligonucleotide
  X-linked inhibitor of apoptosis (XIAP) siRNA
aaaaagaccacacaataaaaaaa

SEQ ID NO: 16845 - DNA, 23 bp, Artificial Sequence
  Description of Artificial Sequence: Synthetic oligonucleotide
  X-linked inhibitor of apoptosis (XIAP) siRNA
aaaagaccacacaataaaaaaaa

SEQ ID NO: 16846 - DNA, 23 bp, Artificial Sequence
  Description of Artificial Sequence: Synthetic oligonucleotide
  X-linked inhibitor of apoptosis (XIAP) siRNA
aaaaaaaatacaaaataatacaa

SEQ ID NO: 16847 - DNA, 23 bp, Artificial Sequence
  Description of Artificial Sequence: Synthetic oligonucleotide
  X-linked inhibitor of apoptosis (XIAP) siRNA
aaaaaaatacaaaataatacaaa

SEQ ID NO: 16848 - DNA, 23 bp, Artificial Sequence
  Description of Artificial Sequence: Synthetic oligonucleotide
  X-linked inhibitor of apoptosis (XIAP) siRNA
aaaaaatacaaaataatacaaag

SEQ ID NO: 16849 - DNA, 23 bp, Artificial Sequence
  Description of Artificial Sequence: Synthetic oligonucleotide
  X-linked inhibitor of apoptosis (XIAP) siRNA
aaaaatacaaaataatacaaaga

SEQ ID NO: 16850 - DNA, 23 bp, Artificial Sequence
  Description of Artificial Sequence: Synthetic oligonucleotide
  X-linked inhibitor of apoptosis (XIAP) siRNA
aaaatacaaaataatacaaagaa

SEQ ID NO: 16851 - DNA, 23 bp, Artificial Sequence
  Description of Artificial Sequence: Synthetic oligonucleotide
  X-linked inhibitor of apoptosis (XIAP) siRNA
aaatacaaaataatacaaagaaa

SEQ ID NO: 16852 - DNA, 23 bp, Artificial Sequence
  Description of Artificial Sequence: Synthetic oligonucleotide
  X-linked inhibitor of apoptosis (XIAP) siRNA
aatacaaaataatacaaagaaaa

SEQ ID NO: 16853 - DNA, 23 bp, Artificial Sequence
  Description of Artificial Sequence: Synthetic oligonucleotide
  X-linked inhibitor of apoptosis (XIAP) siRNA
atacaaaataatacaaagaaaaa

SEQ ID NO: 16854 - DNA, 23 bp, Artificial Sequence
  Description of Artificial Sequence: Synthetic oligonucleotide
  X-linked inhibitor of apoptosis (XIAP) siRNA
tacaaaataatacaaagaaaaag

SEQ ID NO: 16855 - DNA, 23 bp, Artificial Sequence
  Description of Artificial Sequence: Synthetic oligonucleotide
  X-linked inhibitor of apoptosis (XIAP) siRNA
acaaaataatacaaagaaaaagc

SEQ ID NO: 16856 - DNA, 23 bp, Artificial Sequence
  Description of Artificial Sequence: Synthetic oligonucleotide
  X-linked inhibitor of apoptosis (XIAP) siRNA
caaaataatacaaagaaaaagcc

SEQ ID NO: 16857 - DNA, 23 bp, Artificial Sequence
  Description of Artificial Sequence: Synthetic oligonucleotide
  X-linked inhibitor of apoptosis (XIAP) siRNA
aaaataatacaaagaaaaagcca

SEQ ID NO: 16858 - DNA, 23 bp, Artificial Sequence
  Description of Artificial Sequence: Synthetic oligonucleotide
  X-linked inhibitor of apoptosis (XIAP) siRNA
aaataatacaaagaaaaagccaa

SEQ ID NO: 16859 - DNA, 23 bp, Artificial Sequence
  Description of Artificial Sequence: Synthetic oligonucleotide
  X-linked inhibitor of apoptosis (XIAP) siRNA
aataatacaaagaaaaagccaaa

SEQ ID NO: 16860 - DNA, 23 bp, Artificial Sequence
  Description of Artificial Sequence: Synthetic oligonucleotide
  X-linked inhibitor of apoptosis (XIAP) siRNA
ataatacaaagaaaaagccaaaa

SEQ ID NO: 16861 - DNA, 23 bp, Artificial Sequence
  Description of Artificial Sequence: Synthetic oligonucleotide
  X-linked inhibitor of apoptosis (XIAP) siRNA
taatacaaagaaaaagccaaaat

SEQ ID NO: 16862 - DNA, 23 bp, Artificial Sequence
  Description of Artificial Sequence: Synthetic oligonucleotide
  X-linked inhibitor of apoptosis (XIAP) siRNA
aatacaaagaaaaagccaaaatt

SEQ ID NO: 16863 - DNA, 23 bp, Artificial Sequence
  Description of Artificial Sequence: Synthetic oligonucleotide
  X-linked inhibitor of apoptosis (XIAP) siRNA
atacaaagaaaaagccaaaattg

SEQ ID NO: 16864 - DNA, 23 bp, Artificial Sequence
  Description of Artificial Sequence: Synthetic oligonucleotide
  X-linked inhibitor of apoptosis (XIAP) siRNA
tacaaagaaaaagccaaaattgt

SEQ ID NO: 16865 - DNA, 23 bp, Artificial Sequence
  Description of Artificial Sequence: Synthetic oligonucleotide
  X-linked inhibitor of apoptosis (XIAP) siRNA
acaaagaaaaagccaaaattgtc

SEQ ID NO: 16866 - DNA, 23 bp, Artificial Sequence
  Description of Artificial Sequence: Synthetic oligonucleotide
  X-linked inhibitor of apoptosis (XIAP) siRNA
caaagaaaaagccaaaattgtca

SEQ ID NO: 16867 - DNA, 23 bp, Artificial Sequence
  Description of Artificial Sequence: Synthetic oligonucleotide
  X-linked inhibitor of apoptosis (XIAP) siRNA
aaagaaaaagccaaaattgtcat

SEQ ID NO: 16868 - DNA, 23 bp, Artificial Sequence
  Description of Artificial Sequence: Synthetic oligonucleotide
  X-linked inhibitor of apoptosis (XIAP) siRNA
aagaaaaagccaaaattgtcata

SEQ ID NO: 16869 - DNA, 23 bp, Artificial Sequence
  Description of Artificial Sequence: Synthetic oligonucleotide
  X-linked inhibitor of apoptosis (XIAP) siRNA
agaaaaagccaaaattgtcatac

SEQ ID NO: 16870 - DNA, 23 bp, Artificial Sequence
  Description of Artificial Sequence: Synthetic oligonucleotide
  X-linked inhibitor of apoptosis (XIAP) siRNA
gaaaaagccaaaattgtcatact

SEQ ID NO: 16871 - DNA, 23 bp, Artificial Sequence
  Description of Artificial Sequence: Synthetic oligonucleotide
  X-linked inhibitor of apoptosis (XIAP) siRNA
aaaaagccaaaattgtcatactg

SEQ ID NO: 16872 - DNA, 23 bp, Artificial Sequence
  Description of Artificial Sequence: Synthetic oligonucleotide
  X-linked inhibitor of apoptosis (XIAP) siRNA
aaaagccaaaattgtcatactgt

SEQ ID NO: 16873 - DNA, 23 bp, Artificial Sequence
  Description of Artificial Sequence: Synthetic oligonucleotide
  X-linked inhibitor of apoptosis (XIAP) siRNA
aaagccaaaattgtcatactgtt

SEQ ID NO: 16874 - DNA, 23 bp, Artificial Sequence
  Description of Artificial Sequence: Synthetic oligonucleotide
  X-linked inhibitor of apoptosis (XIAP) siRNA
aagccaaaattgtcatactgttg

SEQ ID NO: 16875 - DNA, 23 bp, Artificial Sequence
  Description of Artificial Sequence: Synthetic oligonucleotide
  X-linked inhibitor of apoptosis (XIAP) siRNA
agccaaaattgtcatactgttgt

SEQ ID NO: 16876 - DNA, 23 bp, Artificial Sequence
  Description of Artificial Sequence: Synthetic oligonucleotide
  X-linked inhibitor of apoptosis (XIAP) siRNA
gccaaaattgtcatactgttgtt

SEQ ID NO: 16877 - DNA, 23 bp, Artificial Sequence
  Description of Artificial Sequence: Synthetic oligonucleotide
  X-linked inhibitor of apoptosis (XIAP) siRNA
ccaaaattgtcatactgttgtta

SEQ ID NO: 16878 - DNA, 23 bp, Artificial Sequence
  Description of Artificial Sequence: Synthetic oligonucleotide
  X-linked inhibitor of apoptosis (XIAP) siRNA
caaaattgtcatactgttgttaa

SEQ ID NO: 16879 - DNA, 23 bp, Artificial Sequence
  Description of Artificial Sequence: Synthetic oligonucleotide
  X-linked inhibitor of apoptosis (XIAP) siRNA
aaaattgtcatactgttgttaag

SEQ ID NO: 16880 - DNA, 23 bp, Artificial Sequence
  Description of Artificial Sequence: Synthetic oligonucleotide
  X-linked inhibitor of apoptosis (XIAP) siRNA
aaattgtcatactgttgttaagc

SEQ ID NO: 16881 - DNA, 23 bp, Artificial Sequence
  Description of Artificial Sequence: Synthetic oligonucleotide
  X-linked inhibitor of apoptosis (XIAP) siRNA
aattgtcatactgttgttaagca

SEQ ID NO: 16882 - DNA, 23 bp, Artificial Sequence
  Description of Artificial Sequence: Synthetic oligonucleotide
  X-linked inhibitor of apoptosis (XIAP) siRNA
attgtcatactgttgttaagcaa

SEQ ID NO: 16883 - DNA, 23 bp, Artificial Sequence
  Description of Artificial Sequence: Synthetic oligonucleotide
  X-linked inhibitor of apoptosis (XIAP) siRNA
ttgtcatactgttgttaagcaac

SEQ ID NO: 16884 - DNA, 23 bp, Artificial Sequence
  Description of Artificial Sequence: Synthetic oligonucleotide
  X-linked inhibitor of apoptosis (XIAP) siRNA
tgtcatactgttgttaagcaaca

SEQ ID NO: 16885 - DNA, 23 bp, Artificial Sequence
  Description of Artificial Sequence: Synthetic oligonucleotide
  X-linked inhibitor of apoptosis (XIAP) siRNA
gtcatactgttgttaagcaacag

SEQ ID NO: 16886 - DNA, 23 bp, Artificial Sequence
  Description of Artificial Sequence: Synthetic oligonucleotide
  X-linked inhibitor of apoptosis (XIAP) siRNA
tcatactgttgttaagcaacagt

SEQ ID NO: 16887 - DNA, 23 bp, Artificial Sequence
  Description of Artificial Sequence: Synthetic oligonucleotide
  X-linked inhibitor of apoptosis (XIAP) siRNA
catactgttgttaagcaacagta

SEQ ID NO: 16888 - DNA, 23 bp, Artificial Sequence
  Description of Artificial Sequence: Synthetic oligonucleotide
  X-linked inhibitor of apoptosis (XIAP) siRNA
atactgttgttaagcaacagtat

SEQ ID NO: 16889 - DNA, 23 bp, Artificial Sequence
  Description of Artificial Sequence: Synthetic oligonucleotide
  X-linked inhibitor of apoptosis (XIAP) siRNA
tactgttgttaagcaacagtata

SEQ ID NO: 16890 - DNA, 23 bp, Artificial Sequence
  Description of Artificial Sequence: Synthetic oligonucleotide
  X-linked inhibitor of apoptosis (XIAP) siRNA
actgttgttaagcaacagtataa

SEQ ID NO: 16891 - DNA, 23 bp, Artificial Sequence
  Description of Artificial Sequence: Synthetic oligonucleotide
  X-linked inhibitor of apoptosis (XIAP) siRNA
ctgttgttaagcaacagtataac

SEQ ID NO: 16892 - DNA, 23 bp, Artificial Sequence
  Description of Artificial Sequence: Synthetic oligonucleotide
  X-linked inhibitor of apoptosis (XIAP) siRNA
tgttgttaagcaacagtataaca

SEQ ID NO: 16893 - DNA, 23 bp, Artificial Sequence
  Description of Artificial Sequence: Synthetic oligonucleotide
  X-linked inhibitor of apoptosis (XIAP) siRNA
gttgttaagcaacagtataacaa

SEQ ID NO: 16894 - DNA, 23 bp, Artificial Sequence
  Description of Artificial Sequence: Synthetic oligonucleotide
  X-linked inhibitor of apoptosis (XIAP) siRNA
ttgttaagcaacagtataacaac

SEQ ID NO: 16895 - DNA, 23 bp, Artificial Sequence
  Description of Artificial Sequence: Synthetic oligonucleotide
  X-linked inhibitor of apoptosis (XIAP) siRNA
tgttaagcaacagtataacaact

SEQ ID NO: 16896 - DNA, 23 bp, Artificial Sequence
  Description of Artificial Sequence: Synthetic oligonucleotide
  X-linked inhibitor of apoptosis (XIAP) siRNA
gttaagcaacagtataacaacta

SEQ ID NO: 16897 - DNA, 23 bp, Artificial Sequence
  Description of Artificial Sequence: Synthetic oligonucleotide
  X-linked inhibitor of apoptosis (XIAP) siRNA
ttaagcaacagtataacaactat

SEQ ID NO: 16898 - DNA, 23 bp, Artificial Sequence
  Description of Artificial Sequence: Synthetic oligonucleotide
  X-linked inhibitor of apoptosis (XIAP) siRNA
taagcaacagtataacaactatt

SEQ ID NO: 16899 - DNA, 23 bp, Artificial Sequence
  Description of Artificial Sequence: Synthetic oligonucleotide
  X-linked inhibitor of apoptosis (XIAP) siRNA
aagcaacagtataacaactattt

SEQ ID NO: 16900 - DNA, 23 bp, Artificial Sequence
  Description of Artificial Sequence: Synthetic oligonucleotide
  X-linked inhibitor of apoptosis (XIAP) siRNA
agcaacagtataacaactattta

SEQ ID NO: 16901 - DNA, 23 bp, Artificial Sequence
  Description of Artificial Sequence: Synthetic oligonucleotide
  X-linked inhibitor of apoptosis (XIAP) siRNA
gcaacagtataacaactatttac

SEQ ID NO: 16902 - DNA, 23 bp, Artificial Sequence
  Description of Artificial Sequence: Synthetic oligonucleotide
  X-linked inhibitor of apoptosis (XIAP) siRNA
caacagtataacaactatttaca

SEQ ID NO: 16903 - DNA, 23 bp, Artificial Sequence
  Description of Artificial Sequence: Synthetic oligonucleotide
  X-linked inhibitor of apoptosis (XIAP) siRNA
aacagtataacaactatttacat

SEQ ID NO: 16904 - DNA, 23 bp, Artificial Sequence
  Description of Artificial Sequence: Synthetic oligonucleotide
  X-linked inhibitor of apoptosis (XIAP) siRNA
acagtataacaactatttacata

SEQ ID NO: 16905 - DNA, 23 bp, Artificial Sequence
  Description of Artificial Sequence: Synthetic oligonucleotide
  X-linked inhibitor of apoptosis (XIAP) siRNA
cagtataacaactatttacatag

SEQ ID NO: 16906 - DNA, 23 bp, Artificial Sequence
  Description of Artificial Sequence: Synthetic oligonucleotide
  X-linked inhibitor of apoptosis (XIAP) siRNA
agtataacaactatttacatagc

SEQ ID NO: 16907 - DNA, 23 bp, Artificial Sequence
  Description of Artificial Sequence: Synthetic oligonucleotide
  X-linked inhibitor of apoptosis (XIAP) siRNA
gtataacaactatttacatagca

SEQ ID NO: 16908 - DNA, 23 bp, Artificial Sequence
  Description of Artificial Sequence: Synthetic oligonucleotide
  X-linked inhibitor of apoptosis (XIAP) siRNA
tataacaactatttacatagcat

SEQ ID NO: 16909 - DNA, 23 bp, Artificial Sequence
  Description of Artificial Sequence: Synthetic oligonucleotide
  X-linked inhibitor of apoptosis (XIAP) siRNA
ataacaactatttacatagcatt

SEQ ID NO: 16910 - DNA, 23 bp, Artificial Sequence
  Description of Artificial Sequence: Synthetic oligonucleotide
  X-linked inhibitor of apoptosis (XIAP) siRNA
taacaactatttacatagcatta

SEQ ID NO: 16911 - DNA, 23 bp, Artificial Sequence
  Description of Artificial Sequence: Synthetic oligonucleotide
  X-linked inhibitor of apoptosis (XIAP) siRNA
aacaactatttacatagcattaa

SEQ ID NO: 16912 - DNA, 23 bp, Artificial Sequence
  Description of Artificial Sequence: Synthetic oligonucleotide
  X-linked inhibitor of apoptosis (XIAP) siRNA
acaactatttacatagcattaag

SEQ ID NO: 16913 - DNA, 23 bp, Artificial Sequence
  Description of Artificial Sequence: Synthetic oligonucleotide
  X-linked inhibitor of apoptosis (XIAP) siRNA
caactatttacatagcattaagg

SEQ ID NO: 16914 - DNA, 23 bp, Artificial Sequence
  Description of Artificial Sequence: Synthetic oligonucleotide
  X-linked inhibitor of apoptosis (XIAP) siRNA
aactatttacatagcattaaggt

SEQ ID NO: 16915 - DNA, 23 bp, Artificial Sequence
  Description of Artificial Sequence: Synthetic oligonucleotide
  X-linked inhibitor of apoptosis (XIAP) siRNA
actatttacatagcattaaggtt

SEQ ID NO: 16916 - DNA, 23 bp, Artificial Sequence
  Description of Artificial Sequence: Synthetic oligonucleotide
  X-linked inhibitor of apoptosis (XIAP) siRNA
ctatttacatagcattaaggttg

SEQ ID NO: 16917 - DNA, 23 bp, Artificial Sequence
  Description of Artificial Sequence: Synthetic oligonucleotide
  X-linked inhibitor of apoptosis (XIAP) siRNA
tatttacatagcattaaggttgg

SEQ ID NO: 16918 - DNA, 23 bp, Artificial Sequence
  Description of Artificial Sequence: Synthetic oligonucleotide
  X-linked inhibitor of apoptosis (XIAP) siRNA
atttacatagcattaaggttggt

SEQ ID NO: 16919 - DNA, 23 bp, Artificial Sequence
  Description of Artificial Sequence: Synthetic oligonucleotide
  X-linked inhibitor of apoptosis (XIAP) siRNA
tttacatagcattaaggttggtg

SEQ ID NO: 16920 - DNA, 23 bp, Artificial Sequence
  Description of Artificial Sequence: Synthetic oligonucleotide
  X-linked inhibitor of apoptosis (XIAP) siRNA
ttacatagcattaaggttggtgc

SEQ ID NO: 16921 - DNA, 23 bp, Artificial Sequence
  Description of Artificial Sequence: Synthetic oligonucleotide
  X-linked inhibitor of apoptosis (XIAP) siRNA
tacatagcattaaggttggtgca

SEQ ID NO: 16922 - DNA, 23 bp, Artificial Sequence
  Description of Artificial Sequence: Synthetic oligonucleotide
  X-linked inhibitor of apoptosis (XIAP) siRNA
acatagcattaaggttggtgcaa

SEQ ID NO: 16923 - DNA, 23 bp, Artificial Sequence
  Description of Artificial Sequence: Synthetic oligonucleotide
  X-linked inhibitor of apoptosis (XIAP) siRNA
catagcattaaggttggtgcaaa

SEQ ID NO: 16924 - DNA, 23 bp, Artificial Sequence
  Description of Artificial Sequence: Synthetic oligonucleotide
  X-linked inhibitor of apoptosis (XIAP) siRNA
atagcattaaggttggtgcaaaa

SEQ ID NO: 16925 - DNA, 23 bp, Artificial Sequence
  Description of Artificial Sequence: Synthetic oligonucleotide
  X-linked inhibitor of apoptosis (XIAP) siRNA
tagcattaaggttggtgcaaaaa

SEQ ID NO: 16926 - DNA, 23 bp, Artificial Sequence
  Description of Artificial Sequence: Synthetic oligonucleotide
  X-linked inhibitor of apoptosis (XIAP) siRNA
agcattaaggttggtgcaaaaat

SEQ ID NO: 16927 - DNA, 23 bp, Artificial Sequence
  Description of Artificial Sequence: Synthetic oligonucleotide
  X-linked inhibitor of apoptosis (XIAP) siRNA
gcattaaggttggtgcaaaaatg

SEQ ID NO: 16928 - DNA, 23 bp, Artificial Sequence
  Description of Artificial Sequence: Synthetic oligonucleotide
  X-linked inhibitor of apoptosis (XIAP) siRNA
cattaaggttggtgcaaaaatgc

SEQ ID NO: 16929 - DNA, 23 bp, Artificial Sequence
  Description of Artificial Sequence: Synthetic oligonucleotide
  X-linked inhibitor of apoptosis (XIAP) siRNA
attaaggttggtgcaaaaatgca

SEQ ID NO: 16930 - DNA, 23 bp, Artificial Sequence
  Description of Artificial Sequence: Synthetic oligonucleotide
  X-linked inhibitor of apoptosis (XIAP) siRNA
ttaaggttggtgcaaaaatgcaa

SEQ ID NO: 16931 - DNA, 23 bp, Artificial Sequence
  Description of Artificial Sequence: Synthetic oligonucleotide
  X-linked inhibitor of apoptosis (XIAP) siRNA
taaggttggtgcaaaaatgcaaa

SEQ ID NO: 16932 - DNA, 23 bp, Artificial Sequence
  Description of Artificial Sequence: Synthetic oligonucleotide
  X-linked inhibitor of apoptosis (XIAP) siRNA
aaggttggtgcaaaaatgcaaaa

SEQ ID NO: 16933 - DNA, 23 bp, Artificial Sequence
  Description of Artificial Sequence: Synthetic oligonucleotide
  X-linked inhibitor of apoptosis (XIAP) siRNA
aggttggtgcaaaaatgcaaaaa

SEQ ID NO: 16934 - DNA, 23 bp, Artificial Sequence
  Description of Artificial Sequence: Synthetic oligonucleotide
  X-linked inhibitor of apoptosis (XIAP) siRNA
ggttggtgcaaaaatgcaaaaaa

SEQ ID NO: 16935 - DNA, 23 bp, Artificial Sequence
  Description of Artificial Sequence: Synthetic oligonucleotide
  X-linked inhibitor of apoptosis (XIAP) siRNA
gttggtgcaaaaatgcaaaaaaa

SEQ ID NO: 16936 - DNA, 23 bp, Artificial Sequence
  Description of Artificial Sequence: Synthetic oligonucleotide
  X-linked inhibitor of apoptosis (XIAP) siRNA
ttggtgcaaaaatgcaaaaaaaa

SEQ ID NO: 16937 - DNA, 23 bp, Artificial Sequence
  Description of Artificial Sequence: Synthetic oligonucleotide
  X-linked inhibitor of apoptosis (XIAP) siRNA
aaaaaaaagcaattatttttaaa

SEQ ID NO: 16938 - DNA, 23 bp, Artificial Sequence
  Description of Artificial Sequence: Synthetic oligonucleotide
  X-linked inhibitor of apoptosis (XIAP) siRNA
aaaaaaagcaattatttttaaac

SEQ ID NO: 16939 - DNA, 23 bp, Artificial Sequence
  Description of Artificial Sequence: Synthetic oligonucleotide
  X-linked inhibitor of apoptosis (XIAP) siRNA
aaaaaagcaattatttttaaacc

SEQ ID NO: 16940 - DNA, 23 bp, Artificial Sequence
  Description of Artificial Sequence: Synthetic oligonucleotide
  X-linked inhibitor of apoptosis (XIAP) siRNA
aaaaagcaattatttttaaacca

SEQ ID NO: 16941 - DNA, 23 bp, Artificial Sequence
  Description of Artificial Sequence: Synthetic oligonucleotide
  X-linked inhibitor of apoptosis (XIAP) siRNA
aaaagcaattatttttaaaccaa

SEQ ID NO: 16942 - DNA, 23 bp, Artificial Sequence
  Description of Artificial Sequence: Synthetic oligonucleotide
  X-linked inhibitor of apoptosis (XIAP) siRNA
aaagcaattatttttaaaccaac

SEQ ID NO: 16943 - DNA, 23 bp, Artificial Sequence
  Description of Artificial Sequence: Synthetic oligonucleotide
  X-linked inhibitor of apoptosis (XIAP) siRNA
aagcaattatttttaaaccaacc

SEQ ID NO: 16944 - DNA, 23 bp, Artificial Sequence
  Description of Artificial Sequence: Synthetic oligonucleotide
  X-linked inhibitor of apoptosis (XIAP) siRNA
agcaattatttttaaaccaacct

SEQ ID NO: 16945 - DNA, 23 bp, Artificial Sequence
  Description of Artificial Sequence: Synthetic oligonucleotide
  X-linked inhibitor of apoptosis (XIAP) siRNA
gcaattatttttaaaccaaccta

SEQ ID NO: 16946 - DNA, 23 bp, Artificial Sequence
  Description of Artificial Sequence: Synthetic oligonucleotide
  X-linked inhibitor of apoptosis (XIAP) siRNA
caattatttttaaaccaacctaa

SEQ ID NO: 16947 - DNA, 23 bp, Artificial Sequence
  Description of Artificial Sequence: Synthetic oligonucleotide
  X-linked inhibitor of apoptosis (XIAP) siRNA
aattatttttaaaccaacctaat

SEQ ID NO: 16948 - DNA, 23 bp, Artificial Sequence
  Description of Artificial Sequence: Synthetic oligonucleotide
  X-linked inhibitor of apoptosis (XIAP) siRNA
attatttttaaaccaacctaata

SEQ ID NO: 16949 - DNA, 23 bp, Artificial Sequence
  Description of Artificial Sequence: Synthetic oligonucleotide
  X-linked inhibitor of apoptosis (XIAP) siRNA
ttatttttaaaccaacctaatat

SEQ ID NO: 16950 - DNA, 23 bp, Artificial Sequence
  Description of Artificial Sequence: Synthetic oligonucleotide
  X-linked inhibitor of apoptosis (XIAP) siRNA
tatttttaaaccaacctaatata

SEQ ID NO: 16951 - DNA, 23 bp, Artificial Sequence
  Description of Artificial Sequence: Synthetic oligonucleotide
  X-linked inhibitor of apoptosis (XIAP) siRNA
atttttaaaccaacctaatatat

SEQ ID NO: 16952 - DNA, 23 bp, Artificial Sequence
  Description of Artificial Sequence: Synthetic oligonucleotide
  X-linked inhibitor of apoptosis (XIAP) siRNA
tttttaaaccaacctaatatatt

SEQ ID NO: 16953 - DNA, 23 bp, Artificial Sequence
  Description of Artificial Sequence: Synthetic oligonucleotide
  X-linked inhibitor of apoptosis (XIAP) siRNA
ttttaaaccaacctaatatattg

SEQ ID NO: 16954 - DNA, 23 bp, Artificial Sequence
  Description of Artificial Sequence: Synthetic oligonucleotide
  X-linked inhibitor of apoptosis (XIAP) siRNA
tttaaaccaacctaatatattgt

SEQ ID NO: 16955 - DNA, 23 bp, Artificial Sequence
  Description of Artificial Sequence: Synthetic oligonucleotide
  X-linked inhibitor of apoptosis (XIAP) siRNA
ttaaaccaacctaatatattgta

SEQ ID NO: 16956 - DNA, 23 bp, Artificial Sequence
  Description of Artificial Sequence: Synthetic oligonucleotide
  X-linked inhibitor of apoptosis (XIAP) siRNA
taaaccaacctaatatattgtat

SEQ ID NO: 16957 - DNA, 23 bp, Artificial Sequence
  Description of Artificial Sequence: Synthetic oligonucleotide
  X-linked inhibitor of apoptosis (XIAP) siRNA
aaaccaacctaatatattgtatt

SEQ ID NO: 16958 - DNA, 23 bp, Artificial Sequence
  Description of Artificial Sequence: Synthetic oligonucleotide
  X-linked inhibitor of apoptosis (XIAP) siRNA
aaccaacctaatatattgtatta

SEQ ID NO: 16959 - DNA, 23 bp, Artificial Sequence
  Description of Artificial Sequence: Synthetic oligonucleotide
  X-linked inhibitor of apoptosis (XIAP) siRNA
accaacctaatatattgtattag

SEQ ID NO: 16960 - DNA, 23 bp, Artificial Sequence
  Description of Artificial Sequence: Synthetic oligonucleotide
  X-linked inhibitor of apoptosis (XIAP) siRNA
ccaacctaatatattgtattagg

SEQ ID NO: 16961 - DNA, 23 bp, Artificial Sequence
  Description of Artificial Sequence: Synthetic oligonucleotide
  X-linked inhibitor of apoptosis (XIAP) siRNA
caacctaatatattgtattaggt

SEQ ID NO: 16962 - DNA, 23 bp, Artificial Sequence
  Description of Artificial Sequence: Synthetic oligonucleotide
  X-linked inhibitor of apoptosis (XIAP) siRNA
aacctaatatattgtattaggta

SEQ ID NO: 16963 - DNA, 23 bp, Artificial Sequence
  Description of Artificial Sequence: Synthetic oligonucleotide
  X-linked inhibitor of apoptosis (XIAP) siRNA
acctaatatattgtattaggtat

SEQ ID NO: 16964 - DNA, 23 bp, Artificial Sequence
  Description of Artificial Sequence: Synthetic oligonucleotide
  X-linked inhibitor of apoptosis (XIAP) siRNA
cctaatatattgtattaggtatt

SEQ ID NO: 16965 - DNA, 23 bp, Artificial Sequence
  Description of Artificial Sequence: Synthetic oligonucleotide
  X-linked inhibitor of apoptosis (XIAP) siRNA
ctaatatattgtattaggtatta

SEQ ID NO: 16966 - DNA, 23 bp, Artificial Sequence
  Description of Artificial Sequence: Synthetic oligonucleotide
  X-linked inhibitor of apoptosis (XIAP) siRNA
taatatattgtattaggtattaa

SEQ ID NO: 16967 - DNA, 23 bp, Artificial Sequence
  Description of Artificial Sequence: Synthetic oligonucleotide
  X-linked inhibitor of apoptosis (XIAP) siRNA
aatatattgtattaggtattaaa

SEQ ID NO: 16968 - DNA, 23 bp, Artificial Sequence
  Description of Artificial Sequence: Synthetic oligonucleotide
  X-linked inhibitor of apoptosis (XIAP) siRNA
atatattgtattaggtattaaag

SEQ ID NO: 16969 - DNA, 23 bp, Artificial Sequence
  Description of Artificial Sequence: Synthetic oligonucleotide
  X-linked inhibitor of apoptosis (XIAP) siRNA
tatattgtattaggtattaaagt

SEQ ID NO: 16970 - DNA, 23 bp, Artificial Sequence
  Description of Artificial Sequence: Synthetic oligonucleotide
  X-linked inhibitor of apoptosis (XIAP) siRNA
atattgtattaggtattaaagtc

SEQ ID NO: 16971 - DNA, 23 bp, Artificial Sequence
  Description of Artificial Sequence: Synthetic oligonucleotide
  X-linked inhibitor of apoptosis (XIAP) siRNA
tattgtattaggtattaaagtca

SEQ ID NO: 16972 - DNA, 23 bp, Artificial Sequence
  Description of Artificial Sequence: Synthetic oligonucleotide
  X-linked inhibitor of apoptosis (XIAP) siRNA
attgtattaggtattaaagtcat

SEQ ID NO: 16973 - DNA, 23 bp, Artificial Sequence
  Description of Artificial Sequence: Synthetic oligonucleotide
  X-linked inhibitor of apoptosis (XIAP) siRNA
ttgtattaggtattaaagtcatc

SEQ ID NO: 16974 - DNA, 23 bp, Artificial Sequence
  Description of Artificial Sequence: Synthetic oligonucleotide
  X-linked inhibitor of apoptosis (XIAP) siRNA
tgtattaggtattaaagtcatct

SEQ ID NO: 16975 - DNA, 23 bp, Artificial Sequence
  Description of Artificial Sequence: Synthetic oligonucleotide
  X-linked inhibitor of apoptosis (XIAP) siRNA
gtattaggtattaaagtcatctg

SEQ ID NO: 16976 - DNA, 23 bp, Artificial Sequence
  Description of Artificial Sequence: Synthetic oligonucleotide
  X-linked inhibitor of apoptosis (XIAP) siRNA
tattaggtattaaagtcatctgg

SEQ ID NO: 16977 - DNA, 23 bp, Artificial Sequence
  Description of Artificial Sequence: Synthetic oligonucleotide
  X-linked inhibitor of apoptosis (XIAP) siRNA
attaggtattaaagtcatctgga

SEQ ID NO: 16978 - DNA, 23 bp, Artificial Sequence
  Description of Artificial Sequence: Synthetic oligonucleotide
  X-linked inhibitor of apoptosis (XIAP) siRNA
ttaggtattaaagtcatctggac

SEQ ID NO: 16979 - DNA, 23 bp, Artificial Sequence
  Description of Artificial Sequence: Synthetic oligonucleotide
  X-linked inhibitor of apoptosis (XIAP) siRNA
taggtattaaagtcatctggaca

SEQ ID NO: 16980 - DNA, 23 bp, Artificial Sequence
  Description of Artificial Sequence: Synthetic oligonucleotide
  X-linked inhibitor of apoptosis (XIAP) siRNA
aggtattaaagtcatctggacat

SEQ ID NO: 16981 - DNA, 23 bp, Artificial Sequence
  Description of Artificial Sequence: Synthetic oligonucleotide
  X-linked inhibitor of apoptosis (XIAP) siRNA
ggtattaaagtcatctggacatg

SEQ ID NO: 16982 - DNA, 23 bp, Artificial Sequence
  Description of Artificial Sequence: Synthetic oligonucleotide
  X-linked inhibitor of apoptosis (XIAP) siRNA
gtattaaagtcatctggacatga

SEQ ID NO: 16983 - DNA, 23 bp, Artificial Sequence
  Description of Artificial Sequence: Synthetic oligonucleotide
  X-linked inhibitor of apoptosis (XIAP) siRNA
tattaaagtcatctggacatgaa

SEQ ID NO: 16984 - DNA, 23 bp, Artificial Sequence
  Description of Artificial Sequence: Synthetic oligonucleotide
  X-linked inhibitor of apoptosis (XIAP) siRNA
attaaagtcatctggacatgaat

SEQ ID NO: 16985 - DNA, 23 bp, Artificial Sequence
  Description of Artificial Sequence: Synthetic oligonucleotide
  X-linked inhibitor of apoptosis (XIAP) siRNA
ttaaagtcatctggacatgaatt

SEQ ID NO: 16986 - DNA, 23 bp, Artificial Sequence
  Description of Artificial Sequence: Synthetic oligonucleotide
  X-linked inhibitor of apoptosis (XIAP) siRNA
taaagtcatctggacatgaatta

SEQ ID NO: 16987 - DNA, 23 bp, Artificial Sequence
  Description of Artificial Sequence: Synthetic oligonucleotide
  X-linked inhibitor of apoptosis (XIAP) siRNA
aaagtcatctggacatgaattaa

SEQ ID NO: 16988 - DNA, 23 bp, Artificial Sequence
  Description of Artificial Sequence: Synthetic oligonucleotide
  X-linked inhibitor of apoptosis (XIAP) siRNA
aagtcatctggacatgaattaaa

SEQ ID NO: 16989 - DNA, 23 bp, Artificial Sequence
  Description of Artificial Sequence: Synthetic oligonucleotide
  X-linked inhibitor of apoptosis (XIAP) siRNA
agtcatctggacatgaattaaag

SEQ ID NO: 16990 - DNA, 23 bp, Artificial Sequence
  Description of Artificial Sequence: Synthetic oligonucleotide
  X-linked inhibitor of apoptosis (XIAP) siRNA
gtcatctggacatgaattaaagt

SEQ ID NO: 16991 - DNA, 23 bp, Artificial Sequence
  Description of Artificial Sequence: Synthetic oligonucleotide
  X-linked inhibitor of apoptosis (XIAP) siRNA
tcatctggacatgaattaaagta

SEQ ID NO: 16992 - DNA, 23 bp, Artificial Sequence
  Description of Artificial Sequence: Synthetic oligonucleotide
  X-linked inhibitor of apoptosis (XIAP) siRNA
catctggacatgaattaaagtat

SEQ ID NO: 16993 - DNA, 23 bp, Artificial Sequence
  Description of Artificial Sequence: Synthetic oligonucleotide
  X-linked inhibitor of apoptosis (XIAP) siRNA
atctggacatgaattaaagtata

SEQ ID NO: 16994 - DNA, 23 bp, Artificial Sequence
  Description of Artificial Sequence: Synthetic oligonucleotide
  X-linked inhibitor of apoptosis (XIAP) siRNA
tctggacatgaattaaagtatat

SEQ ID NO: 16995 - DNA, 23 bp, Artificial Sequence
  Description of Artificial Sequence: Synthetic oligonucleotide
  X-linked inhibitor of apoptosis (XIAP) siRNA
ctggacatgaattaaagtatatg

(The sequence listing continues in the following parts.)

1. A nucleic acid-lipid particle comprising:
an siRNA molecule that silences expression a gene expressed in cancer, said gene selected from the group consisting of Eg5, EGFR, XIAP, and combinations thereof;
a cationic lipid;
a non-cationic lipid; and
a conjugated lipid that inhibits aggregation of said particle.

2. The nucleic acid-lipid particle of claim 1, wherein said nucleic acid-lipid particle comprises an siRNA molecule comprising at least one sequence set forth in any one of Tables 1-9.

3. (canceled)

4. (canceled)

5. (canceled)

6. The nucleic acid-lipid particle of claim 1, wherein said cationic lipid is a member selected from the group consisting of N,N-dioleyl-N,N-dimethylammonium chloride (DODAC), N,N-distearyl-N,N-dimethylammonium bromide (DDAB), N-(1-(2,3-dioleoyloxy)propyl)-N,N,N-trimethylammonium chloride (DOTAP), N-(1-(2,3-dioleyloxy)propyl)-N,N,N-trimethylammonium chloride (DOTMA), and N,N-dimethyl-2,3-dioleyloxy)propylamine (DODMA), 1,2-DiLinoleyloxy-N,N-dimethylaminopropane (DLinDMA), 1,2-Dilinolenyloxy-N,N-dimethylaminopropane (DLendMA), and a mixture thereof.

7. The nucleic acid-lipid particle of claim 1, wherein said cationic lipid is DLinDMA.

8. The nucleic acid-lipid particle of claim 1, wherein said non-cationic lipid is a member selected from the group consisting of dioleoylphosphatidylethanolamine (DOPE), palmitoyloleoylphosphatidylcholine (POPC), egg phosphatidylcholine (EPC), distearoylphosphatidylcholine (DSPC), palmitoyloleyolphosphatidylglycerol (POPG), dipalmitoyl phosphatidyl ethanolamine (DPPE), dimyristoylphosphoethanolamine (DMPE), distearoyl-phosphatidyl-ethanolamine (DSPE), 16-O-monomethyl PE, 16-O-dimethyl PE, 18-1-trans PE, palmitoyloleoyl-phosphatidylethanolamine (POPE), 1-stearoyl-2-oleoyl-phosphatidyethanolamine (SOPE), cholesterol, and a mixture thereof.

9. The nucleic acid-lipid particle of claim 1, wherein said non-cationic lipid is DSPC.

10. The nucleic acid-lipid particle of claim 1, wherein the conjugated lipid that inhibits aggregation of particles is a polyethyleneglycol (PEG)-dialkyloxypropyl (PEG-DAA) conjugate selected from the group consisting of a PEG-dilauryloxypropyl (C₁₂), a PEG-dimyristyloxypropyl (C₁₄), a PEG-dipalmityloxypropyl (C₁₆), and a PEG-distearyloxypropyl (C₁₈).

11. The nucleic acid-lipid particle of claim 10, wherein the PEG-DAA conjugate is a PEG-dimyristyloxypropyl (C₁₄).

12. The nucleic acid-lipid particle of claim 1, wherein said cationic lipid comprises from about 30 mol % to about 50 mol % of the total lipid present in said particle.

13. The nucleic acid-lipid particle of claim 1, wherein said non-cationic lipid comprises from about 5 mol % to about 90 mol % of the total lipid present in said particle.

14. The nucleic acid-lipid particle of claim 10, wherein said PEG-DAA conjugate comprises from 1 mol % to about 20 mol % of the total lipid present in said particle.

15. The nucleic acid-lipid particle of claim 1, further comprising cholesterol.

16. The nucleic acid-lipid particle of claim 15, wherein the cholesterol comprises from about 10 mol % to about 60 mol % of the total lipid present in said particle.

17. (canceled)

18. (canceled)

19. (canceled)

20. The nucleic acid-lipid particle of claim 1, wherein the nucleic acid is fully encapsulated in said nucleic acid-lipid particle.

21. The nucleic acid-lipid particle of claim 1, wherein said particle has a nucleic acid:lipid ratio of from about 0.01 to about 0.2.

22. The nucleic acid-lipid particle of claim 1, wherein said particle has a median diameter of less than about 150 nm.

23. A composition comprising the nucleic acid-lipid particle of claim 2 and a pharmaceutically acceptable carrier.

24. A method of introducing an siRNA that silences expression of a Eg5, EGFR or XIAP gene into a cell, said method comprising:
contacting said cell with a nucleic acid-lipid particle comprising
a cationic lipid;
a non-cationic lipid;
a conjugated lipid that inhibits aggregation of particles; and
said siRNA.

25.-33. (canceled)
